(19) United States
(12) Patent Application Publication
(10) Pub. No.: US 2025/0327063 A1
(43) Pub. Date: Oct. 23, 2025

(54) PREPARATION OF LONG READ NUCLEIC ACID LIBRARIES

(71) Applicant: Illumina, Inc., San Diego, CA (US)

(72) Inventors: Heather Meinholz, Cottage Grove, WI (US); Daniel Gerhardt, Madison, WI (US); Joshua Burgess, Sun Prairie, WI (US); Leigh Graham Monahan, Stanmore (AU); Jennifer Dennin, Mt. Horeb, WI (US); Stephen Paul Bruinsma, Madison, WI (US); M. Maggie O'Meara, Madison, WI (US); Aaron Earl Darling, Hornsby (AU); Johnathan Parker, Dane, WI (US); Stewart MacArthur, Cambridge (GB); Denise Raterman, Madison, WI (US); Feng Chen, Castro Valley, CA (US); Susan C. Verity, Cambridge (GB); Esther Musgrave-Brown, Cambridge (GB); Andrew Slatter, Cambridge (GB); Tina Huang, Los Altos, CA (US); Tiffany Truong, San Francisco, CA (US); Yoon Hye Shin, Chula Vista, CA (US); David Tse, San Diego, CA (US)

(21) Appl. No.: 18/867,223

(22) PCT Filed: May 25, 2023
(86) PCT No.: PCT/US2023/067466

§ 371 Date: Nov. 19, 2024

Related U.S. Application Data
(60) Provisional application No. 63/365,361, filed on May 26, 2022.
(60) Provisional application No. 63/366,222, filed on Jun. 10, 2022.
(60) Provisional application No. 63/366,516, filed on Jun. 16, 2022.
(60) Provisional application No. 63/366,896, filed on Jun. 23, 2022.
(60) Provisional application No. 63/373,685, filed on Aug. 26, 2022.
(60) Provisional application No. 63/483,213, filed on Feb. 3, 2023.

(51) Int. Cl. C12N 15/10; C12Q 1/6806; C12Q 1/6853; C12Q 1/686; C12Q 1/6874

(52) U.S. Cl. CPC C12N 15/1031; C12N 15/1093; C12Q 1/6806; C12Q 1/6853; C12Q 1/686; C12Q 1/6874

(57) ABSTRACT

Some embodiments of the methods and compositions provided herein relate to obtaining long read information from short reads of a target nucleic acid. Some embodiments include steps to selectively generate, mark, and amplify long nucleic acid fragments. Some embodiments include enriching for certain sequences in the long fragments with selection probes directed to certain challenging medically relevant genes (CMRG). Some embodiments also include fragmenting the long nucleic acid fragments into shorter fragments for sequencing, and informatically reconstructing a sequence of the target nucleic acid.

### RELATED APPLICATIONS

[0001] This application claims priority to U.S. Prov. App. No. 63/483,213 filed Feb. 3, 2023; U.S. Prov. App. No. 63/373,685 filed Aug. 26, 2022; U.S. Prov. App. No. 63/366,896 filed Jun. 23, 2022; U.S. Prov. App. No. 63/366,516 filed Jun. 16, 2022; U.S. Prov. App. No. 63/366,222 filed Jun. 10, 2022; and U.S. Prov. App. No. 63/365,361 filed May 26, 2022, which are each entitled “PREPARATION OF LONG READ NUCLEIC ACID LIBRARIES” and which are each incorporated by reference herein in its entirety.

### REFERENCE TO SEQUENCE LISTING

[0002] The present application is being filed along with a Sequence Listing in electronic format. The Sequence Listing is provided as a file entitled ILLINC736WO3, created May 20, 2023, which is approximately 189,995,442 bytes in size. The information in the electronic format of the Sequence Listing is incorporated herein by reference in its entirety.

### FIELD OF THE INVENTION

[0003] Some embodiments of the methods and compositions provided herein relate to obtaining long read information from short reads of a target nucleic acid. Some embodiments include steps to selectively generate, mark, and amplify long nucleic acid fragments. Some embodiments include enriching for certain sequences in the long fragments with selection probes directed to certain challenging medically relevant genes (CMRG). Some embodiments also include fragmenting the long nucleic acid fragments into shorter fragments for sequencing, and informatically reconstructing a sequence of the target nucleic acid.

### BACKGROUND OF THE INVENTION

[0004] Current protocols for next-generation sequencing (NGS) of nucleic acid samples routinely employ a sample preparation process that converts DNA or RNA into a library of fragmented, sequenceable templates. Sample preparation methods often require multiple steps, material transfers, and expensive instruments to effect fragmentation, and therefore are often difficult, tedious, expensive, and inefficient.

[0005] In one approach, nucleic acid fragment libraries may be prepared using a transposome-based method where two transposon end sequences, one linked to a tag sequence, and a transposase form a transposome complex. The transposome complexes are used to fragment and tag target nucleic acids in solution to generate a sequencer-ready tagmented library. The transposome complexes may be immobilized on a solid surface, such as through a biotin molecule appended at the 5′ end of one of the two end sequences. Use of immobilized transposomes can provide advantages over solution-phase approaches by reducing hands-on and overall library preparation time, cost, and reagent requirements, lowering sample input requirements, and enabling the use of unpurified or degraded samples as a starting point for library preparation. However, certain portions of a genome may be underrepresented in libraries prepared using such transposomes.

### SUMMARY OF THE INVENTION

[0006] Some embodiments of the methods and compositions provided herein a method for preparing a nucleic acid library, comprising: (a) obtaining a plurality of transposomes comprising transposon adaptors, wherein the plurality of transposomes is immobilized on a solid support; (b) contacting a plurality of nucleic acid fragments with the plurality of transposomes to obtain a plurality of polynucleotides; (c) amplifying the plurality of polynucleotides to obtain amplified polynucleotides; and (d) adding library adapters to each end of the amplified polynucleotides, thereby obtaining the nucleic acid library.

[0007] In some embodiments, the solid support comprises a bead. In some embodiments, the plurality of the transposomes is immobilized on the bead at a density such that an average length of the plurality of polynucleotides is greater than about 1 kbp, 2 kbp, 5 kbp, 10 kbp, 15 kbp, 20 kbp, or 40 kbp; and/or wherein the average length of the plurality of polynucleotides is in a range from about 1 kbp to about 40 kbp, 1 kbp to about 30 kbp, 1 kbp to about 20 kbp, 5 kbp to about 20 kbp, 5 kbp to about 15 kbp, or 7 kbp to about 12 kbp. In some embodiments, the number of transposomes immobilized on the bead is no more than about 100 transposomes, 50 transposomes, 40 transposomes, 30 transposomes, 20 transposomes, or 10 transposomes. In some embodiments, the number of transposomes immobilized on the bead is no more than about 30 transposomes. In some embodiments, the plurality of the transposomes immobilized on the bead comprise a total activity such that an average length of the plurality of polynucleotides greater than about 1 kbp, 2 kbp, 5 kbp, 10 kbp, 15 kbp, 20 kbp, or 40 kbp; and/or wherein the average length of the plurality of polynucleotides is in a range from about 1 kbp to about 40 kbp, 1 kbp to about 30 kbp, 1 kbp to about 20 kbp, 5 kbp to about 20 kbp, 5 kbp to about 15 kbp, or 7 kbp to about 12 kbp. In some embodiments, the plurality of the transposomes immobilized on the bead comprise an activity in a range from about 0.05 AU/μl to about 0.25 0.05 AU/μl. In some embodiments, the plurality of the transposomes immobilized on the bead comprise an activity of about 0.075 AU/μl. In some embodiments, the transposon adapters comprise the same sequence. In some embodiments, the transposomes of the plurality of transposomes are the same. In some embodiments, the transposomes of the plurality of transposomes are B15 transposomes. In some embodiments, the transposon adapters comprise the nucleotide sequence: SEQ ID NO:01 (GTCTCGTGGGCTCGG).

[0008] In some embodiments, the step (c) comprises a mutagenesis PCR, such that mutations are introduced into amplified polynucleotides. In some embodiments, the mutagenesis PCR comprises amplifying the plurality of polynucleotides with a low bias DNA polymerase, and/or with a nucleotide analogue. In some embodiments, the nucleotide analogue comprises dPTP, and/or S-oxo-dGTP. In some embodiments, the low bias DNA polymerase is a Thermococcal polymerase, or a functional derivative thereof. In some embodiments, the Thermococcal polymerase is derived from a Thermococcal strain selected from the group consisting of T. kodakarensis, T. siculi, T. celer and T. sp KS-1. In some embodiments, the mutagenesis PCR comprises no more than 12 cycles, 10 cycles, 9 cycles, S cycles, 7 cycles, 6 cycles, 5 cycles, 4 cycles, 3 cycles, or 2 cycles. In some embodiments, the mutagenesis PCR comprises no more than 6 cycles.

[0009] In some embodiments, a first end of a polynucleotide of the plurality of polynucleotides is capable of annealing to a second end of the polynucleotide of the plurality of polynucleotides; and/or, wherein a first end of an amplified polynucleotide is capable of annealing to a second end of the amplified polynucleotide. In some embodiments, step (c) further comprises a suppression PCR in some embodiments, the suppression PCR comprises use of a single amplification primer. In some embodiments, the amplified polynucleotides have an average length greater than about 1 kbp, 2 kbp, 3 kbp, 4 kbp, 5 kbp, 10 kbp, 15 kbp, or 20 kbp. In some embodiments, the suppression PCR comprises no more than 16 cycles, 14 cycles, 10 cycles, 9 cycles, S cycles, 7 cycles, 6 cycles, 5 cycles, 4 cycles, 3 cycles, or 2 cycles. In some embodiments, the suppression PCR comprises no more than 6 cycles.

[0010] Some embodiments also include enriching for target nucleic acids in the amplified polynucleotides. Some embodiments also include enriching for target nucleic acids in the plurality of polynucleotides. In some embodiments, the enriching for target nucleic acids in the amplified polynucleotides is performed after performing the mutagenesis PCR, and before performing the suppression PCR. In some embodiments, the enriching for target nucleic acids in the amplified polynucleotides is performed after performing the suppression PCR. Some embodiments also include amplifying the target nucleic acids.

[0011] In some embodiments, step (d) comprises contacting the amplified polynucleotides with an additional plurality of transposomes comprising the library adapters. In some embodiments, the library adapters comprise (i) indexes, (ii) bridge amplification primer binding sites, and/or (iii) sequencing primer binding sites. Some embodiments also include enriching for target polynucleotides in the nucleic acid library.

[0012] In some embodiments, the enriching comprises hybridizing a plurality of selection probes with the amplified polynucleotides, the plurality of polynucleotides, and/or the nucleic acid library, wherein the selection probes of the plurality of selection probes comprise different nucleotide sequences from one another. In some embodiments, an average distance between two adjacent nucleotide sequences of the selection probes on a reference sequence of a genome is in a range from about 300 consecutive nucleotides to about 7,000 consecutive nucleotides; optionally, wherein the range is from about 500 consecutive nucleotides to about 5,000 consecutive nucleotides; optionally, wherein the range is from about 750 consecutive nucleotides to about 2,500 consecutive nucleotides; optionally, wherein the range is from about 750 consecutive nucleotides to about 1,500 consecutive nucleotides; and optionally, wherein the range is from about 900 consecutive nucleotides to about 1,200 consecutive nucleotides. In some embodiments, an average distance between two adjacent nucleotide sequences of the selection probes on a reference sequence of a genome is about 750, 1000, 1500, or 2000 consecutive nucleotides. In some embodiments, an average number of sites in a genome that each selection probe of the plurality of selection probes is capable of hybridizing to is no more than 50 different sites in the genome, to no more than 40 different sites in the genome, to no more than 30 different sites in the genome, to no more than 20 different sites in the genome. In some embodiments, each selection probe of the plurality of selection probes is capable of hybridizing to no more than 50 different sites in a genome, to no more than 40 different sites in a genome, to no more than 30 different sites in a genome, to no more than 20 different sites in a genome. In some embodiments, a selection probe capable of hybridizing to a site in the genome comprises at least 50, 60, 70, or 80 consecutive nucleotides complementary to at least 90% of a nucleotide sequence at the site in the genome.

[0013] In some embodiments, the plurality of selection probes comprise at least 50, 100, 200, 500, 1000, 5000 different selection probes. In some embodiments, each selection probe of the plurality of selection probes comprises a nucleotide sequence capable of hybridizing to a gene selected from TABLE 1C; and/or a nucleotide sequence within, no more than 10 kbp 5′ or no more than 10 kbp 3′ of a gene selected from TABLE 1C. In some embodiments, each selection probe of the plurality of selection probes comprises a nucleotide sequence having at least 90%, 95%, or 100% sequence identity to any one of SEQ ID NOs:02-140600. In some embodiments, each selection probe of the plurality of selection probes comprises a nucleotide sequence having at least 90%, 95%, or 100% sequence identity to any one of SEQ ID NOs:02-43879. In some embodiments, each selection probe of the plurality of selection probes comprises a nucleotide sequence having at least 90%, 95%, or 100% sequence identity to any one of SEQ ID NOs:02-22546. In some embodiments, the plurality of selection probes is attached to a substrate. In some embodiments, the substrate comprises a plurality of beads; optionally wherein the beads are magnetic.

[0014] Some embodiments also include amplifying the target polynucleotides. In some embodiments, an amount of the plurality of nucleic acid fragments is less than about 100 ng, 50 ng, 30 ng, 20 ng, 10 ng, 5 ng, or 1 ng. In some embodiments, the plurality of nucleic acid fragments is mammalian. In some embodiments, the plurality of nucleic acid fragments is human. In some embodiments, a plurality of nucleic acid fragments comprises genomic DNA.

[0015] Some embodiments of the methods and compositions provided herein a method for preparing a nucleic acid library, comprising: (a) obtaining a plurality of transposomes comprising transposon adaptors, wherein the plurality of transposomes is immobilized on a bead, wherein the transposomes of the plurality of transposomes are the same; (b) contacting a plurality of nucleic acid fragments with the plurality of transposomes to obtain a plurality of polynucleotides, wherein the plurality of the transposomes immobilized on the bead comprise a total activity such that an average length of the plurality of polynucleotides greater than about 1 kbp, 2 kbp, 5 kbp, 10 kbp, 15 kbp, 20 kbp, or 40 kbp; (c) amplifying the plurality of polynucleotides to obtain amplified polynucleotides by: (i) performing a mutagenesis PCR, such that mutations are introduced into amplified polynucleotides, and (ii) performing a suppression PCR; and (d) adding library adapters to each end of the amplified polynucleotides by contacting the amplified polynucleotides with an additional plurality of transposomes, thereby obtaining the nucleic acid library.

[0016] Some embodiments also include enriching for target nucleic acids in the amplified polynucleotides, and/or enriching for target nucleic acids in the nucleic acid library. In some embodiments, enriching for target nucleic acids in the amplified polynucleotides is performed prior to performing the suppression PCR. In some embodiments, enriching for target nucleic acids in the amplified polynucleotides is performed after performing the suppression PCR. In some embodiments, the enriching comprises hybridizing a plurality of selection probes with the amplified polynucleotides and/or the nucleic acid library.

[0017] In some embodiments, the enriching comprises hybridizing a plurality of selection probes with the amplified polynucleotides, the plurality of polynucleotides, and/or the nucleic acid library, wherein the selection probes of the plurality of selection probes comprise different nucleotide sequences from one another. In some embodiments, an average distance between two adjacent nucleotide sequences of the selection probes on a reference sequence of a genome is in a range from about 300 consecutive nucleotides to about 7,000 consecutive nucleotides; optionally, wherein the range is from about 500 consecutive nucleotides to about 5,000 consecutive nucleotides; optionally, wherein the range is from about 750 consecutive nucleotides to about 2,500 consecutive nucleotides; optionally, wherein the range is from about 750 consecutive nucleotides to about 1,500 consecutive nucleotides; and optionally, wherein the range is from about 900 consecutive nucleotides to about 1,200 consecutive nucleotides. In some embodiments, an average distance between two adjacent nucleotide sequences of the selection probes on a reference sequence of a genome is about 750, 1000, 1500, or 2000 consecutive nucleotides. In some embodiments, an average number of sites in a genome that each selection probe of the plurality of selection probes is capable of hybridizing to is no more than 50 different sites in the genome, to no more than 40 different sites in the genome, to no more than 30 different sites in the genome, to no more than 20 different sites in the genome. In some embodiments, each selection probe of the plurality of selection probes is capable of hybridizing to no more than 50 different sites in a genome, to no more than 40 different sites in a genome, to no more than 30 different sites in a genome, to no more than 20 different sites in a genome. In some embodiments, a selection probe capable of hybridizing to a site in the genome comprises at least 50, 60, 70, or 80 consecutive nucleotides complementary to at least 90% of a nucleotide sequence at the site in the genome.

[0018] In some embodiments, the plurality of selection probes comprise at least 50, 100, 200, 500, 1000, 5000 different selection probes. In some embodiments, each selection probe of the plurality of selection probes comprises a nucleotide sequence capable of hybridizing to a gene selected from TABLE 1C; and/or a nucleotide sequence within, no more than 10 kbp 5′ or no more than 10 kbp 3′ of a gene selected from TABLE 1C. In some embodiments, each selection probe of the plurality of selection probes comprises a nucleotide sequence having at least 90%, 95%, or 100% sequence identity to any one of SEQ ID NOs:02-140600. In some embodiments, each selection probe of the plurality of selection probes comprises a nucleotide sequence having at least 90%, 95%, or 100% sequence identity to any one of SEQ ID NOs:02-43879. In some embodiments, each selection probe of the plurality of selection probes comprises a nucleotide sequence having at least 90%, 95%, or 100% sequence identity to any one of SEQ ID NOs:02-22546. In some embodiments, the plurality of selection probes is attached to a substrate; optionally, wherein the substrate comprises a plurality of beads; optionally wherein the beads are magnetic.

[0019] Some embodiments of the methods and compositions provided herein a method for determining a sequence of a target nucleic acid, comprising: performing any one of the foregoing methods; sequencing the nucleic acid library to obtain sequence reads; and assembling sequence reads to obtain the sequence of a target nucleic acid. In some embodiments, the assembling comprises comparing the sequence reads to a reference sequence. In some embodiments, the comparing comprises determining mutations introduced into the amplified polynucleotides during the mutagenesis PCR. In some embodiments, the reference sequence is obtained from the same nucleic acid sample as the plurality of nucleic acid fragments.

[0020] Some embodiments of the methods and compositions provided herein a kit comprising: a first bead-linked transposomes (BIT-1) reagent, wherein the BLT-1 transposomes comprises a first adaptor sequence; a mutagenesis reagent comprising a first primer, dPTPs, dNTPs, and a polymerase; a second bead-linked transposomes (BLT-2) reagent, wherein the BLT-2 transposomes comprise the first adaptor and a second adaptor; an amplification reagent comprising a first primer, a second primer, dNTPs, and a polymerase; wherein BLT-1 has a lower transposome density as compared to BLT-2; and wherein the first primer hybridizes to the first adaptor sequence and the second primer hybridizes to the second adaptor sequence. In some embodiments, BLT-2 has more than 10, 20, 50, 100, or 1000 times the transposome density as compared to BLT-1. In some embodiments, the first adaptor is B15 and the second adaptor is A14.

[0021] Some embodiments of the methods and compositions provided herein a system for preparing a nucleic acid library, comprising: (a) a first plurality of transposomes comprising transposon adaptors for tagmenting a plurality of nucleic acid fragments, wherein the first plurality of transposomes is immobilized on a first plurality of beads at a first density; (b) reagents for amplifying the plurality of polynucleotides to obtain amplified polynucleotides, wherein the amplifying comprising a mutagenesis PCR and/or a suppression PCR, wherein: (i) the first reagent for performing mutagenesis PCR comprise a low bias DNA polymerase and/or a nucleotide analogue; optionally, wherein the nucleotide analogue comprises dPTP, and/or 8-oxo-dGTP; and/or the low bias DNA polymerase is a Thermococcal polymerase, or a functional derivative thereof, optionally, wherein the Thermococcal polymerase is derived from a Thermococcal strain selected from the group consisting of T. kodakarensis, T. siculi, T. celer and T. sp. KS-1, and (ii) the first reagents for performing suppression PCR comprise amplification primers having the same nucleotide sequence capable of hybridizing to the transposon adaptors; (c) a plurality of selection probes for enriching for target polynucleotides in the amplified polynucleotides; and (d) a second plurality of transposomes comprising library adaptors for adding library adaptors to each end of the amplified polynucleotides, wherein the second plurality of transposomes is immobilized on a second plurality of beads at a second density, wherein the first density is less than the second density.

[0022] Some embodiments of the methods and compositions provided herein a system for preparing a nucleic acid library, comprising: (a) a first plurality of transposomes for tagmenting a plurality of nucleic acid fragments to obtain a plurality of polynucleotides, wherein the first plurality of transposomes comprises transposon adaptors, wherein the first plurality of transposomes is immobilized on a solid support, optionally, wherein the solid support comprises a first plurality of beads; wherein: the first plurality of the transposomes is immobilized on the first plurality of beads at a density such that on contacting the first plurality of transposomes with the plurality of nucleic acid fragments the plurality of polynucleotides has an average length of the plurality of polynucleotides is greater than about 1 kbp, 2 kbp, 5 kbp, 10 kbp, 15 kbp, 20 kbp, or 40 kbp; and/or wherein the average length of the plurality of polynucleotides is in a range from about 1 kbp to about 40 kbp, 1 kbp to about 30 kbp, 1 kbp to about 20 kbp, 5 kbp to about 20 kbp, 5 kbp to about 15 kbp, or 7 kbp to about 12 kbp; the number of transposomes immobilized on the bead is no more than about 100 transposomes, 50 transposomes, 40 transposomes, 30 transposomes, 20 transposomes, or 10 transposomes, optionally, wherein the number of transposomes immobilized on the bead is no more than about 30 transposomes; the plurality of the transposomes immobilized on the bead comprise a total activity such that on contacting the first plurality of transposomes with the plurality of nucleic acid fragments the plurality of polynucleotides has an average length greater than about 1 kbp, 2 kbp, 5 kbp, 10 kbp, 15 kbp, 20 kbp, or 40 kbp; and/or wherein the average length of the plurality of polynucleotides is in a range from about 1 kbp to about 40 kbp, 1 kbp to about 30 kbp, 1 kbp to about 20 kbp, 5 kbp to about 20 kbp, 5 kbp to about 15 kbp, or 7 kbp to about 12 kbp; and/or the plurality of the transposomes immobilized on the bead comprise an activity in a range from about 0.05 AU/μl to about 0.25 0.05 AU/μl, optionally, wherein the plurality of the transposomes immobilized on the bead comprise an activity of about 0.075 AU/μL; (b) first reagents for amplifying the plurality of polynucleotides to obtain amplified polynucleotides; and (c) second reagents for adding library adaptors to each end of the amplified polynucleotides. In some embodiments, the transposon adapters comprise the same sequence, optionally, wherein the transposon adapters comprise the nucleotide sequence: SEQ ID NO:01 (GTCTCGTGGGCTCGG); and/or wherein the transposomes of the plurality of transposomes are the same, optionally, wherein the transposomes of the plurality of transposomes are B15 transposomes.

[0023] In some embodiments, the first reagents comprise reagents for performing mutagenesis PCR comprising a low bias DNA polymerase and/or a nucleotide analogue; optionally, wherein: the nucleotide analogue comprises dPTP, and/or 8-oxo-dGTP; and/or the low bias DNA polymerase is a Thermococcal polymerase, or a functional derivative thereof, optionally, wherein the Thermococcal polymerase is derived from a Thermococcal strain selected from the group consisting of T. kodakarensis, T. siculi, T. celer and T. sp KS-1. In some embodiments, the first reagents comprise reagents for performing suppression PCR comprising amplification primers having the same nucleotide sequence; optionally, wherein the amplification primers are capable of hybridizing to the transposon adaptors.

[0024] In some embodiments, the second reagents comprise a second plurality of transposomes comprising the library adaptors; and optionally, wherein the second plurality of transposomes has an activity such that on contacting the second plurality of transposomes with the amplified polynucleotides a library of nucleic acids is obtained and comprises the library adaptors and having an average length less than about 1 kb, 900 bp, 800, bp, 700 bp, 600 bp, 500 bp, 400 bp, 300 bp, 200 bp, or 100 bp. In some embodiments, the first plurality of the transposomes is immobilized on the beads at a density less than a density at which the second plurality of transposomes are immobilized on the second plurality of beads.

[0025] Some embodiments also include third reagents for enriching for target polynucleotides in the amplified polynucleotides, comprising a plurality of selection probes; optionally, wherein the plurality of selection probes is attached to a third plurality of beads. In some embodiments, an average distance between two adjacent nucleotide sequences of the selection probes on a reference sequence of a genome is in a range from about 300 consecutive nucleotides to about 7,000 consecutive nucleotides; optionally, wherein the range is from about 500 consecutive nucleotides to about 5,000 consecutive nucleotides; optionally, wherein the range is from about 750 consecutive nucleotides to about 2,500 consecutive nucleotides; optionally, wherein the range is from about 750 consecutive nucleotides to about 1,500 consecutive nucleotides; and optionally, wherein the range is from about 900 consecutive nucleotides to about 1,200 consecutive nucleotides; and optionally, wherein an average distance between two adjacent nucleotide sequences of the selection probes on a reference sequence of a genome is about 750, 1000, 1500, or 2000 consecutive nucleotides. In some embodiments, an average number of sites in a genome that each selection probe of the plurality of selection probes is capable of hybridizing to is no more than 50 different sites in the genome, to no more than 40 different sites in the genome, to no more than 30 different sites in the genome, to no more than 20 different sites in the genome. In some embodiments, each selection probe of the plurality of selection probes is capable of hybridizing to no more than 50 different sites in a genome, to no more than 40 different sites in a genome, to no more than 30 different sites in a genome, to no more than 20 different sites in a genome; and optionally, wherein a selection probe capable of hybridizing to a site in the genome comprises at least 50, 60, 70, or 80 consecutive nucleotides complementary to at least 90% of a nucleotide sequence at the site in the genome. In some embodiments, the plurality of selection probes comprise at least 50, 100, 200, 500, 1000, 5000 different selection probes. In some embodiments, each selection probe of the plurality of selection probes comprises a nucleotide sequence capable of hybridizing to a gene selected from TABLE 1C; and/or a nucleotide sequence within, no more than 10 kbp 5′ or no more than 10 kbp 3′ of a gene selected from TABLE 1C. In some embodiments, each selection probe of the plurality of selection probes comprises a nucleotide sequence having at least 90%, 95%, or 100% sequence identity to any one of SEQ ID NOs:02-140600. In some embodiments, each selection probe of the plurality of selection probes comprises a nucleotide sequence having at least 90%, 95%, or 100% sequence identity to any one of SEQ ID NOs:02-43879. In some embodiments, each selection probe of the plurality of selection probes comprises a nucleotide sequence having at least 90%, 95%, or 100% sequence identity to any one of SEQ ID NOs:02-22546.

[0026] In some embodiments, the plurality of nucleic acid fragments is mammalian. In some embodiments, the plurality of nucleic acid fragments is human. In some embodiments, the plurality of nucleic acid fragments comprises genomic DNA.

[0027] Some embodiments of the methods and compositions provided herein a kit comprising: a plurality oat least 50, 100, 1000, 2000, 3000, 4000, 5000, 10000, 20000, 30000, or 40000 selection probes, wherein the selection probes are different from one another, and comprise a nucleotide sequence having at least 90%, 95%, or 100% sequence identity to any one of SEQ ID NOs:02-140600; and optionally: (i) a first plurality of transposomes comprising transposon adaptors for tagmenting a plurality of nucleic acid fragments, wherein the first plurality of transposomes is immobilized on a first plurality of beads at a first density; and (ii) a second plurality of transposomes comprising library adaptors for adding library adaptors to each end of the amplified polynucleotides, wherein the second plurality of transposomes is immobilized on a second plurality of beads at a second density, wherein the first density is less than the second density. In some embodiments, each selection probe of the plurality of selection probes comprises a nucleotide sequence having at least 90%, 95%, or 100% sequence identity to any one of SEQ ID NOs:02-43879, or to any one of SEQ ID NOs:02-22546.

### BRIEF DESCRIPTION OF THE DRAWINGS

[0028] FIG. 1 depicts an example embodiment of a workflow which includes: fragmenting long input DNA by high molecular weight (HMW) fragmentation and adding adapters, such as by tagmentation using low density bead linked transposomes (BLTs); long range PCR mutagenesis to introduce a signature into long fragments; further library preparation steps, such as additional tagmentation to obtain small fragments with adapters; sequencing and assembly of sequencing reads.

[0029] FIG. 2 depicts an example embodiment of a workflow which includes a long-read (iLR) pathway, and a reference pathway. The long-read pathway includes steps for: tagmentation; mutagenesis; bottlenecking (suppression) PCR. Both the long-read pathway and reference pathway share steps including: standard library preparation, such as tagmentation; sequencing; and assembly of sequencing reads,

[0030] FIG. 3A is a graph which relates to a purified bottlenecking PCR product run on an Agilent Bioanalyzer using a High Sensitivity DNA Kit.

[0031] FIG. 3B is a graph which relates to a purified final library prep product run on an Agilent Bioanalyzer using a High Sensitivity DNA Kit.

[0032] FIG. 4A depicts a graph of results using transposomes in solution at various concentration

[0033] FIG. 4B depicts a graph of results for size distribution using BLTs.

[0034] FIG. 4C depicts graphs for a Staphylococcus aureus 4 Mb genome view, with samples at 4 million reads, GC content: 32.9%, size: 0.8 Mb. A: Nextera XT (soluble transposomes); B: Flex (BLT): 1 ng; C: Flex (BLT): 100 ng, D: Flex (BLT): colony direct.

[0035] FIG. 5 depicts a schematic for workflow steps including HMW fragmentation; and mutagenesis and suppression PCR in which smaller products form hairpins.

[0036] FIGS. 6A-6C depict graphs related to activity and fragment length. FIG. 6A is a graph of actual activity units (AU)/μl and median AU/μl versus build AU/μl for soluble transposomes (TSM), and BLTs having various densities/activities of transposomes: BLT at low density (BLT-LR) at 0.075 AU/μl, and TDER-BLT comprising A14 and B15 TSMs at 0.1 AU/μl, 0.2 AU/μl, and 0.5 AU/μl. In FIG. 6A, “TDER-BLR” is “TDER-BLT”. FIG. 6B is a graph of fragment size. FIG. 6C is a graph for average size for soluble TSM, and BLTs containing A14 and B15 TSMs, or B15 TSM only.

[0037] FIGS. 7A-7C depict graphs related to mutagenesis PCR for soluble TSM, and BLTs containing A14 and B15 TSMs, or B15 TSM only. FIG. 7A is a graph of mean yield (ng/μl). FIG. 7B is a graph for average size. FIG. 7C is a graph for mean average size.

[0038] FIGS. 8A-8C depict graphs related to bottleneck (suppression) PCR for soluble TSM, and BLTs containing A14 and B15 TSMs, or B15 TSM only. FIG. 8A is a graph of mean yield (ng/μl). FIG. 8B is a graph for size distribution. FIG. 8C is a graph for mean average size.

[0039] FIG. 9 depicts a graph for a sequencing metric (GC coverage) for soluble TSM, and BLTs containing A14 and B15 TSMs, or B15 TSM only.

[0040] FIGS. 10A and 10B depict graphs for a N50 sequencing metric for soluble TSM, and BLTs containing A14 and B15 TSMs, or B15 TSM only. N50 is the length of the shortest contig for which longer and equal length contigs cover at least 50% of the assembly. FIG. 10A depicts a graph for N50. FIG. 10B depicts a graph for N50 by regions.

[0041] FIG. 11 depicts a graph for a sequencing metric (fraction of bases with no coverage, left panel; and fraction of bases with <10× coverage, right panel) for soluble TSM, and BLTs containing A14 and B15 TSMs, or B15 TSM only.

[0042] FIG. 12 depict graphs of various BLT activities (Build AU/μl), and product average size (lower panel), total yield (middle panel), or fluorescent resonance energy transfer (FRET) (upper panel).

[0043] FIG. 13 depicts graphs of various BLT activities (Build AU/μl), and sequencing metrics including SLR coverage depth (lower panels), total bases (middle panels), or N50 (upper panels).

[0044] FIG. 14 depicts graphs of various BLT activities (Build AU/μl), and sequencing metrics including percent duplicated reads (lower panels), fraction of bases with <10× coverage (middle panels), or fraction of bases with no coverage (upper panels).

[0045] FIG. 15 depicts graphs of various BLT activities (AU/μl), and sequencing metrics including SLR coverage depth (lower panel), total bases (lower middle panel), redundancy (upper middle panel), or N50 (upper panel) with three different operators.

[0046] FIG. 16 depicts graphs of tagmentation yield (left panel) or tagmentation fragment length (right panel) for various amounts of input DNA.

[0047] FIG. 17 depicts graphs for various amounts of input DNA and mutagenesis yield (upper left panel), bottleneck yield (middle left panel), library yield (lower left panel), mutagenesis fragment length (upper right panel), bottleneck fragment length (middle right panel), and library fragment length (lower right panel).

[0048] FIG. 18 depicts graphs for various amounts of input DNA and sequencing metrics including: total bases (upper left panel), insert size (middle left panel), percent duplicated reads (lower left panel), total bases (upper right panel), insert size (middle right panel), and library fragment length (lower right panel). The right panels show the same data as the left panels, but without the 1000 ng data point.

[0049] FIG. 19 depicts graphs for various amounts of input DNA and sequencing metrics including: number of MQ0 reads (upper left panel), error rate (upper middle left panel), redundancy (lower middle left panel), N50 (lower left panel), number of MQ0 reads (upper right panel), error rate (upper middle right panel), redundancy (lower middle right panel), N50 (lower right panel). The right panels show the same data as the left panels, but without the 1000 ng data point.

[0050] FIG. 20 depicts graphs for various amounts of input DNA and sequencing metrics including: mode coverage (tipper left panel), fraction of bases with no coverage (middle left panel), fraction of bases with <1 OX coverage (lower left panel), mode coverage (upper right panel), fraction of bases with no coverage (middle right panel), fraction of bases with <1 OX coverage (lower right panel). The right panels show the same data as the left panels, but without the 1000 ng data point.

[0051] FIG. 21 depicts a graph for various amounts of input DNA and sequencing metric (GC bias).

[0052] FIG. 22 depicts graphs for various input DNAs subjected to shearing for different periods of time, control input DNA, and HMW input DNA, and fragment size.

[0053] FIG. 23 depicts graphs for various input DNAs subjected to shearing for different periods of time, control input DNA, and HMW input DNA, and tagmentation yield (left panel) or tagmentation fragment length (right panel).

[0054] FIG. 24A depicts graphs for various input DNAs subjected to shearing for different periods of time, control input DNA, and HMW input DNA, and mutagenesis yield (left panel) or normalization yield (right panel).

[0055] FIG. 24B depicts graphs for various input DNAs subjected to shearing for different periods of time, control input DNA, and HMW input DNA, and bottleneck PCR yield (left panel) or post-bottleneck fragment length (right panel).

[0056] FIG. 25 depicts graphs for various input DNAs subjected to shearing for different periods of time, and HMW input DNA, and sequencing metrics: N50 (left panels) or redundancy (right panels).

[0057] FIG. 26 depicts graphs for various input DNAs subjected to shearing for different periods of time, and HMW input DNA, and sequencing metrics: SLR coverage (upper left panel), fraction with no coverage (middle left panel), fraction with <10× coverage (lower left panel), insert size (upper right panel), percent duplicated reads (upper middle right panel), insertion per 100 kb (lower middle right panel), or MQ0 (lower right panel).

[0058] FIG. 27 depicts graphs for various input DNAs subjected to shearing for different periods of time, and HMW input DNA, and a sequencing metric (GC bias).

[0059] FIG. 28 depicts an example overview for enrichment of ‘long fragments’ or ‘short fragments’ in a workflow.

[0060] FIG. 29 depicts an example timeline for enrichment of ‘long fragments’ or ‘short fragments’ in a workflow.

[0061] FIG. 30 depicts selection of probes with higher specificity in long fragments.

[0062] FIG. 31 depicts design of probes in regions adjacent to problematic regions of the genome.

[0063] FIG. 32 depicts embodiments including an example work flow for whole genome sequencing (WGS) with optional enrichment steps, and parallel standard short read (SR) library preparation.

[0064] FIG. 33 depicts use of 80mer probes with long fragments in problematic target regions, compared to use of probes with short fragments (upper panel); use of 80mer probes with flanked long difficult regions, compared to use of probes with short fragments (middle panel); and use of 80mer probes with long fragments in regions with infrequent probe coverage, compared to use of probes with short fragments (lower panel).

[0065] FIG. 34 depicts results of sequencing coverage for a targeted region using a method with long fragments and enrichment (ICLR with enrichment).

[0066] FIG. 35 depicts results of sequencing coverage for a targeted a 722 kb region in the MHC locus using a method with long fragments and enrichment.

[0067] FIG. 36 depicts results of sequencing coverage for a targeted a 426 kb region in the MHC locus that covered HLA-A, HLA-G, HLA-F using a method with long fragments and enrichment.

[0068] FIG. 37A depicts a graph for SNV precision and recall for methods which included (i) on market long reads; (ii) PCR free (tagmentation to provide short fragments); (iii) long fragments with enrichment using an MHC selection probe panel (ICLR-MHC enrichment); and (iv) long fragments without enrichment (ICLR-WGS).

[0069] FIG. 37B depicts a graph for Indel precision and recall for methods which included (i) on market long reads; (ii) PCR free (tagmentation to provide short fragments); (iii) long fragments with enrichment using an MHC selection probe panel (ICLR-MHC enrichment); and (iv) long fragments without enrichment (ICLR-WGS).

[0070] FIG. 38 depicts a graph for coverage in ACM genes using methods which included long fragments with enrichment using an ACMG selection probe panel (enrichment) or long fragments without enrichment (WGS).

[0071] FIG. 39 depicts results of sequencing coverage for a TNNT2, a 22 kb gene which was fully phased in one phase block, using a method with long fragments and enrichment with an ACMG panel of selection probes.

[0072] FIG. 40A depicts results of sequencing coverage for APOB which was fully phased in one phase block, using a method with long fragments and enrichment with an A CMG panel of selection probes.

[0073] FIG. 40B depicts results of sequencing coverage for TMEM127 which was fully phased in one phase block, using a method with long fragments and enrichment with an ACMG panel of selection probes.

[0074] FIG. 41 depicts results of sequencing coverage for MSH6 using a method with long fragments and enrichment with an ACMG panel of selection probes (ICLR with enrichment), and a method with long fragments without enrichment (ICLR WGS).

[0075] FIG. 42A depicts a graph for SNV precision and recall for methods which included (i) on market long reads; (ii) PCR free (tagmentation to provide short fragments); (iii) long fragments with enrichment using an ACMG selection probe panel (ICLR-ACMG enrichment); and (iv) long fragments without enrichment (ICLR-WGS).

[0076] FIG. 42B depicts a graph for Indel precision and recall for methods which included (i) on market long reads; (ii) PCR free (tagmentation to provide short fragments); (iii) long fragments with enrichment using an ACMG selection probe panel (ICLR-ACMG enrichment); and (iv) long fragments without enrichment (ICLR-WGS).

[0077] FIG. 43A depicts a graph for SNV precision and recall for methods which included (i) on market long reads; (ii) PCR free (tagmentation to provide short fragments); (iii) long fragments with enrichment using a PGX selection probe panel (ICLR-PGX enrichment); and (iv) long fragments without enrichment (ICLR-WGS).

[0078] FIG. 43B depicts a graph for Indel precision and recall for methods which included (i) on market long reads; (ii) PCR free (tagmentation to provide short fragments); (iii) long fragments with enrichment using a PGX selection probe panel (ICLR-PGX enrichment); and (iv) long fragments without enrichment (ICLR-WGS).

[0079] FIG. 44A depicts three graphs comparing use of a first selection probe panel (SYD-C2-CMRG-230 bp) and a second selection probe panel (SYD-C2-CMRG-1 kb) for (i) total mutations in bases in region (upper left panel); (ii) percentage DUP mutant reads (upper right panel); and (iii) percentage on target unique mapped reads (lower panel).

[0080] FIG. 44B depicts a graph of normalized coverage between use of a first selection probe panel (SYD-C2-CMRG-230 bp) and a second selection probe panel (SYD-C2-CMRG-1 kb).

[0081] FIG. 44C depicts a comparison between results of sequencing coverage for HBG1 using a method (i) with long fragments and enrichment with an CMRG panel of selection probes (ICLR with enrichment); (ii) with long fragments without enrichment (ICLR WGS); and (iii) tagmentation with short reads (PCR free short read).

[0082] FIG. 45A depicts a graph for SNV precision and recall for methods which included (i) on market long reads; (ii) PCR free (tagmentation to provide short fragments); (iii) long fragments with enrichment using a CMRG selection probe panel (ICLR-CMRG enrichment); and (iv) long fragments without enrichment (ICLR-WGS).

[0083] FIG. 45B depicts a graph for Indel precision and recall for methods which included (i) on market long reads; (ii) PCR free (tagmentation to provide short fragments); (iii) long fragments with enrichment using a CMRG selection probe panel (ICLR-CMRG enrichment); and (iv) long fragments without enrichment (ICLR-WGS).

### DETAILED DESCRIPTION

[0084] Some embodiments of the methods and compositions provided herein relate to obtaining long read information from short reads of a target nucleic acid. Some embodiments include steps to selectively generate, mark, and amplify long nucleic acid fragments. Some embodiments include enriching for certain sequences in the long fragments with selection probes directed to challenging medically relevant genes (CMRG). Some embodiments also include fragmenting the long nucleic acid fragments into shorter fragments for sequencing, and informatically reconstructing a sequence of the target nucleic acid.

[0085] Prior fragmentation methods typically generated a very wide distribution of fragment sizes such that even when aiming for large fragments, inevitably short fragments were included. Such short fragments are ‘wasted’ space, giving very little new information. Some embodiments provided herein preserve long (about 2,000-40,000 bp) fragments, mark them, and carry them through into a short-read portion of a workflow so they can then be reconstructed into their parent long fragments informatically. Shorter fragments are generally much less desirable, and may take up valuable sequencing space and informatics volume if they are included. Use of long fragments enables the use of a smaller number of selection probes to enrich for target sequences in the long fragments.

[0086] In prior short read library preps, most size selection was done by a combination of (1) initial fragmentation and (2) Solid-Phase Reversible Immobilization (SPRI)-based size selection. However, SPRI size selection primarily works on fragments smaller than about 60 Gbp in length. In contrast, suppression (“bottlenecking” or “bottleneck”) PCR acts on larger fragments. Suppression PCR entails appending complementary sequences on 5′ and 3′ ends of the same DNA molecule, such that during a PCR annealing step, there is a direct competition between annealing of a primer and annealing of opposite ends of the same DNA fragment. When the PCR primer anneals, extension proceeds as normal, and the fragment is amplified. When opposite ends anneal, for example by forming a hairpin, there is no templated 3′ hydroxyl to extend, and so amplification does not occur. A key to suppression PCR and size selection is that for shorter fragments, the opposite ends of the same fragment are closer together and therefore more likely to find each other and anneal. Under optimized conditions, this leads to preferential amplification of longer fragments. Aspects of suppression PCR useful with embodiments provided herein are described in Dai, Z-M, et al (2006) J. of Biotech 128:435-443; and Rand K. N. et al. (2005) N.A. Res. 33:e127 which are incorporated by reference in their entireties.

[0087] In some embodiments provided herein, complementary 5′ and 3′ ends are achieved by an initial tagmentation step with B15 transposomes only. Typically, tagmentation would be performed with a combination of A14 and B15 transposomes so that the different sequences can be used for read 1 and read 2 primers during subsequent sequencing. However, because the initial tagmentation in certain embodiments provided herein is used to provide a landing spot for PCR, different sequences for read 1 and read 2 primers do not need to be added at this stage. In contrast to SPRI size selection, it was observed that by adding cycles of suppression PCR, the number of smaller fragments tinder 2000 bp in length can be dramatically reduced.

[0088] In some embodiments provided herein a workflow includes: fragmenting long input DNA by high molecular weight (HMW) fragmentation and adding adapters, such as by tagmentation using low density bead linked transposomes (BLTs); long range PCR mutagenesis to introduce a signature into long fragments; further library preparation steps, such as additional tagmentation to obtain small fragments with adapters; sequencing and assembly of sequencing reads (FIG. 1). In some embodiments provided herein a workflow includes a long-read (“iLR” or “ILR”) pathway, and a reference pathway. The long-read pathway includes steps for: tagmentation; mutagenesis; bottlenecking (suppression) PCR. Both the long-read pathway and reference pathway share steps including: standard library preparation, such as tagmentation; sequencing; and assembly of sequencing reads (FIG. 2).

[0089] Certain aspects useful with embodiments of the methods and compositions provided herein are disclosed in U.S. Pat. Nos. 9,040,256; 9,683,230; and U.S. 2021/0010008 which are each incorporated by reference in its entirety.

### Definitions

[0090] As used herein, the term “nucleic acid” refers to a polynucleotide sequence, or fragment thereof. A nucleic acid can comprise nucleotides. A nucleic acid can be exogenous or endogenous to a cell. A nucleic acid can exist in a cell-free environment. A nucleic acid can be a gene or fragment thereof. A nucleic acid can be DNA. A nucleic acid can be RNA. A nucleic acid can comprise one or more analogs (e.g., altered backbone, sugar, or nucleobase). Some non-limiting examples of analogs include: 5-bromouracil, peptide nucleic acid, xeno nucleic acid, morpholinos, locked nucleic acids, glycol nucleic acids, threose nucleic acids, dideoxynucleotides, cordycepin, 7-deaza-GTP, fluorophores (e.g., rhodamine or fluorescein linked to the sugar), thiol containing nucleotides, biotin linked nucleotides, fluorescent base analogs, CpG islands, methyl-7-guanosine, methylated nucleotides, inosine, thiouridine, pseudouridine, dihydrouridine, queuosine, and wyosine. “Nucleic acid”, “polynucleotide, “target polynucleotide, and “target nucleic acid” can be used interchangeably. As used herein, “kbp” can refer to kilobase pairs and relates to a length of a double-stranded nucleic acid. The length of a nucleic acid may also be referred to in terms of a number of nucleotides, such as consecutive nucleotides.

[0091] As used herein “transposome” includes a complex comprising of at least one transposase enzyme and a transposon recognition sequence, such as a transposon adapter. In some such systems, the transposase binds to a transposon recognition sequence to form a functional complex that is capable of catalyzing a transposition reaction. In some aspects, the transposon recognition sequence is a double-stranded transposon end sequence. The transposase, or integrase, binds to a transposase recognition site in a target nucleic acid and inserts the transposon recognition sequence into a target nucleic acid. In some such insertion events, one strand of the transposon recognition sequence (or end sequence) is transferred into the target nucleic acid, resulting also in a cleavage event. Exemplary transposition procedures and systems that can be readily adapted for use with the transposases of the present disclosure are described, for example, in WO10/048605, U.S. 2012/0301925, U.S. 2012/13470087, or U.S. 2013/0143774, each of which is incorporated herein by reference in its entirety.

[0092] In some embodiments, the transposome complex is a dimer of two molecules of a transposase. In some embodiments, the transposome complex is a homodimer, wherein two molecules of a transposase are each bound to first and second transposons of the same type (e.g., the sequences of the two transposons bound to each monomer are the same, forming a “homodimer”). In some embodiments, the compositions and methods described herein employ two populations of transposome complexes. In some embodiments, the transposases in each population are the same. In some embodiments, the transposome complexes in each population are homodimers, wherein the first population has a first adaptor sequence in each monomer and the second population has a different adaptor sequence in each monomer.

[0093] As used herein “solid surface,” “solid support,” and other grammatical equivalents refer to any material that is appropriate for or can be modified to be appropriate for the attachment of the transposome complexes. As will be appreciated by those in the art, the number of possible substrates is multitude. Possible substrates include, but are not limited to, glass and modified or functionalized glass, plastics (including acrylics, polystyrene and copolymers of styrene and other materials, polypropylene, polyethylene, polybutylene, polyurethanes, TEFLON, etc.), polysaccharides, nylon or nitrocellulose, ceramics, resins, silica or silica-based materials including silicon and modified silicon, carbon, metals, inorganic glasses, plastics, optical fiber bundles, beads, paramagnetic beads, and a variety of other polymers. In some such embodiments, the transposome complex is immobilized on the solid support via the linker. In some further embodiments, the solid support comprises or is a tube, a well of a plate, a slide, a bead, or a flowcell, or a combination thereof. In some further embodiment, the solid support comprises or is a bead. In one embodiment, the bead is a paramagnetic bead. In some of the methods and compositions presented herein, transposome complexes are immobilized to a solid support. In one embodiment, the solid support is a bead. Suitable bead compositions include, but are not limited to, plastics, ceramics, glass, polystyrene, methylstyrene, acrylic polymers, paramagnetic materials, thoria sol, carbon graphite, titanium dioxide, latex or cross-linked dextrans such as Sepharose, cellulose, nylon, cross-linked micelles and TEFLON, as well as any other materials outlined herein for solid supports.

[0094] As used herein, “tagmentation: includes to the modification of DNA by a transposome complex comprising transposase enzyme complexed with adaptors comprising transposon end sequence. Tagmentation results in the simultaneous fragmentation of the DNA and ligation of the adaptors to the 5′ ends of both strands of duplex fragments. Following a purification step to remove the transposase enzyme, additional sequences can be added to the ends of the adapted fragments, for example by PCR, ligation, or any other suitable methodology known to those of skill in the art.

### Certain Methods for Preparing Nucleic Acid Libraries

[0095] Some embodiments of the methods and compositions providing herein include preparing a nucleic acid library. Some such embodiments include (a) obtaining a plurality of transposomes comprising transposon adaptors, wherein the plurality of transposomes is immobilized on a solid support; (b) contacting a plurality of nucleic acid fragments with the plurality of transposomes to obtain a plurality of polynucleotides; (c) amplifying the plurality of polynucleotides to obtain amplified polynucleotides; and (d) adding library adapters to each end of the amplified polynucleotides, thereby obtaining the nucleic acid library. In some embodiments, an amount of the plurality of nucleic acid fragments is less than about 100 ng, 50 ng, 30 ng, 20 ng, 10 ng, 5 ng, or 1 ng.

[0096] Some embodiments include an initial tagmentation step which fragments the plurality of nucleic acids fragments and adds an adaptor to each end of the products of the tagmentation. The initial tagmentation is limited such that the products of the tagmentation are longer than a tagmentation where the activity of transposomes is not limited.

[0097] Certain aspects useful with embodiments of the methods and compositions provided herein are disclosed in U.S. Pat. Nos. 9,115,396; 9,080,211; 9,040,256; U.S. patent application publication 2014/0194324, each of which is incorporated herein by reference in its entirety.

[0098] In some embodiments, the solid support comprises a bead. In some such embodiments, the transposomes are bead-linked transposomes (BLTs). In some embodiments, the activity of the transposomes on the beads is such that a tagmentation reaction with the BLTs and the plurality of nucleic acid fragments results in long polynucleotides, such as polynucleotides an having average length of the plurality of polynucleotides greater than about 1 kbp, 2 kbp, 5 kbp, 10 kbp, 15 kbp, 20 kbp, or 40 kbp; and/or wherein the average length of the plurality of polynucleotides is in a range from about 1 kbp to about 40 kbp, 1 kbp to about 30 kbp, 1 kbp to about 20 kbp, 5 kbp to about 20 kbp, 5 kbp to about 15 kbp, or 7 kbp to about 12 kbp. For example, the transposomes can be bound at a low density on the beads; and/or have a low tagmentation activity. In some embodiments, the number of transposomes immobilized on the bead is no more than about 100 transposomes, 50 transposomes, 40 transposomes, 30 transposomes, 20 transposomes, or 10 transposomes. In some embodiments, the number of transposomes immobilized on the bead is no more than about 30 transposomes. In some embodiments, the plurality of the transposomes immobilized on the bead comprise a total activity such that an average length of the plurality of polynucleotides greater than about 1 kbp, 2 kbp, 5 kbp, 10 kbp, 15 kbp, 20 kbp, or 40 kbp; and/or wherein the average length of the plurality of polynucleotides is in a range from about 1 kbp to about 40 kbp, 1 kbp to about 30 kbp, 1 kbp to about 20 kbp, 5 kbp to about 20 kbp, 5 kbp to about 15 kbp, or 7 kbp to about 12 kbp. In some embodiments, the plurality of the transposomes immobilized on the bead comprise a tagmentation activity in a range from about 0.05 AU/μl to about 0.25 AU/μl. In some embodiments, the plurality of the transposomes immobilized on the bead comprise a tagmentation activity of about 0.075 AU/μl.

[0099] In some embodiments, the transposomes on the beads are the same. For example, in some embodiments, the transposon adapters comprise the same sequence. In some embodiments, the transposomes of the plurality of transposomes are B15 transposomes. In some embodiments, the transposon adapters comprise the nucleotide sequence: SEQ ID NO:01 (GTCTCGTGGGCTCGG).

[0100] Some embodiments also include steps to add a signature to the products of the initial tagmentation. For example, a signature can be added into the sequence of the library products by steps that include limited mutagenesis. In some embodiments, step (c) comprises a mutagenesis PCR, such that mutations are introduced into amplified polynucleotides. In some embodiments, the mutagenesis PCR comprises amplifying the plurality of polynucleotides with a low bias DNA polymerase, and/or with a nucleotide analogue. In some embodiments, the nucleotide analogue comprises dPTP (such as, 6H,8H=3,4-Dihydro-pyrimido(4,5-c)(1,2)oxazin-7-one-8-β-D-2-deoxy-ribofuranoside-5′-triphosphate), and/or 8-oxo-dG-TP. dP contains the bicyclic pyrimidine analog 3,4-dihydro-8H-pyrimido-[4,5-C][1,2]oxazin-7-one. In some embodiments, the low bias DNA polymerase is a Thermococcal polymerase, or a functional derivative thereof. In some embodiments, the Thermococcal polymerase is derived from a Thermococcal strain selected from the group consisting of T. kodakarensis, T. siculi, celer and T. sp KS-1. In some embodiments, the mutagenesis PCR comprises no more than 12 cycles, 10 cycles, 9 cycles, 8 cycles, 7 cycles, 6 cycles, 5 cycles, 4 cycles, 3 cycles, or 2 cycles. In some embodiments, the mutagenesis PCR comprises no more than 6 cycles.

[0101] Some embodiments also include a bottlenecking or suppression PCR step to enrich for longer polynucleotides. For example, shorter amplified polynucleotides form hairpins, while longer amplified polynucleotides may be further amplified. In other words, the bottlenecking or suppression PCR can be biased against the amplification of shorter nucleic acids in a mixture of nucleic acids of different lengths. Some such embodiments can enrich for longer fragments. In some such embodiments, a first end of a polynucleotide of the plurality of polynucleotides is capable of annealing to a second end of the polynucleotide of the plurality of polynucleotides; and/or, wherein a first end of an amplified polynucleotide is capable of annealing to a second end of the amplified polynucleotide. In some embodiments, the suppression PCR comprises use of a single amplification primer. In some embodiments, the amplified polynucleotides have an average length greater than about 1 kbp, 2 kbp, 3 kbp, 4 kbp, 5 kbp, 10 kbp, 15 kbp, or 20 kbp. In some embodiments, the suppression PCR comprises no more than 16 cycles, 14 cycles, 10 cycles, 9 cycles, 8 cycles, 7 cycles, 6 cycles, 5 cycles, 4 cycles, 3 cycles, or 2 cycles. In some embodiments, the suppression PCR comprises no more than 6 cycles.

[0102] Detailed descriptions of certain embodiments of suppression PCR are found in, e.g., U.S. Pat. No. 5,565,340 and Siebert et al., Nucleic Acids Res., 23(6):1087-1088 (1995). Briefly, the inverted repeat sequences function as suppression tails by competing with the suppression PCR primer for complementary binding. The inverted repeats tend to anneal each other, thereby preventing PCR primer binding. Since shorter amplicons undergo inverted repeat annealing more often than longer amplicons, the suppression PCR favors generating long amplicons.

[0103] Some embodiments also include enriching for target nucleic acids in the amplified polynucleotides, such as products of the suppression PCR. In some embodiments, the enriching comprises hybridizing a plurality of selection probes with the amplified polynucleotides. In some embodiments, the plurality of selection probes lack sequences capable of hybridizing to a repetitive genomic DNA element. In some embodiments, the repetitive genomic DNA element is selected from a tandem repeat, an Alu repeat, a short interspersed nuclear element (SINE), a long interspersed nuclear element (LINE), an integrated viral sequence, a viral long terminal repeat (LTR), and a transposon. Some embodiments also include amplifying the target nucleic acids.

[0104] Some embodiments also include preparing a library of shorter fragments from the products of the suppression PCR, and/or the enrichment. For example, the products of the suppression PCR, and/or the enrichment can undergo an additional tagmentation. In some embodiments, step (d) comprises contacting the amplified polynucleotides with an additional plurality of transposomes. In some embodiments, the additional plurality of transposomes comprise transposon adapters comprising (i) indexes, (ii) bridge amplification primer binding sites, and/or (iii) sequencing primer binding sites. An example of a bridge amplification primer binding site includes a sequence capable of binding a capture probe on a surface, wherein the capture probe comprises a primer extended during bridge amplification on the surface.

[0105] Some embodiments also include enriching for target polynucleotides in the library of nucleic acids. In some embodiments, the enriching comprises hybridizing a plurality of selection probes with the library of nucleic acids, wherein the plurality of selection probes is capable of specifically hybridizing with the target polynucleotides. Some embodiments also include amplifying the target polynucleotides.

[0106] Some embodiments include methods for preparing a nucleic acid library, comprising: (a) obtaining a plurality of transposomes comprising transposon adaptors, wherein the plurality of transposomes is immobilized on a bead, and wherein the transposomes of the plurality of transposomes are the same; (b) contacting a plurality of nucleic acid fragments with the plurality of transposomes to obtain a plurality of polynucleotides, wherein the plurality of the transposomes immobilized on the bead comprise a total activity such that an average length of the plurality of polynucleotides greater than about 1 kbp, 2 kbp, 5 kbp, 10 kbp, 15 kbp, 20 kbp, or 40 kbp; and/or wherein the average length of the plurality of polynucleotides is in a range from about 1 kbp to about 40 kbp, 1 kbp to about 30 kbp, 1 kbp to about 20 kbp, 5 kbp to about 20 kbp, 5 kbp to about 15 kbp, or 7 kbp to about 12 kbp; (c) amplifying the plurality of polynucleotides to obtain amplified polynucleotides by: (i) performing a mutagenesis PCR, such that mutations are introduced into amplified polynucleotides, and (ii) performing a suppression PCR; and (d) adding library adapters to each end of the amplified polynucleotides by contacting the amplified polynucleotides with an additional plurality of transposomes, thereby obtaining the nucleic acid library. An example embodiment of a workflow is depicted in FIG. 32 which includes whole genome sequencing (WGS) which includes: fragmenting genomic DNA into long fragments by limited tagmentation; land-marking or adding a signature to the long fragments; amplifying the long fragments with a bias against shorter fragments; tagmenting products prior to sequencing. Optional steps include enrichment of the amplified long fragments with a panel of selection probes, such as capture probes with certain sequences. A parallel workflow includes tagmenting the genomic DNA to form a library of short fragments, such as a standard short read (SR) library, and sequencing the library of short fragments.

[0107] Some embodiments also include enriching for target nucleic acids in the amplified polynucleotides. In some embodiments, the enriching comprises hybridizing a plurality of selection probes with the amplified polynucleotides, wherein the plurality of selection probes is capable of specifically hybridizing with the target nucleic acids. In some embodiments, the plurality of selection probes lack sequences capable of hybridizing to a repetitive genomic DNA element. In some embodiments, the repetitive genomic DNA element is selected from a tandem repeat, an Alu repeat, a short interspersed nuclear element (SINE), a long interspersed nuclear element (LINE), an integrated viral sequence, a viral long terminal repeat (LTR), and a transposon. Some embodiments also include amplifying the target nucleic acids.

[0108] Some embodiments also include enriching for target polynucleotides in the library of nucleic acids. In some embodiments, the enriching comprises hybridizing a plurality of selection probes with the library of nucleic acids, wherein the plurality of selection probes is capable of specifically hybridizing with the target polynucleotides. Some embodiments also include amplifying the target polynucleotides.

[0109] Some embodiments also include methods for determining a sequence of a target nucleic acid, comprising preparing a nucleic acid library by any one of the embodiments above, sequencing the library of nucleic acids to obtain sequence reads; and assembling sequence reads to obtain the sequence of a target nucleic acid. In some embodiments, the assembling comprises comparing the sequence reads to a reference sequence. In some embodiments, the reference sequence is obtained from the same nucleic acid sample as the plurality of nucleic acid fragments.

### Target Enrichment

[0110] Certain embodiments provided herein include enriching for target nucleic acids during preparation of a nucleic acid library, such as certain challenging medically relevant genes (CMRG). FIG. 32 shows an example work flow which includes steps for whole genome sequencing (WGS) with additional enrichment steps. In some embodiments, the nucleic acid library is prepared from a nucleic acids sample with bead-linked transposomes to generate long tagmented polynucleotides. The polynucleotides are marked with methods, such as mutagenesis amplification. In an optional step, suppression/bottlenecking PCR is performed where amplification is biased against shorter self-annealing nucleic acids. Target nucleic acids can then be enriched for in the amplified nucleic acids using selection probes. Additional steps can include a further tagmentation step to generate shorter library nucleic, sequencing the library nucleic acids, and comparing the generated sequence with a reference sequence obtained from the same nucleic acid sample.

[0111] Enrichment efficiency is increased compared to conventional library preparation methods because hybridization of selection probes is to long tagmented polynucleotides. For example, specificity, such as percentage hybridization to target, directly affects the amount of sequencing needed to achieve target coverage depth. High specificity hybridization to target can be difficult to achieve in long repetitive regions and pseudogenes. However, long fragment hybridization has several advantages over short fragment. As shown in FIG. 33, long fragment hybridization allows removal of ineffective probes; allows strategic placement of probes, such as adjacent to problematic genomic regions; and allows the use of fewer probes to cover a region previously covered by many probes. Targeted enrichments can achieve cost-effective human whole genome coverage. For example, genomic regions that may have been typically underrepresented in conventional nucleic acid libraries can be targeted with selection probes. Some embodiments provided herein include the use of certain panels of selection probes, such panels a Major Histocompatibility Complex (MHC) panel directed to the MHC region; an American College of Medical Genetics and Genomics (ACMG) panel directed to genes for which specific mutations are known to be causative of disorders that are clinically actionable; a pharmacogenetic (PGX) panel directed to genes commonly targeted by pharmacogenetic testing assays; a challenging medically relevant gene (CMRG) panel directed to medically relevant autosomal genes that may be under-represented in certain tests due to repeats or polymorphic complexities; and a comprehensive genome wide (dark) panel directed to genomic regions typically underrepresented in sequencing reads.

### Major Histocompatibility Complex (MC) Panel

[0112] Some embodiments provided herein relate to targeting the MHC region of the human genome. Some such embodiments include generation and/or use of a selection probe panel to target the MHC region. The MHC region is a large locus located on the short arm of human chromosome 6 (6p21.1-6p21.3), and contains highly polymorphic genes that code for cell surface proteins essential for the adaptive immune system. The region is challenging to obtain sequence information due to the presence of a high level of repetitive sequences, sequence homology, pseudogenes, and a wide variety of alleles in the population. Precise genotyping and phasing of the MHC region is challenging but highly clinically desirable for applications such as organ transplantation and drug discovery.

### American College of Medical Genetics (ACMG) Panel

[0113] Some embodiments provided herein relate to targeting a panel of genes, such as an American College of Medical Genetics (ACMG) panel of genes. Some such embodiments include generation and/or use of a selection probe panel to target the ACMG genes. A selection probe panel was generated from a list of genes compiled by ACMG for which specific mutations are known to be causative of disorders that are clinically actionable. Miller D. T., et al., Genet Med. 2022 Jul.; 24(7):1407-1414. doi: 10.1016/j.gim.2022.04.006.

[0114] A selection probe panel was designed to precisely call variants and phase in these genes. The panel included 78 unique genes in ACMG SF v3.1, and targeted full genes. The panel size was about 6.8 Mbp. The ACMG genes include those listed in TABLE 1A.

TABLE 1A
ACMG genes

ACTA2, ACTC1, ACVRL1, APC, APOB, ATP7B, BAG3, BMPR1A, BRCA1, BRCA2,
BTD, CACNA1S, CASQ2, COL3A1, DES, DSC2, DSG2, DSP, ENG, FBN1, FLNC, GAA,
GLA, HFE, HNF1A, KCNH2, KCNQ1, LDLR, LMNA, MAX, MEN1, MLH1, MSH2,
MSH6, MUTYH, MYBPC3, MYH11, MYH7, MYL2, MYL3, NF2, OTC, PALB2, PCSK9,
PKP2, PMS2, PRKAG2, PTEN, RB1, RBM20, RET, RPE65, RYR1, RYR2, SCN5A,
SDHAF2, SDHB, SDHC, SDHD, SMAD3, SMAD4, STK11, TGFBR1, TGFBR2,
TMEM127, TMEM43, TNNC1, TNNI3, TNNT2, TP53, TPM1, TRDN, TSC1, TSC2, TTN,
TTR, VHL, WT1

### Pharmacogenetic (PGX) Panel

[0115] Some embodiments provided herein relate to targeting a panel of genes such as a panel of pharmacogenetic (PGX) genes. Some such embodiments include generation and/or use of a selection probe panel to target the PGX genes. A selection probe panel was generated for genes commonly targeted by pharmacogenetic testing assays. Kalman L. V. et al., Clin Pharmacol Ther. 2016 February; 99(2): 172-185. doi:10.1002/cpt.280. Genetic variation is known to influence the way individual respond to therapeutics. Accurately detecting functional haplotypes, such as haplotypes associated with protein activity levels (“star alleles”) in clinically actionable pharmacogenetic genes is crucial to implementation of personalized medicine. The panel was generated to achieve highly accurate genotyping and star allele calling in such genes. The panel included 98 genes that are important in pharmacogenetics, targeting full genes. The panel size was about 8.1 Mbp. The genes include those listed in TABLE 1B.

TABLE 1B
PGX genes

ABCB1, ABCG2, ABL1, ACE, ADH1A, ADH1B, ADH1C, ADRA2A, ADRB1, ADRB2,
AHR, ALDH1A1, ALK, ALOX5, ANKK1, ASL, BCHE, BCR, BRAF, BRCA1,
CACNA1S, CFTR, COMT, CYP1A1, CYP1A2, CYP2A13, CYP2A6, CYP2B6,
CYP2C18, CYP2C19, CYP2C8, CYP2C9, CYP2D6, CYP2E1, CYP2J2, CYP3A4,
CYP3A5, CYP3A7, CYP4F2, DPYD, DRD2, EGFR, ERBB2, F2, F5, G6PD, GRIK4,
GRK4, GRK5, GSTM1, GSTP1, HLA-A, HLA-B, HLA-C, HLA-DPB1, HLA-DQA1,
HLA-DQB1, HLA-DRA, HLA-DRB1, HMGCR, HTR2A, HTR2C, IFNL3, IFNL4,
KCNH2, KCNJ11, KIT, KRAS, MTHFR, NAT1, NAT2, NQO1, NR1I2, NRAS, NUDT15,
OPRM1, P2RY1, P2RY12, PTGIS, PTGS2, RYR1, SCN5A, SLC15A2, SLC19A1,
SLC22A1, SLC22A2, SLCO1B1, SLCO2B1, SULT1A1, TPMT, TYMS, UGT1A1,
UGT1A4, UGT2B15, UGT2B17, UGT2B7, VDR, VKORC1

### Challenging Medically Relevant Gene (CMRG) Panel

[0116] Some embodiments provided herein relate to targeting a panel of genes such as a panel of challenging medically relevant genes (CMRG). Some such embodiments include generation and/or use of a selection probe panel to target the CMRG. The repetitive nature and complexity of some medically relevant genes poses a challenge for their accurate analysis in a clinical setting (Wagner J., et al, (2022) Nat Biotechnol. 40:672-680). The Genome in a Bottle (GIAB) Consortium has provided variant benchmark sets, but these exclude nearly four hundred medically relevant genes due to their repetitiveness or polymorphic complexity. Multiple regions of the genome are not fully resolved in existing benchmarks due to repetitive sequence, segmental duplications, and complex variants, such as multiple nearby SNVs, INDELs, and/or SVs. Goldfeder R L et al. Genome Med. 8, 1-12 (2016).

[0117] About 5175 gene symbols have been previously identified from the following sources: (1) 4,773 potentially medically-relevant genes from the databases OMIM, HGMD, and ClinVar which includes both commonly tested and rarely tested genes (Mandelker D et al. Genet. Med 18, 1282-1289 (2016). (2) The COSMIC gene census contains 723 gene symbols found in tumors (Tate J G et al. Nucleic Acids Res. 47, D941-D947 (2019)), (3) A focused list of “High Priority Clinical Genes” that are commonly tested for clinical inherited diseases (Wagner J., et al., (2022) Nat Biotechnol. 40:672-680).

[0118] 5,027 have unique coordinates on the primary assembly of GRCh38 and valid ENSEMBL annotations, and 4,697 are autosomal. 70% of these genes are specific to the list from OMIM, HGMD, and ClinVar, which includes genes associated with disease in a small number of studies and are currently tested more frequently in research studies than in high-throughput clinical laboratories. 395 genes included 90% or less on GRCh37 or GRCh38. Many of the 395 medically relevant genes were not covered well by the v4.2.1 small variant benchmark due to SVs, complex variants, and segmental duplications. A CMRG benchmark for 273 of the 395 genes has been previously created. (Wagner J., et al., (2022) Nat Biotechnol. 40:672-680). To be included in the CMRG benchmark, the entire gene including 20 kb flanking sequence on each side and any overlapping segmental duplications needed to have exactly one fully aligned contig from each haplotype with no breaks on GRCh37 and GRCh38. The total size of 391 of the CMRG gene panel is about 22.5 Mbp. The smallest gene is about 66 bp (SNORD64), the largest gene is about 1 Mbp (PTPRN2). CMRG genes include those listed in TABLE 1C.

TABLE 1C
CMRG genes

A4GALT, ABCG8, ABO, ABR, ADAMTS10, ADAMTSL2, AFP, AGL, AGRN,
ALOXE3, ANKRD11, ANO7, APOBEC1, APOBEC3H, APOC1, APOC2, APOC4,
ARHGEF10, ASIP, ATPAF2, AXIN1, B3GAT3, BAX, BFSP2, BLOC1S3, BRAF, BSG,
BTRC, C1R, C3, CABIN1, CALR3, CANT1, CASP10, CBR3, CBS, CCL3L1, CD247,
CD320, CD4, CD55, CDH15, CDH17, CEL, CFC1, CFC1B, CFD, CFHR1, CFHR3, CHL1,
CHMP1A, CHRNA4, CLCN7, CLIP2, CNR2, COL18A1, COL6A1, COL6A2, COX14,
COX6B1, CR1, CREB3L3, CRYAA, CTDP1, CYB5R3, CYP2G1P, CYP4F12, CYP4F3,
D2HGDH, DAXX, DAZL, DCLRE1C, DEAF1, DGCR6, DIP2C, DLGAP2, DMPK,
DNAAF4, DNMT3L, DOK7, DPP6, DPY19L2, DRD4, DSPP, DUX4, DUX4L1, ECHS1,
EEF1A2, EHMT1, EIF2B5, EIF4E, ELANE, ELOA3, ENO3, ESPN, ESRRA, ETFB,
ETHE1, EXTL2, F7, FAM20C, FAT1, FCGR1A, FCGR2B, FCGR3A, FGF3, FGFRL1,
FKBP8, FLAD1, FLG, FLT4, FOXN1, FSCN2, FTCD, FUT1, FUT3, FXN, G6PC3, GAK,
GALNT9, GALR1, GALT, GCGR, GCSH, GDF3, GIP, GIPC3, GNPTG, GOLGA3,
GP1BA, GP6, GPI, GPIHBP1, GRIN1, GRK1, GSTM1, GTF2I, GTF2IRD2, GUSB,
GYPA, GYPB, GYPE, H19, HBG1, HBM, HCN2, HCN3, HEATR2, HES7, HLA-B, HLA-
DQB1, HLA-DRB1, HMGCL, HMX1, HNF1A, HOMER2, HOXB8, HPD, HSD11B2,
HYAL1, HYDIN, IFITM3, IFNL3, IGHA1, IGHG1, IGHG2, IGHM, IGHV3-21, IGKC,
IGKV1-5, IKBKB, IKZF1, IMPA1, INPP5D, INPP5E, INSL3, INSR, JAG2, KANSL1,
KATNAL2, KCNE1, KCNJ18, KCNV2, KDM2B, KIR2DL1, KIR2DL3, KIR3DL1,
KISS1, KISS1R, KLF11, KLF14, KLK4, KMT2C, KNG1, KRTAP1-1, LAMB1, LBR,
LCE3B, LHFPL5, LIPN, LIX1, LMF1, LMNB2, LPA, LRIG2, LRPAP1, LZTFL1, MAFA,
MAN1B1, MAP2K3, MARVELD2, MASP2, MBOAT7, MC1R, MDK, MEST, MLC1,
MLPH, MOGS, MPG, MRC1, MST1R, MUC1, MUC16, MUC3A, MUC4, MUC5B,
MUSK, MYO9B, MYOT, MYT1, NACA, NAIP, NAPRT, NBEAP1, NCF1, NCF1C,
NCR3, NDUFA6, NDUFAF1, NDUFB1, NDUFV3, NFKBIL1, NLRP12, NLRP2, NLRP7,
NOD1, NOTCH2, NPM1, NPPA, NSMF, NUTM2B, NUTM2D, OCLN, OPRL1, OR12D2,
OR4F5, OR51A2, ORC6, P2RX2, P2RX5, PADI4, PAPSS2, PCBP1, PCCB, PCDHA10,
PCMT1, PDE4DIP, PDE6B, PDLIM3, PDPK1, PDSS1, PEX5, PGAM5, PGAP6, PHKG2,
PIGV, PKD1, PKN3, PLA2G10, PLTP, PMS2, PNKP, POLG2, PPIA, PPIP5K1, PRG4,
PRKCG, PRODH, PROZ, PRSS2, PSPH, PTEN, PTK6, PTPRC, PTPRN2, PTPRQ, PXDN,
RFX2, RGPD3, RHCE, RHOA, RNF212, RNF213, RPIA, RPL22, RPN1, RPS17,
RXYLT1, SAR1B, SBK3, SDHA, SEC63, SEMG1, SERPINF2, SH2B1, SHANK2,
SHANK3, SIGLEC16, SIRT3, SLC17A5, SLC22A1, SLC22A12, SLC26A9, SLC27A4,
SLC27A5, SLC29A4, SLC5A11, SLC6A18, SLC6A3, SMG1, SMN1, SMN2, SMOC2,
SNORD64, SNTG2, SOHLH1, SPATA31C1, SPI1, SPRN, SRGAP2, SRR, SSTR5,
STK11, STXBP2, SULT1A1, SUZ12, TAPBP, TAS2R46, TBXA2R, TCF3, TERT, TFPT,
THBS2, TJP2, TM4SF19, TMC6, TMEM114, TNNI3, TNNT1, TNNT3, TPCN2, TPO,
TRAPPC10, TRBV9, TRMT1, TRPM4, TTC37, TTLL1, TUBGCP6, TWIST2, TYK2,
TYMS, U2AF1, UGT2A1, UGT2A2, UGT2B17, UGT2B28, UNKL, USP8, UTP4,
UVSSA, VANGL1, VKORC1, VPS53, ZAN, ZNF141, ZNF407, ZNF419, ZNF469,
ZNF479

### Certain Selection Probes

[0119] Some embodiments include enriching for target nucleic acids in the amplified polynucleotides, such as products of mutagenesis PCR, and/or products of suppression PCR. In some such embodiments, the enriching comprises hybridizing a plurality of selection probes with the amplified polynucleotides, wherein the selection probes of the plurality of selection probes comprise different nucleotide sequences from one another. In some embodiments, the plurality of selection probes comprise at least 50, 100, 200, 500, 1000, 5000, or 10000 different selection probes.

[0120] In some embodiments, the selection probes are designed such that an average distance between two adjacent nucleotide sequences of the selection probes on a reference sequence of a genome, such as a human genome, is in a range from about 300 consecutive nucleotides to about 7,000 consecutive nucleotides; a range from about 500 consecutive nucleotides to about 5,000 consecutive nucleotides; a range from about 750 consecutive nucleotides to about 2,500 consecutive nucleotides; a range from about 750 consecutive nucleotides to about 1,500 consecutive nucleotides; a range from about 900 consecutive nucleotides to about 1,200 consecutive nucleotides. In some embodiments, an average distance between two adjacent nucleotide sequences of the selection probes on a reference sequence of a genome is about 750, 1000, 1500, or 2000 consecutive nucleotides.

[0121] In some embodiments, the selection probes are designed such that an average number of sites in a genome, such as a human genome, that each selection probe of the plurality of selection probes is capable of hybridizing to is no more than 100 different sites in the genome, no more than 50 different sites in the genome, no more than 40 different sites in the genome, no more than 30 different sites in the genome, no more than 20 different sites in the genome, no more than 10 different sites in the genome, or no more than 5 different sites in the genome, or any number between any of the foregoing number of different sites. In some embodiments, each selection probe of the plurality of selection probes is capable of hybridizing to no more than 100 different sites in the genome, no more than 50 different sites in a genome, no more than 40 different sites in a genome, no more than 30 different sites in a genome, no more than 20 different sites in a genome, or no more than 10 different sites in a genome, or any number between any of the foregoing number of different sites. In some embodiments, a selection probe capable of hybridizing to a site in the genome comprises at least 50, 60, 70, or 80 consecutive nucleotides complementary to at least 80%, 90%, 95%, 96%, 98%, or 100% of a nucleotide sequence at the site in the genome. In some embodiments, a selection probe capable of hybridizing to a site in the genome comprises at least 50 consecutive nucleotides complementary to at least 90% of a nucleotide sequence at the site in the genome.

[0122] In some embodiments, the plurality of selection probes lack sequences capable of hybridizing to a repetitive genomic DNA element. In some embodiments, the repetitive genomic DNA element is selected from a tandem repeat, an Alu repeat, a short interspersed nuclear element (SINE), a long interspersed nuclear element (LINE), an integrated viral sequence, a viral long terminal repeat (LTR), and a transposon.

[0123] In some embodiments, the selection probes target a plurality of selected genes, such as a panel including challenging medically relevant genes (CMRG), such as the genes listed in TABLE 1C. In some such embodiments, each selection probe of the plurality of selection probes comprises a nucleotide sequence capable of hybridizing to a gene selected from TABLE 1C; and/or a nucleotide sequence within, no more than 10 kbp 5′ or no more than 10 kbp 3′ of a gene selected from TABLE 1C. In some embodiments, each selection probe of the plurality of selection probes comprises a nucleotide sequence having at least 90%, 95%, or 100% sequence identity to any one of SEQ ID NOs:02-140601. In some embodiments, each selection probe of the plurality of selection probes comprises a nucleotide sequence having at least 90%, 95%, or 100% sequence identity to any one of SEQ ID NOs:02-43879. In some embodiments, each selection probe of the plurality of selection probes comprises a nucleotide sequence having at least 90%, 95%, or 100% sequence identity to any one of SEQ ID NOs:02-6936.

### Certain Compositions, Kits and Systems

[0124] Some embodiments of the methods and composition provided herein include kits and systems for preparing a nucleic acid library. Some embodiments include a kit comprising: a first bead-linked transposomes (BLT-1) reagent, wherein the BLT-1 transposomes comprises a first adaptor sequence; a mutagenesis reagent comprising a first primer, dPTPs, dNTPs, and a polymerase; a second bead-linked transposomes (BLT-2) reagent, wherein the BLT-2 transposomes comprise the first adaptor and a second adaptor; an amplification reagent comprising a first primer, a second primer, dNTPs, and a polymerase; wherein BLT-1 has a lower transposome density as compared to BLT-2; and wherein the first primer hybridizes to the first adaptor sequence and the second primer hybridizes to the second adaptor sequence. In some embodiments, BLT-2 has more than 10, 20, 50, 100, or 1000 times the transposome density as compared to BLT-1. In some embodiments, the first adaptor is B15 and the second adaptor is A14. Some embodiments include population of oligonucleotides, wherein the oligonucleotides comprise at least 10, 100, 1000, 10000 different nucleotide sequences selected from any one of SEQ ID NOs. 02-140601.

[0125] Some embodiments include system for preparing a nucleic acid library, comprising: (a) a first plurality of transposomes comprising transposon adaptors for tagmenting a plurality of nucleic acid fragments, wherein the first plurality of transposomes is immobilized on a first plurality of beads at a first density; (b) reagents for amplifying the plurality of polynucleotides to obtain amplified polynucleotides, wherein the amplifying comprising a mutagenesis PCR and/or a suppression PCR, wherein: (i) the first reagent for performing mutagenesis PCR comprise a low bias DNA polymerase and/or a nucleotide analogue; optionally, wherein the nucleotide analogue comprises dPTP, and/or 8-oxo-dGTP; and/or the low bias DNA polymerase is a Thermococcal polymerase, or a functional derivative thereof, optionally, wherein the Thermococcal polymerase is derived from a Thermococcus strain selected from the group consisting of T. kodakarensis, T. siculi, T. celer and T. sp KS-1, and (ii) the first reagents for performing suppression PCR comprise amplification primers having the same nucleotide sequence capable of hybridizing to the transposon adaptors; (c) a plurality of selection probes for enriching for target polynucleotides in the amplified polynucleotides; and (d) a second plurality of transposomes comprising library adaptors for adding library adaptors to each end of the amplified polynucleotides, wherein the second plurality of transposomes is immobilized on a second plurality of beads at a second density, wherein the first density is less than the second density.

[0126] Some embodiments include a system for preparing a nucleic acid library, comprising: (a) a first plurality of transposomes for tagmenting a plurality of nucleic acid fragments to obtain a plurality of polynucleotides; (b) first reagents for amplifying the plurality of polynucleotides to obtain amplified polynucleotides; and (c) second reagents for adding library adaptors to each end of the amplified polynucleotides. In some embodiments, the first plurality of transposomes comprises transposon adaptors, wherein the first plurality of transposomes is immobilized on a solid support. In some embodiments, the solid support comprises a first plurality of beads.

[0127] In some embodiments, the first plurality of the transposomes is immobilized on the first plurality of beads at a density such that on contacting the first plurality of transposomes with the plurality of nucleic acid fragments the plurality of polynucleotides has an average length of the plurality of polynucleotides is greater than about 1 kbp, 2 kbp, 5 kbp, 10 kbp, 15 kbp, 20 kbp, or 40 kbp. In some embodiments, the average length of the plurality of polynucleotides is in a range from about 1 kbp to about 40 kbp, 1 kbp to about 30 kbp, 1 kbp to about 20 kbp, 5 kbp to about 20 kbp, 5 kbp to about 15 kbp, or 7 kbp to about 12 kbp.

[0128] In some embodiments, the number of transposomes immobilized on the bead is no more than about 100 transposomes, 50 transposomes, 40 transposomes, 30 transposomes, 20 transposomes, or 10 transposomes. In some embodiments, the number of transposomes immobilized on the bead is no more than about 30 transposomes.

[0129] In some embodiments, the first plurality of the transposomes immobilized on the bead comprise a total activity such that on contacting the first plurality of transposomes with the plurality of nucleic acid fragments the plurality of polynucleotides has an average length greater than about 1 kbp, 2 kbp, 5 kbp, 10 kbp, 15 kbp, 20 kbp, or 40 kbp. In some embodiments, the average length of the plurality of polynucleotides is in a range from about 1 kbp to about 40 kbp, 1 kbp to about 30 kbp, 1 kbp to about 20 kbp, 5 kbp to about 20 kbp, 5 kbp to about 15 kbp, or 7 kbp to about 12 kbp.

[0130] In some embodiments, the first plurality of the transposomes immobilized on the bead comprise an activity in a range from about 0.05 AU/μl to about 0.25 0.05 AU/μl. In some embodiments, the first plurality of the transposomes immobilized on the bead comprise an activity of about 0.075 AU/μl.

[0131] In some embodiments, the transposon adapters comprise the same sequence. In some embodiments, the transposon adapters comprise the nucleotide sequence: SEQ ID NO:01 (GTCTCGTGGOCTCGG)

[0132] In some embodiments, the transposomes of the plurality of transposomes are the same. In some embodiments, the transposomes of the plurality of transposomes are B15 transposomes.

[0133] In some embodiments, the first reagents comprise reagents for performing mutagenesis PCR comprising a low bias DNA polymerase and/or a nucleotide analogue. In some embodiments, the nucleotide analogue comprises dPTP, and/or 8-oxo-dGTP. In some embodiments, the low bias DNA polymerase is a Thermococcal polymerase, or a functional derivative thereof. In some embodiments, the Thermococcal polymerase is derived from a Thermococcal strain selected from the group consisting of T. kodakarensis, T. siculi, T. celer and T. sp KS-1.

[0134] In some embodiments, the first reagents comprise reagents for performing suppression PCR comprising amplification primers having the same nucleotide sequence. In some embodiments, the amplification primers are capable of hybridizing to the transposon adaptors.

[0135] In some embodiments, the second reagents comprise a second plurality of transposomes comprising the library adaptors. In some embodiments, the second plurality of transposomes has an activity such that on contacting the second plurality of transposomes with the amplified polynucleotides a library of nucleic acids is obtained and comprises the library adaptors and having an average length less than about 1 kb, 900 bp, 800, bp, 700 bp, 600 bp, 500 bp, 400 bp, 300 bp, 200 bp, or 100 bp.

[0136] In some embodiments, the first plurality of the transposomes is immobilized on the beads at a density less than a density at which the second plurality of transposomes are immobilized on the second plurality of beads.

[0137] Some embodiments also include third reagents for enriching for target polynucleotides in the amplified polynucleotides, comprising a plurality of selection probes. In some embodiments, the plurality of selection probes is attached to a third plurality of beads.

[0138] In some embodiments, an average distance between two adjacent nucleotide sequences of the selection probes on a reference sequence of a genome is in a range from about 300 consecutive nucleotides to about 7,000 consecutive nucleotides. In some embodiments, the range is from about 500 consecutive nucleotides to about 5,000 consecutive nucleotides. In some embodiments, the range is from about 750 consecutive nucleotides to about 2,500 consecutive nucleotides. In some embodiments, the range is from about 750 consecutive nucleotides to about 1,500 consecutive nucleotides. In some embodiments, the range is from about 900 consecutive nucleotides to about 1,200 consecutive nucleotides. In some embodiments, an average distance between two adjacent nucleotide sequences of the selection probes on a reference sequence of a genome is about 750, 1000, 1500, or 2000 consecutive nucleotides.

[0139] In some embodiments, an average number of sites in a genome that each selection probe of the plurality of selection probes is capable of hybridizing to is no more than 50 different sites in the genome, to no more than 40 different sites in the genome, to no more than 30 different sites in the genome, to no more than 20 different sites in the genome. In some embodiments, each selection probe of the plurality of selection probes is capable of hybridizing to no more than 50 different sites in a genome, to no more than 40 different sites in a genome, to no more than 30 different sites in a genome, to no more than 20 different sites in a genome. In some embodiments, a selection probe capable of hybridizing to a site in the genome comprises at least 50, 60, 70, or 80 consecutive nucleotides complementary to at least 90% of a nucleotide sequence at the site in the genome.

[0140] In some embodiments, the plurality of selection probes lack sequences capable of hybridizing to a repetitive genomic DNA element; In some embodiments, the repetitive genomic DNA element is selected from a tandem repeat, an Alu repeat, a short interspersed nuclear element (SINE), a long interspersed nuclear element (LINE), an integrated viral sequence, a viral long terminal repeat (LTR), and a transposon.

[0141] In some embodiments, the plurality of selection probes comprise at least 50, 100, 200, 500, 1000, 5000 different selection probes.

[0142] In some embodiments, each selection probe of the plurality of selection probes comprises a nucleotide sequence capable of hybridizing to a gene selected from TABLE 1C; and/or a nucleotide sequence within, no more than 10 kbp 5′ or no more than 10 kbp 3′ of a gene selected from TABLE 1C. In some embodiments, each selection probe of the plurality of selection probes comprises a nucleotide sequence having at least 90%, 95%, or 100% sequence identity to any one of SEQ ID NOs:02-140600. In some embodiments, each selection probe of the plurality of selection probes comprises a nucleotide sequence having at least 90%, 95%, or 100% sequence identity to any one of SEQ ID NOs:02-43879. In some embodiments, each selection probe of the plurality of selection probes comprises a nucleotide sequence having at least 90%, 95%, or 100% sequence identity to any one of SEQ ID NOs:02-22546.

[0143] In some embodiments, the plurality of nucleic acid fragments is mammalian. In some embodiments, the plurality of nucleic acid fragments is human. In some embodiments, the plurality of nucleic acid fragments comprises genomic DNA.

[0144] Some embodiments include a kit comprising a plurality of selection probes. In some embodiments the plurality of selection probes comprise at least 50, 100, 1000, 2000, 3000, 4000, 5000, 10000, 20000, 30000, or 40000 or any number between any one of the foregoing numbers of different nucleotide sequences.

[0145] In some embodiments, each selection probe of the plurality of selection probes comprises a nucleotide sequence capable of hybridizing to a gene selected from TABLE 1C; and/or a nucleotide sequence within, no more than 10 kbp 5′ or no more than 10 kbp 3′ of a gene selected from TABLE 1C. In some embodiments, each selection probe of the plurality of selection probes comprises a nucleotide sequence having at least 90%, 95%, or 100% sequence identity to any one of SEQ ID NOs:02-140600. In some embodiments, each selection probe of the plurality of selection probes comprises a nucleotide sequence having at least 90%, 95%, or 100% sequence identity to any one of SEQ ID NOs:02-43879. In some embodiments, each selection probe of the plurality of selection probes comprises a nucleotide sequence having at least 90%, 95%, or 100% sequence identity to any one of SEQ ID NOs:02-22546.

### Examples

### Example 1—Generation of Nucleic Acid Library

[0146] The following describes the preparation of human genome libraries for sequencing with (1) low-density bead-linked transposomes; (2) random mutagenesis; and (3) bottlenecking (suppression) amplification. The workflow included uniquely encoding long DNA templates with steps including highly uniform random mutagenesis and amplification. The long DNA templates were then fragmented and sequenced on a standard short-read (SR) platform. Reads from prepared libraries were used to accurately reconstruct and decode the original long template sequences using an unmutated reference data set which was generated in parallel.

[0147] Unmutated reference data: to reconstruct accurate long read sequences from mutated short reads, an additional unmutated reference data set was used. This was generated from the same genomic starting material as the sample to be mutated, using standard methods for short-read library preparation and sequencing. Paired end reads were generated at a minimum length of 2×150 nucleotides for the unmutated data set, with a recommended 60× genome coverage for isolated bacterial genomes and 40× for pure human cell cultures.

[0148] Input DNA requirements: the workflow was found to be compatible with genomic DNA samples of relatively poor quality, containing unwanted low molecular weight fragments. These low molecular weight fragments were actively excluded by certain steps in the workflow; and the presence of some higher molecular weight material (>20 kb) was included to generate long templates for sequencing. To quantify input DNA for library preparation, a fluorometric-based method such as the Qubit dsDNA HS Assay Kit (Thermo Scientific) was used. Concentrations of input DNA between 12.5 and 50 ng/l was used.

[0149] The following outlines a workflow which included: high molecular weight tagmentation; mutagenesis PCR; library normalization; bottlenecking (suppression) PCR; library preparation; fragment analysis of products; and sequencing.

### Reagents, Materials and Thermocycler Parameters

| | |
|---|---|
| BLT Long Range | BLT-LR |
| Long Range PCR Mix | LPM |
| Long Range Marking Mix | LMM |
| Long Range Primer Mix 1 | LRP1 |
| Long Range Primer Mix 2 | LRP2 |
| Library Reducing Beads | LRB |
| Binding Buffer | IBB |
| Wash Buffer 1 | IWB1 |
| Stop Tagment Buffer 2 | ST2 |
| Illumina Purification Bead | IPB |
| PW1 (water) | |
| Resuspension Buffer | RSB |
| Ethyl Alcohol, Pure | |
| Enrich BL Transposome, Lg-LT | eBLT-L |
| Enhanced PCR Mix | EPM |
| Tagmentation Buffer 1 | TB1 |
| Tagmentation Wash Buffer | TWB |
| Nextera DNA UD Index Plate | |

Tagmentation parameters

| Step | Temperature | Time |
|---|---|---|
| 1 | 55° C. | 5 minutes |
| 2 | 10° C. | hold |

Mutagenesis PCR parameters

| Step | Temperature | Time | |
|---|---|---|---|
| 1 | 68° C. | 3 | minutes |

| | |
|---|---|
| 2 | PCR cycles (12 cycles) |

| | | |
|---|---|---|
| 98° C. | 10 | seconds |
| 68° C. | 10 | minutes |

| | | |
|---|---|---|
| 3 | 4° C. | hold |

Bottlenecking PCR parameters

| | | |
|---|---|---|
| Step | Temperature | Time |

| | |
|---|---|
| 1 | PCR cycles (14 or 16 cycles) |

| | | |
|---|---|---|
| 98° C. | 10 | seconds |
| 68° C. | 10 | minutes |

| | | |
|---|---|---|
| 3 | 4° C. | hold |

Index PCR parameters

| Step | Temperature | Time | |
|---|---|---|---|
| 1 | 68° C. | 3 | minutes |
| 2 | 98° C. | 3 | minutes |

| | |
|---|---|
| 3 | PCR cycles (6 cycles) |

| | | | |
|---|---|---|---|
| | 98° C. | 45 | seconds |
| | 62° C. | 30 | seconds |
| | 68° C. | 2 | minute |
| 4 | 68° C. | 1 | minutes |

| | | |
|---|---|---|
| 5 | 4° C. | hold |

### High Molecular Weight Tagmentation

[0150] This step used low density bead-linked transposomes (BLT-LR) to generate long DNA fragments tagged with adapter sequences.

| | |
|---|---|
| 1 | Label a Biorad PCR plate. |
| 2 | Label a 1.7 ml tube and add the following components in order: BLT-LR; and |
| | TB1. |
| 3 | Vortex to mix thoroughly, then briefly pulse centrifuge. |
| 4 | Add 20 μl of mastermix to wells. |
| 5 | Add 30 μl input DNA (50 ng total). |
| 6 | Use a pipette to gently mix then briefly pulse centrifuge. |
| 7 | Place tubes in a thermocycler with a heated lid set to 80° C. and run the Tagment. |
| 8 | Remove from the thermocycler and add 10 μl of ST2. |
| 9 | Use a pipette set at half of the total rxn volume to gently mix. |
| 10 | Incubate at room temperature for 2 min. |
| 11 | Place the tubes on a magnetic stand or plate for 3 min or until the solution is |
| | clear. Remove and discard the clear supernatant. Note: If beads become |
| | disturbed during aspiration, redisperse solution into the tube. Maintain tube on |
| | the magnet to let the beads settle. |
| 12 | Remove tubes from the magnet and add 100 μl TWB. Gently pipette mix until |
| | beads are fully resuspended. |
| 13 | Place the tubes on a magnetic stand or plate and incubate for at least 2 min, or |
| | until clear. While samples are incubating, proceed to the next step. Note: Keep |
| | pellets in TWB to help prevent any chance of over-drying the beads. |

### Mutagenesis PCR

[0151] In this step, long templates were uniquely encoded via random incorporation of the mutagenic nucleotide analogue dPTP during PCR.

| | |
|---|---|
| 14 | Label a 1.7 ml tube and combine the following to prepare mutagenesis master |
| | mix: LMM; LPM; LRP1; and RSB. |
| 15 | Use a pipette to mix thoroughly, then briefly pulse centrifuge. |
| 16 | Remove TWB from each well. |
| 17 | Add 50 μl of master mix to beads. |
| 18 | Gently pipette mix to resuspend beads |
| 19 | Place in preprogrammed thermal cycler and run the Mutagenesis PCR program. |
| 20 | Remove from thermocycler. |
| 21 | Vortex IPB to resuspend the beads. |
| 22 | Add 30 μl of IPB beads to each well. |
| 23 | Mix the total reaction volume by gently pipetting at least 10 times and incubate |
| | for 2 minutes at room temperature. |
| 24 | Place on the magnetic stand and wait until the liquid is clear (~5 minutes). |
| 25 | Remove and discard all supernatant. |
| 26 | Wash beads as follows: a. keep on the magnetic stand and add 180 μl fresh 80% |
| | EtOH to each well; b. wait 30 seconds; and c. remove and discard all |
| | supernatant |
| 27 | Briefly spin for 10 seconds and return plate to magnet. |
| 28 | With a 20 μl pipette, remove all residual EtOH. |
| 29 | Dry on magnet for 2 minutes. |
| 30 | Remove from the magnetic stand and add 25 μl RSB to each well. |
| 31 | Pipette mix and incubate at room temperature for 2 minutes. |
| 32 | Place on the magnetic stand and wait until the liquid is clear (~2 minutes). |
| 33 | Transfer 10 μl supernatant to a new plate and leave remaining supernatant with |
| | SPRI beads |

### Library Normalization

| | |
|---|---|
| 34 | In a new 2 ml tube, combine the following to prepare normalization master mix: |
| | Binding Buffer (IBB); and LRB |
| 35 | Vortex normalization master mix until homogenous immediately prior to use. |
| 36 | Pipette 10 μL of prepared mastermix into each well containing 10 μL of DNA. |
| 37 | Seal plate with microseal and put on bioshake for 30 minutes at 1800 rpm. |
| 38 | Remove plate from bioshake and place on plate magnet for 1 minute. Removing |
| | and replacing plate on magnet may help to condense beads. |
| 39 | Gently remove supernatant, taking care not to disturb beads. |
| 40 | Remove plate from magnet. |
| 41 | Immediately add 150 μL of IWB1 to each well. |
| 42 | Using a p200 pipette set to 140 μL, pipette mix each well at least 10 times. |
| 43 | Place on plate magnet for 1 minute. |
| 44 | Gently remove supernatant, taking care not to disturb beads. |
| 45 | Repeat steps 41-44 for a total of two washes. Remove plate from magnet. |
| 46 | Immediately add 150 μL of 80% EtOH to each well. |
| 47 | Using a p200 pipette set to 140 μL, pipette mix each well at least 10 times. |
| 48 | Place on plate magnet for 1 minute. |
| 49 | Gently remove supernatant, taking care not to disturb beads. |
| 50 | Briefly spin down plate and use a p20 to remove excess liquid. |
| 51 | Allow to dry for 2 minutes. |
| 52 | Add 80 μL of RSB to each sample well. |
| 53 | Using a pipette set to 50 μL, pipette mix each sample at least 10 times. |
| 54 | Allow to incubate for 10 minutes. |
| 55 | Place on plate magnet for 1 minute. |
| 56 | Transfer 70 μL of supernatant to new well. |
| 57 | If performing 165 pg input, go to step 62 for next |
| | If performing 55 pg input, dilute 20 ul of eluted material in 40 μl of RSB in |
| | adjacent well. Mix well, then use 2 μl as stated in step 62. |
| | [Optional] Measure DNA on Qubit using 10 μL of DNA diluted in 190 μL of |
| | Qubit buffer. |

### Bottlenecking (Suppression) PCR

[0152] In this step a defined quantity of the purified mutagenesis product was amplified to create many copies of each unique template. The amount of starting material in the bottlenecking PCR determined the number of long templates available for sequencing, and was controlled through careful dilution of the mutagenesis sample. The following protocol was used to generate between about 10× to about 30× long-read coverage of the human genome (see below). For arbitrary samples, a simple calculator or look up table was, provided to guide users on sample dilution and indicate the number of enrichment cycles required for a particular genome size or sample type.

| | |
|---|---|
| 58 | Combine the following volumes to prepare enrichment master mix: LPM; and |
| | LRP2. |
| 59 | Use a pipette to mix thoroughly, then briefly pulse centrifuge. |
| 60 | Add 48 μl of master mix to a new Bio-Rad plate. Place tubes on ice. |
| 61 | Add 2 μl of DNA to each well. |
| 62 | Gently pipette mix the 50 μl reaction and briefly pulse centrifuge. |
| 63 | Place in preprogrammed thermal cycler and run the Bottlenecking PCR program. |
| 64 | Note: Perform 16 enrichment cycles for 10x genome coverage or 14 cycles for |
| | 30x. |
| 65 | Remove from thermocycler. |
| 66 | Vortex IPB to resuspend the beads. |
| 67 | Add 30 ul of IPB beads to each well. |
| 68 | Mix the total reaction volume by gently pipetting at least 10 times and incubate |
| | for 2 minutes at room temperature. |
| 69 | Place on the magnetic stand and wait until the liquid is clear (~5 minutes). |
| 70 | Remove and discard all supernatant. |
| 71 | Wash beads as follows: a. keep on the magnetic stand and add 180 μl fresh 80% |
| | EtOH to each well; b. wait 30 seconds; and c. remove and discard all supernatant. |
| 72 | Briefly spin for 10 seconds and return plate to magnet. |
| 73 | With a 20 μl pipette, remove all residual EtOH. |
| 74 | Dry on magnet for 2 minutes. |
| 75 | Remove from the magnetic stand and add 25 μl RSB to each well. |
| 76 | Pipette mix and Incubate at room temperature for 2 minutes. |
| 77 | Place on the magnetic stand and wait until the liquid is clear (~2 minutes). |
| 78 | Transfer 24 μl supernatant to a new plate. |
| 79 | Keep on ice for same day use or store at −20° C. (safe stopping point). |
| 80 | Determine the concentration of each purified bottlenecking PCR product with the |
| | Qubit dsDNA HS Assay Kit. Use 1-2 μl of sample DNA per measurement. |

### Library Preparation

[0153] In this step the long, mutated DNA templates were fragmented and adapters were attached to create a library of short, overlapping fragments that are ready for sequencing. 50 ng of each purified enrichment product can be used as input DNA for internal library preparation. A small amount of bottlenecking PCR product was reserved for subsequent analysis of template size.

| | |
|---|---|
| 81 | Bring TB1 and eBLT-L to room temperature and vortex to mix. |
| 82 | Make a dilution using RSB and 50 ng worth of purified bottlenecking product |
| | into each well with a final volume of 30 μl. |
| 83 | Vortex eBLT-L vigorously for 10 seconds, then visually check the beads for |
| | complete resuspension. Repeat as necessary. |
| 84 | Prepare a tagmentation master mix: eBLT-L; TB1. |
| 85 | Vortex the tagmentation master mix thoroughly to make sure the eBLT-L |
| | beads are evenly resuspended in the buffer. |
| 86 | Using fresh tips, transfer 20 μl of tagmentation master mix to each tube |
| | containing 30 μl of DNA. |
| 87 | Pipette mix the 50 μl reaction mix to resuspend. |
| 88 | Place in preprogrammed thermal cycler and run the Tagment program. |
| 89 | Remove from thermocycler and add 10 μl of ST2 to each tagmentation |
| | reaction. |
| 90 | Use a pipette set at half of the total rxn volume to gently mix. |
| 91 | Incubate at RT for 5 minutes. |
| 92 | Place the tubes on a magnetic stand or plate for 3 min or until the solution is |
| | clear. Remove and discard the clear supernatant. Note: If beads become |
| | disturbed during aspiration, redisperse solution into the tube. Maintain tube on |
| | the magnet to let the beads settle. |
| 93 | Remove tubes from the magnet and add 100 μl TWB. Gently pipette mix until |
| | beads are fully resuspended. |
| 94 | Place the tubes on a magnetic stand or plate for 3 min or until the solution is |
| | clear. Remove and discard the clear supernatant. |
| 95 | Remove tubes from the magnet and add 100 μl TWB. Gently pipette mix until |
| | beads are fully resuspended (total of 2 washes). |
| 96 | Place the tubes on a magnetic stand or plate and incubate for at least 3 min, or |
| | until clear. While samples are incubating, proceed to the next step. Note: Keep |
| | pellets in TWB to help prevent any chance of over drying the beads. |
| 97 | Prepare a index PCR master mix: EPM; RSB. |
| 98 | Use a pipette to mix thoroughly, then briefly pulse centrifuge. |
| 99 | Carefully remove the second TWB wash from the samples while on the |
| | magnet. Use a pipette with P10 or P20 tips to remove excess liquid from the |
| | tube. Any remaining foam on the tube walls does not adversely affect the |
| | library. |
| 100 | Remove tubes from the magnet and proceed immediately to the next step to |
| | prevent excessive drying of the beads. |
| 101 | Add 46 μl of the PCR master mix to each sample. Gently pipette mix to ensure |
| | the beads are thoroughly resuspended. |
| 102 | To each sample, add 4 μl Nextera DNA UD Index. Use a unique combination |
| | of indexes for each sample. |
| 103 | Using a pipette set to 40 μl, pipette mix a minimum of 10 times to mix the |
| | entire reaction volume. |
| 104 | Place in preprogrammed thermal cycler and run the Index PCR program. |
| 105 | Clean up PCR reaction using IPB beads as follows: |
| 106 | Place plate on the magnetic stand and wait until the liquid is clear (~5 |
| | minutes) |
| 107 | Transfer 45 μL of supernatant to a new plate. |
| 108 | Add 55 μL RSB to bring volume to 100 uL. |
| 109 | Perform a double-sided bead purification as follows: |
| 110 | Add 30 μL of IPB beads to the sample. |
| 111 | Mix the total reaction volume by gently pipetting at least 10 times and |
| | incubate for 2 minutes at room temperature. |
| 112 | Place on the magnetic stand and wait until the liquid is clear (~5 minutes). |
| 113 | Transfer 127 μl of the clear supernatant in new wells. Discard the remaining |
| | beads. |
| 114 | Add 20 μl of IPB beads to the sample. |
| 115 | Mix the total reaction volume by gently pipetting at least 10 times and |
| | incubate for 2 minutes at room temperature. |
| 116 | Place on the magnetic stand and wait until the liquid is clear (~5 minutes). |
| 117 | Remove and discard all supernatant. |
| 118 | Wash beads as follows: a. keep on the magnetic stand and add 180 μl fresh |
| | 80% EtOH to each well; b. wait 30 seconds; and c. remove and discard all |
| | supernatant. |
| 119 | Briefly spin for 10 seconds and return plate to magnet. |
| 120 | With a 20 μl pipette, remove all residual EtOH. |
| 121 | Dry on magnet for 2 minutes. |
| 122 | Remove from the magnetic stand and add 30 μl RSB to each well. |
| 123 | Pipette mix and incubate at room temperature for 2 minutes. |
| 124 | Place on the magnetic stand and wait until the liquid is clear (~2 minutes). |
| 125 | Transfer 28 μl to a new plate. |
| 126 | Determine the concentration of each purified enrichment product with the |
| | Qubit dsDNA HS Assay Kit. Use 1-2 μl of sample DNA per measurement. |
| 127 | Keep on ice for same day use or store at −20° c. (SAFE STOPPING POINT). |

[0154] Libraries were quantified, normalized and sequenced using standard workflows for libraries. Example additional considerations for quality control, sample index selection and sequencing are provided below.

### Fragment Analysis of Products

| | |
|---|---|
| 128 | Run purified library prep product on appropriate |
| | instrument for fragment analysis. |
| 129 | Record the average fragment length for the purified |
| | library prep product. |

[0155] DNA fragment length: assessing the fragment length profile of the purified bottlenecking PCR product was performed to evaluate the size distribution of long templates as well as to evaluate the final short-read library. To assess the fragment size of the purified bottlenecking PCR product, the following products from Agilent Technologies® were used: Bioanalyzer 2100, TapeStation 4200, and Fragment Analyzer 5300; or equivalent technologies from other providers.

Purified Bottlenecking Product

| | | | Expected average |
|---|---|---|---|
| | | Recommended | fragment length |
| Instrumentation | Kit | Region (bp) | (bp) |
| Bioanalyzer | High Sensitivity | 3,000-10,000 | 7,000-8,000 |
| 2100 | DNA | | |
| Fragment | DNF-464 HS Large | 3,000-49,000 | 7,000-8,000 |
| Analyzer 5300 | Fragment | | |

[0156] The peak template length after bottlenecking PCR was expected to be around 7,000-8,000 bp, with virtually no products below ˜3,000 bp. FIG. 3A illustrates purified bottlenecking PCR product run on an Agilent® Bioanalyzer using a High Sensitivity DNA Kit.

Final Library

| | | Region | Expected average |
|---|---|---|---|
| Instrumentation | Kit | (bp) | fragment length (bp) |
| TapeStation | High Sensitivity | 150-1,500 | 800-900 |
| 4200 | D5000 | | |
| Bioanalyzer | High Sensitivity DNA | 150-1,500 | 800-900 |
| 2100 | | | |

[0157] The peak template length after bottlenecking PCR was expected to be around 800-900 bp. FIG. 3B illustrates purified final library prep product run on an Agilent® Bioanalyzer using a High Sensitivity DNA Kit.

### Sequencing

[0158] The final library or library pool was sequenced on a NGS instrument, generating 2×150 nt paired end reads. The aim was to produce at least 400 Gbp of sequence data for mutated samples targeting 10× long-read coverage of the human genome, or at least 1200 Gbp for 30× coverage. This was in addition to the unmutated reference data that was also required for long read reconstruction.

### Example 2—Effects of Immobilizing Transposomes on Beads at Low Densities

[0159] This example illustrates improved long read coverage by changing initial tagmentation from soluble transposomes to low density bead-linked transposomes (BLT-LR); and changing from an A14/B15 mixture of BLT-LRs to B15 BLT-LR only. Nucleic acid libraries were generated and sequenced with a protocol substantially similar to that of Example 1. Different amounts of input DNA were tested. A protocol using bead-linked transposomes was compared with a protocol using transposomes in solution. As shown in FIGS. 4A-4C, a switch from low concentration soluble transposomes to low-density BLT (BLT-LR) provided increased robustness to changes in transposome:input DNA ratio; and a more uniform coverage with BLT vs. soluble.

[0160] FIG. 5 outlines steps of high molecular weight tagmentation followed by mutagenesis and suppression PCR to enrich for longer fragments.

[0161] Protocols were compared that included (i) soluble transposome (TSM) (0.4 AU/ul); (2) BLT-LR made with A14/B15 (0.1 AU/ul build); or (3) BLT-LR made with B15 only (0.075 AU/ul build). Quality control and sequencing metrics were compared for each protocol.

[0162] As shown in FIGS. 6A-6C, soluble TSM had a greater activity than BLT-LR and soluble TSM created longer fragments than BLT-LRs. A14/B15 could not be melted off of the beads due to 5′ attachment of TDE1. In mutagenesis PCR, A14/B15 BLT provided a lower yield than B15 only (FIGS. 7A-7C). The yield with soluble (NITE) yield was also lower and may have been accounted for because only 50% tag product was taken into PCR; 100% used for BLTs. Fragment sizes of BLT-LR were smaller than with soluble TSM. Average sizes of products were 1-48 kb (FIG. 7B). There were larger fragment lengths with soluble TSM (FIGS. 7B and 7C). In bottleneck (suppression) PCR, yields and fragment sizes were more similar, while BLT-LRs still produced smallest products of ˜8 kb in length (FIG. 8A). Average sizes were 1-48 kb (FIGS. 8B and 8C).

[0163] In a sequencing metrics comparison, GC bias was comparable between soluble and BLT-LR with A14/B15 BLT slightly worse (FIG. 9) A higher N50 was achieved with soluble TSM, slightly higher N50 with B15-only compared to A14/B15, slightly higher N50 (350) with eBLT-L compared to BLT (FIGS. 10A and 10B). Sequencing redundancy, SLR depth, and error rate achieved using with A14/B15 BLT or B1 only BLT were measured. Fraction of bases with no coverage achieved using with A14/B15 BLT or B15 only BLT is depicted in FIG. 11.

[0164] BLT-LRs had better coverage than soluble transposomes (fraction of bases with <0/10× coverage). BLT-LRs created shorter fragments, which generated lower N50s in workflow. N50s were still above 5 kb mark so this decrease in performance was acceptable when paired with better coverage metrics and a more robust tagmentation reaction. B15-only TSM BLTs gave a better yield and lower redundancy than A14/B15 BLTs. The change to B15 BLT-LRs created a more efficient mutagenesis suppression PCR.

### Example 3—Effects of BLT Activity on Fragment Size

[0165] BLT-LR activity was investigated for high molecular weight tagmentation. BLT-LR activity should provide: tagment large fragments to provide for mutagenesis PCR; maximize fragment size, ideally >8 kb; yield >4 ng post-high molecular weight (HMW) tagmentation; reproducibility, ease in QC tested, and good sequence quality. A goal was to maximize fragment size while maintaining good yield and downstream sequencing metrics.

[0166] BLT-LRs having different levels of activity were compared. As transposome activity (AU/ul) decreased, yield decreased and average fragment size increased (FIG. 12).

[0167] BLT-LRs were compared with builds/activities of 0.0025, 0.005, 0.025, 0.05, 0.1, 0.15 AU/ul. N50s were compared. “N50” was the length of the shortest contig for which longer and equal length contigs cover at least 50% of the assembly. Lower build activity maximized N50s but sequencing metrics started to drop at 0.025 AU/ul (FIGS. 13 and 14). There was no apparent cliff-edge on high activity side, but N50s continued to decline, and at 0.075 AU/ul, were well above cliff edge while maximizing N50.

[0168] Results were compared from studies with three different operators testing activities from 0.05 AU/ul to 0.25 AU/ul. Consistent performance between operators was found for BLT-L R activities from 0.05 AU)/ul to 0.25 AU/ul (FIG. 15), A BLT-LR activity of 0.075 AU/ul was chosen for BLT-LR which balanced fragment size and yield. It was found that a fluctuation of +/−100% in activity would still provide good sequencing metrics.

### Example 4—Effects of Quantity of Input DNA

[0169] Changing the amount of input DNA used in the initial HMW tagmentation reaction could impact any of the following: amount of DNA tagmented (test BLT-LR saturation); fragment sizes after initial HMW tagmentation (and downstream); biases in what is tagmented/amplified; sequencing metrics including percent duplicates, redundancy, N50, CC bias. Effects of input DNA quantity were tested for a protocol substantially similar to the workflow of Example 1 for amounts: 1 ng, 3, ng, 5 ng, 10 ng, 20 ng, 30 ng, 50 ng, 100 ng, 300 ng, and 1000 ng. Yield and fragment size plateaued after 20-30 ng of input DNA (FIG. 16). Yields reached maximum around 20 ng of DNA input, fragment sizes were unaffected by increased DNA input (FIG. 17).

[0170] Sequencing was performed for input DNAs of 1 ng, 10 ng, 20 ng and 1000 ng to determine cliff edges for metrics. A workflow with 1 ng input DNA provided slightly higher insert sizes and percent duplicated reads compared to workflows performed with higher amounts of input DNA (FIG. 18). Minimal differences were observed in error rates, read quality, redundancy, or N50s (FIG. 19). Similar coverage across all DNA input amounts were observed with all points within normal variation with a slight decrease in mode coverage as fraction with <0/0× increased (FIG. 20). A very slight increase in GC bias between 60-80% was observed in higher inputs, but well within normal variation (FIG. 21).

[0171] In sum, similar sequencing metrics were observed for input DNA amounts of 1 ng to 1000 ng. Inputs as low as 1 ng were found to work within the workflow. BLT-LR saturated at about 30 ng input; input above 30 ng did not bias coverage. DNA input amounts less than 10 ng resulted in low yields in the workflow. There was a slight increase in percent duplicated reads for 1 ng DNA input.

### Example 5-Effects of Quality of Input DNA

[0172] Effects of input DNA quality was tested for a protocol substantially similar to the workflow of Example 1. Preliminary data indicated that vortexing and up to 3 freeze/thaw cycles for input DNA were tolerated; and FFPE DNA was not suitable, or was too degraded, to be used as input DNA. Input DNA was prepared by shearing for 1, 3, 10, 30 and 60 seconds, and compared to control BLT-LR tagmented DNA and HMW DNA.

[0173] Input DNA was sheared for 1, 3, 10, 30 and 60 seconds. There was a noticeable change in size distribution profile after even 1 second, while Control BLT-LR and HMW DNA gave similar size profiles (FIG. 22). In the tagmentation step of the workflow, 1 second sheared DNA had similar fragment size and yield to control, and >1 second shearing quickly reduced size and yield (FIG. 23). In the mutagenesis step of the workflow, mutagenesis PCR yield sharply reduced at >1 second shearing (FIG. 24A). In the bottlenecking PCR step of the workflow, yield also sharply reduced at >1 second shearing (FIG. 24B). For sequencing metrics, N50s declined and redundancy increased at >3 seconds shearing (FIG. 25). Coverage metrics declined >3 seconds shearing (FIG. 26). GC bias correlated with post-tagmentation sizes (FIG. 27).

[0174] In sum, HMW DNA gave better yields and larger fragment lengths coming out of initial Tagmentation but did not result in final higher N50. Highly sheared DNA (30s or longer) did not amplify well in either PCR step which resulted in not enough DNA to continue with library prep. N50s and coverage/redundancy metrics worsened with DNA sheared >3 seconds. GC bias was impacted by fragment sizes. PCR steps were not suitable for highly degraded DNA, but tolerated mild shearing (1-3 see) reasonably well.

[0175] BLT-LRs were investigated to create large fragment sizes suitable for the workflow outlined in Example 1. B15-only transposomes improved mutagenesis PCR small fragment suppression and overall yield The workflow gave improved coverage of low MapQ regions of the genome. The workflow was robust to changes in DNA input amount. The workflow tolerated mildly sheared DNA, DNA that has been through freeze/thaw, and DNA that had been vortexed.

### Example 6—Enriching for Long Fragments

[0176] A workflow was performed, as described in Example 1, with an added enrichment step. The workflow included: high molecular weight tagmentation; mutagenesis PCR; library normalization; bottlenecking (suppression) PCR; library preparation; fragment analysis of products; and sequencing. FIG. 32 depicts an example workflow which includes enrichment for long fragments. The additional enrichment step for long fragment enrichment of certain fragments was performed on the products of the bottlenecking (suppression) PCR, and prior to the library preparation step. The fragments that were products of the suppression PCR, are referred to as ‘long fragments’ to differentiate them from fragments that are the products of the library preparation step and referred to in Example 7 as ‘short fragments’.

[0177] An example overview and timeline for long fragment enrichment in the workflow is depicted in FIG. 28 and FIG. 29, respectively. The enrichment step included hybridizing the products with selection probes, capturing the products hybridized to the selection probes with bead-linked capture probes, and amplifying the captured products. An example protocol is described below in the following. However, it should be realized that other protocols using similar enrichment for long fragments are contemplated.

### Hybridization

Bring DNA libraries (HYB Plate), EHB2, and probes to RT.
Vortex and briefly spin down EHB2 and probes before use.
NOTE: Vortex EHB2 thoroughly and allow enough time to bring
up to RT.
Ensure that crystals are fully dissolved. Heat tube in hands
if needed.
Preheat NHB2 to 50° C. for 5 m and vortex for 30 sec, ensure
solution is clear and free from precipitate.
NOTE: Vortex NHB2 thoroughly and allow enough time to thaw to RT
and get up to 50° C. prior to use.
Ensure that crystals are fully dissolved. Use while warm to avoid
precipitates from reforming.
Prepare Hyb Master Mix and add 17.5 uL to HYB plate wells. (or add
components individually in order: Library, NHB2, Probes, EHB2)
Pipette mix. Seal HYB plate with Microseal ‘B’.
Centrifuge HYB plate briefly at 280 × g for 30 sec.
Place plate on a thermal cycler and run the LCE HYB program
overnight. (holds at 58° C.)

| | | |
|---|---|---|
| Program name: LCE HYB | Rnx volume: 25μ | Lid: 100° C. |

| Step | Temp | Duration | | Cycles |
|---|---|---|---|---|
| Heat denature | 98° C. | 5 | min | 1 |
| Ramp down | 96° C. | −2° | C./min | 19 |
| | 58° C. | | | |
| Hybridize | 58° C. | 30 | min | 1 |

### Capture

Bring SMB3, EEW, EE1, HP3, ET2, and RSB to RT.
Vortex and briefly spin down ET2, EE1 and HP3 before use.
Vortex EEW and SMB3 thoroughly.
Leave the thermal cycler running at 58 C.
Remove the HYB plate from the thermal cycler.
Centrifuge HYB plate at 280 × g for 30 sec.
Vortex SMB3 thoroughly for 1 min before use.
Add 75 μL of SMB3 to each sample.
Pipette mix 20x
Seal HYB wash plate with Microseal ‘B’
Incubate plate on thermal cycler running at 58° C. for 15 min.
Centrifuge HYB wash plate briefly at 280 × g for 30 sec.
Place on a magnetic stand for 2 min.
While on the magnetic stand, use a pipettor set to 100 μL to
carefully remove and discard the supernatant.

### Post-Hybridization Wash

Vortex EEW thoroughly for 1 min before use.
Vortex and briefly spin down EE1 and HP3 before use.

| | |
|---|---|
| PERFORM | Remove the HYB plate from the magnetic stand |
| 2X | and add 100 μL of EEW to each sample. |
| | Pipette mix to fully resuspend the beads. |
| | Seal HYB wash plate with Microseal ‘B’ |
| | Incubate in a thermal cycler at 58° C. for 10 min. |
| | Place HYB plate on a magnetic stand for 2 min. |
| | While on the magnetic stand, use a pipettor to |
| | carefully remove and discard the supernatant. |

Use a P20 pipettor to remove any residual supernatant from the final
pellet.
Remove HYB plate from magnet.
Add 100 μL EEW to each well.
Pipette mix to fully resuspend the beads.
Transfer 100 μl of resuspended bead solution to a new PCR plate.
Seal HYB wash plate with Microseal ‘B’
Place on the thermal cycler at 58° C. for 5 min.
Turn off thermal cycler at 58° C.
Remove from thermalcycler and place on magnetic stand for 2 min
or until the solution is clear.
Prepare EE1 + HP3 Elution Mix.
Set pipette to 100 μL and discard all supernatant from each well.
Centrifuge at 280 × g for 30 sec then return to magnet for 10 sec.
Use a P20 pipettor to remove any residual supernatant.
Immediately proceed to Elution to prevent excessive drying of beads.

### Elution

Vortex and briefly spin down ET2 before use.
Vortex EE1 + HP3 Elution Mix to mix well.
Remove the HYB plate from the magnetic stand and add 23 μL
of EE1 + HP3 Elution Mix.
Pipette mix to fully resuspend the beads.
Incubate at RT for 2 min.
Centrifuge at 280 × g for 30 sec.
Place on a magnetic stand for 2 min.
Add 4 μL of ET2 to a new 96-well PCR plate to wells corresponding
to sample layout.
Label the plate, “ELU plate”.
Carefully transfer 21 μL of eluate from the HYB wash plate to
corresponding wells of ET2 in the ELU plate.
Set pipette to 20 μL and gently pipette mix each well 10 times.
Centrifuge at 280 × g for 30 sec.

Enriched library PCR

Bring MM reagents to RT.
Prepare RED Master Mix. Mix and spin.
Briefly spin down ELU plate to collect condensation if
needed.
Pipette mix.
Seal ELU plate with Microseal ‘B’
Briefly spin down plate to collect droplets.
Place plate on a thermal cycler and run the SYD_EN PCR
program.
(# cycles depends on Probe Panel used)
(same PCR conditions as Bottleneck PCR)

Enrichment PCR

| | | |
|---|---|---|
| Step | Temperature | Time |

| | |
|---|---|
| 1 | PCR cycles (depend on panel) |

| | | |
|---|---|---|
| 98° C. | 10 | s |
| 68° C. | 10 | min |

| | | |
|---|---|---|
| 3 | 4° C. | Hold |

### PCR Clean Up

Bring IPB and RSB to RT for at least 30 min.
Prepare fresh 80% EtOH wash solution as follows. Vortex to mix well.
Remove ELU plate from thermocycler. Briefly spin down PCR plate to collect droplets.
Vortex IPB to resuspend the beads.
Add 30 ul of IPB beads to each well.
Mix the total reaction volume by gently pipetting at least 10 times and incubate for 2 minutes at
room temperature.
Place on the magnetic stand and wait until the liquid is clear (~5 minutes)
Remove and discard all supernatant
Wash beads as follows: a. Keep on the magnetic stand and add 180 μl fresh 80% EtOH to each
well; b. Wait 30 seconds; and c. Remove and discard all supernatant
Repeat wash for a total of 2 washes.
Briefly spin for 10 seconds and return plate to magnet.
With a 20 μl pipette, remove all residual EtOH.
Dry on magnet for 2 minutes.
Remove from the magnetic stand and add 25 μl RSB to each well.
Pipette mix and incubate at room temperature for 2 minutes.
Place on the magnetic stand and wait until the liquid is clear (~2 minutes).
Transfer 24 μl supernatant to a new plate.
Keep on ice for same day use or store at −20° c. (SAFE STOPPING POINT).
Determine the concentration of each purified recovery product with the Qubit dsDNA HS Assay
Kit. Use 1-2 μl of sample DNA per measurement.
Proceed with 50 ng to BLT prep (next tab)

### Example 7—Enriching for Short Fragments

[0178] A workflow was performed as described in Example 1, and included an enrichment step for short fragments. The workflow included: high molecular weight tagmentation; mutagenesis PCR; library normalization; bottlenecking (suppression) PCR; library preparation; fragment analysis of products; and sequencing. The additional enrichment step for short fragment enrichment of certain fragments was performed on the products of the library preparation step. An example overview and timeline for short fragment enrichment in the workflow are depicted in FIG. 28 and FIG. 29, respectively. Of course, other workflows for such short fragment enrichment are also contemplated.

[0179] The enrichment step included hybridizing the products with selection probes, capturing the products hybridized to the selection probes with bead-linked capture probes, and amplifying the captured products. The enrichment step was substantially the same as that performed in Example 6.

### Example 8—Selection of Probes for Under-Represented Genomic Regions

[0180] This example relates to the generation and use of selection probes to enrich for regions of the genome including those which are typically under-represented in whole genome sequencing methods. Such regions of the genome may provide sequencing data that are systematically impacted by lower quality—such as elevated error rates, low mapping quality or depth anomalies—may fail to deliver consistently accurate variant calls even for SNVs and indels. Many of the reference characteristics that cause these systematic errors are well known, such as, highly repetitive regions have poor mapping quality and homopolymers are known to result in low base accuracy. This knowledge has been used to classify the genome into ‘easy’ and ‘difficult’ regions (Krusche P, et al. Nat Biotechnol. 2019; 37:555-560). Though these classifications can be helpful, they are not a perfect representation of the actual performance within these regions. For example, a large segmental duplication may be comprised of regions of high and low similarity, leading to very different variant calling accuracy.

[0181] Selection probes for use to enrich for targets in long fragments were identified by methods which included: selecting target regions of the genome; designing a probe set within the target regions; and identifying suitable probes within the probe set to generate a panel of selection probes. Briefly, for a panel that was focused on under-represented regions of the genome, target regions included those with low mappability (non-unique) portions of protein-coding regions, including introns and untranslated regions (JTRs). Such regions included those having a low mapping quality score (MAPQ) score, less than 50, in the HG38 reference sequence of the human genome; and those represented in the RefSeq database which includes non-redundant, well-annotated set of sequences, including genomic DNA and transcripts. MAPQ scores quantify the probability that a sequencing read is misplaced in a reference sequence (Li H, et al. (2008) Genome Research 18:1851-8). More regions of interest included certain groups of genes and regions of the genome. Examples included: (i) protein coding regions with low mappability, e.g., low mappability RefSeq sequences; (ii) CMRG genes, e.g., Wagner J., et al., (2022) Nat Biotechnol. 40: 672-680; (iii) deCODE Icelandic dark matter regions; (iv) regions with short tandem repeats (STR), e.g., Stevanovski I., et al., Sci Adv. 2022 March; 8(9): eabm5386; (v) MHC locus; (vi) ACMG genes; (vii) regions reported in Wenger A. M., et al., (2019) Nat Biotechnol. 37:1155-1162; and (viii) PGX genes.

[0182] Probe sets were designed to hybridize within such target regions using software tools including DESIGNSTUDIO (Illumina, Inc., San Diego). Probes were designed to hybridize to target regions having about 1 kb+/−0.2 kb between corresponding sequences in the linear reference sequence. A 400 bp window centered around the 1 kb target spacing was searched. Within the 400 bp window, probes were identified using several parameters including GC bias (e.g. <25% to <75%) and uniqueness or hits in the genome. Suitable probes were predicted to hybridize or to hit less than 20 other regions of the reference genome. A hit was at least 80 consecutive bps of the 120 bp probes match >90%. 198,451 probes were identified. As depicted in FIG. 30, selection probes were identified having increased specificity for a target fragment.

[0183] In an example selection process for a fixed panel, probes were selected using the following steps: (1) Target regions were selected based on several inputs, including focusing on low mappability (non-unique) portions of protein-coding regions (including introns and JTRs), and certain identified groups of genes and genomic regions including: A CMG genes, CMRG genes, PGX genes, MHC locus, deCODE Icelandic dark matter regions. (2) Probes were designed to capture the above regions, aiming for about 1000 bp spacing between probes with the following sub-steps (2A)-(2D). (2A) To select better probes, 500 bp spacing was initially used. This provided two opportunities to find good probes for each region, which was useful to maximize the power of the data in a limited time. (2B) To achieve 1000 bp spacing, the algorithm jumped from one probe to the next in 1000 bp increments, but allowed a window of +/−200 bp to find the ‘best’ probe. (2C) There were multiple parameters within that window to find the ‘best’ probe. Mostly these were typical parameters such as CT content. However, a primary parameter for the panel was number of hits in the genome (minimize this number), and requirements on this parameter were relaxed to permit selection of probes in all regions. (2D) Probes were manufactured as double stranded DNA 80-mers or 120-mers. (3) At least 2 probes were selected per region, even for ‘small’ regions (e.g. 1000 bp, where 1 probe may target based on the above). (4) After probe selection was complete, additional rounds of selection were performed, based on the following sub-steps (4A)-(4D). (4A) Discarding region types that did not belong in the panel, for example, regions that were not low mappability portions of protein-coding regions. (4B) Discarding regions that were identified as “failed to cover” using the following sub-steps. (41B)(i). Regions that “failed to cover” included those that neither of the two panel designs covered at least half of the region 5×. This was calculated from the median of many samples, each with mean coverage in the 30× range. (4B)(ii) There were two designs for this panel which provided a choice of which probes to keep. ‘Panel A’ was kept as a default, because it had more replicates and typically saw better coverage overall, and slightly more probes were in this panel. ‘Panel B’ was kept if panel B gave at least 20% better coverage (calculated by fraction of bases covered >10×). (4C) To be even more rigorous about probes that hit multiple times in the genome, all probes were discarded that hit at least 20 times elsewhere in the genome. A hit included at least 50 consecutive bps of the 120 bp probes match >90%. This resulted in some gaps larger than desired. If there was a gap:>1.5 kb or a region with a single probe, the other panel was examined probes from the other panel were added to cover those gaps. (4D) Any corrections that were needed were then made to align probes with coordinates of genomic sequences.

[0184] Additional “spike in” probes were identified in target regions using the following steps. Gaps between probes were identified in the remaining target regions that were larger than 1.5 kb, and target regions were identified that had gaps of larger than 1.5 kb between the first or last remaining probe and the target region start or stop location on the chromosome. For each identified 1.5 kb gap, unselected probes which targeted the region from panel A or panel B were identified and selected to fill the gap, making sure that such selected probes did not bind excessively (more than 20 times) in other parts of the genome. Separately, target regions were identified that were left with a single probe after going through the previous selection criteria. Targets could be left with a single probe because all the other probes assigned to that target region were liable to bind to >20 other places in the genome and had been removed, or because many target regions only had one probe from each uber panel A and uber panel B and only one of the panel batches to use for those targets had been picked. For these single-probe targets, unpicked probes were added that hit that same target from the non-picked panel, provided that those probes were also not labeled to bind excessively in other parts of the genome and that those probes had also met the same coverage criteria in the previous steps. Initial probe panels including ‘Uber A’ and ‘Uber B’ were generated. Probes within these panels were excluded with criteria that included having at least 20 hits in the genome, to generate a ‘final’ panel. TABLE 2A summarizes steps used to generate different batches of selections probes using steps described above.

TABLE 2A

| Step included | Batch | | | | |
|---|---|---|---|---|---|
| in batch | | | Uber A and | First | Second |
| generation | Final | Spike-in | Uber B | order | order |
| (1) | Yes | Yes | Yes | Yes | Yes |
| (2A) | Yes | Yes | Yes | Yes | Yes |
| (2B) | Yes | Yes | Yes | Yes | Yes |
| (2C) | Yes | Yes | Yes | Yes | Yes |
| (2D) | Yes | Yes | Yes | Yes | Yes |
| (3) | Yes | Yes | Yes | Yes | Yes |
| (4A) | Yes | Yes | No | No | No |
| (4B)(i) | Yes | Yes | No | No | No |
| (4B)(ii) | Yes | Yes | No | No | No |
| (4C) | Yes | No | No | No | No |
| (4D) | Yes | Yes | No | No | No |

[0185] TABLE 2B lists certain probes generated by the foregoing methods.

TABLE 2B

| | Characteristic | | |
|---|---|---|---|
| | Size | Approx spacing | No of |
| Batch | (bases) | in genome (kb) | probes |
| Final | 120 | 1 kb | 39953 |
| Uber A | 120 | 1 kb | 81325 |
| Spike-in | 120 | 1 kb | 1491 |

[0186] A series of selection probe panels were developed using methods substantially similar to the foregoing methods. Panels included: (1a) uber A: (1b) uber B; (2) intermediate/dev; and (3) final. Panels (1)-(3) were progressive iterations of a selection probe panel. The panels were used to prepare libraries with a method with long fragments with enrichment, and substantially similar to the WGS with enrichment workflow depicted in FIG. 32. A control included a library prepared with a method with long fragments, without enrichment, substantially similar to the WGS workflow depicted in FIG. 32. TABLE 2C lists certain metrics for data obtained using each method/panel which show that in methods that included enrichment, compared to methods without enrichment, median coverage levels and N50 values were much greater despite a smaller number of paired end reads.

TABLE 2C

| | With enrichment | | | | | Without |
|---|---|---|---|---|---|---|
| | Panel | Panel | Panel | Panel | Panel | enrichment |
| Metric | (1a) | (1a) | (1b) | (2) | (3) | None |
| Level of input reads | Low | High | High | Low | Low | High |
| (# paired end reads) | 1.0E+09 | ~5E+09 | ~3E+09 | 6.0E+08 | 5.9E+08 | 5.4E+09 |
| target region size (Mbp) | 76 | 76 | | 40 | 40 | N/A |
| median coverage | 32.2 | 72.2 | 67.5 | 34.4 | 41.9 | 27.3 |
| percent bases with no | 5.2% | 2.3% | 3.7% | 2.3% | 2.4% | 2.0% |
| coverage | | | | | | |
| percent bases with less | 20.1% | | | 15.3% | 12.3% | 11.5% |
| than 10x coverage | | | | | | |
| N50 (bp) | 6089 | 4198 | 4192 | 6677 | 7116 | 7054 |
| percent reads on target | 72% | | | 85% | 85% | N/A |
| f-measure non-SNP type 2 | 0.737 | 0.784 | 0.732 | 0.841 | 0.841 | 0.881 |
| f-measure SNP type 2 | 0.885 | 0.902 | 0.882 | 0.905 | 0.911 | 0.947 |
| precision non-SNP type 2 | 0.841 | 0.878 | 0.847 | 0.848 | 0.869 | 0.889 |
| precision SNP type 2 | 0.923 | 0.92 | 0.892 | 0.952 | 0.947 | 0.96 |
| sensitivity non-SNP type 2 | 0.656 | 0.709 | 0.644 | 0.834 | 0.814 | 0.874 |
| sensitivity SNP type 2 | 0.849 | 0.884 | 0.872 | 0.863 | 0.879 | 0.934 |

[0187] The data in TABLE 2C show that in methods that included enrichment, compared to methods without enrichment, median coverage levels and N50 values were much greater despite a smaller number of input paired end reads.

### Example 9—Major Histocompatibility Complex (MHC) Panel

[0188] The MHC region is a large locus located on the short arm of human chromosome 6 (6p21.1-6p21.3), and contains highly polymorphic genes that code for cell surface proteins, essential for the adaptive immune system. The region is challenging to obtain sequence information due to presence of high level of repetitive sequences, sequence homology, pseudo genes, and a wide variety of alleles in the population. Precise genotyping and phasing of the MHC region is challenging but highly clinically desirable for applications like organ transplantation and drug discovery.

[0189] Panels of selection probes were prepared which targeted approximately 5 Mbp of the MHC region. A first panel of selection probes was designed such that probes were spaced about 230 bp from one another on the HG38 reference sequence of the MHC region. Probe sequences were designed to hybridize within the target region using software tools, DESIGNSTUDIO (Illumina, Inc., San Diego). Potential probe sequences were evaluated by several criteria including number of hits within the genome, and percentage GC content. Probes having more than about 20 hits within the genome were discarded. A second panel of selection probes was prepared such that probes would be spaced about 1 kb from one another on a reference sequence of the MHC. The second panel was prepared by removing probes from the first panel. Probes included 80-mers and 120-mers. A batch of clinical probes was designed by a method including: targeting a 1 kb window in a reference sequence; identifying potential probes within the 1 kb using software tools, DESIGNSTUDIO (Illumina, Inc., San Diego); selecting a probe within the 1 kb based on criteria including less than 20 hits within the reference genome, and GC content. A hit included probes having at least 90% sequence identity along the full length of the probe with a target complement in the reference sequence. TABLE 3A lists probes generated by the foregoing methods.

TABLE 3A

| | Oligo characteristic | | | |
|---|---|---|---|---|
| | Size | Approx spacing | | No of |
| Batch | (bases) | in genome | | probes |
| Clinical | 120 | 1 | kb | 4966 |
| Final design | 120 | 1 | kb | 5153 |
| Final design | 80 | 1 | kb | 5155 |
| Input4_120_designs | 120 | 230 | bp | 21608 |
| Input4_120_designs | 80 | 230 | bp | 21608 |

[0190] The panels were used to prepare libraries with a method with long fragments and enrichment, and substantially similar to the WGS with enrichment workflow depicted in FIG. 32. Use of the MHC probe panel generated highly specific and efficient enrichment over the target region, with 98.3% long-reads on-target. FIG. 34 depicts an example of coverage for the targeted region. TABLE 3B lists certain sequencing metrics.

TABLE 3B

| Parameter | MHC panel |
|---|---|
| Read N50 | 5932 |
| Error Rate | 0.71% |
| Mean Coverage | 43.05 |
| %0 Coverage | 1.06% |
| % Low Coverage (1-3X) | 0.64% |
| % On Target Reads | 98.3% |

[0191] Use of the MHC selection probe panel resolved haplotype in polymorphic genes. Phasing worked well with use of the MHC probe panel in methods with long fragments and enrichment (e.g. WGS with enrichment workflow depicted in FIG. 32), and was comparable to such methods without enrichment (e.g. WGS without workflow depicted in FIG. 32). TABLE 3C lists certain sequencing metrics. As depicted in FIG. 35, a 722 kb region in the MHC locus was analyzed, and a 580 kb region was encapsulated in one phase block. As depicted in FIG. 36, a 426 kb region in the MHC locus that covered HLA-A, HLA-G, HLA-F, was fully phased.

TABLE 3C

| Parameter | MHC panel |
|---|---|
| % Biallelic Het SNVs Phased | 95.88% |
| Block N50 | 274,215 |
| Switch Error Rate | 0.14% |

[0192] Use of the MHC selection probe panel achieved accurate variant calling in the MHC region. FIG. 37A depicts a graph for SNV precision vs SNV recall for sequence information obtained from nucleic acid libraries prepared by (1) on market long read kits; (2) short read (SR) PCR-free sequencing methods, such as those including simple tagmentation of gDNA; (3) method with long fragments and enrichment, such as the WGS with enrichment workflow depicted in FIG. 32 (1CLR-MHC enrichment); and (4) method with long fragments without enrichment, such as the WGS workflow depicted in FIG. 32 (ICLR-WGS). Use of the MHC panel with long fragment with enrichment methods achieved levels of SNV precision greater than methods without enrichment.

[0193] FIG. 37B depicts a graph for INDEL precision vs INDEL recall for sequence information obtained from nucleic acid libraries prepared by (1) on market long read kits; (2) PCR-free methods; (3) method with long fragments and enrichment, such as the WGS with enrichment workflow depicted in FIG. 32 (ICLR-MHC enrichment); and (4) method with long fragments without enrichment, such as the WGS workflow depicted in FIG. 32 (ICLR-WGS). Use of the MHI C panel with long fragment with enrichment methods achieved levels of indel precision greater than methods without enrichment.

### Example 10—American College of Medical Genetics (ACMG) Panel

[0194] A selection probe panel was generated from a list of genes compiled by ACMG for which specific mutations are known to be causative of disorders that are clinically actionable. The panel was designed to precisely call variants and phase in these genes. The panel included 78 unique genes in ACMG SF v3.1 and targeted full genes. The panel size was about 6.8 Mbp. The ACMG genes included those listed in TABLE 1A.

[0195] Panels of selection probes were prepared which targeted the ACMG genes. A first panel of selection probes was designed such that probes were spaced about 230 bp from one another on the HG38 reference sequence of the ACMG genes. Probe sequences were designed to hybridize within the target region using software tools, DESIGNSTUDIO (Illumina, Inc., San Diego). Potential probe sequences were evaluated by several criteria including number of hits within the genome, and percentage GC content. Probes having more than about 20 hits within the genome were discarded. A second panel of selection probes was prepared such that probes would be spaced about 1 kb from one another on a reference sequence of the ACMG genes. The second panel was prepared by removing probes from the first panel. Probes included 80-mers and 120-mers. A batch of clinical probes was designed by a method including: targeting a 1 kb window in a reference sequence; identifying potential probes within the 1 kb using software tools, DESIGNSTUDIO (Illumina, Inc., San Diego); selecting a probe within the 1 kb based on criteria including less than 20 hits within the reference genome, and GC content. A hit included probes having at least 90% sequence identity along the full length of the probe with a target complement in the reference sequence. TABLE 4A lists probes generated by the foregoing methods.

TABLE 4A

| | Characteristic | | | |
|---|---|---|---|---|
| | Size | Approx spacing | | No of |
| Batch | (bases) | in genome | | probes |
| Clinical 1 kb | 120 | 1 | kb | 6935 |
| 120mer_1 kb_Optimized- | 120 | 1 | kb | 7513 |
| Final | | | | |
| 80mer_1 kb_Optimized- | 80 | 1 | kb | 7520 |
| Final | | | | |
| Clinical 230 bp | 120 | 230 | bp | 29954 |
| ACMG_120mer_designs | 120 | 230 | bp | 29954 |
| ACMG_80mer_designs | 80 | 230 | bp | 29954 |

[0196] Use of the ACMG selection probe panel was highly effective and achieved comparable coverage performance with long read whole genome sequencing methods without the use of the panel (FIG. 38) TABLE 4B lists certain sequencing metrics

TABLE 4B

| Parameter | ACMG panel |
|---|---|
| Read N50 | 7497 |
| Error Rate | 0.26% |
| Mean Coverage | 59.47 |
| %0 Coverage | 0.04% |
| % Low Coverage (1-3X) | 0.22% |
| % On Target Reads | 87.4% |

[0197] 99.5% of heterozygous SNVs were phased using the ACMG panel. For example, as depicted in FIG. 39, TNNT2, a 22 kb gene was fully phased in one phase block. TABLE 4C lists certain sequencing metrics. Phasing metrics were in target genes only, hence a shorter block N50.

TABLE 4C

| Parameter | ACMG panel |
|---|---|
| % Biallelic Het SNVs Phased | 99.5% |
| Block N50 | 85841 |
| Switch Error Rate | 0.17% |

[0198] 99% of heterozygous SNVs were phased using the ACMG panel. For example, as depicted in FIG. 40A for APOB and in FIG. 40B for TMEM127, genes were fully phased in one phase block.

[0199] Use of the ACMG panel covered and phased highly repetitive MSH6 (70,76% contains repeat elements), and enrichment achieved comparable coverage and phasing compared to long read whole genome sequencing methods without the use of the panel (FIG. 41), 27 kb was fully encapsulated in one phase block. Use of the ACMG panel covered and phased highly repetitive NF2 (45% contains repeat elements), and enrichment achieved comparable coverage and phasing compared to long read whole genome sequencing methods without the use of the panel. 99 kb was fully encapsulated in one phase block.

[0200] Use of the ACMG selection probe panel achieved highly accurate variant calling in the ACMG. FIG. 42A depicts a graph for SNV precision vs SNV recall for sequence information obtained from nucleic acid libraries prepared by (1) on market long read kits; (2) PCR-free methods; (3) method with long fragments and enrichment, such as the WGS with enrichment workflow depicted in FIG. 32 (ICLR-ACMG enrichment); and (4) method with long fragments without enrichment, such as the WGS workflow depicted in FIG. 32 (ICLR-WGS). Use of the ACMG panel with long fragment with enrichment methods achieved levels of SNV precision greater than methods without enrichment. FIG. 42B depicts a graph for INDEL precision vs INDEL recall for sequence information obtained from nucleic acid libraries prepared by (1) on market long read kits; (2) PCR-free methods; (3) method with long fragments and enrichment, such as the WGS with enrichment workflow depicted in FIG. 32 (ICLR-ACMG enrichment); and (4) method with long fragments without enrichment, such as the WGS workflow depicted in FIG. 32 (ICLR-WGS). Use of the ACMG panel with long fragment with enrichment methods achieved levels of indel precision and indel recall greater than methods without enrichment.

### Example 11—Pharmacogenetic (PGX) Panel

[0201] A selection probe panel was generated for genes commonly targeted by pharmacogenetic testing assays. Genetic variation is known to influence the way individual respond to therapeutics. Accurately detecting functional haplotypes (“star alleles”) in clinically actionable pharmacogenetic genes is crucial to implementation of personalized medicine. The panel was generated to achieve highly accurate genotyping and star allele calling in such genes. The panel included 98 genes that are important in pharmacogenetics, targeting full genes. The panel size was about 8.1 Mbp. The genes included those listed in TABLE 1B.

[0202] Panels of selection probes were prepared which targeted the PGX genes. A first panel of selection probes was designed such that probes were spaced about 230 bp from one another on the HG38 reference sequence of the PGX genes. Probe sequences were designed to hybridize within the target region using soft are tools, DESIGNSTUDIO (Illumina, Inc., San Diego). Potential probe sequences were evaluated by several criteria including number of hits within the genome, and percentage GC content. Probes having more than about 20 hits within the genome were discarded. A second panel of selection probes was prepared such that probes would be spaced about 1 kb from one another on a reference sequence of the PGX genes. The second panel was prepared by removing probes from the first panel. Probes included 80-mers and 120-mers. A batch of clinical probes was designed by a method including: targeting a 1 kb window in a reference sequence; identifying potential probes within the 1 kb using software tools, DESIGNSTUDIO (Illumina, Inc., San Diego); selecting a probe within the 1 kb based on criteria including less than 20 hits within the reference genome, and GC content. A hit included probes having at least 90% sequence identity along the full length of the probe with a target complement in the reference sequence. TABLE 5A lists probes generated by the foregoing methods.

TABLE 5A

| | Characteristic | | | |
|---|---|---|---|---|
| | Size | Approx spacing | | No of |
| Batch | (bases) | in genome | | probes |
| Clinical 1 kb | 120 | 1 | kb | 8153 |
| PGX_80mer_1 kb | 80 | 1 | kb | 8693 |
| PGX_80mer_230 bp | 80 | 230 | bp | 35205 |
| PGX_80mer_230bp_v1 | 80 | 230 | bp | 33089 |

[0203] TABLE 5B lists certain sequencing metrics for methods with long fragments and enrichment with the PGX panel, and shows highly effective target region coverage.

TABLE 5B

| Parameter | PGx panel |
|---|---|
| Read N50 | 7279 |
| Mean Coverage | 57.17 |
| %0 Coverage | 0.12% |
| % Low Coverage (1-3X) | 0.32% |
| % On Target Reads | 88.3% |

[0204] Star Alleles are a nomenclature system used to describe allelic variation. In the case of PGX genes, star alleles describe haplotype patterns associated with protein-level interactions, with * 1 usually referring to the wild-type or “fully-functional” haplotype. TABLE 5C lists star alleles called by methods which include long fragments, and enrichment (ICLR PGX enrichment) which were 100% concordant with on market long read methods.

TABLE 5C

| Gene | ICLR PGx Enrichment | On-market Long Reads |
|---|---|---|
| CYP2C19 | *1.002, *1.002 | *1.002, *1.002 |
| CYP2C8 | *1.001, *1.004 | *1.001, *1.004 |
| CYP2C9 | *1.001, *1.001 | *1.001, *1.001 |
| CYP2E1 | *1.002, *7.002 | |
| CYP2J2 | *1.001, *1.001 | *1.001, *1.001 |
| CYP3A4 | *1.002, *1.002 | *1.002, *1.002 |
| CYP3A5 | *3.001, *3.001 | *3.001, *3.001 |
| CYP3A7 | *1.001, *1.001 | *1.001, *1.001 |
| CYP4F2 | *1.001, *4.1001 or | *1.001, *4.1001 or |
| | *2.001, *3.001 | *2.001, *3.001 |
| NUDT15 | *1.001, *1.001 | *1.001, *1.001 |
| SLCO1B1 | *1.002, *1.002 | *1.002, *1.002 |
| TPMT | *1.001, *1.001 | *1.001, *1.001 |
| UGT1A1 | *1, *1 | *1, *1 |

[0205] Use of the POX selection probe panel achieved highly accurate variant calling in the PGX genes. FIG. 43A depicts a graph for SNV precision vs SNV recall for sequence information obtained from nucleic acid libraries prepared by (1) on market long read kits; (2) PCR-free methods; (3) method with long fragments and enrichment, such as the WGS with enrichment workflow depicted in FIG. 32 (ICLR-PGX enrichment); and (4) method with long fragments without enrichment, such as the WGS workflow depicted in FIG. 32 (ICLR-WGS). Use of the PGX panel with long fragment with enrichment methods achieved levels of SNV precision and indel recall greater than methods without enrichment. FIG. 43B depicts a graph for INDEL precision vs INDEL recall for sequence information obtained from nucleic acid libraries prepared by (1) on market long read kits; (2) PCR-free methods: (3) method with long fragments and enrichment, such as the WGS with enrichment workflow depicted in FIG. 32 (ICLR-PGX enrichment); and (4) method with long fragments without enrichment, such as the WGS workflow depicted in FIG. 32 (ICLR-WGS). Use of the PGX panel with long fragment with enrichment methods achieved levels of indel precision and indel recall greater than methods without enrichment.

### Example 12—Challenging Medically Relevant Genes (CMRG) Panel

[0206] A selection probe panel was generated for genes that are medically relevant autosomal genes that are excluded from the GiaB v4.2.1 variant benchmark due to repeats or polymorphic complexities (Wagner J., et al, (2022) Nat Biotechnol. 40: 672-680). These genes have <90% bases included in the benchmark and pose a challenge for their accurate analysis in a clinical setting. The selection probe panel was generated to rescue coverage gap in these genes. The panel targeted 389 genes, with a panel size of 22.5 Mbp. The average overlap with repeat: 36.6%, and the average overlap with segdup was 19.7%. The genes include those listed in TABLE 1C.

[0207] Panels of selection probes were prepared which targeted the CMRG genes. A first panel of selection probes was designed such that probes were spaced about 230 bp from one another on the HG38 reference sequence of the CMRG genes. Probe sequences were designed to hybridize within the target region using software tools, DESIGNSTUDIO (Illumina, Inc., San Diego). Potential probe sequences were evaluated by several criteria including number of hits within the genome, and percentage GC content. Probes having more than about 20 hits within the genome were discarded. A second panel of selection probes was prepared such that probes would be spaced about 1 kb from one another on a reference sequence of the CMRG genes. The second panel was prepared by removing probes from the first panel. Probes included 80-mers and 120-mers. A batch of clinical probes was designed by a method including: targeting a 1 kb window in a reference sequence; identifying potential probes within the 1 kb using software tools, DESIGNSTUDIO (Illumina, Inc., San Diego); selecting a probe within the 1 kb based on criteria including less than 20 hits within the reference genome, and GC content. A hit included probes having at least 90% sequence identity along the full length of the probe with a target complement in the reference sequence. TABLE 6A lists probes generated by the foregoing methods.

TABLE 6A

| | Characteristic | | | | |
|---|---|---|---|---|---|
| | | Approx | | | |
| | Size | spacing | | No of | |
| Batch | (bases) | in genome | | probes | SEQ ID NOs. |
| Clinical | 120 | 1 | kb | 22545 | 02-22546 |
| CMG_80mer_1 kb | 80 | 1 | kb | 21333 | 22547-43879 |
| CMG_80mer_230 bp | 80 | 230 | bp | 96721 | 43880-140600 |

[0208] Methods using long fragments with enrichment with either the first selection panel (230 bp spacing), or the second selection panel were compared. As depicted in FIG. 44A, use of the second selection probe panel (SYD-C2-CMRG-1 kb) compared to use of the first selection probe panel (SYD-C2-CMRG-230 bp), resulted in increased identification in sequence data for (i) total mutations in bases in region; (ii) percentage DUP mutant reads; and (iii) percentage on target unique mapped reads. FIG. 44B compares normalized coverage between use of the first selection probe panel (SYD-C2-CMRG-230 bp) and the second selection probe panel (SYD-C2-CMRG-1 kb).

[0209] Coverage of certain genes, including CFC1, HBG1, OR51A2, RGPD3, and CYP4F3 was compared using methods with long fragment and enrichment (ICLR with enrichment), methods with long fragments without enrichment (ICLR WGS), and PCR free short reads (SR). FIG. 44C depicts an example with respect to HBG1 and shows that enrichment with the CMRG panel rescued a SR coverage dip in the gene. With regard to other genes, for CFC1, enrichment with the CMRG panel increased coverage in the gene. For HBG1, enrichment with the CMRG panel rescued a SR coverage dip in the gene. For OR51A2, enrichment with the CMRG panel rescued a SR coverage gap in the gene. For the RGPD3 gene, enrichment with the CMRG panel rescued an SR coverage dip in the gene. For the CYP4F3 gene, enrichment with the CMRG panel resolved SVs missed by SR in the gene.

[0210] TABLE 6B lists certain metrics which shows that methods with long fragments and enrichment with the CMRG panel achieved highly effective target region coverage.

TABLE 6B

| Parameter | CMRG panel |
|---|---|
| Read N50 | 6432 |
| Mean Coverage | 47.68 |
| %0 Coverage | 2.74% |
| % Low Coverage (1-3X) | 0.92% |
| % On Target Reads | 80.5% |

[0211] Use of the CMRG selection probe panel achieved highly accurate variant calling in the CMRG genes. FIG. 45A depicts a graph for SNV precision vs SNV recall for sequence information obtained from nucleic acid libraries prepared by (1) on market long read kits; (2) PCR-free methods; (3) method with long fragments and enrichment, such as the WGS with enrichment workflow depicted in FIG. 32 (ICLR-CMRG enrichment); and (4) method with long fragments without enrichment, such as the WGS workflow depicted in FIG. 32 (ICLR-WGS). FIG. 45B depicts a graph for INDEL precision vs INDEL recall for sequence information obtained from nucleic acid libraries prepared by (1) on market long read kits; (2) PCR-free methods; (3) method with long fragments and enrichment, such as the WGS with enrichment workflow depicted in FIG. 32 (ICLR-CMRG enrichment); and (4) method with long fragments without enrichment, such as the WGS workflow depicted in FIG. 32 (ICLR-WGS).

[0212] The term “comprising” as used herein is synonymous with “including,” “containing,” or “characterized by,” and is inclusive or open-ended and does not exclude additional, unrecited elements or method steps.

[0213] The above description discloses several methods and materials of the present invention. This invention is susceptible to modifications in the methods and materials, as well as alterations in the fabrication methods and equipment. Such modifications will become apparent to those skilled in the art from a consideration of this disclosure or practice of the invention disclosed herein. Consequently, it is not intended that this invention be limited to the specific embodiments disclosed herein, but that it cover all modifications and alternatives coming within the true scope and spirit of the invention.

[0214] All references cited herein, including but not limited to published and unpublished applications, patents, and literature references, are incorporated herein by reference in their entirety and are hereby made a part of this specification. To the extent publications and patents or patent applications incorporated by reference contradict the disclosure contained in the specification, the specification is intended to supersede and/or take precedence over any such contradictory material.

1.-101. (canceled)

102. A method for preparing a nucleic acid library, comprising:
(a) obtaining a plurality of transposomes comprising transposon adaptors, wherein the plurality of transposomes is immobilized on a plurality of beads;
(b) contacting a plurality of nucleic acid fragments with the plurality of transposomes to obtain a plurality of polynucleotides;
(c) amplifying the plurality of polynucleotides to obtain amplified polynucleotides by:
(i) performing a mutagenesis PCR, such that mutations are introduced into amplified polynucleotides, and
(ii) performing a suppression PCR; and
(d) adding library adapters to each end of the amplified polynucleotides, thereby obtaining the nucleic acid library;
further comprising enriching for target polynucleotides in (i) the plurality of polynucleotide, (ii) the amplified polynucleotides, and/or (iii) nucleic acids of the nucleic acid library by hybridizing a plurality of selection probes to the target polynucleotide; wherein the selection probes of the plurality of selection probes comprise at least 50 different nucleotide sequences;
wherein each selection probe of the plurality of selection probes comprises a nucleotide sequence capable of hybridizing to a gene selected from TABLE 1C; and/or a nucleotide sequence within no more than 10 kbp 5′ or no more than 10 kbp 3′ of a gene in a human genome selected from TABLE 1C.

103. The method of claim 102, wherein each selection probe of the plurality of selection probes comprises a nucleotide sequence having at least 90% sequence identity to any one of SEQ ID NOs:02-140601.

104. The method of claim 102, wherein the plurality of selection probes is attached to a substrate.

105. The method of claim 102, further comprising amplifying the target polynucleotides.

106. The method of claim 102, wherein the plurality of the transposomes is immobilized on the plurality of beads:
(i) at a density such that an average length of the plurality of polynucleotides is greater than about 1 kbp, and/or the average length of the plurality of polynucleotides is in a range from about 1 kbp to about 40 kbp;
(ii) such that the number of transposomes immobilized on the plurality of beads is no more than about 100 transposomes per bead;
(iii) comprise a total activity such that an average length of the plurality of polynucleotides is greater than about 1 kbp, and/or wherein the average length of the plurality of polynucleotides is in a range from about 1 kbp to about 40 kbp; and/or
(iv) comprise an activity in a range from about 0.05 AU/μl to about 0.25 AU/μl.

107. The method of claim 102, wherein the transposomes of the plurality of transposomes are the same.

108. The method of claim 102, wherein the mutagenesis PCR comprises: (i) amplifying the plurality of polynucleotides with a low bias DNA polymerase; (ii) amplifying the plurality of polynucleotides with a nucleotide analogue; and/or (iii) no more than 6 cycles.

109. The method of claim 102, wherein a first end of a polynucleotide of the plurality of polynucleotides is capable of annealing to a second end of the polynucleotide of the plurality of polynucleotides; and/or, wherein a first end of an amplified polynucleotide is capable of annealing to a second end of the amplified polynucleotide.

110. The method of claim 102, wherein the suppression PCR comprises (i) use of a single amplification primer; and/or (ii) no more than 6 cycles.

111. The method of claim 102, wherein step (d) comprises contacting the amplified polynucleotides with an additional plurality of transposomes comprising the library adapters.

112. A method for determining a sequence of a target nucleic acid, comprising:
performing the method of claim 102;
sequencing the nucleic acid library to obtain sequence reads; and
assembling sequence reads to obtain the sequence of a target nucleic acid.

113. The method of claim 112, wherein the assembling comprises determining mutations introduced into the amplified polynucleotides during the mutagenesis PCR and comparing the sequence reads to a reference sequence.

114. A kit comprising:
a first bead-linked transposomes (BLT-1) reagent, wherein the BLT-1 transposomes reagent comprises a first adaptor sequence;
a mutagenesis reagent comprising a first primer, dPTPs, dNTPs, and a polymerase;
a second bead-linked transposomes (BLT-2) reagent, wherein the BLT-2 transposomes reagent comprise the first adaptor and a second adaptor;
an amplification reagent comprising a first primer, a second primer, dNTPs, and a polymerase; and
a plurality of selection probes, wherein each selection probe of the plurality of selection probes comprises a nucleotide sequence capable of hybridizing to a gene selected from TABLE 1C; and/or a nucleotide sequence within no more than 10 kbp 5′ or no more than 10 kbp 3′ of a gene in a human genome selected from TABLE 1C;
wherein BLT-1 has a lower transposome density as compared to BLT-2;
wherein the first primer hybridizes to the first adaptor sequence and the second primer hybridizes to the second adaptor sequence.

115. The kit of claim 114, wherein BLT-2 has more than 10 times the transposome density as compared to BLT-1; and/or the first adaptor is B15 and the second adaptor is A14.

116. The kit of claim 114, comprising a plurality of at least 50 selection probes, wherein the selection probes are different from one another, wherein each selection probe of the plurality of selection probes comprises a nucleotide sequence having at least 90% sequence identity to any one of SEQ ID NOs:02-140601.

117. A system for preparing a nucleic acid library, comprising:
(a) a first plurality of transposomes comprising transposon adaptors for tagmenting a plurality of nucleic acid fragments, wherein the first plurality of transposomes is immobilized on a first plurality of beads at a first density;
(b) reagents for amplifying the plurality of polynucleotides to obtain amplified polynucleotides, wherein the amplifying comprising a mutagenesis PCR and/or a suppression PCR, wherein:
(i) the first reagent for performing mutagenesis PCR comprise a low bias DNA polymerase and/or a nucleotide analogue, and
(ii) the first reagents for performing suppression PCR comprise amplification primers having the same nucleotide sequence capable of hybridizing to the transposon adaptors;
(c) a plurality of selection probes for enriching for target polynucleotides in the amplified polynucleotides, wherein each selection probe of the plurality of selection probes comprises a nucleotide sequence capable of hybridizing to a gene selected from TABLE 1C; and/or a nucleotide sequence within no more than 10 kbp 5′ or no more than 10 kbp 3′ of a gene in a human genome selected from TABLE 1C; and
(d) a second plurality of transposomes comprising library adaptors for adding library adaptors to each end of the amplified polynucleotides, wherein the second plurality of transposomes is immobilized on a second plurality of beads at a second density, wherein the first density is less than the second density.

118. The system of claim 117, wherein the first plurality of the transposomes is immobilized on the first plurality of beads:
(i) at a density such that an average length of the plurality of polynucleotides is greater than about 1 kbp, and/or the average length of the plurality of polynucleotides is in a range from about 1 kbp to about 40 kbp;
(ii) such that the number of transposomes immobilized on the first plurality of beads is no more than about 100 transposomes per bead;
(iii) comprise a total activity such that an average length of the plurality of polynucleotides is greater than about 1 kbp, and/or wherein the average length of the plurality of polynucleotides is in a range from about 1 kbp to about 40 kbp; and/or
(iv) comprise an activity in a range from about 0.05 AU/μl to about 0.25 AU/μl.

119. The system of claim 117, wherein:
(i) an average distance between two adjacent nucleotide sequences of the selection probes on a reference sequence of a genome is in a range from about 300 consecutive nucleotides to about 7,000 consecutive nucleotides;
(ii) an average number of sites in a genome that each selection probe of the plurality of selection probes is capable of hybridizing to is no more than 50 different sites in the genome;
(iii) each selection probe of the plurality of selection probes is capable of hybridizing to no more than 50 different sites in a genome;
(iv) the plurality of selection probes lacks sequences capable of hybridizing to a repetitive genomic DNA element;
(v) the plurality of selection probes comprises at least 50 different selection probes; and/or
(vi) each selection probe of the plurality of selection probes comprises a nucleotide sequence having at least 90% sequence identity to any one of SEQ ID NOs:02-140601.

The application's sequence listing, which the Patent Office published only in electronic form, follows.

SEQUENCE LISTING (140600 sequences)

SEQ ID NO: 1 - DNA, 15 bp, synthetic construct
  misc_feature 1..15: note = Artificially Synthesized Probe
  source 1..15: mol_type = other DNA
gtctcgtgggctcgg

SEQ ID NO: 2 - DNA, 120 bp, synthetic construct
  misc_feature 1..120: note = Artificially Synthesized Probe
  source 1..120: mol_type = other DNA
ttcttccccatccccttagcaccggcctctgccctcgtgggcacctctgtcccaactgcctggctttccgcaccacctgggggtgccctgaggttcatccttcctgcctgttgtctagaa

SEQ ID NO: 3 - DNA, 120 bp, synthetic construct
  misc_feature 1..120: note = Artificially Synthesized Probe
  source 1..120: mol_type = other DNA
gggatctctgctggcaggttatagagctgccctttctccttgggctctcccacaacgtgccagtagatcatgatggagacgaaaaacgtgaacttgaagccgatgatgaacagggtgcag

SEQ ID NO: 4 - DNA, 120 bp, synthetic construct
  misc_feature 1..120: note = Artificially Synthesized Probe
  source 1..120: mol_type = other DNA
cactaaagggtaacattcattcattcatagttcgataaatactggctgtccatcctgtccatgccaggtgactttctcagcatctcacacataggaacatgtgtggccccttataaccac

SEQ ID NO: 5 - DNA, 120 bp, synthetic construct
  misc_feature 1..120: note = Artificially Synthesized Probe
  source 1..120: mol_type = other DNA
tgacaaagtcacaccccctttgaccctcagcaagcccgaggggcagttgcatcgtttctactttaggtgccaggaaacctgggcataaagtcaagggactgggtgcaacctgattgctaa

SEQ ID NO: 6 - DNA, 120 bp, synthetic construct
  misc_feature 1..120: note = Artificially Synthesized Probe
  source 1..120: mol_type = other DNA
aaaagaaaaaaggaaacagacaaagatggtgactcccttggggaggtgacacatggttaagcaccaaggatgagcaggtcagatggaggagacagtggtggctccagacctctgcaagca

SEQ ID NO: 7 - DNA, 120 bp, synthetic construct
  misc_feature 1..120: note = Artificially Synthesized Probe
  source 1..120: mol_type = other DNA
tgttttgtgttttgttcagctctgaaatggtagaacggtgtccagctcttagtatgtggtcaataaataggcagtgattccatgagttaaccaatgagtgaattaatgaatgatcagtaa

SEQ ID NO: 8 - DNA, 120 bp, synthetic construct
  misc_feature 1..120: note = Artificially Synthesized Probe
  source 1..120: mol_type = other DNA
aaaaaaaaaaaatcgagaggtgcagggcaatggagacagaaggccaaaggctgggtcagacccctaccagccaggttcttggcaccagctctgcagaccccaactaggggcatcagcatc

SEQ ID NO: 9 - DNA, 120 bp, synthetic construct
  misc_feature 1..120: note = Artificially Synthesized Probe
  source 1..120: mol_type = other DNA
tttgcactgcggactcatcctgaattttcttgccccctggtgtgagtggccacgaccctcctgtcactctcggtcacatcactcgacatttccttcaatgcccttggtcatgggcctggc

SEQ ID NO: 10 - DNA, 120 bp, synthetic construct
  misc_feature 1..120: note = Artificially Synthesized Probe
  source 1..120: mol_type = other DNA
ctcattctgttcctggtgctgacacaggttcagccgacagcaggagctcaacagatactgatgagatgaggaatggccctccaggagagccagaggctatttccactcttctcatgttct

SEQ ID NO: 11 - DNA, 120 bp, synthetic construct
  misc_feature 1..120: note = Artificially Synthesized Probe
  source 1..120: mol_type = other DNA
tctccagagtccccatgaccctaaggtcacatgtggctttgaacatcactaacatagcagctccataaagaatgctcccgccgcagcaggagaaaaaggagaaaagtcacatgcactgct

SEQ ID NO: 12 - DNA, 120 bp, synthetic construct
  misc_feature 1..120: note = Artificially Synthesized Probe
  source 1..120: mol_type = other DNA
aaaggatagcccagaagtcaatgacggaaccttctgatgacctcctcaatcgaccaatgaatgtctcatccccctgatcagtgtcttcttcctgctttttctccctgggactccttgtcc

SEQ ID NO: 13 - DNA, 120 bp, synthetic construct
  misc_feature 1..120: note = Artificially Synthesized Probe
  source 1..120: mol_type = other DNA
tgtgtgtgtgttgtccccaccaggctgtgaatgccttgggggcagagactaggcccagcctagggctcaaccacatgtattaaataaataagtagtgggctttttttttgttgtttgttt

SEQ ID NO: 14 - DNA, 120 bp, synthetic construct
  misc_feature 1..120: note = Artificially Synthesized Probe
  source 1..120: mol_type = other DNA
ctagccccacaatctttcaaggcacaaataaatataatatttctacccaagaagtaagaatgacagtttttaggaggaagtaattggtataagaaggactgtttgtgcccaggcgcagtg

SEQ ID NO: 15 - DNA, 120 bp, synthetic construct
  misc_feature 1..120: note = Artificially Synthesized Probe
  source 1..120: mol_type = other DNA
ctttcaccagagaaacccagagaactgtcctggcttctctcccaatttccaccaaaacctcctgttaattgccactccaggaaaattcaactaattcaaatatggaaaaaaatttaaagg

SEQ ID NO: 16 - DNA, 120 bp, synthetic construct
  misc_feature 1..120: note = Artificially Synthesized Probe
  source 1..120: mol_type = other DNA
atttttagattagatttcaagcataacctgtaacctatctctattctctattcaagagacataccttaaacgaagtaacttagaatggttaaaaatataagaacagccgggtgcggtcgc

SEQ ID NO: 17 - DNA, 120 bp, synthetic construct
  misc_feature 1..120: note = Artificially Synthesized Probe
  source 1..120: mol_type = other DNA
gtaaggtactataatatttcaaactctctaccctagtgatagatactgtgctttcttttcaagagctgagctgatggaacagtcatgaaatctgaccatattcagtccaaagaaaatgtc

SEQ ID NO: 18 - DNA, 120 bp, synthetic construct
  misc_feature 1..120: note = Artificially Synthesized Probe
  source 1..120: mol_type = other DNA
attagccgggtgtggtggcacctacctgtaatcccagcactttgggaggctgagccaggcagatcacctgaggttgggagttcaagaccagcctgactaacatggagaaaccccatctct

SEQ ID NO: 19 - DNA, 120 bp, synthetic construct
  misc_feature 1..120: note = Artificially Synthesized Probe
  source 1..120: mol_type = other DNA
atcccagaagacatagctaatctacacaggacaacttccacattagaaacagaattataaaaggactaccattacaaaacaaaagcaccagggcaaaacattttgggagggaatcctgga

SEQ ID NO: 20 - DNA, 120 bp, synthetic construct
  misc_feature 1..120: note = Artificially Synthesized Probe
  source 1..120: mol_type = other DNA
ttcatacctgggcactaatactaagctcagggaagacacagatgctgccaccaccatcactatactgggtgtatttatcagaggaatttgacaaaagaaagaaaacgcaatagaaatagt

SEQ ID NO: 21 - DNA, 120 bp, synthetic construct
  misc_feature 1..120: note = Artificially Synthesized Probe
  source 1..120: mol_type = other DNA
tagaaatgcaaatggacatactcagatagcatctctcacatatcagatcagcaaaaatccaaaacacttaacacattattttggcaaggctgtgagcaaacaggcatgctcatacacagc

SEQ ID NO: 22 - DNA, 120 bp, synthetic construct
  misc_feature 1..120: note = Artificially Synthesized Probe
  source 1..120: mol_type = other DNA
cacaaagccgggatcaaatgtgataactaatcctgggaaatgccctttgcaaactataaactctacgcagatgcaaattacagctgcctcattatttgaaggtacaaatcaagtcacatg

SEQ ID NO: 23 - DNA, 120 bp, synthetic construct
  misc_feature 1..120: note = Artificially Synthesized Probe
  source 1..120: mol_type = other DNA
gtttcttcatctgtaaaataaagagctgagaaaagacaatctcttaggacccttctagaaaggccttcctaatctggtctcctggcaccacctctgtccattccatcagaagccaacatc

SEQ ID NO: 24 - DNA, 120 bp, synthetic construct
  misc_feature 1..120: note = Artificially Synthesized Probe
  source 1..120: mol_type = other DNA
agagttcaataccagcctgggcaacgcaggaagacctcatctctacaaaaaataaaaataaaaaaattagccagaggccaggcacagtggcgcatgcctgtaatcccagcactttgggag

SEQ ID NO: 25 - DNA, 120 bp, synthetic construct
  misc_feature 1..120: note = Artificially Synthesized Probe
  source 1..120: mol_type = other DNA
ttttgattgggatgattttgggagtgctacagtgtgacttacgtcttagagatctaagagagcaatacagcttcataccataaattccaaggcaacattgtctcccaccttaaggtagtt

SEQ ID NO: 26 - DNA, 120 bp, synthetic construct
  misc_feature 1..120: note = Artificially Synthesized Probe
  source 1..120: mol_type = other DNA
gcctcagaaatataatttaaatcttcagatatggagccctaacctgctctctcccactcctactccaggctcagggcacacttgcctcaccacaggctctcccagggcataggagggcga

SEQ ID NO: 27 - DNA, 120 bp, synthetic construct
  misc_feature 1..120: note = Artificially Synthesized Probe
  source 1..120: mol_type = other DNA
gaaggagcaaatgatggtcacagatgatcagggctctctgggtcccgtaactatatctgggacaatgactttcaaacaggtgaagacagacactcttcctgtttcgctctcatgtgctgg

SEQ ID NO: 28 - DNA, 120 bp, synthetic construct
  misc_feature 1..120: note = Artificially Synthesized Probe
  source 1..120: mol_type = other DNA
acaaggggtaaaaccttactgatgagctcaaaccaatcaataagcaacacacaaagaacctggcttctcgtactctgacccaggagtttcatttctaggaaatacgaagaaatatctagc

SEQ ID NO: 29 - DNA, 120 bp, synthetic construct
  misc_feature 1..120: note = Artificially Synthesized Probe
  source 1..120: mol_type = other DNA
aatgttaacaatagttgtcttcaagtatgcaaacaggaattgtttttcctacttctttcggttaattcattcaaacaatattcaggaagcacctgctaggtgccaggcctggcactaggc

SEQ ID NO: 30 - DNA, 120 bp, synthetic construct
  misc_feature 1..120: note = Artificially Synthesized Probe
  source 1..120: mol_type = other DNA
aaaactaatgacagagaggattccatctctcctcttcctttcttttcctttctattttgttttcctttgtattcctttgatttggggaccctcttttggggggttgcagctatggaaaca

SEQ ID NO: 31 - DNA, 120 bp, synthetic construct
  misc_feature 1..120: note = Artificially Synthesized Probe
  source 1..120: mol_type = other DNA
agccgcaggatccccctggagcccccgtcccccgcaacatcggcgcggcccctcgtacctctagctccagcggcggcgggcggcggacagcggggccccggcgggcgggcggcgcggcgg

SEQ ID NO: 32 - DNA, 120 bp, synthetic construct
  misc_feature 1..120: note = Artificially Synthesized Probe
  source 1..120: mol_type = other DNA
aaaactgttttggattgaaaaacaaaatacttataggtatcagaataagaggaaagccaagactcttggaaacgtttggatcctaggacggatttctttttgtgcccccctggggtggtc

SEQ ID NO: 33 - DNA, 120 bp, synthetic construct
  misc_feature 1..120: note = Artificially Synthesized Probe
  source 1..120: mol_type = other DNA
gggactcataacagagaaataggcaggaagttctgaactatctgggaagatagcaagagaaatctactgatgagatggcttgtgcagagccaaagagatcttttgttgaaatattattat

SEQ ID NO: 34 - DNA, 120 bp, synthetic construct
  misc_feature 1..120: note = Artificially Synthesized Probe
  source 1..120: mol_type = other DNA
aagaaacaaaatgtgacttcattgggattgtctttcaaaatgtgccctgtaatttcccagtcgtgtggttcttctaaccagagccatcctggctttacattttttggatccaatctgaac

SEQ ID NO: 35 - DNA, 120 bp, synthetic construct
  misc_feature 1..120: note = Artificially Synthesized Probe
  source 1..120: mol_type = other DNA
gggggttccatttcttgttgttcttagaagtgggacacacttctgagaagggtgctaaatgccaccttgtttacttctttataaggactgcaacaggtgaaaatttgttaaaggagaaga

SEQ ID NO: 36 - DNA, 120 bp, synthetic construct
  misc_feature 1..120: note = Artificially Synthesized Probe
  source 1..120: mol_type = other DNA
gtagagagtggcagtgaatgtcaacaatttgcaagcaatagctcaatcaagaggcttctgtggagccaatttgtcagaagcttttaaccttaaaatgtagatggtaatccagtgtagcag

SEQ ID NO: 37 - DNA, 120 bp, synthetic construct
  misc_feature 1..120: note = Artificially Synthesized Probe
  source 1..120: mol_type = other DNA
agcaccactggaatcaaagataggggcttaatgggcatttttgtgcttatttaatccttttcctgtctctaggcagtgtacagataggggaaattgtgtttcctgagtacttttatatgc

SEQ ID NO: 38 - DNA, 120 bp, synthetic construct
  misc_feature 1..120: note = Artificially Synthesized Probe
  source 1..120: mol_type = other DNA
tgcattctttcaccaggtttcaagactccttgcattcgcagtacccccattcccatccacagagggcaggccgtagacactgggttggcagggcactgctgccactttgtttatgcccag

SEQ ID NO: 39 - DNA, 120 bp, synthetic construct
  misc_feature 1..120: note = Artificially Synthesized Probe
  source 1..120: mol_type = other DNA
gaacagattcagggtcccagaggcctctgaggtcacttcctgccctaagaaatgctcttttagggaaatgatgttcttttgtgtgatgtgggacaatttcactttttcttttttcttttc

SEQ ID NO: 40 - DNA, 120 bp, synthetic construct
  misc_feature 1..120: note = Artificially Synthesized Probe
  source 1..120: mol_type = other DNA
gctgagtgacggtctgcccgtaacacctgtgggtcttggaacaagaggatgagggtcacatttcctatgtctagatatataaaagtcatcagtcaagctataagaacagttaaataaaat

SEQ ID NO: 41 - DNA, 120 bp, synthetic construct
  misc_feature 1..120: note = Artificially Synthesized Probe
  source 1..120: mol_type = other DNA
tcagaagttaatacgaggagaaattacaatgtagcccagcatgagcagagctggttacctacaaataaacctgcttttgcttttttgggtgtcacctgtcagaaattcaagtgatgttct

SEQ ID NO: 42 - DNA, 120 bp, synthetic construct
  misc_feature 1..120: note = Artificially Synthesized Probe
  source 1..120: mol_type = other DNA
cgacctggggatgttttggccagcagaagtaatttctcagctcatttacattgtctaatatccctcctgcagatatttgttttaaaaacaacaacagcaagatgcatgttagcccacatg

SEQ ID NO: 43 - DNA, 120 bp, synthetic construct
  misc_feature 1..120: note = Artificially Synthesized Probe
  source 1..120: mol_type = other DNA
ttgttgggtgcatggttgattgaaggaatgtatagtgtgagaatggtagcttgaggaggaaagtctatgggaacttgttaatgaaagtgtacttgttcctgcctgacagaaatgtaagaa

SEQ ID NO: 44 - DNA, 120 bp, synthetic construct
  misc_feature 1..120: note = Artificially Synthesized Probe
  source 1..120: mol_type = other DNA
cgacaataacaacaacatgatgatgatgatgagagggacttcctctcaaagctcccagcagcattttccatcactttgttgcatgaactcttcatcaaaatcagatatgaggagaagtat

SEQ ID NO: 45 - DNA, 120 bp, synthetic construct
  misc_feature 1..120: note = Artificially Synthesized Probe
  source 1..120: mol_type = other DNA
tatataattttttttttgtaaaatgtactatccctggagcttataaaacatccagagtgcaaagacaatgactgacctttcagaggcacccaggaaccccctggtcagattcaaggatcc

SEQ ID NO: 46 - DNA, 120 bp, synthetic construct
  misc_feature 1..120: note = Artificially Synthesized Probe
  source 1..120: mol_type = other DNA
caatggtttctctcctgggatacagaatggtcctttggacaaatggatgcttcttatggagctctttgctgactagtagaataatacagcagaatggctgagaacacaggttctgggtca

SEQ ID NO: 47 - DNA, 120 bp, synthetic construct
  misc_feature 1..120: note = Artificially Synthesized Probe
  source 1..120: mol_type = other DNA
tctcgtaaggacacatatttaatgcagagctagaactagaactttggtttcatcattctcggatcaagacatttctccctgggacacccttacatagtgctggagagagcattttatatc

SEQ ID NO: 48 - DNA, 120 bp, synthetic construct
  misc_feature 1..120: note = Artificially Synthesized Probe
  source 1..120: mol_type = other DNA
aacaacaaacaactttagacaaataaatagtagagttgtctgagcaaatagtgattaatgaatctggcagcactcaaaaacaggaccagttcagaggctcccccaagcaatttggtcagg

SEQ ID NO: 49 - DNA, 120 bp, synthetic construct
  misc_feature 1..120: note = Artificially Synthesized Probe
  source 1..120: mol_type = other DNA
atactctcagcaatgccaaaagtggtttccaattgatgagtttattgatttggagattccagccattgaataagggtcttgaatgccagtgggtgttttgtcttagttcatggaaggtgt

SEQ ID NO: 50 - DNA, 120 bp, synthetic construct
  misc_feature 1..120: note = Artificially Synthesized Probe
  source 1..120: mol_type = other DNA
ccaatccgcattcatagcttgaacagctgtcacagacagaggctcaccgaaagtttttggaaactggatccaatctgatgcttactttctcaaatcaataataattagtacatcattcag

SEQ ID NO: 51 - DNA, 120 bp, synthetic construct
  misc_feature 1..120: note = Artificially Synthesized Probe
  source 1..120: mol_type = other DNA
caaaatagatttggttttgcatgtttaaaagacgctctataaatgctccaaattagtcctcacaaagccagcttctgagccaaccgacattgaataatgagacattgctggcatgtttgc

SEQ ID NO: 52 - DNA, 120 bp, synthetic construct
  misc_feature 1..120: note = Artificially Synthesized Probe
  source 1..120: mol_type = other DNA
ccattggttcccttcactgcacttgtcaagatgtgggatgagtgtatttgtttgtgtgttttctgggcctccatgtgggtagagagccatggtccccaatacactgccacgttcctaaca

SEQ ID NO: 53 - DNA, 120 bp, synthetic construct
  misc_feature 1..120: note = Artificially Synthesized Probe
  source 1..120: mol_type = other DNA
ttctgtgcatgatagattagaaacttgcaaactccaaagatgggagggcatggaattcaagagggtggggatcaataaatatcagagtctttattcagactcagtagggaaacaaccttt

SEQ ID NO: 54 - DNA, 120 bp, synthetic construct
  misc_feature 1..120: note = Artificially Synthesized Probe
  source 1..120: mol_type = other DNA
acctgccgacctggccatcggggaataatttaaagtaaccccagagaggggttaccagaagtcaagtgtccacagcaaacctgaaaactcttttttacattttatattgttactggaagg

SEQ ID NO: 55 - DNA, 120 bp, synthetic construct
  misc_feature 1..120: note = Artificially Synthesized Probe
  source 1..120: mol_type = other DNA
gagaaatctacctgaagttggccggtccctagaaccctccagccagacattctcctgctttcggcagggtgcctgggaggccaagttattaattttcagtgagaattctcaccatctgga

SEQ ID NO: 56 - DNA, 120 bp, synthetic construct
  misc_feature 1..120: note = Artificially Synthesized Probe
  source 1..120: mol_type = other DNA
tgatctctcactctcgggatagaattataactctctggatagaactctcactatctatctggatagaattcttaccatctggatagaactctcactatctgaatagaattctcactctct

SEQ ID NO: 57 - DNA, 120 bp, synthetic construct
  misc_feature 1..120: note = Artificially Synthesized Probe
  source 1..120: mol_type = other DNA
caccatctggatagaattctcactatctggatagaattcttactttctggatagaactctcagtgtctttctggatagaattctcaccctctggatagaactcgcactatctacctggat

SEQ ID NO: 58 - DNA, 120 bp, synthetic construct
  misc_feature 1..120: note = Artificially Synthesized Probe
  source 1..120: mol_type = other DNA
ggatataattcccactctgtcgttagaactctcactacctgtctagatacaattttcaccatccatgaacaactctcacaatctgtatggaattcgctatctctggatagaagtcttact

SEQ ID NO: 59 - DNA, 120 bp, synthetic construct
  misc_feature 1..120: note = Artificially Synthesized Probe
  source 1..120: mol_type = other DNA
gaactctcaatatctatctagatagaactctcactatctggatagaattctcaccctctggatacaactctcactgtctatctggatagaattcttagtctctggatagaagtctcactc

SEQ ID NO: 60 - DNA, 120 bp, synthetic construct
  misc_feature 1..120: note = Artificially Synthesized Probe
  source 1..120: mol_type = other DNA
actatctggatagaattctcactctctggatagaactctcactatctatctggatagaattctcattctctggatagatctctcattatctgtctggagagaatactcattctctggata

SEQ ID NO: 61 - DNA, 120 bp, synthetic construct
  misc_feature 1..120: note = Artificially Synthesized Probe
  source 1..120: mol_type = other DNA
tctgtatagaattctcaccctctggatagaactctaacaatctggatagaattctcactctctgcatagaactctcactgtctatctggatagaattctcactctctggatagaactctc

SEQ ID NO: 62 - DNA, 120 bp, synthetic construct
  misc_feature 1..120: note = Artificially Synthesized Probe
  source 1..120: mol_type = other DNA
attctcactccccagatagtggacactatgtctcactatccggatagtggacataattctcactatccggatagaaatttcaccatctgcatagaactctcactaccgggatagaattct

SEQ ID NO: 63 - DNA, 120 bp, synthetic construct
  misc_feature 1..120: note = Artificially Synthesized Probe
  source 1..120: mol_type = other DNA
ctatctctctgtgtagaattctgataatctggttagcactcttactaactgtctggatagaattctcactctctggatagaactctcactctctgtctaggtagaattttcaccatctgg

SEQ ID NO: 64 - DNA, 120 bp, synthetic construct
  misc_feature 1..120: note = Artificially Synthesized Probe
  source 1..120: mol_type = other DNA
ctctctggatagaactctatttgtctaggtagaattttcaccgtccggaaacatctctcacaatctggataggattctcactctgtaggtagaactcttactgtcaatctggatataatt

SEQ ID NO: 65 - DNA, 120 bp, synthetic construct
  misc_feature 1..120: note = Artificially Synthesized Probe
  source 1..120: mol_type = other DNA
attctcaccgtctgcatggaactgtcactatctggatagaattctcactctctgtataaaactctcactatctatctagatagaatactcactatctggatagaactctcactgtctatc

SEQ ID NO: 66 - DNA, 120 bp, synthetic construct
  misc_feature 1..120: note = Artificially Synthesized Probe
  source 1..120: mol_type = other DNA
tatctggatagaattcttaatctctggatagaagtctcactatcagtctggatagaattctcaccatctggatagaactttcactatctgtctagatagatctctcactatctatctgga

SEQ ID NO: 67 - DNA, 120 bp, synthetic construct
  misc_feature 1..120: note = Artificially Synthesized Probe
  source 1..120: mol_type = other DNA
agaggatgtggagaaataggaacacttttacactgttggtgggattgtaaactagttcaaccattgtggaagtcaatgtggtgattcctcagggatctagaactagaaatactatttgac

SEQ ID NO: 68 - DNA, 120 bp, synthetic construct
  misc_feature 1..120: note = Artificially Synthesized Probe
  source 1..120: mol_type = other DNA
tagaattctcactctgtggatagaactctccgtatcaatctggatagaattctcaccctctggatagaactgtcactatctggaaggaattctcaccatctggatagaactgtcactatc

SEQ ID NO: 69 - DNA, 120 bp, synthetic construct
  misc_feature 1..120: note = Artificially Synthesized Probe
  source 1..120: mol_type = other DNA
tctctggatactactctcgctatctggatagaattctcagcatctggatataattcccactatcgatcaggatagaattctcactctgtggatagaactctgacaatgtatctggataga

SEQ ID NO: 70 - DNA, 120 bp, synthetic construct
  misc_feature 1..120: note = Artificially Synthesized Probe
  source 1..120: mol_type = other DNA
gatagaaatttctctatctatctggatagaattctccctctctggatagaagtctcattatctgtctggatagaattctcaccatctggatagaagtgtcactatctgtctggatagaat

SEQ ID NO: 71 - DNA, 120 bp, synthetic construct
  misc_feature 1..120: note = Artificially Synthesized Probe
  source 1..120: mol_type = other DNA
atctgtgtggatagaattctcaccatctgcatagaactctcactatatgggtagaattctgactctctggatcgaactctcactatctgtctggaaagaatcctcactctttggatagaa

SEQ ID NO: 72 - DNA, 120 bp, synthetic construct
  misc_feature 1..120: note = Artificially Synthesized Probe
  source 1..120: mol_type = other DNA
tctgaaggctcttgctctgtcctaagatgtcctcaaaatgagcctgggtagtgggacttgggcggggcctctactctttcccattttttgatccactgctcttaccctgaggcttctgca

SEQ ID NO: 73 - DNA, 120 bp, synthetic construct
  misc_feature 1..120: note = Artificially Synthesized Probe
  source 1..120: mol_type = other DNA
ctttaagcaaaattaagatatcctcaccggctggaagatcgtagaaatagcatagggtcattgagaaaaatggagacaataggagagaatctctggttaaaagggaagtcgtggtcatac

SEQ ID NO: 74 - DNA, 120 bp, synthetic construct
  misc_feature 1..120: note = Artificially Synthesized Probe
  source 1..120: mol_type = other DNA
gagccaccacgcccagcctgtccgtacatctttatggaagtaattgattttttcctcaggatcatttctttgagtaacattgccaagctgatacattcatgataaaagtaacaatcattt

SEQ ID NO: 75 - DNA, 120 bp, synthetic construct
  misc_feature 1..120: note = Artificially Synthesized Probe
  source 1..120: mol_type = other DNA
ctgtagatttattctacttcttcattctcttttcctttcccttactttttaggttactcagagagggcaatgctttactatgaactggaagacgggctgtacaccactggtccatatttc

SEQ ID NO: 76 - DNA, 120 bp, synthetic construct
  misc_feature 1..120: note = Artificially Synthesized Probe
  source 1..120: mol_type = other DNA
gctttcatctggagatggacacttatcacttagatccaactcgaggctggcccttctggaagcagaggcctttgcccactgccctggaggccaaaggaatgattccattagagattccag

SEQ ID NO: 77 - DNA, 120 bp, synthetic construct
  misc_feature 1..120: note = Artificially Synthesized Probe
  source 1..120: mol_type = other DNA
tatggggagatcacatgaatatgcaggagactgtgagaatatggggagaccgtgagaatatggggagactgtgggaatatgaggaaagtgtgaatatgggggagaccatgtcaatataaa

SEQ ID NO: 78 - DNA, 120 bp, synthetic construct
  misc_feature 1..120: note = Artificially Synthesized Probe
  source 1..120: mol_type = other DNA
caatataaaggagatcgtgggaatatggggagatcgtgcgaatatggggagcccatgggaatatggggagactgaatatatgggagactgtgggaatatggggagatcatgcaaatatgg

SEQ ID NO: 79 - DNA, 120 bp, synthetic construct
  misc_feature 1..120: note = Artificially Synthesized Probe
  source 1..120: mol_type = other DNA
aagccaacgtgaacaattaaaaatgtattgagcatctactctgtagcaggtcctgtgaaaacactttaggtggacaatcccttgaggtaagtggtatcccattttataggtgtgaaaact

SEQ ID NO: 80 - DNA, 120 bp, synthetic construct
  misc_feature 1..120: note = Artificially Synthesized Probe
  source 1..120: mol_type = other DNA
gcaaggggatctagaccagaatcaagccttggatctagttctcaagtctcttttgtctctttcagtttaggaacagtttgtcaactttccttcacttttgtgaccttgatacttgagttt

SEQ ID NO: 81 - DNA, 120 bp, synthetic construct
  misc_feature 1..120: note = Artificially Synthesized Probe
  source 1..120: mol_type = other DNA
tgtgcatacatatacacctaagtacacatgagtttactctgataacatccatttccaatccagcatcacagagttgatcctaggttcttccctcttctctaattgtgagaaacctggctt

SEQ ID NO: 82 - DNA, 120 bp, synthetic construct
  misc_feature 1..120: note = Artificially Synthesized Probe
  source 1..120: mol_type = other DNA
aaaaaaaaaaaaaacccaaggctctcgaggcatgcatgctgttcagcgagccctgccctgcattgcgaaagggtagagatttgtttatttgtcagtattgaaagcatggcttgcaaagtt

SEQ ID NO: 83 - DNA, 120 bp, synthetic construct
  misc_feature 1..120: note = Artificially Synthesized Probe
  source 1..120: mol_type = other DNA
ggaactggaatgcggggaaagtgatgaaatattttgttggttggcctttgcttgtttgcaaaatatatccaatgctcacacctgagagacaacagacatccttatttgtgaatagtctgc

SEQ ID NO: 84 - DNA, 120 bp, synthetic construct
  misc_feature 1..120: note = Artificially Synthesized Probe
  source 1..120: mol_type = other DNA
atgtgctggtacctgcagctcaggacaaagggaggcagcgtgaatgacacgttcttttatttgggttcttgctgctcccacgttactgtcacaatattttctgtggagttgaaaagcaaa

SEQ ID NO: 85 - DNA, 120 bp, synthetic construct
  misc_feature 1..120: note = Artificially Synthesized Probe
  source 1..120: mol_type = other DNA
agggctccaggatttgacctcacatttcccgcccgcctaagtctgtgtgcttttaggcctgtgtggccttccctgtctgtgccctcagtctacctggacgctgccatccttcaaaaccca

SEQ ID NO: 86 - DNA, 120 bp, synthetic construct
  misc_feature 1..120: note = Artificially Synthesized Probe
  source 1..120: mol_type = other DNA
tgctaatgttctgtgcagctctttggttcagtgagtcctttttggtgaaagggctcagagatgcggctaaagcctgtgccagccttgcactcccatgaggttgctgttaccctcatgcca

SEQ ID NO: 87 - DNA, 120 bp, synthetic construct
  misc_feature 1..120: note = Artificially Synthesized Probe
  source 1..120: mol_type = other DNA
ttgtctgattgatctaatggggcgccgtccctctggtctgtgattgctctggaatgagccacggagcccagagaaggaacatgcagagggcatctgagaactgcagcaggggacccagtt

SEQ ID NO: 88 - DNA, 120 bp, synthetic construct
  misc_feature 1..120: note = Artificially Synthesized Probe
  source 1..120: mol_type = other DNA
ggccattctttagaaaacggctgtttttgctctgggaacatttttaaattatttcttcttcctttgcctcagatgggaggagcatcgcgctactggatcacctctaatcattttttcctt

SEQ ID NO: 89 - DNA, 120 bp, synthetic construct
  misc_feature 1..120: note = Artificially Synthesized Probe
  source 1..120: mol_type = other DNA
ctgaccacctacctgagcttccacccagcttcaaggctgtggggatcgtttcttagccaaggtgaaaggccctgagccctccagtgggctctgagggtttgaatgtttattctaaatggg

SEQ ID NO: 90 - DNA, 120 bp, synthetic construct
  misc_feature 1..120: note = Artificially Synthesized Probe
  source 1..120: mol_type = other DNA
ttgagcccacggtgctgactgggggtccctcgtctggcaaactcagctatgggcacaaagtcgggacaacaaaatggtgtgcacagaatgactcatttcatgtttttaaaaaccttttgg

SEQ ID NO: 91 - DNA, 120 bp, synthetic construct
  misc_feature 1..120: note = Artificially Synthesized Probe
  source 1..120: mol_type = other DNA
tgtcaaaaaatgaaaaataaaataaaccgttttacagctgcgcatgtgtgtaaaaacaggacacagcacttctgccgccccacgtgccagtaatgctccgactcctttactcctcattcc

SEQ ID NO: 92 - DNA, 120 bp, synthetic construct
  misc_feature 1..120: note = Artificially Synthesized Probe
  source 1..120: mol_type = other DNA
ttcctattcctcgtgaccaaatgtgtcttttcaattacggtcatttaaaaatgaaatgtgagtgaagacgatgattctagggcaatggttgtcaactgtggctgctctgtagaatcatcg

SEQ ID NO: 93 - DNA, 120 bp, synthetic construct
  misc_feature 1..120: note = Artificially Synthesized Probe
  source 1..120: mol_type = other DNA
ggcccaggcagcagcaaagctgcgatttcgaggccgacttggttccaaagcccaagcttttaaccgtcacgctataggacaccatgcagtcctccagattcgttatattttttattattt

SEQ ID NO: 94 - DNA, 120 bp, synthetic construct
  misc_feature 1..120: note = Artificially Synthesized Probe
  source 1..120: mol_type = other DNA
ccctgagacacatgcaagtaagagtcttctggcaaaaatacaatttaattttccagtttccctcctctcaaaaaactccagaggatacctttagtaggcacagagtataatgtcatgttc

SEQ ID NO: 95 - DNA, 120 bp, synthetic construct
  misc_feature 1..120: note = Artificially Synthesized Probe
  source 1..120: mol_type = other DNA
gataccctcagctaccaacttaagtaacgctgaaacccctaccttcaaatccagcttaccgtcagatgaactatgtatacgtgggaaattatgattaaagctttacgttcaaagtcaagt

SEQ ID NO: 96 - DNA, 120 bp, synthetic construct
  misc_feature 1..120: note = Artificially Synthesized Probe
  source 1..120: mol_type = other DNA
gtgcaacagaacttttcacatcctcctgtctgcattacagatatttgttttttacccacggagaccgtattgcaaaggtataaagtggtctacccaacaaagtattttacagatgatggc

SEQ ID NO: 97 - DNA, 120 bp, synthetic construct
  misc_feature 1..120: note = Artificially Synthesized Probe
  source 1..120: mol_type = other DNA
caagtcattggttcagatgaaacctgtgaagctaaaaatctactaaatccatttttaggaagaagaaaaaaccaccctgccacaaaccagcaaactaatcgcacctgtatgttcacaggg

SEQ ID NO: 98 - DNA, 120 bp, synthetic construct
  misc_feature 1..120: note = Artificially Synthesized Probe
  source 1..120: mol_type = other DNA
tttggaataaaaaaatctgcaaaggagcctatctgtccagtaagcaccacagaaacagagttcccagtggcagccaccattccttgagggcctcccctgtgtctagcactttccagagtt

SEQ ID NO: 99 - DNA, 120 bp, synthetic construct
  misc_feature 1..120: note = Artificially Synthesized Probe
  source 1..120: mol_type = other DNA
ctagttcactcgcctctgacagtgatgatctatcctttactggggctcagccttcacccactgaggggccctggatggaagcatgtgtttgcttggtggggatgacaagtcgaatttccc

SEQ ID NO: 100 - DNA, 120 bp, synthetic construct
  misc_feature 1..120: note = Artificially Synthesized Probe
  source 1..120: mol_type = other DNA
tacagagggcaggatgaaatccctttgaaatgagcagtacagaactccaaaggaagagatggggtctgtgtgtttcttctgccacctgaaataattgaaaggttcaaaatccaatgttat

SEQ ID NO: 101 - DNA, 120 bp, synthetic construct
  misc_feature 1..120: note = Artificially Synthesized Probe
  source 1..120: mol_type = other DNA
ccaggttataggtagattcaaaatttttttattggcaattggttgaaagagttattatcactagaaaggagtgtctaggttatgataaggggttgtggagaccaaagttttatcatgcaa

SEQ ID NO: 102 - DNA, 120 bp, synthetic construct
  misc_feature 1..120: note = Artificially Synthesized Probe
  source 1..120: mol_type = other DNA
ataaaaaataaaaaaaggaatggctaaacataaacattacttttacaatcaaaaccatttcaaaggccttacttcactggattctcagccagtgctgcccccagagcagaaggcagctgt

SEQ ID NO: 103 - DNA, 120 bp, synthetic construct
  misc_feature 1..120: note = Artificially Synthesized Probe
  source 1..120: mol_type = other DNA
ggcttttggagtcaggaagaaccaggcttaagtaatagaactgcctgacctccagcttgtctcttcagctcccaggtctgtgctcgatttgggattattgggtggggcacataagaagct

SEQ ID NO: 104 - DNA, 120 bp, synthetic construct
  misc_feature 1..120: note = Artificially Synthesized Probe
  source 1..120: mol_type = other DNA
atatctgtgactgtgtgctggaaaagccagcaacacgaaacaccaaaagacacagacaaaaaccaacaacaacaaacccaacaagttggccctcagccaaaataattaggcaagaggaag

SEQ ID NO: 105 - DNA, 120 bp, synthetic construct
  misc_feature 1..120: note = Artificially Synthesized Probe
  source 1..120: mol_type = other DNA
gtctgtgtgtttgcatgcatgtctgtgtgtctgtgtggtctatgtgtctgtgtgtacacttctgtatgtctttctctgtgcatttttgcatgtgtctccatgtgtctctgtgcatgtctg

SEQ ID NO: 106 - DNA, 120 bp, synthetic construct
  misc_feature 1..120: note = Artificially Synthesized Probe
  source 1..120: mol_type = other DNA
gtgtatgtgtgtgtaatggtgtgtttctgtggccggaagggcgtatctgcgattgcgtgtctgtgtatgtaatggtgtgtctctgtggcggggagggtgtgtgtgtgattttgtgtctgt

SEQ ID NO: 107 - DNA, 120 bp, synthetic construct
  misc_feature 1..120: note = Artificially Synthesized Probe
  source 1..120: mol_type = other DNA
accctagagcttcctccctccaggcttgaactgcacctattcctaagagtaagtcattcctggcctccgccactgtcgctggcccagctgcccacagctgccgagaagtcaagtatgtgt

SEQ ID NO: 108 - DNA, 120 bp, synthetic construct
  misc_feature 1..120: note = Artificially Synthesized Probe
  source 1..120: mol_type = other DNA
ggggctttggagaacaaagggacaggaaacaagagacgcaagtcagagaaagcaaagggaaagaggacagccatgtgggcctctgaattcagatgtcaggagaatctgagaggagagaac

SEQ ID NO: 109 - DNA, 120 bp, synthetic construct
  misc_feature 1..120: note = Artificially Synthesized Probe
  source 1..120: mol_type = other DNA
acataaaaacacaggtaccattgactccacttataaaaggtagttggagtagcagactcataacaacagaccatggaatggtgagctgggggagggaaaatggagttgctattttatggg

SEQ ID NO: 110 - DNA, 120 bp, synthetic construct
  misc_feature 1..120: note = Artificially Synthesized Probe
  source 1..120: mol_type = other DNA
attataccttggcaacgagacgcgctgcagatggtcaggttccctaacagccatgctgcagaatgagaacacaggagatgaagtttagtctaggagcaggatttagggcacaagtgcatg

SEQ ID NO: 111 - DNA, 120 bp, synthetic construct
  misc_feature 1..120: note = Artificially Synthesized Probe
  source 1..120: mol_type = other DNA
atattctgtgtttctaagaaataaatgcagcagaagtgatgctgggtgacttctgaagccaggcccaaaaaggtgatctggcttctgtctcatctttcttgggatgttggtcttggagcc

SEQ ID NO: 112 - DNA, 120 bp, synthetic construct
  misc_feature 1..120: note = Artificially Synthesized Probe
  source 1..120: mol_type = other DNA
agactccacacttaggaaaattttaaatgggagtgagatgagcctgttgcccaggtgaggctaaaataagggagcaagtaagcacaccctccgccagagctggacgcaggcaataactgt

SEQ ID NO: 113 - DNA, 120 bp, synthetic construct
  misc_feature 1..120: note = Artificially Synthesized Probe
  source 1..120: mol_type = other DNA
tgtctcagaggctcatgttctggaaacaatcattgtctttaaggtgattttatgtatattaaagtcacgtacagtagttcccttatccacaccttcgcttgctggagtttcagttaccca

SEQ ID NO: 114 - DNA, 120 bp, synthetic construct
  misc_feature 1..120: note = Artificially Synthesized Probe
  source 1..120: mol_type = other DNA
ttacttcttatcttataatgcttgtgtgtgtttacctccacctttctaagtcctgtgaccacggagcgatttatctcgaatagcttcttgaaacagaaacgtgggaggcaaaacatttga

SEQ ID NO: 115 - DNA, 120 bp, synthetic construct
  misc_feature 1..120: note = Artificially Synthesized Probe
  source 1..120: mol_type = other DNA
ccacagtccttgccaacacttgatggtcactcttttatcctttagccatgctagtggatgaggagtggtatctaagtgtgtccaatgactaaggaggtaaatcatcttttcatgtattta

SEQ ID NO: 116 - DNA, 120 bp, synthetic construct
  misc_feature 1..120: note = Artificially Synthesized Probe
  source 1..120: mol_type = other DNA
tgaataagacccagtatttgatagcataacagggagactatagtcaataataatttaattgcacatttaaaaataactaaaagagaggtcgggcacagtggctcatgcctgtaatctcag

SEQ ID NO: 117 - DNA, 120 bp, synthetic construct
  misc_feature 1..120: note = Artificially Synthesized Probe
  source 1..120: mol_type = other DNA
gtgtgaaaggctaaagtccctttcttccctcaatggatatccagtcatttcagccatttgaattgaaaatactttcctttctctatcacattaccttagcacccttatcaaaaagcaact

SEQ ID NO: 118 - DNA, 120 bp, synthetic construct
  misc_feature 1..120: note = Artificially Synthesized Probe
  source 1..120: mol_type = other DNA
atgagccatggtgcctggtttatattgcagttttaattgtatagacatttctcctaatttggtaaattattctctaaatatttcatgttttatgatgctactgtaaatggtatttaaaat

SEQ ID NO: 119 - DNA, 120 bp, synthetic construct
  misc_feature 1..120: note = Artificially Synthesized Probe
  source 1..120: mol_type = other DNA
cctgtgagagacatacatactttagaaacaaagatacaaataggtcaaagcaaaaggatagtagatttgctatgcaaacaaccgtaagggagcttgaggagaaatgctaacgtcagacta

SEQ ID NO: 120 - DNA, 120 bp, synthetic construct
  misc_feature 1..120: note = Artificially Synthesized Probe
  source 1..120: mol_type = other DNA
ccccacaaaatgcttaaaaggtagcttgactctttgtttggggcccagtcctttggatgttaatctgattgggtcggtgcacctaaataattaaataattcctcctcaaccccatcggtc

SEQ ID NO: 121 - DNA, 120 bp, synthetic construct
  misc_feature 1..120: note = Artificially Synthesized Probe
  source 1..120: mol_type = other DNA
catggaacagtgtccaaggtcaatcatatgctggaccataaaacaattctgagaaattcgaaaggactgatatccacagagtttcttctctagccacaggggaatgaaatcagaaattaa

SEQ ID NO: 122 - DNA, 120 bp, synthetic construct
  misc_feature 1..120: note = Artificially Synthesized Probe
  source 1..120: mol_type = other DNA
tggtggtactcacctgtagtcccagctactcaggaggctgaggtgggaggaccaattgagcccaagagattgaggctgcagtgagccaagatcatgccactgcactccagcctgggtgac

SEQ ID NO: 123 - DNA, 120 bp, synthetic construct
  misc_feature 1..120: note = Artificially Synthesized Probe
  source 1..120: mol_type = other DNA
tgaaaataattcatttgaaacaggtgaattttatggcatatcaatgacacggcaataaagctgtttctttcaatggtgccatcaaccccagccccttgaccctaagctgaaggaagagag

SEQ ID NO: 124 - DNA, 120 bp, synthetic construct
  misc_feature 1..120: note = Artificially Synthesized Probe
  source 1..120: mol_type = other DNA
gtggcagctgtgttcatcatcttgactgggtcaagatgtatccagctgtacctttcatgtgcggtttattgtatacatccgttgaaacatattaagacaaaaaagggaaaacaaagacca

SEQ ID NO: 125 - DNA, 120 bp, synthetic construct
  misc_feature 1..120: note = Artificially Synthesized Probe
  source 1..120: mol_type = other DNA
agtcaggcctcagtatgccttatccgccacctgattccaaatcaaagtaaaacatctctccccagatgtgtacacagcactcctctaaattaaagggctgtgtgctggctctgggtaccc

SEQ ID NO: 126 - DNA, 120 bp, synthetic construct
  misc_feature 1..120: note = Artificially Synthesized Probe
  source 1..120: mol_type = other DNA
cggctccgggtgcccctgaagccccgtccccgggggccccttgacaccctgtctcccgggcgggggcgaccccctgacatcctgctcccccggggaggcgggggagacgaacccgtgaag

SEQ ID NO: 127 - DNA, 120 bp, synthetic construct
  misc_feature 1..120: note = Artificially Synthesized Probe
  source 1..120: mol_type = other DNA
catagacaaaaaaatatatccttaccaacttattaaagtcagatattcatgaagggtcccatcctacctgtgtatcagcagaaactggcagccatcagccattgcccagcaagaacaggc

SEQ ID NO: 128 - DNA, 120 bp, synthetic construct
  misc_feature 1..120: note = Artificially Synthesized Probe
  source 1..120: mol_type = other DNA
ctggctatctcgatagcaggtcacctgtgagtctttacactcaaaggaaatagaacagcagggaagggaactgaaaagcagtagaagaaacagtcagagatgcctcactgatagacagga

SEQ ID NO: 129 - DNA, 120 bp, synthetic construct
  misc_feature 1..120: note = Artificially Synthesized Probe
  source 1..120: mol_type = other DNA
tgtacaaggtggcacaaaagacgtacgcattccagttcttggaagctggcttccctcgagtctggagtgctgggtttgggagttttctattgcagtctttcaagtctgagttggacccca

SEQ ID NO: 130 - DNA, 120 bp, synthetic construct
  misc_feature 1..120: note = Artificially Synthesized Probe
  source 1..120: mol_type = other DNA
gaggtgtgctttgctctccacttctgagggtctcagtaacgtgggtccaaacacggtagccaggttgtgaagtgacattttgttgatgggctccttctcggcaaccctaagaaggagaag

SEQ ID NO: 131 - DNA, 120 bp, synthetic construct
  misc_feature 1..120: note = Artificially Synthesized Probe
  source 1..120: mol_type = other DNA
agatactgttctgaaaactccctggaacaactcacactcgccgcagtcctttgaggtaaatatgattatcgtcacccccatcgtgtagatgaagaaaccgaagtacagaggggttaagtg

SEQ ID NO: 132 - DNA, 120 bp, synthetic construct
  misc_feature 1..120: note = Artificially Synthesized Probe
  source 1..120: mol_type = other DNA
ccagtgggtttcaccttttttgactgtggcccacaatacaacccatgctgtaacacagtccacacgtctctatgtaactgaaaagcagcacctgcatcaaggcttacaatgtatcctcct

SEQ ID NO: 133 - DNA, 120 bp, synthetic construct
  misc_feature 1..120: note = Artificially Synthesized Probe
  source 1..120: mol_type = other DNA
tgtctcgtaacaggacaccccctggtctgtgtggctaaggttaagccagtagggacatatcctgccagcggtggattctctttctccaccccttctgctgctggagcgtgggtgcaagca

SEQ ID NO: 134 - DNA, 120 bp, synthetic construct
  misc_feature 1..120: note = Artificially Synthesized Probe
  source 1..120: mol_type = other DNA
atccatcacccagagttcagagccacattcataccatgtggcctgcagcttccttccgactggaacctctccatcgctaagcccctctctggaaggcattgcacacttttcacacgtaaa

SEQ ID NO: 135 - DNA, 120 bp, synthetic construct
  misc_feature 1..120: note = Artificially Synthesized Probe
  source 1..120: mol_type = other DNA
aaacctacaagttgggtcatcctgggcaagtgagtcggcccttgtgagtttctgcagttgcttacctgcagcaagggacaagagattggaggggaggggattacaagagaaagcacttgc

SEQ ID NO: 136 - DNA, 120 bp, synthetic construct
  misc_feature 1..120: note = Artificially Synthesized Probe
  source 1..120: mol_type = other DNA
atcttcacaccgaagacgccggtctgctttttggacggggtcctcttcaggctcatatctcggctggtgaatttcatggaaaattccactttgatctggttggggggtgaggcaggtaaa

SEQ ID NO: 137 - DNA, 120 bp, synthetic construct
  misc_feature 1..120: note = Artificially Synthesized Probe
  source 1..120: mol_type = other DNA
cctgtgcacctgcgaactaattctgagcaactgtgcgctccctggcactttctgaagtcaaaatctgaacatttccaagtttaaatagttgcaaagagtatgatttccaaaatcatgtca

SEQ ID NO: 138 - DNA, 120 bp, synthetic construct
  misc_feature 1..120: note = Artificially Synthesized Probe
  source 1..120: mol_type = other DNA
aacaacaacaaaaaactacacaaacaagctcttctttccctcacagagctcctggatcttctctccttgaatttgtttctattccatttctcctaaagaatgttgtcctagtttatattt

SEQ ID NO: 139 - DNA, 120 bp, synthetic construct
  misc_feature 1..120: note = Artificially Synthesized Probe
  source 1..120: mol_type = other DNA
tggtggaatgctctctcaatgagatgggcggaacattttttgctttagttcgcgtatctatagggtattattttttgctagagtgaaacgaggctcagcatcaatttggttcatgtttct

SEQ ID NO: 140 - DNA, 120 bp, synthetic construct
  misc_feature 1..120: note = Artificially Synthesized Probe
  source 1..120: mol_type = other DNA
tcaggcctctcctctgcagaggacaggatggcgagatgctggctctcaggcagatggctttctggcaatagcacctatggcagctgagaatctgcaaactgatttcctgaaaactctcct

SEQ ID NO: 141 - DNA, 120 bp, synthetic construct
  misc_feature 1..120: note = Artificially Synthesized Probe
  source 1..120: mol_type = other DNA
tgtatttatttttctagagacagggtctcactgtgccgtccaggctgctatgttgccctgggcttcagtgatcctcctgcctcagcctcctgaagagctggcattacaggcatgtaccac

SEQ ID NO: 142 - DNA, 120 bp, synthetic construct
  misc_feature 1..120: note = Artificially Synthesized Probe
  source 1..120: mol_type = other DNA
gttatggaagagtgagagcaacggacttatctcgagctcttcctgcaagtctgacactgatgaatcctctacacacagcatctgcgttcatgatcatgatagcagacatatgcggtttaa

SEQ ID NO: 143 - DNA, 120 bp, synthetic construct
  misc_feature 1..120: note = Artificially Synthesized Probe
  source 1..120: mol_type = other DNA
atatcatttaaacacagaggagggagggagaggcacagcgtacattttccagagaaacgctgctgcccgcaactgcgctggctatttataactcctgggaaatgtggactgtgctatttc

SEQ ID NO: 144 - DNA, 120 bp, synthetic construct
  misc_feature 1..120: note = Artificially Synthesized Probe
  source 1..120: mol_type = other DNA
tgaagacccgaaggtgagcgtggattctctgccaagaatcccgtaggtggctggtggaggtcgcctcgcctttctggaccgaagtgacctcatgtttggggcaggaatcagcaaagtggc

SEQ ID NO: 145 - DNA, 120 bp, synthetic construct
  misc_feature 1..120: note = Artificially Synthesized Probe
  source 1..120: mol_type = other DNA
tccagcctggcggcagaaaaaaaaaaaaaatgcttcttcacaacaaaggtggtaaatctgttcctgagaggtgggacaggaacgctagaaaatgactcccagccgggcgcggtggctcat

SEQ ID NO: 146 - DNA, 120 bp, synthetic construct
  misc_feature 1..120: note = Artificially Synthesized Probe
  source 1..120: mol_type = other DNA
caacaccagagaacttcgaagttccccaagcctcatgggaggaaggggattagcagctctgaacgacgcttttgtccaaggcaggctagcctcttagcacccgcagcaacctgccttccc

SEQ ID NO: 147 - DNA, 120 bp, synthetic construct
  misc_feature 1..120: note = Artificially Synthesized Probe
  source 1..120: mol_type = other DNA
aaaaaaaaaaagcagcatcaacagccttctctgataccagcttcaccctccctgcccgggcccagaacactttctgggcatggagcttgctgccggggacgtgaggggctccagcaattc

SEQ ID NO: 148 - DNA, 120 bp, synthetic construct
  misc_feature 1..120: note = Artificially Synthesized Probe
  source 1..120: mol_type = other DNA
tttgggaagctgaggcgggtggatcacctgaggtcaggagttcaagaccagcctggctaacacggtgaaaccccgtctctactaaaaatacaaaaaattagctgggcgaggtggcgggcg

SEQ ID NO: 149 - DNA, 120 bp, synthetic construct
  misc_feature 1..120: note = Artificially Synthesized Probe
  source 1..120: mol_type = other DNA
aggttttttatggctgaattcttcttgtcatttaaatcttcgttcaaaagtgatcctctcaagccaggcatccccccgtcactctctactgcgttacccagttgtgtttatttttttcac

SEQ ID NO: 150 - DNA, 120 bp, synthetic construct
  misc_feature 1..120: note = Artificially Synthesized Probe
  source 1..120: mol_type = other DNA
aaaatgtctggggcctcattgcctctgggtactacagcaacactgggctcaggcagctttggcctttgaggaacccccttgattggcaggttctcctctccctggtccagagccatccaa

SEQ ID NO: 151 - DNA, 120 bp, synthetic construct
  misc_feature 1..120: note = Artificially Synthesized Probe
  source 1..120: mol_type = other DNA
agacttctattgcagaaggctgcgagatctttcctgacgcccagactggattataaaataaagtagacgagcccaagacatatctgtatcttgtacccagcacctgtgtaccctcgatgg

SEQ ID NO: 152 - DNA, 120 bp, synthetic construct
  misc_feature 1..120: note = Artificially Synthesized Probe
  source 1..120: mol_type = other DNA
aaaaaaaaacaaacagggaaaaggaaagaaaagtagaaacgcgaagttcaataccgagagccctggctgaacccacaaacccagatgccacgtgtctcccagctaaacactcgcacaaaa

SEQ ID NO: 153 - DNA, 120 bp, synthetic construct
  misc_feature 1..120: note = Artificially Synthesized Probe
  source 1..120: mol_type = other DNA
caggcactgccagaggcaaacccagctaaggaattcttgaaggggcttctcagttctgccggccacaaatgcatagggaaagaactgaaagtctgggacctcaggtttaaaagttgcccc

SEQ ID NO: 154 - DNA, 120 bp, synthetic construct
  misc_feature 1..120: note = Artificially Synthesized Probe
  source 1..120: mol_type = other DNA
ctcccttgttgctctcttgatggatgggcccagccctggccagccggactggcactctgagacagctaactcggacagttgatttgatctgcagagttatcgagcacttcctgtgcgctg

SEQ ID NO: 155 - DNA, 120 bp, synthetic construct
  misc_feature 1..120: note = Artificially Synthesized Probe
  source 1..120: mol_type = other DNA
cgcctccctccctccctccctccccgcgctcccctccctccctccctccgtccgcgtccctcctccctcctccctcctccgcatccctccttccccgccctccgcgaggctgcagcccag

SEQ ID NO: 156 - DNA, 120 bp, synthetic construct
  misc_feature 1..120: note = Artificially Synthesized Probe
  source 1..120: mol_type = other DNA
tagtgaactttctaaccgcagagactaggacacaaattacgtctcaaggtaacagtgcaagttagagtacggtattcagagaaaagagaaaggctgaatcccaaatgtttaactatgcaa

SEQ ID NO: 157 - DNA, 120 bp, synthetic construct
  misc_feature 1..120: note = Artificially Synthesized Probe
  source 1..120: mol_type = other DNA
tccagggctccaggaggacccagacagccccttcacacagccacaaagccatctcctccaggaaggctctgctcactcctcaggccccactgcttggtcccactcatgtcattttttttt

SEQ ID NO: 158 - DNA, 120 bp, synthetic construct
  misc_feature 1..120: note = Artificially Synthesized Probe
  source 1..120: mol_type = other DNA
agacttgccttctctcccccaagcccgactcattgcttcctggagtcaatggtcttgggtggaagaagatctgtgcaagacagatgtccccagcaaaagcagaagtctgaattctagtcg

SEQ ID NO: 159 - DNA, 120 bp, synthetic construct
  misc_feature 1..120: note = Artificially Synthesized Probe
  source 1..120: mol_type = other DNA
acgacctgcaagactcccccggctggataaacagagcctggtggtaaggcccccacgaacagatgtcactgcctttggaattaaaaacattcctagtggaccatcccatcctccctcagc

SEQ ID NO: 160 - DNA, 120 bp, synthetic construct
  misc_feature 1..120: note = Artificially Synthesized Probe
  source 1..120: mol_type = other DNA
ctgcattcttactgtgtgttctgaccatttcctgtaccgaccctaaccaaaacctgcggactggaaggccaaatgtcttcccagaatgagacactgagactcactctaggtttttctccc

SEQ ID NO: 161 - DNA, 120 bp, synthetic construct
  misc_feature 1..120: note = Artificially Synthesized Probe
  source 1..120: mol_type = other DNA
tgtttttctctgggttcagtttccacagctgtcaaatcaggagctcggaacagacacatggtctccggtgagatttcttttctgctgaggacgcacccctgccgttttttccaaatgaaa

SEQ ID NO: 162 - DNA, 120 bp, synthetic construct
  misc_feature 1..120: note = Artificially Synthesized Probe
  source 1..120: mol_type = other DNA
cctaactcaagaaattctctggcaacccttctgtggcatccttctcttgaagctttcagaaaacacggaaagtgggacaaccctggagctgatcctttggattcctaggaggaagcagca

SEQ ID NO: 163 - DNA, 120 bp, synthetic construct
  misc_feature 1..120: note = Artificially Synthesized Probe
  source 1..120: mol_type = other DNA
caggagccgaggcggggcctgacatgcactcctggccttggcgggcgccgacgcgggctgatcttccagggagaggtcactccggtgtcccacgacagggagctatgggggctgtgagtg

SEQ ID NO: 164 - DNA, 120 bp, synthetic construct
  misc_feature 1..120: note = Artificially Synthesized Probe
  source 1..120: mol_type = other DNA
atactcgctctgttctcccaactaacgatggagaaagctagactcagccccgcaagatctgtctggcctcaaaaccccggcaacactggctaacgatccaagttctcgttttcctttttt

SEQ ID NO: 165 - DNA, 120 bp, synthetic construct
  misc_feature 1..120: note = Artificially Synthesized Probe
  source 1..120: mol_type = other DNA
agtaaataaataaaagaagaaactgagatgccaagaagtcaagggaccagaggttgttcccgcggcctcagggtgactgcgtctgcattcgatgcacctaaaccactgaccaggggagga

SEQ ID NO: 166 - DNA, 120 bp, synthetic construct
  misc_feature 1..120: note = Artificially Synthesized Probe
  source 1..120: mol_type = other DNA
aggaaattcagacacacaacggcatatgggtgaagctcaaggacatgaggaggacaaatgctgtctgattccacctacgtaaggttcccagactggacaaattcgtacagacagaaagca

SEQ ID NO: 167 - DNA, 120 bp, synthetic construct
  misc_feature 1..120: note = Artificially Synthesized Probe
  source 1..120: mol_type = other DNA
tacagtagcgcaatccttagctcactctagcctccttagcctcccaagtagtccacagctacaccacgtgagctactatgcctggcttctaccactattttttctttaaaaagaataaag

SEQ ID NO: 168 - DNA, 120 bp, synthetic construct
  misc_feature 1..120: note = Artificially Synthesized Probe
  source 1..120: mol_type = other DNA
gcctgcgcaccttgctggaataacacagagccttagcatagcaattgcgctggccgctctataccaagatttctacaaagaatataaagtacttttaacaaagtatccaaaaaggtgctt

SEQ ID NO: 169 - DNA, 120 bp, synthetic construct
  misc_feature 1..120: note = Artificially Synthesized Probe
  source 1..120: mol_type = other DNA
atttagcaccgtgctgggctcgtcctgggctcgcttatgtgtgtacggctattgtggctgacatctagcattcttctcactggagaacatggaccaatatactcgtctttccaatctgac

SEQ ID NO: 170 - DNA, 120 bp, synthetic construct
  misc_feature 1..120: note = Artificially Synthesized Probe
  source 1..120: mol_type = other DNA
aaaggcctgagacgtggggacatggcacagaggagggaacatggcctttcccacataccatacgcagagatgccttggccaaggtacttaacctcagtaccccagtgtcctcatctgtaa

SEQ ID NO: 171 - DNA, 120 bp, synthetic construct
  misc_feature 1..120: note = Artificially Synthesized Probe
  source 1..120: mol_type = other DNA
ctggcagcaggaaggtttatgtttcttttaatatcaactcccaggcatttaacattcctcgaagcttaaacacagaaacattttccttaccagactctgccttctgctttgccaaacata

SEQ ID NO: 172 - DNA, 120 bp, synthetic construct
  misc_feature 1..120: note = Artificially Synthesized Probe
  source 1..120: mol_type = other DNA
tcttcaaaattggcagaatgtttcagagacacaggctgcacacacagaggccttttccctatatatgtttatagggagccaaaagcacagttgaggcataaatgctgtttttatttattt

SEQ ID NO: 173 - DNA, 120 bp, synthetic construct
  misc_feature 1..120: note = Artificially Synthesized Probe
  source 1..120: mol_type = other DNA
tctgtcctttgcccatgatcttgtccacgatctcattgttgtccttgttgaccttggtcttgtcatagcacttctcatagcacaggatcctcagggactgggagccctccagctcgatct

SEQ ID NO: 174 - DNA, 120 bp, synthetic construct
  misc_feature 1..120: note = Artificially Synthesized Probe
  source 1..120: mol_type = other DNA
gctccgctgtgtcccggaacaccctggttttggctttgctgacaaaatagccgaaggaatccacctccagggtacagtacaggtctgtgggggaaggacagacggagatactgagtgagt

SEQ ID NO: 175 - DNA, 120 bp, synthetic construct
  misc_feature 1..120: note = Artificially Synthesized Probe
  source 1..120: mol_type = other DNA
aaaaaaaaccaaaaaaaccagctttcctgcagaaaggacagtgcagctaccccaagaagcctccagctggagcaacagaaagaagacccaggtgggcctcagaacacacagaacggggct

SEQ ID NO: 176 - DNA, 120 bp, synthetic construct
  misc_feature 1..120: note = Artificially Synthesized Probe
  source 1..120: mol_type = other DNA
ttccggaaggggctgggggagggttcacagggtcagagggagggttccggaaggggctgggggagggttcacagggtcagagggagggttccggaaggggctgggggaggggtcacaggg

SEQ ID NO: 177 - DNA, 120 bp, synthetic construct
  misc_feature 1..120: note = Artificially Synthesized Probe
  source 1..120: mol_type = other DNA
agtttaccacggctgaagacacagggcctcacctctgagtgagaacagacatatgagtgggtcaggggtggcggcggcgaagggagtgaggataatctgggggtaaagagagattttgga

SEQ ID NO: 178 - DNA, 120 bp, synthetic construct
  misc_feature 1..120: note = Artificially Synthesized Probe
  source 1..120: mol_type = other DNA
atgttaagtcttttctcctctctgtgactcggttacctcctctggcaaatgggtagaaactattagctgtctaactgactcacagattcccgtgtggataacaggtagataaaaagcgca

SEQ ID NO: 179 - DNA, 120 bp, synthetic construct
  misc_feature 1..120: note = Artificially Synthesized Probe
  source 1..120: mol_type = other DNA
ttactggctgattgcttaaatcccttggcagagtggacgatgacatgaaggaagccatagagtcctggagactcatcgtctgcaagagagaaaagcccccagggcagagggtggtcagcg

SEQ ID NO: 180 - DNA, 120 bp, synthetic construct
  misc_feature 1..120: note = Artificially Synthesized Probe
  source 1..120: mol_type = other DNA
aaaactgaccaatatgataaatcattctgctaatgatttatgtcgaggaaagcttgccttcaggaccccgttcacaaagtggaccctttcccagcacacaggcagctagaatacacccac

SEQ ID NO: 181 - DNA, 120 bp, synthetic construct
  misc_feature 1..120: note = Artificially Synthesized Probe
  source 1..120: mol_type = other DNA
ccaaagacgtgatactggacatgaaacgcttagaaatacaaaaggcccatcaatgccacggacatcattggggagcgtggaagaggcaggaatttacccttcttctgtagtttctgaatt

SEQ ID NO: 182 - DNA, 120 bp, synthetic construct
  misc_feature 1..120: note = Artificially Synthesized Probe
  source 1..120: mol_type = other DNA
agggttcccctcacactcgggcctttctcacgagcagcactaagcacgacactccactgtgtgttaacatgctctttacattttccgtatttcgtgatgttttgacatcttgtggcagga

SEQ ID NO: 183 - DNA, 120 bp, synthetic construct
  misc_feature 1..120: note = Artificially Synthesized Probe
  source 1..120: mol_type = other DNA
cattatgcttcaagtctcagctcccaaggccatcctcaagctcctcagttagaattcacctctatggtgttttgttctttttaacccactggactggcaaaattgtaaagaatgttcaca

SEQ ID NO: 184 - DNA, 120 bp, synthetic construct
  misc_feature 1..120: note = Artificially Synthesized Probe
  source 1..120: mol_type = other DNA
gtcagcagtgggaggtgagtggcgaccagctttaccctgtacatgctggtactacgagcatttctcattaaaaccagccagtattatattggggattagaaaaaacatgaaaatttaaaa

SEQ ID NO: 185 - DNA, 120 bp, synthetic construct
  misc_feature 1..120: note = Artificially Synthesized Probe
  source 1..120: mol_type = other DNA
gttttctacgtgtcgaatatgaggaacatggaacagaagaaaatagcgctgtccctggagttcaaattccagtggggaagagaggagtctgacaatgcaattacaattcagtaccattta

SEQ ID NO: 186 - DNA, 120 bp, synthetic construct
  misc_feature 1..120: note = Artificially Synthesized Probe
  source 1..120: mol_type = other DNA
gctatgcatgttcctctagacactgttgttacgtgaactgagggctatgcatgttcctctagacgctgttgttatgtgaactgagggctatgcatgttcctctagacactgttgttatgt

SEQ ID NO: 187 - DNA, 120 bp, synthetic construct
  misc_feature 1..120: note = Artificially Synthesized Probe
  source 1..120: mol_type = other DNA
tccagacactgttgttatgtgaactgagggctatgcatgttcctctagacactgctgttatgtgaactgagggctatgcatgttcctctagacactgttgttacgtgaactgagggctat

SEQ ID NO: 188 - DNA, 120 bp, synthetic construct
  misc_feature 1..120: note = Artificially Synthesized Probe
  source 1..120: mol_type = other DNA
tacgtgaactgagggctatgcatgttcctctagacactgttgttatgtgaactgagggctatgcatgttcctctagacactgttgttatgtgaactgagggctatgcatgttcctctaga

SEQ ID NO: 189 - DNA, 120 bp, synthetic construct
  misc_feature 1..120: note = Artificially Synthesized Probe
  source 1..120: mol_type = other DNA
gcactttggctgcatccatgggtactggtatgtagtacactcatttccagacagcactaaacagtttgcagttctcattttgaattttgatttcctctttaccttgtcagtttgaacttt

SEQ ID NO: 190 - DNA, 120 bp, synthetic construct
  misc_feature 1..120: note = Artificially Synthesized Probe
  source 1..120: mol_type = other DNA
gatctgtcagtttctgagaggcctcccaggtccttttccttgcacaggtcctgcttttccttacaaaagcctgctttttcttctcttgcttccctctacctccactttttttttttgttt

SEQ ID NO: 191 - DNA, 120 bp, synthetic construct
  misc_feature 1..120: note = Artificially Synthesized Probe
  source 1..120: mol_type = other DNA
tgccatcgcaaaggacgacaggcagaagcatgtgtgcttattattgccatctctgcctcagaactatctcaaacatgatctagttccagggagtcatgtcctttattattattatttttt

SEQ ID NO: 192 - DNA, 120 bp, synthetic construct
  misc_feature 1..120: note = Artificially Synthesized Probe
  source 1..120: mol_type = other DNA
ggcataaaccctcaataaatagtagcaggagacgtggtgaatattcacagcactgcagttagcagaaattcagagatgtctaataaaaggagaatgcttaagtagacgatggcacatcta

SEQ ID NO: 193 - DNA, 120 bp, synthetic construct
  misc_feature 1..120: note = Artificially Synthesized Probe
  source 1..120: mol_type = other DNA
actcacacactcaccctgcagaggtcttcttcagcttggcacacagtaggacatctgtaaagaggaagacgtgccgcagcttccgggagctctctgacacttccaccaggaagccgtcct

SEQ ID NO: 194 - DNA, 120 bp, synthetic construct
  misc_feature 1..120: note = Artificially Synthesized Probe
  source 1..120: mol_type = other DNA
gctcagagccggggggtcgtccccatctgtgccagcctttcctgtatgatacacggtgtgacctacatctgctgtaatacgtaggtgagcgtattcaaagtatacaattaagatgaccga

SEQ ID NO: 195 - DNA, 120 bp, synthetic construct
  misc_feature 1..120: note = Artificially Synthesized Probe
  source 1..120: mol_type = other DNA
gtcccaggtgaggaatccagctctgacaccagtggctgaaagactgcgtggtggacctggagagactccccagcctcaggttcttctggctcactggattgttattattatttctgagat

SEQ ID NO: 196 - DNA, 120 bp, synthetic construct
  misc_feature 1..120: note = Artificially Synthesized Probe
  source 1..120: mol_type = other DNA
tgagttgaggggagcggctctggggcctgatgtgtggccaccggggagtgctcagtccccatccaaagggtgggcactcagggacctgcctaattcccgcaaaatctgaactacaaatca

SEQ ID NO: 197 - DNA, 120 bp, synthetic construct
  misc_feature 1..120: note = Artificially Synthesized Probe
  source 1..120: mol_type = other DNA
tggccattcggaggcttgacactcacgtgtaggactagggtgctccgagtgacccggtcaatgggcttgtagagcagagctgtcgggggagacagggagaaggaggaagaggatgatgga

SEQ ID NO: 198 - DNA, 120 bp, synthetic construct
  misc_feature 1..120: note = Artificially Synthesized Probe
  source 1..120: mol_type = other DNA
tcaaaaaaaaagaaaaaaggctgtgctctcaaacacgtggcagcctgaggggcaaaggtttcctgaagcaactcaggttaggcctcacatatgagagccccaaagaggctgggaggacgc

SEQ ID NO: 199 - DNA, 120 bp, synthetic construct
  misc_feature 1..120: note = Artificially Synthesized Probe
  source 1..120: mol_type = other DNA
tgctccccagccccgtcaactcaacccaaatctctgcaagaccacaagggccatcagcatttctataaagcttctttactgatttgaatgtataataatggttgaaaaccactgctttat

SEQ ID NO: 200 - DNA, 120 bp, synthetic construct
  misc_feature 1..120: note = Artificially Synthesized Probe
  source 1..120: mol_type = other DNA
ctctctagtttgctgggtactcgctctgtgcccaagggtactgagttaactgctttgctctcattatttcctgtgattaaaacgggaagcaattctcactagccccattttacagacaag

SEQ ID NO: 201 - DNA, 120 bp, synthetic construct
  misc_feature 1..120: note = Artificially Synthesized Probe
  source 1..120: mol_type = other DNA
aggaagccaagggtacgtttccttttcagggaggcagagtcaagacctgaccaactcctaggccagaccaaaaagaccatttctcctctgatcgctgaccaggccaatttcaagtgagaa

SEQ ID NO: 202 - DNA, 120 bp, synthetic construct
  misc_feature 1..120: note = Artificially Synthesized Probe
  source 1..120: mol_type = other DNA
cacatctaagcccactccagccggcccccagaggtgggagggtccgccacctcccacagcgagcacctgggttaccataggtgcagttacagcagaagcgaataatgaggagaatctcca

SEQ ID NO: 203 - DNA, 120 bp, synthetic construct
  misc_feature 1..120: note = Artificially Synthesized Probe
  source 1..120: mol_type = other DNA
gagttcctgccaaagggaggagaggagtcatggcctgttctgtccctcacctctcccagcccccactgtgagcctggcaagaaggggagttctgaaactcagggtgtacatatgagaaca

SEQ ID NO: 204 - DNA, 120 bp, synthetic construct
  misc_feature 1..120: note = Artificially Synthesized Probe
  source 1..120: mol_type = other DNA
cctgcttggtctgcaggggaggaagcgctcagacagcaggaacttcctacttctgtctcaagctgtttctagacagagaaaactcctggagatggagcttgggtgtgtgtatattttggg

SEQ ID NO: 205 - DNA, 120 bp, synthetic construct
  misc_feature 1..120: note = Artificially Synthesized Probe
  source 1..120: mol_type = other DNA
tctataggtacgtttcattccagaggcgaagtgtcagcaagcccactgtggctacagatccaaatccacattttccaagctgcatttttttaacagtaatgaaggtgacatgttcatctc

SEQ ID NO: 206 - DNA, 120 bp, synthetic construct
  misc_feature 1..120: note = Artificially Synthesized Probe
  source 1..120: mol_type = other DNA
cttaccctttttgtgtttatgggatggcagtcttagagttggcaagaaccttaaaagacgacctatagtccaaatttcctcaagacttccctgtcataaatattacccagaagcttgttc

SEQ ID NO: 207 - DNA, 120 bp, synthetic construct
  misc_feature 1..120: note = Artificially Synthesized Probe
  source 1..120: mol_type = other DNA
aaaataaataaaatagatcgttttctattaagagggaaaatgtcaggtgcaagaaagcaaatatcaggctaagtgttacccattagagtaaccacttcaccgactggcaagcgagggagg

SEQ ID NO: 208 - DNA, 120 bp, synthetic construct
  misc_feature 1..120: note = Artificially Synthesized Probe
  source 1..120: mol_type = other DNA
ttccccaaatatttatggaaaggcttcgctgcgctgtatataagcacttcctcttaagggaccaaagggtagaaattcaaattaaagccatcacgagatattttatactcatcagaaggg

SEQ ID NO: 209 - DNA, 120 bp, synthetic construct
  misc_feature 1..120: note = Artificially Synthesized Probe
  source 1..120: mol_type = other DNA
aagcacctgagatacggccggttcaaactgagacgtgccggacatgtaaaatacacagtgggttccaaagccttagtatgtaaaagagaatgtaaattacctcgttaatttttaaatact

SEQ ID NO: 210 - DNA, 120 bp, synthetic construct
  misc_feature 1..120: note = Artificially Synthesized Probe
  source 1..120: mol_type = other DNA
gcacccgatttacacatagcattgctgacaagctccaaaacgaacatgggttgaactgtaaaatacgattgctgacaagctccaaaacgaacatgggttgaactgtaaaatatgatatat

SEQ ID NO: 211 - DNA, 120 bp, synthetic construct
  misc_feature 1..120: note = Artificially Synthesized Probe
  source 1..120: mol_type = other DNA
gcaggttcattaactgggaagtgcaggttgcctggaaacagcagcctggcactggagtgatctcataaaacaaacagcagagacgctaattcccttctctcagtaacgaataatcaaata

SEQ ID NO: 212 - DNA, 120 bp, synthetic construct
  misc_feature 1..120: note = Artificially Synthesized Probe
  source 1..120: mol_type = other DNA
aggtgttcaccatccctgaaccggagggagcaggggggggtatgctagaaccagagtgtggcattcccttggaaggataccttccagggtgcctcttcccaatttaataataataataat

SEQ ID NO: 213 - DNA, 120 bp, synthetic construct
  misc_feature 1..120: note = Artificially Synthesized Probe
  source 1..120: mol_type = other DNA
tcagatattaactcctcaaaatcacccaatgaggtaaatactgttactatcctgttttttacagatgaggaagctgattcagagcggttgggtaagttgcccagttgcaggtttaatctg

SEQ ID NO: 214 - DNA, 120 bp, synthetic construct
  misc_feature 1..120: note = Artificially Synthesized Probe
  source 1..120: mol_type = other DNA
aggcagggagctcagctctgaacacactcagctagaggtcctaggagtgtccaggcaggagagggagagtcttctccagcgtgagaaaggcagagccctgtccattcagccagaacacgg

SEQ ID NO: 215 - DNA, 120 bp, synthetic construct
  misc_feature 1..120: note = Artificially Synthesized Probe
  source 1..120: mol_type = other DNA
atggtgacctggctgtcccactgttgcaccttggggcacaggttgtcatagaactccttgtggatctcatagatgtcctggatcttgtagaagatggtctcgatctgctggatggtgagc

SEQ ID NO: 216 - DNA, 120 bp, synthetic construct
  misc_feature 1..120: note = Artificially Synthesized Probe
  source 1..120: mol_type = other DNA
gaccgtgggataacgggacgtgcaggcatttcctcagtgtggttctctgcattttataaatcacctacaatgaatgaatatgaataatcagaaaaaaaaaaaccaaagatgaccaggctg

SEQ ID NO: 217 - DNA, 120 bp, synthetic construct
  misc_feature 1..120: note = Artificially Synthesized Probe
  source 1..120: mol_type = other DNA
caaaaacaaaaacgaggcttagacttaatctacgttgctctgcagacccaggaacagtggggaaaagttatggggtcagattcgggctcactagagctgtcccccataggattaagtagt

SEQ ID NO: 218 - DNA, 120 bp, synthetic construct
  misc_feature 1..120: note = Artificially Synthesized Probe
  source 1..120: mol_type = other DNA
gcttcgtgtcaccagcagcctcatgtgtgaaactgggataatacagccatgcgctacctactggcattcccgtcagtgcgtacacgatcatggtcccagactgcaatttttttttttttt

SEQ ID NO: 219 - DNA, 120 bp, synthetic construct
  misc_feature 1..120: note = Artificially Synthesized Probe
  source 1..120: mol_type = other DNA
ttctcacttgccagtgggacttcacatagccgtttgtcagctctgtcccccagcgaccggcctttcgaaataagggaaagaaatgtacccacttcctccacctcctgccccagaaggcct

SEQ ID NO: 220 - DNA, 120 bp, synthetic construct
  misc_feature 1..120: note = Artificially Synthesized Probe
  source 1..120: mol_type = other DNA
tgcatatcaggaagtgttcagatgaaagcaaacaggctggggcagagcggtgggaatggggtcaggagtgggaaagcgagcatggagggaacgaatttcttctccttcaagctggcacct

SEQ ID NO: 221 - DNA, 120 bp, synthetic construct
  misc_feature 1..120: note = Artificially Synthesized Probe
  source 1..120: mol_type = other DNA
ctagatcctctgtctgaactcctttcaaatacacaccctgttagtaatgacaactatgttcctttttggacagcaattcacggtttggaagacgtgtttcacgaatgtctgacgggttgt

SEQ ID NO: 222 - DNA, 120 bp, synthetic construct
  misc_feature 1..120: note = Artificially Synthesized Probe
  source 1..120: mol_type = other DNA
tcacttatctttcccgtgtatgatgcatgctgacattttttcattggtttaaaaatgctggttcaacccactgtactggtttcacaacccactgtactgatttcacaacccaaagcactg

SEQ ID NO: 223 - DNA, 120 bp, synthetic construct
  misc_feature 1..120: note = Artificially Synthesized Probe
  source 1..120: mol_type = other DNA
attgacacgccacgatcactctgcataacatccagacacatctaaggagcactttcttccaaggcaaaaccacctcacatctgtgtagtacttttatcttccgaaaacattttcatattc

SEQ ID NO: 224 - DNA, 120 bp, synthetic construct
  misc_feature 1..120: note = Artificially Synthesized Probe
  source 1..120: mol_type = other DNA
actcaccagcaacagggcttccagctggttaatgtagatctcttcgctggccaagaaccccgagagaaccagcttcctcatctccaggcctttccctgcttccacctgcacaaacgcaaa

SEQ ID NO: 225 - DNA, 120 bp, synthetic construct
  misc_feature 1..120: note = Artificially Synthesized Probe
  source 1..120: mol_type = other DNA
tatacaaaacatgcagaaatataaaaggaaaagacaatcacccatattcctcctgtaacatctcgttttgcttccctcaatctattttccacctgggttctcgaaccgacttttcctccc

SEQ ID NO: 226 - DNA, 120 bp, synthetic construct
  misc_feature 1..120: note = Artificially Synthesized Probe
  source 1..120: mol_type = other DNA
gcttggaagatgctacactggtaggtttgaagacagaggatggggccacgagctaaggaatgcagagagcctttggaagctggaaatggcaataaaatgaactcactcccctagagcagg

SEQ ID NO: 227 - DNA, 120 bp, synthetic construct
  misc_feature 1..120: note = Artificially Synthesized Probe
  source 1..120: mol_type = other DNA
catctcccatcttttccagctttcctcagactccacaattcccagtttagagccatgaggaaattcacattgtttcttcagtctttgcagggcgtctcttgtctcatcaaaaaccaggct

SEQ ID NO: 228 - DNA, 120 bp, synthetic construct
  misc_feature 1..120: note = Artificially Synthesized Probe
  source 1..120: mol_type = other DNA
aggcaggcaccatagggcacaggcaatgttttgaaactttggttgttcatatcccacccttaaaattttgccatactcacataccaccacctgcactattctttactcaatattgttctt

SEQ ID NO: 229 - DNA, 120 bp, synthetic construct
  misc_feature 1..120: note = Artificially Synthesized Probe
  source 1..120: mol_type = other DNA
taaaatatatacttaaccattaaaatgcaaaatatagatcgaggtgccaccgatcatttctcaaatcaccacgtggggcccgcacttagaaaaacatccaaatgggggatacaggcatga

SEQ ID NO: 230 - DNA, 120 bp, synthetic construct
  misc_feature 1..120: note = Artificially Synthesized Probe
  source 1..120: mol_type = other DNA
ggaaacaggattgatttatgggcctggcacttgggcacatgctcacaacgcaactgctgcttaaggtaagtacccctaaagtaaagtaatagcaaagagaattgccttggattcctacta

SEQ ID NO: 231 - DNA, 120 bp, synthetic construct
  misc_feature 1..120: note = Artificially Synthesized Probe
  source 1..120: mol_type = other DNA
cagtgttcagcaatgaatatgacatggtcctggtcctccaggagaatgggatataattgcggaggcaaatgtctagagttctgagcatctgagcagaatgaaatacgggcttagctgagg

SEQ ID NO: 232 - DNA, 120 bp, synthetic construct
  misc_feature 1..120: note = Artificially Synthesized Probe
  source 1..120: mol_type = other DNA
ttcagctgacccagtgcttttccttcaaggaagctcagtgacctctggctcttgccctttgcaaacaccctcttgcctcagctcggagacaccaagtccctgtctcctggctgggaagag

SEQ ID NO: 233 - DNA, 120 bp, synthetic construct
  misc_feature 1..120: note = Artificially Synthesized Probe
  source 1..120: mol_type = other DNA
gcggccgggccggggtggggtggagcggggaggccgcttcccagacgcatcttcattccccgcgcgcggccgagccaggagcccggcgagcaggggcgacccccagagccaccccggagt

SEQ ID NO: 234 - DNA, 120 bp, synthetic construct
  misc_feature 1..120: note = Artificially Synthesized Probe
  source 1..120: mol_type = other DNA
gatggctgctggaggaaacgcaagctcatggctgcctgatctctgttcaaaataagctaaaatctggcttattaacaggaatgctcctgattttaaaacgatggcaaataattaacattt

SEQ ID NO: 235 - DNA, 120 bp, synthetic construct
  misc_feature 1..120: note = Artificially Synthesized Probe
  source 1..120: mol_type = other DNA
ctcctaatgttctccatagaagcagcctgcttcaaaggcccccccaaacggtttattccaaagccagaggcctccctctccgactctttggcctctgcagtctagagtttctccaagccc

SEQ ID NO: 236 - DNA, 120 bp, synthetic construct
  misc_feature 1..120: note = Artificially Synthesized Probe
  source 1..120: mol_type = other DNA
acagcatcatggagggtgaggggcataagcacacaccacacctagctactgtttgaaatctttcgcagccactgagatttctgacaccatcaagtctaaatctcagtctccaatggttga

SEQ ID NO: 237 - DNA, 120 bp, synthetic construct
  misc_feature 1..120: note = Artificially Synthesized Probe
  source 1..120: mol_type = other DNA
cactaacaattctaactctgtagacacacataataaagaaagagaaagtctcctctggttccctctgacagagggagcctctaagagttagttatacatttttccttatttgtgtccacg

SEQ ID NO: 238 - DNA, 120 bp, synthetic construct
  misc_feature 1..120: note = Artificially Synthesized Probe
  source 1..120: mol_type = other DNA
aaaaaaaaagcagtggttagagatgctggtggggctggggaacagacaggagagagactatgtgaggcacaatgacatgagtttagtctggctggttcatgcattcattcagctaatatt

SEQ ID NO: 239 - DNA, 120 bp, synthetic construct
  misc_feature 1..120: note = Artificially Synthesized Probe
  source 1..120: mol_type = other DNA
gactggattcgtcaccttccagatcaccttgctcctccctctgcctcctctctgttctagtacaggtcactccaaaatcatatacatagttcaactacataaagctaatgttggccagat

SEQ ID NO: 240 - DNA, 120 bp, synthetic construct
  misc_feature 1..120: note = Artificially Synthesized Probe
  source 1..120: mol_type = other DNA
aaaataaaataaagctaatgttgaggagaagccggtacacaacactgtttatacagtgaaacaaataaactaaaacagaaagaaaactcccctgcactctggatgtgagccccagctctg

SEQ ID NO: 241 - DNA, 120 bp, synthetic construct
  misc_feature 1..120: note = Artificially Synthesized Probe
  source 1..120: mol_type = other DNA
gttatccctgagccggagttcctcccagcattatccctgaacccgagttcctcccagcgttatccctgagcccgagttcctcccagcattatccctgagcccgagttcctcccagcgtta

SEQ ID NO: 242 - DNA, 120 bp, synthetic construct
  misc_feature 1..120: note = Artificially Synthesized Probe
  source 1..120: mol_type = other DNA
agcctgagttcctcccagcgttatccctgagcctgagttctccccagcgttatcgctgagcctgagttcctcccagcgttatccctgagcctgagttcttcccagcgttatccctgagcc

SEQ ID NO: 243 - DNA, 120 bp, synthetic construct
  misc_feature 1..120: note = Artificially Synthesized Probe
  source 1..120: mol_type = other DNA
gacagcgctgtgcaggctctggcatcatagaaacccaagtttcaataacacgctgccccactggctgcatggtcttggacaaacaataatattaatagctattattaagagatggagtct

SEQ ID NO: 244 - DNA, 120 bp, synthetic construct
  misc_feature 1..120: note = Artificially Synthesized Probe
  source 1..120: mol_type = other DNA
tggtgaggatttcaattcgcctccacccttatctttgggttctcctgcaggctggagtctaatcccctgtttcgattttacattgacaaagcattctgccaaacaccatctcacagaaac

SEQ ID NO: 245 - DNA, 120 bp, synthetic construct
  misc_feature 1..120: note = Artificially Synthesized Probe
  source 1..120: mol_type = other DNA
actacctttcaggggagttagagctatctagagacaaggagactgaggctcagcggtatgaggacacttgcccaatgtctcacagctaaagagtagattttcttttattttcttgagatg

SEQ ID NO: 246 - DNA, 120 bp, synthetic construct
  misc_feature 1..120: note = Artificially Synthesized Probe
  source 1..120: mol_type = other DNA
ccagctattgactgcagagattaggacctctaagcctccataatcacctgaatcaattccttctaatacttttcttcgtatgtagatatagatacagataacgcacacaccctgttggtt

SEQ ID NO: 247 - DNA, 120 bp, synthetic construct
  misc_feature 1..120: note = Artificially Synthesized Probe
  source 1..120: mol_type = other DNA
gcttctagtcgatggtgtaaacatcaaccctgggggccacaagcactttagggggcagtcactctagcatctctggatttcaaggtcctcaagccaagtgagtccctcgtgagccaccaa

SEQ ID NO: 248 - DNA, 120 bp, synthetic construct
  misc_feature 1..120: note = Artificially Synthesized Probe
  source 1..120: mol_type = other DNA
acagtttctatccctggcctgtctcagagcacatacttaatattccttctacaatgcttctctctggagcagaactcttgtctctgtcaacaaggagaggtggatgccatcagagtttgt

SEQ ID NO: 249 - DNA, 120 bp, synthetic construct
  misc_feature 1..120: note = Artificially Synthesized Probe
  source 1..120: mol_type = other DNA
tgttttctttgccttctgcctaattccaagtgtaaaaattaacagtgggagcaagaggcaggacgcttccaactctcctctctgagtcaccattttgctttttatagggaataaggaggt

SEQ ID NO: 250 - DNA, 120 bp, synthetic construct
  misc_feature 1..120: note = Artificially Synthesized Probe
  source 1..120: mol_type = other DNA
cactcgtgcgggccagcgggagctggcaccgcagggcgtcctggagacacgaagatcaccgtgccggcagccttggggccagcaggagcctcctacgcactggactgcccagtggcggcg

SEQ ID NO: 251 - DNA, 120 bp, synthetic construct
  misc_feature 1..120: note = Artificially Synthesized Probe
  source 1..120: mol_type = other DNA
ctgagccaatgccccattcagctgccaggggacatggactagttttttccctagacagggttgtgtatgaagaaccacaggacccagggatgccccatcactgagatgagtgtacaccac

SEQ ID NO: 252 - DNA, 120 bp, synthetic construct
  misc_feature 1..120: note = Artificially Synthesized Probe
  source 1..120: mol_type = other DNA
cagcagctagttcaaagacacctttcctgatggtgtgagccatatgattacgttctagacaacaagatgttacagggatatgtgtggaacttgcaggaagctgctggaagagactgattt

SEQ ID NO: 253 - DNA, 120 bp, synthetic construct
  misc_feature 1..120: note = Artificially Synthesized Probe
  source 1..120: mol_type = other DNA
aacaaaaaaagattcatgcacttcagcaaatgttgggctccagtgagtgacatgctggagtgaagtgtacaactctctgcaacttactccgaaatacataaaaaataagatgggctgaac

SEQ ID NO: 254 - DNA, 120 bp, synthetic construct
  misc_feature 1..120: note = Artificially Synthesized Probe
  source 1..120: mol_type = other DNA
tggaaaacattctttgtagatgtgaataaatgaagggtctcaagatgagatcattgtcgattaaccggtgggtcctaaatccaatgctgtgtccctatggaaagagaaagggggaaaaca

SEQ ID NO: 255 - DNA, 120 bp, synthetic construct
  misc_feature 1..120: note = Artificially Synthesized Probe
  source 1..120: mol_type = other DNA
ctctttgcacaccaaatgcagtgcctgccacgcgcacagctcccccctttgcacaccaaatgcagtgcctgccacgcgcacagctccccctctttgcacaccaaatgcagtgcctgccac

SEQ ID NO: 256 - DNA, 120 bp, synthetic construct
  misc_feature 1..120: note = Artificially Synthesized Probe
  source 1..120: mol_type = other DNA
atatatatacctctccttaccccttgtccacctggtgaaatcctgttttgccctcaaatctgcctcatctgtgccctctcccaggaactttcctgtattctacatattatgataatactt

SEQ ID NO: 257 - DNA, 120 bp, synthetic construct
  misc_feature 1..120: note = Artificially Synthesized Probe
  source 1..120: mol_type = other DNA
aaaacatacgtgcatagaaaaaagactggaaggctacaacacaaaatcattagagccttccgattctggaaattttgaaaaaattaatgtacggtctctgcgctctagggcactggcaga

SEQ ID NO: 258 - DNA, 120 bp, synthetic construct
  misc_feature 1..120: note = Artificially Synthesized Probe
  source 1..120: mol_type = other DNA
aaattaaattaaataaataaaagaacagagccatttccctcatgctgttcagctgagccacactaggaagagcctgtctcatttcctgctcatgggaaatacaagtccctatatattggg

SEQ ID NO: 259 - DNA, 120 bp, synthetic construct
  misc_feature 1..120: note = Artificially Synthesized Probe
  source 1..120: mol_type = other DNA
tgttaagtgataaacttattttctgcccaagaattgaggatgggaatgagagagggaagagcagctgagggagcccagccctgaccattattccaccaaagctgcatcaaaagtcttcag

SEQ ID NO: 260 - DNA, 120 bp, synthetic construct
  misc_feature 1..120: note = Artificially Synthesized Probe
  source 1..120: mol_type = other DNA
ccatgtaggccaggctgatcttgaactcctgacctcaagtgatccacccacctcggcctcccacagtgctgggattacaggcgtgagccaccgcgcctggccaaaaatctgatgtttagt

SEQ ID NO: 261 - DNA, 120 bp, synthetic construct
  misc_feature 1..120: note = Artificially Synthesized Probe
  source 1..120: mol_type = other DNA
gatcacagatcactgtaacaggtgtcataacaataaaaaagtctgaaagatcgtgagaaccaccaacacgtaacacagagagaatgcgaggtggccacacacttccaactggtgaaaaaa

SEQ ID NO: 262 - DNA, 120 bp, synthetic construct
  misc_feature 1..120: note = Artificially Synthesized Probe
  source 1..120: mol_type = other DNA
aagcaactttccaggacactgaagatgttccatatcttgatctgggtgttagttacacaagcagacatatggaaatattcaccaagctctatgcttaagactggtgcacttgaaaagctt

SEQ ID NO: 263 - DNA, 120 bp, synthetic construct
  misc_feature 1..120: note = Artificially Synthesized Probe
  source 1..120: mol_type = other DNA
atacatacatatttgtttttaaatttctgcctccgtaccattatgactcatttacaatggaggaaatgaaagcgcagggagttaagttactcgcccaagatttcacggcagtcaggtggg

SEQ ID NO: 264 - DNA, 120 bp, synthetic construct
  misc_feature 1..120: note = Artificially Synthesized Probe
  source 1..120: mol_type = other DNA
gtaccagatcagcctgtccggggcaatttcagcagggatggtggctcagatacaaaatctaccacctcacctacaacaataaggacactgtcttctactgcactttattttattgattta

SEQ ID NO: 265 - DNA, 120 bp, synthetic construct
  misc_feature 1..120: note = Artificially Synthesized Probe
  source 1..120: mol_type = other DNA
tctctaaaatgaggataaaaacaagatctatacctcatgaagcttttgcgaggttacaatgaggaaatatatgctatgcaaggcacccaaagctggcgctaacaaaacggcagctattat

SEQ ID NO: 266 - DNA, 120 bp, synthetic construct
  misc_feature 1..120: note = Artificially Synthesized Probe
  source 1..120: mol_type = other DNA
atgacttgaatcctaagataactgttccaatcttcactgcacactggaatccctggggagttgggaagctctctggctcctaccccagggattgctactgaattggtatggaatggcctg

SEQ ID NO: 267 - DNA, 120 bp, synthetic construct
  misc_feature 1..120: note = Artificially Synthesized Probe
  source 1..120: mol_type = other DNA
gatgaaatccaatcatccacctccaagatccttggaagagggaggcagagaccgtagccgcctggagaagtggccgcctggagaagctcagggctccacagcctgagacaaaggaatcat

SEQ ID NO: 268 - DNA, 120 bp, synthetic construct
  misc_feature 1..120: note = Artificially Synthesized Probe
  source 1..120: mol_type = other DNA
caaggccattgtttcctgcgatttgacaaaatccccccaccttggcagagggaactaaaattcctcatctctctgtaggaaagacagttatgtgcccaccgaacatagaggaatcatatt

SEQ ID NO: 269 - DNA, 120 bp, synthetic construct
  misc_feature 1..120: note = Artificially Synthesized Probe
  source 1..120: mol_type = other DNA
ccatctatggctttgtaagtccttagggtatttatgaaaaattaaatgacaatctagtgctgagaagtaggaagaggcaattcagagaacagacaagtaatgccaggtccagagaggcca

SEQ ID NO: 270 - DNA, 120 bp, synthetic construct
  misc_feature 1..120: note = Artificially Synthesized Probe
  source 1..120: mol_type = other DNA
gtgaaacggaatgataggattgttgtggggattccatgagatgacgtctgtaaacagctcagcacagtgcggggcacatgaagatgaccatgattctgccacttcccctagaagtcagtt

SEQ ID NO: 271 - DNA, 120 bp, synthetic construct
  misc_feature 1..120: note = Artificially Synthesized Probe
  source 1..120: mol_type = other DNA
ctaacaaactgtaagtggacatgacaagtatcatttcacggctgaacagtgaaaaattacacacagctctttctccctttctcctccctctgtgacccttggaggccacatattccaaat

SEQ ID NO: 272 - DNA, 120 bp, synthetic construct
  misc_feature 1..120: note = Artificially Synthesized Probe
  source 1..120: mol_type = other DNA
aatacccgcattcctaagagcattattgacacttgccaaaaaacagaaacacctcaagtgtctatgggtggatgaatggatacacaaaacgcggcctttacataaaacggatattattcg

SEQ ID NO: 273 - DNA, 120 bp, synthetic construct
  misc_feature 1..120: note = Artificially Synthesized Probe
  source 1..120: mol_type = other DNA
gcgcccggcctattttgccataatttaaaaaaatagaataaaatctaaatttaaaaaaaaagtagacaggaaaggagtaataccagggacagagacccccccatgggtatcgacaggagg

SEQ ID NO: 274 - DNA, 120 bp, synthetic construct
  misc_feature 1..120: note = Artificially Synthesized Probe
  source 1..120: mol_type = other DNA
tgtcagaattttttttgttacccacctgacaaagctcttcatcttgctaaagataacagagcacttggccaagccagcgcgatgtctgcactcagatctcctctctcatcttttgcccac

SEQ ID NO: 275 - DNA, 120 bp, synthetic construct
  misc_feature 1..120: note = Artificially Synthesized Probe
  source 1..120: mol_type = other DNA
ctctgttttaccttcaacatggagtaacagtagcacccaagttcacagggtttctgtgaggatgaaacgagtaaacatctaaagcacaccgaagagaggattagttcctattaccacacc

SEQ ID NO: 276 - DNA, 120 bp, synthetic construct
  misc_feature 1..120: note = Artificially Synthesized Probe
  source 1..120: mol_type = other DNA
aaaaaaaaaaaagacaggacagtgtctactacaactcccggcacacaacaagtgctcagcacacctggaacacagactttttacctcctttcccgttgtaggcaaaagatgagagaggag

SEQ ID NO: 277 - DNA, 120 bp, synthetic construct
  misc_feature 1..120: note = Artificially Synthesized Probe
  source 1..120: mol_type = other DNA
ttaaaaaaaaaatttttgacacagcctgggcaggtttaatcagctgtgatccagagccgccctctgttctgggagatggggaccagtctggacccctttcttgccccatcatcaggtgca

SEQ ID NO: 278 - DNA, 120 bp, synthetic construct
  misc_feature 1..120: note = Artificially Synthesized Probe
  source 1..120: mol_type = other DNA
ccttcagaattcaacaggtgcagcttacagttcccgtcccgtggtgctgcctgccctggttgcattaaagtgctcataaagcccagaatcctcctgcaaaccaaaatatctccatggtgc

SEQ ID NO: 279 - DNA, 120 bp, synthetic construct
  misc_feature 1..120: note = Artificially Synthesized Probe
  source 1..120: mol_type = other DNA
aaatgtaacagctaaagctaaacaacatgtagaagaaaacctgggggtagatcttcatggtcttggacttggcaaaggattcttacatacgacaccagaagcacaagcaacagagagcac

SEQ ID NO: 280 - DNA, 120 bp, synthetic construct
  misc_feature 1..120: note = Artificially Synthesized Probe
  source 1..120: mol_type = other DNA
tgctcccttcacatgggcgacagtgtccagtgagaaaataaacctcttttcatgtgaagaaaaaaaaaaggcctctcctgagttcctggctgggtagccgggtagacggcagagctaaat

SEQ ID NO: 281 - DNA, 120 bp, synthetic construct
  misc_feature 1..120: note = Artificially Synthesized Probe
  source 1..120: mol_type = other DNA
ggctcagtaataacaacagtccacacacacatacgataagttaactcaccgcagcctcacaccgcgccaggaggcaggcactaatattatctcaattttacggatgaggaaaccgaagct

SEQ ID NO: 282 - DNA, 120 bp, synthetic construct
  misc_feature 1..120: note = Artificially Synthesized Probe
  source 1..120: mol_type = other DNA
ctttgacggtgcacagtttagagctacaggcaggagcgaagatgaacctaaaaacataaatttaaccagaaaagggcagctcacaggaacatgcttacaatgtaattcttcttcttttta

SEQ ID NO: 283 - DNA, 120 bp, synthetic construct
  misc_feature 1..120: note = Artificially Synthesized Probe
  source 1..120: mol_type = other DNA
tgacaaaggaaaccaactatattaaactactgtcttagtcatggaactctcaggagtccaagagaagtaggaatgcagtactcatacacaagagaagaatgcggtactcacatacaggag

SEQ ID NO: 284 - DNA, 120 bp, synthetic construct
  misc_feature 1..120: note = Artificially Synthesized Probe
  source 1..120: mol_type = other DNA
tatttaagcaaagttcatgaaatgtcagctctgcaactgtacagtcagtaggaattacaccccaaattcagatgaggaaacaggctcaaagatgtaacagcttcatgcaaccagcattga

SEQ ID NO: 285 - DNA, 120 bp, synthetic construct
  misc_feature 1..120: note = Artificially Synthesized Probe
  source 1..120: mol_type = other DNA
cccacaagtccagtcttttttttttttctgagtctcatctccttcccagcacctatcctgggaaggttttgttggaaatccccgtcacccacaagtccagtcttttttttttttaagaca

SEQ ID NO: 286 - DNA, 120 bp, synthetic construct
  misc_feature 1..120: note = Artificially Synthesized Probe
  source 1..120: mol_type = other DNA
caatttctctttcctttgccgacacatcctccagaggttagagactcccagcagaactgaggatgtgaaaagactcagttcgtggtgaggacccagtgagtgtttatcaacagcaacaat

SEQ ID NO: 287 - DNA, 120 bp, synthetic construct
  misc_feature 1..120: note = Artificially Synthesized Probe
  source 1..120: mol_type = other DNA
gctaacgttagctattatcactggccactctgcatcaatcgcatcgtgattttttgtgtcgactctgtatcgaccctgtaaaagcaaaatctcaatgtttctgtgacaattccatagaaa

SEQ ID NO: 288 - DNA, 120 bp, synthetic construct
  misc_feature 1..120: note = Artificially Synthesized Probe
  source 1..120: mol_type = other DNA
ttcggtctacagataaaatgcaagacgcccagtgaacatgaacgtcgggtgagcaacagactagctttcagtctactatgtcctaagttttgtatgggatatacttacttttcttttttt

SEQ ID NO: 289 - DNA, 120 bp, synthetic construct
  misc_feature 1..120: note = Artificially Synthesized Probe
  source 1..120: mol_type = other DNA
tatttgctgaaaaactcagcagtgctttcagtgtggttggtaagattgttcccattctaaaggtgagaaaaacacagctcactagagcataaataacttgctggaggtcataggctaagc

SEQ ID NO: 290 - DNA, 120 bp, synthetic construct
  misc_feature 1..120: note = Artificially Synthesized Probe
  source 1..120: mol_type = other DNA
tggagtttcacttcggtcattctcagctctatttttactcaaaggtggtaggaacaccacacgttcaaagcaggacaggcaagtcgtctgactccacgcggctgcaaggctgagcttttc

SEQ ID NO: 291 - DNA, 120 bp, synthetic construct
  misc_feature 1..120: note = Artificially Synthesized Probe
  source 1..120: mol_type = other DNA
tcaagacagatgtgttgtgtgacctctgggaagtcttggggaagcatgaaacaggataaaaatggctaagaactcagcaggttgccggaggctaaatgagatactgttagcaaagcagag

SEQ ID NO: 292 - DNA, 120 bp, synthetic construct
  misc_feature 1..120: note = Artificially Synthesized Probe
  source 1..120: mol_type = other DNA
tcaaaaaaaaagataagaaagtgctaagcgatgtgagccggagcaatcagcattagggactctgagccagggatctcactaaggccagtgctcgaatcaggcctggaggacttcctggag

SEQ ID NO: 293 - DNA, 120 bp, synthetic construct
  misc_feature 1..120: note = Artificially Synthesized Probe
  source 1..120: mol_type = other DNA
taacaacctttcataggtttactgtgaagatgaaatgagatcacgaatgtgagaacgctcgctctactcttgcacccgtgaggtgtccaatcaattgctttgttacttttattcctattg

SEQ ID NO: 294 - DNA, 120 bp, synthetic construct
  misc_feature 1..120: note = Artificially Synthesized Probe
  source 1..120: mol_type = other DNA
cgctgtgaagggtaagagtgcgggagaaagaacacagtttacagcagggccaaccgagcgcacagtccctggcttgtagtctgcgaccttgaattaattaatttagtttgtttatgtatt

SEQ ID NO: 295 - DNA, 120 bp, synthetic construct
  misc_feature 1..120: note = Artificially Synthesized Probe
  source 1..120: mol_type = other DNA
acaagtgacgaagtcaattgcggctgtgaggagtagatgttcccagccagagaaataactggcttaattacacggcgtctttggtccccgtaatctcgatccattaaacctttgctgctg

SEQ ID NO: 296 - DNA, 120 bp, synthetic construct
  misc_feature 1..120: note = Artificially Synthesized Probe
  source 1..120: mol_type = other DNA
attaatcaatcaggtcaccacagagccgaccacatctggctctatctactgaagcccaggctgactctgacattttccatacagccagtaaacccagattcatctttcggtctagtgtgt

SEQ ID NO: 297 - DNA, 120 bp, synthetic construct
  misc_feature 1..120: note = Artificially Synthesized Probe
  source 1..120: mol_type = other DNA
acaatgaccaaatccacacagccggaaacgcatggacgggccagctgacaggtttcagctaacaggggtttctgctgcggggaggagctcaaggagccaagaactcgagttttctttttc

SEQ ID NO: 298 - DNA, 120 bp, synthetic construct
  misc_feature 1..120: note = Artificially Synthesized Probe
  source 1..120: mol_type = other DNA
tcctcctaacagcatcttccagccaattccccacaaatttccttccttttcccgaagaacaacagtagccaacaatcacaaccacagaaacctaagtttctctgagtagatgacttaatt

SEQ ID NO: 299 - DNA, 120 bp, synthetic construct
  misc_feature 1..120: note = Artificially Synthesized Probe
  source 1..120: mol_type = other DNA
gactctgtctcaaaaaaaagagagcctcagagagagcatcatagcaaccccagggagagaaaggtaaggtactgaggggtgaaactgacattgctacattaatacaggcaaatgagtggc

SEQ ID NO: 300 - DNA, 120 bp, synthetic construct
  misc_feature 1..120: note = Artificially Synthesized Probe
  source 1..120: mol_type = other DNA
aataaactcagacatacccaggtggtactcgggatcctcctcattattctagggtacaacctgaattccagctcagccatttgttacttatgtgatcttaggtctatgatttatgctaac

SEQ ID NO: 301 - DNA, 120 bp, synthetic construct
  misc_feature 1..120: note = Artificially Synthesized Probe
  source 1..120: mol_type = other DNA
aacttcctctgggagccacaaaaccttgctgccaggcaaatgacagctcgggtatttgttttaatttaggctcttgtcaagaggaaagttgatggctaacagcccaaacatgactgcaca

SEQ ID NO: 302 - DNA, 120 bp, synthetic construct
  misc_feature 1..120: note = Artificially Synthesized Probe
  source 1..120: mol_type = other DNA
ccctttgatgttgagaaaccaaagcagaatgaaccatcacaaggacagctcctggggggaggagaggaaggaacatggatggaggaggaggcgggtggagaagaagatacagggaatgac

SEQ ID NO: 303 - DNA, 120 bp, synthetic construct
  misc_feature 1..120: note = Artificially Synthesized Probe
  source 1..120: mol_type = other DNA
tcagttacgcatcccccggggccatgcaagagcaatcacatgatccagagagatttgggagcgagggggtggagaactcgagaaggtttgttttttttttcttctgagggtggtggtgat

SEQ ID NO: 304 - DNA, 120 bp, synthetic construct
  misc_feature 1..120: note = Artificially Synthesized Probe
  source 1..120: mol_type = other DNA
gatccgcaaaccaggtgccgtggggggcccgggagcccacaggggtgacatcacctcccgcccgggatctccaagcgcggcttcgcgggcgggagcggcggccgggcccctccccagcca

SEQ ID NO: 305 - DNA, 120 bp, synthetic construct
  misc_feature 1..120: note = Artificially Synthesized Probe
  source 1..120: mol_type = other DNA
tcctcatcactccaaacagacacacacacatctagttcttaaggggagaagcagctcctcccccaggatgctgagaggaagccccataagctgcttgggcagaggcctctgcagctgccc

SEQ ID NO: 306 - DNA, 120 bp, synthetic construct
  misc_feature 1..120: note = Artificially Synthesized Probe
  source 1..120: mol_type = other DNA
ttctgcgtgagtcacatacatttgcgtacattttacatttttatctacaaaggcttgaacaagctattttcagcatcctccaagctaaaatgtggcagttgctttccttcgcgttgccat

SEQ ID NO: 307 - DNA, 120 bp, synthetic construct
  misc_feature 1..120: note = Artificially Synthesized Probe
  source 1..120: mol_type = other DNA
accaactcttgcttctaccaatcaaggtagaagccttggttcttggccaggacagaaaaaaggggacgggccctagaaccaaaactgggtatctccacatttcctcccttctcatgttag

SEQ ID NO: 308 - DNA, 120 bp, synthetic construct
  misc_feature 1..120: note = Artificially Synthesized Probe
  source 1..120: mol_type = other DNA
ctatgaccacatggtgcctccagatcagctttctgccgagcgcccagcagatcggcattcaataatgcacattgaacaaataaaattaatgacagctaacagttattgagtgcttttttt

SEQ ID NO: 309 - DNA, 120 bp, synthetic construct
  misc_feature 1..120: note = Artificially Synthesized Probe
  source 1..120: mol_type = other DNA
taactagcagatggcgatgcttggaaatgaaccaagtctgaatccagggttcccgtgtgtaatctctgcattgagcggcaattagtgaatgaatgaataaacagaatgaagttaaactca

SEQ ID NO: 310 - DNA, 120 bp, synthetic construct
  misc_feature 1..120: note = Artificially Synthesized Probe
  source 1..120: mol_type = other DNA
agcatttactattctaagattcatcctcagccctccagtctggggaaagaagaaaattccccaggcctccacagtgtcacctgtaagggtgaagtctcagcctatgagtctgtcttttgc

SEQ ID NO: 311 - DNA, 120 bp, synthetic construct
  misc_feature 1..120: note = Artificially Synthesized Probe
  source 1..120: mol_type = other DNA
gggaacacagctgggggagtcaggaggagctccgtctgggaaggagagagcagaagcccccaggagtgacatggggagaatgatcatcccgccggacaaaaccttcactaaaatatcctc

SEQ ID NO: 312 - DNA, 120 bp, synthetic construct
  misc_feature 1..120: note = Artificially Synthesized Probe
  source 1..120: mol_type = other DNA
taagtaaataaaaataacaatgtgtgggagcatttaaagaggtcacaataggccagctgcagtggcttatgcctgtaatcccagcactttgggaggccgaggcgggcagatcactaggtc

SEQ ID NO: 313 - DNA, 120 bp, synthetic construct
  misc_feature 1..120: note = Artificially Synthesized Probe
  source 1..120: mol_type = other DNA
gatatgaagatcaattagaggaaagagtttcccagtgtctaacagcaactgaaggcttgctctaagacatcctaaaacacatgtagcatgtcattcctctcttactaagacctgtctatg

SEQ ID NO: 314 - DNA, 120 bp, synthetic construct
  misc_feature 1..120: note = Artificially Synthesized Probe
  source 1..120: mol_type = other DNA
accaccctctctggaaagatgcaaagaaagaacaaatggcccctaggatgggatttggggtgggagaattgctgttccaattaattctctaactgctcacaaaaaaccctaactgaaaat

SEQ ID NO: 315 - DNA, 120 bp, synthetic construct
  misc_feature 1..120: note = Artificially Synthesized Probe
  source 1..120: mol_type = other DNA
agaggctcctttccatgttcccgtcaccaaaacaaagaaataaacaaaacaaccaatgtcaaatcaagatccggttctcgggcctcgagtttgtaaagatccagaaagccaccccagcag

SEQ ID NO: 316 - DNA, 120 bp, synthetic construct
  misc_feature 1..120: note = Artificially Synthesized Probe
  source 1..120: mol_type = other DNA
ttacttattatttcactgaatattccctgagccctactgtataaaccagagttccttttcccaggctgcttatgataatagacttcagacatgcccagaaatcacagagagggaaagaca

SEQ ID NO: 317 - DNA, 120 bp, synthetic construct
  misc_feature 1..120: note = Artificially Synthesized Probe
  source 1..120: mol_type = other DNA
cttttgggaactgggggcgaatatagaaactgctactaatctaacgtgtggcctcagcatgaattcaggaaaacaacagaattagcagcttttcttagatccaccttatagagaagcctt

SEQ ID NO: 318 - DNA, 120 bp, synthetic construct
  misc_feature 1..120: note = Artificially Synthesized Probe
  source 1..120: mol_type = other DNA
tctttctcctctactgaaatctgacaagctcctgggtcttttgatttctccttgaacatgaggtttgtacctggaggatctctggtggcaagggtgtttcctttgtttttttttatttat

SEQ ID NO: 319 - DNA, 120 bp, synthetic construct
  misc_feature 1..120: note = Artificially Synthesized Probe
  source 1..120: mol_type = other DNA
gggtgttttctactgctacagtgattaactagtctctggtgtatctctctcccaaaggcagcccccagccctgcctgacccaggctcagcaagtagcgtaaggagcattttaaagaaaat

SEQ ID NO: 320 - DNA, 120 bp, synthetic construct
  misc_feature 1..120: note = Artificially Synthesized Probe
  source 1..120: mol_type = other DNA
taattaaatttaatttagaaaagatttcttagctaacttctcagaggaacataggacaaaactgggtattaactctacatcctgcctcacccaccccctccctaaatgttgatgactctg

SEQ ID NO: 321 - DNA, 120 bp, synthetic construct
  misc_feature 1..120: note = Artificially Synthesized Probe
  source 1..120: mol_type = other DNA
gatgaaacctcaccctaatccccttctcgtggcccacagccttctagacactcattgcccaaacccctgcatgagttattttcccagttgctgtttctgtctgattgtgaaagattcttt

SEQ ID NO: 322 - DNA, 120 bp, synthetic construct
  misc_feature 1..120: note = Artificially Synthesized Probe
  source 1..120: mol_type = other DNA
ttttagtgtgactttcaggaccaaaaaggaagaggttctgtctggacaaggagagcttggcctgagacaccaacagacggcaacttcccacctggcctctgcctgattctgcaatcaaag

SEQ ID NO: 323 - DNA, 120 bp, synthetic construct
  misc_feature 1..120: note = Artificially Synthesized Probe
  source 1..120: mol_type = other DNA
gcaattaacacactggcaggggctcatctgtacccatgtcatagaccaccaagaggccacacggaaggtacaaaacatacaggctgttggggtttttgttttctggtttttttgaaacag

SEQ ID NO: 324 - DNA, 120 bp, synthetic construct
  misc_feature 1..120: note = Artificially Synthesized Probe
  source 1..120: mol_type = other DNA
aatttttttaaataaagtctatgggagacgtgattaggttacatgtaactattacagcaccttatataagagacttgggcgtcctgggattctggtatctgccaggggtcctggggccaa

SEQ ID NO: 325 - DNA, 120 bp, synthetic construct
  misc_feature 1..120: note = Artificially Synthesized Probe
  source 1..120: mol_type = other DNA
tagcactcacgcagtatcagctattatcatcatgctggctgacttttatgtgagcgtgtataacacgggtacacacacacacaacacctctctccggagggtaaaaacaagacaaaaagt

SEQ ID NO: 326 - DNA, 120 bp, synthetic construct
  misc_feature 1..120: note = Artificially Synthesized Probe
  source 1..120: mol_type = other DNA
acctctttataacagatgcagccataccagagccccagagcgcacattcaaaagagaatctccaacctcttattactcatcttagatcactcattctaaattgcaaattcaaaggggatc

SEQ ID NO: 327 - DNA, 120 bp, synthetic construct
  misc_feature 1..120: note = Artificially Synthesized Probe
  source 1..120: mol_type = other DNA
agccatcgcgcccagccccattccttttaaaaggtctttcacttgccggtgtgagcagaggatcctggggagactccttggaaggggcttcggatccagccaggctcccgcgcagtcctc

SEQ ID NO: 328 - DNA, 120 bp, synthetic construct
  misc_feature 1..120: note = Artificially Synthesized Probe
  source 1..120: mol_type = other DNA
catgggttcaaactacagtcctgagccatatgacctgaaaggactatatatacaaaggtggtccagaagattataatcctgtattttttcctgtaccttttgtacgcttagacgtgttca

SEQ ID NO: 329 - DNA, 120 bp, synthetic construct
  misc_feature 1..120: note = Artificially Synthesized Probe
  source 1..120: mol_type = other DNA
catacccggttttatccccattattaagagactgtaatgagctctgggccctttggcacattacccaatattcttaagccttagttttctcatacatcaaatgggggctaataatacaaa

SEQ ID NO: 330 - DNA, 120 bp, synthetic construct
  misc_feature 1..120: note = Artificially Synthesized Probe
  source 1..120: mol_type = other DNA
gggttgttgcgtgcacaaccgagcatcccttgaccccttagatcacacagggtttatcccaggaatacaagcctagctcaatattagacaatctgcatgattcactacattaatttatta

SEQ ID NO: 331 - DNA, 120 bp, synthetic construct
  misc_feature 1..120: note = Artificially Synthesized Probe
  source 1..120: mol_type = other DNA
gtgaacagattctctcaaaaagaagtaaggtgagaatataaattggatcaacttttctgaaggataattttacaatatctatttgtatttaaaatgcatatatttggccgtgtgcagtgg

SEQ ID NO: 332 - DNA, 120 bp, synthetic construct
  misc_feature 1..120: note = Artificially Synthesized Probe
  source 1..120: mol_type = other DNA
ttgtctaggaatgagggtgtagcagacccattgagttatgagtgtttataaaagagaagttgctcgacccccagatgagtccctgggtggaaaggaaatggtggatactagaacttgttc

SEQ ID NO: 333 - DNA, 120 bp, synthetic construct
  misc_feature 1..120: note = Artificially Synthesized Probe
  source 1..120: mol_type = other DNA
tgggagcctggaacttacagtcataaaatcagacatacagtgttttactctctgcagctgcgttgaagtgggtggtgttttattgttcacatccttctcttttaacctgtttgtttcttt

SEQ ID NO: 334 - DNA, 120 bp, synthetic construct
  misc_feature 1..120: note = Artificially Synthesized Probe
  source 1..120: mol_type = other DNA
acacatatctttcatggcaaagacacctaaattagtaaagcactaaattagtgacggctgatctcttagagagacagggagaaagtagaggtagaaagtaacagaatctagagaggcgga

SEQ ID NO: 335 - DNA, 120 bp, synthetic construct
  misc_feature 1..120: note = Artificially Synthesized Probe
  source 1..120: mol_type = other DNA
tgaaaaataaataaaaatatggattccaggttttgctctgacccagtgggattccatttcagtggagctagccaccaaaaatcgatcttcttctgctgttcctgcagaggtgtctgactt

SEQ ID NO: 336 - DNA, 120 bp, synthetic construct
  misc_feature 1..120: note = Artificially Synthesized Probe
  source 1..120: mol_type = other DNA
cagtgttaaactgagatacaaagaggctgggcatggtggctcacgcctatagtcccagtactttgggaggccaaggcaggaagatctctcgagtctgggagttcgagaccagcctgggca

SEQ ID NO: 337 - DNA, 120 bp, synthetic construct
  misc_feature 1..120: note = Artificially Synthesized Probe
  source 1..120: mol_type = other DNA
agaagctgtatctgggatgggaatttggacttaagaaatttttcacccttttaccaaacagctaaaggagtgtgaaattcccccaacaaatccttgaatggagctgcagacaatcagagt

SEQ ID NO: 338 - DNA, 120 bp, synthetic construct
  misc_feature 1..120: note = Artificially Synthesized Probe
  source 1..120: mol_type = other DNA
cttccccgccccccaccaccaccttaaacctaaagataagctaacttcaggtcccttcaacctaaaatgaacatttattttggctttcatcagtttttggaatctatgatactaggatgt

SEQ ID NO: 339 - DNA, 120 bp, synthetic construct
  misc_feature 1..120: note = Artificially Synthesized Probe
  source 1..120: mol_type = other DNA
catagtttttccctgtaatgtggcagctatctcggtgtatataagctcaatggccaagttctatttctctccaaataaaatactcagaccaaaaaagtattgctcttgaccaggtggggt

SEQ ID NO: 340 - DNA, 120 bp, synthetic construct
  misc_feature 1..120: note = Artificially Synthesized Probe
  source 1..120: mol_type = other DNA
aaagaaagaaactgaacacctaaatagaacttactatgtgccaggctcagcccttatatcaacttgctcagttctcacaaatctgcgaggtagggaagctgttataaccccctgctccag

SEQ ID NO: 341 - DNA, 120 bp, synthetic construct
  misc_feature 1..120: note = Artificially Synthesized Probe
  source 1..120: mol_type = other DNA
cgcgtctgtaattggatgcttcgctgttccagctcttggattattcaaattacaggattttcagtttcaattaaggttatgaccaggcaacaagatgagcaagataccatgtttcacctt

SEQ ID NO: 342 - DNA, 120 bp, synthetic construct
  misc_feature 1..120: note = Artificially Synthesized Probe
  source 1..120: mol_type = other DNA
gtagctgttttcatttatacggagctcaccacatgccggaccccatgctacattatttcatttaacctttgcaacaccaagtgaggtacaatgatccccattgtatagaaaagaaaataa

SEQ ID NO: 343 - DNA, 120 bp, synthetic construct
  misc_feature 1..120: note = Artificially Synthesized Probe
  source 1..120: mol_type = other DNA
ctgaattccttatacattccaaatgtgcaaaatccccaaggaaatcgcgtttttcagagagctgagcaatcagatctttaggccttccaccctcacaaatgaagttaatatactactagg

SEQ ID NO: 344 - DNA, 120 bp, synthetic construct
  misc_feature 1..120: note = Artificially Synthesized Probe
  source 1..120: mol_type = other DNA
aaaattcaacgtgacagcgtaggtaaagcacttgacctagtgctttgcagagagtaggtactggagtatctttatactctagttccttcccagctctgtgtcaataaaaattttaaagtg

SEQ ID NO: 345 - DNA, 120 bp, synthetic construct
  misc_feature 1..120: note = Artificially Synthesized Probe
  source 1..120: mol_type = other DNA
attcttctatttttccttgtaacagagcccctattttacttgaggtggccatacacccagataaaatactgcatttcccagcctctcttatacctcgaggtgactaaggagataaaaaca

SEQ ID NO: 346 - DNA, 120 bp, synthetic construct
  misc_feature 1..120: note = Artificially Synthesized Probe
  source 1..120: mol_type = other DNA
aatataagcagtagcctggtttagccaactgaaaattcctggacttataacagcaacaataaagacaccatcgaggaagagtaacgataacagcaccatggaggatcccatctttttttc

SEQ ID NO: 347 - DNA, 120 bp, synthetic construct
  misc_feature 1..120: note = Artificially Synthesized Probe
  source 1..120: mol_type = other DNA
acacacacagagacacgaataccctccatcgtcactctacgccaggtgttctgctacactctttaattattctcttgcatttaatcttcgtaactatcctgagagggaagtactaatatt

SEQ ID NO: 348 - DNA, 120 bp, synthetic construct
  misc_feature 1..120: note = Artificially Synthesized Probe
  source 1..120: mol_type = other DNA
tagaaggaagatactaagcgaattggcagactaacttatttacactctgatgttgctatcgtgcgcggacaaaaaagccgaaatgtgttttggcttaggaatctgcccctcatctaaaag

SEQ ID NO: 349 - DNA, 120 bp, synthetic construct
  misc_feature 1..120: note = Artificially Synthesized Probe
  source 1..120: mol_type = other DNA
cccaggaggcagagcttgcagggagcccagatggcaccactgcactccagcctgggcaacaccgtgagactccatctcaaaaaaaaaaaaaaagaaaagaaaagaaagaaagaaatgggg

SEQ ID NO: 350 - DNA, 120 bp, synthetic construct
  misc_feature 1..120: note = Artificially Synthesized Probe
  source 1..120: mol_type = other DNA
cttctcccaatgtcacacaggcagtctagcttcagaaacatggtttaattccgtgttttcaaacctttttgttcatctcacagcaagaaatacattctacatcagctcccagtgtacaca

SEQ ID NO: 351 - DNA, 120 bp, synthetic construct
  misc_feature 1..120: note = Artificially Synthesized Probe
  source 1..120: mol_type = other DNA
atttggaacttggcactagggtgaaatcttcaggctcttcccttaagttaaagagacatataaaaatgttaccagcatgggcggcaagagcattgcctgtgggaaacacagccaatcttt

SEQ ID NO: 352 - DNA, 120 bp, synthetic construct
  misc_feature 1..120: note = Artificially Synthesized Probe
  source 1..120: mol_type = other DNA
ctcaattccaggcaatcatttattcagccattatgcgttgagctttgactgctgcaaagcaccgtgcatactaccagaagggggttcaaagatgactaagatcaggccctgtcctcagaa

SEQ ID NO: 353 - DNA, 120 bp, synthetic construct
  misc_feature 1..120: note = Artificially Synthesized Probe
  source 1..120: mol_type = other DNA
gatgaacttctcgttgaaatccaccatctcgaagtcgtggtcgccgccgtcgcccccctcgtccgtgccgggagccgcctgggggtccccgaggggcgcgtcgtcctcccgggcccggaa

SEQ ID NO: 354 - DNA, 120 bp, synthetic construct
  misc_feature 1..120: note = Artificially Synthesized Probe
  source 1..120: mol_type = other DNA
ttttgcagcacatctggcggaagtaggctcggctgcagaactgaaatttgagcaccagggggcagtaggcgaccttgttcacatccttgcactctgcggggacgggagaaggaaggaaaa

SEQ ID NO: 355 - DNA, 120 bp, synthetic construct
  misc_feature 1..120: note = Artificially Synthesized Probe
  source 1..120: mol_type = other DNA
gatcaaaccccatctctactaaaaatataaaaattagctgggcgtggtggcgggtgcctgtaatcccagctactcgacagcctgaggcaggagaattgcctgaacccgggaggcagaggt

SEQ ID NO: 356 - DNA, 120 bp, synthetic construct
  misc_feature 1..120: note = Artificially Synthesized Probe
  source 1..120: mol_type = other DNA
tgtgatcatgatgtctgttgatgactatggatggatatgagcttccatctagcggccagtgatttatggcaggaccaggggcgaattaaaagctacagatggattttttttttttttttg

SEQ ID NO: 357 - DNA, 120 bp, synthetic construct
  misc_feature 1..120: note = Artificially Synthesized Probe
  source 1..120: mol_type = other DNA
ggtggattacttgaggccaggagttcaagaccagcctgggctacatagaaaaaccccgtctctatcaaagaatacaagaatacaaaaattaactgggcactgtggctcttgcctgtagtc

SEQ ID NO: 358 - DNA, 120 bp, synthetic construct
  misc_feature 1..120: note = Artificially Synthesized Probe
  source 1..120: mol_type = other DNA
tgaggttgaaaaaccgatttaaaggaaaaatattcaggaaattgtgctacaggtggagatgaataggtacaggttatgaaagtgactggggaaatgtcacaagtttgggtgcacagaagg

SEQ ID NO: 359 - DNA, 120 bp, synthetic construct
  misc_feature 1..120: note = Artificially Synthesized Probe
  source 1..120: mol_type = other DNA
atatggaaactggcaccaggcacctccacattccacacttggggcatcgttagcctgcacccagactgggggcagagaggtgcattaccctaaggagaaataaatctttggacaatgcga

SEQ ID NO: 360 - DNA, 120 bp, synthetic construct
  misc_feature 1..120: note = Artificially Synthesized Probe
  source 1..120: mol_type = other DNA
ggttcagaattctagtcatgctgaaaccgccctccccactgacccctaatcctcatcccctccccaccatctgctcacccaagtgactgagagagaggttcagatcctggatgaagatgt

SEQ ID NO: 361 - DNA, 120 bp, synthetic construct
  misc_feature 1..120: note = Artificially Synthesized Probe
  source 1..120: mol_type = other DNA
tgacctcctgggctcaagggatcctcctgcctctcagcctctcgagcagctggaactacaggtgtacaccaccacacccgcctaattaaaagaattttgtagccgggcacagtggtcacg

SEQ ID NO: 362 - DNA, 120 bp, synthetic construct
  misc_feature 1..120: note = Artificially Synthesized Probe
  source 1..120: mol_type = other DNA
tggaaaaggtgctttctacattctctgaatatcccctcccgtagtaagcctttccctgctagcacagaacattcattctcgcagctcctctggctcacagaggatggaaagtgatgcttg

SEQ ID NO: 363 - DNA, 120 bp, synthetic construct
  misc_feature 1..120: note = Artificially Synthesized Probe
  source 1..120: mol_type = other DNA
actcccacggctgcccttcacggccccacagcctttggagtcccacactcacctccccggtacgttttccacttgtagaatttcccacggaaagggatgctgtcaaattcagaacactgc

SEQ ID NO: 364 - DNA, 120 bp, synthetic construct
  misc_feature 1..120: note = Artificially Synthesized Probe
  source 1..120: mol_type = other DNA
cacatctgggataggactggatccctcattagaggtctgagggtgagctgggcaggacacacctgggtttctggttccaggctatggaatctttcttgcttgcttgcattttttttcttt

SEQ ID NO: 365 - DNA, 120 bp, synthetic construct
  misc_feature 1..120: note = Artificially Synthesized Probe
  source 1..120: mol_type = other DNA
agagactggatggtagggggttgtgagggccaagcagtgatttcaaggtgggggcttgtagtctaaatgtaggaggaaaagagagctggaaggagccaggtctttaaggaggaggggttg

SEQ ID NO: 366 - DNA, 120 bp, synthetic construct
  misc_feature 1..120: note = Artificially Synthesized Probe
  source 1..120: mol_type = other DNA
atgagggagagagcaaacagtaggcgtggccagagccgtgggaatcattacacggtgggcgtggccaacgcgggagggagttaaacagtaggcgtggccagaaccaagggacgcatagac

SEQ ID NO: 367 - DNA, 120 bp, synthetic construct
  misc_feature 1..120: note = Artificially Synthesized Probe
  source 1..120: mol_type = other DNA
actgggagaaaaccaagcttcagacaggtaaggtcacacagctactaagggaatagcctggagtttaacccagctctttaattcagagtctgtgctctaacgaactttgcaattcagttc

SEQ ID NO: 368 - DNA, 120 bp, synthetic construct
  misc_feature 1..120: note = Artificially Synthesized Probe
  source 1..120: mol_type = other DNA
atttagtaaataaatccccctttgccaagatggcctgaaagatgttccttcaaaaactaaaaggaaggctcaattcaacatatagccagtgccagcccaagcttgatattttgacagctc

SEQ ID NO: 369 - DNA, 120 bp, synthetic construct
  misc_feature 1..120: note = Artificially Synthesized Probe
  source 1..120: mol_type = other DNA
tgtctagttctttgccaagtaggaaagatggctcatccccagggaaattatttccgtcaggactggatgtttagttaaaaactgccccgtgagaggtcttgagactttgatcctgctgta

SEQ ID NO: 370 - DNA, 120 bp, synthetic construct
  misc_feature 1..120: note = Artificially Synthesized Probe
  source 1..120: mol_type = other DNA
ctcaccccagcccactgccttcataggcgcctgaaacctacggggctcgggtacctagtgtgccgcagggtttgttcttgtagatgcagatgtcatagctgtaaaaggagacagggtcag

SEQ ID NO: 371 - DNA, 120 bp, synthetic construct
  misc_feature 1..120: note = Artificially Synthesized Probe
  source 1..120: mol_type = other DNA
aagaggagcccagggtagaaaatgaaaagcaaaaacaatgataacagcttgctttcatcaggcacctactgtgtgtcgggtcttaggctaaacctgctattagggttttttgttgctgtt

SEQ ID NO: 372 - DNA, 120 bp, synthetic construct
  misc_feature 1..120: note = Artificially Synthesized Probe
  source 1..120: mol_type = other DNA
atgaggagacatgcaaacagaggttaggacacagctggtaggtgtcagaagtgagactcaagtctggattgcttaccagaacatttctttcagactcctccaagctcagcttatctactt

SEQ ID NO: 373 - DNA, 120 bp, synthetic construct
  misc_feature 1..120: note = Artificially Synthesized Probe
  source 1..120: mol_type = other DNA
tccaccaatccttactctctagggtagctaccattatatctccatttgatacactggtacgctgaggcttagagaggtcaagaatctcgcctgagatctaggatggaaatggactatatc

SEQ ID NO: 374 - DNA, 120 bp, synthetic construct
  misc_feature 1..120: note = Artificially Synthesized Probe
  source 1..120: mol_type = other DNA
gcctgtgtgtatttttacacacagcaaacacttatatgccacctactgcatgccaagaactgttctacatgctttatgaatgcactggatctaccttagctttataaagtaggtaccaca

SEQ ID NO: 375 - DNA, 120 bp, synthetic construct
  misc_feature 1..120: note = Artificially Synthesized Probe
  source 1..120: mol_type = other DNA
ctggacagacaatttctggtcattctgctgccttctcttgttgtccagctacctgtgtgatggtctgtctgcccaatgggctgccaaacacctcatcgtttttcttattctttttttttt

SEQ ID NO: 376 - DNA, 120 bp, synthetic construct
  misc_feature 1..120: note = Artificially Synthesized Probe
  source 1..120: mol_type = other DNA
tcgtacgtcatccaccttttttctgtctgtactgctgactgtggctgtatgtctaccacagcatcctactcatagagtatctgattatatacttaattcaatatcacactgttctgcttt

SEQ ID NO: 377 - DNA, 120 bp, synthetic construct
  misc_feature 1..120: note = Artificially Synthesized Probe
  source 1..120: mol_type = other DNA
gtaagtattttgttggtgtatagctttccttctctctcatttcttaaatgcctgattgtacaaccatcctcctaccagtctgatcgtaaatctggccttttggctgtataactgctggag

SEQ ID NO: 378 - DNA, 120 bp, synthetic construct
  misc_feature 1..120: note = Artificially Synthesized Probe
  source 1..120: mol_type = other DNA
tatgttgcccaggctggtctcgaattcctggcctcaagtgatcctcctgcctcggcctcccaaagtgctaagattaaaagcatgagtcagcatgctcagcctctaatttctttttatttt

SEQ ID NO: 379 - DNA, 120 bp, synthetic construct
  misc_feature 1..120: note = Artificially Synthesized Probe
  source 1..120: mol_type = other DNA
ccactatcattccttctctgccctctatgtagaagtgtttttcttaacttccaaacttatgggcatttccccccgcgttccagaatcctcagctcaccaggcctccacaggtgctgatgg

SEQ ID NO: 380 - DNA, 120 bp, synthetic construct
  misc_feature 1..120: note = Artificially Synthesized Probe
  source 1..120: mol_type = other DNA
cttccaatccttcctacactcctacaagaggacagacagggactgggacgctgggagtatctcctatgtgccagctactggccctagttttcacaccactgcatttctgttcttttgtta

SEQ ID NO: 381 - DNA, 120 bp, synthetic construct
  misc_feature 1..120: note = Artificially Synthesized Probe
  source 1..120: mol_type = other DNA
aattttcaagccagattagagctaaggctcccacccatgcatctactgtcctgggccctgtctttggattatctgaaatgggtagcaccattcaagccagatttttaaagctaaggctag

SEQ ID NO: 382 - DNA, 120 bp, synthetic construct
  misc_feature 1..120: note = Artificially Synthesized Probe
  source 1..120: mol_type = other DNA
tggagaacttcctcttagacttcttctttcttctgttcctaatgaaccccctccaacaaaaacccacctcctctccctctccctctcttcttgcttcttcttccctattccttctttgga

SEQ ID NO: 383 - DNA, 120 bp, synthetic construct
  misc_feature 1..120: note = Artificially Synthesized Probe
  source 1..120: mol_type = other DNA
gatctgcactgtggcgtgtgtgtgtgactgcatgtacattacagcatgtatgtgagtgtgtgtgaccctgtgtgtgattgtgagcgtgtgactgcatgtgcattatggcttgtgagtgtg

SEQ ID NO: 384 - DNA, 120 bp, synthetic construct
  misc_feature 1..120: note = Artificially Synthesized Probe
  source 1..120: mol_type = other DNA
acatacatacacagacaacccaaggagacagacacacaggcctacacgctgacacatacacactcatttgcatgctcacaccaaaccagagacaaactcacaagtcccacagacctagac

SEQ ID NO: 385 - DNA, 120 bp, synthetic construct
  misc_feature 1..120: note = Artificially Synthesized Probe
  source 1..120: mol_type = other DNA
tttgcaggccgaagagggatcctggagagtgggggactcacctcaacagcactctctaaggggtaaggagcccctggcatcaggagctaccagagcacctgctacgtgccagtcatggct

SEQ ID NO: 386 - DNA, 120 bp, synthetic construct
  misc_feature 1..120: note = Artificially Synthesized Probe
  source 1..120: mol_type = other DNA
acggtattatcgctttcactactattactggtggctttccttcccagcctttctggtgggtggtcagacacagggcagaactttctcatgaaggcagctgaaggaactcacaagtttctt

SEQ ID NO: 387 - DNA, 120 bp, synthetic construct
  misc_feature 1..120: note = Artificially Synthesized Probe
  source 1..120: mol_type = other DNA
ccgggctccagaggcgcagagcgggttaaagtgtgcgccaggccggccggcgcgggcgggggagcggcctggtgggaagtgtgagtgttcctccccgtctgcctgacagctataaaggcg

SEQ ID NO: 388 - DNA, 120 bp, synthetic construct
  misc_feature 1..120: note = Artificially Synthesized Probe
  source 1..120: mol_type = other DNA
tccctgagtttgctagtgtgctaccttgctgtgtggctttgagcaggttggctcccctctctgggctccaggttatgagtgcaggctgcgtggtttctgaaatcccttctctaactcgct

SEQ ID NO: 389 - DNA, 120 bp, synthetic construct
  misc_feature 1..120: note = Artificially Synthesized Probe
  source 1..120: mol_type = other DNA
aagcaggcattactaatcattcaccaagctccttcttgctaagcctagactgaggcggggggttcatccttcccaacagggtctgccagacaaccacgaccaactagtcccagataacct

SEQ ID NO: 390 - DNA, 120 bp, synthetic construct
  misc_feature 1..120: note = Artificially Synthesized Probe
  source 1..120: mol_type = other DNA
gcaccaggaaagccctttcacgagagggcaggagccatttctagaggtctgtcctggaggcggagaaccaccctgacttctcttctgaagacctgagtgagggtctttagaatatgccag

SEQ ID NO: 391 - DNA, 120 bp, synthetic construct
  misc_feature 1..120: note = Artificially Synthesized Probe
  source 1..120: mol_type = other DNA
ccctgtgctcacatgtgctcagcaatgctgggacgggcggactcactctgctcctggaacttcaagtgcagcctcaaggtttggggtctctggtcgcagctccactttactcacaacatt

SEQ ID NO: 392 - DNA, 120 bp, synthetic construct
  misc_feature 1..120: note = Artificially Synthesized Probe
  source 1..120: mol_type = other DNA
ttgtctgcacgctgggttcctctttatggagtcaggaccacgatcttcctgatttacgcagtgtgcatggccacggaccgtgtgccaggccctgtcccgtcactgtagacacacagtcag

SEQ ID NO: 393 - DNA, 120 bp, synthetic construct
  misc_feature 1..120: note = Artificially Synthesized Probe
  source 1..120: mol_type = other DNA
catctatgcaatgggagctgtctcagagggaggaaaagggaagtcctctgaatccggcatttcctgccccgctgaaaccttctgtctttgtctccctccaccagatgactatgtccacat

SEQ ID NO: 394 - DNA, 120 bp, synthetic construct
  misc_feature 1..120: note = Artificially Synthesized Probe
  source 1..120: mol_type = other DNA
tgggcaaccctttgttgaggacctgctgggtaccagtggacacttggcttgggggtcacatttgccctttgagacagcctgcagggaggtgttaacaatgcaccttttttttttttttga

SEQ ID NO: 395 - DNA, 120 bp, synthetic construct
  misc_feature 1..120: note = Artificially Synthesized Probe
  source 1..120: mol_type = other DNA
tcattcttctccatattcacaaggtaactcattcacgcctggcaacagctctacaaggctggcactattactgttgctgaaatatacagaaacagtcaaagagaggctaaataactcatc

SEQ ID NO: 396 - DNA, 120 bp, synthetic construct
  misc_feature 1..120: note = Artificially Synthesized Probe
  source 1..120: mol_type = other DNA
ccaatgccacacccagtgatatcaggttggtagtgcaaacaaacatagcttcagtcgcttgcttcaagcttctatcttgaaacccaaagaaggggaaaaatgttttaaaatgcattttga

SEQ ID NO: 397 - DNA, 120 bp, synthetic construct
  misc_feature 1..120: note = Artificially Synthesized Probe
  source 1..120: mol_type = other DNA
cacccaaggctgcctttccaatcaagaggggctcactgtcatccttttgcctccaggttactctctggtgacccacatcccggctggtgcccgagacatccagattgtagagaggaagaa

SEQ ID NO: 398 - DNA, 120 bp, synthetic construct
  misc_feature 1..120: note = Artificially Synthesized Probe
  source 1..120: mol_type = other DNA
tcttgctcttgaaacagacgcgtagaaataccaagggtgggctcggagcactgggaaagccgcaggaaggaaggtcattactgtcaggaaacaggttttggacgagagcctcggatttaa

SEQ ID NO: 399 - DNA, 120 bp, synthetic construct
  misc_feature 1..120: note = Artificially Synthesized Probe
  source 1..120: mol_type = other DNA
agactgggtcccttggttgtggtgcgacctcattaccttgcagcccctcagcttcttcacaggtagccacaagaacaggaccaaatgggtccccagccagccgtgttcaatgtctagacc

SEQ ID NO: 400 - DNA, 120 bp, synthetic construct
  misc_feature 1..120: note = Artificially Synthesized Probe
  source 1..120: mol_type = other DNA
tcacttgttctttcactaactccctcccccattcattcattcactcggattttggttcatttccagtctcccattcactcatcagttcattaattcatttacctgttcacttctcactca

SEQ ID NO: 401 - DNA, 120 bp, synthetic construct
  misc_feature 1..120: note = Artificially Synthesized Probe
  source 1..120: mol_type = other DNA
cacaacctgggctgttttggtttccagatctccctgtggtgggtttcattgcctcatgttgcaggtcatgaaatgtgggcacagagcgagtgacttgcagtcatggaattgtgagtggca

SEQ ID NO: 402 - DNA, 120 bp, synthetic construct
  misc_feature 1..120: note = Artificially Synthesized Probe
  source 1..120: mol_type = other DNA
cttttgtccagttatcatcacaaggggcagggggataccaagagatgcccagggcatcagcaggtgccacatagattctttggccccagggtcaaacaacgcctttcctactcttttttt

SEQ ID NO: 403 - DNA, 120 bp, synthetic construct
  misc_feature 1..120: note = Artificially Synthesized Probe
  source 1..120: mol_type = other DNA
caacttttatttaggaccagattcagcacttccccttccaggatggaaggggtctgatgtgatcagcttgtcacccagtagctgagtggcctttagaggtggtactttagaggcttagtg

SEQ ID NO: 404 - DNA, 120 bp, synthetic construct
  misc_feature 1..120: note = Artificially Synthesized Probe
  source 1..120: mol_type = other DNA
aagttttttgcaagtgatgtgtatttatttactgcagatggccttgctccagaaccatagggtgctatgttatgctttccctacaggctttccagaaattccatctgacatctttcccta

SEQ ID NO: 405 - DNA, 120 bp, synthetic construct
  misc_feature 1..120: note = Artificially Synthesized Probe
  source 1..120: mol_type = other DNA
agcttttaatgtcacccagcagatgagttgaacagatattcttggatgtggaatatgctggctccagaattactcttcgtggtggagggtatgagatgctgtcaatttctctttcctctc

SEQ ID NO: 406 - DNA, 120 bp, synthetic construct
  misc_feature 1..120: note = Artificially Synthesized Probe
  source 1..120: mol_type = other DNA
ttcttggggtcctttacttccacaaacctctgcaagtttttaacccctacccctgccccagccaactctcaaacacttgagctattgcaccaatagtgcatttcctttcgctggcattct

SEQ ID NO: 407 - DNA, 120 bp, synthetic construct
  misc_feature 1..120: note = Artificially Synthesized Probe
  source 1..120: mol_type = other DNA
agagggacaccgtgattacttagaatttctggcacatggtgagaagaaaatgcaggccaggttttgttggcttcattacttaaattctctgcatacagcatgcagagacgagggcccacc

SEQ ID NO: 408 - DNA, 120 bp, synthetic construct
  misc_feature 1..120: note = Artificially Synthesized Probe
  source 1..120: mol_type = other DNA
tgctattcaatccactacagaagtcgattgaattcccatcagcaagagatgatccaggcaggtctcatgcctccgttttgcccgaattacgtcctctagttaggcagaagccctccttct

SEQ ID NO: 409 - DNA, 120 bp, synthetic construct
  misc_feature 1..120: note = Artificially Synthesized Probe
  source 1..120: mol_type = other DNA
ttgtgagccagggacagagctcagcattttatatgcatggaaacatgtcatcgtcacaaccgcccttagtggtggggttgctatttgctattgtgggctcagagagagctagcggtgtat

SEQ ID NO: 410 - DNA, 120 bp, synthetic construct
  misc_feature 1..120: note = Artificially Synthesized Probe
  source 1..120: mol_type = other DNA
ggggctactttaaacaggcagtgagtgggggttggaggcaggcacgggctcactggtgtttggttttgttttctgaggtccaacccaagccctttgactttagacgcaagcatgaactga

SEQ ID NO: 411 - DNA, 120 bp, synthetic construct
  misc_feature 1..120: note = Artificially Synthesized Probe
  source 1..120: mol_type = other DNA
atagccacgtctcggccgagttgtccaaacacaggaagtcgtgtctgctcagagaaggcaaaatcaaaggggcagcccagaaaggaaaggctattttcatctttccagaaaagcttcaaa

SEQ ID NO: 412 - DNA, 120 bp, synthetic construct
  misc_feature 1..120: note = Artificially Synthesized Probe
  source 1..120: mol_type = other DNA
gatcttttcatctctttttgttcttggggagaatttaaagctgttgaaagtaggtggggaactggtcagcacagtttagtgttttctgaatcgaacattaaggactggtcttccgggttc

SEQ ID NO: 413 - DNA, 120 bp, synthetic construct
  misc_feature 1..120: note = Artificially Synthesized Probe
  source 1..120: mol_type = other DNA
ccaagcaaaacagaagagcaatgctcacccgcttgcctaacacattgtaaactccccattcaatccaaacccatgtctgtatcacggagtcaatctgaaagcctttctgaatataatgct

SEQ ID NO: 414 - DNA, 120 bp, synthetic construct
  misc_feature 1..120: note = Artificially Synthesized Probe
  source 1..120: mol_type = other DNA
cgggcagctcccatgcagttgagatggaaaacaatgccaatcaatcctaaaatgtgcccctctgcgggcgcctcatccgttccacttcagacagtgggaactctgaccgtagcaggtgga

SEQ ID NO: 415 - DNA, 120 bp, synthetic construct
  misc_feature 1..120: note = Artificially Synthesized Probe
  source 1..120: mol_type = other DNA
aacccaggatcaggatacagggccgttgatgggagaaaatatggcagggagaccccagtgccggctgtgaggtcacattttatctattcttggggcttcatgtttggatgtagaggatac

SEQ ID NO: 416 - DNA, 120 bp, synthetic construct
  misc_feature 1..120: note = Artificially Synthesized Probe
  source 1..120: mol_type = other DNA
caaattgccaaagccttccgagccactgttttccacaggtgaactgggacgcctgcttatctcaaaggtgggttgtggggatccacatgaaacaaggaatagcctctcatggtcagaggt

SEQ ID NO: 417 - DNA, 120 bp, synthetic construct
  misc_feature 1..120: note = Artificially Synthesized Probe
  source 1..120: mol_type = other DNA
aagggggagagagagagagagagagagaaagggggagagagacagagagaaagggagagagagagagagggagagagagagagagggagagagagagagggagagggagagagagggaga

SEQ ID NO: 418 - DNA, 120 bp, synthetic construct
  misc_feature 1..120: note = Artificially Synthesized Probe
  source 1..120: mol_type = other DNA
ggtttgaaaagcaccgttttcgagatgggtgtcatgaagagggtgcccagaaaaaacgtcctggcatttgattctcacaggctctctggaaggttcccatttcgggaaggagcatgctga

SEQ ID NO: 419 - DNA, 120 bp, synthetic construct
  misc_feature 1..120: note = Artificially Synthesized Probe
  source 1..120: mol_type = other DNA
tcaaggaagtggcactgctaggtgagggctgcctgtcacccactgtcccccagtgggattacagagtacggggcaccaacaaagacaggcacacagtgatgattaaagaaagttcaggcc

SEQ ID NO: 420 - DNA, 120 bp, synthetic construct
  misc_feature 1..120: note = Artificially Synthesized Probe
  source 1..120: mol_type = other DNA
atttagaaaccattctcaacattatattacagcggtatctttgccccaccaggcccacttggcacatctaggatttttataaactcaagggattattcccaagattccatgcctattggc

SEQ ID NO: 421 - DNA, 120 bp, synthetic construct
  misc_feature 1..120: note = Artificially Synthesized Probe
  source 1..120: mol_type = other DNA
cttcccctcagagcccatcagctttggacctcttattccaagtctatctgcctggaagacttccgggtctcactcataacccctcccagctcaagctaaggggaaggagaggtctttccc

SEQ ID NO: 422 - DNA, 120 bp, synthetic construct
  misc_feature 1..120: note = Artificially Synthesized Probe
  source 1..120: mol_type = other DNA
gcttttctctgtgtgcttttcatcaagcatgcattatttctgtaattagaatagaaaatgttatttaaaaagtggttaccatggcaaccgcttcgacactgcctgggagccactcctctc

SEQ ID NO: 423 - DNA, 120 bp, synthetic construct
  misc_feature 1..120: note = Artificially Synthesized Probe
  source 1..120: mol_type = other DNA
ccggcaggtcactaaaccggataatctcgagccaaattgttttctgctaaattgattttggccaaatcatcactggccagattgtcattagccaatttgtttcaaaacagatggttatgt

SEQ ID NO: 424 - DNA, 120 bp, synthetic construct
  misc_feature 1..120: note = Artificially Synthesized Probe
  source 1..120: mol_type = other DNA
acccagttctttgcctgaagggtctcctctctcccaatagtgccatgaggagaggttcttttccccattcctcagaggttcagggagctctctggcccactcggggtcccacagttactg

SEQ ID NO: 425 - DNA, 120 bp, synthetic construct
  misc_feature 1..120: note = Artificially Synthesized Probe
  source 1..120: mol_type = other DNA
caagtcttggttgctgtggcgggtggatgcaagatcctaaaccttatgagttcaaggcagagagtccaagagtctgtgaggagcgagctggggaccccagtgcggccctgctcagagatt

SEQ ID NO: 426 - DNA, 120 bp, synthetic construct
  misc_feature 1..120: note = Artificially Synthesized Probe
  source 1..120: mol_type = other DNA
agcagtctttctgccaagtcttaatcggtcttccttgctcctttgcaaacagaagtggagagtgggtcccagggccagggcctcccaccccacccatctcagaggacagagggctcaggt

SEQ ID NO: 427 - DNA, 120 bp, synthetic construct
  misc_feature 1..120: note = Artificially Synthesized Probe
  source 1..120: mol_type = other DNA
agccctgccccacggagcccccaggtgaggcgcggggaggccgagggtggctctgggaattcccaggggaggcgaggacagagtcagggcctgaggggtgagcagacattgctcaccttg

SEQ ID NO: 428 - DNA, 120 bp, synthetic construct
  misc_feature 1..120: note = Artificially Synthesized Probe
  source 1..120: mol_type = other DNA
tgaaactgccctgcttcgctctgtgttccttctccagatgacagctgccaggaccagccaggcaccaactgtgccctggccatcaaagtgaacctctgcgggcactggtactacagcaag

SEQ ID NO: 429 - DNA, 120 bp, synthetic construct
  misc_feature 1..120: note = Artificially Synthesized Probe
  source 1..120: mol_type = other DNA
tgtcaaaggtgagagggctcttctctagctagagactaatcagaaatacattcagggataattatttgaatagaccttaagggttgggtacattttgttcaagcattgatggagaaggag

SEQ ID NO: 430 - DNA, 120 bp, synthetic construct
  misc_feature 1..120: note = Artificially Synthesized Probe
  source 1..120: mol_type = other DNA
ataaaaagtagtattcaaatgcacatcaacgtctccacttggagggcttaaagacgtttcaacatacaaaccggggagttttgcctggaatgtttcctaaaatgtgtcctgtagcacata

SEQ ID NO: 431 - DNA, 120 bp, synthetic construct
  misc_feature 1..120: note = Artificially Synthesized Probe
  source 1..120: mol_type = other DNA
cttgttgctgattattcccatccaaaaacagtgcctggaatgcagacttaacattttattgaatgaataaataaaaccccatctatcgagtgctactttgtgcaagacccggttctgagg

SEQ ID NO: 432 - DNA, 120 bp, synthetic construct
  misc_feature 1..120: note = Artificially Synthesized Probe
  source 1..120: mol_type = other DNA
caaatactttggctttcatatatttgagtaaagtcccccttgaggaagagtagaagaactgcactttgtaaatactatcctggaatccaaacggatagacaaggatggtgctacctcttt

SEQ ID NO: 433 - DNA, 120 bp, synthetic construct
  misc_feature 1..120: note = Artificially Synthesized Probe
  source 1..120: mol_type = other DNA
gacagggatgataggaggtgagccactcttagcatccatcatttagtattaacatcatcatcttgagttgctaagtgaatgatgcacctgacccactttataaagacacatgtgcaaata

SEQ ID NO: 434 - DNA, 120 bp, synthetic construct
  misc_feature 1..120: note = Artificially Synthesized Probe
  source 1..120: mol_type = other DNA
aggttactagttaacaggcattgcctgaaaagagtataaaagaatttcagcatgattttccatattgtgcttccaccactgccaataacaaaataactagcaaccatgaagtgggtggaa

SEQ ID NO: 435 - DNA, 120 bp, synthetic construct
  misc_feature 1..120: note = Artificially Synthesized Probe
  source 1..120: mol_type = other DNA
tgggtacccctgtgagctcttaaaagcacaaaagcaatttggacaatttcaagaaaagttactcatactgaatatcaacttgatgttgaagaggttaaactgttgactaatgtcttcgac

SEQ ID NO: 436 - DNA, 120 bp, synthetic construct
  misc_feature 1..120: note = Artificially Synthesized Probe
  source 1..120: mol_type = other DNA
caagaagccacttacaaggaagtaagcaaaatggtgaaagatgcattgactgcaattgagaaacccactggagatgaacagtcttcagggtgtttagaaaaccaggtgagtgaataattt

SEQ ID NO: 437 - DNA, 120 bp, synthetic construct
  misc_feature 1..120: note = Artificially Synthesized Probe
  source 1..120: mol_type = other DNA
gattagaactctccaattataaaacaacatgcccagagaatactctgttatggtggggttaattaggtggctgaaagacaatgtacctggaatatcatagaagagatgctcctttaagga

SEQ ID NO: 438 - DNA, 120 bp, synthetic construct
  misc_feature 1..120: note = Artificially Synthesized Probe
  source 1..120: mol_type = other DNA
gggaaagagaaacaaaagattgcatggcttttttccttttattgtttggacattaaagtctcattttccataaggcagcaaagaaatctatttcatcaggctgaaacaaaatacattaga

SEQ ID NO: 439 - DNA, 120 bp, synthetic construct
  misc_feature 1..120: note = Artificially Synthesized Probe
  source 1..120: mol_type = other DNA
tgctttccagagccatatattggtgttttgtgttcacctaattgcctagaaataaaagttagagatccaagcatggtcaagcatggtcaagatacacagacatggcaaaggtttactgaa

SEQ ID NO: 440 - DNA, 120 bp, synthetic construct
  misc_feature 1..120: note = Artificially Synthesized Probe
  source 1..120: mol_type = other DNA
gcatcccttcctgtatgcacctacaattcttctttgggctgctcgctatgacaaaataattccatcttgctgcaaagctgaaaatgcagttgaatgcttccaaacaaaggtatcatattt

SEQ ID NO: 441 - DNA, 120 bp, synthetic construct
  misc_feature 1..120: note = Artificially Synthesized Probe
  source 1..120: mol_type = other DNA
cttgttaaatcaacatgcatgtgcagtaatgaaaaattttgggacccgaactttccaagccatgtaagttcaagttctatctagggaagagggtgagagctacagaactaccattttgca

SEQ ID NO: 442 - DNA, 120 bp, synthetic construct
  misc_feature 1..120: note = Artificially Synthesized Probe
  source 1..120: mol_type = other DNA
tacccttatcatttgctatccataagtgaaagctaagtggtctaaatttatagagaagatccatctttatcagaagcaggagtaacactattttctctaggagcaatggttttacaaaga

SEQ ID NO: 443 - DNA, 120 bp, synthetic construct
  misc_feature 1..120: note = Artificially Synthesized Probe
  source 1..120: mol_type = other DNA
ttgcagaggagatgtgctggattgtctgcaggatggggtgaagagtcttgcttcttaaaatagaagattttcactcccttttctttctttttgtctcattctaaaagggagaaggttgtt

SEQ ID NO: 444 - DNA, 120 bp, synthetic construct
  misc_feature 1..120: note = Artificially Synthesized Probe
  source 1..120: mol_type = other DNA
ttaaaaattactgctcttaggtactcaaatggcttgataaccagcactggactatggtttccagaaggctgaaagtgaagataaaatgctcatttcagcccatccgatggcaattcagtg

SEQ ID NO: 445 - DNA, 120 bp, synthetic construct
  misc_feature 1..120: note = Artificially Synthesized Probe
  source 1..120: mol_type = other DNA
ttcttacggaatttctcgtggagcagaaagtttgctctccatgttatgataccagttgcaagtgttgtttaggggcaaatttgaatgctaatagaaatacatatagcaacatgcatccta

SEQ ID NO: 446 - DNA, 120 bp, synthetic construct
  misc_feature 1..120: note = Artificially Synthesized Probe
  source 1..120: mol_type = other DNA
gaatgttctgagccaaaatagatttcagtagataaccagggaataagtaatgggatttggtgtttaacggtgaagcgttcaccactgtgactcattaactgctttgcttatgaagctgaa

SEQ ID NO: 447 - DNA, 120 bp, synthetic construct
  misc_feature 1..120: note = Artificially Synthesized Probe
  source 1..120: mol_type = other DNA
tgagatggcctatttcttgtttatttgttctgcctccctataatgtgtgcttttcagagggcaggtatttatcttagacatcattgagtccgttctgcttaaagcaatgctagcaaagag

SEQ ID NO: 448 - DNA, 120 bp, synthetic construct
  misc_feature 1..120: note = Artificially Synthesized Probe
  source 1..120: mol_type = other DNA
tcattttcaggaagaagaattacagaaatacatccaggagagccaagcattggcaaagcgaagctgcggcctcttccagaaactaggagaatattacttacaaaatgcgtatgtttttgt

SEQ ID NO: 449 - DNA, 120 bp, synthetic construct
  misc_feature 1..120: note = Artificially Synthesized Probe
  source 1..120: mol_type = other DNA
ttcctattcctccagggtggctggtggaagttcagccagtttagtcaacaatatctgagccaactttatatatcggaaagacagaacgaccaacatgtaactcataattcataacaattc

SEQ ID NO: 450 - DNA, 120 bp, synthetic construct
  misc_feature 1..120: note = Artificially Synthesized Probe
  source 1..120: mol_type = other DNA
atgttccggaggccaccagccaacaaccgcattctactttcactattctttagttgtatcacagtgggaaagcaacttatgtcattaagcttgagttttttcatctgacatttgagaata

SEQ ID NO: 451 - DNA, 120 bp, synthetic construct
  misc_feature 1..120: note = Artificially Synthesized Probe
  source 1..120: mol_type = other DNA
aacactattgggctcactaacagagcgttactcccaaaacacttaaaatgcctttgaaaatagttttgtctcagtgtcttcacagtctcattggggaagcaggtctagaaaaattgacga

SEQ ID NO: 452 - DNA, 120 bp, synthetic construct
  misc_feature 1..120: note = Artificially Synthesized Probe
  source 1..120: mol_type = other DNA
ttgttttgttttaaatcacaggtttctcattaaccttgtgaagcaaaagccacaaataacagaggaacaacttgaggctgtcattgcagatttctcaggcctgttggagaaatgctgcca

SEQ ID NO: 453 - DNA, 120 bp, synthetic construct
  misc_feature 1..120: note = Artificially Synthesized Probe
  source 1..120: mol_type = other DNA
atttgagtgtgtgcacttaccagtatatgtgtgtgtttttggtgggatcaggtagggtgggacatagataaccaaattagataaaactggtgaaacagatttgatgtgaagcatttctga

SEQ ID NO: 454 - DNA, 120 bp, synthetic construct
  misc_feature 1..120: note = Artificially Synthesized Probe
  source 1..120: mol_type = other DNA
cattaagtgttggttattataggagattaaagctatccaaggatggatttacagcactagatcacttggtgaactgaaaaatgttcccaagttaaacactatttgatgctaccagggcat

SEQ ID NO: 455 - DNA, 120 bp, synthetic construct
  misc_feature 1..120: note = Artificially Synthesized Probe
  source 1..120: mol_type = other DNA
ggcaggaaacaactattaatttgccttctcgaatcttaatagttataagattcattctctttcattgctctgctaggcataaaacacacttcgaacatgtaagtgccgctgtcagctctg

SEQ ID NO: 456 - DNA, 120 bp, synthetic construct
  misc_feature 1..120: note = Artificially Synthesized Probe
  source 1..120: mol_type = other DNA
tttcacacatacaatgtgatatcttcatgccaaatccgcgcctttttccaactttggcatttaaaatcactgagtacctactccatttttggctttcctgactctgcacttttctggttt

SEQ ID NO: 457 - DNA, 120 bp, synthetic construct
  misc_feature 1..120: note = Artificially Synthesized Probe
  source 1..120: mol_type = other DNA
tattcccaccctggaccttggcttcaacctgatattatgcaatagaatagtattaggatagctcaacttggatatgcttaaatctagcatgtccaaaaatatcccctgcccattctcgat

SEQ ID NO: 458 - DNA, 120 bp, synthetic construct
  misc_feature 1..120: note = Artificially Synthesized Probe
  source 1..120: mol_type = other DNA
acagaactattaagtgctgaataatgaagcagtgtctaaaggcttgttagtcttacagtgtcagactagggtttaaaatctgtgagaattgatgagggcaggtgactcacacttgtaatc

SEQ ID NO: 459 - DNA, 120 bp, synthetic construct
  misc_feature 1..120: note = Artificially Synthesized Probe
  source 1..120: mol_type = other DNA
gagtggaagagtggtagagaagggacattggagacaagaagcattgagaaggctattttaaaaacacatctgattaaagaaaaggattgaacagcctgagttgaaaaagagaggacaagg

SEQ ID NO: 460 - DNA, 120 bp, synthetic construct
  misc_feature 1..120: note = Artificially Synthesized Probe
  source 1..120: mol_type = other DNA
atgctagttgcctacaagagagacatggctaatgcaagttaagtatcctagcattagtatgaggaataagatagccacaccatgtactgctatgacctcagctaattttagcaaactgag

SEQ ID NO: 461 - DNA, 120 bp, synthetic construct
  misc_feature 1..120: note = Artificially Synthesized Probe
  source 1..120: mol_type = other DNA
agatcaacagcatcccaaggcagaatttttcttagtacagaacaaaatagagtctcccatgtctacttctttctacacagacacagcaacaatctgatttctctatcttttccccacctc

SEQ ID NO: 462 - DNA, 120 bp, synthetic construct
  misc_feature 1..120: note = Artificially Synthesized Probe
  source 1..120: mol_type = other DNA
ttacaaacaaaaaaggcatactcagaagaaaacgtagaggttgtaggtctggaaggggttgacaatcacaccctcatttgtttgcagtatgttgccatgcattgcacttttacttaagct

SEQ ID NO: 463 - DNA, 120 bp, synthetic construct
  misc_feature 1..120: note = Artificially Synthesized Probe
  source 1..120: mol_type = other DNA
ataaatgacttagcttgggaattattggggttttttcctgaaggtagagcactgatccaaatactgttttggagattttagatgagttttaacctttgctctgcaagttctctgaatact

SEQ ID NO: 464 - DNA, 120 bp, synthetic construct
  misc_feature 1..120: note = Artificially Synthesized Probe
  source 1..120: mol_type = other DNA
gtagtagtattatggtgtatgtactctacctccctgcctactgccatgtttcagccatacttttttccagaagatattttaaaagctctacataaatgtgtacaatgtaacaaaatagaa

SEQ ID NO: 465 - DNA, 120 bp, synthetic construct
  misc_feature 1..120: note = Artificially Synthesized Probe
  source 1..120: mol_type = other DNA
aaataacctaacttgggcaaaagtagaaatgcattggctctcaggattacaagacagctttagtaactaaaccatgaagcatagggatataggcagtagtgtgttggaggtgcttttgct

SEQ ID NO: 466 - DNA, 120 bp, synthetic construct
  misc_feature 1..120: note = Artificially Synthesized Probe
  source 1..120: mol_type = other DNA
gttccgattaggcccaactttacagggaaaagcagttaccgtgtatacaaattacccatttcctggagaaacatttaatagagaaaaattccgttctctggattgggaaaatccaacaga

SEQ ID NO: 467 - DNA, 120 bp, synthetic construct
  misc_feature 1..120: note = Artificially Synthesized Probe
  source 1..120: mol_type = other DNA
acttagggttgcaaaagaatcaggtaatgtcagcttgctttctttttcttatttaaaaaaataaatgtaattatcctctgtgatatagatttcaaaagttttgtgtattagtccattctc

SEQ ID NO: 468 - DNA, 120 bp, synthetic construct
  misc_feature 1..120: note = Artificially Synthesized Probe
  source 1..120: mol_type = other DNA
acaggtgcaaaccactgcacctgatctcaatattaattttctgcttttaagttggataatacatgaagaaaggaatgagaagttcactgacataactaaaacagaatacaagtactatgg

SEQ ID NO: 469 - DNA, 120 bp, synthetic construct
  misc_feature 1..120: note = Artificially Synthesized Probe
  source 1..120: mol_type = other DNA
attgcagactcttggactatctaggtcatgctactcccttgccaatcagttagaattaaatcctgacttttcaagacctaatagaaagtatacctggaatgatgttggacagctagtgga

SEQ ID NO: 470 - DNA, 120 bp, synthetic construct
  misc_feature 1..120: note = Artificially Synthesized Probe
  source 1..120: mol_type = other DNA
agcctgacaaagcgtggccatcagcagctttgggtttaacccagtttaccttacaaatgttatcttgtgtgtatgctacaatgtagaaaagtttggaaaccactgatttgcatatgtaaa

SEQ ID NO: 471 - DNA, 120 bp, synthetic construct
  misc_feature 1..120: note = Artificially Synthesized Probe
  source 1..120: mol_type = other DNA
tacagcagcagtctctaccacagactgtatttctgagacatttgggagattctgtgcaatgtaaaagaagtaaaccttgccacagccttacttgaaaagtgttgcaaatcgtaatatcct

SEQ ID NO: 472 - DNA, 120 bp, synthetic construct
  misc_feature 1..120: note = Artificially Synthesized Probe
  source 1..120: mol_type = other DNA
ctgggaacccatttgccctggaaaaggtcttggttcaaatgccaagactcttgctgttcttatcttaaataaatgtttcttcttatgctgaatgccctaggataatttccagggactaaa

SEQ ID NO: 473 - DNA, 120 bp, synthetic construct
  misc_feature 1..120: note = Artificially Synthesized Probe
  source 1..120: mol_type = other DNA
gttcaaggctgcagtgagctatgattgcaccactgcactcctgcactcctgggtgatggagaaagacctttctcaaaaataaatggatgaatgagagcagcattggtatttactcttttt

SEQ ID NO: 474 - DNA, 120 bp, synthetic construct
  misc_feature 1..120: note = Artificially Synthesized Probe
  source 1..120: mol_type = other DNA
agctgagtaaatgaagcacaaacaattcatttcagcagcagagcaatgtggttaagattgcatattctgaagagagacttggccaagttaattcctgactgtatgacttgggctgagtta

SEQ ID NO: 475 - DNA, 120 bp, synthetic construct
  misc_feature 1..120: note = Artificially Synthesized Probe
  source 1..120: mol_type = other DNA
tcttagacagagcactttggcgtttctcctgtgatgttgcagaagggaaatacaaagaaaagggaatacctgctttgattgaaaatgatcaccatatgaatgtcagtatgtacagaggag

SEQ ID NO: 476 - DNA, 120 bp, synthetic construct
  misc_feature 1..120: note = Artificially Synthesized Probe
  source 1..120: mol_type = other DNA
gaactagagtaggactcagaaatagtgcctttgaagtagacgtcaatatggcttgagctctaggatactcagtcagcttcatgcatcaacttttgcaattgtgtaacaccttaatacagg

SEQ ID NO: 477 - DNA, 120 bp, synthetic construct
  misc_feature 1..120: note = Artificially Synthesized Probe
  source 1..120: mol_type = other DNA
gcctcaaatatatcccctagtatgctcttgatcttttaactcttgtttatggtgacattttttttcaatgtagtcaaacttttcaatctctgatggcttccaatttcatatcatgcttag

SEQ ID NO: 478 - DNA, 120 bp, synthetic construct
  misc_feature 1..120: note = Artificially Synthesized Probe
  source 1..120: mol_type = other DNA
aagccaccatgcccggcggcagttttcatatatttactcttccagatgaaccttagaaactggattttaagaattgatttgtattttatgctgttttgtgaggctaacgtgaataaccac

SEQ ID NO: 479 - DNA, 120 bp, synthetic construct
  misc_feature 1..120: note = Artificially Synthesized Probe
  source 1..120: mol_type = other DNA
taggcgagtaaccaagtctgatccaaaccaacaccttacgattattcaagatcctgaatacagacggtttggctgtactgtagatatgaacattgcactaacgactttcataccacatga

SEQ ID NO: 480 - DNA, 120 bp, synthetic construct
  misc_feature 1..120: note = Artificially Synthesized Probe
  source 1..120: mol_type = other DNA
aacacaatttaatgtttttcaggcagttaattgccttttgggaaatgtgttttatgaacgactggctggccatggtccaaaactaggacctgtcactagaaagcatcctttagttaccag

SEQ ID NO: 481 - DNA, 120 bp, synthetic construct
  misc_feature 1..120: note = Artificially Synthesized Probe
  source 1..120: mol_type = other DNA
tggatgggtaatgggagatgatcctcttcgaaactttgctgaaccgggtatgtaatttttaacttctctgtggatggggaaagaatagttcatggcaaggtcaaaataaaatctgcttta

SEQ ID NO: 482 - DNA, 120 bp, synthetic construct
  misc_feature 1..120: note = Artificially Synthesized Probe
  source 1..120: mol_type = other DNA
acttatttgctggggagacagtgttaaattacgctatgggaataaaccagaggactgtccttatctctgggcacacatgaaaaaatacactgaaataactgcaacttatttccagggagt

SEQ ID NO: 483 - DNA, 120 bp, synthetic construct
  misc_feature 1..120: note = Artificially Synthesized Probe
  source 1..120: mol_type = other DNA
ccctacagtggcactgcttataagatttttgataccttactagtgaccagtgtcacttaggtgttctttggaaatgtgtgcttacctaaaaaatgtctatttctataatattaaagcagt

SEQ ID NO: 484 - DNA, 120 bp, synthetic construct
  misc_feature 1..120: note = Artificially Synthesized Probe
  source 1..120: mol_type = other DNA
cactgtgctttttacagtacatgttggatgctgctaggaatttgcaacccaatttatatgtagtagctgaactgttcacaggaagtgaagatctggacaatgtctttgttactagactgg

SEQ ID NO: 485 - DNA, 120 bp, synthetic construct
  misc_feature 1..120: note = Artificially Synthesized Probe
  source 1..120: mol_type = other DNA
tcagccctgtttgaggcctttaatgccagctattgcacatgccctgtttatggatattacgcatgataatgagtgtcctattgtggtaagcacctaatctttttcatgtacttattttgc

SEQ ID NO: 486 - DNA, 120 bp, synthetic construct
  misc_feature 1..120: note = Artificially Synthesized Probe
  source 1..120: mol_type = other DNA
gtctgttgtggctgtatctagaactgctttcaggaatcccaagacttcattttacagcaaggaagtgcctcaaatgtgcatccctggtaatgcaatctaaaaattgttactgtatttgta

SEQ ID NO: 487 - DNA, 120 bp, synthetic construct
  misc_feature 1..120: note = Artificially Synthesized Probe
  source 1..120: mol_type = other DNA
gccctatgtcagtccactatttcagccaaatagatatttttacttctccccaaatactatgcgaattgtctggatctttcaaggtctaaagttgcacctcctttgttcagtgattcttct

SEQ ID NO: 488 - DNA, 120 bp, synthetic construct
  misc_feature 1..120: note = Artificially Synthesized Probe
  source 1..120: mol_type = other DNA
tatatgttgtttaaggaaacaggcatgtgtagtgaaaatgccaggggtagtgagcaccaaactgaattgaggttacctctgaaagtgaagaatgggtacacagaggctttattgtatttg

SEQ ID NO: 489 - DNA, 120 bp, synthetic construct
  misc_feature 1..120: note = Artificially Synthesized Probe
  source 1..120: mol_type = other DNA
ctgacacaattcagtcctcactttaaatctggcagcctagctgttgacaatgcagatcctatattaaaaattccttttgcttcgtaagtatgccttgtttggtagagatttgccacctta

SEQ ID NO: 490 - DNA, 120 bp, synthetic construct
  misc_feature 1..120: note = Artificially Synthesized Probe
  source 1..120: mol_type = other DNA
cctggtgccaaaaaggaccattgggttagactatatccatatatttgaggctgttaatacatactgccaaattttctccagaaagattataataattaatactttcagctctatccaaga

SEQ ID NO: 491 - DNA, 120 bp, synthetic construct
  misc_feature 1..120: note = Artificially Synthesized Probe
  source 1..120: mol_type = other DNA
aataaagtagttgcattcttaaccaaaaaatctgtgatgaagcagctttgtgtttggatggactgcttgtaaaatgcatgttcctcctcagacctgctcagattattttggagcaaggcc

SEQ ID NO: 492 - DNA, 120 bp, synthetic construct
  misc_feature 1..120: note = Artificially Synthesized Probe
  source 1..120: mol_type = other DNA
aaacaagctgaggggcagtgcaaccttagagaagagaaaggaagggacttggagagaaatatgaaggtagagagcatgtgatttcctaggcaattaactttgactttttattcctttagt

SEQ ID NO: 493 - DNA, 120 bp, synthetic construct
  misc_feature 1..120: note = Artificially Synthesized Probe
  source 1..120: mol_type = other DNA
ttccttaaggtctgtatagctctttatgtatacttggaccttgattaatgtttcttgacctggtttattatataataaacagaatattcttgtttgggccccaagtgggattaggttgta

SEQ ID NO: 494 - DNA, 120 bp, synthetic construct
  misc_feature 1..120: note = Artificially Synthesized Probe
  source 1..120: mol_type = other DNA
gctttataccaatcccttttccctctgattgtttaatattttcagcaggccacatatttccagcaggctgctaataagagcctcagattaaatcagatttaactactttgttgacctgtc

SEQ ID NO: 495 - DNA, 120 bp, synthetic construct
  misc_feature 1..120: note = Artificially Synthesized Probe
  source 1..120: mol_type = other DNA
cttccttaaatctagcctgaatactgatgaacccactacttttcaacatgaaaaaatacaggcttattacttttctttcttgagatgcttttgggcagggaagccatgccagttaccctt

SEQ ID NO: 496 - DNA, 120 bp, synthetic construct
  misc_feature 1..120: note = Artificially Synthesized Probe
  source 1..120: mol_type = other DNA
ttaattacaggttggtaaatggttgcaggctatgttcttctacctgaagcagatcccacgttaccttatcccatgttactttgatgctatattaattggtgcatataccactcttctgga

SEQ ID NO: 497 - DNA, 120 bp, synthetic construct
  misc_feature 1..120: note = Artificially Synthesized Probe
  source 1..120: mol_type = other DNA
gttcaactgtgtggagtaggaaaattcccttccctgccaattctttcacctgccctaatggatgtaccttataggttaaatgagatcacaaaagaaaaggagcaatgttgtgtttctcta

SEQ ID NO: 498 - DNA, 120 bp, synthetic construct
  misc_feature 1..120: note = Artificially Synthesized Probe
  source 1..120: mol_type = other DNA
tgtttttagattttcatttgactgtttgatctcctggtacccgttgttccctcatgaatccatgcagatgctcatgaaactgaccttagccataggggcaaaggaaacattgatgtaaat

SEQ ID NO: 499 - DNA, 120 bp, synthetic construct
  misc_feature 1..120: note = Artificially Synthesized Probe
  source 1..120: mol_type = other DNA
cagaccgcatatatttttggatataccgattcagactcacctttgaatctacctgtattcatgtttcatacaaggaattaaatgggtcagagtaccaggaagtgtgtatggcacagagtg

SEQ ID NO: 500 - DNA, 120 bp, synthetic construct
  misc_feature 1..120: note = Artificially Synthesized Probe
  source 1..120: mol_type = other DNA
tagtgggaaatttgataatgttgactcaagtgctcaaatgttgactccatatacttaattaggtatcattaaggtaataatttcatgtttaggtttatttattgtccttaagttcaaggt

SEQ ID NO: 501 - DNA, 120 bp, synthetic construct
  misc_feature 1..120: note = Artificially Synthesized Probe
  source 1..120: mol_type = other DNA
acgctatgtagaagccaggtaggagagcctctaaagtgttgtactgcgagtttatgtctgaatgtcttttacatgctcttcaaactttccttcttgtccatcttttcttaacatttggga

SEQ ID NO: 502 - DNA, 120 bp, synthetic construct
  misc_feature 1..120: note = Artificially Synthesized Probe
  source 1..120: mol_type = other DNA
ctaaatgctcctgaattactgatttagaagaaggaaatggaacatcagcattcagcatagtatagtggttaagaacttcggctttacaccagactgccagcttctaatcctggttccaaa

SEQ ID NO: 503 - DNA, 120 bp, synthetic construct
  misc_feature 1..120: note = Artificially Synthesized Probe
  source 1..120: mol_type = other DNA
cttaatggcttttcacaaataaaatttatttcttgcttgtagtcgtagacgcatgctcagtaagcagccttctatatactgattcagggaagcaggtttcttccagcttgaggatctgtc

SEQ ID NO: 504 - DNA, 120 bp, synthetic construct
  misc_feature 1..120: note = Artificially Synthesized Probe
  source 1..120: mol_type = other DNA
ccaaaaagcagtaagacctagacattttaaataacatttccaaggccacacagatggcaaagctaggatttagacttcagccttcttatttcttaatttcatgctgtttctagagtgcct

SEQ ID NO: 505 - DNA, 120 bp, synthetic construct
  misc_feature 1..120: note = Artificially Synthesized Probe
  source 1..120: mol_type = other DNA
gatccacttaattctgttgttttaggaatattattttagcatttgcgggtaccctgaggcatggtctcattcctaatctactgggtgaaggaatttatgccagatacaattgtcgggatg

SEQ ID NO: 506 - DNA, 120 bp, synthetic construct
  misc_feature 1..120: note = Artificially Synthesized Probe
  source 1..120: mol_type = other DNA
gggtagtaagagattatggaaagggtgagccaggttatggagagccttgactaccaatccagggagcttaaagattatcttatgaacagtgaagaatggatagacatttttgagtgtttt

SEQ ID NO: 507 - DNA, 120 bp, synthetic construct
  misc_feature 1..120: note = Artificially Synthesized Probe
  source 1..120: mol_type = other DNA
cgtctgtattatttggtatataggagctgcttcttccctggcctcaccccaattcctatttctcacttcaaaggaaagtatatattttcacattacttcagttgtcggatttgggggaaa

SEQ ID NO: 508 - DNA, 120 bp, synthetic construct
  misc_feature 1..120: note = Artificially Synthesized Probe
  source 1..120: mol_type = other DNA
tgatggacatttgggttggttccaagtctttgctattgtgaatactgctgcaatgaacatacgtgtgcatgtgtctttatagcagcatgatttataatcctttgggtatatacccagtaa

SEQ ID NO: 509 - DNA, 120 bp, synthetic construct
  misc_feature 1..120: note = Artificially Synthesized Probe
  source 1..120: mol_type = other DNA
cttcacccagtacagcatcagagtcaggagattgacattagtatgttttcaacttttaaaagtttttacattcacttgtgtgtatatgtgtatgtgtagatccgtgcaatttgaccccat

SEQ ID NO: 510 - DNA, 120 bp, synthetic construct
  misc_feature 1..120: note = Artificially Synthesized Probe
  source 1..120: mol_type = other DNA
atcttccctctttgctgaaatgtcggttcacgtattttgcacattgtctctttctttattattttttagagacagggtcccactctgtcactgagactggatggcagtggtgcatcatag

SEQ ID NO: 511 - DNA, 120 bp, synthetic construct
  misc_feature 1..120: note = Artificially Synthesized Probe
  source 1..120: mol_type = other DNA
ttttttaccttgcaaaacaaactctatactcgtgaaacactagttcttcctcctctatccccactcttcccaggccttagtaaccacctgtctgctttctgtccctgtgattttgactac

SEQ ID NO: 512 - DNA, 120 bp, synthetic construct
  misc_feature 1..120: note = Artificially Synthesized Probe
  source 1..120: mol_type = other DNA
tgagtaactaccgtactgtcttccacagtggctgtgccattttacactcttactaatagtaaacaggcttccattcatctatatcctcaccaatacttgtttttttctgtgtttgttttt

SEQ ID NO: 513 - DNA, 120 bp, synthetic construct
  misc_feature 1..120: note = Artificially Synthesized Probe
  source 1..120: mol_type = other DNA
caaagcatcattctctttggagcatttttatgatacctcccttaagcttttctgtcagatacttccaacatctgagtcacctcagtgttgtcacctgttaattgccttttctcattcagg

SEQ ID NO: 514 - DNA, 120 bp, synthetic construct
  misc_feature 1..120: note = Artificially Synthesized Probe
  source 1..120: mol_type = other DNA
cctctttccttttcctttggctagagtcaattggtttttcttggaactctttgtcattacctgttggaggttgcaggttgcttttccaagtttacatctcacccagactggtatatatgg

SEQ ID NO: 515 - DNA, 120 bp, synthetic construct
  misc_feature 1..120: note = Artificially Synthesized Probe
  source 1..120: mol_type = other DNA
gcacatggatggataaaatgggagaaagtgacagagctagaaacagaggaatcccagccacaccaaggtagtgtaaatgttataatgctgtgtaattatacccttctttaagaaagcact

SEQ ID NO: 516 - DNA, 120 bp, synthetic construct
  misc_feature 1..120: note = Artificially Synthesized Probe
  source 1..120: mol_type = other DNA
tatgcccatcttttgcaaacatagaaaacaaccagttgttctgtcttttatgcaattctttcactttctgaaccttttttcctaatttttaaatcttttttcctaatgtttgtcatttaa

SEQ ID NO: 517 - DNA, 120 bp, synthetic construct
  misc_feature 1..120: note = Artificially Synthesized Probe
  source 1..120: mol_type = other DNA
gtctgctgtggaaattgtgggcctgagtaaatctgctgttcgctggttgctggaattatccaaaaaaaatattttcccttatcatgaagtcacagtaaaaagacatggtaagctggttat

SEQ ID NO: 518 - DNA, 120 bp, synthetic construct
  misc_feature 1..120: note = Artificially Synthesized Probe
  source 1..120: mol_type = other DNA
atgtttccgaagacccttcagatttaaatgaaaagcatccaaatctggttcacaaacgtggcatatacaaagatagttatggagcttcaagtccttggtgtgactatcagctcaggccta

SEQ ID NO: 519 - DNA, 120 bp, synthetic construct
  misc_feature 1..120: note = Artificially Synthesized Probe
  source 1..120: mol_type = other DNA
agtgcctcagcacactagttggaaagccctgaactagtgaactaaagtggatagctttagttaacattctgttttcattgttgcattgctgcaatcagtttgtccggcaaagaattttag

SEQ ID NO: 520 - DNA, 120 bp, synthetic construct
  misc_feature 1..120: note = Artificially Synthesized Probe
  source 1..120: mol_type = other DNA
tatttgtttttggcattcactaggcccctgagctctttactacagaaaaagcatggaaagctttggagattgcagaaaaaaaattgcttggtccccttggcatgaaaactttagatccag

SEQ ID NO: 521 - DNA, 120 bp, synthetic construct
  misc_feature 1..120: note = Artificially Synthesized Probe
  source 1..120: mol_type = other DNA
tttttaggagtggctgtggcctattgggtattttcttcgtgcaaaattatatttttccagattgatgggcccggagactactgcaaagactatagttttggttaaaaatgttctttcccg

SEQ ID NO: 522 - DNA, 120 bp, synthetic construct
  misc_feature 1..120: note = Artificially Synthesized Probe
  source 1..120: mol_type = other DNA
atctcctttcttacaagcacataagggacttctgcgtgtttcatattaatagagccactcctggtctgttttgtttggttgtcaccatggtacagattttaccatccttttaagctattt

SEQ ID NO: 523 - DNA, 120 bp, synthetic construct
  misc_feature 1..120: note = Artificially Synthesized Probe
  source 1..120: mol_type = other DNA
tctgctaattcatttctgggttgcttttgcttgtgattgttctctttattttgggtcatatcaccctgcttctttgcttggtagtttttgttttttgatttttggagcgacaggggtctt

SEQ ID NO: 524 - DNA, 120 bp, synthetic construct
  misc_feature 1..120: note = Artificially Synthesized Probe
  source 1..120: mol_type = other DNA
cccagcctggaattgggcaattctctaaggatcccttgttctttatagtgaaaaatgttatttagaagccagatctgagcacatggtgtatttattattactatgacccccagtagatag

SEQ ID NO: 525 - DNA, 120 bp, synthetic construct
  misc_feature 1..120: note = Artificially Synthesized Probe
  source 1..120: mol_type = other DNA
actcggggctaggacttcaacatacaaattctgtggagatgtaattcaacacattacagatgcccaggtatccaacttcagtcatttggcattttactctgatgtagcttgaatacttgg

SEQ ID NO: 526 - DNA, 120 bp, synthetic construct
  misc_feature 1..120: note = Artificially Synthesized Probe
  source 1..120: mol_type = other DNA
aaattatgtctttgtaaaatgtcttttctttcattcagatccccttggaaaggacttccagaactgaccaatgagaatgcccagtactgtcctttcagctgtgaaacacaagcctggtca

SEQ ID NO: 527 - DNA, 120 bp, synthetic construct
  misc_feature 1..120: note = Artificially Synthesized Probe
  source 1..120: mol_type = other DNA
tctaaaactcaactatctttagtcatgttcaaaaatctattgctagatcatagtagatactggttttctattaactcaaaacctacattgacaagtttaacattgagaagaatcttaaca

SEQ ID NO: 528 - DNA, 120 bp, synthetic construct
  misc_feature 1..120: note = Artificially Synthesized Probe
  source 1..120: mol_type = other DNA
ccttctctaaactgtgcgggtaaaaggaatgactgtccttgagagaaccattagtttatcaaaggtttatgtagttttgttgctgtaccctaactttgatattcagggaggtaggaaagg

SEQ ID NO: 529 - DNA, 120 bp, synthetic construct
  misc_feature 1..120: note = Artificially Synthesized Probe
  source 1..120: mol_type = other DNA
tcctttcgtgctgtgccggaggctgcagcacacggtgtcttgtggtccaacctcattctctgcttctccgtccctggctccccagctgcatctccaagccctcacattagacatctttgg

SEQ ID NO: 530 - DNA, 120 bp, synthetic construct
  misc_feature 1..120: note = Artificially Synthesized Probe
  source 1..120: mol_type = other DNA
gggaggacatgataaccttggtcctcttctgggcactcatggtctggggaaaagatgggggcatcgtggactcaggataggctgtcaggagctgaggaggggctggagaagggggttagg

SEQ ID NO: 531 - DNA, 120 bp, synthetic construct
  misc_feature 1..120: note = Artificially Synthesized Probe
  source 1..120: mol_type = other DNA
aaggtctctggagccagtctggctggagaagggacaattctgtgtgcccacccctcccctcacactgggtggtgtgggaggtgggtccatctcctgctctgtaggagataaggacattga

SEQ ID NO: 532 - DNA, 120 bp, synthetic construct
  misc_feature 1..120: note = Artificially Synthesized Probe
  source 1..120: mol_type = other DNA
tcctccgcattcctgccaccctctcctgccccctcctgactccaggttctcatcctgccccctggttcccccacccccaccccatgagcccctctctggccctcccccaggcaggtctgg

SEQ ID NO: 533 - DNA, 120 bp, synthetic construct
  misc_feature 1..120: note = Artificially Synthesized Probe
  source 1..120: mol_type = other DNA
cgcccagggctttgcttccacctgtgggacccaggtccacagccccaccagcggcctgggtggggcaggaacggaccccctccctgcagtcctggttctggcaccccctccccacttgga

SEQ ID NO: 534 - DNA, 120 bp, synthetic construct
  misc_feature 1..120: note = Artificially Synthesized Probe
  source 1..120: mol_type = other DNA
tacacgcatgtgtgtgcacgtgcctgcagcctcagatgtaccagcctgtgcacttcagaattctgcctggagcctccactagtgggccatggttcttaccaccctatgtccctgggttca

SEQ ID NO: 535 - DNA, 120 bp, synthetic construct
  misc_feature 1..120: note = Artificially Synthesized Probe
  source 1..120: mol_type = other DNA
gccacgccaccctttccgaaggaaccgagccccagcccctcgtgggccaagggcgcccacagccacgccaccctctcccaaggaaccgagccccagcccctcgtgggccaagggcgccca

SEQ ID NO: 536 - DNA, 120 bp, synthetic construct
  misc_feature 1..120: note = Artificially Synthesized Probe
  source 1..120: mol_type = other DNA
tgtgtccacacgggaacatatgggtgggaggtgaggagaacgtgccttcccagtgtatgggtgggggttgagggacaaaattaatgttgcacaaagatatgggggatgcccaatatctat

SEQ ID NO: 537 - DNA, 120 bp, synthetic construct
  misc_feature 1..120: note = Artificially Synthesized Probe
  source 1..120: mol_type = other DNA
atggtgctgagagatcagcatgtgtgtgtgcagtgcatggtgctgtgagatcagcgtgtgtgtgtgtgcagtgcatggtgctgagtgtgagatcagcatgtgtgtgtgtgcagtgcatgg

SEQ ID NO: 538 - DNA, 120 bp, synthetic construct
  misc_feature 1..120: note = Artificially Synthesized Probe
  source 1..120: mol_type = other DNA
tggtgctgtgagtgtgagatcagggaccagggggctagtactctttcctgcacatgagcctgcgtgggctggtcagggctgaatgattttgtctgaagatcccaaaatagctcatgtcgc

SEQ ID NO: 539 - DNA, 120 bp, synthetic construct
  misc_feature 1..120: note = Artificially Synthesized Probe
  source 1..120: mol_type = other DNA
tcctctggggtggactgaggtgaggcctgggtgtgaccacgcggtggcactggtggctgccggcagctgtcgtctgcagagtgggtgagaccgagtgtggcagatggcttggtccgcggt

SEQ ID NO: 540 - DNA, 120 bp, synthetic construct
  misc_feature 1..120: note = Artificially Synthesized Probe
  source 1..120: mol_type = other DNA
cgcgacccctgctcccccggcccagccccaccgctgccctcgactcaatcccagttgaacgcccgcagcctcagtcccacccccggcccagccccagcgcccccagtcccacccccggcc

SEQ ID NO: 541 - DNA, 120 bp, synthetic construct
  misc_feature 1..120: note = Artificially Synthesized Probe
  source 1..120: mol_type = other DNA
gccccgggccatgcctccgctgccgctggcgcgggacacccggcagccgcctggcgcctccctgctggtgcgaggcttcatggtgccctgcaacgcctgcctgatcctgctggccaccgc

SEQ ID NO: 542 - DNA, 120 bp, synthetic construct
  misc_feature 1..120: note = Artificially Synthesized Probe
  source 1..120: mol_type = other DNA
tcagcctcaaaactgggaacaagtcctgggacccacaggttgtgaggtgatgtcagacctgtagggcagggccagagtccggtcagggggctccgctctattgtcctcccttctccctgt

SEQ ID NO: 543 - DNA, 120 bp, synthetic construct
  misc_feature 1..120: note = Artificially Synthesized Probe
  source 1..120: mol_type = other DNA
actcaactcctggtcccagggactctggcctggggcagcgctgggcctggggtgaggagctgggcagcgggaatggggaatggtggctgtgggaacccgtcctacccctgggctctagcc

SEQ ID NO: 544 - DNA, 120 bp, synthetic construct
  misc_feature 1..120: note = Artificially Synthesized Probe
  source 1..120: mol_type = other DNA
actggatttaaagaggtgctcaggtgggaggtcccctctcttagcatcctcagcctcgtttcctgacacccagaaggctggggagtgtctccttttctttacacactgcccccttcacct

SEQ ID NO: 545 - DNA, 120 bp, synthetic construct
  misc_feature 1..120: note = Artificially Synthesized Probe
  source 1..120: mol_type = other DNA
aaggggaaccagaagggaagtgaaagggccaggggtgcatgtggtttgagtttgatttgagccaggacgggggaaggccagtggtgatgacagccctcatgactatacttacagtggcag

SEQ ID NO: 546 - DNA, 120 bp, synthetic construct
  misc_feature 1..120: note = Artificially Synthesized Probe
  source 1..120: mol_type = other DNA
ccatttcacgagcctgctgggaagtgatgggtggtagccacccctctgacatgacttattaatgataattggacccaattaaacatttattaaatccagacagctgcagccgctaacgga

SEQ ID NO: 547 - DNA, 120 bp, synthetic construct
  misc_feature 1..120: note = Artificially Synthesized Probe
  source 1..120: mol_type = other DNA
tggacccccgatgcggcgcgggggcgggtgaatgcgcgggctgcgagcacggcaaggtctctcaggcttgtggacgtgggtacgggcgtctcggcaccctgagctttctcccctacccgc

SEQ ID NO: 548 - DNA, 120 bp, synthetic construct
  misc_feature 1..120: note = Artificially Synthesized Probe
  source 1..120: mol_type = other DNA
gcgccctgagatgctcctacggcccgagagctgccctgcccggcaggcgccagtgtgtggggacgacggagtcacctacgaaaacgactgtgtcatgggccgatcgggggccgcccgggg

SEQ ID NO: 549 - DNA, 120 bp, synthetic construct
  misc_feature 1..120: note = Artificially Synthesized Probe
  source 1..120: mol_type = other DNA
tggccgtcgtgtcccgtcgtgttcgtcttggtcagttcgcccatcttctggtctttctctctgcgtctgtctcttctctttggtctcttcttccctgtcggctccgcctcttgtgtcttc

SEQ ID NO: 550 - DNA, 120 bp, synthetic construct
  misc_feature 1..120: note = Artificially Synthesized Probe
  source 1..120: mol_type = other DNA
gaccgctgcgggcagtgccgctttggagccctgtgcgaggccgagaccgggcgctgcgtgtgcccctctgaatgcgtggctttggcccagcccgtgtgtggctccgacgggcacacgtac

SEQ ID NO: 551 - DNA, 120 bp, synthetic construct
  misc_feature 1..120: note = Artificially Synthesized Probe
  source 1..120: mol_type = other DNA
cgtcttcagatgtctgtttctcgatttgcaaggaagctcgcgtgtgtgtgtgcacagagctgcgtgtccgtgatctttggatgctctgtgtgttgtgtgttcctggatctgcatttacag

SEQ ID NO: 552 - DNA, 120 bp, synthetic construct
  misc_feature 1..120: note = Artificially Synthesized Probe
  source 1..120: mol_type = other DNA
ttctggaactttcgaggcatcgtcaccgatggccggagtggctgtacacgtgagtgacagggcccaggactggccaccggctatgccctcctacctgttcacccccatcactgtgcttct

SEQ ID NO: 553 - DNA, 120 bp, synthetic construct
  misc_feature 1..120: note = Artificially Synthesized Probe
  source 1..120: mol_type = other DNA
acccctccgccctcatcacgacctcggaccactgccagcgtccccaggaccaccgtgtggcccgtgctgacggtgccccccacggcaccctcccctgcacccagcctggtggcgtccgcc

SEQ ID NO: 554 - DNA, 120 bp, synthetic construct
  misc_feature 1..120: note = Artificially Synthesized Probe
  source 1..120: mol_type = other DNA
cctgccacagctggacgacctcttccggaattcagacgtcaagaaggattttcggagtgtccgcttgcgggacctggggcccggcaaatccgtccgcgccattgtggatgtgcactttga

SEQ ID NO: 555 - DNA, 120 bp, synthetic construct
  misc_feature 1..120: note = Artificially Synthesized Probe
  source 1..120: mol_type = other DNA
aggccgaggcaggcggatcacctgaggtcgggagttcgagaccagcctgaccaacatggagacactctgtctctactaaaaatacaaaattagccgggcgtggtggtgggcgcctgtaat

SEQ ID NO: 556 - DNA, 120 bp, synthetic construct
  misc_feature 1..120: note = Artificially Synthesized Probe
  source 1..120: mol_type = other DNA
cctgagccctgacccggtgtccctcctggtggcagggcgctggagcggaccttcgtgggcgccggcctgagggggtgcatccgtttgctggacgtcaacaaccagcgcctggagcttggc

SEQ ID NO: 557 - DNA, 120 bp, synthetic construct
  misc_feature 1..120: note = Artificially Synthesized Probe
  source 1..120: mol_type = other DNA
gcactgcgggaccgccgcctggagttccgctacgacctgggcaagggggcagcggtcatcaggtgggccggcaagggtggctctgggaggcctggggcactggcccggggccggggcacc

SEQ ID NO: 558 - DNA, 120 bp, synthetic construct
  misc_feature 1..120: note = Artificially Synthesized Probe
  source 1..120: mol_type = other DNA
acccctgcacccgggcctcaggccacccctgcctcaatggggcctcctgcgtcccgagggaggctgcctatgtgtgcctgtgtcccgggggattctcaggaccgcactgcgagaagggtg

SEQ ID NO: 559 - DNA, 120 bp, synthetic construct
  misc_feature 1..120: note = Artificially Synthesized Probe
  source 1..120: mol_type = other DNA
acttccgcgtgtgtgaacatgcagctgtgtctgtgcgtgtctatgtatatggagtggatgtgcaagtgtgtgtgaatatccagctgtgtgtgtgcatgggtccatgtatatgtgtgtgtg

SEQ ID NO: 560 - DNA, 120 bp, synthetic construct
  misc_feature 1..120: note = Artificially Synthesized Probe
  source 1..120: mol_type = other DNA
ggctggcccatctgtcctcccgcccgtctctctgatctctctctgccaggctgcccctgtctccatccctcttctccctcccactgtcggtgtctgcccaccagccacccctgggtcccg

SEQ ID NO: 561 - DNA, 120 bp, synthetic construct
  misc_feature 1..120: note = Artificially Synthesized Probe
  source 1..120: mol_type = other DNA
ggacactgatggagccctgtggcttggtgagtgttttggggagactagagagggatgcccaagggtctcatgatatccgagggacagactccaccccccagcgcccacccttgagtcagg

SEQ ID NO: 562 - DNA, 120 bp, synthetic construct
  misc_feature 1..120: note = Artificially Synthesized Probe
  source 1..120: mol_type = other DNA
ttcatgtgttgattttatttgacccctggagtggtgggtctcatctttcccatctcgcctgagagcggctgagggctgcctcactgcaaatcctccccacagcgtcagtgaaagtcgtcc

SEQ ID NO: 563 - DNA, 120 bp, synthetic construct
  misc_feature 1..120: note = Artificially Synthesized Probe
  source 1..120: mol_type = other DNA
tgcgccgccgccgtcctccgcccgccgccgcctccctcctcgcggagacaagtgcacctcgcccacggactgcggctgccgcgcgccctccctaccggccgagaaggagaggggcctggg

SEQ ID NO: 564 - DNA, 120 bp, synthetic construct
  misc_feature 1..120: note = Artificially Synthesized Probe
  source 1..120: mol_type = other DNA
cgtgggtccctgtccccgtgagggccgccaggtcggctgtagcctttaccacaggccaccgtcagagcagctgccctcagggccccaggagctgagaaggtggagggtggggcaccctgc

SEQ ID NO: 565 - DNA, 120 bp, synthetic construct
  misc_feature 1..120: note = Artificially Synthesized Probe
  source 1..120: mol_type = other DNA
ttggaagaaagagaacgtagaaaggcatggtaggagaaggagtttggggattggggaggatgagggagaaaagctcagaaacccaagctgggcattccaagaggctggaacaagaggctg

SEQ ID NO: 566 - DNA, 120 bp, synthetic construct
  misc_feature 1..120: note = Artificially Synthesized Probe
  source 1..120: mol_type = other DNA
aaaggtccctttcatacctgatccaactgctctgtgaactaaaagaacgaaccacacctttcatacaaccgagatcaaagtaaacactgcccaggaaatatacccaagaatataacaatt

SEQ ID NO: 567 - DNA, 120 bp, synthetic construct
  misc_feature 1..120: note = Artificially Synthesized Probe
  source 1..120: mol_type = other DNA
gcattggcgaagccctccagatcaatgttaaatagcagcagtaatagtgggcattgggcattattttcttatctctgactttaatgaatagacatctatggtctcaccataaatacagtg

SEQ ID NO: 568 - DNA, 120 bp, synthetic construct
  misc_feature 1..120: note = Artificially Synthesized Probe
  source 1..120: mol_type = other DNA
gccactgcacccggccttataatttcattttcgtaataacagctaacacgtaagcactgtacatgaaccatcgcaaccatacatcaactctgaagacaggtattcttattattctcactt

SEQ ID NO: 569 - DNA, 120 bp, synthetic construct
  misc_feature 1..120: note = Artificially Synthesized Probe
  source 1..120: mol_type = other DNA
tgcaagtgtttcaccctagccagtaccctctggactgcccagcctagccctgcccaaatttctgatccagagaatcttaagaaaaaagaaatatgtctgtagtttttttattttattgta

SEQ ID NO: 570 - DNA, 120 bp, synthetic construct
  misc_feature 1..120: note = Artificially Synthesized Probe
  source 1..120: mol_type = other DNA
gagccaccacgcctggctgccaagcattttaaatagagctatgtatttggttcacattttaaaatcatgtacacaaaggatctgatttaataactgagacatgatggctcctcagtgaca

SEQ ID NO: 571 - DNA, 120 bp, synthetic construct
  misc_feature 1..120: note = Artificially Synthesized Probe
  source 1..120: mol_type = other DNA
agcgtgagaaataagaatattcacctgttagagagcttgtgtgcaagacggctgggtggaaacaaagatgatgggaaccagtgataaagggctacttgcctggcctaaactcagatattg

SEQ ID NO: 572 - DNA, 120 bp, synthetic construct
  misc_feature 1..120: note = Artificially Synthesized Probe
  source 1..120: mol_type = other DNA
tggtaactaaactggtatttgcttcagtctatgtcttttgggattatcattttctgaagaaattgaagaacccaaggcagttctgcagtgaacataaatcccgtcgatcagtcctcaagc

SEQ ID NO: 573 - DNA, 120 bp, synthetic construct
  misc_feature 1..120: note = Artificially Synthesized Probe
  source 1..120: mol_type = other DNA
cttgggttgccatgccacacagagcaagctgctactccacctggctgggttctaaccatgagaggagcccctaagttcttctcccaaattaacatcaacttgaatcaccattacaacctt

SEQ ID NO: 574 - DNA, 120 bp, synthetic construct
  misc_feature 1..120: note = Artificially Synthesized Probe
  source 1..120: mol_type = other DNA
cttcctgatagttctcaaatgcaccagcacattcagaattcagggcctgcacacttactatacctctgcctgctactcttgccccaattatcttcagaactagcacctctccttccttca

SEQ ID NO: 575 - DNA, 120 bp, synthetic construct
  misc_feature 1..120: note = Artificially Synthesized Probe
  source 1..120: mol_type = other DNA
aattccagagcactatgaggaagactacaactagggtggtgacagtagggatcagccacctaactggatttaggaagacagagagggaaacatgagtcaaagagaactaaggtttggagt

SEQ ID NO: 576 - DNA, 120 bp, synthetic construct
  misc_feature 1..120: note = Artificially Synthesized Probe
  source 1..120: mol_type = other DNA
aaatgaaataaagtaagataggagagttgaattaacagtaattagatccccctttgggtcttaagtaggaaacagacaccccaaatatgaaacaactgcccaaggagggaggagctgtca

SEQ ID NO: 577 - DNA, 120 bp, synthetic construct
  misc_feature 1..120: note = Artificially Synthesized Probe
  source 1..120: mol_type = other DNA
tttgagagaaagttcccagaatcctctgaagtcagagatggctcccactgcacgttgcagaatattgacagagctcaggaagctgaaatgaatgggtgggcttgtggaaaggtcaaggga

SEQ ID NO: 578 - DNA, 120 bp, synthetic construct
  misc_feature 1..120: note = Artificially Synthesized Probe
  source 1..120: mol_type = other DNA
gcagctacctgccatttcagaagggaccccaaactcaattcataccctcaagaattccctatgctagggtgtgaaaacacctgaaatccccaggcgccatgagcgcagggaccacaatgt

SEQ ID NO: 579 - DNA, 120 bp, synthetic construct
  misc_feature 1..120: note = Artificially Synthesized Probe
  source 1..120: mol_type = other DNA
cccattacgtgcgtgggaggagatccttaggtatttggtaactaaaagaatgaactgaaagccggggagcctggctgggctcagggtcagctgagggtagtgctggggctcaggatgagg

SEQ ID NO: 580 - DNA, 120 bp, synthetic construct
  misc_feature 1..120: note = Artificially Synthesized Probe
  source 1..120: mol_type = other DNA
ctcatacctagtccttcccactctcaactcagatggaatccccttctgacatctgagcactatgtatccagcaacagctaaatgaacacatgagaactgaccaaccatgtctctagcttt

SEQ ID NO: 581 - DNA, 120 bp, synthetic construct
  misc_feature 1..120: note = Artificially Synthesized Probe
  source 1..120: mol_type = other DNA
aaaactctatgaggtaggaatcattatatcttcaatttaatactagacactaagggtcagagagatggagtgacttgcacagctgagtggcagagcagggatttgagaacctaagccttt

SEQ ID NO: 582 - DNA, 120 bp, synthetic construct
  misc_feature 1..120: note = Artificially Synthesized Probe
  source 1..120: mol_type = other DNA
cactggaaggtagaagaggggctggcacgtggagagatgcatactcttcactttgtggatgtctgtgctgtttgaatttttacagtgagcactattttttttttccttctttttaagatg

SEQ ID NO: 583 - DNA, 120 bp, synthetic construct
  misc_feature 1..120: note = Artificially Synthesized Probe
  source 1..120: mol_type = other DNA
caaaaggaatggaacatggaacaagtaggcgtgtggcaataggtcaataacataggatgtataaagatgtgtgggctgggcgtggtggctcatgcctgtaatcccagcactttgggaggc

SEQ ID NO: 584 - DNA, 120 bp, synthetic construct
  misc_feature 1..120: note = Artificially Synthesized Probe
  source 1..120: mol_type = other DNA
acttgacttcctttcccctccttcccaagctttaatcttcacctgtcaccctggtctacacaagttgtcgtctttgtcaaggcaaatttcttgtctgactccatctcctgaaagctgttg

SEQ ID NO: 585 - DNA, 120 bp, synthetic construct
  misc_feature 1..120: note = Artificially Synthesized Probe
  source 1..120: mol_type = other DNA
cagcttcacccccaaattatagcaatcttcccaattgttggcatgtttatctcccctccagactataaactccctgagggcagaagtcgtcttgtattcctttttcttctttttcttctt

SEQ ID NO: 586 - DNA, 120 bp, synthetic construct
  misc_feature 1..120: note = Artificially Synthesized Probe
  source 1..120: mol_type = other DNA
agaagggtgcctgcctatatgagtgtatgtgtctatgtgagtctccagaagagtcaataccgtctgcaaaaccctcgcatttcagggcttgagaggctcccttttttcagaaaacatcta

SEQ ID NO: 587 - DNA, 120 bp, synthetic construct
  misc_feature 1..120: note = Artificially Synthesized Probe
  source 1..120: mol_type = other DNA
ctgcctggatggagttcatcatctccaggaaagacagggacctcaatagggaaggtgaggaggtcagggccggtatcctgagttcagcaggatctcaagagtccaggaggaatactcctc

SEQ ID NO: 588 - DNA, 120 bp, synthetic construct
  misc_feature 1..120: note = Artificially Synthesized Probe
  source 1..120: mol_type = other DNA
gaatcatccgtgtgaatcactaaacagtggagagttgcacttggtcataaatcacacgtgactgcagccacacgcaggtgagtcgcacacgcattccagcacatgtcaaatggtcaggaa

SEQ ID NO: 589 - DNA, 120 bp, synthetic construct
  misc_feature 1..120: note = Artificially Synthesized Probe
  source 1..120: mol_type = other DNA
ggtcactgtttgtgagaggtggacaccttaattttctttagttgatcagaatggaacaaaaaattttaaaaatgtactccgttctccaactcctgaaatgcctctgcagttgctggagaa

SEQ ID NO: 590 - DNA, 120 bp, synthetic construct
  misc_feature 1..120: note = Artificially Synthesized Probe
  source 1..120: mol_type = other DNA
tagtttcacttgtatttctagtagaaactatgccatttaaaagtgcacataaggggactggactggggtagcacatattttggaaactaatggagaaatggaagcgtggccagggagtac

SEQ ID NO: 591 - DNA, 120 bp, synthetic construct
  misc_feature 1..120: note = Artificially Synthesized Probe
  source 1..120: mol_type = other DNA
aagtcccattttaatgtagtcaaacatttatcttcttacaggaaagtcttccatgtgtctttatgaagctttcagttttttctcacggctctggttaggaagggcctagtggcctgggga

SEQ ID NO: 592 - DNA, 120 bp, synthetic construct
  misc_feature 1..120: note = Artificially Synthesized Probe
  source 1..120: mol_type = other DNA
cttcatgcggtcatacttgtcatccacgtcctggagccaggagatgaactggcgggcgttgaaacggtcgcgcactgacttgttctcgtcaccctgtggaaaccaaacacgggagtttca

SEQ ID NO: 593 - DNA, 120 bp, synthetic construct
  misc_feature 1..120: note = Artificially Synthesized Probe
  source 1..120: mol_type = other DNA
cagtcaacagggtgaaaagacacgcacagaatgggaggaaacgcctgcaaaccgctcctgtcacacagattctcaagcagaacatagaaggcatgcaattaactcgatatgaaaaaatct

SEQ ID NO: 594 - DNA, 120 bp, synthetic construct
  misc_feature 1..120: note = Artificially Synthesized Probe
  source 1..120: mol_type = other DNA
agagctgtcctgactgcctgtccatcacagcctctcacctgcggtacaagaatgcaaacttatcagcatccagcccccaaagcaccatttggtccaactcatgttttctttaaagaaaat

SEQ ID NO: 595 - DNA, 120 bp, synthetic construct
  misc_feature 1..120: note = Artificially Synthesized Probe
  source 1..120: mol_type = other DNA
attgtgtatatgagagacattgataaaatacatccccaaagaaaggaagatctttaatgcacaaagagatgttttcaactaaacatctgggagcccctggctgtcaccacacagcaaagc

SEQ ID NO: 596 - DNA, 120 bp, synthetic construct
  misc_feature 1..120: note = Artificially Synthesized Probe
  source 1..120: mol_type = other DNA
gcgcccccctgcctgtgccagcccacttacccgctcgatgctgtgctgtagacgcagctttccccggacggcctcctgctgcctgaacagctccttcaggggctccgccagggagggagg

SEQ ID NO: 597 - DNA, 120 bp, synthetic construct
  misc_feature 1..120: note = Artificially Synthesized Probe
  source 1..120: mol_type = other DNA
cagaagggttctcacagaggtgggtcggccattctgaaactacatgcatgctggaagtgaatgaggaagtaaagacagccgagaccatcaggatgaggcctcacactcttggagaaacaa

SEQ ID NO: 598 - DNA, 120 bp, synthetic construct
  misc_feature 1..120: note = Artificially Synthesized Probe
  source 1..120: mol_type = other DNA
actcaaaagaccaggcgggaggtgcacagaacattcccaggactactcagattggcaggattctagtgacttttttcccctgtattttccaaattttctacagcagtcagactagtgtta

SEQ ID NO: 599 - DNA, 120 bp, synthetic construct
  misc_feature 1..120: note = Artificially Synthesized Probe
  source 1..120: mol_type = other DNA
ggaatccccagaaggaaatggccattggtgacggcaagcctgttctgggcataacacaacacactcaagcgagacggctgcatcaaccacacagtccgctaggcacagtgtgagtggagt

SEQ ID NO: 600 - DNA, 120 bp, synthetic construct
  misc_feature 1..120: note = Artificially Synthesized Probe
  source 1..120: mol_type = other DNA
ctgcggcgtgatacagcacaggatcttgcgcttctcctcgatcttcttcctgatctgcaggtattcgaagtaggggttggccctgtcgctgtggtagggctcgatggcatccagcttgat

SEQ ID NO: 601 - DNA, 120 bp, synthetic construct
  misc_feature 1..120: note = Artificially Synthesized Probe
  source 1..120: mol_type = other DNA
tcagccactacggtggaaacatccccaccgtttatgaccccgggggcccctggaggcatctcttctggaggagcaagactttcttccacgggttccgcttcaccatctgcggcatcttta

SEQ ID NO: 602 - DNA, 120 bp, synthetic construct
  misc_feature 1..120: note = Artificially Synthesized Probe
  source 1..120: mol_type = other DNA
tcgtagctggaggcagcaggaacgctctgctgcctgaagagcttgtctccgacgctgaattcttcctcgggggtcctcctaatgtcgacagagaccgagcggtaaaggtttgtggagaga

SEQ ID NO: 603 - DNA, 120 bp, synthetic construct
  misc_feature 1..120: note = Artificially Synthesized Probe
  source 1..120: mol_type = other DNA
gcctctccttctcgtctctccatttctccctgtgtttctctctcttcttcttctcttttaggatgttgatggcactagatccataaggctttagttccttttctattttcttggaaggtt

SEQ ID NO: 604 - DNA, 120 bp, synthetic construct
  misc_feature 1..120: note = Artificially Synthesized Probe
  source 1..120: mol_type = other DNA
tgtttatttttcttatcttgcgtggagtccactgaggctctgtccttcctgtccttgtacttttctgtggactctttatccttcttctccttgtgcttttcaaagactttctcttttttg

SEQ ID NO: 605 - DNA, 120 bp, synthetic construct
  misc_feature 1..120: note = Artificially Synthesized Probe
  source 1..120: mol_type = other DNA
ggacaagtcagaaaaccaccgatctcgctgatcgtcagaaaggctaaatttggtgtcttcattctccagaaactgatttttgttacaatattcgtcaaaagcagaatcttccctataaac

SEQ ID NO: 606 - DNA, 120 bp, synthetic construct
  misc_feature 1..120: note = Artificially Synthesized Probe
  source 1..120: mol_type = other DNA
ttttgtttctttctttcgcttctttttcactttatttttttccttctgctgcttggcattagaaggctctcgtgtcttactaccaggcaatatcgtatgtgccgagagtctcagcttctc

SEQ ID NO: 607 - DNA, 120 bp, synthetic construct
  misc_feature 1..120: note = Artificially Synthesized Probe
  source 1..120: mol_type = other DNA
acactgtgcaaacaccacagggcagctcctaccatccctgcataaaagaacaggcagctcaggtggccgtgacttacccgtcgagctctcctcgctggaagtgtaagtgcctttgcctaa

SEQ ID NO: 608 - DNA, 120 bp, synthetic construct
  misc_feature 1..120: note = Artificially Synthesized Probe
  source 1..120: mol_type = other DNA
cacagaatcagtttccagttcgtgtgtgacatgttctattgttgaatcagtacagagttcttatgtgtgtgagttttctatggtgactacacaaaacctcaggcttacaattgtggaggt

SEQ ID NO: 609 - DNA, 120 bp, synthetic construct
  misc_feature 1..120: note = Artificially Synthesized Probe
  source 1..120: mol_type = other DNA
caatggccactttctaaagcttgagtctatggttctgtgcactggccacacctcttggtgttacctcattccagacgagggtgggtctgccttgcaggtctaacagtcccacagtggtga

SEQ ID NO: 610 - DNA, 120 bp, synthetic construct
  misc_feature 1..120: note = Artificially Synthesized Probe
  source 1..120: mol_type = other DNA
gaagcacacggcactgctctagagaagtttcttttagaaaaatgctttaaaaaaaaaaggtgctaaattaggtttgggtcagacagctataaaccagggcagttggagaaatctagaagg

SEQ ID NO: 611 - DNA, 120 bp, synthetic construct
  misc_feature 1..120: note = Artificially Synthesized Probe
  source 1..120: mol_type = other DNA
taaaaataaaaataacaataaaacccagcaaacaagtttactttgaaatactttccaagaaacactgatttcttctcagcaacagggaaccccactggagtgagtgtggctgtgaacacc

SEQ ID NO: 612 - DNA, 120 bp, synthetic construct
  misc_feature 1..120: note = Artificially Synthesized Probe
  source 1..120: mol_type = other DNA
gtctctccacgctcgtttctcttgttcactttatctttggtttttgaggcagagttgggcgttcccttctgacacactgtagactgggaggggtgctttggtgttgtgtccactgcaggc

SEQ ID NO: 613 - DNA, 120 bp, synthetic construct
  misc_feature 1..120: note = Artificially Synthesized Probe
  source 1..120: mol_type = other DNA
ttcaggacttctccctcggctggtgtttgatcctacagaggtgggagacatctctaacaacggactaactggatcccacacctgcccggtcactggaacacagaacggtcttaactagtc

SEQ ID NO: 614 - DNA, 120 bp, synthetic construct
  misc_feature 1..120: note = Artificially Synthesized Probe
  source 1..120: mol_type = other DNA
tgagaacacgaggaaagcagaatccccgagatacacagactttgcaaagctgcacacagcacaggagactcctgggagcagacggcatctccttattccattgaccatcagaagtgaaaa

SEQ ID NO: 615 - DNA, 120 bp, synthetic construct
  misc_feature 1..120: note = Artificially Synthesized Probe
  source 1..120: mol_type = other DNA
cagcaacttttcacccagctctccctgtcctgaaacaggactttttacttgtcctgacaccaaaaaagtccaatatgaaaccagatctcccaggatgccaatctctccactgtgaaacaa

SEQ ID NO: 616 - DNA, 120 bp, synthetic construct
  misc_feature 1..120: note = Artificially Synthesized Probe
  source 1..120: mol_type = other DNA
ggacagccagcaagttcctgtagcattctgcaaatttcctgtttctaccgtccaaatggaagccaaatacaatttctatgaattccaaatggtattcaccaagttgcaaagtggaaaact

SEQ ID NO: 617 - DNA, 120 bp, synthetic construct
  misc_feature 1..120: note = Artificially Synthesized Probe
  source 1..120: mol_type = other DNA
ttaaatgtgtaattactgctctttctcctgcttataattcattatactttttgaatttgaggcttgtgtttttatgaaccttgaaaagccctctgctgccggcctctggagccaccgtct

SEQ ID NO: 618 - DNA, 120 bp, synthetic construct
  misc_feature 1..120: note = Artificially Synthesized Probe
  source 1..120: mol_type = other DNA
tcagctgctcatctgaacaaatgccttttgtatcaatcatttagcacctctaatttctaggcttttctagcaagagtcttttaggagacacaggccacgatactgtcaacataggaaaat

SEQ ID NO: 619 - DNA, 120 bp, synthetic construct
  misc_feature 1..120: note = Artificially Synthesized Probe
  source 1..120: mol_type = other DNA
agcactgtgagccatcttgtggtgagactggcttctccttccaatctccaggtttctctctctttctgccttctttctgtcagttaccgtcattgatcacttaaagaaagacagggccta

SEQ ID NO: 620 - DNA, 120 bp, synthetic construct
  misc_feature 1..120: note = Artificially Synthesized Probe
  source 1..120: mol_type = other DNA
gaggaaaaatggttgagaaataggaggaccagagaccaatcacgcggagttcttaatcatgtgaaaatattttattttgacgtgctttttcttgagtgcctgaatgtggtggctcttagg

SEQ ID NO: 621 - DNA, 120 bp, synthetic construct
  misc_feature 1..120: note = Artificially Synthesized Probe
  source 1..120: mol_type = other DNA
tgtgccctgtgtgaggtgcctgccctgtgtggggtgcgtggggtctgtgccctgtgtggggtgcctgccctgtgtggggtgcgtgcggtctgtgccctgtgtggggtgcctgccctgtgt

SEQ ID NO: 622 - DNA, 120 bp, synthetic construct
  misc_feature 1..120: note = Artificially Synthesized Probe
  source 1..120: mol_type = other DNA
aaatcccagatatcatataatttaatatgaatgctttcagtgataaggctttttaaactgagaccacccttgaggtggtagaggacagacttcaaaagcagatacaagaggccccgggca

SEQ ID NO: 623 - DNA, 120 bp, synthetic construct
  misc_feature 1..120: note = Artificially Synthesized Probe
  source 1..120: mol_type = other DNA
ggaccagagaagagtctcttgtctgtcacgtgtcagttaaccctgcaccaatgtttctcttctcatccctgctggtgtgcgcctctccctccaccccactcatttctgagcaagaacggc

SEQ ID NO: 624 - DNA, 120 bp, synthetic construct
  misc_feature 1..120: note = Artificially Synthesized Probe
  source 1..120: mol_type = other DNA
caaatactacgtttcttaggtctttttgttacaatccttgcctggaaaattctattttcaaaatgttctttactgttttcccacctcacagggattctcacctaccctgtcctcacctag

SEQ ID NO: 625 - DNA, 120 bp, synthetic construct
  misc_feature 1..120: note = Artificially Synthesized Probe
  source 1..120: mol_type = other DNA
cataaaggctgaagcttgctgagctgtgctgacaaaagctggggtgtggatcctctttactggctgtgcctgctgccgttcctcttcaacaatctccttcgtatcacgagctcttctcac

SEQ ID NO: 626 - DNA, 120 bp, synthetic construct
  misc_feature 1..120: note = Artificially Synthesized Probe
  source 1..120: mol_type = other DNA
catcgccacgctccagttttggggtcttggttagagaaactttatctttatcctagaaaagaaagggatgctttcagtcgtgatgtccaaattacattctcaagctctcaagattttgtt

SEQ ID NO: 627 - DNA, 120 bp, synthetic construct
  misc_feature 1..120: note = Artificially Synthesized Probe
  source 1..120: mol_type = other DNA
tccgcagacacgcgccacccacctcccactccgcagacacgcgccatctacctcccactccgcagacacgcgccacctcccactccgcagacacgccacttacctcccactccgcagaca

SEQ ID NO: 628 - DNA, 120 bp, synthetic construct
  misc_feature 1..120: note = Artificially Synthesized Probe
  source 1..120: mol_type = other DNA
ctgatacatcttccagctcagtcactctgcatccaccaaacgtgcatccacccaacctgcatccaccaaacctgacagttaatctgagacatccctgagtgaccatgaaagagctttcca

SEQ ID NO: 629 - DNA, 120 bp, synthetic construct
  misc_feature 1..120: note = Artificially Synthesized Probe
  source 1..120: mol_type = other DNA
ggaaggttctaccaaacatgtgaagaggccaccatcaccctcatctcagaacctgatgagggcattctatgaaaagaaaatgataaaccaacataccttatgaacatagacaggatatat

SEQ ID NO: 630 - DNA, 120 bp, synthetic construct
  misc_feature 1..120: note = Artificially Synthesized Probe
  source 1..120: mol_type = other DNA
tcaaggcagttttgttcgtaatacaaaaaaaatgacacaactaaactgcccgtccaaaggcaaatgaacaattctagaatacaaatggaataccgcagggggtgcgcgccgtgagaaacg

SEQ ID NO: 631 - DNA, 120 bp, synthetic construct
  misc_feature 1..120: note = Artificially Synthesized Probe
  source 1..120: mol_type = other DNA
ctacctcatgcctgtagctttagaggaagcaatgaaactacactgtctgcatcctccaattctgttctttctcaaggtggctttggttattctaggtcttttcaatttccctattaactt

SEQ ID NO: 632 - DNA, 120 bp, synthetic construct
  misc_feature 1..120: note = Artificially Synthesized Probe
  source 1..120: mol_type = other DNA
atgctgactgcagtggagatggccagtgtttctttgtctgttctcaattttaggtggaaagaattcagtctttgacattaaatatgatgtcagttgcaggttttcacagatgctctctgt

SEQ ID NO: 633 - DNA, 120 bp, synthetic construct
  misc_feature 1..120: note = Artificially Synthesized Probe
  source 1..120: mol_type = other DNA
ggacccagagccaaggggattttcttggctttttctttcttaaagtgggaagtttttgctttattctaataatgaaaatcaggaacacagggaaggacttccacttcttttttcttcccc

SEQ ID NO: 634 - DNA, 120 bp, synthetic construct
  misc_feature 1..120: note = Artificially Synthesized Probe
  source 1..120: mol_type = other DNA
tcagctaaggtcactctggaatacttatcttgagggacgtagctcccagctccccacctgcagcactgacaaagctatcttcggggaggggcctcagaccagatgtgagtctgtaactgg

SEQ ID NO: 635 - DNA, 120 bp, synthetic construct
  misc_feature 1..120: note = Artificially Synthesized Probe
  source 1..120: mol_type = other DNA
gctaagaaagctccaccaggcctgagagctccctactccctgtaatgcgtttaaaatttgtctgcctccatgaggaaaatgcctggctttactgtgagtagttggaaaaacaaacaaaca

SEQ ID NO: 636 - DNA, 120 bp, synthetic construct
  misc_feature 1..120: note = Artificially Synthesized Probe
  source 1..120: mol_type = other DNA
cacatcacccgtgtgaacatgacaggtttttgatccaaacacacagctcacgcctccacactctcggggtgaaaccacaccatacacgacctctttgggagccaatgctcagtggaggca

SEQ ID NO: 637 - DNA, 120 bp, synthetic construct
  misc_feature 1..120: note = Artificially Synthesized Probe
  source 1..120: mol_type = other DNA
acgatactgtgcctgctgcagagacaggaagctgactcaggagacacctgacttgttgacggtcacaaagataacacatggcaaagcctgaacttgaacctggatctgtccaagttcaca

SEQ ID NO: 638 - DNA, 120 bp, synthetic construct
  misc_feature 1..120: note = Artificially Synthesized Probe
  source 1..120: mol_type = other DNA
acttctgtacataaagctattatttaacgcttgacttcggtccccaaataacaaatacaaaaaaagcaaggccactttgggaaagatcactcctcaccaccctctccactcctggctgca

SEQ ID NO: 639 - DNA, 120 bp, synthetic construct
  misc_feature 1..120: note = Artificially Synthesized Probe
  source 1..120: mol_type = other DNA
acgccccctcgggcctcaggctccagctcctgggtttcccaggaaatccgaggacacatactgtattaattgtatattatttttatttattaatcatgttttattttaggaaattttgcc

SEQ ID NO: 640 - DNA, 120 bp, synthetic construct
  misc_feature 1..120: note = Artificially Synthesized Probe
  source 1..120: mol_type = other DNA
gtctagaaactcagtggtaatgtttacaagtttaaggattatctggaattaacattttaaaaaatccagactgtctgctctcaggacggaaaaacggggccttcaccatgtagagtccac

SEQ ID NO: 641 - DNA, 120 bp, synthetic construct
  misc_feature 1..120: note = Artificially Synthesized Probe
  source 1..120: mol_type = other DNA
ggtgacttggctgtccctgcctagactcattttaagtgcagcctaaatctccctcatttccaagttatcaggcaaagtctattttaaactcacgacccttgaatcagcaggaaactgaaa

SEQ ID NO: 642 - DNA, 120 bp, synthetic construct
  misc_feature 1..120: note = Artificially Synthesized Probe
  source 1..120: mol_type = other DNA
ccaaagagccttcctccaggattaagcctgatgcagaagtggttacactgactacggcaaggtcagtttggcaaaacccccaggaatttcagcctatctggtctcttcagctgacaagag

SEQ ID NO: 643 - DNA, 120 bp, synthetic construct
  misc_feature 1..120: note = Artificially Synthesized Probe
  source 1..120: mol_type = other DNA
acttcaaattcagatttgtcttccacagtatgttgatagaacaggcctttacgtacgtcctgggcaaatgctcctctccttatgtaagttaataactccaccaaccactagtttgtgtaa

SEQ ID NO: 644 - DNA, 120 bp, synthetic construct
  misc_feature 1..120: note = Artificially Synthesized Probe
  source 1..120: mol_type = other DNA
aaggagaaaaggaaaaagagctgcatacctggcaggcctactgtgtgcaaagcccttgagtgacacaccctatgacccacagcactgtggcaatcccaggtatggaagagaagcaccact

SEQ ID NO: 645 - DNA, 120 bp, synthetic construct
  misc_feature 1..120: note = Artificially Synthesized Probe
  source 1..120: mol_type = other DNA
gcaccacacatcgcgaggtagaatctctttgctacggtttgaatgtttgtgtcggcccctcccctgcaccccaaaattcacaggttcaaaccaaacccccagtgtgcccagctacttttt

SEQ ID NO: 646 - DNA, 120 bp, synthetic construct
  misc_feature 1..120: note = Artificially Synthesized Probe
  source 1..120: mol_type = other DNA
aggaaactagtccactctcatcagggccaactcacgcacctggcaatctctactcatactgaacacaagtatgccctatagcccagcaatgccattctggacatacacgtccaaaagaaa

SEQ ID NO: 647 - DNA, 120 bp, synthetic construct
  misc_feature 1..120: note = Artificially Synthesized Probe
  source 1..120: mol_type = other DNA
aaatgcttcttttacacagaaggcgccaagatacaaactaaatgtgatgaagacaaagaaaagcaggcgtgtgtgttaaaggtacaattgcacagctaaaaataatcatggccgtaaggc

SEQ ID NO: 648 - DNA, 120 bp, synthetic construct
  misc_feature 1..120: note = Artificially Synthesized Probe
  source 1..120: mol_type = other DNA
tgacagcgaaatatgtaaggctggctcaaccatcaatcagtcaacgtcacccagcatgccaacaagctaaagaagaaacaccacataatcacaactggtacagaaaatcatttgataaaa

SEQ ID NO: 649 - DNA, 120 bp, synthetic construct
  misc_feature 1..120: note = Artificially Synthesized Probe
  source 1..120: mol_type = other DNA
gaaagaagtatcaaacaacaaacattaattagaaaataagagaaaacacacagacattcagaagaggtgcacgtggtgaacaagccatgaaggcactcgacatcctaagccgttagggaa

SEQ ID NO: 650 - DNA, 120 bp, synthetic construct
  misc_feature 1..120: note = Artificially Synthesized Probe
  source 1..120: mol_type = other DNA
tatccaggataagacgggggatctgaatcaagtctgcagggcggtcaccctgtcttccaatgtcatgttcccggccactgggcgaaggtggggaagggcacaagggatgctgctattttt

SEQ ID NO: 651 - DNA, 120 bp, synthetic construct
  misc_feature 1..120: note = Artificially Synthesized Probe
  source 1..120: mol_type = other DNA
atataaaaatacaaaaagcaatctctacaacttcaaaaaggaagaggaagcaatacacttagctgtgtgtccggtcaggggcaggacacaaagcatttgtcaacaatgaccatgcagcca

SEQ ID NO: 652 - DNA, 120 bp, synthetic construct
  misc_feature 1..120: note = Artificially Synthesized Probe
  source 1..120: mol_type = other DNA
aattagatgcacagttcacatcatatatctcatggacagaacaactctatgggacagaagaccccgatctctgacaaacaggcaaaaatcccagagaaaagaacaaagggagaatttaca

SEQ ID NO: 653 - DNA, 120 bp, synthetic construct
  misc_feature 1..120: note = Artificially Synthesized Probe
  source 1..120: mol_type = other DNA
ctcacaataaaggatcattttacaagcagactataaacactgaaacagacaaaaaactaaaaacccaactcatgagaaacacctggtgaacgctcttcagctccgtgaagtcctgggatg

SEQ ID NO: 654 - DNA, 120 bp, synthetic construct
  misc_feature 1..120: note = Artificially Synthesized Probe
  source 1..120: mol_type = other DNA
tggccaagctcaacaatgctctgggaactccagtcaaagatgcatcacaacttttgggtcatgcctaaggtcaattccagaatcattttagcatgttaaacagacactgaaaataaaaca

SEQ ID NO: 655 - DNA, 120 bp, synthetic construct
  misc_feature 1..120: note = Artificially Synthesized Probe
  source 1..120: mol_type = other DNA
actttctcaccactggaagcagtcaggacaattcaaatgctggcctaactggttaagagccctcaatctgtggtcagatatatctaagtttctcaatctataaaatacagaaataaggcc

SEQ ID NO: 656 - DNA, 120 bp, synthetic construct
  misc_feature 1..120: note = Artificially Synthesized Probe
  source 1..120: mol_type = other DNA
tgagctctatcgtatgtgcacctaagatgtgtgccatttcctccacggatgttataccgcaaagaacaataaaaaacgactaacactgattgctgaccacctccccaaataactaatcag

SEQ ID NO: 657 - DNA, 120 bp, synthetic construct
  misc_feature 1..120: note = Artificially Synthesized Probe
  source 1..120: mol_type = other DNA
cttcaagatgccctgtgactctctcagatgggtcttttattagagtttctaaataaagaagtgatggccaacatcacaggaaaccttagatactattcctgccagttggtttgaaaaagc

SEQ ID NO: 658 - DNA, 120 bp, synthetic construct
  misc_feature 1..120: note = Artificially Synthesized Probe
  source 1..120: mol_type = other DNA
cggcctgtcctaaaagcacgccctacaaggagtccccactctctacctatctgcttctaatgttctgactacatgagagatgataaaagggtttcaatacaagtgtaacattttaaatat

SEQ ID NO: 659 - DNA, 120 bp, synthetic construct
  misc_feature 1..120: note = Artificially Synthesized Probe
  source 1..120: mol_type = other DNA
ccacctgcttacaggggtgctgacaaatactgactacctgcaaaattgaaacatgggtttgaaaagggcctgagtggaaatcctgtacttaacatacactctgttaaaaaaaaaaaaaaa

SEQ ID NO: 660 - DNA, 120 bp, synthetic construct
  misc_feature 1..120: note = Artificially Synthesized Probe
  source 1..120: mol_type = other DNA
caccaacaccagaatccatatcccatctagaaacttcttcctgtgatgcctgccaaaaggtccatttttcagtccattatcacaatgaaggtgaagttttgctgtttaggtcaaaatcat

SEQ ID NO: 661 - DNA, 120 bp, synthetic construct
  misc_feature 1..120: note = Artificially Synthesized Probe
  source 1..120: mol_type = other DNA
tctatctgtgtggatacaggcagttctactattcttatgacaactgcagtgtgcgctcctcgttgtctgaaaaatccattctcctgttgactaacatttgttttttccaactttttgcga

SEQ ID NO: 662 - DNA, 120 bp, synthetic construct
  misc_feature 1..120: note = Artificially Synthesized Probe
  source 1..120: mol_type = other DNA
agagtcctggacggacattctaccttccaaagcagaccagactcaccaacacacccagaaagaacatttttaaaatataaatggcttcagaatcctttaacatatgcccaggaaaaaatt

SEQ ID NO: 663 - DNA, 120 bp, synthetic construct
  misc_feature 1..120: note = Artificially Synthesized Probe
  source 1..120: mol_type = other DNA
aacgtggctttaatcccctcacacacctattcatctgcataatgatatacctacaaaagcaaaataaggtccttgggttaactctctctgcacaaacgtgcacaaacaaaaagtggccaa

SEQ ID NO: 664 - DNA, 120 bp, synthetic construct
  misc_feature 1..120: note = Artificially Synthesized Probe
  source 1..120: mol_type = other DNA
ttaaaacatgaaaaacattattacagaataaccaaacttttgttccctcagagtgcctttctgtgatcgtttatgcccaactggcaaaggagtgggaaagggacggaggtgaatgaaaag

SEQ ID NO: 665 - DNA, 120 bp, synthetic construct
  misc_feature 1..120: note = Artificially Synthesized Probe
  source 1..120: mol_type = other DNA
ttcaaattacatctgcacggtgctttactttcatacgttattttatttggagcctctaacgagcctcagctaacagatggtattatttccacatggcaaacaaagagacaggagctgcaa

SEQ ID NO: 666 - DNA, 120 bp, synthetic construct
  misc_feature 1..120: note = Artificially Synthesized Probe
  source 1..120: mol_type = other DNA
aactgtattttccttagtttcattaccaggctccttgtagaaaataccagtgaaaaagaatggttggcagaactgaaaatctcaggaaaaagcacaaacacagcacacagcagaagcagg

SEQ ID NO: 667 - DNA, 120 bp, synthetic construct
  misc_feature 1..120: note = Artificially Synthesized Probe
  source 1..120: mol_type = other DNA
tccaggaggtaaggtgagccactataatatggcaaaaagttcctttcacaagagagctaagacggtccgacatttatgcaaataaaagcctctgagtaaagaacaagaatcaacagaaca

SEQ ID NO: 668 - DNA, 120 bp, synthetic construct
  misc_feature 1..120: note = Artificially Synthesized Probe
  source 1..120: mol_type = other DNA
gagttttattttaaatgacctataaaatagagaacaagctacacgacacaataggaaagcaactagacaaaataggaaggcgcgaactgtctgcgaagcaaatggcccaatccccaaggt

SEQ ID NO: 669 - DNA, 120 bp, synthetic construct
  misc_feature 1..120: note = Artificially Synthesized Probe
  source 1..120: mol_type = other DNA
gtttctcagaacgtcctccatcagactgaggaaactcccttctgttcttactttgcagagcactttcctcatgaataggtatgggattttgtctttttttttttgacagcatctcattcc

SEQ ID NO: 670 - DNA, 120 bp, synthetic construct
  misc_feature 1..120: note = Artificially Synthesized Probe
  source 1..120: mol_type = other DNA
aacaaattcccttattgtactttgaatggctataagatcacagcaatgtcccttttctcatgtccatactaaaaatttgttgcttctttttctcctgatccatttggctaaggggctacc

SEQ ID NO: 671 - DNA, 120 bp, synthetic construct
  misc_feature 1..120: note = Artificially Synthesized Probe
  source 1..120: mol_type = other DNA
ccgatttttagaaatgagcaaatggcagatatgaaagtgaagacacatgcttcaccaaagcaaatacatggatagtcccttccccccaccaaaaaagccacatgaaaagacaagcaacat

SEQ ID NO: 672 - DNA, 120 bp, synthetic construct
  misc_feature 1..120: note = Artificially Synthesized Probe
  source 1..120: mol_type = other DNA
gatggaaatactactctgtatcatgactgtgatggtgggaacaagacagttccaactgattccttaaaactctcacatctgtagtcatgagcaacatgatgctcatgttgagtgtggtca

SEQ ID NO: 673 - DNA, 120 bp, synthetic construct
  misc_feature 1..120: note = Artificially Synthesized Probe
  source 1..120: mol_type = other DNA
gtgacgattaaaggtccaagtttctttctgaggtgacagcaatgttctagaactgacagtcctggtggttgaacagacccgtgaatacactaacaacctttgaactgtgcgctttatctg

SEQ ID NO: 674 - DNA, 120 bp, synthetic construct
  misc_feature 1..120: note = Artificially Synthesized Probe
  source 1..120: mol_type = other DNA
ccctacctgctttgtcagcatcttgtcctttccctcttttctctcacggcttgttctacttcacggcatgtttaagcaaagggggtcactacaacaaaattattttaaaacaaacatact

SEQ ID NO: 675 - DNA, 120 bp, synthetic construct
  misc_feature 1..120: note = Artificially Synthesized Probe
  source 1..120: mol_type = other DNA
tgccgcctgcaaggtcactccactgcttctaaataatgcactgcacagatggaggaaagtatacctttacccattcaaatcttccaaggcacgcattttcacaaattttacatatatata

SEQ ID NO: 676 - DNA, 120 bp, synthetic construct
  misc_feature 1..120: note = Artificially Synthesized Probe
  source 1..120: mol_type = other DNA
tcccaggaaatgcacagattcacatgctgaagacccaccagatgcaggaaggaaacgccagaacaacatgtttgctttcatctaaaaacatcagaaaaagtctaaatgttgctgacattt

SEQ ID NO: 677 - DNA, 120 bp, synthetic construct
  misc_feature 1..120: note = Artificially Synthesized Probe
  source 1..120: mol_type = other DNA
ggttacaaacaatgaactattgtgggtttttaaaaactgattacagactttcaggacgtccaaaggagacatctttgtcaagggagtaaagtggagaattccagagacacgcacagttct

SEQ ID NO: 678 - DNA, 120 bp, synthetic construct
  misc_feature 1..120: note = Artificially Synthesized Probe
  source 1..120: mol_type = other DNA
aagaaaaaaaaagaacgtaatggtacaattttggggaccccaaaaggataatgcacataataaacaacaaaagcctgaggcttctcccaggccctgtggctgtaatctcccggagtccca

SEQ ID NO: 679 - DNA, 120 bp, synthetic construct
  misc_feature 1..120: note = Artificially Synthesized Probe
  source 1..120: mol_type = other DNA
atgctcaatttctgaaatcaatctcttcaaatagccagtaaatgcttcctttccaaagactgaaccctcttactgctttgaacaatggaggaagtgagtgaggcaccagatgcaactttt

SEQ ID NO: 680 - DNA, 120 bp, synthetic construct
  misc_feature 1..120: note = Artificially Synthesized Probe
  source 1..120: mol_type = other DNA
cattgtcactgtcctcatctaaaagactgattctggaagaaaaaaaaaatcaatctgaaacaagatcacggaaatgcgatctgtcccacacacaccatctttaacatgaatggtgcctcc

SEQ ID NO: 681 - DNA, 120 bp, synthetic construct
  misc_feature 1..120: note = Artificially Synthesized Probe
  source 1..120: mol_type = other DNA
ggaactgggtaactgtacaagaggcattttcaacggtcttcatatctgagtctcaacagccagcagaagatgtttgcattttagtctacactacattctatgtgatgcagaaagataaga

SEQ ID NO: 682 - DNA, 120 bp, synthetic construct
  misc_feature 1..120: note = Artificially Synthesized Probe
  source 1..120: mol_type = other DNA
ccctttcaaaactccaggtgtgtgtgtctgtcatgtggctatggagaggaagaggagaagaaaagatttcgattcactaaaaactcctgttaagcctccaagaaagatccaagtaatcag

SEQ ID NO: 683 - DNA, 120 bp, synthetic construct
  misc_feature 1..120: note = Artificially Synthesized Probe
  source 1..120: mol_type = other DNA
caggaggaccctgaatttatgggagggggcaagactaaccctcaagtgctcctcagatacgtttcattaaatgcactgaaagttttgtaaaagatgcaagtttcaacatgagatacaatt

SEQ ID NO: 684 - DNA, 120 bp, synthetic construct
  misc_feature 1..120: note = Artificially Synthesized Probe
  source 1..120: mol_type = other DNA
ctatactctgccttctgaagcagtctctaaattcaccctgtatttgacggtgcatgcgaatttgttatttatgcttaaatgccagccaaggagtaagattcagtctgcattaggagatat

SEQ ID NO: 685 - DNA, 120 bp, synthetic construct
  misc_feature 1..120: note = Artificially Synthesized Probe
  source 1..120: mol_type = other DNA
atgaaatggattcagcccccatcagcctaatgcagcttcatgagtgatcccaggtatgaccagcagaaaaccaccaggcaacacaagaattaagagaactcataaatcattattttctta

SEQ ID NO: 686 - DNA, 120 bp, synthetic construct
  misc_feature 1..120: note = Artificially Synthesized Probe
  source 1..120: mol_type = other DNA
gcacgcagatggcccagggaaaagcctcatcgaatgctgaatacctgtgagatcatttcttacaaagccaaatgaacaacactatgttaattttcaaattttggcatggaaatcacattc

SEQ ID NO: 687 - DNA, 120 bp, synthetic construct
  misc_feature 1..120: note = Artificially Synthesized Probe
  source 1..120: mol_type = other DNA
agtagggggccttttaccgcaattcttcctgggcagtgtctgtggaaggtggtctctccgcagaaacccaacgttttttttaactttgttttaggttcgggttgcaggtttgttacgtag

SEQ ID NO: 688 - DNA, 120 bp, synthetic construct
  misc_feature 1..120: note = Artificially Synthesized Probe
  source 1..120: mol_type = other DNA
tctgtcacatcatcctgttgctgctgtgaacgaccctttaagaatgtgaagaccatccttcgcaatctggttgtacaaagacagacccacaggctggattaggtccgctgattgtggttt

SEQ ID NO: 689 - DNA, 120 bp, synthetic construct
  misc_feature 1..120: note = Artificially Synthesized Probe
  source 1..120: mol_type = other DNA
tgtccttgcaaccaactgctgtgctccgtttatctgaaaaccctgtttatctgatttctagtcctgttcacagtgctcactacgctactcattggtttaaaaaataagtcctacatcaaa

SEQ ID NO: 690 - DNA, 120 bp, synthetic construct
  misc_feature 1..120: note = Artificially Synthesized Probe
  source 1..120: mol_type = other DNA
ctaccctagaaaggaccaaccacaccagatcacagcataagcaccccaaacccaagaagttttcccaagagagaatatgaaacaataatcttcaaagggctggtctccaaacaaaaggca

SEQ ID NO: 691 - DNA, 120 bp, synthetic construct
  misc_feature 1..120: note = Artificially Synthesized Probe
  source 1..120: mol_type = other DNA
tactgttcagtgtgcaaaatgccaccactggggaagcttggcaatgtgtacaagggactgctccctgttctttcttacatctcatgtcatctatggttatctcagaagaaaacaaacaaa

SEQ ID NO: 692 - DNA, 120 bp, synthetic construct
  misc_feature 1..120: note = Artificially Synthesized Probe
  source 1..120: mol_type = other DNA
ttcagcatgacaccactaggcaattctcacagaacagaaacaaataaagaataagaaagagatgacagacaagcaccgccagtgtccattctaccatttggtgtcgttttatgtcattta

SEQ ID NO: 693 - DNA, 120 bp, synthetic construct
  misc_feature 1..120: note = Artificially Synthesized Probe
  source 1..120: mol_type = other DNA
gaactctactgactggcctgttacagaacaggaggctgctccatagaaatcagctggaagaaagaacccacagaggctctaaagatgggaccggtttgtcacgggccaagaacatggtga

SEQ ID NO: 694 - DNA, 120 bp, synthetic construct
  misc_feature 1..120: note = Artificially Synthesized Probe
  source 1..120: mol_type = other DNA
ctgtgggaatgacagaagcaatggaaaaggccttcacagatcatccaatgcaactggaaaactaagacgtttacccaagattgtgaagcaatttaatagctgaacttgaacaaaaacacc

SEQ ID NO: 695 - DNA, 120 bp, synthetic construct
  misc_feature 1..120: note = Artificially Synthesized Probe
  source 1..120: mol_type = other DNA
aggggtgttaacccgagacaaaaatgatcaatagttttactggtgattttcttcaccctcccctctccccatgacatcccttaaagagatcctttattcacggcaattctttttaaaaac

SEQ ID NO: 696 - DNA, 120 bp, synthetic construct
  misc_feature 1..120: note = Artificially Synthesized Probe
  source 1..120: mol_type = other DNA
attataaaaaattaaacgcttataaatacttacagactgtacatggcatcgttcagcagagggaaacgtaaacaaacgtaacgtcgcaggctcaagcagaagtgtatacaactcagtgcg

SEQ ID NO: 697 - DNA, 120 bp, synthetic construct
  misc_feature 1..120: note = Artificially Synthesized Probe
  source 1..120: mol_type = other DNA
cttttcaaaatcgataaatccagcagaagggccatcacaaaaaaagaacaggacatccgtgaagccatcaccgcagctacagcaacaggcttgaaaatttttttgtgaaataccttttta

SEQ ID NO: 698 - DNA, 120 bp, synthetic construct
  misc_feature 1..120: note = Artificially Synthesized Probe
  source 1..120: mol_type = other DNA
gttttgaatgcaggtgaaactcccctattctggcgaaaaaaatcctgtaagaacatttgttagtaagaaagagaagcgagcactgggatagaaggcaagaagggataagctaatgctact

SEQ ID NO: 699 - DNA, 120 bp, synthetic construct
  misc_feature 1..120: note = Artificially Synthesized Probe
  source 1..120: mol_type = other DNA
tgtcagtgttggattaaaatgtgttgactgtttatgtgatcaggaaggcactggtcaacaaaattaaatactcggggtataaaaggttatatgtggacttgactgtaccaggggtcagtg

SEQ ID NO: 700 - DNA, 120 bp, synthetic construct
  misc_feature 1..120: note = Artificially Synthesized Probe
  source 1..120: mol_type = other DNA
gggtgcacaccgtctgtatgtgcgtcacaggctcatgcttttttaatcctatcttgaaaacttagggctttctcacaaagaccttgtgccagttcctaagtggaacaacaattttataaa

SEQ ID NO: 701 - DNA, 120 bp, synthetic construct
  misc_feature 1..120: note = Artificially Synthesized Probe
  source 1..120: mol_type = other DNA
taccaaacactattttctgcatctccaaacccctcaagcttcagtccaggtccaagtatcaatgggtatatatgaagctcctctgccaccagaaattcactatggaaagatgttatttct

SEQ ID NO: 702 - DNA, 120 bp, synthetic construct
  misc_feature 1..120: note = Artificially Synthesized Probe
  source 1..120: mol_type = other DNA
ttgttaaaagacaataaccaataggagacaggcttctagatctgcagaaactctagaaataaatgaaggaaagcctgacgagtacctgcctgctttccagggaagagaagtgagcaaagg

SEQ ID NO: 703 - DNA, 120 bp, synthetic construct
  misc_feature 1..120: note = Artificially Synthesized Probe
  source 1..120: mol_type = other DNA
ctgaccagggcaggagtgacccaagcaaagttaaaaggtgtctagaaattccttgagcctctaactgcatcttaaactagacagccaggcacccgaagtctagaaatatatatatatata

SEQ ID NO: 704 - DNA, 120 bp, synthetic construct
  misc_feature 1..120: note = Artificially Synthesized Probe
  source 1..120: mol_type = other DNA
cgtgagccaccgtgccaggcttgtaaagcgtaacttttaataaaggtagttattcaattatgccatgtcatatacctctctcgtctggattcaactttcacaccactgtaatataggttt

SEQ ID NO: 705 - DNA, 120 bp, synthetic construct
  misc_feature 1..120: note = Artificially Synthesized Probe
  source 1..120: mol_type = other DNA
caagctccagtcatacctctgtctcacaaacacccgctagggccttgtcaaactcacctcccactgacgaaggcgcttcacaaaagcatctagcaagataaagaatctgaaactgggagg

SEQ ID NO: 706 - DNA, 120 bp, synthetic construct
  misc_feature 1..120: note = Artificially Synthesized Probe
  source 1..120: mol_type = other DNA
caaactacagaaagaatagaactcaattcttccctccttttacctcaatcaggtggccttttggtcttactgtatttttggcaacctgtatttagcacctacagaaaaagcaggcccact

SEQ ID NO: 707 - DNA, 120 bp, synthetic construct
  misc_feature 1..120: note = Artificially Synthesized Probe
  source 1..120: mol_type = other DNA
caaactgggtccaatttgtctgcaagagaagcaaaggggatgccagggcttctcctattcctcagattttcgtttttaagtaaagtcattacagattaagaaaatacaataccggcttcc

SEQ ID NO: 708 - DNA, 120 bp, synthetic construct
  misc_feature 1..120: note = Artificially Synthesized Probe
  source 1..120: mol_type = other DNA
ttattaaaaccattgactgttggatttcatcaatccaaaatagcactgtagaatccttccagatggcacaatgacttgtaaacagcatctccataaagcagaagcctgaagactcagtcc

SEQ ID NO: 709 - DNA, 120 bp, synthetic construct
  misc_feature 1..120: note = Artificially Synthesized Probe
  source 1..120: mol_type = other DNA
tagttcagagtccctgtacagccttacccagcttccctaatgctaacatcatacataaacataaccacagtgaaattatctaattccaaaatcagcactaacaccagactattcaccacc

SEQ ID NO: 710 - DNA, 120 bp, synthetic construct
  misc_feature 1..120: note = Artificially Synthesized Probe
  source 1..120: mol_type = other DNA
acaaatcctaaaagcaacagctgaaagggacaaaaaggttccaaggaactatgtggatcccagaacaaagcccaagatgacttacaggaatatacaattatccagcacataatgaggtaa

SEQ ID NO: 711 - DNA, 120 bp, synthetic construct
  misc_feature 1..120: note = Artificially Synthesized Probe
  source 1..120: mol_type = other DNA
tgggattcacagaagaacaggcattcagaagatctgtgaactcagagaaacggcatgtcaacaactcaaacatgagcaaaaacactgagtgtggcagggagcaccgagagagaagatcac

SEQ ID NO: 712 - DNA, 120 bp, synthetic construct
  misc_feature 1..120: note = Artificially Synthesized Probe
  source 1..120: mol_type = other DNA
catgccctgccctccgcatctgactgtgcatatcctttgcaaaatcctttccacgacactggtgaacatgtaagtgtcaccctgatttgtgtgagccactctcataaaattattgcacca

SEQ ID NO: 713 - DNA, 120 bp, synthetic construct
  misc_feature 1..120: note = Artificially Synthesized Probe
  source 1..120: mol_type = other DNA
tacacagacagatacacaaaaccacaaactcagtaatgattttaataccctgttctcaatcactgagaggacaagctgacagagaatcagtaagcacacttgtaagaagtaaagcagagg

SEQ ID NO: 714 - DNA, 120 bp, synthetic construct
  misc_feature 1..120: note = Artificially Synthesized Probe
  source 1..120: mol_type = other DNA
tctgaaatgagtgagtgatctacagtcaccaaggccctttctgtttccccaaaaattccttttctaaactccagcctatttcttcacattctacttcttattcaaggcctatgcaaatgc

SEQ ID NO: 715 - DNA, 120 bp, synthetic construct
  misc_feature 1..120: note = Artificially Synthesized Probe
  source 1..120: mol_type = other DNA
tgtcaaaaaacaaaagccaaaaagtcacgaagaaagtgcttgtaatagagactagtttacttgtgagggctacgaataagtgaagctcaaaccactaggtgccaaacatgaaagtgggtt

SEQ ID NO: 716 - DNA, 120 bp, synthetic construct
  misc_feature 1..120: note = Artificially Synthesized Probe
  source 1..120: mol_type = other DNA
ctacttagagctgatgagagaaccccctgttaaaaagatctccaaaccagcaaatacatcacggtatgattttaagtcactgcaatccagatcatcttaaaagttctgcaggatttggaa

SEQ ID NO: 717 - DNA, 120 bp, synthetic construct
  misc_feature 1..120: note = Artificially Synthesized Probe
  source 1..120: mol_type = other DNA
aaactctggttgttcggacatgagtactggcagatcatttctaaaaaatgaaggaaagacagctgcaagttcagccagaacacctcaacaacttgttgtcaatgtgaaaattcaagcttt

SEQ ID NO: 718 - DNA, 120 bp, synthetic construct
  misc_feature 1..120: note = Artificially Synthesized Probe
  source 1..120: mol_type = other DNA
aatgtgctgcttatatgcaatgggcttattattcctgttgttaattggaattggtatacagacattttccaatccttcaggtttcaactggcaaatgccagcagacatacccacagagcc

SEQ ID NO: 719 - DNA, 120 bp, synthetic construct
  misc_feature 1..120: note = Artificially Synthesized Probe
  source 1..120: mol_type = other DNA
cactgatctcctgttgttgaatcggtgcaatattcacccaccaaaaacaaccacaaagcgcctgtcaccagtgacaatgtagcactgtctatgtgaataaaattaaattgtgtttggaga

SEQ ID NO: 720 - DNA, 120 bp, synthetic construct
  misc_feature 1..120: note = Artificially Synthesized Probe
  source 1..120: mol_type = other DNA
gagagattgtgtgtccaaaaaaaaaaatcccaatacactgttagtgtctcaagcccaggttagaaattactcgtctagtctctgacagaaaaatcaggtgggctaagcaaaggtgctttc

SEQ ID NO: 721 - DNA, 120 bp, synthetic construct
  misc_feature 1..120: note = Artificially Synthesized Probe
  source 1..120: mol_type = other DNA
aacctaaagctaatataaaaaataaagtctactttttttaaagtgaccatcctgtcagaaagacaaaatggtcccagagcacagggcttggattcacacagcacagaatcggctcccaga

SEQ ID NO: 722 - DNA, 120 bp, synthetic construct
  misc_feature 1..120: note = Artificially Synthesized Probe
  source 1..120: mol_type = other DNA
ccggggctgcctggcatggcacccaagaccaagatggaaagggaggccccgcgtgtgggtggacaaatccacaacacgctggccctcaagttgtctcagtaatgttatatatttctctct

SEQ ID NO: 723 - DNA, 120 bp, synthetic construct
  misc_feature 1..120: note = Artificially Synthesized Probe
  source 1..120: mol_type = other DNA
acaccaagtttcactctctgtccatggacctctttaatggaaatcctgacttttccataaggcactgaatctgtgtaacttttagagtaaggaggacgacctacagttcactgcatgaaa

SEQ ID NO: 724 - DNA, 120 bp, synthetic construct
  misc_feature 1..120: note = Artificially Synthesized Probe
  source 1..120: mol_type = other DNA
tgctttcaggtaaaacactacagagaaacttcctgttggcaggtggaccccgcactccctagggcctgatccgctccctctcttctgctttacgggcactgacaggaagtatctgatgcg

SEQ ID NO: 725 - DNA, 120 bp, synthetic construct
  misc_feature 1..120: note = Artificially Synthesized Probe
  source 1..120: mol_type = other DNA
aaaactaaaatagggtgaaagaatgcaagagactcagaactatggcaaacttataactaaaattccaaactacaggaaactctcagagcaaacgctgcatcacataagctgctagcccgg

SEQ ID NO: 726 - DNA, 120 bp, synthetic construct
  misc_feature 1..120: note = Artificially Synthesized Probe
  source 1..120: mol_type = other DNA
cgtgtccacagaccaccataaatgtagtttgttgttttaaataaaactgaaatcagacttccaaaaagaaacatctaaaaacttctcctctcccatcccaccagagccatggcccacaac

SEQ ID NO: 727 - DNA, 120 bp, synthetic construct
  misc_feature 1..120: note = Artificially Synthesized Probe
  source 1..120: mol_type = other DNA
aaaaaaaaccttcagccagaaaatcaccaaagtcctaagtctggttatgccctttgttttctatttcttaataataaaaacacagcaaggggtttggtgctgtgagcaaggggctctctg

SEQ ID NO: 728 - DNA, 120 bp, synthetic construct
  misc_feature 1..120: note = Artificially Synthesized Probe
  source 1..120: mol_type = other DNA
gataaaaaaaaaagaacacgcagacagaaaagaatgacctaagaaggcacacgaggaacatcagcaaaggactgacagaaaaagactcatatttttatataaggaacacggggggaaaaa

SEQ ID NO: 729 - DNA, 120 bp, synthetic construct
  misc_feature 1..120: note = Artificially Synthesized Probe
  source 1..120: mol_type = other DNA
tcttccattaacttcaaaaagccaaactgataagtttttaagtaaagaacaaacacatctatagcgaagtgtggaaaatcactgtggtcactccccagctacagctgccatgcagtggta

SEQ ID NO: 730 - DNA, 120 bp, synthetic construct
  misc_feature 1..120: note = Artificially Synthesized Probe
  source 1..120: mol_type = other DNA
cgggactcactcactcacttcactgatcagccgtggaatcctgaattcaaaccctacttcctaaacatcttttgaggcctacattcctcttgtaataaaaataaggaaaatgcaattttc

SEQ ID NO: 731 - DNA, 120 bp, synthetic construct
  misc_feature 1..120: note = Artificially Synthesized Probe
  source 1..120: mol_type = other DNA
tgagtgtcacctaaagcctcataacatcatcaccaagcccatccccaaaagctgtagttagtaagccaccaggatttgatatttagaaacttttcccactaacaaaaaacaagcaagaat

SEQ ID NO: 732 - DNA, 120 bp, synthetic construct
  misc_feature 1..120: note = Artificially Synthesized Probe
  source 1..120: mol_type = other DNA
aaataaatcatccatttagcaaaacgtcaacgataccaaaagctatgaaagcatccttggatttacaaagaaccctcgcttctcatttcccttattttcccatgcccaggcagagagccc

SEQ ID NO: 733 - DNA, 120 bp, synthetic construct
  misc_feature 1..120: note = Artificially Synthesized Probe
  source 1..120: mol_type = other DNA
tcccaatggacaacacaaataaataattaagatccttattctagagtggggaaaaaaagagactagaattctcagcagaacttgaggaatccaatggccagtaacgaagatgcctcccag

SEQ ID NO: 734 - DNA, 120 bp, synthetic construct
  misc_feature 1..120: note = Artificially Synthesized Probe
  source 1..120: mol_type = other DNA
aaataaaacactggccccatgagaatcactgtagttaacaaaagaaatacagtaaccgcaatattataacctacaaacaaaaagccattctcagtcccccagcaggacctctccatgcct

SEQ ID NO: 735 - DNA, 120 bp, synthetic construct
  misc_feature 1..120: note = Artificially Synthesized Probe
  source 1..120: mol_type = other DNA
acactgaggcgcacgatcgcacctgccttacaagttcaacatttcagcaagacagaacctgattacttttccatcttaaatggagatgtcaattaaaaatgtaaaacattaagtccaagc

SEQ ID NO: 736 - DNA, 120 bp, synthetic construct
  misc_feature 1..120: note = Artificially Synthesized Probe
  source 1..120: mol_type = other DNA
ctcaacggctcacattccaccccaaggaatcaaagtgaaacacgggaatgacacaaataccaacatgaaaaatatcagagcacctgtaacattcttattcttctttatttgggacagggt

SEQ ID NO: 737 - DNA, 120 bp, synthetic construct
  misc_feature 1..120: note = Artificially Synthesized Probe
  source 1..120: mol_type = other DNA
cacaacagacctcatgctaagggccttcctcgtattcaatctaaccaccacaggcaaacaaaagacaaaatcaatactgaggatctatagttcacaaaagtgacaaatggcattaaacac

SEQ ID NO: 738 - DNA, 120 bp, synthetic construct
  misc_feature 1..120: note = Artificially Synthesized Probe
  source 1..120: mol_type = other DNA
gatcttgaaaaatgtctcacctgatcacaaacatgcccactacccaggctggcttcattctaactacaaaccatcccacagattaagagaagacaattctagacctattttcaaggatat

SEQ ID NO: 739 - DNA, 120 bp, synthetic construct
  misc_feature 1..120: note = Artificially Synthesized Probe
  source 1..120: mol_type = other DNA
cacacagcacagggtgggggtctcagtcatcaccagaccatctgaggatgaagaaaattaaaggaggacaagaggaaataaacttcttttataggctattaacaacctatttaatttttc

SEQ ID NO: 740 - DNA, 120 bp, synthetic construct
  misc_feature 1..120: note = Artificially Synthesized Probe
  source 1..120: mol_type = other DNA
gatgacactgatacaatcttgtgaaatcaccataaaaccagattttagaggctctggggctttttatacgtaagaaaccaaataacccaagtgggcaatctcgccacagaaacaaaacat

SEQ ID NO: 741 - DNA, 120 bp, synthetic construct
  misc_feature 1..120: note = Artificially Synthesized Probe
  source 1..120: mol_type = other DNA
aggtttttcctccttacactcctggaagatggagtgaggtttttcctccttacactcctggacaggattgttcaaagctgccattaacctcaaggaccattaaaaataagtgtgtgatgg

SEQ ID NO: 742 - DNA, 120 bp, synthetic construct
  misc_feature 1..120: note = Artificially Synthesized Probe
  source 1..120: mol_type = other DNA
aaaaaaagcttcatttagaatacatgttcacatcaaaaccaccaccacgactataaacaagctatgttgtcaaacagaaaagcaccaggctacacttcttactgtcagctcctgcctaca

SEQ ID NO: 743 - DNA, 120 bp, synthetic construct
  misc_feature 1..120: note = Artificially Synthesized Probe
  source 1..120: mol_type = other DNA
aatggtggagcaatgtgaggttttaaatgctcttaccactctggactccttactctcatcaacccctttaagtgggttatttgccacgttagggatagggaaagaaaattatttaataca

SEQ ID NO: 744 - DNA, 120 bp, synthetic construct
  misc_feature 1..120: note = Artificially Synthesized Probe
  source 1..120: mol_type = other DNA
acatcaataatcacttttttcaatcaggagatctacaactgcttgctaaccatagtcttcaatccgctaagatgagcaattctttctgtccacactgactaaccccaactgacagcagag

SEQ ID NO: 745 - DNA, 120 bp, synthetic construct
  misc_feature 1..120: note = Artificially Synthesized Probe
  source 1..120: mol_type = other DNA
attactagaggtcaaaaatggtccaataaactccactcagttgttcacagctgttttattcataagcaccagaaactggaatcagcccagatgtgcttcgatggtgtaagaaaacgtttt

SEQ ID NO: 746 - DNA, 120 bp, synthetic construct
  misc_feature 1..120: note = Artificially Synthesized Probe
  source 1..120: mol_type = other DNA
aggccacagttctccaatgtgttaccattcgaagagaggaggagactggccgaagtgtacaaagggctctcaaggatttcttacaacaaaacacaagctcaaactatttaaaaaaaaaaa

SEQ ID NO: 747 - DNA, 120 bp, synthetic construct
  misc_feature 1..120: note = Artificially Synthesized Probe
  source 1..120: mol_type = other DNA
acaggaaacaaaatgaatgttcccaaacaattctctttataccatttagcagaaaaaggtgcaaagtggatgaatgcagaacgagaacaagggggaacgatttcacacaaccgttcttcc

SEQ ID NO: 748 - DNA, 120 bp, synthetic construct
  misc_feature 1..120: note = Artificially Synthesized Probe
  source 1..120: mol_type = other DNA
gtttcacttcagtgtgaagctcctactcaacaatcgcttagttatttgtgacctctcacaacactcatctgttctgtttctacaaaatgaataatccaagtggcagtagacatcaggaca

SEQ ID NO: 749 - DNA, 120 bp, synthetic construct
  misc_feature 1..120: note = Artificially Synthesized Probe
  source 1..120: mol_type = other DNA
gcctgggagacagagtatgcctcaaaaaaaaaaaagtctagtaatcgtatgatgccaggtttttctaaaatgattatttttaattattaagggggcaaaataaaacaagggcactgattt

SEQ ID NO: 750 - DNA, 120 bp, synthetic construct
  misc_feature 1..120: note = Artificially Synthesized Probe
  source 1..120: mol_type = other DNA
aaaaataagaatacaccactgtccctgaatgtgcactgttcttttaatttagaatgtgagcccacaatgatttgtacagcccaacatctaagatgcaatgaacagaatgtaaatgggggt

SEQ ID NO: 751 - DNA, 120 bp, synthetic construct
  misc_feature 1..120: note = Artificially Synthesized Probe
  source 1..120: mol_type = other DNA
acgttctagtacacagcagggactctcaactctcgcgctcagacgttctagtacacagcagggattctcaactctcacgctcagtcgttctagtacacagcagggattctcaactctcac

SEQ ID NO: 752 - DNA, 120 bp, synthetic construct
  misc_feature 1..120: note = Artificially Synthesized Probe
  source 1..120: mol_type = other DNA
acaaaagaaacatcaccaaaatgaattgtttctttcttaagacaaaagggagtttgctcctcacatatgaccttacgcagtttctgtctgagaatcatcatgttcgtcagccctgcctgt

SEQ ID NO: 753 - DNA, 120 bp, synthetic construct
  misc_feature 1..120: note = Artificially Synthesized Probe
  source 1..120: mol_type = other DNA
agtatttctttacctacatcatcataacaacttaattatctccacctccagccacacacaccatcaacttattccccacagtgctaaggggagaatttgccacatctggtcacttattta

SEQ ID NO: 754 - DNA, 120 bp, synthetic construct
  misc_feature 1..120: note = Artificially Synthesized Probe
  source 1..120: mol_type = other DNA
cacacgaaatatatggacacaggccacattatatacaagcattgccataataaaaacagctctcccttggcctctgagcattttacccttttgatccattcagcttctttagaacagatg

SEQ ID NO: 755 - DNA, 120 bp, synthetic construct
  misc_feature 1..120: note = Artificially Synthesized Probe
  source 1..120: mol_type = other DNA
ctcagaatccaagaactcctgagaaaacagctacatcgacatctggtattaacatttgattgtttaaccacactataagggagaaggggacatggacactggcttctaaatacagaagtt

SEQ ID NO: 756 - DNA, 120 bp, synthetic construct
  misc_feature 1..120: note = Artificially Synthesized Probe
  source 1..120: mol_type = other DNA
ctcacacagccacaccacacacacaaggtctcaggactctagccaaggtcttctagtttgtagtggcctcatgtttgatgagcatctaataacaaagacaggaaagcactggatggagac

SEQ ID NO: 757 - DNA, 120 bp, synthetic construct
  misc_feature 1..120: note = Artificially Synthesized Probe
  source 1..120: mol_type = other DNA
tgctgagagcagagggttttgcagggtcacacattcttccaacaatatgactgcagaccccccagcaaaaggaaagattccccatttgggaaagtagactaaaattttcttctattaaaa

SEQ ID NO: 758 - DNA, 120 bp, synthetic construct
  misc_feature 1..120: note = Artificially Synthesized Probe
  source 1..120: mol_type = other DNA
tctaatcccctgaggtaactgtgagggaattaataactagagaactgttagagacccctgaaggttggacaatggtattgccgaagctttgtgttttgctcttcaataaacttatctact

SEQ ID NO: 759 - DNA, 120 bp, synthetic construct
  misc_feature 1..120: note = Artificially Synthesized Probe
  source 1..120: mol_type = other DNA
ctaggcccgggggctgtggagttgggcagccatggttaaaatcattcttagtttcctcatctgtagaaagaaaaattcctggatacaaaatataagatgaatatacacaagtccattgta

SEQ ID NO: 760 - DNA, 120 bp, synthetic construct
  misc_feature 1..120: note = Artificially Synthesized Probe
  source 1..120: mol_type = other DNA
aaaaaaagaactgtattcttccattcatatagaagataaacatcacaatgggaaactccctctgtgtggcacgttgttcaaatccacatgcatgcacagtcccagagtcttctttcctac

SEQ ID NO: 761 - DNA, 120 bp, synthetic construct
  misc_feature 1..120: note = Artificially Synthesized Probe
  source 1..120: mol_type = other DNA
ttcctacttctccagtcctcaaggggacaatggcagggttcacaggattcttcctccggaagaattcagtgtgctgtaattagaaatgaacattttatcaatatgttcacgtaaaatgta

SEQ ID NO: 762 - DNA, 120 bp, synthetic construct
  misc_feature 1..120: note = Artificially Synthesized Probe
  source 1..120: mol_type = other DNA
ctggatgacacgacaaaactctgtctcaaaaggagggggaggaggaggtaagagggaaaggaagaaagcataagaaaatatcaagcacaaactaagggccccaaaaaatccaactcacag

SEQ ID NO: 763 - DNA, 120 bp, synthetic construct
  misc_feature 1..120: note = Artificially Synthesized Probe
  source 1..120: mol_type = other DNA
atgcaaagacctttcccaaagccaccagacctccgttcaaacaactcaaatccggtctagaaattaaaaatccttgtactgaaagcaaaatcagggttagctgtgactaagatccaagaa

SEQ ID NO: 764 - DNA, 120 bp, synthetic construct
  misc_feature 1..120: note = Artificially Synthesized Probe
  source 1..120: mol_type = other DNA
tgtcactcaacacctcaccacagcacccagcctctgcctctttcattagacataagcaaggatttttcctctagccaggaagtttttcaaatgtgaagtatttcatttttttcttcttat

SEQ ID NO: 765 - DNA, 120 bp, synthetic construct
  misc_feature 1..120: note = Artificially Synthesized Probe
  source 1..120: mol_type = other DNA
gcaagagaaatgcaattcttaagagcgggaacacccctttattacatgtaaagatacacaagctggatgaattgaataggggtgaacagtgatgacccatgaccaagatgcattaagaaa

SEQ ID NO: 766 - DNA, 120 bp, synthetic construct
  misc_feature 1..120: note = Artificially Synthesized Probe
  source 1..120: mol_type = other DNA
aaaaaaaagagaaattctaccaaataaagatcaactatgatgtaacaaccaagtaaccctacagtgtgagaaatgcatgaggggcttaagctcagggaaccaccacctaaagagagaggc

SEQ ID NO: 767 - DNA, 120 bp, synthetic construct
  misc_feature 1..120: note = Artificially Synthesized Probe
  source 1..120: mol_type = other DNA
ttaaaaaggacttccaattgcatttcatgaaggcagtgggtagaaaatccttgatcagtccctaattgggtgtgttttccatgaatgagctattgggatacagagtgtcgagaacaagaa

SEQ ID NO: 768 - DNA, 120 bp, synthetic construct
  misc_feature 1..120: note = Artificially Synthesized Probe
  source 1..120: mol_type = other DNA
acccccaatgcatatttgcaacccattagtaccaaaagtttaatcactattgctgccctgtctcctactaccccattccttgccctcattaaactcctaaagacagtggtccctagatgc

SEQ ID NO: 769 - DNA, 120 bp, synthetic construct
  misc_feature 1..120: note = Artificially Synthesized Probe
  source 1..120: mol_type = other DNA
cctgcagacagtgggcaccttgcagacactgggcacaggaattcagtaagactgataggtgatgtttttagttagggagaatatatgtgcaaattatttccatgtaatataaaaagaaaa

SEQ ID NO: 770 - DNA, 120 bp, synthetic construct
  misc_feature 1..120: note = Artificially Synthesized Probe
  source 1..120: mol_type = other DNA
ggacctggcatctgttcatgttttacttgcccatatcaccattgtatttagttcttggtagcagccatcaaccatcataaagcagcttcttttattctttgctacttcaaatcacacatg

SEQ ID NO: 771 - DNA, 120 bp, synthetic construct
  misc_feature 1..120: note = Artificially Synthesized Probe
  source 1..120: mol_type = other DNA
tggagctggctcagaccggggagccagatgctgtctgaaaatatgccatcaattctttctactcacttaaaattcaagtacctaagacattcaccccccattttgtaaaaaagcaaacaa

SEQ ID NO: 772 - DNA, 120 bp, synthetic construct
  misc_feature 1..120: note = Artificially Synthesized Probe
  source 1..120: mol_type = other DNA
aatttaatatcacacagaaactaaatatgccttccatcagccatgaaaatgactaatgaaaatgtaaatgaccacgtggcccaatcctggtttccatgggaagaccagctggctcaccac

SEQ ID NO: 773 - DNA, 120 bp, synthetic construct
  misc_feature 1..120: note = Artificially Synthesized Probe
  source 1..120: mol_type = other DNA
cctaaagtttagggtacaagctgaaataaaatcctaaaaaatctttaaaacatgtgtctagacgttcaaaatttaacctctggtatcaaatagctcatttgcgccgggtgcagtgtctca

SEQ ID NO: 774 - DNA, 120 bp, synthetic construct
  misc_feature 1..120: note = Artificially Synthesized Probe
  source 1..120: mol_type = other DNA
aagttaagaggtcctattcccctcactacttttagattcttgttttcacatggtcttcttgaaagaaactgcacacgcccgctttttcatacaatcacacatgcgtggataaacacatac

SEQ ID NO: 775 - DNA, 120 bp, synthetic construct
  misc_feature 1..120: note = Artificially Synthesized Probe
  source 1..120: mol_type = other DNA
aggcaagacagatgttatttaaataaaagcacaaagcatctgttcaagcacgaaaaaacatatgggaaaatacaagcacaggacactcaggacaatgtgatgtgctgaagacacagcggc

SEQ ID NO: 776 - DNA, 120 bp, synthetic construct
  misc_feature 1..120: note = Artificially Synthesized Probe
  source 1..120: mol_type = other DNA
ttctagggttcctcaagctgctcccctgggtgctgttagggttcctcaagctgctcccctgagtgtttctagggttcctcaagctgctcccctgggtgcttctagggttcctcaagctgc

SEQ ID NO: 777 - DNA, 120 bp, synthetic construct
  misc_feature 1..120: note = Artificially Synthesized Probe
  source 1..120: mol_type = other DNA
agctgcaaaaactgtcagaatcaactcttcagaactgtggagtctaataaaaaacttctaacaagcagagaacgcctaatgaaaaagctgctcgatttgggcaggagagagctgtggaga

SEQ ID NO: 778 - DNA, 120 bp, synthetic construct
  misc_feature 1..120: note = Artificially Synthesized Probe
  source 1..120: mol_type = other DNA
gaaatatcctggaatagacataatggtgctagttgcacaaagttgtaaatgtgctacaggccatggaattgtacacattcaaatggtcagagtggtggggtgttcgttatgtgagtcttt

SEQ ID NO: 779 - DNA, 120 bp, synthetic construct
  misc_feature 1..120: note = Artificially Synthesized Probe
  source 1..120: mol_type = other DNA
ggcattctgcggtgatggaaatgtctgtgtcaagctggtgcttaatacctggggtatcaaaactgtcaaactcatcctactgtaccttctaaaatggctgcttttattatataaagtata

SEQ ID NO: 780 - DNA, 120 bp, synthetic construct
  misc_feature 1..120: note = Artificially Synthesized Probe
  source 1..120: mol_type = other DNA
accctggtcacatacacctgtcttcaggaaaacttctctgtgatgaaagaacccagattcacagtggtgaactcttcaaaaactatactaaacaagggaagactgtgctagatgaaataa

SEQ ID NO: 781 - DNA, 120 bp, synthetic construct
  misc_feature 1..120: note = Artificially Synthesized Probe
  source 1..120: mol_type = other DNA
taatatgtttggtaaacaactaaaaaactgattcctagtactgtttcagtatttatcaaacaactgatcgtgttctataaaaaggtttaaaaaaataaaattcaggaacagtggcccatg

SEQ ID NO: 782 - DNA, 120 bp, synthetic construct
  misc_feature 1..120: note = Artificially Synthesized Probe
  source 1..120: mol_type = other DNA
aaacaaaaattgaatttgacctgcagggggtagtcacaattgaggaatctgagctgtggggcaaactgttcaaatgaagattctgacccacaggaacaaactgatccaaaagggaaatat

SEQ ID NO: 783 - DNA, 120 bp, synthetic construct
  misc_feature 1..120: note = Artificially Synthesized Probe
  source 1..120: mol_type = other DNA
cactaataactatggtcattcccattaaaacattaagttttgaaaactagggttctcatttaagcctgtctcacagcagctcagctctcagaatgttcagaagactctgacactgccctc

SEQ ID NO: 784 - DNA, 120 bp, synthetic construct
  misc_feature 1..120: note = Artificially Synthesized Probe
  source 1..120: mol_type = other DNA
gccgccccatccgggagggaggtgagggggtcagccccccgcccagctgccccgtccgggagggaggtggaggtggggggggtcagcccccccgccaggccagccgccccgtccgggagg

SEQ ID NO: 785 - DNA, 120 bp, synthetic construct
  misc_feature 1..120: note = Artificially Synthesized Probe
  source 1..120: mol_type = other DNA
ccctacgttaccacacaagcaatagactgttaagtttaatgctcccatggctttctacttatgcaaaaaattaacttcttcaaaacacctatggtggaagttcttcctgttcagactgca

SEQ ID NO: 786 - DNA, 120 bp, synthetic construct
  misc_feature 1..120: note = Artificially Synthesized Probe
  source 1..120: mol_type = other DNA
caaactctacagaaagtcaggaccactgcagaggaaaagcaagcttcaaggatgaaaaaccaataaagctacacagttccaagttcatctactatgattactatgatggggaaaccacct

SEQ ID NO: 787 - DNA, 120 bp, synthetic construct
  misc_feature 1..120: note = Artificially Synthesized Probe
  source 1..120: mol_type = other DNA
cccaccccctacaagcaacgagcccccacctgctgacagttcaattctctgaagaagaaatgatgatcttatttatctaaaacccaaaagacttaattctcatttatgggaaacattcac

SEQ ID NO: 788 - DNA, 120 bp, synthetic construct
  misc_feature 1..120: note = Artificially Synthesized Probe
  source 1..120: mol_type = other DNA
gagctagttatgaataacaaatgacatcctatcatataagaaattccaatggttgcaggaactctgtgccaggagtgagaaggcgcagggagaaaaagaccacataatcttttattgacc

SEQ ID NO: 789 - DNA, 120 bp, synthetic construct
  misc_feature 1..120: note = Artificially Synthesized Probe
  source 1..120: mol_type = other DNA
tcaacacgcaggatgcactgcacagctgatcccaaatgctgttgtgaatctaatcaagataccgtaagacatactgcatatgtttttaaaaatcagataagacgactgggtgacttgcta

SEQ ID NO: 790 - DNA, 120 bp, synthetic construct
  misc_feature 1..120: note = Artificially Synthesized Probe
  source 1..120: mol_type = other DNA
tcagctgacaccctgccagccaatgtatcctacaggaagaatgatacactgtcaccaagtgggtttaacccaggaatacatgattggttaaacgttcaaaaaacaaaaccaaatgataaa

SEQ ID NO: 791 - DNA, 120 bp, synthetic construct
  misc_feature 1..120: note = Artificially Synthesized Probe
  source 1..120: mol_type = other DNA
gagtcaccatgcctataatgtcaccggcctataatcccaattcttacaagaaaaccaaaagcgaggaaaaatgaagtaacttactcatggtcatagcttatcactaagattcaaaccctt

SEQ ID NO: 792 - DNA, 120 bp, synthetic construct
  misc_feature 1..120: note = Artificially Synthesized Probe
  source 1..120: mol_type = other DNA
tttgtagtcccagttactcgggaggctgaggcaggagagtggtgtgaacctgggaggcggagcttgcagtgagctgagatcatgccactgcactccagcctgggcgacagagcgagactc

SEQ ID NO: 793 - DNA, 120 bp, synthetic construct
  misc_feature 1..120: note = Artificially Synthesized Probe
  source 1..120: mol_type = other DNA
aaagatatgatttcatttaccacccaaatcaactcacatacaactcacagcaaagaggaaacaggaaaacatgtaccttaagtccttactcccccagttaccaggtcctgaacatcaggg

SEQ ID NO: 794 - DNA, 120 bp, synthetic construct
  misc_feature 1..120: note = Artificially Synthesized Probe
  source 1..120: mol_type = other DNA
taaaagataattacaacacaacaataaattattaccacagaggggagcagagagcaccgcaagaccaaaggtgagaatctaaccaatggcagaagtcacaagtgaaaaaagagctcaacc

SEQ ID NO: 795 - DNA, 120 bp, synthetic construct
  misc_feature 1..120: note = Artificially Synthesized Probe
  source 1..120: mol_type = other DNA
gtggtgaaaacaatggaatggctttcccttgactgggttgcattaggtggcaaagttgctgcgctgtcactcccatgactacattatgttacgtaagacttagtctactgaagcagaaga

SEQ ID NO: 796 - DNA, 120 bp, synthetic construct
  misc_feature 1..120: note = Artificially Synthesized Probe
  source 1..120: mol_type = other DNA
catcccaaaacttacacatgtatcatccaaataaaaaaataaaatgtaagttaaatcttcaaacgcaaatttgtgctgatgatctagaaggaaagctgggccctgcctggccgggagctg

SEQ ID NO: 797 - DNA, 120 bp, synthetic construct
  misc_feature 1..120: note = Artificially Synthesized Probe
  source 1..120: mol_type = other DNA
agtcaacaacaaacaattacaatcaaaattctgttctatgctgtgatatctccacgaaacacaaaatgctctcccaagtttaaagagggataaggaacacgaaaacaactgaccccggcc

SEQ ID NO: 798 - DNA, 120 bp, synthetic construct
  misc_feature 1..120: note = Artificially Synthesized Probe
  source 1..120: mol_type = other DNA
taacaatctataatacgaggagctcgttaagctcagagatgaaaggggaagtgagtggaagaccacaccgtgagcatctattaataaaagcagacggagtaagaaacagagaaaaaggtt

SEQ ID NO: 799 - DNA, 120 bp, synthetic construct
  misc_feature 1..120: note = Artificially Synthesized Probe
  source 1..120: mol_type = other DNA
caaaaaagaaaaataaaacaatggcttaatgagaggagcgcttaataaactgaaattttgtttaacactttcaggaacagttcccaacgttgttgtcagggcacagtgacagtggcccag

SEQ ID NO: 800 - DNA, 120 bp, synthetic construct
  misc_feature 1..120: note = Artificially Synthesized Probe
  source 1..120: mol_type = other DNA
aatgcaaattccttattcccatgactaacatcaaagaaccacacctccaaagactgacactgggattattcctaaatttctcaaggatgaggtaatctggaggttaaacatgcctgaact

SEQ ID NO: 801 - DNA, 120 bp, synthetic construct
  misc_feature 1..120: note = Artificially Synthesized Probe
  source 1..120: mol_type = other DNA
gcatgaacctgggagtcggagcttgcagtgagccgagattgtgccactgcactccagcctgggtgacagagcgagactccatctcaaaaaaaaaaaaaaaaaaactagccgggcgtgatg

SEQ ID NO: 802 - DNA, 120 bp, synthetic construct
  misc_feature 1..120: note = Artificially Synthesized Probe
  source 1..120: mol_type = other DNA
ctgctttcttttctgtctcctttgctctatcgtttcacaaagccactctcctaactaatgtttgccccattccctccactgggaatcaattcatcttctctttttccaagtctttttaat

SEQ ID NO: 803 - DNA, 120 bp, synthetic construct
  misc_feature 1..120: note = Artificially Synthesized Probe
  source 1..120: mol_type = other DNA
cccttaaatctcccaggtcacagagcctttccctcctctgatctatgatctctcttttcataagaaccaatatttaatgcaagctttagtcaactaaatgcatctttctcccagatctca

SEQ ID NO: 804 - DNA, 120 bp, synthetic construct
  misc_feature 1..120: note = Artificially Synthesized Probe
  source 1..120: mol_type = other DNA
aaccagccctacctacccagattttagcccaggcagatcatgttaggcttctaatcaacagaactataaaacaataaatctaaggttatggtggttagttacagcagcgctggaaaacca

SEQ ID NO: 805 - DNA, 120 bp, synthetic construct
  misc_feature 1..120: note = Artificially Synthesized Probe
  source 1..120: mol_type = other DNA
caaacatacaattatagtgaagaaaaaatccacaaagtctaaaaattccttgaaatccgaatcaactgtggggctgtggaatactaacactacaagctctcgagacgctcttcggctgcc

SEQ ID NO: 806 - DNA, 120 bp, synthetic construct
  misc_feature 1..120: note = Artificially Synthesized Probe
  source 1..120: mol_type = other DNA
ttttcaaataatgaacaggtacacattggttgctttacacgtggaaaaaagagccctacagatttccaggataataaataattcactgcacagatgcgaaggacaggcctggaaacaggt

SEQ ID NO: 807 - DNA, 120 bp, synthetic construct
  misc_feature 1..120: note = Artificially Synthesized Probe
  source 1..120: mol_type = other DNA
tctactctggcctgaaaacagcagtcctgctaaaagtgctttcacagaaagcactttcttcccacaaagacaactctccctttatgtttctttatctcttgttctgccttaattgtgaaa

SEQ ID NO: 808 - DNA, 120 bp, synthetic construct
  misc_feature 1..120: note = Artificially Synthesized Probe
  source 1..120: mol_type = other DNA
caataacttttatttgaattcattccatttttctataaagtttatcaaacgggccacactgaattcccacagagcactgactacacaagagtcacaaactgacgcagccaccagacaagg

SEQ ID NO: 809 - DNA, 120 bp, synthetic construct
  misc_feature 1..120: note = Artificially Synthesized Probe
  source 1..120: mol_type = other DNA
agcatctggcggtggcaatgcaagtcagaaggctgacgcaaatgagagctgcaaaagaggaactcaggttttaaaggtgacacctttaaaaacaaaattctggtaaattgtgttatgtat

SEQ ID NO: 810 - DNA, 120 bp, synthetic construct
  misc_feature 1..120: note = Artificially Synthesized Probe
  source 1..120: mol_type = other DNA
tgaatcctaagcatgttacatagaaggaaaacagtttcaaagcatagggagctgttagaccagcttcatcttcccaagcctcttccaaaacttcttggaagctgatatataacactaacc

SEQ ID NO: 811 - DNA, 120 bp, synthetic construct
  misc_feature 1..120: note = Artificially Synthesized Probe
  source 1..120: mol_type = other DNA
tacggccgacccaagctccgccgacctcccaggccccccccggagccccctatgggcccctcacggccaccccgggcccccaaagacccccggctgccccgaacccggacccgtaggccc

SEQ ID NO: 812 - DNA, 120 bp, synthetic construct
  misc_feature 1..120: note = Artificially Synthesized Probe
  source 1..120: mol_type = other DNA
acactcagtgcggctctggacggggtacacccagctggggttggcttcctgcctgcccaggggctcccccatggagcaggtcccttcgttggggtggggggcatccccattctttctgca

SEQ ID NO: 813 - DNA, 120 bp, synthetic construct
  misc_feature 1..120: note = Artificially Synthesized Probe
  source 1..120: mol_type = other DNA
tggtttcttcctggagctcgtggctggctagggggttctccatgtgctcatggccaggagagtctgccgagccagcccagccccattctactccgagtcgagtctgtaaagtgagctcac

SEQ ID NO: 814 - DNA, 120 bp, synthetic construct
  misc_feature 1..120: note = Artificially Synthesized Probe
  source 1..120: mol_type = other DNA
tggcccaaggaggaggggagccggctggaggcccagggctggtggtgccctctggccctgcctgccgctccccgcgcctgcgcatcctgtgcccccacacagcagaggggcttccccctc

SEQ ID NO: 815 - DNA, 120 bp, synthetic construct
  misc_feature 1..120: note = Artificially Synthesized Probe
  source 1..120: mol_type = other DNA
tctgactcttatctcttgcactccaccccttttgtaccttcaaaatctctttgatccacccccaacccactgcctctgtctgcccggagctaccaccgactccaggggattgcaccagca

SEQ ID NO: 816 - DNA, 120 bp, synthetic construct
  misc_feature 1..120: note = Artificially Synthesized Probe
  source 1..120: mol_type = other DNA
ttcattctgaggactgtggggtggggctttgacatacaaattttggagaaacttagttcagcccatatcaaggtggaagccatccacgtgtccacctacagatgactagataagcaaaat

SEQ ID NO: 817 - DNA, 120 bp, synthetic construct
  misc_feature 1..120: note = Artificially Synthesized Probe
  source 1..120: mol_type = other DNA
ccatttggcctggtattgttaaagttttgtcagttttgtgtgttctgttttgtgtcaaagggattaacgtatgcctgatgtattatttcccatatttagaaagtgagtctttcaatcctc

SEQ ID NO: 818 - DNA, 120 bp, synthetic construct
  misc_feature 1..120: note = Artificially Synthesized Probe
  source 1..120: mol_type = other DNA
ttcataaattaaccttcaccataggaatgtatatcataggtatgtacgtattataggtatgtatagggaaagacagtatatataggtttgttactctgcacagtttcaggcatccaccgg

SEQ ID NO: 819 - DNA, 120 bp, synthetic construct
  misc_feature 1..120: note = Artificially Synthesized Probe
  source 1..120: mol_type = other DNA
acctttgccattcacctgtcccgtctccaacattaaagcttttgggtaggcgtgtcatttgtgtttatgactctcagtgtgcttatagaattaacagcttaaaaagtcctttcacatgtt

SEQ ID NO: 820 - DNA, 120 bp, synthetic construct
  misc_feature 1..120: note = Artificially Synthesized Probe
  source 1..120: mol_type = other DNA
aatcgatcctgagttttatgttcatcccactcggggtttctttaccattttagcgccaattttacataatcaagcaatacagcctggctttgtctgtttgagatcggcagagctgaatct

SEQ ID NO: 821 - DNA, 120 bp, synthetic construct
  misc_feature 1..120: note = Artificially Synthesized Probe
  source 1..120: mol_type = other DNA
cctccctcttccttattaaggcttaggagcttgttgtctgttctggacacttagccattgctggtggcgtgtgtgacagacatctttccccagtcctggctggctgtcctggtcatgatg

SEQ ID NO: 822 - DNA, 120 bp, synthetic construct
  misc_feature 1..120: note = Artificially Synthesized Probe
  source 1..120: mol_type = other DNA
cactggactgaatcagatccctgtctcaacccaccccgggctccaggagcacctgtcacatgttggcacacatgtgcacatgtgaacatagacagtagtgctcacctatatgtacacaca

SEQ ID NO: 823 - DNA, 120 bp, synthetic construct
  misc_feature 1..120: note = Artificially Synthesized Probe
  source 1..120: mol_type = other DNA
tggctggcctgaccctcactgcgtgcgggtgggagacacgctacttaccagttcccaccccttttccacttgagggtctctgggctacaaattgacaagctgagcagcctcagagcctga

SEQ ID NO: 824 - DNA, 120 bp, synthetic construct
  misc_feature 1..120: note = Artificially Synthesized Probe
  source 1..120: mol_type = other DNA
tgtggaggtagaatacagggacacgtttggcccatgctggctccctcctggaaacgacacgtgtgtcgtccacacacattactactggacaaagccagttgcactatggcaccaggccta

SEQ ID NO: 825 - DNA, 120 bp, synthetic construct
  misc_feature 1..120: note = Artificially Synthesized Probe
  source 1..120: mol_type = other DNA
tggtgacacaaagtcccaagcctttccatcagatcgctattgtcaccagaaggctgagggaggccgtccatggccttggcctaaagacaggctagctaggacttccctgttctgctatca

SEQ ID NO: 826 - DNA, 120 bp, synthetic construct
  misc_feature 1..120: note = Artificially Synthesized Probe
  source 1..120: mol_type = other DNA
gctctagatgctatggctctgtctctctgggtagcgtctcttgctgggaaagacagtgaggtctcctatccccctccagaagctgggtaaactgaggcaatgccaaagcgggcactgacc

SEQ ID NO: 827 - DNA, 120 bp, synthetic construct
  misc_feature 1..120: note = Artificially Synthesized Probe
  source 1..120: mol_type = other DNA
gcctcctaatgctccagtaacagtgctgagagccgcttctgctggtgggggtctctcctgactccctccccgaatgtcactggcccatgaggccctggggcaaccccaggaacttccatc

SEQ ID NO: 828 - DNA, 120 bp, synthetic construct
  misc_feature 1..120: note = Artificially Synthesized Probe
  source 1..120: mol_type = other DNA
ggggacccctaggtgctaggtcctgtgcagacagctggtgcttgaggtgattgaggtgtgaggtgagcacatgcctgtcttcaggagtgtcacagagggccttgtggacatggctgaaag

SEQ ID NO: 829 - DNA, 120 bp, synthetic construct
  misc_feature 1..120: note = Artificially Synthesized Probe
  source 1..120: mol_type = other DNA
gctcccaggctgacaggtagctaggactgctctcaggctgaaacaggtagacaggtgtgctctcaggctgacacaggtggataagagtgctccaaggctgacacaggtggacaggagtgc

SEQ ID NO: 830 - DNA, 120 bp, synthetic construct
  misc_feature 1..120: note = Artificially Synthesized Probe
  source 1..120: mol_type = other DNA
gccagacacaggtgggcaggagtgctaccaggctgacacaggtggacaggagtgctcccaggctgacataggtggacaggagtgctcccagcctgacaggtggacaggagtgctcccagg

SEQ ID NO: 831 - DNA, 120 bp, synthetic construct
  misc_feature 1..120: note = Artificially Synthesized Probe
  source 1..120: mol_type = other DNA
gaaattcagaaacttaactcagacattgtcatggcatatattttaaaacaactattttttttaagaaatgctgggcctggcaaaggcagtggtggacagagaggacaagggagagagagg

SEQ ID NO: 832 - DNA, 120 bp, synthetic construct
  misc_feature 1..120: note = Artificially Synthesized Probe
  source 1..120: mol_type = other DNA
tgcaaaatacactcacctcatcccagcatcctccaaagtctcaacctcttacagcattaactctaggtccaaaacctcatgaaaatatcagctcagaaagtcccaaatcgcatcctcaaa

SEQ ID NO: 833 - DNA, 120 bp, synthetic construct
  misc_feature 1..120: note = Artificially Synthesized Probe
  source 1..120: mol_type = other DNA
atggggcatttttcaagcaagggggttggtttcaaggaaaagagaggcgggcaccccagcagggccattcactgcaccctgtcttgccttccagccaaaggggcttcctaataggacctc

SEQ ID NO: 834 - DNA, 120 bp, synthetic construct
  misc_feature 1..120: note = Artificially Synthesized Probe
  source 1..120: mol_type = other DNA
gggtgagtgggctgaggccggccaggcactgaccaggggcccaccctgccggccgccagccagaacgtgactttctcactcactgacacacatggccctcatttctatttctttcttctt

SEQ ID NO: 835 - DNA, 120 bp, synthetic construct
  misc_feature 1..120: note = Artificially Synthesized Probe
  source 1..120: mol_type = other DNA
tatcaattttcccaactcctgttaatcaacatgtttttgggtgacttcggaaatgtcacactttgtctccttcttttaaatatctggatgatatggccttttcctcacccgtgtgtggca

SEQ ID NO: 836 - DNA, 120 bp, synthetic construct
  misc_feature 1..120: note = Artificially Synthesized Probe
  source 1..120: mol_type = other DNA
gggaggagacaggaaggatcccatcaaggctcatgatcttgactttctcctaggtttgtgggatacccaggcaactaccacaccttgtttggagtccgcaatgaggaggtgagtgtgcct

SEQ ID NO: 837 - DNA, 120 bp, synthetic construct
  misc_feature 1..120: note = Artificially Synthesized Probe
  source 1..120: mol_type = other DNA
ctgcctgtgactgtatctctaagagccttagctactccgtatctctgagagccaggcgtgaacctggtttttcagaaagcaaatggaagttcacctggtggaggatgaagcgttgttgtc

SEQ ID NO: 838 - DNA, 120 bp, synthetic construct
  misc_feature 1..120: note = Artificially Synthesized Probe
  source 1..120: mol_type = other DNA
gagttttcttggctcctgtactgaaaacgctcagggctacgcgggcttaggtatgaatgatccaggtgttaaaaatgctgcactgctattcccagcattgcctgtgttctcagaaagatt

SEQ ID NO: 839 - DNA, 120 bp, synthetic construct
  misc_feature 1..120: note = Artificially Synthesized Probe
  source 1..120: mol_type = other DNA
actgacatttctgggccaccaggaatagcagttgggagatggtggccatgccacatcccgagagatggccctgcctcttggaactattggtgctgtgaaaccacaagaccataaggtgca

SEQ ID NO: 840 - DNA, 120 bp, synthetic construct
  misc_feature 1..120: note = Artificially Synthesized Probe
  source 1..120: mol_type = other DNA
cacgggtggtgcactctggagggtgggtctgtatcacctgtgccgtccctgcagtgcagggtctgactctgagctgacaaaagggagaaggaatcatcaggcagtttgtttgtttgtttt

SEQ ID NO: 841 - DNA, 120 bp, synthetic construct
  misc_feature 1..120: note = Artificially Synthesized Probe
  source 1..120: mol_type = other DNA
actgaaccctggaccccaatgatctcactagtaattctcggcgaagacccagaagccccttccaaagagccctctcctaacagctcccctgtggggtgactggagaagctggttgtaaaa

SEQ ID NO: 842 - DNA, 120 bp, synthetic construct
  misc_feature 1..120: note = Artificially Synthesized Probe
  source 1..120: mol_type = other DNA
gtgggcaggggctggggggaggttccccgcggtaagggacggagctttgcggggctggagggcaaatcgtggattctaggtgaattgctagttggtcatagtgtagcaggacgagtcgca

SEQ ID NO: 843 - DNA, 120 bp, synthetic construct
  misc_feature 1..120: note = Artificially Synthesized Probe
  source 1..120: mol_type = other DNA
atgtacttcacccgcagttgtggagacttcctttgtgatctggttacaatgaagttttgcatgtgtttcaataaacttgaaaagcatcatagtctcctaatgttggagcaaatctcagca

SEQ ID NO: 844 - DNA, 120 bp, synthetic construct
  misc_feature 1..120: note = Artificially Synthesized Probe
  source 1..120: mol_type = other DNA
ggtatgtggttagtggggtcttcacatgcagaaatgcatacacatatgtatgcatagaaatatgtatcacgcatatgtatgataatattgccatgcatttttgtccttcaaatagcggat

SEQ ID NO: 845 - DNA, 120 bp, synthetic construct
  misc_feature 1..120: note = Artificially Synthesized Probe
  source 1..120: mol_type = other DNA
tctgggctcactgcaacccccgcctcctgggttcttgtgcatcagcctgccaagtagctgggattacaggcgtgcgctaccacacccagatgatttttttttttttgtatttttagtaga

SEQ ID NO: 846 - DNA, 120 bp, synthetic construct
  misc_feature 1..120: note = Artificially Synthesized Probe
  source 1..120: mol_type = other DNA
ggtctcgtcgtcactgtctcccagtccccagtctctcttctgctgtgtctggccacttaaaagtttattccattcatttgagggattttttttccaatggctatatttttaacttgcaat

SEQ ID NO: 847 - DNA, 120 bp, synthetic construct
  misc_feature 1..120: note = Artificially Synthesized Probe
  source 1..120: mol_type = other DNA
ctttccgggatgacgatggacattattcccagacctactggaatcttcttgccatccgcctggccttcgtcattgtgtttgaggtagccgaggcacctgctggttctcccatccatggca

SEQ ID NO: 848 - DNA, 120 bp, synthetic construct
  misc_feature 1..120: note = Artificially Synthesized Probe
  source 1..120: mol_type = other DNA
tatctgggtcctctggattcttctgtttcttgaatcaggctctgctttccccctagccactacaggcagcctctgacagtgccgctttacttgcattctgcagcaattacatgtgtcctt

SEQ ID NO: 849 - DNA, 120 bp, synthetic construct
  misc_feature 1..120: note = Artificially Synthesized Probe
  source 1..120: mol_type = other DNA
atcccagtgtggccgtctgcttgctaaaaaatggatctgtgctcatctgtattgatgtccttggagttctacaagtggaacttaagtgtcaaaaagaatatgtggtttttagctgagcgt

SEQ ID NO: 850 - DNA, 120 bp, synthetic construct
  misc_feature 1..120: note = Artificially Synthesized Probe
  source 1..120: mol_type = other DNA
atcctattcatctccaagccacagaaggatgtatcagccctgtagctaaaaggatgtgtggcggaatcgtttggtaatggcagttttgaagatgaagtctgaaaaatgtaagatgatttt

SEQ ID NO: 851 - DNA, 120 bp, synthetic construct
  misc_feature 1..120: note = Artificially Synthesized Probe
  source 1..120: mol_type = other DNA
atgagtcaaattttctcaggaaagacctttgaagaaggatgcttctttttgcatcaacatttgtgtccctaaagtgacttactagaattatgcagtgcagctccagtgcgtacaacatca

SEQ ID NO: 852 - DNA, 120 bp, synthetic construct
  misc_feature 1..120: note = Artificially Synthesized Probe
  source 1..120: mol_type = other DNA
tgtatgctgccatgcctgtctgatttttttattttattttttattttattttattttattttatcttgagacggagtctcgctctgtcgcccaggctggagtgcagtggcgcgatctcgg

SEQ ID NO: 853 - DNA, 120 bp, synthetic construct
  misc_feature 1..120: note = Artificially Synthesized Probe
  source 1..120: mol_type = other DNA
aagacgtcaaactcccagggttcgattcttctcctgaaatacaaaaagcagcccacactgtcatgccacatttagagagatcttagaaatcttttcctgctcccctcttctttttttatt

SEQ ID NO: 854 - DNA, 120 bp, synthetic construct
  misc_feature 1..120: note = Artificially Synthesized Probe
  source 1..120: mol_type = other DNA
ctattcctcaatggactctaaccagattttctcaagtgttgacgcctcaaattgccaacaagattgtattgtcaagaacagacaaaagagcaatttagcctcaagattcttccacattag

SEQ ID NO: 855 - DNA, 120 bp, synthetic construct
  misc_feature 1..120: note = Artificially Synthesized Probe
  source 1..120: mol_type = other DNA
agattctctcatggattaattgtattggaccagctcattgtacccaagaaaagcaagatttttaaggactctgccaaaatctcttttcccagatgcccaatcccaaacaaggtagtctgc

SEQ ID NO: 856 - DNA, 120 bp, synthetic construct
  misc_feature 1..120: note = Artificially Synthesized Probe
  source 1..120: mol_type = other DNA
cacagggagtggtgcagaccatggtggtggagtagtttggaaaatagaaaaggaggtggcattggtggggctttgattttatatatatagagagagagtgcagtggcttatacctataat

SEQ ID NO: 857 - DNA, 120 bp, synthetic construct
  misc_feature 1..120: note = Artificially Synthesized Probe
  source 1..120: mol_type = other DNA
atgaatctcagtctagtctaaagaagcaacacagtgttgcaatcaagagccaaggctctagggtcagagaaaaatgggttataatcccagtttagccaattacttgctctaacacatttg

SEQ ID NO: 858 - DNA, 120 bp, synthetic construct
  misc_feature 1..120: note = Artificially Synthesized Probe
  source 1..120: mol_type = other DNA
tctacggtaggcccaggccattcccatgaaaagaaagtgagcaagggctgtggaaaactgaagataagcctgcatctagagctactaaattccttaaaataaaaacaatcaataacaaca

SEQ ID NO: 859 - DNA, 120 bp, synthetic construct
  misc_feature 1..120: note = Artificially Synthesized Probe
  source 1..120: mol_type = other DNA
ttggagtccttggttacaggtacattatttttcagactcaggctgcgttttgagaaaggcgatacaggaattggagactaaagattttgatttatggcttgattacccaacagaggtgtc

SEQ ID NO: 860 - DNA, 120 bp, synthetic construct
  misc_feature 1..120: note = Artificially Synthesized Probe
  source 1..120: mol_type = other DNA
acacgcatgcaaaacaccaaatgctggtaaggatgcagagaaactgaatctgtcatactttgctggtgggaatgtaaactggtacagccatactggaaaacagtttgcaaatttatttta

SEQ ID NO: 861 - DNA, 120 bp, synthetic construct
  misc_feature 1..120: note = Artificially Synthesized Probe
  source 1..120: mol_type = other DNA
agttcgagaccagcctaacatggtgaaaccccgtctctaataaatacaaaaaattagccaggcatggtggcccatgcttgtaatcccagctactcaggaggccgaggcacaagaatcgct

SEQ ID NO: 862 - DNA, 120 bp, synthetic construct
  misc_feature 1..120: note = Artificially Synthesized Probe
  source 1..120: mol_type = other DNA
tgaatgagtaataagtgtaaaaagatacttgtaaagaacatatggaaagatcctattgaaccagcaaaaaaggaccaggctccaactggagccaagtggttcctgaagacatttacaggg

SEQ ID NO: 863 - DNA, 120 bp, synthetic construct
  misc_feature 1..120: note = Artificially Synthesized Probe
  source 1..120: mol_type = other DNA
tctcaaaaaaaaaggaagaagaaaagtactggaaggagacaaaaggtggtgggggcaccatatcgaccatatcagagatggcagtcagagaagacatctataaagagggacattaaagct

SEQ ID NO: 864 - DNA, 120 bp, synthetic construct
  misc_feature 1..120: note = Artificially Synthesized Probe
  source 1..120: mol_type = other DNA
aaatgagaaattagccagatatctaggaaataggacgaagtcaggaaacactattccaagtgtgacctgaagaacaaatctcttacttttaaaggaggaatgggggatttgagcattggg

SEQ ID NO: 865 - DNA, 120 bp, synthetic construct
  misc_feature 1..120: note = Artificially Synthesized Probe
  source 1..120: mol_type = other DNA
ttatattccagacacaagtctctataaaagcttttaaattctgttcatcaataggattcaatcaacctggaatctcctcttctttgtcgatccaaagtctgcccttctggcctggcatgg

SEQ ID NO: 866 - DNA, 120 bp, synthetic construct
  misc_feature 1..120: note = Artificially Synthesized Probe
  source 1..120: mol_type = other DNA
gtctacacttctcttagaatccagctcaaatcctagctcagctgaaattacttccttcagcctgaagtgttcttcctctcccatgcatttttctaacactgactgtgcacaaatttatca

SEQ ID NO: 867 - DNA, 120 bp, synthetic construct
  misc_feature 1..120: note = Artificially Synthesized Probe
  source 1..120: mol_type = other DNA
actaaaggatgatgggagcaatctggaattttgttcacagtgctttgatgaactttgtgtaagattactttgtttcaatacaaagtcttaggagagggtgtggggaggcaatgatctctg

SEQ ID NO: 868 - DNA, 120 bp, synthetic construct
  misc_feature 1..120: note = Artificially Synthesized Probe
  source 1..120: mol_type = other DNA
atattaagagctcttattttgaaggggagaattttattcacttttcttatttttaatgggttagaggatgggtggcagaaatactgggaggatgggagatccatccctggaaagaccaga

SEQ ID NO: 869 - DNA, 120 bp, synthetic construct
  misc_feature 1..120: note = Artificially Synthesized Probe
  source 1..120: mol_type = other DNA
agcaaaatctatgtaatttcttcagccaaaaatgtgtcacaacactcccttggtgacaacagcttttctgttcactcaactgtgttctgtgcagacaaacttgtcaaacacacacctgag

SEQ ID NO: 870 - DNA, 120 bp, synthetic construct
  misc_feature 1..120: note = Artificially Synthesized Probe
  source 1..120: mol_type = other DNA
atctgatgtgtgcagaaaatacatgaaatgcctgcctataaatttctcaatttttgatgtaacaccctctgtgttttcgtaacccttggtgcctgcctgggttttggcttagctggatct

SEQ ID NO: 871 - DNA, 120 bp, synthetic construct
  misc_feature 1..120: note = Artificially Synthesized Probe
  source 1..120: mol_type = other DNA
cccagaaaaagtgccatgcagaaatttgctttattaacgagatcaagtccatgggactggacgaaacgcagtgctaccaagtcacctgttacctcacgtggagcccctgctcctcctgtg

SEQ ID NO: 872 - DNA, 120 bp, synthetic construct
  misc_feature 1..120: note = Artificially Synthesized Probe
  source 1..120: mol_type = other DNA
tgtgagccaccgtgccccgccccactacctgtttcttttttgtgttctcctctcgcaccaggggctccttcttgttcttttagattccaggggtacgtgcgcagggtcgttacatggata

SEQ ID NO: 873 - DNA, 120 bp, synthetic construct
  misc_feature 1..120: note = Artificially Synthesized Probe
  source 1..120: mol_type = other DNA
taacttctctctttccctctcagcagtcctgaagtgtggatgttttagagaatgacttaagaagtttgcagcttggacccgtatcccactcattatcaagaagcaactcaagatgacttt

SEQ ID NO: 874 - DNA, 120 bp, synthetic construct
  misc_feature 1..120: note = Artificially Synthesized Probe
  source 1..120: mol_type = other DNA
taaaggtcctgcgggcaggacaggacctcccaaccaagccctccagcaaggattcaggttggtgctgagtgcctgggagggacacccgcctacactctgcaagaaactcaaaaagggaga

SEQ ID NO: 875 - DNA, 120 bp, synthetic construct
  misc_feature 1..120: note = Artificially Synthesized Probe
  source 1..120: mol_type = other DNA
cttgaaagtgggtaagctgggtggggggctctgggagaggtcagtgctgagtaaggcaattcccagcagcttgagccccaccaggtcactccagtattcctccccattcttttttttttt

SEQ ID NO: 876 - DNA, 120 bp, synthetic construct
  misc_feature 1..120: note = Artificially Synthesized Probe
  source 1..120: mol_type = other DNA
tgaaaaaaaaacaagtcctggagaggctgacaacatccctctggtcacacagctagatctcaaggtgctcagacttcaaggacagtttccctgactcccatccaggccatattttaaaag

SEQ ID NO: 877 - DNA, 120 bp, synthetic construct
  misc_feature 1..120: note = Artificially Synthesized Probe
  source 1..120: mol_type = other DNA
gaagtaaaggagcaggcctacagggtgtctggtacatgtagatgctcagtatatcatgaaacccacccttgccccctttggcaagttagagagtcattcgttctttcaaaaatatttact

SEQ ID NO: 878 - DNA, 120 bp, synthetic construct
  misc_feature 1..120: note = Artificially Synthesized Probe
  source 1..120: mol_type = other DNA
acgccagtaatcccagcactgtgggaggctgagcaggcggatcacgaggtcaggagttcgagactagcctgctcaacataatgaaaccctctctgtactaaaaatacaaaaattagctgg

SEQ ID NO: 879 - DNA, 120 bp, synthetic construct
  misc_feature 1..120: note = Artificially Synthesized Probe
  source 1..120: mol_type = other DNA
ggcagaatttggacagcctgggaggtagctgcacacagtgacccccttccttattcctccccacagggagtggttttcagagacatttcagaaagtgaaggagaaactcaagattgactc

SEQ ID NO: 880 - DNA, 120 bp, synthetic construct
  misc_feature 1..120: note = Artificially Synthesized Probe
  source 1..120: mol_type = other DNA
ggtggctgaggtggggaggatcccttgagcccaggagtttgaggatgcagtgagctgtgatcttgccaccgtgttccagcctgggtgacagagaaaccccatttctaaaaaagagaaaga

SEQ ID NO: 881 - DNA, 120 bp, synthetic construct
  misc_feature 1..120: note = Artificially Synthesized Probe
  source 1..120: mol_type = other DNA
gtcttggaaaaaaaaaaagaattgtagaccatttgcttgtgttctttctccggggatcagatctcaccctctttctgccgtacttcctcatctcctacgtgtggatgatgatattgtgcc

SEQ ID NO: 882 - DNA, 120 bp, synthetic construct
  misc_feature 1..120: note = Artificially Synthesized Probe
  source 1..120: mol_type = other DNA
aaagaaaaaaataataattaaaatgttaaaatcaggagtagaatcacagaatgttggaaagtgaggcccaagaagggggctgtgtccaagtccatgcatgggaaacttgactgggacacc

SEQ ID NO: 883 - DNA, 120 bp, synthetic construct
  misc_feature 1..120: note = Artificially Synthesized Probe
  source 1..120: mol_type = other DNA
cagtagctcttgcatcctcctcccaactctagcctgaattcttttcaataaaaaatacaattcaagttgcttctcatggatggcactgcttttctgaggactcaagggccaagatggagg

SEQ ID NO: 884 - DNA, 120 bp, synthetic construct
  misc_feature 1..120: note = Artificially Synthesized Probe
  source 1..120: mol_type = other DNA
gcacctgtctctctgtggggtatgtgtgtgcaaaatatttgagtgtgtggacatgtgtgagggggtgagtgtgtgctggtgtgtacgtctgtgttttgcatatgcatttttttttttttt

SEQ ID NO: 885 - DNA, 120 bp, synthetic construct
  misc_feature 1..120: note = Artificially Synthesized Probe
  source 1..120: mol_type = other DNA
agatcagcattatccagtagaaatttaaatttttaatacagggccaggcacggtggctcatgcctgtaatcccagcactttcggaggccgaggcgggtggatcgcaaggtcaggagattt

SEQ ID NO: 886 - DNA, 120 bp, synthetic construct
  misc_feature 1..120: note = Artificially Synthesized Probe
  source 1..120: mol_type = other DNA
aaaatcaggtggtgaagggaggcatcagaggatggcaattagagaggccattagaggggaaccacaggcagacagggtgacaggagggactactgacacaaggtgaagagatggcccagc

SEQ ID NO: 887 - DNA, 120 bp, synthetic construct
  misc_feature 1..120: note = Artificially Synthesized Probe
  source 1..120: mol_type = other DNA
tgggtccgctcaccaaggcctggttcctcgaatccaaagacagcctcttgaagaagacccacagcctgtgccccaggcttgtctgtggggacaaggaccagggttaaaatgttcataaaa

SEQ ID NO: 888 - DNA, 120 bp, synthetic construct
  misc_feature 1..120: note = Artificially Synthesized Probe
  source 1..120: mol_type = other DNA
cctggggggtcgtgcagtaacttagattttccggtaaaggagaagaatgcggtccgcctcaggatgcagagaaggaccggtgtaaggaaagccggcgtctttcccccgcaccctacctgt

SEQ ID NO: 889 - DNA, 120 bp, synthetic construct
  misc_feature 1..120: note = Artificially Synthesized Probe
  source 1..120: mol_type = other DNA
taggtcatgttcccaggcagcagtagacgaacttgctgttgtctgatattgattccagtcactaactttggctgcaagtaaaaattctcattgactcaagatgtaacgggttttaattct

SEQ ID NO: 890 - DNA, 120 bp, synthetic construct
  misc_feature 1..120: note = Artificially Synthesized Probe
  source 1..120: mol_type = other DNA
gaagttgctagaaggcgttgtatggggaagtgctgcttaaaacaaagatgtttggcataaattagagcaaactggaaatgcgctaatgacggttgtattctgtaagcgatgtgaaaacgt

SEQ ID NO: 891 - DNA, 120 bp, synthetic construct
  misc_feature 1..120: note = Artificially Synthesized Probe
  source 1..120: mol_type = other DNA
catgccccgtcaaaatgatcattttaaatcgtggatttttcctttccttccatcattgccatttcctgctttttgttgtatcattagagtaaagcaggcctgccagtagaaagtgctata

SEQ ID NO: 892 - DNA, 120 bp, synthetic construct
  misc_feature 1..120: note = Artificially Synthesized Probe
  source 1..120: mol_type = other DNA
ccttacacttggatgtggtcgttattatgttgtggaagagcagtgccttcctcttaaagtgccttcctcccttaaaaccgtggcatgcacacttaacggttttaaggaattacattttga

SEQ ID NO: 893 - DNA, 120 bp, synthetic construct
  misc_feature 1..120: note = Artificially Synthesized Probe
  source 1..120: mol_type = other DNA
aggcacttcttgcagagcagggctgaggagaattcctttctctggaagctgtggtcctgtgttatgtagaataggtcacttttcagctgcagctggagtctaaacgagcgtcataggtgc

SEQ ID NO: 894 - DNA, 120 bp, synthetic construct
  misc_feature 1..120: note = Artificially Synthesized Probe
  source 1..120: mol_type = other DNA
ccgtgcaaacacctgcgagcaccttcttggtcccttgaggcctttctctgttggcttaggtttagtgcccttttgtgcttatgtgttttttgaatcaagtttttatacttgatttaactt

SEQ ID NO: 895 - DNA, 120 bp, synthetic construct
  misc_feature 1..120: note = Artificially Synthesized Probe
  source 1..120: mol_type = other DNA
gacagtgtgacggccatggagggacagtgtgacatccatggagggacagtggcagccgtggagggacagtgtgtgatggctgtggagagacagtgtgacatctgtggagggacagtgtga

SEQ ID NO: 896 - DNA, 120 bp, synthetic construct
  misc_feature 1..120: note = Artificially Synthesized Probe
  source 1..120: mol_type = other DNA
agagagacagagacaggcagagacagagacagagacagaggcagaggcagagacagagagaggcagaggcagagacagagagagacagaggcagacagaggcagagacagagacagaggc

SEQ ID NO: 897 - DNA, 120 bp, synthetic construct
  misc_feature 1..120: note = Artificially Synthesized Probe
  source 1..120: mol_type = other DNA
cagagacagaggcagagagagacagaggcagagacagaggcaggtgcagcgacaggggcagagacagagacagaggcagagacagagacagagacagaggcaggggcagagacaggggca

SEQ ID NO: 898 - DNA, 120 bp, synthetic construct
  misc_feature 1..120: note = Artificially Synthesized Probe
  source 1..120: mol_type = other DNA
ggttgattctgacccggttagctcgtgactgactgtgttataaagcccttgcgagactgaatgcatttgcttctcttttcactgttttttcttttctgggagcgtgcagaggaggggaga

SEQ ID NO: 899 - DNA, 120 bp, synthetic construct
  misc_feature 1..120: note = Artificially Synthesized Probe
  source 1..120: mol_type = other DNA
ctgtgagtcggtgccgtccctgtgcagctgaggccgtgggggtacaggcaggtcaagggcctgtgtggctgggaagtgctgggctggggcagatgcagacaggctcccggcacaggcttc

SEQ ID NO: 900 - DNA, 120 bp, synthetic construct
  misc_feature 1..120: note = Artificially Synthesized Probe
  source 1..120: mol_type = other DNA
aaaaaaacacaatccaaatgcacaatgaaatctttcattaagatgcttaaattggaaaatgacagcaatcatgaaacaaagcctgcagcccaggcaggtatgagctcatgctgcacgctc

SEQ ID NO: 901 - DNA, 120 bp, synthetic construct
  misc_feature 1..120: note = Artificially Synthesized Probe
  source 1..120: mol_type = other DNA
gtgtgagctgtcacccttaaaaagggccaggcatagaaaggagtaatgcccagtgttgttcatctttccgttggtcctaagattatcagtggaaaaatgagaaatcaatttgactcattt

SEQ ID NO: 902 - DNA, 120 bp, synthetic construct
  misc_feature 1..120: note = Artificially Synthesized Probe
  source 1..120: mol_type = other DNA
gggaaagatgacatcaacctaaactcttgaggactcatagctgtattggagcattgttaattttctttgttgggagatgctccagccatggaacgtactcttcttccatccgtctctgag

SEQ ID NO: 903 - DNA, 120 bp, synthetic construct
  misc_feature 1..120: note = Artificially Synthesized Probe
  source 1..120: mol_type = other DNA
gtggggactgtctggtgtagggactgtctggtgtggggactgtctggtgtggaagctgtctggtgtgggactgtctgctgtggggactgtctgctgtggaagctgtctggtgtggggagt

SEQ ID NO: 904 - DNA, 120 bp, synthetic construct
  misc_feature 1..120: note = Artificially Synthesized Probe
  source 1..120: mol_type = other DNA
ccgacgtggggactgtccggtgtggggactgtccattgtttgctgcacttgtctttgaggtttcctcccatgagcgtcattccctacattcactgttgtggtccaagcatgtctgtctga

SEQ ID NO: 905 - DNA, 120 bp, synthetic construct
  misc_feature 1..120: note = Artificially Synthesized Probe
  source 1..120: mol_type = other DNA
accagtggtttctccattgaaaaataataacagtacctacgtcttggagttgcgctggcgaggtggacctaaaaggaaaaagctagggtaaaagtaatctatgtagaaggttatttgggt

SEQ ID NO: 906 - DNA, 120 bp, synthetic construct
  misc_feature 1..120: note = Artificially Synthesized Probe
  source 1..120: mol_type = other DNA
gtgccgcatctgaggttgggggcagggtcccactgccatcctcattggaaagtagtgtctgtctgcttctgagagtgccagagccagtggccagctctctgcactaggataagggaattc

SEQ ID NO: 907 - DNA, 120 bp, synthetic construct
  misc_feature 1..120: note = Artificially Synthesized Probe
  source 1..120: mol_type = other DNA
tttcaagggagatttacaagtattcatgactaataggtggtgagtcttctaattatggctagtaatgacagttagctcttcctttttgcggggttctctgtcgacagccctacacctatt

SEQ ID NO: 908 - DNA, 120 bp, synthetic construct
  misc_feature 1..120: note = Artificially Synthesized Probe
  source 1..120: mol_type = other DNA
ggacactctgggccctcagagattgtagctggatcagaaaagaggcagcctggaagtcaggctgttcataagcaagtcagtcaccggggcctggtagatgacaaagacaggagaatccag

SEQ ID NO: 909 - DNA, 120 bp, synthetic construct
  misc_feature 1..120: note = Artificially Synthesized Probe
  source 1..120: mol_type = other DNA
tttctttttggcatttcttggaaatgagtggttgtcttggatagttttctgtttgaaggggtgagcaccagagcttgcgtgcttttctgttgcctcccctccttcccacacacatgtaag

SEQ ID NO: 910 - DNA, 120 bp, synthetic construct
  misc_feature 1..120: note = Artificially Synthesized Probe
  source 1..120: mol_type = other DNA
caccatttaatgacagtgctctggcttggaaacttaggtgagtttctagccaataacttttacgacaaatagaaatagggataatggcctggtgtcttttctgaggattctgtggtactt

SEQ ID NO: 911 - DNA, 120 bp, synthetic construct
  misc_feature 1..120: note = Artificially Synthesized Probe
  source 1..120: mol_type = other DNA
tacttagacctagctggtaagcactcagcaaatccattcagaagatgatctgggatttctcagaatgcaaaacaagtcacactgccagctaaagcctttctctaattagtagcaaaattc

SEQ ID NO: 912 - DNA, 120 bp, synthetic construct
  misc_feature 1..120: note = Artificially Synthesized Probe
  source 1..120: mol_type = other DNA
aataacacagcaggatgggagatgtgctgcgcagcgatgggtgtgtcgtggtttctgtttgttgtttattcagtgaatgttgtattcactattaaatgtattcactatgtaaatgtaggg

SEQ ID NO: 913 - DNA, 120 bp, synthetic construct
  misc_feature 1..120: note = Artificially Synthesized Probe
  source 1..120: mol_type = other DNA
tcacccctagacaccgctccccaccccgggcagagggtaactaaattttaaactaaacttagatactttatttgtacccttttgctcattaagaaaagagcacttaaaactaacttcaaa

SEQ ID NO: 914 - DNA, 120 bp, synthetic construct
  misc_feature 1..120: note = Artificially Synthesized Probe
  source 1..120: mol_type = other DNA
cgtggggcagccgcgtgggagggcagtttggtggcttcttcaaacctgagcacactcttaccgtgtgacttgcagccatgccccggcgtatttatttaaatgagttgaaaacttaatgtc

SEQ ID NO: 915 - DNA, 120 bp, synthetic construct
  misc_feature 1..120: note = Artificially Synthesized Probe
  source 1..120: mol_type = other DNA
acgtgacattctagaaaacaaaattatacagtaacaagctcagggttgctaggggtttgcgggggggaggggtgacaggcggagcacgggatttttagggccacgaaattccttgataat

SEQ ID NO: 916 - DNA, 120 bp, synthetic construct
  misc_feature 1..120: note = Artificially Synthesized Probe
  source 1..120: mol_type = other DNA
gcaccttttctagcagcagcatttcgaagattggattgtcaggtaacttcctcgcccttttttgcatataggcataacttaaaatgggcatggtcatattatgtcataatgattggaaac

SEQ ID NO: 917 - DNA, 120 bp, synthetic construct
  misc_feature 1..120: note = Artificially Synthesized Probe
  source 1..120: mol_type = other DNA
attccccaacagctttttgaaagatccatgtcgtctcaaactacaacacgttgtatctcctgagatgctttcagcagcccttgagcatcttttctagtttgcaaattgtagtttttctca

SEQ ID NO: 918 - DNA, 120 bp, synthetic construct
  misc_feature 1..120: note = Artificially Synthesized Probe
  source 1..120: mol_type = other DNA
aggggtgcagcctcaggtggttacattgagcacaacttctttgagttcttgtagaaaggctatttttttcttactggaactgaattctgagaggaatttgtaacacacatcattctgcag

SEQ ID NO: 919 - DNA, 120 bp, synthetic construct
  misc_feature 1..120: note = Artificially Synthesized Probe
  source 1..120: mol_type = other DNA
tcagcggtagtaaactataatttccaaaaaagagagttgacaatataaaaatctagtgtgattgtgtcaccgtctggatgaatctgaacatgtgcctggcagtgactttttttggggtgg

SEQ ID NO: 920 - DNA, 120 bp, synthetic construct
  misc_feature 1..120: note = Artificially Synthesized Probe
  source 1..120: mol_type = other DNA
acatttctgaatcctttttcttgattcaattttagtatttgtcattctcatacttgtaaaactcgtgagtgttggtggaagcagttccagaaagctcgtggggtccccaggtgtcatggt

SEQ ID NO: 921 - DNA, 120 bp, synthetic construct
  misc_feature 1..120: note = Artificially Synthesized Probe
  source 1..120: mol_type = other DNA
tcagaagttatttctaaaagtaaagtggatgatactgaattctcttccagaccatcagcccagccgggtgatgttcatctgctgggtgcacagatttaaaatgtgaaaagctcttttttc

SEQ ID NO: 922 - DNA, 120 bp, synthetic construct
  misc_feature 1..120: note = Artificially Synthesized Probe
  source 1..120: mol_type = other DNA
ctccccattcttacggcccaattggaacattgtagggaaaggatgatttctaggagccagagagttatgatttcttcatgatgtacctgaaaggacttaatttaagattggctaagtttc

SEQ ID NO: 923 - DNA, 120 bp, synthetic construct
  misc_feature 1..120: note = Artificially Synthesized Probe
  source 1..120: mol_type = other DNA
tgcttacatggtgtttctttgtgcatagcaccagcctctcggttgtttgcacagtgtttctttggccatagcatcagcctctcggttgtttgcatggcgtttctttgtgcacagcacccg

SEQ ID NO: 924 - DNA, 120 bp, synthetic construct
  misc_feature 1..120: note = Artificially Synthesized Probe
  source 1..120: mol_type = other DNA
gtcattagatgtttgtttacagagttggaaaatgagcccctagttcatcttcagtgacaggaacaccactgagggaaggccagggtgtatggtttggaaatttttgaaacaacgtctggt

SEQ ID NO: 925 - DNA, 120 bp, synthetic construct
  misc_feature 1..120: note = Artificially Synthesized Probe
  source 1..120: mol_type = other DNA
ctaatggaagcccacagcctctacgcctgagacatgattcttattcctgtaaaggtttcagtggaagcagccttccctttccagttaataacagttgagaaaaaaaaatccttaaagaaa

SEQ ID NO: 926 - DNA, 120 bp, synthetic construct
  misc_feature 1..120: note = Artificially Synthesized Probe
  source 1..120: mol_type = other DNA
gcttatttttgttctgtcaacctagagccagtaataaagccttgttctaataaagactattttaagtcccggagtagaggagcaggtggttctccggttgcgttttgatcattgaatgag

SEQ ID NO: 927 - DNA, 120 bp, synthetic construct
  misc_feature 1..120: note = Artificially Synthesized Probe
  source 1..120: mol_type = other DNA
caggttacatcgagctcagctgtctccgactttgagccaactgctgcggtttgaaaacggttgagaactgttgctcattccaaagataaattccctttagaaagtgtttcatggacagct

SEQ ID NO: 928 - DNA, 120 bp, synthetic construct
  misc_feature 1..120: note = Artificially Synthesized Probe
  source 1..120: mol_type = other DNA
tgaaaccatttttaagggtaaaaacatcaacttcatgagcatttttgtcaggcgtaaagcagcatcacatattttctttcccagcagaaacaccagaagtcacagaagatcgccagccca

SEQ ID NO: 929 - DNA, 120 bp, synthetic construct
  misc_feature 1..120: note = Artificially Synthesized Probe
  source 1..120: mol_type = other DNA
aggtaactttttgttttgatattattttaaactttaaaagtgcaagaatgctccttggtgatgtgataagttctcagagcagggggctgcatcctaatttcacaggtgcacagcacagca

SEQ ID NO: 930 - DNA, 120 bp, synthetic construct
  misc_feature 1..120: note = Artificially Synthesized Probe
  source 1..120: mol_type = other DNA
cgtgttctgtgccgtgcgtaggccaaacatctggaatacttatttacagagttatgagtgaaagcttgaacttgggatgtcctataataatagctgggaaaatatgtgatttcctgtata

SEQ ID NO: 931 - DNA, 120 bp, synthetic construct
  misc_feature 1..120: note = Artificially Synthesized Probe
  source 1..120: mol_type = other DNA
cttgaaatgagagcagtctgcaacgtaaacagagcaaagaattccaaactctatttttatgtacatttaaacctgtaggattatgtcccgtctctgtgtggattaaagcgagcgcatttc

SEQ ID NO: 932 - DNA, 120 bp, synthetic construct
  misc_feature 1..120: note = Artificially Synthesized Probe
  source 1..120: mol_type = other DNA
tactgtggttgcagatagtaaatgctattaaaagaaagagcgtctgtaatactggagcttgacaacagcagcagataaggaattttcctgaatttttatttcctgctagtgtggggacag

SEQ ID NO: 933 - DNA, 120 bp, synthetic construct
  misc_feature 1..120: note = Artificially Synthesized Probe
  source 1..120: mol_type = other DNA
aaatttaaattgcactaggttttgttggtcactgtttaaagtgtttctccccgtttattgcagatccagaggaagcaatttacgatgacgttccaagggaaaactcagactctgaaccag

SEQ ID NO: 934 - DNA, 120 bp, synthetic construct
  misc_feature 1..120: note = Artificially Synthesized Probe
  source 1..120: mol_type = other DNA
tttgcaaatcatatgagaaaagactgcaaaataagtacaaacatattggtacgcatagtaaagtgcatcctattgccagtaaaagaaatcctcagattggataaaatagcaaagctagcc

SEQ ID NO: 935 - DNA, 120 bp, synthetic construct
  misc_feature 1..120: note = Artificially Synthesized Probe
  source 1..120: mol_type = other DNA
tcagtaaaccataaaagattagaacagcaatgtagtatgattgacttgaaggtcatatacagatctttgaagcaagtagttccagaatatgtatttttttaaacacatgaaatattttaa

SEQ ID NO: 936 - DNA, 120 bp, synthetic construct
  misc_feature 1..120: note = Artificially Synthesized Probe
  source 1..120: mol_type = other DNA
ataaaaaccatgaataaacctataatgatccaacataatgaatggtttgcttaactactgtgcagaacagcccaccaggctcagatgtttttatgctggggtttattgagccttcaggga

SEQ ID NO: 937 - DNA, 120 bp, synthetic construct
  misc_feature 1..120: note = Artificially Synthesized Probe
  source 1..120: mol_type = other DNA
ggcagcagaaaaacgaggaaattatatgtgtgtatgtttataagaactcagaagcaatggtgagcaaaaagcaaaagcaagaggagaaagtcacagtgtgctggcatcaagttgcattga

SEQ ID NO: 938 - DNA, 120 bp, synthetic construct
  misc_feature 1..120: note = Artificially Synthesized Probe
  source 1..120: mol_type = other DNA
atacagaaaatgcagctccagctctcaaagggctgaaaatctaattgaggtgaaaaaggtaacatgtgtgaaaaccatgtctgtgtagacttgttttgtatggaccagaaaagttggaag

SEQ ID NO: 939 - DNA, 120 bp, synthetic construct
  misc_feature 1..120: note = Artificially Synthesized Probe
  source 1..120: mol_type = other DNA
gatcattgtccgtggcacacagaacacactgcagcttctgcaaagtgagctcatttcacgcattttatggctttgccaggctgctgttgacctgccagaacttttaatcagacatttgga

SEQ ID NO: 940 - DNA, 120 bp, synthetic construct
  misc_feature 1..120: note = Artificially Synthesized Probe
  source 1..120: mol_type = other DNA
ctgtctaattttcaaaacatcctgtaagtttatataaaggaagatttttcttcttgtgaagttctctaaggctgacaagttacctggcatgactgtggcggatgcccatagccaggtggt

SEQ ID NO: 941 - DNA, 120 bp, synthetic construct
  misc_feature 1..120: note = Artificially Synthesized Probe
  source 1..120: mol_type = other DNA
actgaatagatgggatcggggttccctaagacacagcacatctgcactttgctttaagtgaggtttcaactttagcatgttcagcatgaaaaggaagacgtaaaaatagaagatgttaag

SEQ ID NO: 942 - DNA, 120 bp, synthetic construct
  misc_feature 1..120: note = Artificially Synthesized Probe
  source 1..120: mol_type = other DNA
aaactcaaggagaatctactagatcttggcagtcagctcacctacccagtttcattcacaagttcttccaggaattagatcttttctgccaccgtcatcattacaactgcgatttaaaca

SEQ ID NO: 943 - DNA, 120 bp, synthetic construct
  misc_feature 1..120: note = Artificially Synthesized Probe
  source 1..120: mol_type = other DNA
tcagttagagagaaagtgatctcaggttggagacccttgaaaatccgtgctgccatccccaaaatatgtcactttcagtatagtttaaatacaagtatcttttgcttggatgccaacata

SEQ ID NO: 944 - DNA, 120 bp, synthetic construct
  misc_feature 1..120: note = Artificially Synthesized Probe
  source 1..120: mol_type = other DNA
gaaccaaaaagagcctttttgtgaaaagactgtgtctctttatgctgtagctttctcatgacctaacccgtttaaaggagcactatgagaaaaagatgagagatttgatggcaagcacgg

SEQ ID NO: 945 - DNA, 120 bp, synthetic construct
  misc_feature 1..120: note = Artificially Synthesized Probe
  source 1..120: mol_type = other DNA
ctccagtttgtcagtttgcagttctctgatactctgtccggggaccctgaacggcgctggctgaaaaccaagggttcacagcccaaatctggggttgagaaagagcaggatgtagacagg

SEQ ID NO: 946 - DNA, 120 bp, synthetic construct
  misc_feature 1..120: note = Artificially Synthesized Probe
  source 1..120: mol_type = other DNA
ccacgtagctctttgtgtgagtggatcacatataataccataaatggggcagggaacatgtttcaccatgtccaggaagggctgtatttttaaggtctgttttttccttttttccaacaa

SEQ ID NO: 947 - DNA, 120 bp, synthetic construct
  misc_feature 1..120: note = Artificially Synthesized Probe
  source 1..120: mol_type = other DNA
tgaactggcatttcaggaatcttttccttggtgaggggagatttggagtagacagctgaagttccaggtttttctaaacatctaacgaaggcgcagtggtctgtgcagttatgtgtggaa

SEQ ID NO: 948 - DNA, 120 bp, synthetic construct
  misc_feature 1..120: note = Artificially Synthesized Probe
  source 1..120: mol_type = other DNA
aaaaaaagggcaaatccctaacctcccaacccgagtttcctaagccataaaatgagaggcttggacagaatttcgttcttcgtcctggttgtacctaagaattaactagaaagcttttaa

SEQ ID NO: 949 - DNA, 120 bp, synthetic construct
  misc_feature 1..120: note = Artificially Synthesized Probe
  source 1..120: mol_type = other DNA
atccagtgagagagacagaagaaatatactaagtgccacctcagttttcaatgacttttgactcacctcagttttcaatgactgttcttagccattcttagctgtgtttccttgtttctg

SEQ ID NO: 950 - DNA, 120 bp, synthetic construct
  misc_feature 1..120: note = Artificially Synthesized Probe
  source 1..120: mol_type = other DNA
ttaaaaatctgatactcagtagcagaagggaaaaaatcagtggttttcattggattgtcttagggtaaaaggaagagaaaacttgaggaaccagagtgacagcaccaagtttgcaggcct

SEQ ID NO: 951 - DNA, 120 bp, synthetic construct
  misc_feature 1..120: note = Artificially Synthesized Probe
  source 1..120: mol_type = other DNA
gagaacttactgtagcgatgaagccgaaaaccaaaaatagcaaaagaagggaaaagcacaggggaaatgcttcctagcagatgagggactaaacaggaatcataacaggagtgtgagtga

SEQ ID NO: 952 - DNA, 120 bp, synthetic construct
  misc_feature 1..120: note = Artificially Synthesized Probe
  source 1..120: mol_type = other DNA
ttgtgaagagacagtgagtggggtgagctttgttaggaggcactgagtagggtgagggttgttaggagacagtgagtgggatgagggtttatgaggagacactaggtagggtgaatgttt

SEQ ID NO: 953 - DNA, 120 bp, synthetic construct
  misc_feature 1..120: note = Artificially Synthesized Probe
  source 1..120: mol_type = other DNA
tgaggagacattgagtgggatgagaggtgtgaggagacactgaatgtggtgagggtttgtgaggagatactgcatggggtgagctttcttaggagacactgagtgggtaagagttgtgag

SEQ ID NO: 954 - DNA, 120 bp, synthetic construct
  misc_feature 1..120: note = Artificially Synthesized Probe
  source 1..120: mol_type = other DNA
gttgtgagcagatactgagtggggtgagagttgtgaggatacactgagttgggtgaggagtctgtgaggagacactgaattgggtgagggttgtgagaagacactgaatgggttgaggtt

SEQ ID NO: 955 - DNA, 120 bp, synthetic construct
  misc_feature 1..120: note = Artificially Synthesized Probe
  source 1..120: mol_type = other DNA
ctgcattctttcatgcagctttctttattgtagtcatgattcacatcgattttgttttcctcctgccaaatgtgttgtccatgagagttttctcttgagtggttaaatggggggtattga

SEQ ID NO: 956 - DNA, 120 bp, synthetic construct
  misc_feature 1..120: note = Artificially Synthesized Probe
  source 1..120: mol_type = other DNA
cctttctctaaaaggagtaatctctccattgttaatcaggttttgtaaatcttggttgccctgcaatctttttaaccagagaaatttccgttgtgaaaaatgctctttgcccgctaggtg

SEQ ID NO: 957 - DNA, 120 bp, synthetic construct
  misc_feature 1..120: note = Artificially Synthesized Probe
  source 1..120: mol_type = other DNA
gcgtcctcataggcctttcacgggatcttacagccacaagtctattgtatgtgcttcagtgatgaaaagcaagatggaaaataacgtcaggttttgattgcaaacatgtcagattgtaga

SEQ ID NO: 958 - DNA, 120 bp, synthetic construct
  misc_feature 1..120: note = Artificially Synthesized Probe
  source 1..120: mol_type = other DNA
gacaacaaaacaagacccaggctctgaaaaagaaaagtctgaactgtctttgctcattttgtcttagcaatatgagaagccgctgtctgagatggagccaaaggttctgagtgagaggaa

SEQ ID NO: 959 - DNA, 120 bp, synthetic construct
  misc_feature 1..120: note = Artificially Synthesized Probe
  source 1..120: mol_type = other DNA
ccactggtggtttctgcactggcagtttcgagtcattttatcctcactccgtgtatgaatcatacttattgtatattggttggattctacctagatgtagaggattatgagtgaaacaga

SEQ ID NO: 960 - DNA, 120 bp, synthetic construct
  misc_feature 1..120: note = Artificially Synthesized Probe
  source 1..120: mol_type = other DNA
attttgagggcgagtttcaaatcttctgttttatgttggaaaagggatatctggactctgtgatttctctctgaatttcctcctgtgtttcagttttctaagtccatggtgctggatgca

SEQ ID NO: 961 - DNA, 120 bp, synthetic construct
  misc_feature 1..120: note = Artificially Synthesized Probe
  source 1..120: mol_type = other DNA
ggacaaagtgtgttcttgttacttggactgtttcttggaaactgctgctacctggagcgagtgaacacagggcaagtattctcgcccacagcaacgtgtcattgaagctggaattttttc

SEQ ID NO: 962 - DNA, 120 bp, synthetic construct
  misc_feature 1..120: note = Artificially Synthesized Probe
  source 1..120: mol_type = other DNA
ctgcagcaaagcggaagcccctagagcaggtgcagaaagtggctggaaggtatttggccaagtttcttcttgtagctgaagacaaggtgcaggcttttgactttcccgagtgttcagtgt

SEQ ID NO: 963 - DNA, 120 bp, synthetic construct
  misc_feature 1..120: note = Artificially Synthesized Probe
  source 1..120: mol_type = other DNA
gagagtctatgctggtttctgcctgtgttgatttttcaatgattgctcagcttgctttttctaattaaatcagaggactttgcttggactgcctgcttattagagccgattaagatgaac

SEQ ID NO: 964 - DNA, 120 bp, synthetic construct
  misc_feature 1..120: note = Artificially Synthesized Probe
  source 1..120: mol_type = other DNA
taaatgtaagtaagtaactacaagtaagtaagtaagtaactatttttgcctaggttttttccgaaatacattcttttagacagaaggggtgggcgggctgctggaaacggaacaggacag

SEQ ID NO: 965 - DNA, 120 bp, synthetic construct
  misc_feature 1..120: note = Artificially Synthesized Probe
  source 1..120: mol_type = other DNA
actgtcagtttctcccatggatccagaaacatccattggccctgtgacatttgtctttatcccagctacctatttctctccgttgttgtgcaaagataagtaacaatttctgataataac

SEQ ID NO: 966 - DNA, 120 bp, synthetic construct
  misc_feature 1..120: note = Artificially Synthesized Probe
  source 1..120: mol_type = other DNA
tgttgttgttgatttgtgccacataccctccctttgacctcctcgtgcttgtctgaaaccttaactgggagaagaggtagctcaactccctttttttaaagactactttttaagagaaat

SEQ ID NO: 967 - DNA, 120 bp, synthetic construct
  misc_feature 1..120: note = Artificially Synthesized Probe
  source 1..120: mol_type = other DNA
tattgtacagtgctattttttcaattttgtttttgcaaaggaagctgttcagatgttcagccaagtcgtgactcactcagctcatcatcccttcccaagaactgactttatttttcccca

SEQ ID NO: 968 - DNA, 120 bp, synthetic construct
  misc_feature 1..120: note = Artificially Synthesized Probe
  source 1..120: mol_type = other DNA
caaaaaaaaaaaaaattcacaaacattttttgtcttcacctatgcatgggctaagctgcattgagcgtgaaaagagatgcaggacccagaaggcggcagttcatttgccaggctacattt

SEQ ID NO: 969 - DNA, 120 bp, synthetic construct
  misc_feature 1..120: note = Artificially Synthesized Probe
  source 1..120: mol_type = other DNA
caaacaaacaaaaaaggtagtgtgacttctacatcgcataccattgtcttggttcatacaaagcgtctttctgaagaactgatggttttgctttggctcagtgaagtaaaatatggccta

SEQ ID NO: 970 - DNA, 120 bp, synthetic construct
  misc_feature 1..120: note = Artificially Synthesized Probe
  source 1..120: mol_type = other DNA
agatgataagggaactgatataaagttaactataacactcctggtgctgtagaaaataatgcaagcgaacgtggtgccaattcgtcatgtcttgcaagagtcaagtgttgaatcttccag

SEQ ID NO: 971 - DNA, 120 bp, synthetic construct
  misc_feature 1..120: note = Artificially Synthesized Probe
  source 1..120: mol_type = other DNA
gcctgcgagggacaggttttcattgttgcttttcatcatcgtcagtgactttgtggcagctacaaaataagtccaaaaaatatgtgagtctttaatgacactccttcttgtaagagaaag

SEQ ID NO: 972 - DNA, 120 bp, synthetic construct
  misc_feature 1..120: note = Artificially Synthesized Probe
  source 1..120: mol_type = other DNA
atcggaattttggtaagaactcatgggcatttctgtttttctaaattggaggcacagtctaattcacggaacacaacccatctttcctcttactgtgtctgaattgttcttcctcctttc

SEQ ID NO: 973 - DNA, 120 bp, synthetic construct
  misc_feature 1..120: note = Artificially Synthesized Probe
  source 1..120: mol_type = other DNA
ggggactcagtaagaaagtcagaagcacaattactattgtgagaaagtctgaagagttacaattcagcagtgggaagtttctcacttgaacatctgagggatgaacattaccataacgtg

SEQ ID NO: 974 - DNA, 120 bp, synthetic construct
  misc_feature 1..120: note = Artificially Synthesized Probe
  source 1..120: mol_type = other DNA
cagaagcaaggaaaccacgtgagaacgtttaaccttttctgattgaatttgcatattcacctggatttgcagaacatgatgtaaggagtattaggtctaattcgctttgggaccgctttt

SEQ ID NO: 975 - DNA, 120 bp, synthetic construct
  misc_feature 1..120: note = Artificially Synthesized Probe
  source 1..120: mol_type = other DNA
cattgcatttgcaccctggatttaactatgagcttcctatcagccacagcaagaggagaaacactgagtatggacaagttctcattgtctattaaaaagaaatatgccacattggagagt

SEQ ID NO: 976 - DNA, 120 bp, synthetic construct
  misc_feature 1..120: note = Artificially Synthesized Probe
  source 1..120: mol_type = other DNA
tctcagtgtttgtttcttccggttctcttggtttgtcacttctaaattatatcgagaagctaagtcagaaattctcattctcagtcgatagtcataggacttctgctgcttgaatgactg

SEQ ID NO: 977 - DNA, 120 bp, synthetic construct
  misc_feature 1..120: note = Artificially Synthesized Probe
  source 1..120: mol_type = other DNA
cttcccagggagaagttcttcgtgtgtgtgtgtgtgcacttttattcaactggtctcaagtcagtgtacaggtgaagttcttaaaatgtttagagaaatgtgagtacaacttgaatctac

SEQ ID NO: 978 - DNA, 120 bp, synthetic construct
  misc_feature 1..120: note = Artificially Synthesized Probe
  source 1..120: mol_type = other DNA
gaaaacacagtacctcccccacaaaattcacacggttttaaaaaacaaagcaaaacactactagcaaagaaccagcaccaaggagggaggaaggcgggcgtgacttacagtctttaaata

SEQ ID NO: 979 - DNA, 120 bp, synthetic construct
  misc_feature 1..120: note = Artificially Synthesized Probe
  source 1..120: mol_type = other DNA
catggcttttcagggatttttgatgaaaatggcatctgaagtgaatggagcaaaacagtcacatcacagattctgggcagtgggtaaaaatgtgtccatgagttattctacttttctaca

SEQ ID NO: 980 - DNA, 120 bp, synthetic construct
  misc_feature 1..120: note = Artificially Synthesized Probe
  source 1..120: mol_type = other DNA
tgtgggaatcacacacgtgtgtcctactacacatggacacatacaagttaggtgttgagcaaattaatattatgttctgggtttttgaaccccatgaagctatagggatggttttacttg

SEQ ID NO: 981 - DNA, 120 bp, synthetic construct
  misc_feature 1..120: note = Artificially Synthesized Probe
  source 1..120: mol_type = other DNA
gaccactacgaacagtgacgtggagacatccttacacattagtctgataatttccttagaagtggaattttcaggtcaaagagtagaacatttgtatcctcttttagactcctgatgcat

SEQ ID NO: 982 - DNA, 120 bp, synthetic construct
  misc_feature 1..120: note = Artificially Synthesized Probe
  source 1..120: mol_type = other DNA
atcaattttggcctgaaaatcaacatgaaacagtttttctgaaactgagaatcacatttgaaaagcactggccgcactgtgtggtttcttgttattcttgggatgtgagtgcagacgctt

SEQ ID NO: 983 - DNA, 120 bp, synthetic construct
  misc_feature 1..120: note = Artificially Synthesized Probe
  source 1..120: mol_type = other DNA
tgggtgatgagctgttctgtgggtgatgagttgttttatgggtaatggagctgttctgtcagtgatggagctgttctgtgggtaataaactgttctgtcaagtgatgaagctgttctctg

SEQ ID NO: 984 - DNA, 120 bp, synthetic construct
  misc_feature 1..120: note = Artificially Synthesized Probe
  source 1..120: mol_type = other DNA
cctggagttctccctcaggcttactgcggagatgttcacgtgcatttatacatgtgtgaaaatatatagagccgcacaccaaaaatagaagggtcaatttgattggatgataattgtgaa

SEQ ID NO: 985 - DNA, 120 bp, synthetic construct
  misc_feature 1..120: note = Artificially Synthesized Probe
  source 1..120: mol_type = other DNA
agtgagccactatgcctggccgctccctttgttacgaaacttcatgatacttcaaatgcagttagtaattgcatttgtctagatagttgatacaaatcaggcttaccatgttcataaata

SEQ ID NO: 986 - DNA, 120 bp, synthetic construct
  misc_feature 1..120: note = Artificially Synthesized Probe
  source 1..120: mol_type = other DNA
agcaattctcacttgggcaaatagaccccgggacacgcgtcgttcctctaacccaagtcatcgaagacaaaccatttctattcccttaaaaaaaaaaaaaaactttaggaaagatcattg

SEQ ID NO: 987 - DNA, 120 bp, synthetic construct
  misc_feature 1..120: note = Artificially Synthesized Probe
  source 1..120: mol_type = other DNA
acgttagataaggtgagactatttaatggtaacttttcttcattttgcaaatagggtttaatatcagttctatcttagaaatgtctcagccccccacagtgtgatctgactcccaaagct

SEQ ID NO: 988 - DNA, 120 bp, synthetic construct
  misc_feature 1..120: note = Artificially Synthesized Probe
  source 1..120: mol_type = other DNA
caccggcgattttttagatgttcatattaaaatagagggatcgcatattaaaatggaggggttaaaacggatggtgtttctggtaccagaacatgaatatcagttgaggcagctgaacac

SEQ ID NO: 989 - DNA, 120 bp, synthetic construct
  misc_feature 1..120: note = Artificially Synthesized Probe
  source 1..120: mol_type = other DNA
catctctggtatttgaatctaaacatttcttttgctttggaaaaactggagaaagataaagggaagtggacctatgtggtttatacagcgacgtttggcagcctttgggtccagcgtatt

SEQ ID NO: 990 - DNA, 120 bp, synthetic construct
  misc_feature 1..120: note = Artificially Synthesized Probe
  source 1..120: mol_type = other DNA
tgaagcgccctgagctgccggatttcagtgtgctgatgggatctaaagattaagataccaaaggttgaatctccttaggtgttcacttctaaaaagctaacttctgagagttgtactttt

SEQ ID NO: 991 - DNA, 120 bp, synthetic construct
  misc_feature 1..120: note = Artificially Synthesized Probe
  source 1..120: mol_type = other DNA
gttcctagttgagtgtcagaaattgaacaacccaattagctggtatttcatttgtaccaacctatgaatggaggagtagccttaattcccttgggggcttccacttctaagagaactgtt

SEQ ID NO: 992 - DNA, 120 bp, synthetic construct
  misc_feature 1..120: note = Artificially Synthesized Probe
  source 1..120: mol_type = other DNA
ttttatttttttaagtgtgttgattctcacatgaaaatcgaagcttgtcgtggcctttaagggtcaggttccagcgtattatggaagccgccacatggtcgttttcttctttcctcctaa

SEQ ID NO: 993 - DNA, 120 bp, synthetic construct
  misc_feature 1..120: note = Artificially Synthesized Probe
  source 1..120: mol_type = other DNA
tttaaaagtactggcaagtgtccctaggaatggagaaggaagggcaagagggaagagttgaaatgtttgtgtttatgttaacaggcaccctcgttcttgttacaacgagcaaatatattt

SEQ ID NO: 994 - DNA, 120 bp, synthetic construct
  misc_feature 1..120: note = Artificially Synthesized Probe
  source 1..120: mol_type = other DNA
tccacaccgcccagctcccgcctggatggcagcgtagcctcgccttcattcttccgcttctactgattcattctccaaatatttgttattgagctttttaaactgtaaataaggttttta

SEQ ID NO: 995 - DNA, 120 bp, synthetic construct
  misc_feature 1..120: note = Artificially Synthesized Probe
  source 1..120: mol_type = other DNA
aaatgcaatagaaataacatttctattacgtaaaatgtattttatgcttatgtcccccttttttcccctgggtttactagcgagcatctctccagcctcttacttggctgcattgctgtc

SEQ ID NO: 996 - DNA, 120 bp, synthetic construct
  misc_feature 1..120: note = Artificially Synthesized Probe
  source 1..120: mol_type = other DNA
gagaacaaagttcagttgttggaagttaaaccttaaccgagggaaacgtctgaagtaggccatcgtgtcattgatctttgagttctcgtttcaaaggaatggtgctattggtaggacact

SEQ ID NO: 997 - DNA, 120 bp, synthetic construct
  misc_feature 1..120: note = Artificially Synthesized Probe
  source 1..120: mol_type = other DNA
cttttacctcaattttgatttcttaaagtattctgtgaagatatggcctctcttcgtgatgcagtatagagcaaggcacatgttagaacggaagcagctaatggggaaatgtaacatctg

SEQ ID NO: 998 - DNA, 120 bp, synthetic construct
  misc_feature 1..120: note = Artificially Synthesized Probe
  source 1..120: mol_type = other DNA
tgaaatgaaatattttcttttaagatggatcctgggattcagaacctcaaaaagtgatcaagttaggcgtcctaccagttagaagtctactcatgatggaagacacgttgtgggcggctt

SEQ ID NO: 999 - DNA, 120 bp, synthetic construct
  misc_feature 1..120: note = Artificially Synthesized Probe
  source 1..120: mol_type = other DNA
cagatggatgggactttcaccatgaagacgaaactataaacctctaagataaaaagcagtagaacagttttattactttgcaatggagaaagcctctccaagcatgccacaaacccagaa

SEQ ID NO: 1000 - DNA, 120 bp, synthetic construct
  misc_feature 1..120: note = Artificially Synthesized Probe
  source 1..120: mol_type = other DNA
gtcttgttttttactgtctgttcttggccatctcttgaccccactgtccctaaacaaactgggataacacaggtgtgttttcacccaataaaatggaccaactcatcattaaaaattcct

SEQ ID NO: 1001 - DNA, 120 bp, synthetic construct
  misc_feature 1..120: note = Artificially Synthesized Probe
  source 1..120: mol_type = other DNA
agacctggtctgctagacaggaacagaaaatagctggacagggaggttggggtacatgttagatgatttttggcagtattgttcctgttacttttcatatccatctgacacttcttattt

SEQ ID NO: 1002 - DNA, 120 bp, synthetic construct
  misc_feature 1..120: note = Artificially Synthesized Probe
  source 1..120: mol_type = other DNA
tttcttgcttagagccttgagtcacagctagtttcagtggaatgactacagctgcttaaagtgcaaaccttttcttcctcactcttgattttctgcaatatgcagtgctcttgactgaag

SEQ ID NO: 1003 - DNA, 120 bp, synthetic construct
  misc_feature 1..120: note = Artificially Synthesized Probe
  source 1..120: mol_type = other DNA
catcagtgctaaggtaatacccatataatctgtcctccagaagaaacatagcaaacatttaccaagtacctagcactgtgcaaaaacagagcaaccacagatggttaagacattgatgac

SEQ ID NO: 1004 - DNA, 120 bp, synthetic construct
  misc_feature 1..120: note = Artificially Synthesized Probe
  source 1..120: mol_type = other DNA
caaaggaggttgcgctgggttaaaaactccatgggtttggtttttttaaatcatctttccagaagtttggattgtgattgtgaaagagtcaaaagcccgaggaaagaaagaagctttgct

SEQ ID NO: 1005 - DNA, 120 bp, synthetic construct
  misc_feature 1..120: note = Artificially Synthesized Probe
  source 1..120: mol_type = other DNA
cagtagtaccggaggatctgccagagcaattagacaagggaaaaagagtggaggactcagatgaaaggaagaagtaaagttgcatttgcatatgatatcctcttgtatgtagaatattct

SEQ ID NO: 1006 - DNA, 120 bp, synthetic construct
  misc_feature 1..120: note = Artificially Synthesized Probe
  source 1..120: mol_type = other DNA
acccacagagtgggagaaaatacgtacagctcatgtgagaaggatctagtatgcagagcatctaactcactcttagatcttaataaaaagaaaagtaacgctattaaaggcaagggaact

SEQ ID NO: 1007 - DNA, 120 bp, synthetic construct
  misc_feature 1..120: note = Artificially Synthesized Probe
  source 1..120: mol_type = other DNA
ggggaagggggcataagggtgataaaatgttctggaattcaagagtggttaaagttggcaacttcccgaatatactaaaaagcacagaattgcgccctatagaagggtgaacttcatgat

SEQ ID NO: 1008 - DNA, 120 bp, synthetic construct
  misc_feature 1..120: note = Artificially Synthesized Probe
  source 1..120: mol_type = other DNA
taaattcaacttgtgattattgaagaaattttctatgaggaaactacgggcatatggcgagaggtattacacggctgactctagaatgggcattttatgaggaaactacgggcatatggc

SEQ ID NO: 1009 - DNA, 120 bp, synthetic construct
  misc_feature 1..120: note = Artificially Synthesized Probe
  source 1..120: mol_type = other DNA
atgcctgtgtctttggaatggccattttctgggctcacaaaggagccaggatgattggaaaatggcaggcagttgggttgctggtgtttggttgctggagacgcctgtgatttggagcaa

SEQ ID NO: 1010 - DNA, 120 bp, synthetic construct
  misc_feature 1..120: note = Artificially Synthesized Probe
  source 1..120: mol_type = other DNA
aggcctatgtttgtgaatgccctgttgctggtgggtgtcactgaagtttctgggcaggggagaaggccattacacattgagttttgggaggatcatcctacaacaggatggaggaaagaa

SEQ ID NO: 1011 - DNA, 120 bp, synthetic construct
  misc_feature 1..120: note = Artificially Synthesized Probe
  source 1..120: mol_type = other DNA
atttctcttagtgagaaaaggaggtttatgtaacatgcaagtttatatttagagaaccaaaatggttaagtccctgtggctcagaaagcagacgctctgctgtggaccttgtgttttctt

SEQ ID NO: 1012 - DNA, 120 bp, synthetic construct
  misc_feature 1..120: note = Artificially Synthesized Probe
  source 1..120: mol_type = other DNA
tcctgtatggcaggttcttgatgctttgttttagatactgtctttgacctctcctgtagaagagaaagatggaattatcctgcttccctccaagcatagagcacccaacacagtcctgca

SEQ ID NO: 1013 - DNA, 120 bp, synthetic construct
  misc_feature 1..120: note = Artificially Synthesized Probe
  source 1..120: mol_type = other DNA
gaagacttgccaagccgaaacaacaaaatttgaaaaaaacaaactgtattataactcatgccttttgtgtaagttcacacaacgtgatgaaacctccttccttcctcagggtctcagcac

SEQ ID NO: 1014 - DNA, 120 bp, synthetic construct
  misc_feature 1..120: note = Artificially Synthesized Probe
  source 1..120: mol_type = other DNA
gaaaaaaaaagacaaaaaacgtgtaacttttctgaagaccatggactacaccgtaagggaattcagtaaatgaaaccggactcaagatggtgagttaacgaacgagactgaggacttggg

SEQ ID NO: 1015 - DNA, 120 bp, synthetic construct
  misc_feature 1..120: note = Artificially Synthesized Probe
  source 1..120: mol_type = other DNA
gggttcaggtttgatgctgaactcatatgcacaccggttttctctctcataagacaatcatgtttcatgcttaaaatacttactgttgagtcaaactgctgctctagaaagatcatccac

SEQ ID NO: 1016 - DNA, 120 bp, synthetic construct
  misc_feature 1..120: note = Artificially Synthesized Probe
  source 1..120: mol_type = other DNA
tctcccacattgttttgcagccactttctagccttgtcactgccggagcaaattgtttagtttctctgggcttcagatccttggctgtaaagcaaatcaaaaccaaactaacaaagagcc

SEQ ID NO: 1017 - DNA, 120 bp, synthetic construct
  misc_feature 1..120: note = Artificially Synthesized Probe
  source 1..120: mol_type = other DNA
ccttagtagtccaaggagaatcttatgtttttatattctgtttactgccagaattagtttccatcattcctttctgtgttttatattgtggagaaggaagccgggatctccgttgttcct

SEQ ID NO: 1018 - DNA, 120 bp, synthetic construct
  misc_feature 1..120: note = Artificially Synthesized Probe
  source 1..120: mol_type = other DNA
cggtggcttccgtgcactcagattttggcaggtccacccacaaggattaaggaattctagttttgccattcatttcctaatttatgtttttattatgatatatgggattgtacatgttga

SEQ ID NO: 1019 - DNA, 120 bp, synthetic construct
  misc_feature 1..120: note = Artificially Synthesized Probe
  source 1..120: mol_type = other DNA
atgatgatgctgagttttacgtcaattattcctttggtcctcctctgtagttgtaccaatttgtatcttaaagggtacttttcacctttccggcttttgcattttcctagctgtcccatg

SEQ ID NO: 1020 - DNA, 120 bp, synthetic construct
  misc_feature 1..120: note = Artificially Synthesized Probe
  source 1..120: mol_type = other DNA
agtgtgggggttgcggggctgtgtgtggctttaagaagacctgcaggtgtttctgatacgatcgtgactttaaaatttgaatcacatcacctgaaaactgaaagtcctaattttaatcaa

SEQ ID NO: 1021 - DNA, 120 bp, synthetic construct
  misc_feature 1..120: note = Artificially Synthesized Probe
  source 1..120: mol_type = other DNA
tgcactttttgcttccttgtctcaaattttgcctattttaaaagacagctgttgaactgtttcccttttcaggaagaggcatggtctcctaccatgcacacaacagtcctgtcaaattca

SEQ ID NO: 1022 - DNA, 120 bp, synthetic construct
  misc_feature 1..120: note = Artificially Synthesized Probe
  source 1..120: mol_type = other DNA
catttggactcaagcatcaacaccaaattattcctcccttctcgtataaatagagtgactatccacaggagaaaagtgtgtgctttagtattagaggagataggcagagaagtcttgctt

SEQ ID NO: 1023 - DNA, 120 bp, synthetic construct
  misc_feature 1..120: note = Artificially Synthesized Probe
  source 1..120: mol_type = other DNA
gtacattctgctaattggagtttcagaatcacagtttcttgcttgggtgcagaattttcaaaagtgtttaagtgcctaaattattgttgtagttgctggccactgcccatgccttgtaga

SEQ ID NO: 1024 - DNA, 120 bp, synthetic construct
  misc_feature 1..120: note = Artificially Synthesized Probe
  source 1..120: mol_type = other DNA
aaaataacataaaacttgccatatcttggttccactatgagtgtttctcttccaagcacttctgcctatgggtaagcattctagcaaagatgccattacagtccggcacggagaaataaa

SEQ ID NO: 1025 - DNA, 120 bp, synthetic construct
  misc_feature 1..120: note = Artificially Synthesized Probe
  source 1..120: mol_type = other DNA
aattgcctgctagagagtcaccagttccgtctccatctgttccccaaacttgtgcttatggatttgacattcaggtatttttcagaagaatcagcttgaagcaaaaatactgaacttaaa

SEQ ID NO: 1026 - DNA, 120 bp, synthetic construct
  misc_feature 1..120: note = Artificially Synthesized Probe
  source 1..120: mol_type = other DNA
agcaagaattcttgtagataccatgacaggttaaaagtatttgccacagctggggaagagagaatggggtcagacccttgatgttgtggtagctgacttttttacttgattgcttaattt

SEQ ID NO: 1027 - DNA, 120 bp, synthetic construct
  misc_feature 1..120: note = Artificially Synthesized Probe
  source 1..120: mol_type = other DNA
gtccctttttcttaccaaagttagtcactaccctgacttctaacaccatacattaaattttgcctgtttgggggctttatatgtgtgtgtaggtgtttttatgcgtggcttctttcgctt

SEQ ID NO: 1028 - DNA, 120 bp, synthetic construct
  misc_feature 1..120: note = Artificially Synthesized Probe
  source 1..120: mol_type = other DNA
cctcacttgcctcaccccaatcctggcccatcccattctgtgtcttgcattgtcatgctctttaatatatattgttatttgttgaaaagcagtttctaatctaatgaagtccaaatgttc

SEQ ID NO: 1029 - DNA, 120 bp, synthetic construct
  misc_feature 1..120: note = Artificially Synthesized Probe
  source 1..120: mol_type = other DNA
aaagtatacttctaagttagagcctctatttttgtataacacttgggatattttttacttcacattgaatatagacaggcacccaagaagtctgatggccaccggagtgcgggtgacaag

SEQ ID NO: 1030 - DNA, 120 bp, synthetic construct
  misc_feature 1..120: note = Artificially Synthesized Probe
  source 1..120: mol_type = other DNA
tctttgccgcaaggctgatttgctttcactaactggaattttgtaggagatactggtgacctaagctaagttgcattcaacatactcagtgtcaagctaatgaggttctgttataaagct

SEQ ID NO: 1031 - DNA, 120 bp, synthetic construct
  misc_feature 1..120: note = Artificially Synthesized Probe
  source 1..120: mol_type = other DNA
tgtctttctgccacttgcaccctgtttccatttcctgtaactttgcaataagttttgatatttggtagaataagtccttcatgcctctcatcttccccaagattgccttggctattcttt

SEQ ID NO: 1032 - DNA, 120 bp, synthetic construct
  misc_feature 1..120: note = Artificially Synthesized Probe
  source 1..120: mol_type = other DNA
ccacgcccggccataaatggcatattttaatgttcatttttagttgtttgatgctggcatattgacataataattaaaattttgtatttatacttgcatacagcaaccctgcttaattaa

SEQ ID NO: 1033 - DNA, 120 bp, synthetic construct
  misc_feature 1..120: note = Artificially Synthesized Probe
  source 1..120: mol_type = other DNA
tgaggaatttttcttctaattctagtttgatataatttttaaacattaacagatggtgaattttatgaaatgtatttttctcatcagttaaaatgagcctgtgatttttacactttattc

SEQ ID NO: 1034 - DNA, 120 bp, synthetic construct
  misc_feature 1..120: note = Artificially Synthesized Probe
  source 1..120: mol_type = other DNA
ctattctaattgtattttgttttgttttgatttttgagacagagtcttgctctgtcacccaggctggagtgcagtggcaccatctcacctcactgcaacctctgcctcccaggttcaagc

SEQ ID NO: 1035 - DNA, 120 bp, synthetic construct
  misc_feature 1..120: note = Artificially Synthesized Probe
  source 1..120: mol_type = other DNA
gatatttttttgatacactgaattcctttcttttggaaatatacctatcagtgagattgctggatcatatggtagttctatttttagttttttgaggaatctctatattgttttccatag

SEQ ID NO: 1036 - DNA, 120 bp, synthetic construct
  misc_feature 1..120: note = Artificially Synthesized Probe
  source 1..120: mol_type = other DNA
tagtagagaccgggtttcaccatggtctcgctctcctgacctcgtgatccacccgcctcggctttccaaagtgctgagattacaggtgtgagccaccacacccggcctccagcaccattt

SEQ ID NO: 1037 - DNA, 120 bp, synthetic construct
  misc_feature 1..120: note = Artificially Synthesized Probe
  source 1..120: mol_type = other DNA
tttcacttctttggtcgtttatgcctaagtatttttttctgtagctatcgtaaatgagactgctttgtgttctttctcaaattgttcacagttgaaatatagaaattctataatactaat

SEQ ID NO: 1038 - DNA, 120 bp, synthetic construct
  misc_feature 1..120: note = Artificially Synthesized Probe
  source 1..120: mol_type = other DNA
ttttgaggcccataagagcccccaattcagccagagctgagcagattttgggacaacctgctacagagaggagctgcccactccagggcctcctctgagctattttgtcactcagtaaag

SEQ ID NO: 1039 - DNA, 120 bp, synthetic construct
  misc_feature 1..120: note = Artificially Synthesized Probe
  source 1..120: mol_type = other DNA
atatttctagtttgggtacgctaatattttggttaagatttttacatgtatattatttttaaaatttgatatgtaatttttctcttgtagtgttctctctcttttttaaagagacaggtc

SEQ ID NO: 1040 - DNA, 120 bp, synthetic construct
  misc_feature 1..120: note = Artificially Synthesized Probe
  source 1..120: mol_type = other DNA
gtgctactcctaagatttttctctgggtcgttagctttttatagatgtacagtcacatgcctaggtgtacatttatcctgcttgggctttgtggcatttcttgaatctgtaaccagataa

SEQ ID NO: 1041 - DNA, 120 bp, synthetic construct
  misc_feature 1..120: note = Artificially Synthesized Probe
  source 1..120: mol_type = other DNA
gcactgcttttgagtgactgtaggacttaccagtcagcacttgacatactactataagcaagaagcctcctagaatgtttatccctccaaaagtcactttaaacttagttgccattgtaa

SEQ ID NO: 1042 - DNA, 120 bp, synthetic construct
  misc_feature 1..120: note = Artificially Synthesized Probe
  source 1..120: mol_type = other DNA
caacagattcctcattaaggcttctttcctttctgccgggtattcattattaacaatcatcactccaactgtctcataaataaaatttgatcatcgctgctcaggaaggactggtggcca

SEQ ID NO: 1043 - DNA, 120 bp, synthetic construct
  misc_feature 1..120: note = Artificially Synthesized Probe
  source 1..120: mol_type = other DNA
tagtgcctcttgagcattcttaatattcccattcttagttaatttactccaactaactatccatgactgtcccattccgtttaccggcttagaaaatctggccaacatcttcttcctggt

SEQ ID NO: 1044 - DNA, 120 bp, synthetic construct
  misc_feature 1..120: note = Artificially Synthesized Probe
  source 1..120: mol_type = other DNA
catttggatttagccctaatagagcctgtttatccatccttgctgctatacttggagttttctggttataataggcttgccctctgatcccacagaagaatttataaacatcttccctat

SEQ ID NO: 1045 - DNA, 120 bp, synthetic construct
  misc_feature 1..120: note = Artificially Synthesized Probe
  source 1..120: mol_type = other DNA
gagacgatttgaggttctatatgatgttatctctctccagaagggtttacttttgtttctgtcaagcgaataggctagaggctgaaactttcatctagtaagtgtctgaggaagtcaaag

SEQ ID NO: 1046 - DNA, 120 bp, synthetic construct
  misc_feature 1..120: note = Artificially Synthesized Probe
  source 1..120: mol_type = other DNA
gcttttggaatcagcaattgtcttcagagtaaagtgtctccaaataccagtctcaccttacttggcttctctttttctccagatcttggactagcaaattctcactgcttttgtagctct

SEQ ID NO: 1047 - DNA, 120 bp, synthetic construct
  misc_feature 1..120: note = Artificially Synthesized Probe
  source 1..120: mol_type = other DNA
ctggccccttttcagcaattttaacgtaaccctctgaagtttctcaaactaaatgtgagaatagctggaaacctatggctcttgtatacagatgtacactataggcagttgtatagactt

SEQ ID NO: 1048 - DNA, 120 bp, synthetic construct
  misc_feature 1..120: note = Artificially Synthesized Probe
  source 1..120: mol_type = other DNA
gtgtaaggttgcttgtgggtggtgagaggaacagagcacagaaatgttaacattcacaaactttctgaacacctgagcactgagctgggaacccagaatataaagataaaaaatacaaaa

SEQ ID NO: 1049 - DNA, 120 bp, synthetic construct
  misc_feature 1..120: note = Artificially Synthesized Probe
  source 1..120: mol_type = other DNA
gatgtatttcctgaacaactaaagagtggttgctctcagactattaatcttcctttctcttccctatgcttttgtcactccgaaagcccattctctgttgtgtggatgtttttcttcctt

SEQ ID NO: 1050 - DNA, 120 bp, synthetic construct
  misc_feature 1..120: note = Artificially Synthesized Probe
  source 1..120: mol_type = other DNA
aaagtaggtggaaaagattttagaaaaagaaaactggaaccatacagactaagaaggtgtgtgtgagcctaattctggcagtgaaggtctctagggcatagcggaaggaatagaaagaaa

SEQ ID NO: 1051 - DNA, 120 bp, synthetic construct
  misc_feature 1..120: note = Artificially Synthesized Probe
  source 1..120: mol_type = other DNA
cagtgctcaatggtgcccaggctggagtgcagtggcgtgatctcggctcactacaacctacacctcccagccacctgccttggcctcccaaagtgccgagattgcagcctctgcccggcc

SEQ ID NO: 1052 - DNA, 120 bp, synthetic construct
  misc_feature 1..120: note = Artificially Synthesized Probe
  source 1..120: mol_type = other DNA
ataaattaaaaaaaaaaaagttactcaggagacccttttagaaatacttagggaaagataagctgtctccttgggatgactgggctggtgtctgtgcatatgccttctctggatccaagt

SEQ ID NO: 1053 - DNA, 120 bp, synthetic construct
  misc_feature 1..120: note = Artificially Synthesized Probe
  source 1..120: mol_type = other DNA
gtgctcttgtctcaaccttctttctagattggatcctgcatgttttttttatcattatacttttggcagccctaccactaggcttcctgaaatatagcacctttgtttttgtttgtttgt

SEQ ID NO: 1054 - DNA, 120 bp, synthetic construct
  misc_feature 1..120: note = Artificially Synthesized Probe
  source 1..120: mol_type = other DNA
gcgtgagccacacgctcagctgacgtgtacctactttagaacgtgtgtctcttatgtcagcttaccattattgtccatgtaatttgccattttaacagactaaaaaagaaaagctatatg

SEQ ID NO: 1055 - DNA, 120 bp, synthetic construct
  misc_feature 1..120: note = Artificially Synthesized Probe
  source 1..120: mol_type = other DNA
acaaggcaaggatgtctgctctcacatcttctattgaactctctactggacattccagttaattcagtaaggcaagaacaaggaataaaaaacaataagcttggaaatgaaacagtaaaa

SEQ ID NO: 1056 - DNA, 120 bp, synthetic construct
  misc_feature 1..120: note = Artificially Synthesized Probe
  source 1..120: mol_type = other DNA
actctccctgacttccagacttggagaataatcaaaacagtgtagtattgctataaagatagacaagtcagtagttcagaatagagagtctaggaatagactcacacatgtatggtcaag

SEQ ID NO: 1057 - DNA, 120 bp, synthetic construct
  misc_feature 1..120: note = Artificially Synthesized Probe
  source 1..120: mol_type = other DNA
tcacagatcaacaggatcccaaggcagaggaatttttcttagtgcagaacaaaatgaaaagtctcccatgtctacttctttctacacagacacggcaaccatccgatttctcaatctttt

SEQ ID NO: 1058 - DNA, 120 bp, synthetic construct
  misc_feature 1..120: note = Artificially Synthesized Probe
  source 1..120: mol_type = other DNA
gtaggggcggccgggcagaggcacccctcacctcccggaaggggcggctggccgggcggggggccgacacccccacctccctcccggacggggcggctggccgggcggggggccgacacc

SEQ ID NO: 1059 - DNA, 120 bp, synthetic construct
  misc_feature 1..120: note = Artificially Synthesized Probe
  source 1..120: mol_type = other DNA
tcctcacttctcagacggggtggttgccaggcagagggtctcctcacttctcagacggggtctcggccgggcagaggcgctcctcatcttccagacggggtcgcggctgggcagaggcgc

SEQ ID NO: 1060 - DNA, 120 bp, synthetic construct
  misc_feature 1..120: note = Artificially Synthesized Probe
  source 1..120: mol_type = other DNA
taaatgtgttacatgacaatagcactgagtttggggaacccacattttatagaaagcagtaagtgagcttgctttttaacccagggagatattacttcacagctcaaagttgcttgctgc

SEQ ID NO: 1061 - DNA, 120 bp, synthetic construct
  misc_feature 1..120: note = Artificially Synthesized Probe
  source 1..120: mol_type = other DNA
aatcagtgtgtcccaacccagtagctgtaacttcaccttttctccaattcttccccactcacaccaacatttttcatctggaagagtcaactgtgaatgggacaagagcttttttttttt

SEQ ID NO: 1062 - DNA, 120 bp, synthetic construct
  misc_feature 1..120: note = Artificially Synthesized Probe
  source 1..120: mol_type = other DNA
tttgcactaaaaaatgcagtattatcaccatccagaaagccaaaatcatgacacagattagtttcaagggccacaatgatgtggccacaattggctgatcagactagaacagcaaaacca

SEQ ID NO: 1063 - DNA, 120 bp, synthetic construct
  misc_feature 1..120: note = Artificially Synthesized Probe
  source 1..120: mol_type = other DNA
acctggaaatgaaatttaaagtaaaagtcagtgatgattattgctcaccagtcaggcatatcccattccaccatagctaccatcttgaagagcaagagcaaagtgaccgaagctgttaaa

SEQ ID NO: 1064 - DNA, 120 bp, synthetic construct
  misc_feature 1..120: note = Artificially Synthesized Probe
  source 1..120: mol_type = other DNA
gaaggaaggaaggaaaggaaggaaggaaggaaggaaggaaggaagcgggagggagggaagaaggaaggaaggaaggaaggagggagggagggaagaaggaaagaaggaaggaaggagaaa

SEQ ID NO: 1065 - DNA, 120 bp, synthetic construct
  misc_feature 1..120: note = Artificially Synthesized Probe
  source 1..120: mol_type = other DNA
tgtgaatgtgagagagcaatatgcaagtgctgatacgaaggcagctgaagaattttgggaaactctagataaggtgattgtatttgcctgggaaaatcttcttgagttttatagtttcag

SEQ ID NO: 1066 - DNA, 120 bp, synthetic construct
  misc_feature 1..120: note = Artificially Synthesized Probe
  source 1..120: mol_type = other DNA
ggaagtcttaatcaatgtttcttcaaatattctgggtttttttctctcttctccttctgggatggctagacttctgagagaatgcatatgtttttctgcttgatggtgtcccacatgtcc

SEQ ID NO: 1067 - DNA, 120 bp, synthetic construct
  misc_feature 1..120: note = Artificially Synthesized Probe
  source 1..120: mol_type = other DNA
cttcccagaatactttcctggctaattatttctaagggaataatttaagcccccaaagacacctgggccaagtctttctctagaaacttgatatcttttctgctttctttccctgctttt

SEQ ID NO: 1068 - DNA, 120 bp, synthetic construct
  misc_feature 1..120: note = Artificially Synthesized Probe
  source 1..120: mol_type = other DNA
gtttattgcagggccccatattaacctactttcttctgcagagcctctaagctccacattatccaggaagcaatacattgtgactgttgaagtcaaaataaaacatagcgatgaatctct

SEQ ID NO: 1069 - DNA, 120 bp, synthetic construct
  misc_feature 1..120: note = Artificially Synthesized Probe
  source 1..120: mol_type = other DNA
aatcccttgtaacctcaatgtcaacatcaattccaattctaaagaattgggagaaatatgggaagaacagaccacaagacttctggcaaccagaatgagtatgaaggcatgacgtttgct

SEQ ID NO: 1070 - DNA, 120 bp, synthetic construct
  misc_feature 1..120: note = Artificially Synthesized Probe
  source 1..120: mol_type = other DNA
cattaaaggaagctcaggttaatgttttcaattgtaggtgagttcgctctgcttcagtgatatggaacattttgttctgctgtttccattggaggagattaaagaggctaaatgggatgg

SEQ ID NO: 1071 - DNA, 120 bp, synthetic construct
  misc_feature 1..120: note = Artificially Synthesized Probe
  source 1..120: mol_type = other DNA
gcttgtgcagaatgcaccccaggtaaaggaattcagaaatcaaaagacatgattactgagaaggagaaaaggcagagaagtgatttctggagagcataaacaaaaccaatatagtaccca

SEQ ID NO: 1072 - DNA, 120 bp, synthetic construct
  misc_feature 1..120: note = Artificially Synthesized Probe
  source 1..120: mol_type = other DNA
tcattcaagatcgtaatttgcatgacaataaaccatggttttgtgggctctaagtttcttagaagtgtccgcagcaatttagaacaaacaccgcaagtcttccttccaatttgcagcatc

SEQ ID NO: 1073 - DNA, 120 bp, synthetic construct
  misc_feature 1..120: note = Artificially Synthesized Probe
  source 1..120: mol_type = other DNA
ccgtagggtggactttgtaacaacaaagcaaattgaaccacaaatttattagattcacacccatctcaaaactgtcacatcaatgaagcaaggagacgtattactggttaggaagccaaa

SEQ ID NO: 1074 - DNA, 120 bp, synthetic construct
  misc_feature 1..120: note = Artificially Synthesized Probe
  source 1..120: mol_type = other DNA
aggcctctctccctttggccatatcaactctcagttcaggccattaaatacagacaaattttcaaattcacttctttacttctccaagatctttgatgctgtcatcatctacttctggcc

SEQ ID NO: 1075 - DNA, 120 bp, synthetic construct
  misc_feature 1..120: note = Artificially Synthesized Probe
  source 1..120: mol_type = other DNA
gcagataaacttgaagctccctttactgattaactccaattcccacaactcttctatttatttcttttcctctgtacttttctcctctctcctttccttttctgcctgttttatactcct

SEQ ID NO: 1076 - DNA, 120 bp, synthetic construct
  misc_feature 1..120: note = Artificially Synthesized Probe
  source 1..120: mol_type = other DNA
acctgccaaagtgctgggattacaggcatgagccatggtgccctgtcttgtatgacttttaaattgcccctgaaggccgggcgcagtggcacatgcgtgtaatcccagcactttggaagg

SEQ ID NO: 1077 - DNA, 120 bp, synthetic construct
  misc_feature 1..120: note = Artificially Synthesized Probe
  source 1..120: mol_type = other DNA
aaatattcagcagaatatgttgtagcctctctgaaggggatgccactcatttggaataacagcaattcaacgttcgaagagaacttaaaaatctaataattcatcagcctgggcaacatg

SEQ ID NO: 1078 - DNA, 120 bp, synthetic construct
  misc_feature 1..120: note = Artificially Synthesized Probe
  source 1..120: mol_type = other DNA
gaaagctatggaccctctcccctgaaaaatcacatatgcacagtgtttcacagacaatttcaaggtcaagaattccctcttgctctatcatttccctttcttcccaagtatatgcttttt

SEQ ID NO: 1079 - DNA, 120 bp, synthetic construct
  misc_feature 1..120: note = Artificially Synthesized Probe
  source 1..120: mol_type = other DNA
attgctgttactactcatgaggaacacactcactgctattaatacaattgcagtgggcttgtacaaactttccatgactttccatgccctcttttccacaacttagtcagattcagtcac

SEQ ID NO: 1080 - DNA, 120 bp, synthetic construct
  misc_feature 1..120: note = Artificially Synthesized Probe
  source 1..120: mol_type = other DNA
attaaggatagaaggtagattctttcattcatataacaaatttttgtcaagtttccactctgtgcctcagactctatagtgagtcatatagtcctatcctcttatgaagggggcctgccc

SEQ ID NO: 1081 - DNA, 120 bp, synthetic construct
  misc_feature 1..120: note = Artificially Synthesized Probe
  source 1..120: mol_type = other DNA
gtgtccctggttaatcgagaatggagaatggcgatgacttttaccaggcatactgcctgcaaacatgttaacaaggcacatcctgcacagccctaaatccattaaactttgattcaatac

SEQ ID NO: 1082 - DNA, 120 bp, synthetic construct
  misc_feature 1..120: note = Artificially Synthesized Probe
  source 1..120: mol_type = other DNA
gacaggttcatccaagtgatctgactcgtgtgtctggatccttctttttatccaccatgctgaagagaaactcatcttaagtcctaaatacagatgatgaatttaaaaggagaactgtca

SEQ ID NO: 1083 - DNA, 120 bp, synthetic construct
  misc_feature 1..120: note = Artificially Synthesized Probe
  source 1..120: mol_type = other DNA
taaggaatactggtctttaactttctccctattatacccaaataagatttactccactgagactttaccaatccaagactcagtccaactgtatggttctaccaggagaactgttttgcc

SEQ ID NO: 1084 - DNA, 120 bp, synthetic construct
  misc_feature 1..120: note = Artificially Synthesized Probe
  source 1..120: mol_type = other DNA
cttggtctagtggtagcatcagtgctcgggaaggcaccggttacttagcagaccgagaaagggagtctccctttccccgggggagttagagaagactctgctccaccacctcttgtggaa

SEQ ID NO: 1085 - DNA, 120 bp, synthetic construct
  misc_feature 1..120: note = Artificially Synthesized Probe
  source 1..120: mol_type = other DNA
gctcagattttccggccactctcacttctttgtagaaattcccattacagtttttggcccatgagtatattatttatggtaaggaaaacccaaagacacaaaataactacacgtaccgcc

SEQ ID NO: 1086 - DNA, 120 bp, synthetic construct
  misc_feature 1..120: note = Artificially Synthesized Probe
  source 1..120: mol_type = other DNA
ctctgcctccacaatccaagtttaccagtcctagctcttgtctcattaggacccagtcctgtactaaaacaaatctgaagtctgataaattaatgagaaatattattggcacattagcct

SEQ ID NO: 1087 - DNA, 120 bp, synthetic construct
  misc_feature 1..120: note = Artificially Synthesized Probe
  source 1..120: mol_type = other DNA
taagtaaataaatgtttgtatagcaagctaagcactgcgatcagtgggaaaggacaagcatcatatggggaccaggaagtagccaagcttggatggaatttattacttcctgtgagaaaa

SEQ ID NO: 1088 - DNA, 120 bp, synthetic construct
  misc_feature 1..120: note = Artificially Synthesized Probe
  source 1..120: mol_type = other DNA
attcgttctctctgggtttgggaatctaggatatgagccaacatatatgcttgtctgaaggggccacttacctcttcatctttctcactgagacttaatttattagccttattctgtaca

SEQ ID NO: 1089 - DNA, 120 bp, synthetic construct
  misc_feature 1..120: note = Artificially Synthesized Probe
  source 1..120: mol_type = other DNA
tttaatttagcatttctgaaacttaatgaatcacagaactcctgtcaacagtaacaaacttcaggaaatgctccagaacatatgcaagtctgggatggaccagtcctgtcatgtcagggt

SEQ ID NO: 1090 - DNA, 120 bp, synthetic construct
  misc_feature 1..120: note = Artificially Synthesized Probe
  source 1..120: mol_type = other DNA
gaagaagaagaaagaaagaggatattctacacatatcagacagggaagggaggaacatcaacatttattgatcttcagtgtaacagacttttcactttataaacagacttcatttatcct

SEQ ID NO: 1091 - DNA, 120 bp, synthetic construct
  misc_feature 1..120: note = Artificially Synthesized Probe
  source 1..120: mol_type = other DNA
gagttctcattgttggggtgagactggacttaaagaaggaggacccccaacctctggctaggaactaaatgaaagatttttcaggcctatattaacaaaagaaactgaaagctactaaag

SEQ ID NO: 1092 - DNA, 120 bp, synthetic construct
  misc_feature 1..120: note = Artificially Synthesized Probe
  source 1..120: mol_type = other DNA
tgcccagctgactttttaaattggaaaatatttttgaagattgacaattagaaaaaacaggtgaatcttgttacctagaaatatttaaaaaatgaaaaaaaagtatgtcattaatgcata

SEQ ID NO: 1093 - DNA, 120 bp, synthetic construct
  misc_feature 1..120: note = Artificially Synthesized Probe
  source 1..120: mol_type = other DNA
ttttttttttttttagaaatggggtgtcactctgtcactcaggctggagtgcagtggcaccatctcggctcattgcagcctcaacctcccaggctcaagtgatcctcctgcctcagcccc

SEQ ID NO: 1094 - DNA, 120 bp, synthetic construct
  misc_feature 1..120: note = Artificially Synthesized Probe
  source 1..120: mol_type = other DNA
tcaaaaaaaaacaaaagcggagggggggaagttaaaacattgttagtaaattctgggtgaatggatggtattgcctaccaaaggctctaaatttgaggcctaaatctctgtgttaaaagg

SEQ ID NO: 1095 - DNA, 120 bp, synthetic construct
  misc_feature 1..120: note = Artificially Synthesized Probe
  source 1..120: mol_type = other DNA
attcaggatcatttaacattcacgtaccacctaaaatcataccaccattaacacaggttcccactttgggaaatactggactgaggcattgctgaaatgcacaccttattcctgtcttag

SEQ ID NO: 1096 - DNA, 120 bp, synthetic construct
  misc_feature 1..120: note = Artificially Synthesized Probe
  source 1..120: mol_type = other DNA
atttttgttgtgctaaatctttgaaatctggtgcatagtttacagcacatctcattccaatgctcagttttgacaagcataaaatgtagttctaactaaaaagttgtgtttaagaggaag

SEQ ID NO: 1097 - DNA, 120 bp, synthetic construct
  misc_feature 1..120: note = Artificially Synthesized Probe
  source 1..120: mol_type = other DNA
acaaaaaaaacacaaactagggagaagacgaccagggccaggcaagagccaggtaagtctggatggggatggaggtgagggaatctgactgggggagcgggcggtgggcggtgggcaagc

SEQ ID NO: 1098 - DNA, 120 bp, synthetic construct
  misc_feature 1..120: note = Artificially Synthesized Probe
  source 1..120: mol_type = other DNA
gcataggagcagcacagatgtttgtaaagcgtcatacttagtgtcttcatcatttgaatatccacgacgctccggattctgaataagaatagaaaacaagataaaattgtcccacgccaa

SEQ ID NO: 1099 - DNA, 120 bp, synthetic construct
  misc_feature 1..120: note = Artificially Synthesized Probe
  source 1..120: mol_type = other DNA
acatgccaggtactgttctgagcactagggattcaactatgagcaaaaaaagacaaaagccttgtcctcatggagctgacattcaacttgatgggggacaattaaataaaatgaagaagg

SEQ ID NO: 1100 - DNA, 120 bp, synthetic construct
  misc_feature 1..120: note = Artificially Synthesized Probe
  source 1..120: mol_type = other DNA
tttgttgaagattaaatcggctttttttggcagtcctgtcatgctggtaactcatttagagctaactgccaagtacatcctgatttgttgtgttgttttggcttttcctcctgaactgct

SEQ ID NO: 1101 - DNA, 120 bp, synthetic construct
  misc_feature 1..120: note = Artificially Synthesized Probe
  source 1..120: mol_type = other DNA
tacaaaacagtcctgaagcttaatcaaataaaactattgtacattagaaaaagagagctgggtgtagaaaagccaggtgtaagttccctttaagcaaaggctgctctgcagttggggcat

SEQ ID NO: 1102 - DNA, 120 bp, synthetic construct
  misc_feature 1..120: note = Artificially Synthesized Probe
  source 1..120: mol_type = other DNA
caggtcagtcggtcctggcaggggacacagtgggggacgtggcagggatgcagcagactggctggctcaggctcctctgaggcacaatgcctcagcaccgatttttatttttttttattt

SEQ ID NO: 1103 - DNA, 120 bp, synthetic construct
  misc_feature 1..120: note = Artificially Synthesized Probe
  source 1..120: mol_type = other DNA
tctgggaaaacctggcagacaagtttggcctctagagtgttacatatacagtacatatttacttatacatatgtgtttttcagaactctcctggctgccagtgacagaaaccaaactctg

SEQ ID NO: 1104 - DNA, 120 bp, synthetic construct
  misc_feature 1..120: note = Artificially Synthesized Probe
  source 1..120: mol_type = other DNA
tctgaccctaacctgagactgaaatcaccttccattatttcagacatcctccgcatagacaacctctggcagtttgagaacttgaggaagctgcagctggacaataacatcattgagaag

SEQ ID NO: 1105 - DNA, 120 bp, synthetic construct
  misc_feature 1..120: note = Artificially Synthesized Probe
  source 1..120: mol_type = other DNA
gtctcttgtcccaggtttctcatttctctgcactctagcacccattaatgctgattcatgaatgccatggttttaagcaggagctctctggcctggctgtctctcagacataaagcaagt

SEQ ID NO: 1106 - DNA, 120 bp, synthetic construct
  misc_feature 1..120: note = Artificially Synthesized Probe
  source 1..120: mol_type = other DNA
aaaggaagtgtgcaggcctggcatttgttagacccccattcaaaccccagcttggccaacatactgactttgcacaagatattccactctgtgaacctcagtttcttttttttgagatgg

SEQ ID NO: 1107 - DNA, 120 bp, synthetic construct
  misc_feature 1..120: note = Artificially Synthesized Probe
  source 1..120: mol_type = other DNA
cccaaatcaccttttaaatgtgatcaccctgtggttatcatgctcatatttccaagcccaggaaaaatgctcatttttggcctctaggccattggtgttccaggacaagataacagcccc

SEQ ID NO: 1108 - DNA, 120 bp, synthetic construct
  misc_feature 1..120: note = Artificially Synthesized Probe
  source 1..120: mol_type = other DNA
atgattggcggaactggagagggtagtgaatattggaggctgcaggaaataattcacacctggcttctaaaaaaatcacaaactattagacagtgagtcaaattctggccctggcagctt

SEQ ID NO: 1109 - DNA, 120 bp, synthetic construct
  misc_feature 1..120: note = Artificially Synthesized Probe
  source 1..120: mol_type = other DNA
tgttcctaacaaatggaggactgtcatagctgagggccttcctgcgagtgttgggatgaggggagcttgatgcagactcactgagagataactagaatttgccatccagcagaaggaaaa

SEQ ID NO: 1110 - DNA, 120 bp, synthetic construct
  misc_feature 1..120: note = Artificially Synthesized Probe
  source 1..120: mol_type = other DNA
ttcttgccacctggcttttgggctgggtgggcttctttggcttcagagatatctctgaggcagaaagtgagtaatgagataggacgctgccagctaaggtctctcatggctacagctgaa

SEQ ID NO: 1111 - DNA, 120 bp, synthetic construct
  misc_feature 1..120: note = Artificially Synthesized Probe
  source 1..120: mol_type = other DNA
aatctcctaactgaaagaggcctccctgttattttctctcagggtgccatcttgatgttccttacagcacttaactcaaagcataatggttttatttactttttaaaacatttggccggg

SEQ ID NO: 1112 - DNA, 120 bp, synthetic construct
  misc_feature 1..120: note = Artificially Synthesized Probe
  source 1..120: mol_type = other DNA
ataaagttactggaatgttcccctagctgttatccagggaatccaaggttagccataagttgggtcccatttaatttaagatatttgtaccttccatggggctttacaatctacaaaggc

SEQ ID NO: 1113 - DNA, 120 bp, synthetic construct
  misc_feature 1..120: note = Artificially Synthesized Probe
  source 1..120: mol_type = other DNA
gtttaacagatgtggacgttgaagctcacagatgttgggtaacttgttcaaggtctcaccacatggttcagcagacctgaaccatggtctgctggttctttgaaaagcccatttctgaca

SEQ ID NO: 1114 - DNA, 120 bp, synthetic construct
  misc_feature 1..120: note = Artificially Synthesized Probe
  source 1..120: mol_type = other DNA
aaaaattaaaaaattagaaaagaaaagaagttgaggaggcccaaggagggcaagcagccaggatcactggctcaaggccaagccaggattcaccctaagttggtgtcatcccaggagcaa

SEQ ID NO: 1115 - DNA, 120 bp, synthetic construct
  misc_feature 1..120: note = Artificially Synthesized Probe
  source 1..120: mol_type = other DNA
tgcaaccagactgagaaatgtataacattctggaaacagcctgcagttttatgcctctgcacctctgcacatgccattctctttgtctggaacatgctccctcctgacctgccttcctca

SEQ ID NO: 1116 - DNA, 120 bp, synthetic construct
  misc_feature 1..120: note = Artificially Synthesized Probe
  source 1..120: mol_type = other DNA
ctggcatttattgttttctcaaccaccccactaggcaggtaccatcattaaccccattttatagttggggaaacatagcttggctgtccagggtcaccccattagaggccagcttttgaa

SEQ ID NO: 1117 - DNA, 120 bp, synthetic construct
  misc_feature 1..120: note = Artificially Synthesized Probe
  source 1..120: mol_type = other DNA
aaaccatatcaccatctctaaaaaaaaccaaacacacctgacattctggaaagaatgagggcagggtggtgaggaatagtgaagagcagggctccagagctgggttgtttctgccagctg

SEQ ID NO: 1118 - DNA, 120 bp, synthetic construct
  misc_feature 1..120: note = Artificially Synthesized Probe
  source 1..120: mol_type = other DNA
tctttgtcacacaaagtgcccttgggattcaaggtcggccctaccccccaacttatcatcatcgttactattaataacagtattagtatgaccattactattttgacagtaatgattacc

SEQ ID NO: 1119 - DNA, 120 bp, synthetic construct
  misc_feature 1..120: note = Artificially Synthesized Probe
  source 1..120: mol_type = other DNA
gcgatttaattctcaagaccctccttgttatattttagggagcaggggttactgcattcaaccagaagttcaaaactgtcagcagaggaatacatttggctcacatatgtgttttatgtg

SEQ ID NO: 1120 - DNA, 120 bp, synthetic construct
  misc_feature 1..120: note = Artificially Synthesized Probe
  source 1..120: mol_type = other DNA
tattctgtactttgctttcgtgtgtgtgtgtgagcatagcatgccctgttctgtactttgctttcctatgtgtgtgtgcgtgtatgcatagcatgccctgttttgtactttgctttcgtg

SEQ ID NO: 1121 - DNA, 120 bp, synthetic construct
  misc_feature 1..120: note = Artificially Synthesized Probe
  source 1..120: mol_type = other DNA
tcacaggcttcctcatgtttgccaatctgtgcaccctgagtatgcatttattttctcttaagtggggatgagcaacacgttttacatgttttacaaccatttgtgttttttattctgtga

SEQ ID NO: 1122 - DNA, 120 bp, synthetic construct
  misc_feature 1..120: note = Artificially Synthesized Probe
  source 1..120: mol_type = other DNA
gtcagtgaaatgaatggcaaatatttttcccggtttgtgttttatcttgcaatgttgtctgtggtgcttttgccattcagaatgaaaaatttttttggctgggggaggtggttcacaact

SEQ ID NO: 1123 - DNA, 120 bp, synthetic construct
  misc_feature 1..120: note = Artificially Synthesized Probe
  source 1..120: mol_type = other DNA
ggcaggattcaaattcaggttcacctaactctgaagttgtaaggcaggtaaattttttcctctagcttatcagggtcactgactgggaccaagaattaaactgacataagacaaacgaga

SEQ ID NO: 1124 - DNA, 120 bp, synthetic construct
  misc_feature 1..120: note = Artificially Synthesized Probe
  source 1..120: mol_type = other DNA
actcaaaataatcactatgccaaagcggcatattttggtgtgaaatgctctgaaccccatgaaagccatggctccttctaccctgcctaccagcctctaataaaaacctgagcttacagg

SEQ ID NO: 1125 - DNA, 120 bp, synthetic construct
  misc_feature 1..120: note = Artificially Synthesized Probe
  source 1..120: mol_type = other DNA
cctgtttgcttttattacattttaatcatttacattggaagtgattcttgtggaaaatgagaggtgagctcattcttctgaaatggtccccctatcctggaagtcagtggggagaggttt

SEQ ID NO: 1126 - DNA, 120 bp, synthetic construct
  misc_feature 1..120: note = Artificially Synthesized Probe
  source 1..120: mol_type = other DNA
agatgggtggtctttatgctgaaggtctgtgattagaggagctggttgctaaattttgaggagtaccttttgctctgtgctggacatctaaatatgcatgttaactgtgttctttaacat

SEQ ID NO: 1127 - DNA, 120 bp, synthetic construct
  misc_feature 1..120: note = Artificially Synthesized Probe
  source 1..120: mol_type = other DNA
ttgttctcatatgagtgatgttcactaggaaatgacgccccctgtgttgcaggcaagcacactctggggttgaggcaacccccacgtggaagacactataaggagtacatcaggtgaaat

SEQ ID NO: 1128 - DNA, 120 bp, synthetic construct
  misc_feature 1..120: note = Artificially Synthesized Probe
  source 1..120: mol_type = other DNA
aaagttcaattatgtggaggcttctggcactttctaagagaagcagttacaggtagaggttgaagtctgagatttcccctggaggtcttcttaaccttagagtctgtataatgagtactg

SEQ ID NO: 1129 - DNA, 120 bp, synthetic construct
  misc_feature 1..120: note = Artificially Synthesized Probe
  source 1..120: mol_type = other DNA
aagagactccccaggaccttataccatggcctaagtctccttccatctaagcaacaaaaaatgtgacctacccttctcaggaggaaaaagtatgctctgactatatgagtaataccaaca

SEQ ID NO: 1130 - DNA, 120 bp, synthetic construct
  misc_feature 1..120: note = Artificially Synthesized Probe
  source 1..120: mol_type = other DNA
ggtgaaaaaaacctggcttctgttacctaattatcaaggagcatatcttgataagtcaccctgatgaggttatctctaaaactccactcatgcagttgagtgactgttatcagctcatga

SEQ ID NO: 1131 - DNA, 120 bp, synthetic construct
  misc_feature 1..120: note = Artificially Synthesized Probe
  source 1..120: mol_type = other DNA
cataaaacagacacacatttctccaagaaaacaccaaatggtagatgacactatggcagcaggagggcccagaagcctggaatgggaaaccatggaagctttgtcagcagcttctggggc

SEQ ID NO: 1132 - DNA, 120 bp, synthetic construct
  misc_feature 1..120: note = Artificially Synthesized Probe
  source 1..120: mol_type = other DNA
aagacctatagctacctgccccctgacctctgggaggagactgtgttcaccaagtcttcctctcagtaattcactgaccatcttgtcaagacccacaccagagtctctgtgtggaggact

SEQ ID NO: 1133 - DNA, 120 bp, synthetic construct
  misc_feature 1..120: note = Artificially Synthesized Probe
  source 1..120: mol_type = other DNA
ataaaatgaccagaagaaaacaagagaaatgctttaggacattggcctgggaaaaaattttatgaataagacctcaaaagcacagacaacaaaagcaaaaataaatggaatatatcaaac

SEQ ID NO: 1134 - DNA, 120 bp, synthetic construct
  misc_feature 1..120: note = Artificially Synthesized Probe
  source 1..120: mol_type = other DNA
ggaataagttctagtgttctataccactatgggatgactatagttgacaataatatagtttcaaatagctaaaaggaggatattgaatgttctcaacacaaagaaatgataaatgtttga

SEQ ID NO: 1135 - DNA, 120 bp, synthetic construct
  misc_feature 1..120: note = Artificially Synthesized Probe
  source 1..120: mol_type = other DNA
catgtatgtttctaagcagatttcagtttctgttgcttctcacagcttttgaagctgttttctacatattcaaactctgaggggtatgatttctctgcctggcttagagctccactatga

SEQ ID NO: 1136 - DNA, 120 bp, synthetic construct
  misc_feature 1..120: note = Artificially Synthesized Probe
  source 1..120: mol_type = other DNA
aggcctattagaaggtggttgtttctaacaactttttacaagacagcaaagtcaggaacaagagaaggcagaaggatactccaaatggaatccaaagtttggttttgttgacatgagtgg

SEQ ID NO: 1137 - DNA, 120 bp, synthetic construct
  misc_feature 1..120: note = Artificially Synthesized Probe
  source 1..120: mol_type = other DNA
aaggaactattttccccttccctcaaactggattcagtgaaagatattaaccaatgatctgatgtaaggaatcgggctttggtttcactcctcagattcacaaggatgagatcatgagga

SEQ ID NO: 1138 - DNA, 120 bp, synthetic construct
  misc_feature 1..120: note = Artificially Synthesized Probe
  source 1..120: mol_type = other DNA
agcggaaacatgcacatcaggtgaccttgtcaagcctgtccaggcttttagcccagaaacaacttctattttctactttctagagtaaatcatttgttttagaacagtaggaacaaatag

SEQ ID NO: 1139 - DNA, 120 bp, synthetic construct
  misc_feature 1..120: note = Artificially Synthesized Probe
  source 1..120: mol_type = other DNA
aggacaagacaagttgctgggtgagtggccagtgcctggctgcctcctgaccaaagccacgttccattccaataggttggctgagggcaacaggtttgtatcttgccaaaacacatgaga

SEQ ID NO: 1140 - DNA, 120 bp, synthetic construct
  misc_feature 1..120: note = Artificially Synthesized Probe
  source 1..120: mol_type = other DNA
tcatccaggaactcagaatccaccatgctacacaagctatttgaacttctgggctgcctggtcccaaactgtacaattgtaatatgtcatctgaagagtattccatactttcattgtata

SEQ ID NO: 1141 - DNA, 120 bp, synthetic construct
  misc_feature 1..120: note = Artificially Synthesized Probe
  source 1..120: mol_type = other DNA
ggcctacttgacaatacttctgctggtccttgattttgatttctgcgtgtacataaaagtaataaaagccaagtatgcataactatatttcagatgggttagctgctcccccaaagtgag

SEQ ID NO: 1142 - DNA, 120 bp, synthetic construct
  misc_feature 1..120: note = Artificially Synthesized Probe
  source 1..120: mol_type = other DNA
tagtgagacacatgacccgaacttggcaaatcagagctttccgcacccagtctagtgattggttcatggatggacatgtgacccaagccagggcaatgagattgaactcaagacttctgc

SEQ ID NO: 1143 - DNA, 120 bp, synthetic construct
  misc_feature 1..120: note = Artificially Synthesized Probe
  source 1..120: mol_type = other DNA
tgcgacctccgcctcctgacctctgcgcctggctgagaagatacattttcaagaataatcataactaaataaaacagaaaaacacaatgggggataaaaataatttttgtaattttcttc

SEQ ID NO: 1144 - DNA, 120 bp, synthetic construct
  misc_feature 1..120: note = Artificially Synthesized Probe
  source 1..120: mol_type = other DNA
catttcattagattctgaaatgacactgttttgtcacattcccacatagtattgtagtctggtctttagagcactgcctttgccttctcttttaagacccaaggacacctgccacattgt

SEQ ID NO: 1145 - DNA, 120 bp, synthetic construct
  misc_feature 1..120: note = Artificially Synthesized Probe
  source 1..120: mol_type = other DNA
cagcccattcgatgattggatcccactcattcctttgaagttccactaatgtctcgggctcctccaccctgtagctaattcattgtaaaaataaccttcattaataaaaaagtacaattc

SEQ ID NO: 1146 - DNA, 120 bp, synthetic construct
  misc_feature 1..120: note = Artificially Synthesized Probe
  source 1..120: mol_type = other DNA
tgctgctcaatcatttccattgtttctcaactttcctttggcatcactgaacaattagccaagaaacatagacacagaggagaattcagaactggagaaggacactcctagttatcagca

SEQ ID NO: 1147 - DNA, 120 bp, synthetic construct
  misc_feature 1..120: note = Artificially Synthesized Probe
  source 1..120: mol_type = other DNA
gttaagtacattgtcaaatacagttaataagacatgtattagtgatggagctcaaatctgactggaaacctttaccagctgcctcccttacaccttagaaagtagggaaatagcccatgc

SEQ ID NO: 1148 - DNA, 120 bp, synthetic construct
  misc_feature 1..120: note = Artificially Synthesized Probe
  source 1..120: mol_type = other DNA
agacactgatgagtaaaacagacatggctcctgcccttctgttgcttaccaggcagtggaagagacagacaataaatgtgcaaacataaaacaattataaattgcctaagtgctgacaaa

SEQ ID NO: 1149 - DNA, 120 bp, synthetic construct
  misc_feature 1..120: note = Artificially Synthesized Probe
  source 1..120: mol_type = other DNA
cttcaccctgtgtgatgctgacattctgataaaacctcttcctttctgtaagaaagatttttcaaagaggcagtttaaaataacgttgagacaactcaggaagcgacaggaccagcttgt

SEQ ID NO: 1150 - DNA, 120 bp, synthetic construct
  misc_feature 1..120: note = Artificially Synthesized Probe
  source 1..120: mol_type = other DNA
accctggagggattaacaaccaagagcacttctaaggaattatgcagattccctcaactgataacaaagaagtcacattttggaagctataagctataactcagtctctcacatctgtga

SEQ ID NO: 1151 - DNA, 120 bp, synthetic construct
  misc_feature 1..120: note = Artificially Synthesized Probe
  source 1..120: mol_type = other DNA
aagcttaagttaaaatttcattaattcaaatagaccatgaaaattcaggagaaattagtatgtgtgcatggacagggaagggtaatggagaagtgggcaactggttttactccaaatatt

SEQ ID NO: 1152 - DNA, 120 bp, synthetic construct
  misc_feature 1..120: note = Artificially Synthesized Probe
  source 1..120: mol_type = other DNA
gagggcccaaaattgcattccacatttgcacttactaaactaaggcccaaattgttttcccacaaaaatatgtgtgtgtctaccatgtgtcttggcacttgggatacaagagtgaataaa

SEQ ID NO: 1153 - DNA, 120 bp, synthetic construct
  misc_feature 1..120: note = Artificially Synthesized Probe
  source 1..120: mol_type = other DNA
aacaataaggtgacttctgtgatggggcaggcacgtggaacgattagtcagaattaaattgcaacttgaaggtgaggcaggaggtaccaaactttctgattgattcaatttttttttttt

SEQ ID NO: 1154 - DNA, 120 bp, synthetic construct
  misc_feature 1..120: note = Artificially Synthesized Probe
  source 1..120: mol_type = other DNA
tgaatacatggttagcagacatcaatggtaaccctgtctttaaagatgaaaaaaatcagcctagctttgtaggatcatgcagaactggcctttcctttagaaagattaccagcctcagga

SEQ ID NO: 1155 - DNA, 120 bp, synthetic construct
  misc_feature 1..120: note = Artificially Synthesized Probe
  source 1..120: mol_type = other DNA
actgctggtggaaatgtgaaatggcacagccaccttgaaaaacagtctggcagatcctccaaaagttaaacagagttaccatttgacccagtaattctactcttaggtatatgtccaaga

SEQ ID NO: 1156 - DNA, 120 bp, synthetic construct
  misc_feature 1..120: note = Artificially Synthesized Probe
  source 1..120: mol_type = other DNA
tataaaatgtcccaaacagggaaatctataaaagaacaaaggaaagtagtagttgccaagggatggaagtagtaagggtggatgatagctaaagggtgcaggtttcttttaagggtgata

SEQ ID NO: 1157 - DNA, 120 bp, synthetic construct
  misc_feature 1..120: note = Artificially Synthesized Probe
  source 1..120: mol_type = other DNA
ctcaaaaaaaaaaaaaagcatgcatgggcctgatttatgcacctcccttctcattcattcattcctattttctttcacatttgactacctaccatgtgccaggtacttccaagagcctaa

SEQ ID NO: 1158 - DNA, 120 bp, synthetic construct
  misc_feature 1..120: note = Artificially Synthesized Probe
  source 1..120: mol_type = other DNA
acagaagaagaagaaaaaaaaagaacttgacagccagaaagatcctcaaaggcaacctagtacttcaacgcatggagaaaaatgaggaagtagttgcatgcccaagatcacacagacctc

SEQ ID NO: 1159 - DNA, 120 bp, synthetic construct
  misc_feature 1..120: note = Artificially Synthesized Probe
  source 1..120: mol_type = other DNA
attcagagcccaaacttccccttttgaaaacaaagatgacacctgctttccttattaaagggagggcagccataagctttgagaaaacctgcacaggccaaatatcaattactgtatcgt

SEQ ID NO: 1160 - DNA, 120 bp, synthetic construct
  misc_feature 1..120: note = Artificially Synthesized Probe
  source 1..120: mol_type = other DNA
ccttctccactttgccgatgatcttctcctcaaagacgggcaggacggcctcgtcctctcgaacctcctcaaacaccaccccacagtcaaactcgtcgctcactttcttgaagtagtatc

SEQ ID NO: 1161 - DNA, 120 bp, synthetic construct
  misc_feature 1..120: note = Artificially Synthesized Probe
  source 1..120: mol_type = other DNA
tctcagtcctgtggggccgaaagcctgatgccaccctcagcctagggcttggagaagtggctttagttgcagatgagggacatgagctgaaatggccggaagccctttttcttctttttt

SEQ ID NO: 1162 - DNA, 120 bp, synthetic construct
  misc_feature 1..120: note = Artificially Synthesized Probe
  source 1..120: mol_type = other DNA
tctaggatggcagggcaggctgcagggctcctatctcaggaagacctacggcccccaaaccttaaaaacatctgaagggcagggattggacaaacagaactgtgcacgatttctggataa

SEQ ID NO: 1163 - DNA, 120 bp, synthetic construct
  misc_feature 1..120: note = Artificially Synthesized Probe
  source 1..120: mol_type = other DNA
ggccttttggtcacttgtcatcatgctggacagtcagcgtctcctttgatggagacaggagaaggctctcgggcagcttcgagtctgatgccacgggaccctctcctgccacagctgctt

SEQ ID NO: 1164 - DNA, 120 bp, synthetic construct
  misc_feature 1..120: note = Artificially Synthesized Probe
  source 1..120: mol_type = other DNA
cttgatggtggtttctactctgacatcctgacagggcccagcacccaacctgcctctgggccttcactccgtctccacagcttctcgcaaaaacccacatcccctggacggacaaaccca

SEQ ID NO: 1165 - DNA, 120 bp, synthetic construct
  misc_feature 1..120: note = Artificially Synthesized Probe
  source 1..120: mol_type = other DNA
acactgatctgtggggaattccaatgacccaggatggccgagaaaactggccttatgagcaagctgaaaatggagaagccaggttctggcctggagcgaaaatgctgcccacacaaaggg

SEQ ID NO: 1166 - DNA, 120 bp, synthetic construct
  misc_feature 1..120: note = Artificially Synthesized Probe
  source 1..120: mol_type = other DNA
tggtggggctacactcatctcacaagggcagcctccttgagggataggatgggatggggcactggggcctggccaccaagccacatggacgtcctccacagaccacacaataaaaacatc

SEQ ID NO: 1167 - DNA, 120 bp, synthetic construct
  misc_feature 1..120: note = Artificially Synthesized Probe
  source 1..120: mol_type = other DNA
tggctcacgcctgtaatcccagcactttgggaggctgaggagggcggatcacgaggtcaagagatcgagaccgtcctggctaacacggtgaaaccccacctctactaaaaaaatacaaaa

SEQ ID NO: 1168 - DNA, 120 bp, synthetic construct
  misc_feature 1..120: note = Artificially Synthesized Probe
  source 1..120: mol_type = other DNA
taatgaataaaaagtataagtatgtctcaaagtggaatgtattaatacttatcctaaaatatgggacatgcaatatttagtatatacagctatttaaaaaaaggattcggccgggcacgg

SEQ ID NO: 1169 - DNA, 120 bp, synthetic construct
  misc_feature 1..120: note = Artificially Synthesized Probe
  source 1..120: mol_type = other DNA
tgatctccttttccccctcaatgatccactgcatgattttctggttcttctccgcatcctccgaggcacctggcacctcggtgctggcgctcttccccgactcagccttcttggcatttc

SEQ ID NO: 1170 - DNA, 120 bp, synthetic construct
  misc_feature 1..120: note = Artificially Synthesized Probe
  source 1..120: mol_type = other DNA
aacactctctgagtagcctcgggaccttgccccatggctgtgtggttccaggccccaggcgaagctgctctgggccctgcgggtggcctcggcctccacctgctccttgggccgggctgt

SEQ ID NO: 1171 - DNA, 120 bp, synthetic construct
  misc_feature 1..120: note = Artificially Synthesized Probe
  source 1..120: mol_type = other DNA
ccattatattttaaggagaaccttgtacagaacggctcttgggttatgtacatgttgtgatgctgcctgacgagcttccacatgaagccggtggagtttcacttgattctccaagttaac

SEQ ID NO: 1172 - DNA, 120 bp, synthetic construct
  misc_feature 1..120: note = Artificially Synthesized Probe
  source 1..120: mol_type = other DNA
ctccgtctcccgggttcacaccattctcctgcctcagcctgcccagtagctgggactacaggtgcccgccaccacgcccggctaattttttatatttttagtagagatggagtttcaccg

SEQ ID NO: 1173 - DNA, 120 bp, synthetic construct
  misc_feature 1..120: note = Artificially Synthesized Probe
  source 1..120: mol_type = other DNA
cgagctccacatcggcaggaattctatcatggggctgtgaaatgttacagattaacttaaccactcggctaatggtttttgttttcttctttgtgctttaatttcccaaatttcacaatg

SEQ ID NO: 1174 - DNA, 120 bp, synthetic construct
  misc_feature 1..120: note = Artificially Synthesized Probe
  source 1..120: mol_type = other DNA
acaaaaatattttttttaaaaaatgtctcactcaaaatgggaacctgccctactagaagcacaccctgcgaacgggtgaaggcgcaaagatcagaaaattacagacggccaacatgacag

SEQ ID NO: 1175 - DNA, 120 bp, synthetic construct
  misc_feature 1..120: note = Artificially Synthesized Probe
  source 1..120: mol_type = other DNA
aggagagctgaaggtctgcattttacatcaaggatcaggtgaatggaaacgctcagaagtgtatacattttctaagtattcatattcacgaacattgaaaggagaatgaaggaccacccc

SEQ ID NO: 1176 - DNA, 120 bp, synthetic construct
  misc_feature 1..120: note = Artificially Synthesized Probe
  source 1..120: mol_type = other DNA
agcctaatttttcgtggccatgtgaaagggacctgtttttagctgaactaagcaaagagtcctacaacacaagtgcctagagggccgtgcaccatggcctcaaggaaccaaaagtgacca

SEQ ID NO: 1177 - DNA, 120 bp, synthetic construct
  misc_feature 1..120: note = Artificially Synthesized Probe
  source 1..120: mol_type = other DNA
gtacgtgcgctgcgagggacaggactgtgaggcacgggggttgaaaggtcacaggctaaacatttctttgtgaagggaaagagcgtgtgctatctctgttgtattttattttattttttt

SEQ ID NO: 1178 - DNA, 120 bp, synthetic construct
  misc_feature 1..120: note = Artificially Synthesized Probe
  source 1..120: mol_type = other DNA
ctttcaagggtacttcattttaaatttcaaacttcaaaacagctgcaaaaatagaacaaggaattcccgtccaccttcacccagattccccaagggctcacattctgccataactgcttt

SEQ ID NO: 1179 - DNA, 120 bp, synthetic construct
  misc_feature 1..120: note = Artificially Synthesized Probe
  source 1..120: mol_type = other DNA
ctcatctacacaatgagagtagaaacagcatctaaacctgagaaggatggggtgagactggacacaggggccacacaaaaggcctcctccaggctcagatgttccacagtagacgaggct

SEQ ID NO: 1180 - DNA, 120 bp, synthetic construct
  misc_feature 1..120: note = Artificially Synthesized Probe
  source 1..120: mol_type = other DNA
aacctctccagctttagaggaacagaaaaaaatatcataaaggaaaaagccaagtaaatgaaaacgtgaaacttccaagtaattgtaaaggctaaagatgaagaggcccctccccgcagg

SEQ ID NO: 1181 - DNA, 120 bp, synthetic construct
  misc_feature 1..120: note = Artificially Synthesized Probe
  source 1..120: mol_type = other DNA
gagtcaagggttggctggcatcttctcagaagtgataacaaaccaacatcctttcttttcaaccataaagaaattcctgacttggaaactgatgtctgcagaaaagctaaaaggctaaga

SEQ ID NO: 1182 - DNA, 120 bp, synthetic construct
  misc_feature 1..120: note = Artificially Synthesized Probe
  source 1..120: mol_type = other DNA
aaaacacttttctcatcttcccgtaacatctttcctgttcaaagtcaacccatcaaaataaggaaagatcattaatctgttcatcagcgcaggaatgctctgtagacggagtcaggctgt

SEQ ID NO: 1183 - DNA, 120 bp, synthetic construct
  misc_feature 1..120: note = Artificially Synthesized Probe
  source 1..120: mol_type = other DNA
aaagataggagatgccaaggctgcacactctgcttctctccaggagctggcagggcagtgtggtctctgagggaggcacaaggtagctctttagcaacaggttttcttttatttttttct

SEQ ID NO: 1184 - DNA, 120 bp, synthetic construct
  misc_feature 1..120: note = Artificially Synthesized Probe
  source 1..120: mol_type = other DNA
agcccgcaacaggttttctttatgaaccctttagaagatcattaaaacacgaaagtcagattatacatggtctgaataattaccccagggttaagataactcacgcacaaccatccttca

SEQ ID NO: 1185 - DNA, 120 bp, synthetic construct
  misc_feature 1..120: note = Artificially Synthesized Probe
  source 1..120: mol_type = other DNA
cactgcttcaactccagtaacctcaagtcaggtgctgctaaaatcacgtcaacattttattttgaagattcaaaattaaacgaggatgaaagaaaccaggagaagccacacacagcagct

SEQ ID NO: 1186 - DNA, 120 bp, synthetic construct
  misc_feature 1..120: note = Artificially Synthesized Probe
  source 1..120: mol_type = other DNA
tgtctcaaaatgaaaagaaccataaaaatggtacatacagtgggaccatcacttaaaacatattcataaaaagatgggcagaatcaccagtaggtgagaagtccctctctcctcctccag

SEQ ID NO: 1187 - DNA, 120 bp, synthetic construct
  misc_feature 1..120: note = Artificially Synthesized Probe
  source 1..120: mol_type = other DNA
aatatctcaatgtattaattaaaaacacaagcaatttggagaaaataaggagcatggagaaaagaccaacatctccacctgtcctcttgtccctctgtccttttcaacggggtgcattaa

SEQ ID NO: 1188 - DNA, 120 bp, synthetic construct
  misc_feature 1..120: note = Artificially Synthesized Probe
  source 1..120: mol_type = other DNA
gacaccttttttcaatctgcacttccctgattaatggtcagattggcagtttagcgtatttgtcatttaaacttcttcctctttatctgttcatatggtttaccattttctatggggtgg

SEQ ID NO: 1189 - DNA, 120 bp, synthetic construct
  misc_feature 1..120: note = Artificially Synthesized Probe
  source 1..120: mol_type = other DNA
attgcaccctgacagtcgtcagcctcacagggggtttatcacagtgcacccttacaatcattccatttgattcacaatttttttagtctctactgtgcctaacttgtaagttaaatttga

SEQ ID NO: 1190 - DNA, 120 bp, synthetic construct
  misc_feature 1..120: note = Artificially Synthesized Probe
  source 1..120: mol_type = other DNA
ctcctctctgtacctgacatagagcagataaaatgataccagcctgcagcttcaggctctttgctttaagcatcatgcagtatttataaatgacaccattattcctttgatacttaaagc

SEQ ID NO: 1191 - DNA, 120 bp, synthetic construct
  misc_feature 1..120: note = Artificially Synthesized Probe
  source 1..120: mol_type = other DNA
aattccaaatccttctcccactctgacttcccaggtgtgcctttcacatttttggaaaacctgtttgtctttaaaatgagaagcaggagaaacgcaggtttcccattttccacaagctcc

SEQ ID NO: 1192 - DNA, 120 bp, synthetic construct
  misc_feature 1..120: note = Artificially Synthesized Probe
  source 1..120: mol_type = other DNA
aaccattctatattcttctacttgtgtaagcagcctgccttttaaaaaggtagcataacaatttttccttttaatgaggctgtctggtccggttacatttagtgtgatgtggagggagct

SEQ ID NO: 1193 - DNA, 120 bp, synthetic construct
  misc_feature 1..120: note = Artificially Synthesized Probe
  source 1..120: mol_type = other DNA
tggtttcatggagaaatttagaaacaggtcaagcttcacagcatccctccacatcccttaacacacacgtgcaaatttgagagagttccagctttcctcatcaattacctttaaaattac

SEQ ID NO: 1194 - DNA, 120 bp, synthetic construct
  misc_feature 1..120: note = Artificially Synthesized Probe
  source 1..120: mol_type = other DNA
taaaagtaagttctgatggttttgcttaagcagcacaggtcagtacaccacgtaaaataattatagccattttgaaaggcaaatcgcctttttctccaaccacagagctcctcaactcac

SEQ ID NO: 1195 - DNA, 120 bp, synthetic construct
  misc_feature 1..120: note = Artificially Synthesized Probe
  source 1..120: mol_type = other DNA
ggaccctcttcattttctggagctgtgggcggtggacggatgagtgcatcctttagagcccagacactggcagacacaaaagcctggcaagaagcaacacaggcagaaaaggcctctgag

SEQ ID NO: 1196 - DNA, 120 bp, synthetic construct
  misc_feature 1..120: note = Artificially Synthesized Probe
  source 1..120: mol_type = other DNA
acacacacaccaacaaaacaaaacactgaggggtgtgacttgggttctcacctgcgtctctctaggagcataagcacaggtcttcaccactgtgggtgcaaagggaaaaggtgtcaactg

SEQ ID NO: 1197 - DNA, 120 bp, synthetic construct
  misc_feature 1..120: note = Artificially Synthesized Probe
  source 1..120: mol_type = other DNA
aggtggtcagtaggcgcttccagtgttatcacaagaccacacgccgcacgtcagcacatgacacagacacacttacttgatccctgttttgacaagctaagtcgtactttataccaggag

SEQ ID NO: 1198 - DNA, 120 bp, synthetic construct
  misc_feature 1..120: note = Artificially Synthesized Probe
  source 1..120: mol_type = other DNA
catcttctctcatgacggggccttcggaaacaccaagaaacgaccaaagcagacaggcactgggagaagcaggacaagcatttcctcacctcacatgaacttccatatgaatgtgacaaa

SEQ ID NO: 1199 - DNA, 120 bp, synthetic construct
  misc_feature 1..120: note = Artificially Synthesized Probe
  source 1..120: mol_type = other DNA
gtgacagagtgggatcaaaaaaaaaaaaaaagtgatcaaaatcaggccaccgtcagctatgaaaatctctattttacttcctccataaaatcagggatgtggcctctgcctgaagcgtca

SEQ ID NO: 1200 - DNA, 120 bp, synthetic construct
  misc_feature 1..120: note = Artificially Synthesized Probe
  source 1..120: mol_type = other DNA
caaatgcccctcaccagcacttactggctactgaccacaggcagtctgccaattcctagcttacaaagcggaaatgacagtggccacttctttataaagtttctgagcatttcagcaaac

SEQ ID NO: 1201 - DNA, 120 bp, synthetic construct
  misc_feature 1..120: note = Artificially Synthesized Probe
  source 1..120: mol_type = other DNA
aaaaaataataataaattaaatacttaacaagaacagcatattcacaggaacccaaacactcatgattttgaaaggcacatggcaacgggtgctacagacaggagagatggcaggcaggg

SEQ ID NO: 1202 - DNA, 120 bp, synthetic construct
  misc_feature 1..120: note = Artificially Synthesized Probe
  source 1..120: mol_type = other DNA
catacagagtgggtaacatgaattaggatcccatttttgatgaaaaaaatgtgctaagaaaaatctagagcgatctagatagaatagtagtatctctgagcagtgggatatcagaccatt

SEQ ID NO: 1203 - DNA, 120 bp, synthetic construct
  misc_feature 1..120: note = Artificially Synthesized Probe
  source 1..120: mol_type = other DNA
tgaagaacactttgaaaattataatgcaccaaagaactcactaatgagactcactagttagtgctcagcacaatcagttatgaaactgacgacctctttcctctgctcagcgtgaacacc

SEQ ID NO: 1204 - DNA, 120 bp, synthetic construct
  misc_feature 1..120: note = Artificially Synthesized Probe
  source 1..120: mol_type = other DNA
ctccaaagcagctgtgtccagtttccttgactctgagtgtgcagcaggaagaagcctctgtctggaaagaaacactctgaggcagaaatagaaaatctttatttttatgagatatttaat

SEQ ID NO: 1205 - DNA, 120 bp, synthetic construct
  misc_feature 1..120: note = Artificially Synthesized Probe
  source 1..120: mol_type = other DNA
gatggtggtggaccagcaacaactgagggccccacggtccaaggacagtttagagaactcgcagcagcaacatcacaatcacaagtaaagcatatttaacttttagaaacaggatataaa

SEQ ID NO: 1206 - DNA, 120 bp, synthetic construct
  misc_feature 1..120: note = Artificially Synthesized Probe
  source 1..120: mol_type = other DNA
ccagcaaaacacagtattatgaaataacactgttgataaagaaaacatccaaaaaatgtctggagggaagaaaaaaagcaccatccacaccgtatgaagagaatggagccaggtctttcc

SEQ ID NO: 1207 - DNA, 120 bp, synthetic construct
  misc_feature 1..120: note = Artificially Synthesized Probe
  source 1..120: mol_type = other DNA
acccagtaccatggcatgctaattacacagcacccaataccacggcatgccaataatgcagcacccagtaccacggcaagctaattacacagcacccagtaccacaacacaccaataaca

SEQ ID NO: 1208 - DNA, 120 bp, synthetic construct
  misc_feature 1..120: note = Artificially Synthesized Probe
  source 1..120: mol_type = other DNA
tttttgttcaccatggaaatgctttatctttgtggtatctccaacataactccacactgcaccacgaagctataaattccaaagctaatggaatttccaagcaaaggtgcaagcctgaca

SEQ ID NO: 1209 - DNA, 120 bp, synthetic construct
  misc_feature 1..120: note = Artificially Synthesized Probe
  source 1..120: mol_type = other DNA
tagcagtgagcacgttactcagaaaaggcactaaggaccgaaccgtgtcgcccaattaatatgtgtcagccctgaccatcacgtggctgtgcttgaagtaaggaagtgttattgttagat

SEQ ID NO: 1210 - DNA, 120 bp, synthetic construct
  misc_feature 1..120: note = Artificially Synthesized Probe
  source 1..120: mol_type = other DNA
aagcccacatatccaactgtatgaatgccactgggcattcaagtcatcctatttgctggaatattacaagcagcactccttagggttattttaaatgtttgtttaggagcagacaccaat

SEQ ID NO: 1211 - DNA, 120 bp, synthetic construct
  misc_feature 1..120: note = Artificially Synthesized Probe
  source 1..120: mol_type = other DNA
acagatactttcgtggactctgctgaaacctgtctgagactatggagctttacgtggctaaggaagagaaaaaatatgtttggagtccttgcccactgacaggtgcataaaaatacaaga

SEQ ID NO: 1212 - DNA, 120 bp, synthetic construct
  misc_feature 1..120: note = Artificially Synthesized Probe
  source 1..120: mol_type = other DNA
tcgagaccatcctggctaacaaggtgaaaccccgtctctactaaaaatacaaaaaaaaaaaaaattagccgggcgtggtgacacgcgcctgtagtcccagctgctgaggaggctgaggca

SEQ ID NO: 1213 - DNA, 120 bp, synthetic construct
  misc_feature 1..120: note = Artificially Synthesized Probe
  source 1..120: mol_type = other DNA
tctttttttttttaaccatttcttctcttaaccttttaggccattaccagaaacacagtcaataaactaatgagcaggtccgacggttcctcacgcacccctgcgggaacctgaacggca

SEQ ID NO: 1214 - DNA, 120 bp, synthetic construct
  misc_feature 1..120: note = Artificially Synthesized Probe
  source 1..120: mol_type = other DNA
gagcgggaaccgcggctgcatgcgcttgcaggccagctggagtcccgggtgggcgtgggcttggtgggcccggcactcagagcagccggccagccctgccggccgcgggcaatgaggggc

SEQ ID NO: 1215 - DNA, 120 bp, synthetic construct
  misc_feature 1..120: note = Artificially Synthesized Probe
  source 1..120: mol_type = other DNA
cggctctccacaggatatgcatcccctaacacgtgaggcctaagctccaggccctgctgtggtagcaatgctcaccagccgcctgttcagtacccactctccttttccctttgcattacc

SEQ ID NO: 1216 - DNA, 120 bp, synthetic construct
  misc_feature 1..120: note = Artificially Synthesized Probe
  source 1..120: mol_type = other DNA
acccaaactgtgtagacagagctacacaaaattagacaggagaagccaatgtatcccactaatttcatagcaaaggttccttattacaaatacagcaaaccaaggacagacagcaaagct

SEQ ID NO: 1217 - DNA, 120 bp, synthetic construct
  misc_feature 1..120: note = Artificially Synthesized Probe
  source 1..120: mol_type = other DNA
agtttataccaggcttactcaacaggataactttgcggcatattgtgtcctaaaatgcttgctaaataaataccacttggctaaagacaatgaacaaaagggaaaaaaggccgggcgtgg

SEQ ID NO: 1218 - DNA, 120 bp, synthetic construct
  misc_feature 1..120: note = Artificially Synthesized Probe
  source 1..120: mol_type = other DNA
ccactatagccacaggaagttttcaaagtactctgaccattccccacacgtaaaacgtcccccctgctatttctcagcctgtaggaagaagcttagaagatcattataaaagcaataatc

SEQ ID NO: 1219 - DNA, 120 bp, synthetic construct
  misc_feature 1..120: note = Artificially Synthesized Probe
  source 1..120: mol_type = other DNA
tgttctcaacattacaaatataaaaaagtaatgacaaatgcaaaagtatcacaaataagaacagaaccaaaattcaaccccagcggcagcaggacatccggtgtgggttaacgcccgcct

SEQ ID NO: 1220 - DNA, 120 bp, synthetic construct
  misc_feature 1..120: note = Artificially Synthesized Probe
  source 1..120: mol_type = other DNA
caatcaagatatattttggccacaagcatagttctactttaaagcaatttctggaaacttttacaactacaggaatgcctctcatgctaagaagggatgcccaggacatgggaatgccac

SEQ ID NO: 1221 - DNA, 120 bp, synthetic construct
  misc_feature 1..120: note = Artificially Synthesized Probe
  source 1..120: mol_type = other DNA
tgggtacttcaaggaacagagaaggtacagaataaaaggaaatgcaaatacaatttttagctaaggaagctatagttcatgtgacttcactccttaagctgaaaaccaaaccacccaccc

SEQ ID NO: 1222 - DNA, 120 bp, synthetic construct
  misc_feature 1..120: note = Artificially Synthesized Probe
  source 1..120: mol_type = other DNA
ataaaattagtaaataaataagaagcacccatagatggaggatggtttgcaactatgtgcccccaatgacatttcagcagctaaggactttttgtgaacgctgctgggtagtatgtcatc

SEQ ID NO: 1223 - DNA, 120 bp, synthetic construct
  misc_feature 1..120: note = Artificially Synthesized Probe
  source 1..120: mol_type = other DNA
aaattttcttacaatcatgtgtatttttggctgtcaactgacagaagactttttggtgtccctggaagcacatgaacccctctacaagctactgatgttgttgaaacatgtcccaattcc

SEQ ID NO: 1224 - DNA, 120 bp, synthetic construct
  misc_feature 1..120: note = Artificially Synthesized Probe
  source 1..120: mol_type = other DNA
aaatagggcctgtggatccaagtaagctcgagattcttcctgaagaagcagagaacagaagtgtgagcaaaaacaaggggctgacatgcacataagaaccctttataaattatcttagaa

SEQ ID NO: 1225 - DNA, 120 bp, synthetic construct
  misc_feature 1..120: note = Artificially Synthesized Probe
  source 1..120: mol_type = other DNA
tgccaagctgaaagtttcactgctcgggcagtgcagctctggtttcacgggggctaaattccaaagtgcggggcgggggtagaatctaagaaccacacccaagagaaagaccagtgtttg

SEQ ID NO: 1226 - DNA, 120 bp, synthetic construct
  misc_feature 1..120: note = Artificially Synthesized Probe
  source 1..120: mol_type = other DNA
ctgcagccaggcctctgggtccccgagcctggaatggattctctaaccctatcgacatatacagtataggcttcaaagtgtaaagggcagggtggaggaagacttagtgcctctaaaacc

SEQ ID NO: 1227 - DNA, 120 bp, synthetic construct
  misc_feature 1..120: note = Artificially Synthesized Probe
  source 1..120: mol_type = other DNA
ctgatcagagatctggagagtccctcctggttaaaccacccattcccagggtctcactgtacctcccccatcacctgtccatccaagagccaggtttctatgcccatctccattccctta

SEQ ID NO: 1228 - DNA, 120 bp, synthetic construct
  misc_feature 1..120: note = Artificially Synthesized Probe
  source 1..120: mol_type = other DNA
atgcctaaactccctctttcttgcctgtcaacttcatgctaacactcacctgccctgttcttctggtccatgtccatcacccacctcaactccagagctcaggctgtgggagactataaa

SEQ ID NO: 1229 - DNA, 120 bp, synthetic construct
  misc_feature 1..120: note = Artificially Synthesized Probe
  source 1..120: mol_type = other DNA
aaaaaaaaaaaatacaaaagtaaaatacaaaaaattactggccaggcatggtggctcacacctgtaatcccagcactttgagaggccgaagcaggtggaacacgaagtcaggagttccag

SEQ ID NO: 1230 - DNA, 120 bp, synthetic construct
  misc_feature 1..120: note = Artificially Synthesized Probe
  source 1..120: mol_type = other DNA
ctaaatacagtgcctgctagagagtaaacacactgtaagtaacagctggtataactatttctggaccctagtatgactatcaggccaagcactttcaacttttttttttttgaaatgggc

SEQ ID NO: 1231 - DNA, 120 bp, synthetic construct
  misc_feature 1..120: note = Artificially Synthesized Probe
  source 1..120: mol_type = other DNA
atcaccttatgacttccctagtagccttttctatacctctcgtgtgggaaactcactgcctcaagcagcagaccctctccaactttaataaattccattgttacaattttatgttggata

SEQ ID NO: 1232 - DNA, 120 bp, synthetic construct
  misc_feature 1..120: note = Artificially Synthesized Probe
  source 1..120: mol_type = other DNA
attaataacattattacaaactgtgatggggccatgaagaaaataatcaggatagagaataaaagggaatggaattaagaatggtaactttagctatggtggtcagggaaggcctctctg

SEQ ID NO: 1233 - DNA, 120 bp, synthetic construct
  misc_feature 1..120: note = Artificially Synthesized Probe
  source 1..120: mol_type = other DNA
tccaggtacctcttcccttcctttctcctctagggcccaccagctctgagcagatcatgaagacaggggcccttttgcttcaggggtgagtttgaggtctgattattgtggcacagattt

SEQ ID NO: 1234 - DNA, 120 bp, synthetic construct
  misc_feature 1..120: note = Artificially Synthesized Probe
  source 1..120: mol_type = other DNA
ggacacagcactgtacaaagcaggctacatccctgctctcagggagttcacgtgcaggggtgaagtaaagtgggcagtgtgatttagcagagtggtcaggaaagatttctattttttttt

SEQ ID NO: 1235 - DNA, 120 bp, synthetic construct
  misc_feature 1..120: note = Artificially Synthesized Probe
  source 1..120: mol_type = other DNA
accactgcacccagcctggaaagactttaactttactctgagtgtgatgggagtgattggctggttttaaatacggaagcgacaagacctgatttataactttaagagattattctagca

SEQ ID NO: 1236 - DNA, 120 bp, synthetic construct
  misc_feature 1..120: note = Artificially Synthesized Probe
  source 1..120: mol_type = other DNA
acttttcattatgaagattctcataagaaaatgtggtgggggtggtggtgaaatgctcctggctgttgttggccaaaagagatcatgaggcacaagggcagaagcgaggatcctggagag

SEQ ID NO: 1237 - DNA, 120 bp, synthetic construct
  misc_feature 1..120: note = Artificially Synthesized Probe
  source 1..120: mol_type = other DNA
cctgagagctgaagggtaagaatttgcttcgtcgaggcctgtttaggcggaaacaggagtacatgaagaagtcccgaggcaggaagaatttgatgggaatttaaaaaattaaaaaaaaaa

SEQ ID NO: 1238 - DNA, 120 bp, synthetic construct
  misc_feature 1..120: note = Artificially Synthesized Probe
  source 1..120: mol_type = other DNA
cttgtgggctgcactgtgccttcgggtcttcatcctgagggtactggggagccacagaaggctcaggggtggggcagttgagagtaacattatcttgtttacaattttattttttttatt

SEQ ID NO: 1239 - DNA, 120 bp, synthetic construct
  misc_feature 1..120: note = Artificially Synthesized Probe
  source 1..120: mol_type = other DNA
ttgacttgattagtgccttctgccctccctggagcctccactgcctctggaattgctcaagttcattgatgaccctctgaccctagctctttcctttttttttttttccccactgagaag

SEQ ID NO: 1240 - DNA, 120 bp, synthetic construct
  misc_feature 1..120: note = Artificially Synthesized Probe
  source 1..120: mol_type = other DNA
actttcacacttaaaatggtaatgataacaacaatgctaccttttaccgaggtttactaggagcccacgctagcccccatacgtgcactacccactgtcttctttaaacttcaaagaaat

SEQ ID NO: 1241 - DNA, 120 bp, synthetic construct
  misc_feature 1..120: note = Artificially Synthesized Probe
  source 1..120: mol_type = other DNA
tttaaatgtaaacagccacaggtagctaatggctatcttattggacagggaaggatgcagaggtttcatctttctcccttgcttggtcagccctgcttttcccactctccagggtgattt

SEQ ID NO: 1242 - DNA, 120 bp, synthetic construct
  misc_feature 1..120: note = Artificially Synthesized Probe
  source 1..120: mol_type = other DNA
acatgcgacctctgtagttgagggtcaggatcccacatgggctcactttcctcttaagtgactataaatgagggcctgggtatgaataaagttctctttttcttcttttttaaaaaatca

SEQ ID NO: 1243 - DNA, 120 bp, synthetic construct
  misc_feature 1..120: note = Artificially Synthesized Probe
  source 1..120: mol_type = other DNA
tttcttggatcaggctggagcaagcagtggggaaggtcagagcaggcaacaatttccataaatgtttgggaaacaacatttcctcttgctttcagagggggagaagagttggaaaggaga

SEQ ID NO: 1244 - DNA, 120 bp, synthetic construct
  misc_feature 1..120: note = Artificially Synthesized Probe
  source 1..120: mol_type = other DNA
taccataacaagttgaaacatgacagaagaaaggaaaaagcattatatttgagtaacttaaatcgcactttgttcctgctctttgaacatggggccccacattttgcactgggatccgca

SEQ ID NO: 1245 - DNA, 120 bp, synthetic construct
  misc_feature 1..120: note = Artificially Synthesized Probe
  source 1..120: mol_type = other DNA
tcaggcaatccagatctgggccaggtttctcccacagaacttgtggtcctagaaggctctctttttagaaaaaaaaaacaagaactaatccttctccactgagaataaataaaggcaaca

SEQ ID NO: 1246 - DNA, 120 bp, synthetic construct
  misc_feature 1..120: note = Artificially Synthesized Probe
  source 1..120: mol_type = other DNA
taaacctcttaagatctcttaaaatgtgagttccatgttgggaaatggaagacagggggtggggtcagttttccatgaaaactagggaaaattagatgtgatgcaaagactggggatttt

SEQ ID NO: 1247 - DNA, 120 bp, synthetic construct
  misc_feature 1..120: note = Artificially Synthesized Probe
  source 1..120: mol_type = other DNA
atttttttttctagagttagatgagttgattttaaattccctttgtaagaacagaaagacaagaatggccaggaaagaaaaactaagaaagagtggaggggaggaggctggggaggggac

SEQ ID NO: 1248 - DNA, 120 bp, synthetic construct
  misc_feature 1..120: note = Artificially Synthesized Probe
  source 1..120: mol_type = other DNA
acactcccaatgacacactggcaaaaatatgaacaagaagtatgtacaaagctgttcactgcaatcctatctgtaataccaaaatactggaaaaatccaaatacctcccaggaggggact

SEQ ID NO: 1249 - DNA, 120 bp, synthetic construct
  misc_feature 1..120: note = Artificially Synthesized Probe
  source 1..120: mol_type = other DNA
atgcctatttccaagtctgaccactgaaaagatctagaagcaatggccaacttagcgacaatgaacatttttagcctcagatttgggtctctaacaaccatctttcactaaaagaatggg

SEQ ID NO: 1250 - DNA, 120 bp, synthetic construct
  misc_feature 1..120: note = Artificially Synthesized Probe
  source 1..120: mol_type = other DNA
taggcttggaaactatggtgaaatgaaagattttataggagacaaatctataccaaggcttattgcagtttccaagcctacggtaccacctataacagatgaaaatggaccccagtagga

SEQ ID NO: 1251 - DNA, 120 bp, synthetic construct
  misc_feature 1..120: note = Artificially Synthesized Probe
  source 1..120: mol_type = other DNA
ttttatttatatctataataaaacaatggctctaggcaataacaataatcaaatggctatgaccttcacaaaatgcgaccagcagccgttctgcatctcctggtggagtacacatcacca

SEQ ID NO: 1252 - DNA, 120 bp, synthetic construct
  misc_feature 1..120: note = Artificially Synthesized Probe
  source 1..120: mol_type = other DNA
cacataatcaatgctttaagtttgtggaattgaataaacttgaagacatacattaagtgagcagtaacacaaacagctgcttacatgagcgcgttgatcaaccgacatacgctgtgggag

SEQ ID NO: 1253 - DNA, 120 bp, synthetic construct
  misc_feature 1..120: note = Artificially Synthesized Probe
  source 1..120: mol_type = other DNA
ccatctccacagctcctctcaaaacaaacccagccaaattaaacaagcgtacagaagagcaataggaaagatgttctaaagggctacactctccagaagagctaaattaaaactaatcca

SEQ ID NO: 1254 - DNA, 120 bp, synthetic construct
  misc_feature 1..120: note = Artificially Synthesized Probe
  source 1..120: mol_type = other DNA
gtcctctcccctctacttatacctgccatctcgtctctactcacccctctactcaccgctgtctcactcccctctactcactcctctactcaccctgccatctctgctctactcaccact

SEQ ID NO: 1255 - DNA, 120 bp, synthetic construct
  misc_feature 1..120: note = Artificially Synthesized Probe
  source 1..120: mol_type = other DNA
cctactcatccctgccctctcccttctattcactcctgtcctctcccctctacttgccccagtcctctcccctctactcagccctgcctcctctgttctacttacccctctactcaaccc

SEQ ID NO: 1256 - DNA, 120 bp, synthetic construct
  misc_feature 1..120: note = Artificially Synthesized Probe
  source 1..120: mol_type = other DNA
tatactcaaccctgtcgtctcccctctactcatgcctgctatctcccatctactcaccactctactcatccctgtcctgtgtctgccctctactgacccctgttctctcccctctactca

SEQ ID NO: 1257 - DNA, 120 bp, synthetic construct
  misc_feature 1..120: note = Artificially Synthesized Probe
  source 1..120: mol_type = other DNA
gttctctcccctctactcaccctgccctctcccctctacgtacccctgccatctcccctctactcaccccaccctctcccttctactcaccctcatcctctcctctctactcacccctac

SEQ ID NO: 1258 - DNA, 120 bp, synthetic construct
  misc_feature 1..120: note = Artificially Synthesized Probe
  source 1..120: mol_type = other DNA
caggtaccattcccagctttcaactttacttcattttcatcatcttcattcccaccccccaggtaacctttctccagctctgaggagaaaggttaggtgatggagagatttattatcact

SEQ ID NO: 1259 - DNA, 120 bp, synthetic construct
  misc_feature 1..120: note = Artificially Synthesized Probe
  source 1..120: mol_type = other DNA
ataaagaaactgaggccacagttagtgttccagccaggatcaattcagtgttgtttctacccctaaaatactgtttaaaaacttcctgtcacattcatctataaggcccgagttagtcct

SEQ ID NO: 1260 - DNA, 120 bp, synthetic construct
  misc_feature 1..120: note = Artificially Synthesized Probe
  source 1..120: mol_type = other DNA
tgttaggttgttggggaaaggtttaagaaaggcttgttctgcatttgatgctgtcaggaagtaggggcagtttgatgattggggatcttaataatctttacacaagaggtagaaggaatg

SEQ ID NO: 1261 - DNA, 120 bp, synthetic construct
  misc_feature 1..120: note = Artificially Synthesized Probe
  source 1..120: mol_type = other DNA
cctgttactaacccctaagagtccatttccttatctacacattaagggagaataatccctgtttcataggattgctgtggggatgctggctggagataatgcatgtaaactagaaagtat

SEQ ID NO: 1262 - DNA, 120 bp, synthetic construct
  misc_feature 1..120: note = Artificially Synthesized Probe
  source 1..120: mol_type = other DNA
aaaaaaaaaaaaatccaccacatcctatcaaactacttgggctattggggtccagaaaggaaagctgtacagagagtccaagagaatgctgttcatatagtagaaacacagtaaatgcca

SEQ ID NO: 1263 - DNA, 120 bp, synthetic construct
  misc_feature 1..120: note = Artificially Synthesized Probe
  source 1..120: mol_type = other DNA
tcactccaccgggttgttgtgggaattaaataattcacttagaacacttagcatagtgcttgcccatggtaagcattcggcaaactgtggtagtaatctgcgtcatcatttatagtactt

SEQ ID NO: 1264 - DNA, 120 bp, synthetic construct
  misc_feature 1..120: note = Artificially Synthesized Probe
  source 1..120: mol_type = other DNA
tcccaatttcctgaggattataaatcaaccataaaatttcattttcccctgagactttgcatatatcgaccagctagtctgtttctattctcttctgctttttttttttgcgggggcggg

SEQ ID NO: 1265 - DNA, 120 bp, synthetic construct
  misc_feature 1..120: note = Artificially Synthesized Probe
  source 1..120: mol_type = other DNA
ataaggctggcacaggtttcggttttattatggtcattcatgagatttttaatgagggcttactatgcaccaagcactatgggagttcaaatattagagccaaaattcttggactctggg

SEQ ID NO: 1266 - DNA, 120 bp, synthetic construct
  misc_feature 1..120: note = Artificially Synthesized Probe
  source 1..120: mol_type = other DNA
tgtaagaggagtgcagtgactttgcagtcatctcagctcagacaactgagcatccctttatacatacatctcttttaatcatcttgaaatccaggaaagaaagctcccttatcccttttc

SEQ ID NO: 1267 - DNA, 120 bp, synthetic construct
  misc_feature 1..120: note = Artificially Synthesized Probe
  source 1..120: mol_type = other DNA
atttattcaaatgctggagaaaactcccagccatgctggttttattgattctgggtctccaagatggtgcccttctaaagaatttccaaggatcattttgtgcaattgcaatgttctcct

SEQ ID NO: 1268 - DNA, 120 bp, synthetic construct
  misc_feature 1..120: note = Artificially Synthesized Probe
  source 1..120: mol_type = other DNA
ttaaataacttttccaagattcacaggttgaagtgatagagacaaaacctttaacgtgggtagttggattccagagtctgtatgcccgggtccactctcgacagactaaagctcaaaaca

SEQ ID NO: 1269 - DNA, 120 bp, synthetic construct
  misc_feature 1..120: note = Artificially Synthesized Probe
  source 1..120: mol_type = other DNA
ccccacccccccagaggtcactgctgccctaaatttggtgcttaccactcccatgaaagttttactacatatgtataaaacctttcctaggactattttgcattattttaaactttatgt

SEQ ID NO: 1270 - DNA, 120 bp, synthetic construct
  misc_feature 1..120: note = Artificially Synthesized Probe
  source 1..120: mol_type = other DNA
tgttggacatttgggttggttccaagtctttgctattgtgaatagtgccgtaataaacatacgtgtgcatgtgtctttatagcagcatgatttataatcctttgggtatatacccagtaa

SEQ ID NO: 1271 - DNA, 120 bp, synthetic construct
  misc_feature 1..120: note = Artificially Synthesized Probe
  source 1..120: mol_type = other DNA
attctcaatatacattttattacccaatctgctcctgacattaaataaaactccaaaaattaaattccggccctcaaaccccacaacaggatttaattaacctcgccttccaggtgtaca

SEQ ID NO: 1272 - DNA, 120 bp, synthetic construct
  misc_feature 1..120: note = Artificially Synthesized Probe
  source 1..120: mol_type = other DNA
gattaaagcctgttatcactcgcctgctacagcatgggcttctaaaacctataaactctccttacaattcccccattttacctgtccaaaaaccgcacaagtcttacagattagttcagg

SEQ ID NO: 1273 - DNA, 120 bp, synthetic construct
  misc_feature 1..120: note = Artificially Synthesized Probe
  source 1..120: mol_type = other DNA
ccaggacttcaatctggcctcccacattattcctgataccacacctgacccccatgactgtatctctctgatccacctgacattcatcccatttccccatatttgcttctttcctgttcc

SEQ ID NO: 1274 - DNA, 120 bp, synthetic construct
  misc_feature 1..120: note = Artificially Synthesized Probe
  source 1..120: mol_type = other DNA
cactctaaactcttgaagtaaataaataatttttgctggcaggactatgctgaatctccttaggcactcactaatcagatgtcctaggtcctgccaattcttagaccttttatacctgtt

SEQ ID NO: 1275 - DNA, 120 bp, synthetic construct
  misc_feature 1..120: note = Artificially Synthesized Probe
  source 1..120: mol_type = other DNA
cagaaggagccaaatcaggactgtaaggtggacgcctaatgattttctactgaaactcttgcaaaattgccattattcaataagaggaatgggcagaagcatttgtcatgatggaggact

SEQ ID NO: 1276 - DNA, 120 bp, synthetic construct
  misc_feature 1..120: note = Artificially Synthesized Probe
  source 1..120: mol_type = other DNA
ttccttgtctatatgataggttatgactttttctgttgataggcataggttgcttccaatttttctatcacaaacaagagagagcataagctctctctagtgaggaactgccatggcata

SEQ ID NO: 1277 - DNA, 120 bp, synthetic construct
  misc_feature 1..120: note = Artificially Synthesized Probe
  source 1..120: mol_type = other DNA
tctttatagcagcatgatttataatcctttgggtatatatccagtaatgggatggctgggtcaaatggtatttctagttctagatccttgaggaattgccacactgtcttccacaatggt

SEQ ID NO: 1278 - DNA, 120 bp, synthetic construct
  misc_feature 1..120: note = Artificially Synthesized Probe
  source 1..120: mol_type = other DNA
ttaaagtgatcaaaacagccagtaaagggaaagggaggtggagggtgagtaagttaaatattcatttgtcagctagaagtcagtaaacgatgtctgtggcagataacttgagcaatcaag

SEQ ID NO: 1279 - DNA, 120 bp, synthetic construct
  misc_feature 1..120: note = Artificially Synthesized Probe
  source 1..120: mol_type = other DNA
ggaagtaactgctgttcacccacttagtgtgaccacttacttcagatgtagggatgaaatgagattatgcctgtgaagggctgactgtggcataagtgtagtaagtgctttaaaaaatat

SEQ ID NO: 1280 - DNA, 120 bp, synthetic construct
  misc_feature 1..120: note = Artificially Synthesized Probe
  source 1..120: mol_type = other DNA
ggagcacagcttcaaataaaacatgagttcaaaacatgagttccaatctgcatctgagtaagttcattccagtagaaagggagagggtgagaggttagaaagcagagacagacagagaga

SEQ ID NO: 1281 - DNA, 120 bp, synthetic construct
  misc_feature 1..120: note = Artificially Synthesized Probe
  source 1..120: mol_type = other DNA
cacccagtggctgtgactgtgcttgtgagtgaactgtctcaagagatggctagacttctccattacttgaagacatttcccctaaattcactttcagatgcaatcttttttttttttttt

SEQ ID NO: 1282 - DNA, 120 bp, synthetic construct
  misc_feature 1..120: note = Artificially Synthesized Probe
  source 1..120: mol_type = other DNA
ctttggagcaatggaagagtaacaagcatgcagggccttgaaggccacttcagaagactgggttttactctaagtataagagacacttctatagagttttgttttgttttgtgtgttgtt

SEQ ID NO: 1283 - DNA, 120 bp, synthetic construct
  misc_feature 1..120: note = Artificially Synthesized Probe
  source 1..120: mol_type = other DNA
aagtttgagatgtctgagaaatagccaagtgaagacctcaaagagagggtgagtatgcaagtgtggagctgagcagaaagttctgagatagacatttaaatgtgaaagtcattagcacat

SEQ ID NO: 1284 - DNA, 120 bp, synthetic construct
  misc_feature 1..120: note = Artificially Synthesized Probe
  source 1..120: mol_type = other DNA
gaagtcttcattcaactgcctgtgcacttcagaaaagtaaagcaggatcagtgccagactgcacaaacccatcaaattcattcgacattcattgaacaactgctttgtacaaagacaaat

SEQ ID NO: 1285 - DNA, 120 bp, synthetic construct
  misc_feature 1..120: note = Artificially Synthesized Probe
  source 1..120: mol_type = other DNA
cttgtctacctttttaacctcatctcctacagtagcggctggtttctcaacaaacaggacagagcctggcataaacagtaattatgtgctgaagaaattaaggcaagaatgaatgagtga

SEQ ID NO: 1286 - DNA, 120 bp, synthetic construct
  misc_feature 1..120: note = Artificially Synthesized Probe
  source 1..120: mol_type = other DNA
aagccaatattagtcctttgatacttaaatgtgaatgagttgcaagttctttatcaaccagaaggagaactccaggcaccagaggtgagagacaggagtgattaagaactgggaaaggga

SEQ ID NO: 1287 - DNA, 120 bp, synthetic construct
  misc_feature 1..120: note = Artificially Synthesized Probe
  source 1..120: mol_type = other DNA
ccctggagagatgaaagcttgtcactgtgacagaggctatgaacaagtctgcctttgaatagtctttttgtgccaaaaatcccactctaaaaactcttagaagatatccagattttatgc

SEQ ID NO: 1288 - DNA, 120 bp, synthetic construct
  misc_feature 1..120: note = Artificially Synthesized Probe
  source 1..120: mol_type = other DNA
atactttgagaactactagcttacagtaatgattctccaacctgggcatatcagaattacctgggcacttaaaaatgtcagtgcagtgcacaagccatagactaattaaatcagagtccc

SEQ ID NO: 1289 - DNA, 120 bp, synthetic construct
  misc_feature 1..120: note = Artificially Synthesized Probe
  source 1..120: mol_type = other DNA
gggaacttgtgttaaattagagggagcaacccctcctcaatgcattctatgtcaggtttttttttcaacactgtattatacaaacaaaacaactctgagggtagatccaagctgtggttg

SEQ ID NO: 1290 - DNA, 120 bp, synthetic construct
  misc_feature 1..120: note = Artificially Synthesized Probe
  source 1..120: mol_type = other DNA
tctggcagttgtggaatgagaaaagaattgcccacagagctggttttctgctggctagaattctatgccatttatttccccccgtaactcatctaagatgtatattgttgttttcaggat

SEQ ID NO: 1291 - DNA, 120 bp, synthetic construct
  misc_feature 1..120: note = Artificially Synthesized Probe
  source 1..120: mol_type = other DNA
gtgcactgcctttgaataagaaatttagtaatatgcaccaagagtgttaaaatgcccctagctaccaactgaataatctgaatacaatcctgaaagaataattgaggccgggcgtggtag

SEQ ID NO: 1292 - DNA, 120 bp, synthetic construct
  misc_feature 1..120: note = Artificially Synthesized Probe
  source 1..120: mol_type = other DNA
aagtgacaaggaaggaaaatgtggaaaagtagagaaaataaggtagatgtctgagttaaggcaaaaggctgtttctgagctcttgattactatttagtggttcttgatcctggctacgca

SEQ ID NO: 1293 - DNA, 120 bp, synthetic construct
  misc_feature 1..120: note = Artificially Synthesized Probe
  source 1..120: mol_type = other DNA
gattcattagtgtttttttaatagagtaatctgaaagctacatctcagagaaaacagacagtatttgttttagcttggccaatgctgcctgggcctcttgcagaaaggcagagctcagaa

SEQ ID NO: 1294 - DNA, 120 bp, synthetic construct
  misc_feature 1..120: note = Artificially Synthesized Probe
  source 1..120: mol_type = other DNA
attaagaggttctggctaaggtcagtgcagtattcatattctttccagctatggtgttacgaatgtcaggaacctcatggtccagtttttgaagcttctgaagttgtatgattcagtgat

SEQ ID NO: 1295 - DNA, 120 bp, synthetic construct
  misc_feature 1..120: note = Artificially Synthesized Probe
  source 1..120: mol_type = other DNA
ctataaattaggggttcccacaacctcctctgcagagggataagtagatagtttgctagaacagtgcccagaactcaaggaaacactttacatatttttgccagcttattataaaggata

SEQ ID NO: 1296 - DNA, 120 bp, synthetic construct
  misc_feature 1..120: note = Artificially Synthesized Probe
  source 1..120: mol_type = other DNA
tttgaggcatctgcggtcaggaactttatctgagctgtaaccatcatgccttcatgtcacatgtcaggatgacagattgtgcaaactattaagaatgaagacaagtgaatagattgaaat

SEQ ID NO: 1297 - DNA, 120 bp, synthetic construct
  misc_feature 1..120: note = Artificially Synthesized Probe
  source 1..120: mol_type = other DNA
agtgactgctctattagaggacagcataggtctagatttacccacgaggagaatagaaaccttgaatagcatctctccatgtcatctacacttacaaacaataattttccctgtaaacac

SEQ ID NO: 1298 - DNA, 120 bp, synthetic construct
  misc_feature 1..120: note = Artificially Synthesized Probe
  source 1..120: mol_type = other DNA
aacagatgccccagaatttgtttagcctgttccctactgctgggcactgagggtggtttccaatcttttgctattagaagaaattagtcactaacatggtatacctctcatttccatata

SEQ ID NO: 1299 - DNA, 120 bp, synthetic construct
  misc_feature 1..120: note = Artificially Synthesized Probe
  source 1..120: mol_type = other DNA
tggttgactaccaatatctgggtaactacataggggatcacccaacattgcaacctctttcttacatcttctaccaaggaatctccactcacttattcattcaaaatctgtttgtcaagg

SEQ ID NO: 1300 - DNA, 120 bp, synthetic construct
  misc_feature 1..120: note = Artificially Synthesized Probe
  source 1..120: mol_type = other DNA
aaaatgacttacaactgttataataacgatagctgatcctcttaatgaaaaggagatttgatctcatcctattcctggtagatcctcctcttcttccctagtccctagcatgtgcctggc

SEQ ID NO: 1301 - DNA, 120 bp, synthetic construct
  misc_feature 1..120: note = Artificially Synthesized Probe
  source 1..120: mol_type = other DNA
agattagcatgatctcatgaaatctgaaaagtgcttaagagccaaggcaggtagctgcattctgcagtagaacaatgctcatataaagcaattgatcaccagttgcaaaaaccagagtgc

SEQ ID NO: 1302 - DNA, 120 bp, synthetic construct
  misc_feature 1..120: note = Artificially Synthesized Probe
  source 1..120: mol_type = other DNA
ttaacacctctgttgtacttatttatctcccctttccacaaagagaaagcaggcctcaggacttagcagcttggcagtcaatggtagctggaatttaataacagtggttggttataactt

SEQ ID NO: 1303 - DNA, 120 bp, synthetic construct
  misc_feature 1..120: note = Artificially Synthesized Probe
  source 1..120: mol_type = other DNA
tttacactagacctgcacaccaaggctttgaaacttgcctccattccttccctggcttttccgtatggagtgatggtaaatgtttcacaactgctttctgggtgaaatatatgtatatgt

SEQ ID NO: 1304 - DNA, 120 bp, synthetic construct
  misc_feature 1..120: note = Artificially Synthesized Probe
  source 1..120: mol_type = other DNA
acaatgtaatttaatttctaatgatggctgtgtttagcagtcaacttacaacattcctgaaaatttaaaaatcagctcccgtgagctgttaggagcaagttctagctcactactgctccc

SEQ ID NO: 1305 - DNA, 120 bp, synthetic construct
  misc_feature 1..120: note = Artificially Synthesized Probe
  source 1..120: mol_type = other DNA
tttcatgcttttaagattctaaaggcttcagcatgcttaatctgctggaagcctcacagtgaccacaggagggagtcattatatgataatgagtattattctccattcattgtggtctgt

SEQ ID NO: 1306 - DNA, 120 bp, synthetic construct
  misc_feature 1..120: note = Artificially Synthesized Probe
  source 1..120: mol_type = other DNA
tcaagttggataactcctggtttgagggcggtatgggacaactggcactgtcttacaatgctgaaatggatttcaagttttccgaagggaaatttgccactattcaccaaaattaaaaat

SEQ ID NO: 1307 - DNA, 120 bp, synthetic construct
  misc_feature 1..120: note = Artificially Synthesized Probe
  source 1..120: mol_type = other DNA
ttttaactctctactgtcaaattccagtattatggatcttagtttccaggggattcccatctcacagcatatgagttttgaggcctgaaatgtcttctgactcccaaggatcatcagata

SEQ ID NO: 1308 - DNA, 120 bp, synthetic construct
  misc_feature 1..120: note = Artificially Synthesized Probe
  source 1..120: mol_type = other DNA
tggattgaagttctatttgggtattaaacatcttttcttagatgtcccctccaggaggtcatttgcattgttctaactacagcttcgttggtgcaaatcaaaggttggtccatgtaatcc

SEQ ID NO: 1309 - DNA, 120 bp, synthetic construct
  misc_feature 1..120: note = Artificially Synthesized Probe
  source 1..120: mol_type = other DNA
gtcacaagactatcctagattcaacagggagagaaataaattcaacttcttgatgagacaatggcaaggtcacattgagaaagcgattgtggagtggagataattgttgtagctgccaat

SEQ ID NO: 1310 - DNA, 120 bp, synthetic construct
  misc_feature 1..120: note = Artificially Synthesized Probe
  source 1..120: mol_type = other DNA
acatgaagaactcacctagaagatggagcaaaaactatagacagatgatccaaccgtgattctgtgaagcgtgttcccaaatcacagatgttacaaatccaatgtcaacaacaactagtc

SEQ ID NO: 1311 - DNA, 120 bp, synthetic construct
  misc_feature 1..120: note = Artificially Synthesized Probe
  source 1..120: mol_type = other DNA
ttagctctgtagttttcaggacatggtgcatgggaagatgagaagaaagaagtttccagtctaatggggagacatagatagtgcaataagtgtaaccataatacaagtgctatcatccag

SEQ ID NO: 1312 - DNA, 120 bp, synthetic construct
  misc_feature 1..120: note = Artificially Synthesized Probe
  source 1..120: mol_type = other DNA
gaaaagggatgggcaaaaatgtgctactaaaacaccaaaggggaaagcgctgagtatataaaggccagagacattcattctaaggacagtgatctgggaaagaaagctggaggagatggt

SEQ ID NO: 1313 - DNA, 120 bp, synthetic construct
  misc_feature 1..120: note = Artificially Synthesized Probe
  source 1..120: mol_type = other DNA
aattattttccaaacactgtagaagtatttaagaagaaatcaccccagacttcctctcacataggcacccattcccacagcctagctgtgtccttcctttcctattcacatacaaataat

SEQ ID NO: 1314 - DNA, 120 bp, synthetic construct
  misc_feature 1..120: note = Artificially Synthesized Probe
  source 1..120: mol_type = other DNA
gtacagaacaaaatgaaaagtcaaaaggctttttcttgaatgatcctctcctttaatcagtgaaggaaagacattttgaggcttgcagtggactgtcccttatatctcattggccagaac

SEQ ID NO: 1315 - DNA, 120 bp, synthetic construct
  misc_feature 1..120: note = Artificially Synthesized Probe
  source 1..120: mol_type = other DNA
gttacttcttaagaatctatgtgctacgttcatttagtgagtgccaaggcagacctgactcttgattatttttgtttatcctccaaaccctgccaagacaacctcatgatccgtgtttta

SEQ ID NO: 1316 - DNA, 120 bp, synthetic construct
  misc_feature 1..120: note = Artificially Synthesized Probe
  source 1..120: mol_type = other DNA
ggactccgggaactcgggccccagatccttgttcgagctggtcttcagtttccccatctgtacgctgaagagcctggggtccagtaacccccatcatcacccagtttacagaagaggaaa

SEQ ID NO: 1317 - DNA, 120 bp, synthetic construct
  misc_feature 1..120: note = Artificially Synthesized Probe
  source 1..120: mol_type = other DNA
gatcctgaccctgccgcctggttctgagccttcccctggggcttggctccagcctttgttacatagttgctccttaatctgtttccaccctgggggctcaccaatttttttttttttttt

SEQ ID NO: 1318 - DNA, 120 bp, synthetic construct
  misc_feature 1..120: note = Artificially Synthesized Probe
  source 1..120: mol_type = other DNA
ttcagcccagtcctggtgctttcagcgccagatgacagcactttgcagataagaacgatatgatgtgtggatttcactacatttggctcctggatgctataaaaggacttggatttctga

SEQ ID NO: 1319 - DNA, 120 bp, synthetic construct
  misc_feature 1..120: note = Artificially Synthesized Probe
  source 1..120: mol_type = other DNA
aggggtatagcacccagtccctgccctcacagaggtcgcagtccagtgggagaaacagtaataagatgttctcatagatagttctagtaatcataatttatagtttaatttttaaaaata

SEQ ID NO: 1320 - DNA, 120 bp, synthetic construct
  misc_feature 1..120: note = Artificially Synthesized Probe
  source 1..120: mol_type = other DNA
ccataatttataatttagatacaattttcttggcaccatgattagagccatgaagaagtaaaggagctttatgaaggtggagcgggatccacctgacctaatctgggcgggagagaggaa

SEQ ID NO: 1321 - DNA, 120 bp, synthetic construct
  misc_feature 1..120: note = Artificially Synthesized Probe
  source 1..120: mol_type = other DNA
ttggcatggcagggatgggaatctgattggagagggtacaagagggtgtggaaggagagccagagaccatcctctttgcaatgttgagtgaaggggtgggatggtaagaaatggggaagt

SEQ ID NO: 1322 - DNA, 120 bp, synthetic construct
  misc_feature 1..120: note = Artificially Synthesized Probe
  source 1..120: mol_type = other DNA
taacccagggaaaccacagagtagatactgggcaaattgtttgttgaatgaatgaatggccttcacaccatcacacggcatcagcctctcagatgcatggagctgttgagacgttcgggc

SEQ ID NO: 1323 - DNA, 120 bp, synthetic construct
  misc_feature 1..120: note = Artificially Synthesized Probe
  source 1..120: mol_type = other DNA
ccagcaccactagcaaagagcaggtgcacagtaaacacattttgaatgaagatatgaatgaaggaagtggcaaacacttgaattattggacttctgttgtcactgagaataaaagccaaa

SEQ ID NO: 1324 - DNA, 120 bp, synthetic construct
  misc_feature 1..120: note = Artificially Synthesized Probe
  source 1..120: mol_type = other DNA
agcctttgcaattttgtttttctctggcactcagctctgtatgggcagtgcctatagcaacattgtataacaggcagtcagcaggcagtcactatttgttgacttaatgaatgaatcccc

SEQ ID NO: 1325 - DNA, 120 bp, synthetic construct
  misc_feature 1..120: note = Artificially Synthesized Probe
  source 1..120: mol_type = other DNA
aactctttactgccctctgttggaaaactcgcgtaatatacaaaggtaaagtcctcacttgggtacctgtgggggattccttccaggacccccactgatgccccagaccctaatacaaaa

SEQ ID NO: 1326 - DNA, 120 bp, synthetic construct
  misc_feature 1..120: note = Artificially Synthesized Probe
  source 1..120: mol_type = other DNA
gagatggggtttcaccatgttggcctggctagtctcaaactcctgacctcaggtgatcctcccgccttgggctcccaaagtgctgggattacaggcatgagtcactgtgcccggctgttc

SEQ ID NO: 1327 - DNA, 120 bp, synthetic construct
  misc_feature 1..120: note = Artificially Synthesized Probe
  source 1..120: mol_type = other DNA
attttcaaatagcctttcttcaagttcactaattatttctttttttttctttttctaagatagagaaaggggtcttgctatgtaacctggcctcgtctcaagctcctaggctccagtgac

SEQ ID NO: 1328 - DNA, 120 bp, synthetic construct
  misc_feature 1..120: note = Artificially Synthesized Probe
  source 1..120: mol_type = other DNA
cacccgacaccacgcccggctaattttttgtttttttagtagagacggggtttcaccatgttagtcaggatggtctcgatctcctgacctcacgatccgcccgcctcggcctcccaaagt

SEQ ID NO: 1329 - DNA, 120 bp, synthetic construct
  misc_feature 1..120: note = Artificially Synthesized Probe
  source 1..120: mol_type = other DNA
tgtccactgaaggccctagggctctgtgaggagcagacggcaaatccagccaggcttgtgttcatcctttcagtgtggtgtgagccccccatcacaggtgcgcccagagatgccatctgg

SEQ ID NO: 1330 - DNA, 120 bp, synthetic construct
  misc_feature 1..120: note = Artificially Synthesized Probe
  source 1..120: mol_type = other DNA
ggcagatcacctgaggtcaggagttcgagaccagcctgaccaacacggtgaaaccccgtgtctactaaacatacaaaattagccgggtgttgtggcacacgcgtgtaatcccagctactc

SEQ ID NO: 1331 - DNA, 120 bp, synthetic construct
  misc_feature 1..120: note = Artificially Synthesized Probe
  source 1..120: mol_type = other DNA
tcaccctttccttggagattgctgggttttgcttgtcaagggctagagccatctgtttgactttttaaaactgtttttgcaaaatgtgtattccttttgctgtgtagtcactgaagtttc

SEQ ID NO: 1332 - DNA, 120 bp, synthetic construct
  misc_feature 1..120: note = Artificially Synthesized Probe
  source 1..120: mol_type = other DNA
aattggggaggaggcaaggggtaatgactgcatgaagggttgcatctgagccactgtcaatattgtatttcttcataggggtggaaattaaagatttgtgttcacactaaaaatttgtga

SEQ ID NO: 1333 - DNA, 120 bp, synthetic construct
  misc_feature 1..120: note = Artificially Synthesized Probe
  source 1..120: mol_type = other DNA
ttctaatcagaatgaaaaacagctgagccattctgtttacttatacggtgaccaagccatctgctagtcattcccctattgatgatcattcagggtgttccctattgtttgtgactacat

SEQ ID NO: 1334 - DNA, 120 bp, synthetic construct
  misc_feature 1..120: note = Artificially Synthesized Probe
  source 1..120: mol_type = other DNA
caaaaaaaaaaaaaatcaattttaggaaagtgtctgagagagatcagtgactcagaagagtttgagtggggaagtgctcagaagccatggcttcttgcagggggtatggtcccacagggg

SEQ ID NO: 1335 - DNA, 120 bp, synthetic construct
  misc_feature 1..120: note = Artificially Synthesized Probe
  source 1..120: mol_type = other DNA
aaaaaaaaaaaaaagatctagaaaggagagttagggagtccatgaaaaatctctagccagccctcctgaagcactagacaggggaacaagtcagagtttgcaggaaaatctgggaagtca

SEQ ID NO: 1336 - DNA, 120 bp, synthetic construct
  misc_feature 1..120: note = Artificially Synthesized Probe
  source 1..120: mol_type = other DNA
ctgcacctcccaggttcaagcgattctcgtgcctcagcctcccgagtagctgggattacaggtgtgagccactgcgcctggcctcatgcctggctaattttttttgtatttttagtcgag

SEQ ID NO: 1337 - DNA, 120 bp, synthetic construct
  misc_feature 1..120: note = Artificially Synthesized Probe
  source 1..120: mol_type = other DNA
tctcctctcctctcttctcttctctttttgagacagagtctcactttgtcgaccaggctggagtgcagtggtgctgcaatcttggctcactacaacctccacttcctgcgttcaatcaat

SEQ ID NO: 1338 - DNA, 120 bp, synthetic construct
  misc_feature 1..120: note = Artificially Synthesized Probe
  source 1..120: mol_type = other DNA
tgggcattgatgagttcagtgtttattgtagtctttgtagtctgagcttatttgaacccatccttcttgggaaggcttgccaggaaattgagtgttgtgaactaaacttttggtcactgc

SEQ ID NO: 1339 - DNA, 120 bp, synthetic construct
  misc_feature 1..120: note = Artificially Synthesized Probe
  source 1..120: mol_type = other DNA
tgatatggtttggctgtgtcccacccaaatctcatcttgatttgtagctcccataattcccctatgttatagggggtacccagtgggagataagtgagtcatgggggcagtttcccccat

SEQ ID NO: 1340 - DNA, 120 bp, synthetic construct
  misc_feature 1..120: note = Artificially Synthesized Probe
  source 1..120: mol_type = other DNA
actctttcctctcctttcctcaagcaggagtctttccccagggccaccacagctgggaatgcgctgggtcacacctgaaatcagcacggcactgggtctcacccaaggcctgcggcgagc

SEQ ID NO: 1341 - DNA, 120 bp, synthetic construct
  misc_feature 1..120: note = Artificially Synthesized Probe
  source 1..120: mol_type = other DNA
aagcccattggcttaaaatagcagtcccatcccaaaatctcaaaccaccccaaaagctcattggcttaaaatagcagtcaaatatgacatctcatggttcagtaggttaagtgggtttaa

SEQ ID NO: 1342 - DNA, 120 bp, synthetic construct
  misc_feature 1..120: note = Artificially Synthesized Probe
  source 1..120: mol_type = other DNA
gatcagctgcggctgaccagttatctatctctctctccatgctgcctcttgccatgcccagcttcagcttctgcatagcatggcagtctcaggatattcagaattttttttttttcccca

SEQ ID NO: 1343 - DNA, 120 bp, synthetic construct
  misc_feature 1..120: note = Artificially Synthesized Probe
  source 1..120: mol_type = other DNA
taagagaaaatcttgataaattagattccatcaaaattaaaaacttctgctcttcaacaaacattattaggagaatgaaaagataagccaaacagtgggagaaaatatttgcaaattaca

SEQ ID NO: 1344 - DNA, 120 bp, synthetic construct
  misc_feature 1..120: note = Artificially Synthesized Probe
  source 1..120: mol_type = other DNA
ggcgtgtgcccccacacctagttaaatttttttttttttttttaatagagatggtgtctcatgtgctgcccaggctggacttgaactcctgggctcaagtgattcctcccgccttggcct

SEQ ID NO: 1345 - DNA, 120 bp, synthetic construct
  misc_feature 1..120: note = Artificially Synthesized Probe
  source 1..120: mol_type = other DNA
caaaaaattaaaaaaaatttttgcctagtgctacacataggaatgtgcaggtgcacacgcatacacctgcatacacacacatgtgcacaggtacacataggagtgagtaaaaccagtgaa

SEQ ID NO: 1346 - DNA, 120 bp, synthetic construct
  misc_feature 1..120: note = Artificially Synthesized Probe
  source 1..120: mol_type = other DNA
aacatatcaaaatacatgacatgagataaagtaatgcttagaaagacattgatagatttttaaatgcttaattagaaaagaggaaaaggaggactggggagacggtggtcaaaggataca

SEQ ID NO: 1347 - DNA, 120 bp, synthetic construct
  misc_feature 1..120: note = Artificially Synthesized Probe
  source 1..120: mol_type = other DNA
ctgcctcagcctcccgagtagctgggactacaggcgcctgccactacgcccagctaattttttgtatttttagtagagacgaggtttcaccgtgttagccaggatggtctcgatctcctg

SEQ ID NO: 1348 - DNA, 120 bp, synthetic construct
  misc_feature 1..120: note = Artificially Synthesized Probe
  source 1..120: mol_type = other DNA
gctggtctcgaactcctgacctcacatgatccgcccacctcggcctcccaaagcgctgggattacaggtgtgagccacctcacccggccacttttttttttttcttttttaatgagacaa

SEQ ID NO: 1349 - DNA, 120 bp, synthetic construct
  misc_feature 1..120: note = Artificially Synthesized Probe
  source 1..120: mol_type = other DNA
aaaaaaaaagaaaatgtcattttcagagggcaaagtgaggaaggtgcaccctcaggacattcttgcctcagcctggggaaagagagtttaagcaattcccccagaaaggcacaggaacct

SEQ ID NO: 1350 - DNA, 120 bp, synthetic construct
  misc_feature 1..120: note = Artificially Synthesized Probe
  source 1..120: mol_type = other DNA
taaatagaaacctctttattctaagtatcgaacgttccttaatacattggattggggccagaccttgaggtgagggaaaggggcgggggagctgggatatttctgtagagacttccagaa

SEQ ID NO: 1351 - DNA, 120 bp, synthetic construct
  misc_feature 1..120: note = Artificially Synthesized Probe
  source 1..120: mol_type = other DNA
tcataccagctccctccagaacttcacttccaaccatctccaaatcccccttacaaccaaccccagaaccagccctgggatcttccttttcaccccaagcctcagctcgtgattaaaatt

SEQ ID NO: 1352 - DNA, 120 bp, synthetic construct
  misc_feature 1..120: note = Artificially Synthesized Probe
  source 1..120: mol_type = other DNA
ccaatattcaagttcagaaactccacatcagcaagaatactgggacttcttgggaccccatgggactccaggaatatgtgccttcccaaggacatgaccttatcccccagaatcagaact

SEQ ID NO: 1353 - DNA, 120 bp, synthetic construct
  misc_feature 1..120: note = Artificially Synthesized Probe
  source 1..120: mol_type = other DNA
ggtcaaggctgcagtgaaccgtgattgtgccactgcactccagccagggaaacagagtgagaccctgtctcaaaaaaaaaagaaaaaaagttggcatgtaagatgcttatttaggtctga

SEQ ID NO: 1354 - DNA, 120 bp, synthetic construct
  misc_feature 1..120: note = Artificially Synthesized Probe
  source 1..120: mol_type = other DNA
agcagaagacatactatggccacatttgagaaaaatccataatataatctcctcccagttttgcaggtaatttggaactctgggaaacatctccaaacctcttccacgtctgcaaaatct

SEQ ID NO: 1355 - DNA, 120 bp, synthetic construct
  misc_feature 1..120: note = Artificially Synthesized Probe
  source 1..120: mol_type = other DNA
gaaaaataagctttaaaaatagttactccattgtaatttttgcaaagcaggtatagagaggtctgtggacaattaaaaagtccccatcttttcactgggcacgccccagactccacgaga

SEQ ID NO: 1356 - DNA, 120 bp, synthetic construct
  misc_feature 1..120: note = Artificially Synthesized Probe
  source 1..120: mol_type = other DNA
tgcagtgacttccaactcatactccaccaaaacacacgtgggttcaaaaacttaacacaaaaatgcaacgcagtaattttcaaaacaaaaccaggactaagcaacttcatcaaaaccccc

SEQ ID NO: 1357 - DNA, 120 bp, synthetic construct
  misc_feature 1..120: note = Artificially Synthesized Probe
  source 1..120: mol_type = other DNA
gacaatacatggactttctctttcaatggtgaggaatgaaacaagatacaagaaccacagcatggaatatgttttcttttacatccaatggccaggtcataaaggatgccttgagacctc

SEQ ID NO: 1358 - DNA, 120 bp, synthetic construct
  misc_feature 1..120: note = Artificially Synthesized Probe
  source 1..120: mol_type = other DNA
cactgttagtgaagtgataccacagctatttaatttcatgcaattgactcaaggttaagattctgaaacgtacccctaaaccggttctggcaccactttcaacaacattcagatattccg

SEQ ID NO: 1359 - DNA, 120 bp, synthetic construct
  misc_feature 1..120: note = Artificially Synthesized Probe
  source 1..120: mol_type = other DNA
tgcagccactttacagacaagactgttacacccttacaagatgatcagtgacgcagccacatactgtctatacaattactcataaagtgcttttcacaaataaggacttcttcctcgttt

SEQ ID NO: 1360 - DNA, 120 bp, synthetic construct
  misc_feature 1..120: note = Artificially Synthesized Probe
  source 1..120: mol_type = other DNA
ccttggctatagcttggttggtctgatttgatttgtgttcctaaattctgagtctagattcctgataagggaggttttccattaatttgccattaatacatccgctttctttgctatgac

SEQ ID NO: 1361 - DNA, 120 bp, synthetic construct
  misc_feature 1..120: note = Artificially Synthesized Probe
  source 1..120: mol_type = other DNA
actgtatttcctgagaatttgctacattgtggaggaaaaaaaaaaaacccaaacacttatcttcattgctggacccaatgagaaagaaggcaatgtgtgccagcactatctagcctgctt

SEQ ID NO: 1362 - DNA, 120 bp, synthetic construct
  misc_feature 1..120: note = Artificially Synthesized Probe
  source 1..120: mol_type = other DNA
aatgccactattaggaagagagaggcagtagttatcctcattttgctaaagatacaattaagaggtcaactgatttgttcacaccacacgtttgacagagaaagaaaatccagactgcct

SEQ ID NO: 1363 - DNA, 120 bp, synthetic construct
  misc_feature 1..120: note = Artificially Synthesized Probe
  source 1..120: mol_type = other DNA
ctaatttctgattgctatcagattccaactggttgctagataacactggcacatcccaacaacagattgctaatgactggatgattgaatcctcagctttgtaagctgatagtattagtg

SEQ ID NO: 1364 - DNA, 120 bp, synthetic construct
  misc_feature 1..120: note = Artificially Synthesized Probe
  source 1..120: mol_type = other DNA
gcatgaattccttttaacaagcaattaactaaggtattgtgagtccaaagatcaagaaagggtaaaagaattattgcctcatatttaaagttaagaggattggggaatctagcactgatt

SEQ ID NO: 1365 - DNA, 120 bp, synthetic construct
  misc_feature 1..120: note = Artificially Synthesized Probe
  source 1..120: mol_type = other DNA
ataagactcttaaaatgtccctaaaacatggagaatttaaggaaaacatgggagtaacaggtgatgaatctgctttcacaaaaagtatcttttcttaatgattccttcttgcccatctgg

SEQ ID NO: 1366 - DNA, 120 bp, synthetic construct
  misc_feature 1..120: note = Artificially Synthesized Probe
  source 1..120: mol_type = other DNA
gaaaagtaacagtttacttcttatccaaatcaatcactacttgacatttaaggagaaagtcaactgcagccagaataagtcccctcctgacattcttcgtcatgactttcaagcagtttc

SEQ ID NO: 1367 - DNA, 120 bp, synthetic construct
  misc_feature 1..120: note = Artificially Synthesized Probe
  source 1..120: mol_type = other DNA
aggccatttaagctggtatattaaatagccaatgttttagagaggacaattttaactattggtttaactattagagtttagtatctaaatggctggtatatgccatccgaggggcaggaa

SEQ ID NO: 1368 - DNA, 120 bp, synthetic construct
  misc_feature 1..120: note = Artificially Synthesized Probe
  source 1..120: mol_type = other DNA
ctgtgaggcaggtatgctgggaaattatagaaggagctctatcaataaagagacccctgaccttgtgcctcaaaatggccaaacatttggagcattccacaaagtcaattttgtaaaaac

SEQ ID NO: 1369 - DNA, 120 bp, synthetic construct
  misc_feature 1..120: note = Artificially Synthesized Probe
  source 1..120: mol_type = other DNA
cagaggtatctcaaagaaaaacacacctaaaagttctcacagaattctgtgaagattttttgcaggggagagattgggtgtgaagggagcaatgcgtttgcaacaaaatttgacttctac

SEQ ID NO: 1370 - DNA, 120 bp, synthetic construct
  misc_feature 1..120: note = Artificially Synthesized Probe
  source 1..120: mol_type = other DNA
atataagcaaacatatgttcatttattttccttttgttgctactctcctgaactctctcactcatttgtttcagtggacaggaaacgcaccatatccccctgcctggatgggtgtttttg

SEQ ID NO: 1371 - DNA, 120 bp, synthetic construct
  misc_feature 1..120: note = Artificially Synthesized Probe
  source 1..120: mol_type = other DNA
ggttataatccttgaaggcatacagcatgataatgcatgttcataatcatgaaacatgtttaaagggcttggcataatgcctggcctataataagcactcaataaaaccttagcagctat

SEQ ID NO: 1372 - DNA, 120 bp, synthetic construct
  misc_feature 1..120: note = Artificially Synthesized Probe
  source 1..120: mol_type = other DNA
ctgggcaacagaacaggcccagcctataaaaaaaaaaaatgaggtatcatactacattttgttttctgtcttgttttctttttctctcaccaatatccatgtcatcaatacaaaactaac

SEQ ID NO: 1373 - DNA, 120 bp, synthetic construct
  misc_feature 1..120: note = Artificially Synthesized Probe
  source 1..120: mol_type = other DNA
taaaaagtgggcctaaggatgtactttgcattattaatgtcaataaacattctaagtaagaacccgagcaccatgacgtgaaaagagaacatgggacagggtcatgctgaagctgctcag

SEQ ID NO: 1374 - DNA, 120 bp, synthetic construct
  misc_feature 1..120: note = Artificially Synthesized Probe
  source 1..120: mol_type = other DNA
aaaaaaaaaaaaaagcagtgagttatcaagaattaggtaaaggcaggctgagctgacaaatgccttactgccttttcctttttctgcatcaggcagaaatgcccctcaaaaagacccagt

SEQ ID NO: 1375 - DNA, 120 bp, synthetic construct
  misc_feature 1..120: note = Artificially Synthesized Probe
  source 1..120: mol_type = other DNA
ctcatgaaatacacactgtgtgcccaaaaaagtgctcagaaatctgtctatgaatgttagtctgttcttttggatagcatgaagcttttacttacttggggaaagagtggtctctcatct

SEQ ID NO: 1376 - DNA, 120 bp, synthetic construct
  misc_feature 1..120: note = Artificially Synthesized Probe
  source 1..120: mol_type = other DNA
gctgatgaattttagaaaccgccaagcttgatacattgtgttatttcctgtttggtgctgtaatgacccttgtttaactgccaggcattagtaaagctttgattgcaatgtggcctctat

SEQ ID NO: 1377 - DNA, 120 bp, synthetic construct
  misc_feature 1..120: note = Artificially Synthesized Probe
  source 1..120: mol_type = other DNA
atggtccttcttcccaccactagctgtgatgatcatttactgccttgtatggttattaatctttttgtgatatgtatcttatctaagttctccaatgagactatgggtgctcaggcagag

SEQ ID NO: 1378 - DNA, 120 bp, synthetic construct
  misc_feature 1..120: note = Artificially Synthesized Probe
  source 1..120: mol_type = other DNA
ttgaaaaaactgatttgccagagaaccactcaagtggaagtgtaacacttatcttgctttcccattttccctgttataactgcccttctaccactttacaaaaggcacacctttaggact

SEQ ID NO: 1379 - DNA, 120 bp, synthetic construct
  misc_feature 1..120: note = Artificially Synthesized Probe
  source 1..120: mol_type = other DNA
aaaaaaaaaaaggcacaccttttacccatatgtaacctaactatagtatacattgtcccagggtgtaaaaacctctggggcaacaaagagacatttctaaatactggtgtcaaactgggc

SEQ ID NO: 1380 - DNA, 120 bp, synthetic construct
  misc_feature 1..120: note = Artificially Synthesized Probe
  source 1..120: mol_type = other DNA
tgtgaatgtaacagttgtcagtgagtcttgagcagctttcagtgagttttcagcaagtccttttaacaaacctgaagctggtcttggggactactaaactctgcatgtgattataacaaa

SEQ ID NO: 1381 - DNA, 120 bp, synthetic construct
  misc_feature 1..120: note = Artificially Synthesized Probe
  source 1..120: mol_type = other DNA
ttcaaattctgggactgatttttcatactttcaatacacactcagtactcctggtgtctcgaccctgtcaattcactccatggtattactggagctcatgtctgctcattttcagtatca

SEQ ID NO: 1382 - DNA, 120 bp, synthetic construct
  misc_feature 1..120: note = Artificially Synthesized Probe
  source 1..120: mol_type = other DNA
ttaccagctgtgctctgaatttacaggcaaaatctgccacctcagactatgggtatgagagtctaggggaatggtattcacattgcatagtaaagaatattcctggattcttaaacagaa

SEQ ID NO: 1383 - DNA, 120 bp, synthetic construct
  misc_feature 1..120: note = Artificially Synthesized Probe
  source 1..120: mol_type = other DNA
aagcccttgccacatcatttattatactcccatggaggacaaagcacctaaaatgccaagaagtggatgagagaagaactctgggatgcttttatctgtattttggagataatacttgtt

SEQ ID NO: 1384 - DNA, 120 bp, synthetic construct
  misc_feature 1..120: note = Artificially Synthesized Probe
  source 1..120: mol_type = other DNA
atagaaaaggctaagagctccatgaggctatgttagtaccttttggaaggtaagggacagggaatagttgcttaggaaggaaaagaagtaaaaaattaccctcctactagcattctcatt

SEQ ID NO: 1385 - DNA, 120 bp, synthetic construct
  misc_feature 1..120: note = Artificially Synthesized Probe
  source 1..120: mol_type = other DNA
aattcttcccatgacttaccctattagaatcagttcccacttcccattcctgattcagcaaagaaatactagacttgtggttataagatgcttaggagcagcacaactactgtagtaact

SEQ ID NO: 1386 - DNA, 120 bp, synthetic construct
  misc_feature 1..120: note = Artificially Synthesized Probe
  source 1..120: mol_type = other DNA
ctgatggaagatctgtgggatgtcctgaagagcgtgagaggatggaagtgaaggagaaggttgtatctacttcgctttgtcatacattttgttcatagttgcttttagtaatacagtaca

SEQ ID NO: 1387 - DNA, 120 bp, synthetic construct
  misc_feature 1..120: note = Artificially Synthesized Probe
  source 1..120: mol_type = other DNA
accagaatacagatcttctaagtccaatgtcccctcttccaccttgccacctgccctaattccacttactgtcataagaaatcacagctcaatttaactctaggtttattttgacaaact

SEQ ID NO: 1388 - DNA, 120 bp, synthetic construct
  misc_feature 1..120: note = Artificially Synthesized Probe
  source 1..120: mol_type = other DNA
ccacagcttgctgcaatgcacacaagtttttgttcccttcttttagaacttctctttcttcttttccacaaagcaaaaaacaagaagaaagaaagagctatgcaagacagcacaaggctg

SEQ ID NO: 1389 - DNA, 120 bp, synthetic construct
  misc_feature 1..120: note = Artificially Synthesized Probe
  source 1..120: mol_type = other DNA
agatattctcttggcactcctgggcgagcagtaaaggctcttcattggaatgaagatgctgcagatagtatcttagtctgcacttagggaagagaaatattatgtttttctcacctcatt

SEQ ID NO: 1390 - DNA, 120 bp, synthetic construct
  misc_feature 1..120: note = Artificially Synthesized Probe
  source 1..120: mol_type = other DNA
cacccaaccctccaagttagctttcgttctattttccacctattcatatccatcctttaaaactgaatacaaattctaactcctgagtgaagctttcccatgactaaccgaactgaaagt

SEQ ID NO: 1391 - DNA, 120 bp, synthetic construct
  misc_feature 1..120: note = Artificially Synthesized Probe
  source 1..120: mol_type = other DNA
ataggtctcactgcttacaaagttctgcagtgacatacaaagttaaaaactggtggaaataaatgggccccaatcaaagctttaagatggtgagatcttgtctccattagaaagaaaggg

SEQ ID NO: 1392 - DNA, 120 bp, synthetic construct
  misc_feature 1..120: note = Artificially Synthesized Probe
  source 1..120: mol_type = other DNA
ggacctccctctttccttggtaagatgttaaggagagcattacagttttacagaagtactaggaaagaacaaatatgctatcaaccaaaggaacaacacattctcttgataggtttctct

SEQ ID NO: 1393 - DNA, 120 bp, synthetic construct
  misc_feature 1..120: note = Artificially Synthesized Probe
  source 1..120: mol_type = other DNA
agcttatttgtaaaagccactagcatctctcacttaagtctgctgccattttcaagtattttaaactcttggtaaaacacagaactgacctacttagacatttgcatgtcagccctcttt

SEQ ID NO: 1394 - DNA, 120 bp, synthetic construct
  misc_feature 1..120: note = Artificially Synthesized Probe
  source 1..120: mol_type = other DNA
tcaaatttcatataaacagaatcacctggcttcttttgcgcagcaaaacaattgtgagattcacgcactggctgcatgcagtgttacggggtatgggtatatcacaacttatctatttac

SEQ ID NO: 1395 - DNA, 120 bp, synthetic construct
  misc_feature 1..120: note = Artificially Synthesized Probe
  source 1..120: mol_type = other DNA
aacaagggattaagaacctgtttcatgaagaagtgtgtgatcaactgtatcagatgtttctgacaggtcaaataaactgtggactgagaattttactgctggatctagcaacatggaggc

SEQ ID NO: 1396 - DNA, 120 bp, synthetic construct
  misc_feature 1..120: note = Artificially Synthesized Probe
  source 1..120: mol_type = other DNA
tccaagataaaaaggaaggagagcaactggacagtgaataccaacaagtcttttgagaagttttactgtcgaaggaagaagaggaatgaggtaataactgaagagagaagcaggattaag

SEQ ID NO: 1397 - DNA, 120 bp, synthetic construct
  misc_feature 1..120: note = Artificially Synthesized Probe
  source 1..120: mol_type = other DNA
gatggaggaagatctaccaagcaagtggaaaacaaaaaaaggcaggggttgcaatcctagtctctgataaaacagactttaaaccaacaaagatcaaaagagaccaagaaggccattaca

SEQ ID NO: 1398 - DNA, 120 bp, synthetic construct
  misc_feature 1..120: note = Artificially Synthesized Probe
  source 1..120: mol_type = other DNA
aatagtggagggaaggtcagcagataaacaagtgaacaaaggtctctggttttcctaggcagaggaccctgcggccttccgcagtgtttgtgttcctgggtacttgagattagggagtgg

SEQ ID NO: 1399 - DNA, 120 bp, synthetic construct
  misc_feature 1..120: note = Artificially Synthesized Probe
  source 1..120: mol_type = other DNA
ataaactagaaaatctagaagaaatggataaattcctcgacacatacactctcccaagactaaaccaggaagaagttgaatctctgaatagaccaataacaggatctcaaattgtggcag

SEQ ID NO: 1400 - DNA, 120 bp, synthetic construct
  misc_feature 1..120: note = Artificially Synthesized Probe
  source 1..120: mol_type = other DNA
atgagtgaacttccattcacaattgcttcaaagagaataaaatacttaggaacccaacttacaagggatgtgaaggacctcttcaaggagaactacaaaccactgctcaatgaaataaaa

SEQ ID NO: 1401 - DNA, 120 bp, synthetic construct
  misc_feature 1..120: note = Artificially Synthesized Probe
  source 1..120: mol_type = other DNA
tgcagccaaaagacacatgaaaaaatgctcatcatcactggccatcagagaaatgcaaatcaaaaccataatgagataccatctcacaccaattagaatggcaatcattaaaaagtcagg

SEQ ID NO: 1402 - DNA, 120 bp, synthetic construct
  misc_feature 1..120: note = Artificially Synthesized Probe
  source 1..120: mol_type = other DNA
ataaacatacagaaaaatggaaagaatacccacacaccttccacatagattccacaaatgtcaacattctgccaaatgtgcataagaaagatgtttcattattactgttacttcttaatt

SEQ ID NO: 1403 - DNA, 120 bp, synthetic construct
  misc_feature 1..120: note = Artificially Synthesized Probe
  source 1..120: mol_type = other DNA
aactgaaagtgtaactgccctataacattaagggtctacttgaagttttcgaagggactgaataagttggggaagcaacatgctttaatggttaaaggaatacaccctggagctgaagta

SEQ ID NO: 1404 - DNA, 120 bp, synthetic construct
  misc_feature 1..120: note = Artificially Synthesized Probe
  source 1..120: mol_type = other DNA
aaacttttatacatttgcctcctgctacagtttgaatatggcttgtccccacaaaactcatgtggaggcttggccccagtgtaatggtgttgagagttggtgggacctttaagaggcatt

SEQ ID NO: 1405 - DNA, 120 bp, synthetic construct
  misc_feature 1..120: note = Artificially Synthesized Probe
  source 1..120: mol_type = other DNA
ctgtatacacgacttggaacaaaagctaatgtttcttggggttagaataagcattttcctattttaacagctacttccagaatgctgttaaggtggctggttgcatcagaaatgacccag

SEQ ID NO: 1406 - DNA, 120 bp, synthetic construct
  misc_feature 1..120: note = Artificially Synthesized Probe
  source 1..120: mol_type = other DNA
aaggcacaatgtactgaccattcctggaatttctttagtaacagtattcttaagatatctgggtccttgggatgaatcaatgactggcaggtgaaaagatgataaaacaggccaggtgca

SEQ ID NO: 1407 - DNA, 120 bp, synthetic construct
  misc_feature 1..120: note = Artificially Synthesized Probe
  source 1..120: mol_type = other DNA
aaaggctttgcaaaagtacatattaagaggctatttaaataccctatagccttattgtctagctatagactatatctggcttggtcagtcctttgtgagatgatgctggtcagggaagag

SEQ ID NO: 1408 - DNA, 120 bp, synthetic construct
  misc_feature 1..120: note = Artificially Synthesized Probe
  source 1..120: mol_type = other DNA
cataatttccagtgtactgtaaatatcaacattttagcattttgttgctgctgttacatgaatgttccttagaaaacctctgttcctgtttagtggacataaagttatcttttctccctc

SEQ ID NO: 1409 - DNA, 120 bp, synthetic construct
  misc_feature 1..120: note = Artificially Synthesized Probe
  source 1..120: mol_type = other DNA
gagaaataacagcttttcaaacaggcctttcattttaaccctttcatcccctgagatagctgatattgccaattcctgagaattgaggattctacggtataaaccaggttggctttcatt

SEQ ID NO: 1410 - DNA, 120 bp, synthetic construct
  misc_feature 1..120: note = Artificially Synthesized Probe
  source 1..120: mol_type = other DNA
ttcatttaacagttatgtactgagtatgccaggtcccattctaggcattaggcataaaataatgaaaaaaagcccctgctctcatacagcctgcattctagtggggataaaagacaagaa

SEQ ID NO: 1411 - DNA, 120 bp, synthetic construct
  misc_feature 1..120: note = Artificially Synthesized Probe
  source 1..120: mol_type = other DNA
cactgtgcctggccaagattttaattctttaaaagcctttagattcgaacagattcagagattctaacttatctgaaacgttgagattgtttcaagtctaggggtaagtgggggtgttac

SEQ ID NO: 1412 - DNA, 120 bp, synthetic construct
  misc_feature 1..120: note = Artificially Synthesized Probe
  source 1..120: mol_type = other DNA
caaccattctgtttacttgcacaactgctaacaactttttagcaggtttttgctgtttctatcttctgaacctctcttgcttagctcaatcactgagtgctaagcctaagtttgcagtca

SEQ ID NO: 1413 - DNA, 120 bp, synthetic construct
  misc_feature 1..120: note = Artificially Synthesized Probe
  source 1..120: mol_type = other DNA
acacctctagaatcttccctatttaggtggtcctcactaggcatatcctagtttgtcaatgtttctaaaattccagagcccaggactaaataccacctctaaatgtattctgataagctt

SEQ ID NO: 1414 - DNA, 120 bp, synthetic construct
  misc_feature 1..120: note = Artificially Synthesized Probe
  source 1..120: mol_type = other DNA
aaacagctgtaacgtcaacactgccagtaggtgtttaaattggtacaactactttgtaacattgttggcagcattactaaaactggacatatgcataccctgtggtctcacaattctgtc

SEQ ID NO: 1415 - DNA, 120 bp, synthetic construct
  misc_feature 1..120: note = Artificially Synthesized Probe
  source 1..120: mol_type = other DNA
agatactcaacctgtatgtatattttaataagttaaatcaacattgattttcctcaattatcaaagtaatacagtgcttattctactgtttgtatcataaaatactgtacagcacttaag

SEQ ID NO: 1416 - DNA, 120 bp, synthetic construct
  misc_feature 1..120: note = Artificially Synthesized Probe
  source 1..120: mol_type = other DNA
gctccataatatggtatcttacacatactgctttgaaaaatttcatataccaaagacacctttctacatcaataaatgtacctctaccatgccattttaactcctatataatcacatatg

SEQ ID NO: 1417 - DNA, 120 bp, synthetic construct
  misc_feature 1..120: note = Artificially Synthesized Probe
  source 1..120: mol_type = other DNA
ctttgtcccactgtaatctgcccatcaggaatctcccaatcatcactcgagtcccgtctaccaagtgttttcttgataaaaacagtaaaaaagtcaagtcaagccaaacagaaaaagaaa

SEQ ID NO: 1418 - DNA, 120 bp, synthetic construct
  misc_feature 1..120: note = Artificially Synthesized Probe
  source 1..120: mol_type = other DNA
tttggctgtgacttctaagaagaaagaattcagagaaaaaaagatatcatatactcttaccattcgattcctgtcttctgaggatgaagatgacttcctttctcgctgaggtcctggaga

SEQ ID NO: 1419 - DNA, 120 bp, synthetic construct
  misc_feature 1..120: note = Artificially Synthesized Probe
  source 1..120: mol_type = other DNA
tgcctttgtaagtgagagctttgttaagtaagcgctatggcctctcagccaagttactataaatacaaatattctataggtcaagtgagcctgaggagtatactctttggaagtgatctc

SEQ ID NO: 1420 - DNA, 120 bp, synthetic construct
  misc_feature 1..120: note = Artificially Synthesized Probe
  source 1..120: mol_type = other DNA
ctgtatgacttccatcccattctatggattttctgagaaacagcagggctgagagagcaaaaatctaaagcaccattactacattcagaatatataacagatactaactagcaagagtca

SEQ ID NO: 1421 - DNA, 120 bp, synthetic construct
  misc_feature 1..120: note = Artificially Synthesized Probe
  source 1..120: mol_type = other DNA
acagcatctgtagttttatatttagtttgctttgggtgaaaacaagaaagaagagcccaactacctctgaacactgggccaggctcaaaatcaaacactatttcactggggacagaatgt

SEQ ID NO: 1422 - DNA, 120 bp, synthetic construct
  misc_feature 1..120: note = Artificially Synthesized Probe
  source 1..120: mol_type = other DNA
tttactgacctaagaagaggacaaatgggctttgccattatgggtctgttctataaaatgtacatttaaaacacttccagaaagttgaaggaagtggttgataatgtctgacaaaccccc

SEQ ID NO: 1423 - DNA, 120 bp, synthetic construct
  misc_feature 1..120: note = Artificially Synthesized Probe
  source 1..120: mol_type = other DNA
gtgtctgttacttgaaagaggcaagtataaaggaaataagcagcaaagcaattgcagtttccttgagtttttaaaaaaacctgaaatcactacttacctccatcaccacgaaatccttgg

SEQ ID NO: 1424 - DNA, 120 bp, synthetic construct
  misc_feature 1..120: note = Artificially Synthesized Probe
  source 1..120: mol_type = other DNA
ggttacaatcataaaaatatggatggataagggcacactagaagaggaaagaaacaaagtggctcatagaaaggttttgttaaaatttgtccttttttttgagactcagttgctctgtcg

SEQ ID NO: 1425 - DNA, 120 bp, synthetic construct
  misc_feature 1..120: note = Artificially Synthesized Probe
  source 1..120: mol_type = other DNA
gaaaagaaggtgacaggagttatatggctactaacaaatataaaaatcctagtgatgtcattaactttccattcttgagagcttacaatctcatgggaagtaagatgcacacattggaag

SEQ ID NO: 1426 - DNA, 120 bp, synthetic construct
  misc_feature 1..120: note = Artificially Synthesized Probe
  source 1..120: mol_type = other DNA
cccaacatcacacagtctgtaaagagttacagagctggctatgtccatctttaattcttcacagtctctgagagacataatttccaagctcaaggaattttactacatcaatcatttcct

SEQ ID NO: 1427 - DNA, 120 bp, synthetic construct
  misc_feature 1..120: note = Artificially Synthesized Probe
  source 1..120: mol_type = other DNA
gtccttatatccaactgctactggatttctaaacctgaaagtcccacaggcatcttaaagtcaatatatgcccccaaaaagctaaaattgctgcttctgcaaaccttgttttcctttggt

SEQ ID NO: 1428 - DNA, 120 bp, synthetic construct
  misc_feature 1..120: note = Artificially Synthesized Probe
  source 1..120: mol_type = other DNA
cttaacaaatgactttcctaacccccttatgtagtgtactcctacttattcaccataatctggcttaaaggttgtcccttctctgctcaatgttcctagatccaaccagatggagtttat

SEQ ID NO: 1429 - DNA, 120 bp, synthetic construct
  misc_feature 1..120: note = Artificially Synthesized Probe
  source 1..120: mol_type = other DNA
cttatatcacattctccttttcccctttcttcctttgtttttaggtcttgctagatagaggtgaaccttgctagttaaggaaaactagtactagaaaaaagtcacttaaaatgaacccaa

SEQ ID NO: 1430 - DNA, 120 bp, synthetic construct
  misc_feature 1..120: note = Artificially Synthesized Probe
  source 1..120: mol_type = other DNA
aaatccaatactgccaaagctgctttgctcaagtaggccctccaggaactatcaatgataagaccactgattcttacctggaaaacactagggaaatttacttatggctagaaattacct

SEQ ID NO: 1431 - DNA, 120 bp, synthetic construct
  misc_feature 1..120: note = Artificially Synthesized Probe
  source 1..120: mol_type = other DNA
gacgtgaggaatgggaaaaaaatatagtaggaaaggaatgaataaaggtttgaagagccaaggaagcctaacagtgaaagtcagtctctgaataaaacatgtcagaatctgaaccacacc

SEQ ID NO: 1432 - DNA, 120 bp, synthetic construct
  misc_feature 1..120: note = Artificially Synthesized Probe
  source 1..120: mol_type = other DNA
tcagagaaactcaatttggtagttggtatctaatagttgtgtcttggtccaccaagtcaacttctctagctttcagggcaagtacaagggaacacttgaagtgatcataatctgatgtca

SEQ ID NO: 1433 - DNA, 120 bp, synthetic construct
  misc_feature 1..120: note = Artificially Synthesized Probe
  source 1..120: mol_type = other DNA
ttttaagatagcattccttcactggaaggcaaatgtcctggatcattaccattataaaccttcagagaggccaagctaatttcattagggtgttttataactgctcacagaactgggacc

SEQ ID NO: 1434 - DNA, 120 bp, synthetic construct
  misc_feature 1..120: note = Artificially Synthesized Probe
  source 1..120: mol_type = other DNA
ttttttttttttaaagcatgtgcttccagacgcagcctaaataacgctgccccaaattcaatgtgaaagagtacacagacctgtgtcagaaatgttccaaagctaattaggtgcagtgtc

SEQ ID NO: 1435 - DNA, 120 bp, synthetic construct
  misc_feature 1..120: note = Artificially Synthesized Probe
  source 1..120: mol_type = other DNA
ttcccctttcaccatgcttctattccctaggcccgttcagattgtagtaattctttaaagtctagttcaaataccaccttcttcattaagttttcctgagcactctctttttcctcacta

SEQ ID NO: 1436 - DNA, 120 bp, synthetic construct
  misc_feature 1..120: note = Artificially Synthesized Probe
  source 1..120: mol_type = other DNA
cctgtggtattgggtggtgttcaaagaacttggagacaaacagcaaactgtgaggcaaaacaaaacaaacctaacttgtgcaaaacccagaagcttcatataccaaaatacatagttaac

SEQ ID NO: 1437 - DNA, 120 bp, synthetic construct
  misc_feature 1..120: note = Artificially Synthesized Probe
  source 1..120: mol_type = other DNA
gaacttctgtactacaacgctggtgaaatttataaccacatgtttgacagcggaaaccctggaaaagcagctttcgacaaaagtcacaaaatgctaaggtgaaaaacgtttttcgtacct

SEQ ID NO: 1438 - DNA, 120 bp, synthetic construct
  misc_feature 1..120: note = Artificially Synthesized Probe
  source 1..120: mol_type = other DNA
gtcttcatttttaacagaaaagtttaaaaagtaaaaaagaaaaattaaaaatttttaaaatagaagtttatagaataagcacataaaatatttttgtatagctatataatgtttttaaac

SEQ ID NO: 1439 - DNA, 120 bp, synthetic construct
  misc_feature 1..120: note = Artificially Synthesized Probe
  source 1..120: mol_type = other DNA
aacacttctctaggtgaaacttagaaggcaacatgttaagaattccatgtcaaaggcaaatgatgtagaacatgagtcacgtaacagaactgcactaggaagaatctatcccactaaagc

SEQ ID NO: 1440 - DNA, 120 bp, synthetic construct
  misc_feature 1..120: note = Artificially Synthesized Probe
  source 1..120: mol_type = other DNA
ggggggggtggttaatacttttaattacatgattgtaattatacaatttccactcttcaatattttgtataaaaccagttacaactcacaagattttcaaatgagacaggattttaccag

SEQ ID NO: 1441 - DNA, 120 bp, synthetic construct
  misc_feature 1..120: note = Artificially Synthesized Probe
  source 1..120: mol_type = other DNA
tagtgagaggcacagtcaaggtaatttgcatgcattaatttgtaaggtgtggggctgtgtgaaggaagacactgagtgtctgcagaaaaaggagaaggtttggatataaaagtttcaaat

SEQ ID NO: 1442 - DNA, 120 bp, synthetic construct
  misc_feature 1..120: note = Artificially Synthesized Probe
  source 1..120: mol_type = other DNA
ccatactctggaatcaatctgcagtttgctttcacaatccttctgtggcaaggaccttcctgaggcatcattttaatactattttctcacacttagcaacttaggtctttcttttatctc

SEQ ID NO: 1443 - DNA, 120 bp, synthetic construct
  misc_feature 1..120: note = Artificially Synthesized Probe
  source 1..120: mol_type = other DNA
actttaggcttacaggtacaagcacacgtttgtgtacacagaaaaaagtttggaagacagaacaataatctgttaatctaaacaaatgttggcctctaggagggtattttcacttttttt

SEQ ID NO: 1444 - DNA, 120 bp, synthetic construct
  misc_feature 1..120: note = Artificially Synthesized Probe
  source 1..120: mol_type = other DNA
taaacaaaatttcacgtcacatacaaaccatacccatcctgaattctgtaaacagcacagcactctgggattagacctctcatcatcagtgctttctttagactgtctcggactgtaact

SEQ ID NO: 1445 - DNA, 120 bp, synthetic construct
  misc_feature 1..120: note = Artificially Synthesized Probe
  source 1..120: mol_type = other DNA
gtccagggctatatatatgacccaaacagtacctgagttcttccctaaattgacacatggacactgacagagaaaagtccttgtttctactgtagttctgtagatttgcagaagatacaa

SEQ ID NO: 1446 - DNA, 120 bp, synthetic construct
  misc_feature 1..120: note = Artificially Synthesized Probe
  source 1..120: mol_type = other DNA
aacaaagaaaaaccctgaacttttacctacccagcaaggtaaaagtttgtcatgagagactgggctcatcactggaagtattaaagagactggatggtacagttgatcctcattacttgt

SEQ ID NO: 1447 - DNA, 120 bp, synthetic construct
  misc_feature 1..120: note = Artificially Synthesized Probe
  source 1..120: mol_type = other DNA
acagcagcttggaatctttatagccttgggatttgatcttatttatacctaatagatgttgagtacaaagcagttttgtggggactgcaaagtaggcaggctctcagtggctaaaaatct

SEQ ID NO: 1448 - DNA, 120 bp, synthetic construct
  misc_feature 1..120: note = Artificially Synthesized Probe
  source 1..120: mol_type = other DNA
cccttaggcactccagtaatgcacttcaaatatggctatgctccctcatgcttctctacatatgctgatcctaagttgcatatatatttcatcaacaggcaaaaatttggttttctgctc

SEQ ID NO: 1449 - DNA, 120 bp, synthetic construct
  misc_feature 1..120: note = Artificially Synthesized Probe
  source 1..120: mol_type = other DNA
atgagagacaggtcccagaaacagaagtagaaatggccttcacacatatgaaaacatgttcagtctcactcagaggaaagcaaacccaaactagtgaagttatttttcatttatcagatt

SEQ ID NO: 1450 - DNA, 120 bp, synthetic construct
  misc_feature 1..120: note = Artificially Synthesized Probe
  source 1..120: mol_type = other DNA
gttgttctaaaatttaggtggtcatcaaaattgttatatgtttaattctttgagatagtacattaatttggtagtttgttttacagtgcagacgattatatgccttaagtaagcttcatg

SEQ ID NO: 1451 - DNA, 120 bp, synthetic construct
  misc_feature 1..120: note = Artificially Synthesized Probe
  source 1..120: mol_type = other DNA
cattaaagtagaaaaaggaggatgtctataccacaaaaacttcagaaggtaaaagcaattttagaattaagcgtgcctcctggtcaggttgaatttaactggccaagaaccagaaaccac

SEQ ID NO: 1452 - DNA, 120 bp, synthetic construct
  misc_feature 1..120: note = Artificially Synthesized Probe
  source 1..120: mol_type = other DNA
agtcagtattgccctatcttttccctttgccattcctgtaccttggataccatcaggattaatgccaatcaacagatatttgtttacaaaccccagggtatgtaaacccaaagactcatt

SEQ ID NO: 1453 - DNA, 120 bp, synthetic construct
  misc_feature 1..120: note = Artificially Synthesized Probe
  source 1..120: mol_type = other DNA
gtctcttcaaatgatactccctgtcccaggaattccactttcaggtttgtgacaccttgttatatgtgtacaaggagacaagcacaagaatgttcttattacagcactgtttgtcataac

SEQ ID NO: 1454 - DNA, 120 bp, synthetic construct
  misc_feature 1..120: note = Artificially Synthesized Probe
  source 1..120: mol_type = other DNA
gtgatgtaaaagaccacatccagggtctatcacatttcttgatattacaatcctttgacttagtctaccttattttgaagatagcttatctagtctaccttatactgaagacagcttacc

SEQ ID NO: 1455 - DNA, 120 bp, synthetic construct
  misc_feature 1..120: note = Artificially Synthesized Probe
  source 1..120: mol_type = other DNA
agtgactgctaacgggtacagtgtttatttttgggatgaaaaaatatttttaaatgaattatcacggccacagaactttgtgaatatacaaaaatcattttatactttaaatgggtaaat

SEQ ID NO: 1456 - DNA, 120 bp, synthetic construct
  misc_feature 1..120: note = Artificially Synthesized Probe
  source 1..120: mol_type = other DNA
ataaaagtaaaaggtcagtccctttttcttgtcccagggaatatccccatccctccaataaccccaattaacagatttttacaattattcaaatatatctcagggccaggtgcagtggtt

SEQ ID NO: 1457 - DNA, 120 bp, synthetic construct
  misc_feature 1..120: note = Artificially Synthesized Probe
  source 1..120: mol_type = other DNA
caaagtgctggcaaaaaacaacagatgctggcaaagctgcagagaaaagggaaggcttgtacactgttggtgggaatgtaaattggttaggcactgtggaaagcagtttggaaatttctc

SEQ ID NO: 1458 - DNA, 120 bp, synthetic construct
  misc_feature 1..120: note = Artificially Synthesized Probe
  source 1..120: mol_type = other DNA
ataatgaacatacccatcactttctgaaaggttccttgtgctcctatgtaaatcttccatcctgccatagtcctgtgcccaggcaaatacaaatctgttgtcactatagaagagtttgca

SEQ ID NO: 1459 - DNA, 120 bp, synthetic construct
  misc_feature 1..120: note = Artificially Synthesized Probe
  source 1..120: mol_type = other DNA
caacagaaatctgggttgcttctgcctttggctactatagtgaataatgctgctatgaacatgagtgtacaaatatctctttgagatcctgctttcaattattttgggtatatacacaga

SEQ ID NO: 1460 - DNA, 120 bp, synthetic construct
  misc_feature 1..120: note = Artificially Synthesized Probe
  source 1..120: mol_type = other DNA
gatgcccccaactctgtactttttttgactgctttggctatacgggattccttgagatacggtatgaattttaggacggactttctatttctgaggaaaaaaaaaaaaagcccgttggga

SEQ ID NO: 1461 - DNA, 120 bp, synthetic construct
  misc_feature 1..120: note = Artificially Synthesized Probe
  source 1..120: mol_type = other DNA
gaacctatgaaaagtgaactccttctctggaaaggactttatggtgcatttgcccaagtcaacctaatcaaatttatagcttaacttagctgagagatttacaggtacctctcagtactc

SEQ ID NO: 1462 - DNA, 120 bp, synthetic construct
  misc_feature 1..120: note = Artificially Synthesized Probe
  source 1..120: mol_type = other DNA
gggcacaggagaaccctctaaagcatcaggaaatgtcctacatcttaatctacatggtagttacacatgtaaaaactctgagcgatatacttcagatttgtaccctctactgtgtataag

SEQ ID NO: 1463 - DNA, 120 bp, synthetic construct
  misc_feature 1..120: note = Artificially Synthesized Probe
  source 1..120: mol_type = other DNA
tatctttatgtattctggtaatagatttcagcctttcactgaaggtaatgtccttcaaagggtcagctttatgtgagaatctgggttccaactacctttgtgacacaggctgaaggccca

SEQ ID NO: 1464 - DNA, 120 bp, synthetic construct
  misc_feature 1..120: note = Artificially Synthesized Probe
  source 1..120: mol_type = other DNA
cgcaggccatacaaaaatagatggtgggttagatttgttgagggttatagttcagcgataccttaacatatcagctcctatgcttttctggttttttcaactccgtctttgttttcaccc

SEQ ID NO: 1465 - DNA, 120 bp, synthetic construct
  misc_feature 1..120: note = Artificially Synthesized Probe
  source 1..120: mol_type = other DNA
attccactgaaataattttcagtccctagatacccaaagtgtcttacttttaatattagcttggctattaacttccatcagatctttaatggccctgatccactgccttctagccctcag

SEQ ID NO: 1466 - DNA, 120 bp, synthetic construct
  misc_feature 1..120: note = Artificially Synthesized Probe
  source 1..120: mol_type = other DNA
attgacctagtaaatatcacacctatatgatgaagcttccataaaaatcactgaaatgcaatgttcctagagcttccagggtgctgaacatttggaggtagtggaaggtgatgctcctaa

SEQ ID NO: 1467 - DNA, 120 bp, synthetic construct
  misc_feature 1..120: note = Artificially Synthesized Probe
  source 1..120: mol_type = other DNA
atgctacaaattatttgttccatatatacagaagaggaactaacaggatccccttgttgtacaactccaggaggcaacattcacatctctatggacatgtgcaatgtaaggctatactgg

SEQ ID NO: 1468 - DNA, 120 bp, synthetic construct
  misc_feature 1..120: note = Artificially Synthesized Probe
  source 1..120: mol_type = other DNA
gaggaactgtcattcactaccacaaacaattttacttagaatgtgaattatcctggctgagaagatgtatgtaaagtccttagcacagaacttggaacacagcatggcaaatgctcaaat

SEQ ID NO: 1469 - DNA, 120 bp, synthetic construct
  misc_feature 1..120: note = Artificially Synthesized Probe
  source 1..120: mol_type = other DNA
ctactggggatgggatgtttgccagttttgttaggctgcttcgaagattatctatttacagataattcatatgttgatattccccttttaagtggggcatccctggaaagatatgcttag

SEQ ID NO: 1470 - DNA, 120 bp, synthetic construct
  misc_feature 1..120: note = Artificially Synthesized Probe
  source 1..120: mol_type = other DNA
acaactgatctgtctgaaaaatacaaagaaacagcaaaatggtgatattaaaactgactcaccactgtcctctgtttgttgggcaggaagactctaacgataggtttttgtggtgacttg

SEQ ID NO: 1471 - DNA, 120 bp, synthetic construct
  misc_feature 1..120: note = Artificially Synthesized Probe
  source 1..120: mol_type = other DNA
ctaccatctcaaatagatgcaatactacaaacatttatgaaagagagaagcaaatattttaaaatggcctttcccgtctctcaaggagtttactgttgggcagtggagtaggatgggtgt

SEQ ID NO: 1472 - DNA, 120 bp, synthetic construct
  misc_feature 1..120: note = Artificially Synthesized Probe
  source 1..120: mol_type = other DNA
gtaacaagagctactgaggaagagatttaaacttcatcaaaaggtcttctttgtttacagcctgctagttgccctacccagaccctgtttcatagtagatgagggcattataaacagata

SEQ ID NO: 1473 - DNA, 120 bp, synthetic construct
  misc_feature 1..120: note = Artificially Synthesized Probe
  source 1..120: mol_type = other DNA
cacgcacccctggggcacacatacttatcccaacttcttaaatgtctatctcattacattaatctgttcaaggtcaacattaatctctcaaacagttgctaagatttggccattgttgtc

SEQ ID NO: 1474 - DNA, 120 bp, synthetic construct
  misc_feature 1..120: note = Artificially Synthesized Probe
  source 1..120: mol_type = other DNA
ggttgtcaggggctggagggaatgacttccaatgcatgaagggtttctttgtgggaatgataaaaatattttagaatcagatagtggtgacagttgtccattgtgtaaatacactaagaa

SEQ ID NO: 1475 - DNA, 120 bp, synthetic construct
  misc_feature 1..120: note = Artificially Synthesized Probe
  source 1..120: mol_type = other DNA
agaataaaagaaatgcaattatggccttttatctccttttcaccagacattccctacaaggcaagttgatctaattatgtgcttagacaatcctgagtggaactctcacccgtcaggaag

SEQ ID NO: 1476 - DNA, 120 bp, synthetic construct
  misc_feature 1..120: note = Artificially Synthesized Probe
  source 1..120: mol_type = other DNA
cttaggaaaaaaacacaggagtaaatcatcctgacctttgattaggcaatggtctctcatgtatgatacaccaaaagcacagcaaccacagaaaatagataaattggaattccatccaca

SEQ ID NO: 1477 - DNA, 120 bp, synthetic construct
  misc_feature 1..120: note = Artificially Synthesized Probe
  source 1..120: mol_type = other DNA
catgatatatgtgtatgatgaaatattcagccataacaagaaatgaagtactgatacatactactacataaacaaactttggaaacattacattaagtaaaagcagccagtcacaaaagg

SEQ ID NO: 1478 - DNA, 120 bp, synthetic construct
  misc_feature 1..120: note = Artificially Synthesized Probe
  source 1..120: mol_type = other DNA
ggactcagctgtagggtgattacagagacagtatcccttcatctctgggctccaataaatcaagtacagaaagaagaatctactactagaaaagcatctagcattatatcttacacatag

SEQ ID NO: 1479 - DNA, 120 bp, synthetic construct
  misc_feature 1..120: note = Artificially Synthesized Probe
  source 1..120: mol_type = other DNA
ctgtggtcttgacagaaaagctaaagggactatagcgattcaaccaagtatctgacaactgacctgtgtagaactagtcttacaataatttacctctacgcttcttgctatgtgaaagga

SEQ ID NO: 1480 - DNA, 120 bp, synthetic construct
  misc_feature 1..120: note = Artificially Synthesized Probe
  source 1..120: mol_type = other DNA
tctgcactgtttctgagtttctgttgaccatttctgctgctgtctttcctgttgacagctttctttaaatatctggttattcttaactgtccactcatatttcagagttaagaattctta

SEQ ID NO: 1481 - DNA, 120 bp, synthetic construct
  misc_feature 1..120: note = Artificially Synthesized Probe
  source 1..120: mol_type = other DNA
aaaatggaccaagaacttaaatcagacatttctcaaaaaagatatacaaatggccaataagcacataataaaaggctcaacattgttagtcatcaggaaaatgcaaatcagcaccataat

SEQ ID NO: 1482 - DNA, 120 bp, synthetic construct
  misc_feature 1..120: note = Artificially Synthesized Probe
  source 1..120: mol_type = other DNA
aaaaaaagtgtaaaggaatcttaaatggcagatgagaaacctgcagaacggtgggtctcagtgagtaatcagtagatctagctcttcactgatgggcctttaaatatcagtatgtacagg

SEQ ID NO: 1483 - DNA, 120 bp, synthetic construct
  misc_feature 1..120: note = Artificially Synthesized Probe
  source 1..120: mol_type = other DNA
cttacccaagatgtgatattatttccactttactaatgaggtggggtataagaaggctggatatcttgagtacagaaactaagccagagttgggattcaaacatggagtctgtatgactc

SEQ ID NO: 1484 - DNA, 120 bp, synthetic construct
  misc_feature 1..120: note = Artificially Synthesized Probe
  source 1..120: mol_type = other DNA
ttgttgttagtgatcagtcttcaaatagtaaaaagcctgaagagttatgtgaggagggggcagtgaatcactgctatagtggggacatagctattgatgcaaatgaattacatctcagca

SEQ ID NO: 1485 - DNA, 120 bp, synthetic construct
  misc_feature 1..120: note = Artificially Synthesized Probe
  source 1..120: mol_type = other DNA
ccttaccacctagattctgtaacaccttgttggctgtggagtctgactgactacttaagaaaactaatgctaagaaagctcatctgtgattataacagcacctactaactcataggatta

SEQ ID NO: 1486 - DNA, 120 bp, synthetic construct
  misc_feature 1..120: note = Artificially Synthesized Probe
  source 1..120: mol_type = other DNA
ttcctcacattcccaggccccctttcaaaaaggttaagttctgtttatggtttggtgagcagccttccatgtctcccttttactcatggaaaaaacattaagacatacatatatgaaatg

SEQ ID NO: 1487 - DNA, 120 bp, synthetic construct
  misc_feature 1..120: note = Artificially Synthesized Probe
  source 1..120: mol_type = other DNA
aaatttaataaatatgccaaatggtcttccaaaagaagaaatgtatcaagtcaagtccctatctgcagggtataagtccactcttccccacaatctcaccaacacccagcacaatcacac

SEQ ID NO: 1488 - DNA, 120 bp, synthetic construct
  misc_feature 1..120: note = Artificially Synthesized Probe
  source 1..120: mol_type = other DNA
aacttaacatgttcaaagactaacttctgatctcccccatcacccccacaaaacttgtttttcctagtctctttacctcaggaaataagctcccttctttgagtaaaccaaaaacttcag

SEQ ID NO: 1489 - DNA, 120 bp, synthetic construct
  misc_feature 1..120: note = Artificially Synthesized Probe
  source 1..120: mol_type = other DNA
cattcatctctttatcccaatgtcaccttatcaatgaagcattctcttaccttctcatttagaaaggctctatccctcccattccttaaaggcacagaatcagcttctatgccctttgtt

SEQ ID NO: 1490 - DNA, 120 bp, synthetic construct
  misc_feature 1..120: note = Artificially Synthesized Probe
  source 1..120: mol_type = other DNA
ggatgggagagagaaagtgggggaaaataatcagagatgagaaatgaagagaatgagctgattagaataaaattttcttgctggggtataaaaaacggttaagattgggctgggagtggt

SEQ ID NO: 1491 - DNA, 120 bp, synthetic construct
  misc_feature 1..120: note = Artificially Synthesized Probe
  source 1..120: mol_type = other DNA
gaagatgcccatgttaaaatataaatgcagacaaactgctatggaaggacatgaaggggagctatggcacaaaaaaaaaactacagccattggctcccctcatcccttaaagaaaatgta

SEQ ID NO: 1492 - DNA, 120 bp, synthetic construct
  misc_feature 1..120: note = Artificially Synthesized Probe
  source 1..120: mol_type = other DNA
gagggaagggagagacagaagtggtcttaaaatttcaagaaaatggttgaaagaatcacagtactgaaagcaaggaggccaggaccatcaaccacttagttggaaaaattcagaacattc

SEQ ID NO: 1493 - DNA, 120 bp, synthetic construct
  misc_feature 1..120: note = Artificially Synthesized Probe
  source 1..120: mol_type = other DNA
acattaatgggggaaagggccagcattacagcatttcaaacctatctattattattcaagaagagagatctaggaacatcttgtgccagatatcagaacaacatcagaggccagcttgaa

SEQ ID NO: 1494 - DNA, 120 bp, synthetic construct
  misc_feature 1..120: note = Artificially Synthesized Probe
  source 1..120: mol_type = other DNA
cagtgcatgcagagtggatcttagtttagggatggaagatagctgcaagagacattcttgggacaaccatggaaatctgaacacatatcagatgtaagatgatagaattttaaccttcct

SEQ ID NO: 1495 - DNA, 120 bp, synthetic construct
  misc_feature 1..120: note = Artificially Synthesized Probe
  source 1..120: mol_type = other DNA
ggggataacagaccttagggaattgtgtgtgccttaatacttctttatttttctccactaaaccttatttcacattacaccaaatgacatgtatgtgtgcatgcagatgtgttccccttc

SEQ ID NO: 1496 - DNA, 120 bp, synthetic construct
  misc_feature 1..120: note = Artificially Synthesized Probe
  source 1..120: mol_type = other DNA
gcatatggttcacattggcattataatttagtggggaacagaacggactatataataaatatttccagggtaagtggccatccttttggaaaaggtcaactaatccaaaagaaaatgggc

SEQ ID NO: 1497 - DNA, 120 bp, synthetic construct
  misc_feature 1..120: note = Artificially Synthesized Probe
  source 1..120: mol_type = other DNA
tctattttgaatttggactgttagccactcagaatctgccttaaagggttggttctttcagggttcacaaaaacatgcaatcaacgttctagattgtttgtggatctacacccacagcaa

SEQ ID NO: 1498 - DNA, 120 bp, synthetic construct
  misc_feature 1..120: note = Artificially Synthesized Probe
  source 1..120: mol_type = other DNA
tagaattaatttggcatcagacttttcatcagcaacattaaaagacaatgaagacggaaagtagattacttgttgacttaaggctggggggtgggcaaattggtgggaacagagaatgac

SEQ ID NO: 1499 - DNA, 120 bp, synthetic construct
  misc_feature 1..120: note = Artificially Synthesized Probe
  source 1..120: mol_type = other DNA
tagaaagttaaagatagtgactgtggctatatggtaagcaaggggagagtagaaacaagatgggtatcagaaaaattaggcaatatgccaggttatgaaggatcctgaaagccacggtaa

SEQ ID NO: 1500 - DNA, 120 bp, synthetic construct
  misc_feature 1..120: note = Artificially Synthesized Probe
  source 1..120: mol_type = other DNA
gacctacaagagagtataggccaagaaggctcagccctggggatcataaacatttacaagagaaaccaaaaatggctgaaaagaaagaaacagacactgaggtagaaggaaaaaatattc

SEQ ID NO: 1501 - DNA, 120 bp, synthetic construct
  misc_feature 1..120: note = Artificially Synthesized Probe
  source 1..120: mol_type = other DNA
tgcctaagtgcaggcaggtagcgggcattttgtcaggcccatatgatgaaaagagagaaaaattagagagccaaaggtattagtaatttttacagtcatttcataatagtatcttgaccc

SEQ ID NO: 1502 - DNA, 120 bp, synthetic construct
  misc_feature 1..120: note = Artificially Synthesized Probe
  source 1..120: mol_type = other DNA
aggactgtgcgctctgtgaatttggaacttaccccacttgatcagttttactcctagcacctaagtatactacctagcatgaagcaggtagtttataagtgctggctatataaaatatta

SEQ ID NO: 1503 - DNA, 120 bp, synthetic construct
  misc_feature 1..120: note = Artificially Synthesized Probe
  source 1..120: mol_type = other DNA
agacaatgtcagatggtcataaaaagttatagagaaaaacagagactgtgagcaggatcggggtgggtggctattcattttgtagtatggtaaaacttgaaggtctcattggtaagatga

SEQ ID NO: 1504 - DNA, 120 bp, synthetic construct
  misc_feature 1..120: note = Artificially Synthesized Probe
  source 1..120: mol_type = other DNA
cattgacccaagcagtggttgttttaagcactatgctttggagtggcttttgtacaaaagaaaattaatacgttctgttagggaaacagtagtccacagcaggaggagacacaaaaactt

SEQ ID NO: 1505 - DNA, 120 bp, synthetic construct
  misc_feature 1..120: note = Artificially Synthesized Probe
  source 1..120: mol_type = other DNA
tgtccagatggcaggcatgatatacacagtagctatctgcacatgtacaacttaatcaaggctattcatgctgttgtcattcaactcagttatctgcattgttggtattacaaatgttgg

SEQ ID NO: 1506 - DNA, 120 bp, synthetic construct
  misc_feature 1..120: note = Artificially Synthesized Probe
  source 1..120: mol_type = other DNA
aacagtaaaatgccctatctgcagagtaacacagggcattcagattctaggtaatcttagtacttcaagtctttgcaggtagctctttttacttccaagtctctagtgatatcacccttc

SEQ ID NO: 1507 - DNA, 120 bp, synthetic construct
  misc_feature 1..120: note = Artificially Synthesized Probe
  source 1..120: mol_type = other DNA
ctggccaccacagggacagaggctacacacatacacatattgagaagaagtacccatattctctaaagcaaggactgcctagctcacttagtagaactagaaattaatggatttttatat

SEQ ID NO: 1508 - DNA, 120 bp, synthetic construct
  misc_feature 1..120: note = Artificially Synthesized Probe
  source 1..120: mol_type = other DNA
gaagaagaaataacaaagaaaatttaagaatttctccttgagccaaaaggcaaataagagtcttcagaaccaaagttccttttttaacaaagaaagaataagagctgggcatggtggctt

SEQ ID NO: 1509 - DNA, 120 bp, synthetic construct
  misc_feature 1..120: note = Artificially Synthesized Probe
  source 1..120: mol_type = other DNA
cggaggaaagcaaaagccaggtcaggcaacatggtggcctgaagtttgaatatactccctgatacacagatagacacacaaagaaagaatagaaaccttactggccttgaaatatttgaa

SEQ ID NO: 1510 - DNA, 120 bp, synthetic construct
  misc_feature 1..120: note = Artificially Synthesized Probe
  source 1..120: mol_type = other DNA
aaaaaggcaaagaaataacattcaaagatagtgtctcagttttttcccctcacttttctcacgtaaccccatggtggcagcggcaacaataggatcttcaaaagagccaacattctgaga

SEQ ID NO: 1511 - DNA, 120 bp, synthetic construct
  misc_feature 1..120: note = Artificially Synthesized Probe
  source 1..120: mol_type = other DNA
tcaaaagccttcccaaatctgacaaatgacataaaactacagattcaaaaaggtcggtgaatccaaaaatggataaatacgtagaattccacactctcacacatcataaagtgttgaaaa

SEQ ID NO: 1512 - DNA, 120 bp, synthetic construct
  misc_feature 1..120: note = Artificially Synthesized Probe
  source 1..120: mol_type = other DNA
cagaatggctaaaagttgttcaaacaatctaaaagaatgcaggaaagacagagtaatggaaaacagaagcagctaacagaaaacaaattactaaactggtaaacctaaatctaaacatgc

SEQ ID NO: 1513 - DNA, 120 bp, synthetic construct
  misc_feature 1..120: note = Artificially Synthesized Probe
  source 1..120: mol_type = other DNA
aggcataataaacatgacaataaggttaatcccaggaccacaaggctagttcaatattcaactgaatgaaaatacagcatactaaatctgtgggatgcaaatacagtagtgctacagtga

SEQ ID NO: 1514 - DNA, 120 bp, synthetic construct
  misc_feature 1..120: note = Artificially Synthesized Probe
  source 1..120: mol_type = other DNA
atggcatacagcaaaagcaatgctcaaaggacaatttatagcaataaatgtccacccctacctcacaccatattttaaaaaccctcaaaatgaataaatgatataggagctaaaataata

SEQ ID NO: 1515 - DNA, 120 bp, synthetic construct
  misc_feature 1..120: note = Artificially Synthesized Probe
  source 1..120: mol_type = other DNA
aaaaaaaaaaaaaagcacatatcttaattttaaaatagtgttaaaaaccactaacaattacctgggccttcaaggagtcatcatttttgtgttggtgggtcttgcctcagtgttgatggc

SEQ ID NO: 1516 - DNA, 120 bp, synthetic construct
  misc_feature 1..120: note = Artificially Synthesized Probe
  source 1..120: mol_type = other DNA
ccctcaaagtcatccacaagcattagaatgaacttcttccaaactcctgttaatggtgctattttgacctcctctcatgaatcacaaacattcttaatggcatctagaaaggtgaataat

SEQ ID NO: 1517 - DNA, 120 bp, synthetic construct
  misc_feature 1..120: note = Artificially Synthesized Probe
  source 1..120: mol_type = other DNA
cgacgtctcactatgatggccaggctggtctcgaactcctagcctcaagtgatcctcccaccttggcctcttaaaagtgctgggattacaggcatgagcctgttttgctttcttatcatt

SEQ ID NO: 1518 - DNA, 120 bp, synthetic construct
  misc_feature 1..120: note = Artificially Synthesized Probe
  source 1..120: mol_type = other DNA
aaacacaataaaacaaagtaagcctataattccacatataattcctgcaatgctttacagttgtcaaataaaaaaatgtctacaatcctttctattgggtggcaaaaaccacaattactt

SEQ ID NO: 1519 - DNA, 120 bp, synthetic construct
  misc_feature 1..120: note = Artificially Synthesized Probe
  source 1..120: mol_type = other DNA
atgacaccacatgttctccccacagggcaattttgtttttcctctatggtacctttatttatttttccagttagccatgtaagctttctcaggcttggcctttaatctgtcgtatataac

SEQ ID NO: 1520 - DNA, 120 bp, synthetic construct
  misc_feature 1..120: note = Artificially Synthesized Probe
  source 1..120: mol_type = other DNA
cactcctaatttctagaagaacataagtgtttaacagagacataagatatcttttacttctccagaagcccccaatttaaatcagctccccattacagggactctgattttggtttcagg

SEQ ID NO: 1521 - DNA, 120 bp, synthetic construct
  misc_feature 1..120: note = Artificially Synthesized Probe
  source 1..120: mol_type = other DNA
agggtttcagaaacctgcaggtattccttcatacctcttattaacatttagttacatatttgtgcccagattttgttcaaggtctgtgttacaatgtagtttccacaaatgcggcaactg

SEQ ID NO: 1522 - DNA, 120 bp, synthetic construct
  misc_feature 1..120: note = Artificially Synthesized Probe
  source 1..120: mol_type = other DNA
gaatctgcaaaacacataactgattcacaacactccccttccttaaaccctttaatggctccccagtaactcagaatacaacctaaacttcctagtacagagtgcaagatctgaaaagat

SEQ ID NO: 1523 - DNA, 120 bp, synthetic construct
  misc_feature 1..120: note = Artificially Synthesized Probe
  source 1..120: mol_type = other DNA
atctgaccgcaaatattttttgaaatggagaacatcagttaacctgatgagttggttaggtggaggtcagttcagagagctaaaattacttttcccttttgggtaatatggctgcagtga

SEQ ID NO: 1524 - DNA, 120 bp, synthetic construct
  misc_feature 1..120: note = Artificially Synthesized Probe
  source 1..120: mol_type = other DNA
aagaaaacattattgctgctagaggggaaaaaatcaaagttaacactttccctactctactacaagctgcttgtcatccataatacaggataaaaacaatgatctagcgcgggtgcagtg

SEQ ID NO: 1525 - DNA, 120 bp, synthetic construct
  misc_feature 1..120: note = Artificially Synthesized Probe
  source 1..120: mol_type = other DNA
agaaatgttttattttctaggactaccacagcccagggtactaaggagattcaagacaataatccaaattcaacccatcagtcaaaagtcagtgaggatgccaaaaggtataaggagagc

SEQ ID NO: 1526 - DNA, 120 bp, synthetic construct
  misc_feature 1..120: note = Artificially Synthesized Probe
  source 1..120: mol_type = other DNA
ggatacagtggtgagcaagacggacaaattcctatagccctcagagaactcacatactccatctagattttttttttctaagctaaaactccctactcctttcactgttcttcaatgatt

SEQ ID NO: 1527 - DNA, 120 bp, synthetic construct
  misc_feature 1..120: note = Artificially Synthesized Probe
  source 1..120: mol_type = other DNA
atcccaaatagcatcctccaggcatgacaatcaaaatatttccaaatgcctcccagcagggtaagtatcacctcagaaaccattgaaaaaaaaaattgggtggtatggagaaaatgaagg

SEQ ID NO: 1528 - DNA, 120 bp, synthetic construct
  misc_feature 1..120: note = Artificially Synthesized Probe
  source 1..120: mol_type = other DNA
actatggaacctatctttgggagaacactttgaatattcagtatccacaatataaactttaggaaatactgtgctagagcatttagtacacagcaaggatggctgatagacgtgggcagg

SEQ ID NO: 1529 - DNA, 120 bp, synthetic construct
  misc_feature 1..120: note = Artificially Synthesized Probe
  source 1..120: mol_type = other DNA
ttcttaagcaaagagcaggctcaaatagaagtactctactcaaagacaacaaggatgagtaataaaaagaaacaatccagcaaagggtctatgaggagaaacgttaacaaccccacccgc

SEQ ID NO: 1530 - DNA, 120 bp, synthetic construct
  misc_feature 1..120: note = Artificially Synthesized Probe
  source 1..120: mol_type = other DNA
gcagggttcaagaaagaaatggaaggtaataaaaagaccacttcagaaatgaaggccacggtggaaacagaaagaaatggctgaagaagaaaaaaggaagccattcttggcagaaaaaac

SEQ ID NO: 1531 - DNA, 120 bp, synthetic construct
  misc_feature 1..120: note = Artificially Synthesized Probe
  source 1..120: mol_type = other DNA
ccaactgtcagcaaactagaaatggaagaaacattcttaaacttcatatagggtatctataaaaagtctgtaagtcaccaagcataacagaagcattctcactaaagacaggagaaacat

SEQ ID NO: 1532 - DNA, 120 bp, synthetic construct
  misc_feature 1..120: note = Artificially Synthesized Probe
  source 1..120: mol_type = other DNA
acaacagcacaaaaagattctcgcaaataataccaatcctccacatccaaaaggatgaaaacattatgtagaaaactataaaccttttaaggaaaaaaaaacagagctgggagtagtggc

SEQ ID NO: 1533 - DNA, 120 bp, synthetic construct
  misc_feature 1..120: note = Artificially Synthesized Probe
  source 1..120: mol_type = other DNA
atagacaaacaggttaagaagtagcccagaaatcggtccatgggaatctggtagaaatgagaggttgctttacaaataagtgagaaaaagactgtgcacatatgtacaaatggtgttggg

SEQ ID NO: 1534 - DNA, 120 bp, synthetic construct
  misc_feature 1..120: note = Artificially Synthesized Probe
  source 1..120: mol_type = other DNA
ttccattaaagcataactgtaaagcaaaccccacaacccaaggtaagaaatagcattgccaattatcttaaaagtctcccatttgtccttaatcacatccactttctctcctccctgagg

SEQ ID NO: 1535 - DNA, 120 bp, synthetic construct
  misc_feature 1..120: note = Artificially Synthesized Probe
  source 1..120: mol_type = other DNA
atgcatactcaagaaccattagtctagggcaaacgcctaagagtgagtggtattgctggttataggatatcctattattttccaaaggatttttccccccaatttacattcccatccatc

SEQ ID NO: 1536 - DNA, 120 bp, synthetic construct
  misc_feature 1..120: note = Artificially Synthesized Probe
  source 1..120: mol_type = other DNA
agaaattgatttttatgcataacagatggggaagtctagcttcatttatttaatatggtaggcattgttccagcaagtgtatcctttcccaactaatctgccacaagagcaggtgtccct

SEQ ID NO: 1537 - DNA, 120 bp, synthetic construct
  misc_feature 1..120: note = Artificially Synthesized Probe
  source 1..120: mol_type = other DNA
ttgggtgggagccagatctcacattcacaaaggtaataaccaggatgagcagtgcctaccatagagcattaaaaatttgccgagtggaaaaaggaattaaagaagtcttcctaccttatt

SEQ ID NO: 1538 - DNA, 120 bp, synthetic construct
  misc_feature 1..120: note = Artificially Synthesized Probe
  source 1..120: mol_type = other DNA
tgagatttcaatattgaaattaggccaattaaaaaccctacaatgacttctaagtgttcaagtgaaaccaagagtcacatgtctctctcttgaaatcaaaagctagaaatgattaagctt

SEQ ID NO: 1539 - DNA, 120 bp, synthetic construct
  misc_feature 1..120: note = Artificially Synthesized Probe
  source 1..120: mol_type = other DNA
aagtaattgtgactttcaacattccttatttaagaagtacctttcattgggctatagccgccatagatatcgttattactctgatggatctgggcaacattaattgaaagccttctgcaa

SEQ ID NO: 1540 - DNA, 120 bp, synthetic construct
  misc_feature 1..120: note = Artificially Synthesized Probe
  source 1..120: mol_type = other DNA
tttccaatcaagaatctttcataggtggtaggtatttcttttttgggggaggcagggaggggtgtcaagaaacttcgtatctaaagacataacatttgattctctcactttcaatggtct

SEQ ID NO: 1541 - DNA, 120 bp, synthetic construct
  misc_feature 1..120: note = Artificially Synthesized Probe
  source 1..120: mol_type = other DNA
atcttcacagtgaattggtcattttatcatttgaggtgactcttctgccaataatgctttctgccttactgtccacctttgatattaactgtaccatactgtctgctagaatatgcatgg

SEQ ID NO: 1542 - DNA, 120 bp, synthetic construct
  misc_feature 1..120: note = Artificially Synthesized Probe
  source 1..120: mol_type = other DNA
cagcctctcaaagtaccatgcccagcttcttgtcacatattttaattaaggtcttactagtactttatacagtcaacgtttcttttaatacatccacatatttgccactctctttgctct

SEQ ID NO: 1543 - DNA, 120 bp, synthetic construct
  misc_feature 1..120: note = Artificially Synthesized Probe
  source 1..120: mol_type = other DNA
ctgtgctacactctaaacagtttcttctgccttgtctcccaggcaatgaactctttcttcagctaggcataatctcttaggtatatttggtaaagtgttcacttctggaatttctatttg

SEQ ID NO: 1544 - DNA, 120 bp, synthetic construct
  misc_feature 1..120: note = Artificially Synthesized Probe
  source 1..120: mol_type = other DNA
cttgaaaaattactggaagcaattccctagaatgaaaggcctttctccacacgtgatttgcctttccatctgccaggccatggaagtaatactagtctgaaaccagtaaccatgataaat

SEQ ID NO: 1545 - DNA, 120 bp, synthetic construct
  misc_feature 1..120: note = Artificially Synthesized Probe
  source 1..120: mol_type = other DNA
taataaataacacactgatggtactttgtacatatatacaacaagcactgtgactgtggcagttacaactgcagactgaagagtatttgcgtcaccaatacagcacaagtgacactgcca

SEQ ID NO: 1546 - DNA, 120 bp, synthetic construct
  misc_feature 1..120: note = Artificially Synthesized Probe
  source 1..120: mol_type = other DNA
ctgttatccactttggtggttaatcacgtgctgccatatgcatgctttgtctcttcaattaacagtgttattgtttagaagacttttttcccctccaaatgaaatcccaagcacaattcc

SEQ ID NO: 1547 - DNA, 120 bp, synthetic construct
  misc_feature 1..120: note = Artificially Synthesized Probe
  source 1..120: mol_type = other DNA
tatagtgagtaaaacaaggtaaactctgggattctacaaaagcacaaagcagaggcatcaaactaggacttggaaagaggttaagaaaagcttcctacaataaacggtaggtgaggtaag

SEQ ID NO: 1548 - DNA, 120 bp, synthetic construct
  misc_feature 1..120: note = Artificially Synthesized Probe
  source 1..120: mol_type = other DNA
tcataaagtatagatgctcctatagaaagccaatccttcctatttatacactaaatccctttccctcttacctcttctaagacagtgcttcagcaattcttctctctccctcctgaaacg

SEQ ID NO: 1549 - DNA, 120 bp, synthetic construct
  misc_feature 1..120: note = Artificially Synthesized Probe
  source 1..120: mol_type = other DNA
ctgacctccctatttaaattgctacctacccccatcccagccctaaactgtttaactttcattgctccacagcacttattacctttgaacatactacataatttcctttctgtatgtcta

SEQ ID NO: 1550 - DNA, 120 bp, synthetic construct
  misc_feature 1..120: note = Artificially Synthesized Probe
  source 1..120: mol_type = other DNA
gaaggcatgtgcaggaagaatatgagtggaatatcatcagtgttagaggcaatcctgcaaaaactaaagggagatgaacattttctgtggctctagaataggaatataaagaccactctg

SEQ ID NO: 1551 - DNA, 120 bp, synthetic construct
  misc_feature 1..120: note = Artificially Synthesized Probe
  source 1..120: mol_type = other DNA
agtcaattgagaaacaaccccaagcagtacattaaactgtttaaaatatgccaaaataagtgactaattcaaagtatcctaacattttatttcaattaagcagttctaaaactataaagt

SEQ ID NO: 1552 - DNA, 120 bp, synthetic construct
  misc_feature 1..120: note = Artificially Synthesized Probe
  source 1..120: mol_type = other DNA
tgatgagaaacatcattttacactgtagggataattccctgggctaaccagtaaaaagctatcagtgcagtttaaaacaaagtaaaggggccctataggccccactgaaaaaggtagaaa

SEQ ID NO: 1553 - DNA, 120 bp, synthetic construct
  misc_feature 1..120: note = Artificially Synthesized Probe
  source 1..120: mol_type = other DNA
aaagcaattatgaactttctatagacctctaacctacatcttactttgagaacctcaaatataacatatatagtctcccttagaccaggagtcagaacagttcagcccatgaactggccc

SEQ ID NO: 1554 - DNA, 120 bp, synthetic construct
  misc_feature 1..120: note = Artificially Synthesized Probe
  source 1..120: mol_type = other DNA
acctctgaagaaggtccttgaaaccccaaaacagtgtttttcaaactgcctgttgcagccaatttggctgtcaatttcataaggtgattttgtgaccggcagaaaaaaagaatagaatgt

SEQ ID NO: 1555 - DNA, 120 bp, synthetic construct
  misc_feature 1..120: note = Artificially Synthesized Probe
  source 1..120: mol_type = other DNA
tcccacagtacatttgtcccaaacgtgctgtcaggaactgcagctacattacaagaatgaaaacgacgctttatccgatgttacagagcttccagaagatataaagttaattgagttcaa

SEQ ID NO: 1556 - DNA, 120 bp, synthetic construct
  misc_feature 1..120: note = Artificially Synthesized Probe
  source 1..120: mol_type = other DNA
acaggtttccagctgctatatccagacccacctcctattcattctaatcaagaaagcaagggatagaaaaacaagaaaagtcagactgttctagcctgttaccctaatgtaatttttctg

SEQ ID NO: 1557 - DNA, 120 bp, synthetic construct
  misc_feature 1..120: note = Artificially Synthesized Probe
  source 1..120: mol_type = other DNA
gatcagagatcttgaaaacagaacataataaaattgtaattctaatgcaattgtgagaagctcccttctacagaaacagcacaggaagaacagttaataaatatcactctggtatcacac

SEQ ID NO: 1558 - DNA, 120 bp, synthetic construct
  misc_feature 1..120: note = Artificially Synthesized Probe
  source 1..120: mol_type = other DNA
gccctcgctctcacttactaaatcagactcttcagggggtacagttccaaacaatctggccctttcaaataaaatagaagggtagagattttacttcacaaaagccttctttacagaatt

SEQ ID NO: 1559 - DNA, 120 bp, synthetic construct
  misc_feature 1..120: note = Artificially Synthesized Probe
  source 1..120: mol_type = other DNA
ggaaaaaaataggacaaaaaggaggacaacactaagaaatcaatcagacctataaaaatgggtaggaataaagaggtgtgaatgcacaatggacgactagccaaaaagtgccagtagtgc

SEQ ID NO: 1560 - DNA, 120 bp, synthetic construct
  misc_feature 1..120: note = Artificially Synthesized Probe
  source 1..120: mol_type = other DNA
caaatagaaaagtgaaaaagggcagcggactgagaaggggggcagtccgggagaggagagaggaaatgatgagccccatcatccccacgaccatgtaagaattacacgcgacagtaactc

SEQ ID NO: 1561 - DNA, 120 bp, synthetic construct
  misc_feature 1..120: note = Artificially Synthesized Probe
  source 1..120: mol_type = other DNA
ttggctaaaacttaaaacttttttaaaatagggtaaacgcgccacctgcgaggaaagaagaagggggtaaggttgattgacaactttagacctggaagttgagtttctgaagaggaactt

SEQ ID NO: 1562 - DNA, 120 bp, synthetic construct
  misc_feature 1..120: note = Artificially Synthesized Probe
  source 1..120: mol_type = other DNA
ataggaatcatggcggctgcgctgttcgtgctgctgggattcgcgctgctgggcacccacggagcctccggggctggtgaggagcgggtagggggcgggggtgcggtcctgcaggggccg

SEQ ID NO: 1563 - DNA, 120 bp, synthetic construct
  misc_feature 1..120: note = Artificially Synthesized Probe
  source 1..120: mol_type = other DNA
ggaaatggattgaggtgtgtttttccgggagaaaagcatgacatcctttcttgcttcatagaaaatttcttcctttgttgagacccccatttggttctgggttaaagatttatagtgagg

SEQ ID NO: 1564 - DNA, 120 bp, synthetic construct
  misc_feature 1..120: note = Artificially Synthesized Probe
  source 1..120: mol_type = other DNA
aaaaaaaaatttattgtgaccgatgtgttgggaacaaggtgcagagctggagggtctggcctcctgaagggtcaagagcaagggcttcgagcctctgtcctgggcattgagccgtagggg

SEQ ID NO: 1565 - DNA, 120 bp, synthetic construct
  misc_feature 1..120: note = Artificially Synthesized Probe
  source 1..120: mol_type = other DNA
ctggccctgagccctgggcaaggaggcggaggctgtttttagatgaaggtgactttacttgagaacatgggttacgtctcatgtggccagaatcgaattctaacctttctggggctgtgg

SEQ ID NO: 1566 - DNA, 120 bp, synthetic construct
  misc_feature 1..120: note = Artificially Synthesized Probe
  source 1..120: mol_type = other DNA
tgtgcttcctgccctgactcacctcgcccagctctgcacatagctgccagtgttgcagtctgggaaatcttaactcccaagaaatgtaggttaccaggaggagatccctttgtgaaaatg

SEQ ID NO: 1567 - DNA, 120 bp, synthetic construct
  misc_feature 1..120: note = Artificially Synthesized Probe
  source 1..120: mol_type = other DNA
agaagtcagaggacggtgcgcttgggacctgagctctgggcagccctcggggctcaggactcctggctcttctgcccagtttcatgtgttttgtgttttgaaaccacgtgtggtcccaca

SEQ ID NO: 1568 - DNA, 120 bp, synthetic construct
  misc_feature 1..120: note = Artificially Synthesized Probe
  source 1..120: mol_type = other DNA
ggtctcagaaccttctgtgtccttcgcagcatctcgttctaagggattttcaaatttcaattcctagcgggaatattgtaaactaaccaagaaccaagagatttgcttggttggggattg

SEQ ID NO: 1569 - DNA, 120 bp, synthetic construct
  misc_feature 1..120: note = Artificially Synthesized Probe
  source 1..120: mol_type = other DNA
tacgtttttagaaaagaatttccagtttgtgctggggctgctacaagagctcgatgccctggtccctgctcagggacgtgggtgggtgccttgtctgtccccacaccctggtcccagcct

SEQ ID NO: 1570 - DNA, 120 bp, synthetic construct
  misc_feature 1..120: note = Artificially Synthesized Probe
  source 1..120: mol_type = other DNA
gggtctgttggttctctcacctgtggggtcttgccagcctggctctgtccttggggccgcacggggaccccaggagttcttttgaggttcagacttgactgggacagttttgctttttca

SEQ ID NO: 1571 - DNA, 120 bp, synthetic construct
  misc_feature 1..120: note = Artificially Synthesized Probe
  source 1..120: mol_type = other DNA
gtgaggggcctagactgggggtcccggacccagccctcaggactgggtgaggggcctagactgggggtcccggacccagccctccggactgggtgaggggcctagactgggggtcccgga

SEQ ID NO: 1572 - DNA, 120 bp, synthetic construct
  misc_feature 1..120: note = Artificially Synthesized Probe
  source 1..120: mol_type = other DNA
tggggcctgtgatggcagctcctggaaaacgctgtggggcaggggtgaggcccacgaggccatggggacagctcaccatggggagcacacctgcaggtggggagggctgcctttccccac

SEQ ID NO: 1573 - DNA, 120 bp, synthetic construct
  misc_feature 1..120: note = Artificially Synthesized Probe
  source 1..120: mol_type = other DNA
agtgcttgcaagattccaagttctcacctcttaaagaaaacccaccccgtagattcccatcatacacttccttcttttttaaaaaagttgggttttctccattcaggattctgttcctta

SEQ ID NO: 1574 - DNA, 120 bp, synthetic construct
  misc_feature 1..120: note = Artificially Synthesized Probe
  source 1..120: mol_type = other DNA
agaggcttatagttttgtagaatgaggagggaggatagcctttgccttgagggtggaatcccagcttggccaaactactgttgacaaactctggaagggaagaggcctcactaaagaaga

SEQ ID NO: 1575 - DNA, 120 bp, synthetic construct
  misc_feature 1..120: note = Artificially Synthesized Probe
  source 1..120: mol_type = other DNA
tggttacccgtcagttttaggttgaagcacagtgtgagcaaagattggattttgtgggtgtgcttaaaccccttggaacatatttctttaactttgtatcacgcttttctttttgctgtg

SEQ ID NO: 1576 - DNA, 120 bp, synthetic construct
  misc_feature 1..120: note = Artificially Synthesized Probe
  source 1..120: mol_type = other DNA
tgttttgataatggcctccctggttgagttaaagtggacttggagatgaccatatagtagttgcagcttttagagcaccacacattattaaatcttgaatcagttttcatagggagaagc

SEQ ID NO: 1577 - DNA, 120 bp, synthetic construct
  misc_feature 1..120: note = Artificially Synthesized Probe
  source 1..120: mol_type = other DNA
aggaagctatttgagctagcatcaaataattagtgcacagtacacatggaagaactatccttttaatcaaacgggcatttttattactatttggctttgttctggtcttaacctttccct

SEQ ID NO: 1578 - DNA, 120 bp, synthetic construct
  misc_feature 1..120: note = Artificially Synthesized Probe
  source 1..120: mol_type = other DNA
acaacctcaaaacttagcttaaaaaaaacaattatttttcccctcaaatctgatggtttttctgcttcacttggtattggctgaggtgtgggaaagaccttcacttctcctctatatggg

SEQ ID NO: 1579 - DNA, 120 bp, synthetic construct
  misc_feature 1..120: note = Artificially Synthesized Probe
  source 1..120: mol_type = other DNA
tcaaacagtttgttttctgggtactcttataggtgttggggtatgaaattagtggtaattctttttgcctattttctttttttttgtctgagataccctgagtctcgctctgttgcccag

SEQ ID NO: 1580 - DNA, 120 bp, synthetic construct
  misc_feature 1..120: note = Artificially Synthesized Probe
  source 1..120: mol_type = other DNA
ctgcaacctccgcttcccaggttcaggcaattctcctgtctcagcctcctaagtagctgggattacaggcacctgccatcatccctgactaatttttgtatttttgtagacggggtttca

SEQ ID NO: 1581 - DNA, 120 bp, synthetic construct
  misc_feature 1..120: note = Artificially Synthesized Probe
  source 1..120: mol_type = other DNA
ataaaactttctctttccgtaataagtcaatctcagcattctaaaataggcaatggaggggggaagaaatctctatgggaagggtccactggatcttaacagtttcaactagtgttccac

SEQ ID NO: 1582 - DNA, 120 bp, synthetic construct
  misc_feature 1..120: note = Artificially Synthesized Probe
  source 1..120: mol_type = other DNA
ttctgtagtttggctttcctttcagggtatctgattttgccttcctgctcctaggcttgtgacctgacctgatgctgtcaattacaggagaatgcagaggtgcaagaaattttttttttt

SEQ ID NO: 1583 - DNA, 120 bp, synthetic construct
  misc_feature 1..120: note = Artificially Synthesized Probe
  source 1..120: mol_type = other DNA
cctctttgaagagcaggaaaactgtgggatatggtggcatgtttccttaatatctgttaaggcacactttggtaaatgctaaaatagaagcacaaagtgctatagaatttaagggagggg

SEQ ID NO: 1584 - DNA, 120 bp, synthetic construct
  misc_feature 1..120: note = Artificially Synthesized Probe
  source 1..120: mol_type = other DNA
aactgtaacagagtttacatcaaggtcatacataataacccaacaactcctttgttaacagttttaacagctttccatctcttcgctgcacctaaacttaaggttgcaaagatcaggtgc

SEQ ID NO: 1585 - DNA, 120 bp, synthetic construct
  misc_feature 1..120: note = Artificially Synthesized Probe
  source 1..120: mol_type = other DNA
gatatttcttttctttaattctttttctttttaaaaattttttatttttatttttattttttttgagacgaagtttcgctcttgttgcacaggctggagtgcagtggtgcagtctcagct

SEQ ID NO: 1586 - DNA, 120 bp, synthetic construct
  misc_feature 1..120: note = Artificially Synthesized Probe
  source 1..120: mol_type = other DNA
aaagaagaaagttttgtattggaccttgaagagtagatagattttgacagacttgtgtctgaggtgggcaattccaagaataggaagtaacttgggtaaaggccaggagatcagaagttg

SEQ ID NO: 1587 - DNA, 120 bp, synthetic construct
  misc_feature 1..120: note = Artificially Synthesized Probe
  source 1..120: mol_type = other DNA
atatatagctcagtgagtttttacctagtgaacacatcttcgtaaccattatctagatcaggaatagaactttgccagcactccacaagttgccttcatgctccctttagttactaactc

SEQ ID NO: 1588 - DNA, 120 bp, synthetic construct
  misc_feature 1..120: note = Artificially Synthesized Probe
  source 1..120: mol_type = other DNA
agtcagccaatgtttttcattttatactttctttagcagtgtatgggagtcccagttgctgaacattcttgcagtgctcacttaatatcgtcttttttgaggccgggtatagtggctcat

SEQ ID NO: 1589 - DNA, 120 bp, synthetic construct
  misc_feature 1..120: note = Artificially Synthesized Probe
  source 1..120: mol_type = other DNA
tgatgcttgaattgttccctatttggccagtgggaagtgcattcaaactgcttcctctgttttttggtgtcattgagcattttcttgtttactgaaagatactccaggctcttcttatac

SEQ ID NO: 1590 - DNA, 120 bp, synthetic construct
  misc_feature 1..120: note = Artificially Synthesized Probe
  source 1..120: mol_type = other DNA
gatggtactctgtcatcctgtactaagacctctgctgatcctgcagatgtctgttttgcctggccctgacaaaatgagtagaggtttattgtagtcaaaatgtagtcaagattttcaatt

SEQ ID NO: 1591 - DNA, 120 bp, synthetic construct
  misc_feature 1..120: note = Artificially Synthesized Probe
  source 1..120: mol_type = other DNA
gatctcaggtgatccgcccgcctcggcctcccaaagtgctgggattacaggcatgagccactgagcccagccttctattttttttcctatgaatttgattcctctagatacctcatttaa

SEQ ID NO: 1592 - DNA, 120 bp, synthetic construct
  misc_feature 1..120: note = Artificially Synthesized Probe
  source 1..120: mol_type = other DNA
actgtcttaatttctatatttttatataataacatttcttgatatctgatagtatatgcccctcagcttccccttcccccaagattgcattggctatcttggccttttgcgttttctttt

SEQ ID NO: 1593 - DNA, 120 bp, synthetic construct
  misc_feature 1..120: note = Artificially Synthesized Probe
  source 1..120: mol_type = other DNA
agggcagtaggtatggaaaaggaggaaagacattcaaggatattctggagacagaatgaagaaggttgctgagagtagggtagaacaaatgaagaaaaagagtaaaatatagctggcatc

SEQ ID NO: 1594 - DNA, 120 bp, synthetic construct
  misc_feature 1..120: note = Artificially Synthesized Probe
  source 1..120: mol_type = other DNA
caacgatagactggattaagaaaatgtggcacatatacaccatggaatactatgcagccataaaaaatgatgagttcatgtcctttgtagggacatggatgaaattggaaatcatcattc

SEQ ID NO: 1595 - DNA, 120 bp, synthetic construct
  misc_feature 1..120: note = Artificially Synthesized Probe
  source 1..120: mol_type = other DNA
tattctggggagatcaataggcagaaagcatcagtgaatactagaaacaggtagcaaagcgttgcttcaagcttgaactcaaaagtggaactgggaaacctagcaaggaactaaataatt

SEQ ID NO: 1596 - DNA, 120 bp, synthetic construct
  misc_feature 1..120: note = Artificially Synthesized Probe
  source 1..120: mol_type = other DNA
ggcttggactctctgaattccaactagttggtagtaagttggtttcagaaaacaatttacttctgtaggctgtttgcagctagagaaatagtgaaccatgggagtaggaatataagcaag

SEQ ID NO: 1597 - DNA, 120 bp, synthetic construct
  misc_feature 1..120: note = Artificially Synthesized Probe
  source 1..120: mol_type = other DNA
aacattttcatttctctaaatacccatgagggagaattgcgtgataaatgtaggtttaacctttttagaaattgctattttccagagtgattgtaccagttggcattcccacaagcaatg

SEQ ID NO: 1598 - DNA, 120 bp, synthetic construct
  misc_feature 1..120: note = Artificially Synthesized Probe
  source 1..120: mol_type = other DNA
ggaggcaaggaaggctttcccttgagtaatatattaatttggccccatctatctcttctcctttgtagatcatcccaagcagcagtctgtattataagaagcaaacttaaatgattgcta

SEQ ID NO: 1599 - DNA, 120 bp, synthetic construct
  misc_feature 1..120: note = Artificially Synthesized Probe
  source 1..120: mol_type = other DNA
ggattgcttccacttatatcagagtttgaaagtagaaactcttttcatgtaggtatgggtcacctttgattatatggtagtcttctgaatatggtcctcttacctgacacatatgcacct

SEQ ID NO: 1600 - DNA, 120 bp, synthetic construct
  misc_feature 1..120: note = Artificially Synthesized Probe
  source 1..120: mol_type = other DNA
tggtaggtaaattttacgttgtaccatagtgaaaacaagacctggttttcaggttctgcttcctagatgtcatagatattgggcatgttgcttaacctccttgagtctcactttcctcat

SEQ ID NO: 1601 - DNA, 120 bp, synthetic construct
  misc_feature 1..120: note = Artificially Synthesized Probe
  source 1..120: mol_type = other DNA
gatcaaacagtttgtgaatggcacagctggtattccagctcagacattctagctccagagtgagtgtggttaatcattgtgctatactaaccatgttccttaatttcctcttctctaaaa

SEQ ID NO: 1602 - DNA, 120 bp, synthetic construct
  misc_feature 1..120: note = Artificially Synthesized Probe
  source 1..120: mol_type = other DNA
ctgttgtaaaggtatatttgtaagtattcagaggagcaaacttggagactgtgtaaatatcttatttcacaacattgtttcacgcagtagttttaccatccattggtgattcttctgtgg

SEQ ID NO: 1603 - DNA, 120 bp, synthetic construct
  misc_feature 1..120: note = Artificially Synthesized Probe
  source 1..120: mol_type = other DNA
tctgggactacactttgaggactgctgtggcttctataagtcttcctttttaaaaaaaaaaaaaaaggctagtcaagttctgaagcaattggttgtgaacacctgcacttgccattcgag

SEQ ID NO: 1604 - DNA, 120 bp, synthetic construct
  misc_feature 1..120: note = Artificially Synthesized Probe
  source 1..120: mol_type = other DNA
tcccaggctaaatcacagccttgaagcagctatttctttccgaataaaaagtttaatttcacgccctgattagtgccagtacgtgcaggtagatacttatgttatgtagctaaactgatg

SEQ ID NO: 1605 - DNA, 120 bp, synthetic construct
  misc_feature 1..120: note = Artificially Synthesized Probe
  source 1..120: mol_type = other DNA
tttttgtgtgttcttctacttgataattcaaggcttcttaacctttttttggttatggacttcactgaaaatctggtatcacaggatccttcctcttcccagacacacacacacacatat

SEQ ID NO: 1606 - DNA, 120 bp, synthetic construct
  misc_feature 1..120: note = Artificially Synthesized Probe
  source 1..120: mol_type = other DNA
tctagaagcatgtggaataaactctgttctgtcaaggtcagccttaaacattgtcaacatgttcacttatttatgctctgcagttctggggaggcctgggaaacatttatcttcttttct

SEQ ID NO: 1607 - DNA, 120 bp, synthetic construct
  misc_feature 1..120: note = Artificially Synthesized Probe
  source 1..120: mol_type = other DNA
aatggcccccagcatcatttattggaagaacatgcattctccatcaatctgcagtgttatctccctcataaatcatgtcattacatgcattgatcagtttttggactcattctgttctat

SEQ ID NO: 1608 - DNA, 120 bp, synthetic construct
  misc_feature 1..120: note = Artificially Synthesized Probe
  source 1..120: mol_type = other DNA
ttgatagaaaccaaagtatggagttacttcaaaattaaaaactaaaatttgagaacttttagctaggaaagatggctttcttttgttttgtttagaggagaatcttgctctgttgcccag

SEQ ID NO: 1609 - DNA, 120 bp, synthetic construct
  misc_feature 1..120: note = Artificially Synthesized Probe
  source 1..120: mol_type = other DNA
agccagagtgatctttcagagatctaaaatgttctaatatcttccttttggactaaagctatgcatggtaaactttgttgttttgcctggcagagctggtcctttcccacctatgtcttt

SEQ ID NO: 1610 - DNA, 120 bp, synthetic construct
  misc_feature 1..120: note = Artificially Synthesized Probe
  source 1..120: mol_type = other DNA
gtgcatgacatgtggtagacaataaatacttgtgaagtcactcactttcttttttttcattttgtaaaatagaagctgatgataaactgcccatcctgcttcctggagtcattgtaggga

SEQ ID NO: 1611 - DNA, 120 bp, synthetic construct
  misc_feature 1..120: note = Artificially Synthesized Probe
  source 1..120: mol_type = other DNA
acaggttactatttatcctgtgtggtaactaccgctcctgctgtgattcaaatatttcagcccttaagcagttatattaggcttggggaatagtgtaatttgaagcccttggaacatctt

SEQ ID NO: 1612 - DNA, 120 bp, synthetic construct
  misc_feature 1..120: note = Artificially Synthesized Probe
  source 1..120: mol_type = other DNA
tgcccaaagagaatgaatgagggaagaaaccattggcaacccctttgtgttgtggaattcccaatcttcagtaagtgacatttaaccatttaacatcagattaagggaacacgtatcaaa

SEQ ID NO: 1613 - DNA, 120 bp, synthetic construct
  misc_feature 1..120: note = Artificially Synthesized Probe
  source 1..120: mol_type = other DNA
tcatagcagttaacaagaatgctaggacatacagggacacataattcatcagtcctgtcaaagtacatcacaaaaatccagtatcatgattccaacagcatttcagtcttggggttaggg

SEQ ID NO: 1614 - DNA, 120 bp, synthetic construct
  misc_feature 1..120: note = Artificially Synthesized Probe
  source 1..120: mol_type = other DNA
agactcagttgtctagtttcaaaggtaaagcttaaagcaggtccttcttccgcttccctactccacaaaatacatagtcacagactgactagtaatgagtaaaacaaaagcaaactgcct

SEQ ID NO: 1615 - DNA, 120 bp, synthetic construct
  misc_feature 1..120: note = Artificially Synthesized Probe
  source 1..120: mol_type = other DNA
gctgctgttcttcctcccttgactgtaagtagtgtaaccctcccttttgctccagctgctttattttcattattattgtctaggagttcctcattttcctgagtgtggaaaagattctaa

SEQ ID NO: 1616 - DNA, 120 bp, synthetic construct
  misc_feature 1..120: note = Artificially Synthesized Probe
  source 1..120: mol_type = other DNA
aggctggtctcgagcgaggtaaagattttaaatggagttcagctagtattaagcccactactcacttgttctgtggtactcttaacaaataatgttggattacgacagcaaaatatgtgg

SEQ ID NO: 1617 - DNA, 120 bp, synthetic construct
  misc_feature 1..120: note = Artificially Synthesized Probe
  source 1..120: mol_type = other DNA
taagctgcatcctgttgtcatggcaaccacagttgtggaaatgattaaagctagcctagaaaggatgtattgcagctttagtccactgaaagtaaatagtgtaagaaaagacagggagaa

SEQ ID NO: 1618 - DNA, 120 bp, synthetic construct
  misc_feature 1..120: note = Artificially Synthesized Probe
  source 1..120: mol_type = other DNA
gctggctgcttgcacaggtttttgtggtaatggcattggcatctctgtattagagtattgatctgctgcttggtaggtactgtgtaaaataagtcttctagtaaagatgtattaagtggt

SEQ ID NO: 1619 - DNA, 120 bp, synthetic construct
  misc_feature 1..120: note = Artificially Synthesized Probe
  source 1..120: mol_type = other DNA
ttcagatacccagcaaacagttcaaagattgcattaacaagctagctaacattttgtaaaggagttcaaaatgaaagactgtcagtacctatattccgtgtgcctagctgttgttgcccc

SEQ ID NO: 1620 - DNA, 120 bp, synthetic construct
  misc_feature 1..120: note = Artificially Synthesized Probe
  source 1..120: mol_type = other DNA
ttcatgagtggagtttccctctccttaagaagaaagctccagatagctcccttttgaactcattgttagagcaaacacatctgtagaggaagatgatccataagtctaatgctaaggatt

SEQ ID NO: 1621 - DNA, 120 bp, synthetic construct
  misc_feature 1..120: note = Artificially Synthesized Probe
  source 1..120: mol_type = other DNA
caccgaacactgcaatcatttgaaatttgtgtataggccagcttcacatcatcagaaattgtgtaaccccatgattcccaggcctcagctggtagtgtagttatttcaaataatatttaa

SEQ ID NO: 1622 - DNA, 120 bp, synthetic construct
  misc_feature 1..120: note = Artificially Synthesized Probe
  source 1..120: mol_type = other DNA
agaaggcacccaaattttaacaattgtaaataaacattaggagctgctccccctcttcgctttcttgtttaaagggattctcatccctttagtccaagtttcgtggagaaaataattcct

SEQ ID NO: 1623 - DNA, 120 bp, synthetic construct
  misc_feature 1..120: note = Artificially Synthesized Probe
  source 1..120: mol_type = other DNA
tcaagtactttccatttcaagtaacagattgcttcattccccctttaagcaagaagggagagtattttaagggtacagagatagctcatggaactaaagggaaaaagatggccagtaagg

SEQ ID NO: 1624 - DNA, 120 bp, synthetic construct
  misc_feature 1..120: note = Artificially Synthesized Probe
  source 1..120: mol_type = other DNA
cccagccaatcctagctatattacagtctttgcctttaaagttaatttcaccgtctgtgccatcttggtattggcatctgttgataccagttgaagttttcccctttttagtataccaag

SEQ ID NO: 1625 - DNA, 120 bp, synthetic construct
  misc_feature 1..120: note = Artificially Synthesized Probe
  source 1..120: mol_type = other DNA
aaggtttccttacttcagagttttagccttctttgggtctctgcttctgctgtggctttcctcatggaattgctttgagagaatagcaagaactttaaagaaaaatgggagatttttgcc

SEQ ID NO: 1626 - DNA, 120 bp, synthetic construct
  misc_feature 1..120: note = Artificially Synthesized Probe
  source 1..120: mol_type = other DNA
ttactgtgcttgtcacttctttgttgcttattctatcaatagctgagagagttatgttaggctctcaaactatgtagatttgtgtattttccctttagttctgagttttttgcttatttt

SEQ ID NO: 1627 - DNA, 120 bp, synthetic construct
  misc_feature 1..120: note = Artificially Synthesized Probe
  source 1..120: mol_type = other DNA
cggtttttaaattaatcatctgtcctgatcatctgtcctgatcatctgtccttctttgtttatacttgcactgtccaatagaaacatttaccacagatgccaaccaagtatatactttta

SEQ ID NO: 1628 - DNA, 120 bp, synthetic construct
  misc_feature 1..120: note = Artificially Synthesized Probe
  source 1..120: mol_type = other DNA
cattcaagtgctcagtagccgtatgtgactagtggttattgtattggagagtatgtttagaccatacatttagtgtagtgatcagtatggttaaatttaaattgatcattttgctattta

SEQ ID NO: 1629 - DNA, 120 bp, synthetic construct
  misc_feature 1..120: note = Artificially Synthesized Probe
  source 1..120: mol_type = other DNA
tctatgtagttgaaagacatttacatcattccaagtaaaagcttttatccagtaagcagtttctttctattcccttccttcagcccttggcaatcaccaatctgcattctgcccatatga

SEQ ID NO: 1630 - DNA, 120 bp, synthetic construct
  misc_feature 1..120: note = Artificially Synthesized Probe
  source 1..120: mol_type = other DNA
tgtaacgtcaaaagcttttgagactggacaggagtttactgataaagcttcttctagtacatctggatttcctggtatgcttctctcctaatatatctggatggctgctttttagctttc

SEQ ID NO: 1631 - DNA, 120 bp, synthetic construct
  misc_feature 1..120: note = Artificially Synthesized Probe
  source 1..120: mol_type = other DNA
gcttctgcccatccctgttctctaattttcttttgagacaccagatatgcatgtgttagaccacttacaatttcctataggtcactgaagctttgttcagtttgtttccttagtcttttt

SEQ ID NO: 1632 - DNA, 120 bp, synthetic construct
  misc_feature 1..120: note = Artificially Synthesized Probe
  source 1..120: mol_type = other DNA
ttcattcttcagtattctgcctcactaattctttttagccttcatgtattttgtttcctcaagtaagtggtcccattgtactctgtttgagttcccctttcttgtgcagcagcctggaca

SEQ ID NO: 1633 - DNA, 120 bp, synthetic construct
  misc_feature 1..120: note = Artificially Synthesized Probe
  source 1..120: mol_type = other DNA
aaaatgataaccctttcattgaaatttgagagaaatgtaaatgaagttatagaagaaatagttgaccataggaaaattgacactgtcaccatttgatagactctagatatgcagccagag

SEQ ID NO: 1634 - DNA, 120 bp, synthetic construct
  misc_feature 1..120: note = Artificially Synthesized Probe
  source 1..120: mol_type = other DNA
attgtagccaatgtaacgtcatataatgcaaggcattattcaggtgtttgtgttgatactggtgtaaatgaacctgctgcactgctagtcataaaaaagtgtagtacatactattatgta

SEQ ID NO: 1635 - DNA, 120 bp, synthetic construct
  misc_feature 1..120: note = Artificially Synthesized Probe
  source 1..120: mol_type = other DNA
gcagtggtgagatctcggcttacttcagcctccacattccaggctgaaatgatcctcctgctgcagtctcccgagtagctgggactacaggcatgtgccaccatgcctggctaatttaag

SEQ ID NO: 1636 - DNA, 120 bp, synthetic construct
  misc_feature 1..120: note = Artificially Synthesized Probe
  source 1..120: mol_type = other DNA
aaatgttagagactctgaaatcattcttcacagggtgttgaatattcttttcacagacatatccctttggttcagttgaggcatctctgtttttggtgcccttcattgttctggttcatg

SEQ ID NO: 1637 - DNA, 120 bp, synthetic construct
  misc_feature 1..120: note = Artificially Synthesized Probe
  source 1..120: mol_type = other DNA
ataaaccacttgagaataaggttctgacatgatgtcccatcacctctgaattctctgtgtatttcctgcaaaccagaacattctcccatataacccaataacaaccatcagaattaagga

SEQ ID NO: 1638 - DNA, 120 bp, synthetic construct
  misc_feature 1..120: note = Artificially Synthesized Probe
  source 1..120: mol_type = other DNA
tgagctccagtatttcagagtgccacctcccaaaatgacagcatgatataccttggcaatagtttagacctcttctagaattttctcacatctgctttttttttgccaaacatatatatg

SEQ ID NO: 1639 - DNA, 120 bp, synthetic construct
  misc_feature 1..120: note = Artificially Synthesized Probe
  source 1..120: mol_type = other DNA
catttgaaggttttatttcgagaaaaagccacttccaagcttattgttgttggtggtggtggaattcttttcttcaagggctgttggactgagcctcaattcttagttgtttgttgactg

SEQ ID NO: 1640 - DNA, 120 bp, synthetic construct
  misc_feature 1..120: note = Artificially Synthesized Probe
  source 1..120: mol_type = other DNA
cctagctcttattatcctttgtatttgatctgccacctttatttgatcaatcttcctgtataatccatctcctgttgctgacatatctctcgctccatttctcaccccatacttcatatg

SEQ ID NO: 1641 - DNA, 120 bp, synthetic construct
  misc_feature 1..120: note = Artificially Synthesized Probe
  source 1..120: mol_type = other DNA
agattcatgatttctgaacttggttactccctgcaccctccaaacgagtttcagtttaccagtgtctgtcactaccactactgttcttctagtcattcaagtttgaaatgttgaagttaa

SEQ ID NO: 1642 - DNA, 120 bp, synthetic construct
  misc_feature 1..120: note = Artificially Synthesized Probe
  source 1..120: mol_type = other DNA
ttgcatttctctgatggccagtgatgatgagcattttttcatgtgtctgttggctgcataaatgtcttcttctgagaagtgtctgttcatatccttcacccacttgttgatggggttgtt

SEQ ID NO: 1643 - DNA, 120 bp, synthetic construct
  misc_feature 1..120: note = Artificially Synthesized Probe
  source 1..120: mol_type = other DNA
cctgaccctctctgggtcttatttaccttactagtttattatacaggtgaatgaattggggaagagcttgttccgcaattcattgccaaacaatgaattgttagactgacaaagctaact

SEQ ID NO: 1644 - DNA, 120 bp, synthetic construct
  misc_feature 1..120: note = Artificially Synthesized Probe
  source 1..120: mol_type = other DNA
accttgtgcaataaggctgggcagatatgattatcctatctgacaggtgggagttttgtttttggagtgaactaaattgggattcttaagaggcaatcattggatttgtaggtaaagtct

SEQ ID NO: 1645 - DNA, 120 bp, synthetic construct
  misc_feature 1..120: note = Artificially Synthesized Probe
  source 1..120: mol_type = other DNA
gagctgaagaaactaatatgtgctgtgcagggctggatttgtgtaggatgcagtcattatctgttaactttgtcatagcttttgagactgcatgtaaggagtaggtgatttgcaagttat

SEQ ID NO: 1646 - DNA, 120 bp, synthetic construct
  misc_feature 1..120: note = Artificially Synthesized Probe
  source 1..120: mol_type = other DNA
gttttcatacccataccaattgtcttgtaataatcgggaatgcatcctctgtgtggtgtttgcaaattaatgctattttggaaatcacaccggtatatctagtggctttcctgggtgtat

SEQ ID NO: 1647 - DNA, 120 bp, synthetic construct
  misc_feature 1..120: note = Artificially Synthesized Probe
  source 1..120: mol_type = other DNA
gaagcgacaagctaccttccagtgcctcctcgattttcttccactatttcctttgtccttttcctgtgttttcatgctctatttatttacacccacttctgacttctcttttttctcaga

SEQ ID NO: 1648 - DNA, 120 bp, synthetic construct
  misc_feature 1..120: note = Artificially Synthesized Probe
  source 1..120: mol_type = other DNA
caggatgacagggagaaggaaattataagtttaaagacaggggtaagatgagtatttgaacaaaatatcaaggtaggtagttagctagagtgccagggccaattagaagattagagaagg

SEQ ID NO: 1649 - DNA, 120 bp, synthetic construct
  misc_feature 1..120: note = Artificially Synthesized Probe
  source 1..120: mol_type = other DNA
ttggaccacaggcacaaacctcttgcatggctctcattgtccatttatcaattttagatggtgtaaacagtgaataccatattttgtttcccaatattactttctacaactatattgttt

SEQ ID NO: 1650 - DNA, 120 bp, synthetic construct
  misc_feature 1..120: note = Artificially Synthesized Probe
  source 1..120: mol_type = other DNA
ccttttgggattctctctggggttaaagccagtaagtagtgtgtttcttaaagatgtttctatcataaaggtcagctgcaactggaatattgcgttcagccaagccttaaaaattcctgt

SEQ ID NO: 1651 - DNA, 120 bp, synthetic construct
  misc_feature 1..120: note = Artificially Synthesized Probe
  source 1..120: mol_type = other DNA
ctttcttagaggccaggatgtcagttccaggatgtgcgagaaacttatagagaaataatgtggaaaattgtagacaaaaacgtaggaaagagtttggtgctcattgcttacagattaggg

SEQ ID NO: 1652 - DNA, 120 bp, synthetic construct
  misc_feature 1..120: note = Artificially Synthesized Probe
  source 1..120: mol_type = other DNA
aaatcaagtcttgaatattgtctttgtcactagtggtatgatcctgaacttatttccttatctgtaaatggatactatagtaagggcatgcagtgatggtagctgcttttatcatgatcg

SEQ ID NO: 1653 - DNA, 120 bp, synthetic construct
  misc_feature 1..120: note = Artificially Synthesized Probe
  source 1..120: mol_type = other DNA
gaaaggccattcctttctttggtgaagagtaattcttcactacacaggggtcatggatctctttgggaatctgatgagaactattgatcttgggtatttggcaacattgtgttgaatact

SEQ ID NO: 1654 - DNA, 120 bp, synthetic construct
  misc_feature 1..120: note = Artificially Synthesized Probe
  source 1..120: mol_type = other DNA
ctgacctggcataggtatatagtttgaaagggaaagatattttaataccattttcaggtagttgcagtttcttgaagattagttgcagtatggtatctgaagccttatcaatgaacttcc

SEQ ID NO: 1655 - DNA, 120 bp, synthetic construct
  misc_feature 1..120: note = Artificially Synthesized Probe
  source 1..120: mol_type = other DNA
gtgcttgataatactggttgactaataggcagaaactggatttgaatctagtatcttctctgcccacctactggaattacagcagtcttagtgcatttgcatccttctggtttaggtttt

SEQ ID NO: 1656 - DNA, 120 bp, synthetic construct
  misc_feature 1..120: note = Artificially Synthesized Probe
  source 1..120: mol_type = other DNA
ggagaagctatggagtcattgctgaatttgttggattattcccagtagctcaaattgaaaccacagcattgagatggtttgaaaactagtgacagggaagatgctgaaaaaagttgttag

SEQ ID NO: 1657 - DNA, 120 bp, synthetic construct
  misc_feature 1..120: note = Artificially Synthesized Probe
  source 1..120: mol_type = other DNA
acaagagtatcacccatatgccttccactttaagataattattgctagattaacatgttagtgtcctttgatctgaaatgacttatccatccatgtgtgcctgtgcgtgcacacacacac

SEQ ID NO: 1658 - DNA, 120 bp, synthetic construct
  misc_feature 1..120: note = Artificially Synthesized Probe
  source 1..120: mol_type = other DNA
gagctagaattaaagtcttccctgatctttatctttgctctcttaaactagtcagaggatctgtacccagagcatgcatggaattctgtgccctgtaaaattgacatgaagaaaaggagt

SEQ ID NO: 1659 - DNA, 120 bp, synthetic construct
  misc_feature 1..120: note = Artificially Synthesized Probe
  source 1..120: mol_type = other DNA
taggtttatgaatgtagttagatggtccccaactgtttacaagacagcagaggtgagatatttgattgacaagtcagaaatgcattagatcattctctctgccagtctctggttcatgct

SEQ ID NO: 1660 - DNA, 120 bp, synthetic construct
  misc_feature 1..120: note = Artificially Synthesized Probe
  source 1..120: mol_type = other DNA
tggggcattgaatttacaagtaaagttttaactgagaatgaatggccttttgcagttcttctggagtatggaaaagagtttgtattgaaagttcctcaatggctgggcactgtggctcat

SEQ ID NO: 1661 - DNA, 120 bp, synthetic construct
  misc_feature 1..120: note = Artificially Synthesized Probe
  source 1..120: mol_type = other DNA
catagaatttcagcattggaccagacatcagaggccatctagtcacatacgtctcataatgtagaaatcctttatgaaatgtgtttggaagggagtcatctaatctctccctgatcacta

SEQ ID NO: 1662 - DNA, 120 bp, synthetic construct
  misc_feature 1..120: note = Artificially Synthesized Probe
  source 1..120: mol_type = other DNA
ttttaaacctagctccagttcctgaagatggtgaacatctgcttagaggtactgtagagctccacaatgcactaattgaattactcttttctggagttgcgactgcactaattgaattag

SEQ ID NO: 1663 - DNA, 120 bp, synthetic construct
  misc_feature 1..120: note = Artificially Synthesized Probe
  source 1..120: mol_type = other DNA
ccaccgtgcctggcctctgttgttctacttaatagtttaaaaattaagtttaccacaaatttgggcaagttttaaaccctcctaagtgaagtcagttattttgttcctttaaaagaaaaa

SEQ ID NO: 1664 - DNA, 120 bp, synthetic construct
  misc_feature 1..120: note = Artificially Synthesized Probe
  source 1..120: mol_type = other DNA
cttgttgtcttcagaactggtagttcccactggtgatttgatagtttggggcttctactgaggctataactgagaaagagtctattgcatacaaggtataaagtgcttctttaaacagtc

SEQ ID NO: 1665 - DNA, 120 bp, synthetic construct
  misc_feature 1..120: note = Artificially Synthesized Probe
  source 1..120: mol_type = other DNA
ctcatatatagtagggcatggccttgaggttataggggctctagacatttgaaagatattacacaatgaatggggcaggagggtaactaaattgtggttacaaatttctggtagaaactc

SEQ ID NO: 1666 - DNA, 120 bp, synthetic construct
  misc_feature 1..120: note = Artificially Synthesized Probe
  source 1..120: mol_type = other DNA
tccgtgctcagaagttaactaaaacagatatgttctaggtttattaagccatccatgtactagtaagagatcaggatagccagtagcctcaagctacataatttcctgtggaaacggaaa

SEQ ID NO: 1667 - DNA, 120 bp, synthetic construct
  misc_feature 1..120: note = Artificially Synthesized Probe
  source 1..120: mol_type = other DNA
ccagacgagtagcttatcttgagggacgcaagtaatagaccaaatatagagcagctatttcaggaatcatgtaggtcatttaattatccattatgattgagtggctaatgctcttttggc

SEQ ID NO: 1668 - DNA, 120 bp, synthetic construct
  misc_feature 1..120: note = Artificially Synthesized Probe
  source 1..120: mol_type = other DNA
gttacggtgtggaaagcaatggcagcataatcaaattaattgtaggatttgtcagaaatgcacaaaattctgcatagttagcaaagtggtagattagaggtatacagccattctctagca

SEQ ID NO: 1669 - DNA, 120 bp, synthetic construct
  misc_feature 1..120: note = Artificially Synthesized Probe
  source 1..120: mol_type = other DNA
gaccagtccatattagagacatacacctaaacacagatcttaatctagcccagtctagctttcagaaatgtagtttatttacttgggatggttttacgtctcgggatattagcttttatc

SEQ ID NO: 1670 - DNA, 120 bp, synthetic construct
  misc_feature 1..120: note = Artificially Synthesized Probe
  source 1..120: mol_type = other DNA
gctaagttgatgttcaaacctttgattaagaagtcacaaagctgactgtgttcagacagctgtgtaatatcgctcctattcacaaaacagataactgttttagccccctcccttttttgg

SEQ ID NO: 1671 - DNA, 120 bp, synthetic construct
  misc_feature 1..120: note = Artificially Synthesized Probe
  source 1..120: mol_type = other DNA
ggagggtatttgttggctttgttttagataataactgatcctatctaaagatgttttctgtctgatccctgatagtgggtgctgcatgacgttgtgtaaattcgcagacctagcaatatt

SEQ ID NO: 1672 - DNA, 120 bp, synthetic construct
  misc_feature 1..120: note = Artificially Synthesized Probe
  source 1..120: mol_type = other DNA
gagaatgattatattagcatgcaaaatctactccagaagtagaaatctgaggtgtagaagaccagtgcactatgacaattaatcagtttctgcatactagcataaatgcacaaggcccag

SEQ ID NO: 1673 - DNA, 120 bp, synthetic construct
  misc_feature 1..120: note = Artificially Synthesized Probe
  source 1..120: mol_type = other DNA
gcaatgtgcatgaaaacatgccagagaatatcttaggaggacactttaggtcctccctaaaatgagtccttgaataggattttccgaacagcttctgaacttaaatgacctaagttttcc

SEQ ID NO: 1674 - DNA, 120 bp, synthetic construct
  misc_feature 1..120: note = Artificially Synthesized Probe
  source 1..120: mol_type = other DNA
tttaagctagctggacagtctgggtttagggtttcaattattcattgagcatctgttatctgtatacttacgtaatgtgttagtgggtagagggagctacaaagacttttcccagtaatc

SEQ ID NO: 1675 - DNA, 120 bp, synthetic construct
  misc_feature 1..120: note = Artificially Synthesized Probe
  source 1..120: mol_type = other DNA
caaccccgaaatttcaagatcatatcacctgttggtgagactatgaagaaacttgcttaactggggcagaaaagatgtgttgtgggaaataacttggtgtaatatagtagggaattctgg

SEQ ID NO: 1676 - DNA, 120 bp, synthetic construct
  misc_feature 1..120: note = Artificially Synthesized Probe
  source 1..120: mol_type = other DNA
tatagaatatatcatttggatttaggcaaggatgtcaatgtcagaaggctgtctcaatagtaatagcactggtaagaggtgttgtgggtctggactagagtagaagcagtggaaatgcaa

SEQ ID NO: 1677 - DNA, 120 bp, synthetic construct
  misc_feature 1..120: note = Artificially Synthesized Probe
  source 1..120: mol_type = other DNA
tattttaatatactatagtccccacttattcatagggggtatgttccccagtggatgcctaaaccacagatagttctgaactccatgtatactatgttttttcctatggacacataccta

SEQ ID NO: 1678 - DNA, 120 bp, synthetic construct
  misc_feature 1..120: note = Artificially Synthesized Probe
  source 1..120: mol_type = other DNA
aatggcacaaattattgagccaacaaatcagtgattttcagtggggagagggttgactattaaggagaatttcaagagaattttgggagtggtggaatttttcattttttaatggcggtg

SEQ ID NO: 1679 - DNA, 120 bp, synthetic construct
  misc_feature 1..120: note = Artificially Synthesized Probe
  source 1..120: mol_type = other DNA
aatcctcatagataaagatgcaaggaataactgtgttgctgagctttcctgggtgatgttggacaggctttgagaactgttgaggtgactacttaggtatacatggctatttcatcatta

SEQ ID NO: 1680 - DNA, 120 bp, synthetic construct
  misc_feature 1..120: note = Artificially Synthesized Probe
  source 1..120: mol_type = other DNA
gtgagtatgggctagtcaatactcaggctgttaaggttgagatgactatttttcactttataattcagtatagaggagtttgccagcaattgtgtatcagcccaagtacctgtataataa

SEQ ID NO: 1681 - DNA, 120 bp, synthetic construct
  misc_feature 1..120: note = Artificially Synthesized Probe
  source 1..120: mol_type = other DNA
gatttttagtacttatgaactcattttcagttggattgttgtttttttccccctcctaagtatataaaaaccccactgacattttagggcctctagctgctgtttgaggtgacagtgcca

SEQ ID NO: 1682 - DNA, 120 bp, synthetic construct
  misc_feature 1..120: note = Artificially Synthesized Probe
  source 1..120: mol_type = other DNA
ggcgaaccccctaggaagataataccagagaagaattcacttagacaggtatgaaattcagccttacttaaaataaaaagctaccaacagcaaaacaaaagacaggaggaaacccttgat

SEQ ID NO: 1683 - DNA, 120 bp, synthetic construct
  misc_feature 1..120: note = Artificially Synthesized Probe
  source 1..120: mol_type = other DNA
actgtgccccaatagaaggtaacacattttacttgtgaaagttcaataccattgtgttcttgtaaaaattagaatgtccttggcaaaaacaagaaacgcaagttcttatgatgttgccag

SEQ ID NO: 1684 - DNA, 120 bp, synthetic construct
  misc_feature 1..120: note = Artificially Synthesized Probe
  source 1..120: mol_type = other DNA
ggataggctgatctgttgaaaattaaactaaatttatctctctcatacttcaaactgaagcaagagagagaatcatgcctattaagtccagcacatacagatggaccagcaggtcacaca

SEQ ID NO: 1685 - DNA, 120 bp, synthetic construct
  misc_feature 1..120: note = Artificially Synthesized Probe
  source 1..120: mol_type = other DNA
ggcagctgtccaggactgccctgaacttgattaccccattgctgattttttttaaggtaggacatagtatataagctgtttaaactccctcttttctctattgcatatgacaataatgaa

SEQ ID NO: 1686 - DNA, 120 bp, synthetic construct
  misc_feature 1..120: note = Artificially Synthesized Probe
  source 1..120: mol_type = other DNA
tcctaccttttattcctatctgcaatcaagggcaaaggcctgggaggatacatgaaagtactcattactttttgaaaattgtggcattacaacgttcaactctttgcttctcattggtgc

SEQ ID NO: 1687 - DNA, 120 bp, synthetic construct
  misc_feature 1..120: note = Artificially Synthesized Probe
  source 1..120: mol_type = other DNA
gtgaagaacttaaatcagccagtataagcatggaagtctgatgggcatagctcctttatacagttggatgagtaggaggaaaaagcacatcactgacacagaaaatgacattatagtgtg

SEQ ID NO: 1688 - DNA, 120 bp, synthetic construct
  misc_feature 1..120: note = Artificially Synthesized Probe
  source 1..120: mol_type = other DNA
agaaaacacggtttggcaatttgtgcctagctacaaaaacccttcttcaaaaaggagcaatttaataaccggctttcttaaaattactttgaggaaggaagaccgtatggggggttggtg

SEQ ID NO: 1689 - DNA, 120 bp, synthetic construct
  misc_feature 1..120: note = Artificially Synthesized Probe
  source 1..120: mol_type = other DNA
agtttatgcttatgtgctttatatgcgatataaaaacgtattaaagtactccaacgcaaaactctctgcctctggttcagcaatgaagctaccttttcaagtgttgcatggggacagaac

SEQ ID NO: 1690 - DNA, 120 bp, synthetic construct
  misc_feature 1..120: note = Artificially Synthesized Probe
  source 1..120: mol_type = other DNA
ctaaccacctgtgtaaccaccaccctaattaaactatagaatattttcataacctaggaatgtctcttgttctcctttctacttattttctgcaccaccaatggatcaaatactgatcag

SEQ ID NO: 1691 - DNA, 120 bp, synthetic construct
  misc_feature 1..120: note = Artificially Synthesized Probe
  source 1..120: mol_type = other DNA
acagtgcctaaggtactgacccatccctattttatgtccctgtagacaaggcggacaagaaaaatgataggtgtctatccttgcaccaaataccatagtgtcttgattattgtcatttta

SEQ ID NO: 1692 - DNA, 120 bp, synthetic construct
  misc_feature 1..120: note = Artificially Synthesized Probe
  source 1..120: mol_type = other DNA
tgccccctttgacgtatcttcatcgttctgagtatttccatcttatagtttccctggtcagtcctggagtcaaccatatttccatgaatgtatgattccctttagtgcagaatggtattt

SEQ ID NO: 1693 - DNA, 120 bp, synthetic construct
  misc_feature 1..120: note = Artificially Synthesized Probe
  source 1..120: mol_type = other DNA
tcacaaaatttggggaagtatttgatcactatttttataacttctttgctgtaccgttctcttctcccttccttggactccagccacgcatatattctagataatccagaattgtcccac

SEQ ID NO: 1694 - DNA, 120 bp, synthetic construct
  misc_feature 1..120: note = Artificially Synthesized Probe
  source 1..120: mol_type = other DNA
taaattactggctgatcactatgaccttgtggaggcttggttttgtatttgttaaggtcaggtgtattttggttttgcccttagtcctaagacatactcttgaatctaaactcatggtct

SEQ ID NO: 1695 - DNA, 120 bp, synthetic construct
  misc_feature 1..120: note = Artificially Synthesized Probe
  source 1..120: mol_type = other DNA
agatcaggccactccttccccattttccgtcttttttaagtcgatctccagtgcctttatgtagctttaaaatgtttttcctatctgcaagagggtttatctgatacaaacatttctgcc

SEQ ID NO: 1696 - DNA, 120 bp, synthetic construct
  misc_feature 1..120: note = Artificially Synthesized Probe
  source 1..120: mol_type = other DNA
acatgtccttagctgtataatcaaggctaacatcaccagaaataccagcataccttctgatttgatgcagtgagaggggcacatcacctctaaagtatctttccccaaaataacctcaat

SEQ ID NO: 1697 - DNA, 120 bp, synthetic construct
  misc_feature 1..120: note = Artificially Synthesized Probe
  source 1..120: mol_type = other DNA
gttactgttggttttgagtgtcttaagatttttcttcttaaatccaacacaagtatttatagcaatggttctcgaagagtgttcctggatcagcagcactaacgtcaactggggccttgt

SEQ ID NO: 1698 - DNA, 120 bp, synthetic construct
  misc_feature 1..120: note = Artificially Synthesized Probe
  source 1..120: mol_type = other DNA
tctcaaaaaaaaaaaaaataggtaagtgttggtttatcttttttcaatgttctttcaattttggtttatttctcttttctttttaaagccaaaagtcaaagcttgtattgagattctttt

SEQ ID NO: 1699 - DNA, 120 bp, synthetic construct
  misc_feature 1..120: note = Artificially Synthesized Probe
  source 1..120: mol_type = other DNA
gctcttccaatttgcattttaaaatgctacataatcagtacccccagcttccattaatcattaatacagtgaagccactgctgcttacatacttgttcatgggcacatcagtggcttttg

SEQ ID NO: 1700 - DNA, 120 bp, synthetic construct
  misc_feature 1..120: note = Artificially Synthesized Probe
  source 1..120: mol_type = other DNA
attgagtggctaatgttggaaatactgcttttgttgatcttgatccacatggacaagtatgtttagtcatgtgtatgggctacctctttttcatgtatatatgtcatctctatagcctag

SEQ ID NO: 1701 - DNA, 120 bp, synthetic construct
  misc_feature 1..120: note = Artificially Synthesized Probe
  source 1..120: mol_type = other DNA
agaccatagcaaaagcagagtttttgtttatttttccttaaaacatgcagtagtctctgggcctgctctatcaactggaaatgtatcacacaaaatataaccatcgaaatcatacatata

SEQ ID NO: 1702 - DNA, 120 bp, synthetic construct
  misc_feature 1..120: note = Artificially Synthesized Probe
  source 1..120: mol_type = other DNA
tgatgtctatcatttcctattggaacccagttaaatcactggttccttttattggcccacatcctgtcttctggttcattgcttcagatttgagccaaataatcagttggtcaatgtcaa

SEQ ID NO: 1703 - DNA, 120 bp, synthetic construct
  misc_feature 1..120: note = Artificially Synthesized Probe
  source 1..120: mol_type = other DNA
tgaatagtttcatctgctgcattgatatggctgcagtgttttctcaacttggtacaagtgtctgttgttgattcagattgtactccattgtggcctgaatctgtaaccatttccatgtga

SEQ ID NO: 1704 - DNA, 120 bp, synthetic construct
  misc_feature 1..120: note = Artificially Synthesized Probe
  source 1..120: mol_type = other DNA
tatccagattcctggcccagataagagaagtttttcctctttatgtttgggaaataaaccccttcagtagccctttgtggatgttctgtattttagttgttattggttgttgtcactgtt

SEQ ID NO: 1705 - DNA, 120 bp, synthetic construct
  misc_feature 1..120: note = Artificially Synthesized Probe
  source 1..120: mol_type = other DNA
caggacccctcttatagacaagagtttgtgtgtttgtcagattaaggatgtaagaatacattttcttctagatgtgcgtgccgtttaagaaaaatacagacatggggcaccaaaacggat

SEQ ID NO: 1706 - DNA, 120 bp, synthetic construct
  misc_feature 1..120: note = Artificially Synthesized Probe
  source 1..120: mol_type = other DNA
aagatgctagaatttattcatatttctatctagccagggagctaataggctcgagcttgtctttgtggattgatctagattagcatgaaatgagcccagtcagtgtcttcctcagtgaaa

SEQ ID NO: 1707 - DNA, 120 bp, synthetic construct
  misc_feature 1..120: note = Artificially Synthesized Probe
  source 1..120: mol_type = other DNA
tcagacctttctgtggtgttctgacttctgctttaagaaactgtcacttactgaagggtttaaatctcagcttgtttgcttagctgcactgcttcttttctcattctgaaacatattgtg

SEQ ID NO: 1708 - DNA, 120 bp, synthetic construct
  misc_feature 1..120: note = Artificially Synthesized Probe
  source 1..120: mol_type = other DNA
caccacagctgcacaatgccaggctcagtttctgaaaaggaaagcaaaaaaatctgtgttttatgttactttttttcttgctgtgtacaggcattatctttccattctagagctggttgc

SEQ ID NO: 1709 - DNA, 120 bp, synthetic construct
  misc_feature 1..120: note = Artificially Synthesized Probe
  source 1..120: mol_type = other DNA
gctttcagtgctaagatactgcatttacagaaacttaagtctctaatattatgcctctacttaaaactcattgtacaaaagtacctcacttccccctagtaccatctccctaccctcttc

SEQ ID NO: 1710 - DNA, 120 bp, synthetic construct
  misc_feature 1..120: note = Artificially Synthesized Probe
  source 1..120: mol_type = other DNA
tgtaatcccaaaaatgtccaactggctgaatggccaagaaactcccttgtaatttcctaatagagctaaagttaacaagtcaccttaaagtctactaattccaattaagttcaccttgga

SEQ ID NO: 1711 - DNA, 120 bp, synthetic construct
  misc_feature 1..120: note = Artificially Synthesized Probe
  source 1..120: mol_type = other DNA
caggatacttcccccatcgcattgtgtagcttttctccatttcatttctatagcactttgacatctagcaaatgttattttctcatcttcctcctcttcctacctcttgctgcttgtata

SEQ ID NO: 1712 - DNA, 120 bp, synthetic construct
  misc_feature 1..120: note = Artificially Synthesized Probe
  source 1..120: mol_type = other DNA
tggaaaggttagaaatgcttgacagttaagggtggcataaatttttcacacagactcataaagtatgtaagaaacacttgctcaacatggagcactaagaccatgacaaacaggaacagc

SEQ ID NO: 1713 - DNA, 120 bp, synthetic construct
  misc_feature 1..120: note = Artificially Synthesized Probe
  source 1..120: mol_type = other DNA
atagcagattccatttgcagtgatagttttgtggatatggtatgcttttcaaaggtttaggtactaattaatataaacttgaatacatctagcctgggacactagaggagctactgtctc

SEQ ID NO: 1714 - DNA, 120 bp, synthetic construct
  misc_feature 1..120: note = Artificially Synthesized Probe
  source 1..120: mol_type = other DNA
aatagcttttctgtcatgttaatttagccctgtcggtcttgttctagttcatgatgtacagctcccaccagatactcacttggtgaattgaaagaggagctgtagtgaaaatactgtctt

SEQ ID NO: 1715 - DNA, 120 bp, synthetic construct
  misc_feature 1..120: note = Artificially Synthesized Probe
  source 1..120: mol_type = other DNA
tgtggaggcagtgacatcatcataattttcaatgttttaaagtgtcagtggtaaagggagtttacaagcataggaagagaacacaggctttacgttgaaaaaggtctctgtcatccaggg

SEQ ID NO: 1716 - DNA, 120 bp, synthetic construct
  misc_feature 1..120: note = Artificially Synthesized Probe
  source 1..120: mol_type = other DNA
tccagattaagttcacatccacccagattttaataggaaaagagaaatgaaaagaccattaccggagcccactactaccctctttaagtcactaccctttcaagggtaaacattatcctc

SEQ ID NO: 1717 - DNA, 120 bp, synthetic construct
  misc_feature 1..120: note = Artificially Synthesized Probe
  source 1..120: mol_type = other DNA
cctagcaccatttattgaaatgtgtagttcccattataccggattgttttctttgaccatatgcttataggtctttatcaaaatcttgaactctgatagtaagtgccctagctttgttgt

SEQ ID NO: 1718 - DNA, 120 bp, synthetic construct
  misc_feature 1..120: note = Artificially Synthesized Probe
  source 1..120: mol_type = other DNA
gagagtgattttgtgtgacatatacacacaaaaattccctaagttgtagtttcttctgattttgcccagagccttttaacctggctttcttaagctgctttttttgagatggagtctcat

SEQ ID NO: 1719 - DNA, 120 bp, synthetic construct
  misc_feature 1..120: note = Artificially Synthesized Probe
  source 1..120: mol_type = other DNA
catatgacaattgtaggaagtaggtggtattagttttgtttacagggggaaaaagtgaagcttaaagaaggcaactaacttgttcaggtctatatagcttgtacatggcagacacttggc

SEQ ID NO: 1720 - DNA, 120 bp, synthetic construct
  misc_feature 1..120: note = Artificially Synthesized Probe
  source 1..120: mol_type = other DNA
ttattacaatagctagtatgccaccttggtcttgagggcacttgatggactttcgaatctgaaagaaaaagctctctgcaatacagcaggctatggactataatgctgaaaatacaactg

SEQ ID NO: 1721 - DNA, 120 bp, synthetic construct
  misc_feature 1..120: note = Artificially Synthesized Probe
  source 1..120: mol_type = other DNA
actggaaactgtggggagggatagttggggtaattatcagaagagttgatgtgaaagaaatgaggcatattgaaacagaaaacttcaagaaggcattactagggcttcagatcctagtgt

SEQ ID NO: 1722 - DNA, 120 bp, synthetic construct
  misc_feature 1..120: note = Artificially Synthesized Probe
  source 1..120: mol_type = other DNA
tacaacccctcttcccagaaaacacctacacaaaacccctggtggaagtttgtcccattctaggttaaacaaacaaacaaaccatttttagtgaccctcaaaattctatgtcttttctca

SEQ ID NO: 1723 - DNA, 120 bp, synthetic construct
  misc_feature 1..120: note = Artificially Synthesized Probe
  source 1..120: mol_type = other DNA
gcatccttcttggtgagagaaggggactccaaatatgtttacaccacaagacattttaccactgtactcacaaaaagcaatacccacctcctcgttcatttagattaacagttcagttta

SEQ ID NO: 1724 - DNA, 120 bp, synthetic construct
  misc_feature 1..120: note = Artificially Synthesized Probe
  source 1..120: mol_type = other DNA
tgttagaactgaattttctgatgctaactgaagggagaagggtgttgggggtaagttgggcagaagactctcagtttcaactttcagcatcacagaaattttattctggtaatcttaaca

SEQ ID NO: 1725 - DNA, 120 bp, synthetic construct
  misc_feature 1..120: note = Artificially Synthesized Probe
  source 1..120: mol_type = other DNA
tcctccaggatcagatcttgacttctctaacagcaaagattaattttgcttgctctgatcaatttgatattatgaacaaagaattctctagatggcacagatacactccccctcccccat

SEQ ID NO: 1726 - DNA, 120 bp, synthetic construct
  misc_feature 1..120: note = Artificially Synthesized Probe
  source 1..120: mol_type = other DNA
ttacaggcgtgagccacctgtagttttcgcgcctggctagttttccaaatttttttacctttcaaaatgggtggccctttgaactgaagcatgaagccatcagctcattggcactattgt

SEQ ID NO: 1727 - DNA, 120 bp, synthetic construct
  misc_feature 1..120: note = Artificially Synthesized Probe
  source 1..120: mol_type = other DNA
tagctgcaggggtttttgaaaagagatctaggaattctgcagttaattgaattcttcaggcatggactcagggtctctgaaaaaatttgagtgagcaaaattctcttgctttgctcctag

SEQ ID NO: 1728 - DNA, 120 bp, synthetic construct
  misc_feature 1..120: note = Artificially Synthesized Probe
  source 1..120: mol_type = other DNA
taggacccatccaaaaatccttttaaggtggcactatctacatcagtgggtttaccagccttggaggtgtgtgtagttagtagctataataatgcaacagtaaattaaactgctgtgaat

SEQ ID NO: 1729 - DNA, 120 bp, synthetic construct
  misc_feature 1..120: note = Artificially Synthesized Probe
  source 1..120: mol_type = other DNA
tgaacattaatttccttttttctgcatgttcaatttgtagctaaattctttcagtttatcttgaaatctccttgtaaaaggatgctcaggtgccaatgggcgctagcccttcggggttcc

SEQ ID NO: 1730 - DNA, 120 bp, synthetic construct
  misc_feature 1..120: note = Artificially Synthesized Probe
  source 1..120: mol_type = other DNA
accatgcctgactggctttttttttaaagatgcttttggccgggtgcgatggctcatgcctgtaatccaagcactttgggaggccaagacaggtggatcacgagatcaggagtttgagac

SEQ ID NO: 1731 - DNA, 120 bp, synthetic construct
  misc_feature 1..120: note = Artificially Synthesized Probe
  source 1..120: mol_type = other DNA
atctgcctaatctaatcctagccatagtcacattttgcctggattattttatcagccttctaattgatctttcttcctctgcttttgcaacttgctcttattatcccctccccacctttc

SEQ ID NO: 1732 - DNA, 120 bp, synthetic construct
  misc_feature 1..120: note = Artificially Synthesized Probe
  source 1..120: mol_type = other DNA
taacatatttatatatgttctttctccactcctcttcagagaaggcaaagacactttgtatgcctgttcacagcagtttccctattacctggtaaagtgcccagcatagagtagtcactc

SEQ ID NO: 1733 - DNA, 120 bp, synthetic construct
  misc_feature 1..120: note = Artificially Synthesized Probe
  source 1..120: mol_type = other DNA
ctttcattttgtgtgcttgtcacctgacagcttctttctttcttgtggagacaactgttcactataaacaaaaaagaagagggagatgtgcaggggtggcagaaatttagtgttaccatt

SEQ ID NO: 1734 - DNA, 120 bp, synthetic construct
  misc_feature 1..120: note = Artificially Synthesized Probe
  source 1..120: mol_type = other DNA
agaattactgttcctagagtttcatacgagtagaatcataatggactcatttgtacctggcttctttgattcagcatgtttttgaggttcatctttaccattttgtgtgtctgtggttta

SEQ ID NO: 1735 - DNA, 120 bp, synthetic construct
  misc_feature 1..120: note = Artificially Synthesized Probe
  source 1..120: mol_type = other DNA
cagttggctgtatgtatttctggactcactattcctttccattgatctacacttgtgtccttacaccaaagccacactatcttgattactattacatatcttgaaatttactagtctgag

SEQ ID NO: 1736 - DNA, 120 bp, synthetic construct
  misc_feature 1..120: note = Artificially Synthesized Probe
  source 1..120: mol_type = other DNA
tactacaaattgtataggtggatggttttcaaaaaatgtattcttttttaataggtgtaggagtcactctcagggtgactagtgacctgaaaagggacacaaagggggctagtgagtctc

SEQ ID NO: 1737 - DNA, 120 bp, synthetic construct
  misc_feature 1..120: note = Artificially Synthesized Probe
  source 1..120: mol_type = other DNA
gctgattgttcttctctgttactggcattctggtctttatccagaaaacagtactccagtagcacccaactcatgtccatttccaccttttaaaagacaaagggtgcattttaaaaggca

SEQ ID NO: 1738 - DNA, 120 bp, synthetic construct
  misc_feature 1..120: note = Artificially Synthesized Probe
  source 1..120: mol_type = other DNA
taggatctgtcttcagaatatacactgaatcccaattatttctcaccacctccatagctaccactgtggtccaagagattgttctgtcttccatggactgttgaagtagtgtcttttttt

SEQ ID NO: 1739 - DNA, 120 bp, synthetic construct
  misc_feature 1..120: note = Artificially Synthesized Probe
  source 1..120: mol_type = other DNA
ggacctagggtctcaaaatttccattgcctagaccattcttcctcgctgtctagtcctcatttccttcatgtctgagttaaaatgtcacctttttcaggaaatgatctctaaccacttaa

SEQ ID NO: 1740 - DNA, 120 bp, synthetic construct
  misc_feature 1..120: note = Artificially Synthesized Probe
  source 1..120: mol_type = other DNA
ttatcttaaggtcagctgatttggatccctcttttaatgacagcaatacctacattactgtttgaataactcagagaaggtatgtgtacaccaggggccaagagtcttggggaccagcca

SEQ ID NO: 1741 - DNA, 120 bp, synthetic construct
  misc_feature 1..120: note = Artificially Synthesized Probe
  source 1..120: mol_type = other DNA
tatgagtgttattttagctttatgtccaaaaaggtaccacagagtctcagaatattcattggtttcttttcatgaggaacttcttatttgacaattaaaaaccaagttgttggccgggca

SEQ ID NO: 1742 - DNA, 120 bp, synthetic construct
  misc_feature 1..120: note = Artificially Synthesized Probe
  source 1..120: mol_type = other DNA
gtggaacatcttatatcccaaatgtgtcattaccaacatgggcacataaactcgtatcttaaacctatgttgcagagagatttcataactgctctgccaggtatgtctacaagtgtttgt

SEQ ID NO: 1743 - DNA, 120 bp, synthetic construct
  misc_feature 1..120: note = Artificially Synthesized Probe
  source 1..120: mol_type = other DNA
caccgtacccagccaagactccttttacctatcttcttactcatgcccttctattcaacctatttttacccatacataggtccaaataaaatcttttctgaggtgttacctggtgtaaga

SEQ ID NO: 1744 - DNA, 120 bp, synthetic construct
  misc_feature 1..120: note = Artificially Synthesized Probe
  source 1..120: mol_type = other DNA
ggggaaaaaatacagacatagaatcactatatattaaggaatgtgaacattttaaggcttttaatacatggtgccaaactatcccctaataaaaatataccagctcatagcctcccaact

SEQ ID NO: 1745 - DNA, 120 bp, synthetic construct
  misc_feature 1..120: note = Artificially Synthesized Probe
  source 1..120: mol_type = other DNA
ttcaggggaaaggcccaaaatgaaatgccatgttctctttcttgttaagtttgtgcctacgggagtgagagtatgaaggaatccttctgaactatttaagtctgtagaaaacctctgata

SEQ ID NO: 1746 - DNA, 120 bp, synthetic construct
  misc_feature 1..120: note = Artificially Synthesized Probe
  source 1..120: mol_type = other DNA
tacccaagcctctgtttgaaaaagaaactggaccacactagggacaatgatgtgccttcatagcagaacaaatgctgttctgttttaaaggaccttttgtaaaaaatcattcgccacctt

SEQ ID NO: 1747 - DNA, 120 bp, synthetic construct
  misc_feature 1..120: note = Artificially Synthesized Probe
  source 1..120: mol_type = other DNA
aatcgcatgaaccctaggtttctttcagaaaatttcttgcctttatcttatgcctctggtgttttgtcacctttgtaatcaaaaattatttttaagcccaagtggaataagaactctagc

SEQ ID NO: 1748 - DNA, 120 bp, synthetic construct
  misc_feature 1..120: note = Artificially Synthesized Probe
  source 1..120: mol_type = other DNA
aataaactctttaatagtacaacaaagcaaataaaaatggagttatatggtattcggggtccatcattttgctaagagtgctgggaccagccttggggatacagcaggcagttgcttaca

SEQ ID NO: 1749 - DNA, 120 bp, synthetic construct
  misc_feature 1..120: note = Artificially Synthesized Probe
  source 1..120: mol_type = other DNA
ccttcagagttctgactatatccccttgtctttgggcatgtttatcctcttaatcccatgataaacccatgaaattccaaatacttatacatcccgtgtcaacttcctccattattccct

SEQ ID NO: 1750 - DNA, 120 bp, synthetic construct
  misc_feature 1..120: note = Artificially Synthesized Probe
  source 1..120: mol_type = other DNA
ccttcctgataggaaattttctcaactaattttcagggtatataacagggagagggcaggggagaaacactcctggagacaccaaacaattaattatattgtaatggagctatagaggga

SEQ ID NO: 1751 - DNA, 120 bp, synthetic construct
  misc_feature 1..120: note = Artificially Synthesized Probe
  source 1..120: mol_type = other DNA
atcaggcttacctttgctcctccgcagacagctatggagagtatatggaatggtaaccgtgaaaacactttcaaaatatatgaagttccttataaatatataatgtcggccgggtgtgat

SEQ ID NO: 1752 - DNA, 120 bp, synthetic construct
  misc_feature 1..120: note = Artificially Synthesized Probe
  source 1..120: mol_type = other DNA
atcttctgaattgaacctccttagaagttcatcagtagcaatcagtagcaatggccatcacatatgtaagagcactgagtgtataacctcacgtagttcgtagcttttcttctcttgatg

SEQ ID NO: 1753 - DNA, 120 bp, synthetic construct
  misc_feature 1..120: note = Artificially Synthesized Probe
  source 1..120: mol_type = other DNA
gattattttgggggatcagacacgtaataggaccaacaagtctccacagcaccccatcatcacattgatcaaaaggatcttatttgccatcctagatctgggataaaaacacattggaat

SEQ ID NO: 1754 - DNA, 120 bp, synthetic construct
  misc_feature 1..120: note = Artificially Synthesized Probe
  source 1..120: mol_type = other DNA
gaatagaaaagacggttcctgttttttgtcttttgacttaaaggcatagcaaggcatagcaaacttggcccttgtagttactgacatttaacatttattggtgcttgtggagtgagtgcc

SEQ ID NO: 1755 - DNA, 120 bp, synthetic construct
  misc_feature 1..120: note = Artificially Synthesized Probe
  source 1..120: mol_type = other DNA
agtaccatctaaatctcatctatcacttccagagtgtgggatgtaaatacaggtgaaatgctaaacacgttgattcaccattgtgaagcagttctgcacttgcgtttcaataatggcatg

SEQ ID NO: 1756 - DNA, 120 bp, synthetic construct
  misc_feature 1..120: note = Artificially Synthesized Probe
  source 1..120: mol_type = other DNA
caagtcttcaattttgttatgtttataatcaactgtttttcctttctgtagcttcttacaggtcagaagtttgccccaggcagagaagcagcacagcaaagccttttgttgcccttcttt

SEQ ID NO: 1757 - DNA, 120 bp, synthetic construct
  misc_feature 1..120: note = Artificially Synthesized Probe
  source 1..120: mol_type = other DNA
gtgcgttgtattcgatttgataacaagaggatagtcagtggggcctatgatgggtgagtgtgctaacagagtgtaaaaaagagaaaatctacgtcttaatccttccttatgtttatggtg

SEQ ID NO: 1758 - DNA, 120 bp, synthetic construct
  misc_feature 1..120: note = Artificially Synthesized Probe
  source 1..120: mol_type = other DNA
ggtgacatgttccagcttggtcaagacaatattttcttattgtcctggctttgatctgtacccacctgtcttggaatttgtctgctatgtaccttgaggaaacatggcctattaaaagat

SEQ ID NO: 1759 - DNA, 120 bp, synthetic construct
  misc_feature 1..120: note = Artificially Synthesized Probe
  source 1..120: mol_type = other DNA
ttaacagctgcacagcaactctacacaacagtttagtgcagggagtgaataagaattctgtatccaccagaaacagcagggggtactaagggagagagaatataattattcaaattggaa

SEQ ID NO: 1760 - DNA, 120 bp, synthetic construct
  misc_feature 1..120: note = Artificially Synthesized Probe
  source 1..120: mol_type = other DNA
ggttatacccattcactgattgtttctcgtttttggctattaacaaagtttctataaacatttatgtagaagtcttgggatgaatgtatgctttttgcttttatttctctgaggtaaata

SEQ ID NO: 1761 - DNA, 120 bp, synthetic construct
  misc_feature 1..120: note = Artificially Synthesized Probe
  source 1..120: mol_type = other DNA
aagtcaagtaatgtgagtccttcagctttgtctttttcaaagttttttggggcctttgatttttcatgttaattttaaaatcagtttgccaagttcaaccaaaaaagtctgctgggaatg

SEQ ID NO: 1762 - DNA, 120 bp, synthetic construct
  misc_feature 1..120: note = Artificially Synthesized Probe
  source 1..120: mol_type = other DNA
tgtatctgtgtttgtaagggatattggtttgttgctttattttctgtgtctctggttgactgtcatgataatgttggccttataaaattttgaagtgttccctcatctattttctaagag

SEQ ID NO: 1763 - DNA, 120 bp, synthetic construct
  misc_feature 1..120: note = Artificially Synthesized Probe
  source 1..120: mol_type = other DNA
ctaatcactactttagccacatcccaaaaaatgtcaattaagtcaagttggtttataatattcaggtcttctgtatccttagtgatttttctattcgtccttaccaattattgagagagg

SEQ ID NO: 1764 - DNA, 120 bp, synthetic construct
  misc_feature 1..120: note = Artificially Synthesized Probe
  source 1..120: mol_type = other DNA
agctcctattatgggttcttagttatatctcactaatttggtgaggagggacctagggtttacaatagttatctctaatttattgcagtctactatcagatgatattgtaccacttcatg

SEQ ID NO: 1765 - DNA, 120 bp, synthetic construct
  misc_feature 1..120: note = Artificially Synthesized Probe
  source 1..120: mol_type = other DNA
ctctgaaaaagttttcgttttgccttcatttttgaaagatatttttgctggctaaataattctatataggccaggcatggtgtctcacacctgtaatcccagcactttgggagtctgagg

SEQ ID NO: 1766 - DNA, 120 bp, synthetic construct
  misc_feature 1..120: note = Artificially Synthesized Probe
  source 1..120: mol_type = other DNA
aattaatttctattttttgagccccctagtgtatgccatactttgttatggcacccctagccctgatggaccattctaacactagtcagaagaaagttggggtagctgtattaattagag

SEQ ID NO: 1767 - DNA, 120 bp, synthetic construct
  misc_feature 1..120: note = Artificially Synthesized Probe
  source 1..120: mol_type = other DNA
gacataatgtactaatatcagaaatgaaagagatcccagatcttcacagaatcaatacttaataattatctttccaaacagagaaactaagcctaggcagatccactggtgaattctacc

SEQ ID NO: 1768 - DNA, 120 bp, synthetic construct
  misc_feature 1..120: note = Artificially Synthesized Probe
  source 1..120: mol_type = other DNA
ctgcacccggccatgtatggtcttattattgcccttatgtttagcaatttcatgatttctaaaatattttaaaatgtaataatgtgccaataaaatgtagtaactctgaaattttttaaa

SEQ ID NO: 1769 - DNA, 120 bp, synthetic construct
  misc_feature 1..120: note = Artificially Synthesized Probe
  source 1..120: mol_type = other DNA
tattcatacagtggaatatcaaccagtaataaaaaagaatgaactactgttttacatgcagcaacatagaagaatcttataatgttgactaaaagaagccaggcatgagctgggctcagt

SEQ ID NO: 1770 - DNA, 120 bp, synthetic construct
  misc_feature 1..120: note = Artificially Synthesized Probe
  source 1..120: mol_type = other DNA
agattgttttccagtatgctgggaacattctacatcttcatcagggtggtaactgccagtggtgtgctagaacaggctcatactcacttatgagagccaactattagatattcatgaatt

SEQ ID NO: 1771 - DNA, 120 bp, synthetic construct
  misc_feature 1..120: note = Artificially Synthesized Probe
  source 1..120: mol_type = other DNA
caagttcctaccctttttgtttctacttctttaggagcattccggaagagtttttcgactacagtttgatgaattccagattgtcagtagttcacatgatgacacaatcctcatctggga

SEQ ID NO: 1772 - DNA, 120 bp, synthetic construct
  misc_feature 1..120: note = Artificially Synthesized Probe
  source 1..120: mol_type = other DNA
ggaaaattcctagtgcttagcacagtggcgaatacataatatgccctcaggaaaaactggtcatgagtattaatattgcaatctccatatacctaccccctcctttgcccaaaattttct

SEQ ID NO: 1773 - DNA, 120 bp, synthetic construct
  misc_feature 1..120: note = Artificially Synthesized Probe
  source 1..120: mol_type = other DNA
tcttccttatctgagttccttcttaggctgccttctctattcccaaggcttcagatctcatctcattgtagaagactcaaatttctgtctccagtccaagcctctgccttaatctccagg

SEQ ID NO: 1774 - DNA, 120 bp, synthetic construct
  misc_feature 1..120: note = Artificially Synthesized Probe
  source 1..120: mol_type = other DNA
cctagttttttcccattggttccagacaaaggtgacttataaatatatttagtgttttgccagaatctctcttgctttgccattaagcagaagaactagtttccctgtatagcctgctgg

SEQ ID NO: 1775 - DNA, 120 bp, synthetic construct
  misc_feature 1..120: note = Artificially Synthesized Probe
  source 1..120: mol_type = other DNA
ggtctccccaggcaagaaggtatcctcttcccaaggtgtacccactgaatgttgttactacatattgagagtcattttatgcatatgcattctacctttcctgctttatgagtattttta

SEQ ID NO: 1776 - DNA, 120 bp, synthetic construct
  misc_feature 1..120: note = Artificially Synthesized Probe
  source 1..120: mol_type = other DNA
caactgggctagaataaatgtaaagtttgacctttttaaaacgaaaagagagacaaagtctcagcacattccaaggagtggtagaaacagagctgaaggtgtccccattgtagattagtc

SEQ ID NO: 1777 - DNA, 120 bp, synthetic construct
  misc_feature 1..120: note = Artificially Synthesized Probe
  source 1..120: mol_type = other DNA
gatgatggctgcctggtttcaggtggaacttaatgcattgatctttagaagctccttctgttggaagttgagtacctgtgatctaaaatgtcctggaggcagatgacatctaaaatatgt

SEQ ID NO: 1778 - DNA, 120 bp, synthetic construct
  misc_feature 1..120: note = Artificially Synthesized Probe
  source 1..120: mol_type = other DNA
aaggggccctttgggttgtttcaggtaaagtacatcaatgggactacaggaaagagaatttcacacacggtctttctgcatcagtaattttaatagagactcttagtggttatcaacaac

SEQ ID NO: 1779 - DNA, 120 bp, synthetic construct
  misc_feature 1..120: note = Artificially Synthesized Probe
  source 1..120: mol_type = other DNA
cacgtcttgccccttgttcttgtttatttcttcctagggggtctcccattgtttttattccctgatttcccatctgcttagtgaaaatggcagcatttcgggactgaattcagcactctg

SEQ ID NO: 1780 - DNA, 120 bp, synthetic construct
  misc_feature 1..120: note = Artificially Synthesized Probe
  source 1..120: mol_type = other DNA
cacgcctggccagaatgcttaactattaacatatgtttgctgtgatccctgcttgtgaaagtagacataaaaaccagaaggaatatatcaaaatcttatcagtgattgcatcttggtcgt

SEQ ID NO: 1781 - DNA, 120 bp, synthetic construct
  misc_feature 1..120: note = Artificially Synthesized Probe
  source 1..120: mol_type = other DNA
gaggtgatggtggtgttggtgttggcaatggtggtggtggtgatattggtgttggtaatggtggtggtgatcatggtagtggcgacagtggtgttggtaatggtgatagtggtgatggtg

SEQ ID NO: 1782 - DNA, 120 bp, synthetic construct
  misc_feature 1..120: note = Artificially Synthesized Probe
  source 1..120: mol_type = other DNA
ggtgatggtgttggtaatggtgatagtggtgatggtggtgatggaggttttagtgtggtggtgacgatggtgttggtggtggtgatggtgttggtaatggtgatggtggtgatggtagtg

SEQ ID NO: 1783 - DNA, 120 bp, synthetic construct
  misc_feature 1..120: note = Artificially Synthesized Probe
  source 1..120: mol_type = other DNA
ggtggtagtggggatgatgtggtgacagtgagctgtttatgcgatttgaatcttttctttgcatcagctcagatgcctccttcttcaaacctactaggttcctgttagcactataattta

SEQ ID NO: 1784 - DNA, 120 bp, synthetic construct
  misc_feature 1..120: note = Artificially Synthesized Probe
  source 1..120: mol_type = other DNA
tgaaattcaattctgggtagagcccatccatcccactgagatgagggctcactgattcctgagatggcccataggcatcaaaggacaagtcagggtgagggtctcttggaaagaggctta

SEQ ID NO: 1785 - DNA, 120 bp, synthetic construct
  misc_feature 1..120: note = Artificially Synthesized Probe
  source 1..120: mol_type = other DNA
atgtgtatgagaactagaacgtctgagtaaaatgtaggtaatgtgagaaaccgtgtgacttgctttaaattctatgatgtgaataacaaatgcaaaagtaagggcagtgggtggtgcagg

SEQ ID NO: 1786 - DNA, 120 bp, synthetic construct
  misc_feature 1..120: note = Artificially Synthesized Probe
  source 1..120: mol_type = other DNA
tcacctgggtagctttaaatagtcttgatgttcaggctctactctagatcaatggaatcagagtctctgttgggggccctcatcttcagtatttatttgcttatttttatttttcagaga

SEQ ID NO: 1787 - DNA, 120 bp, synthetic construct
  misc_feature 1..120: note = Artificially Synthesized Probe
  source 1..120: mol_type = other DNA
tttttttttcagcttggacgtttttacacagggccaactgggtagtagcctggtggccagggtggtggtggtggtgatgaaatcctgccttatgtgtgttttcaggggaaggtgaaaagg

SEQ ID NO: 1788 - DNA, 120 bp, synthetic construct
  misc_feature 1..120: note = Artificially Synthesized Probe
  source 1..120: mol_type = other DNA
acccacagcttggtagtaggccaggaagcccttgtagaacatgatggtcccattctcctcgttggagaagtctgtgtggaaggtcagcagcatcttgttcccttgggacataaattcctt

SEQ ID NO: 1789 - DNA, 120 bp, synthetic construct
  misc_feature 1..120: note = Artificially Synthesized Probe
  source 1..120: mol_type = other DNA
taagacgtgccattgtcatgtaattcacgcataatctccaggggtctcctgggaatggtagttgttggaccttcgcaggctctgcttgagccctgaatctcatttttactggatagagaa

SEQ ID NO: 1790 - DNA, 120 bp, synthetic construct
  misc_feature 1..120: note = Artificially Synthesized Probe
  source 1..120: mol_type = other DNA
agaaaggaccatggcatgagcatctatgtatgaagtctcctctgatccctaggaggagggatggggcgtgtgttgtgtgtgtccacgcgtgtgcacagtggaactgatgaggtgtgtgaa

SEQ ID NO: 1791 - DNA, 120 bp, synthetic construct
  misc_feature 1..120: note = Artificially Synthesized Probe
  source 1..120: mol_type = other DNA
agcctgacctgacttgatggtctgctcaatggccatgatgtactcgtcaaagtcattggacagctgaaccttgaccagtcgggtcttgtacactgtgggggagaggcagacagtttgggt

SEQ ID NO: 1792 - DNA, 120 bp, synthetic construct
  misc_feature 1..120: note = Artificially Synthesized Probe
  source 1..120: mol_type = other DNA
atgcatacaaccacatctaccttttctcacatgagcatacctaggccactcacagtcatggttccccacacaatcatggcccctcacaatacatgctctcacacacaccacagtcaccca

SEQ ID NO: 1793 - DNA, 120 bp, synthetic construct
  misc_feature 1..120: note = Artificially Synthesized Probe
  source 1..120: mol_type = other DNA
tgagactacctttctcagctcctctttcaattaggtgtggccaggtggctgaacagattgctatctatgcccataaaaacaacccatgcacaatcttatttccatctagaatgaatgaat

SEQ ID NO: 1794 - DNA, 120 bp, synthetic construct
  misc_feature 1..120: note = Artificially Synthesized Probe
  source 1..120: mol_type = other DNA
tatggggataggagaatgggaagaaataagagaagggagaggagaaagcccaaatcatggtagagatgaaagagtcagagaatgccagatggagagaaaataacagaagaggtggcaggt

SEQ ID NO: 1795 - DNA, 120 bp, synthetic construct
  misc_feature 1..120: note = Artificially Synthesized Probe
  source 1..120: mol_type = other DNA
acttctgattcccacatagcagcacagaggggcgttacattttttaggaaacatttccccaaaggaaataaaaagcaaggtaatgtaatggtcaaggtgattaagagctcagactctgca

SEQ ID NO: 1796 - DNA, 120 bp, synthetic construct
  misc_feature 1..120: note = Artificially Synthesized Probe
  source 1..120: mol_type = other DNA
agacagcataaatggagttatcaaagaatagcagactatggtgatgttgaccctgctgccatttgagagataggtagtgtagaggaactcagggaaggcaaatgtattagcataaataag

SEQ ID NO: 1797 - DNA, 120 bp, synthetic construct
  misc_feature 1..120: note = Artificially Synthesized Probe
  source 1..120: mol_type = other DNA
aaaactttaaaggtcatggaatgattgtgtactttcctccattgattactaagatgctttgacagtctcagcttacgtggtcattgctgtggtctcacattaacatgcaaagcaaggact

SEQ ID NO: 1798 - DNA, 120 bp, synthetic construct
  misc_feature 1..120: note = Artificially Synthesized Probe
  source 1..120: mol_type = other DNA
ataactggaggtcactggactctgaggacatgttcagaactctccgagagacagaaacttacaccaggacttggagatgctgagaacatgtctagaatccatcagaaagtccaaatgtaa

SEQ ID NO: 1799 - DNA, 120 bp, synthetic construct
  misc_feature 1..120: note = Artificially Synthesized Probe
  source 1..120: mol_type = other DNA
ctcctgccttacctctcttgtttcatcaactctcacttctccctttgaaatgaatgcttaatacgcatttgttgaataaatgacgcaacaaactttctcgtgtggtttacaatgaggacc

SEQ ID NO: 1800 - DNA, 120 bp, synthetic construct
  misc_feature 1..120: note = Artificially Synthesized Probe
  source 1..120: mol_type = other DNA
tctgtccttgggacacacctgtcttagatttgtccatttttgagaatttcccagatattttagccaccatgagctgccttgttgctgcatatctattatgtatctggagaaatccacgta

SEQ ID NO: 1801 - DNA, 120 bp, synthetic construct
  misc_feature 1..120: note = Artificially Synthesized Probe
  source 1..120: mol_type = other DNA
aaagtgccgggattacaggctcactgtgcctggcctaatatttagtttttaataataattgtatttaatgaccagcttgaaaaattcctggaaatttaacactgggctccagcaagctag

SEQ ID NO: 1802 - DNA, 120 bp, synthetic construct
  misc_feature 1..120: note = Artificially Synthesized Probe
  source 1..120: mol_type = other DNA
tgccttggtgcctgcacataaattccccatcaatttttgtataatctgggtcacatgtgtgttatatctgggacaactcagaggcctaaaaatacagagatcgttatttattatccccaa

SEQ ID NO: 1803 - DNA, 120 bp, synthetic construct
  misc_feature 1..120: note = Artificially Synthesized Probe
  source 1..120: mol_type = other DNA
cctttgaaaatcacctgaaagatcctctggactaaggaaatagtcttagctctgtatcccaagttttctttaaggaagtagcaagtacgcaactgtactgatcatgtagcactgatgtag

SEQ ID NO: 1804 - DNA, 120 bp, synthetic construct
  misc_feature 1..120: note = Artificially Synthesized Probe
  source 1..120: mol_type = other DNA
cttagtattaattcatgcaacaatttgttccttctgcaaatgtcaatgtacaatgtgcaatgtacaatgggtacaacggtctgatccattgtaaaaccagacacaggctctagccctcac

SEQ ID NO: 1805 - DNA, 120 bp, synthetic construct
  misc_feature 1..120: note = Artificially Synthesized Probe
  source 1..120: mol_type = other DNA
gatcacacttcgagaaccagtgctcgaaggagttttgtgtttaagtgccacagggggagccacgggactttctaagaactgatccagctggatttgaaaaaatcaccccaactgctatgt

SEQ ID NO: 1806 - DNA, 120 bp, synthetic construct
  misc_feature 1..120: note = Artificially Synthesized Probe
  source 1..120: mol_type = other DNA
tctcttccattttgccctaaatcccagcctcttacaatcatttcttggtgtatcacgggcgcatcctcctggaagaccccgtcgggcttctgcttctccaggatcagccatttaacagcc

SEQ ID NO: 1807 - DNA, 120 bp, synthetic construct
  misc_feature 1..120: note = Artificially Synthesized Probe
  source 1..120: mol_type = other DNA
gcatggccttgaggagaggcggggtctcatgaagagcctggcctgggaggagtcagggcctcagagggcgtggccttgagaagaggtggggggccctcaggggatgggcatggccttgag

SEQ ID NO: 1808 - DNA, 120 bp, synthetic construct
  misc_feature 1..120: note = Artificially Synthesized Probe
  source 1..120: mol_type = other DNA
aggggcaccctggtccttgggtctcatttcaccagcagtaaaataattccagtaacaatattcaggaatacttatatcacgcttaatgttactttccagactgttctaagagaataccat

SEQ ID NO: 1809 - DNA, 120 bp, synthetic construct
  misc_feature 1..120: note = Artificially Synthesized Probe
  source 1..120: mol_type = other DNA
aaaaaaaaaaatgtaaaagagggaaaacagatcacagatgggctgttctagctgaaggggaagagaaaggtgcgggttaaacacctccagaatgagatggaatttggctccatccatgcc

SEQ ID NO: 1810 - DNA, 120 bp, synthetic construct
  misc_feature 1..120: note = Artificially Synthesized Probe
  source 1..120: mol_type = other DNA
aaatttcaaatcgagtataaaaaaattattgattggtgatggtcgacgaggtttttggcaccacctaaaattctaagcctggggtcatctcactcactttaccccaatcctggctctgct

SEQ ID NO: 1811 - DNA, 120 bp, synthetic construct
  misc_feature 1..120: note = Artificially Synthesized Probe
  source 1..120: mol_type = other DNA
gcgcctggccggagttaccactatttaatgatttacattctgtttgtagtttgactcagagatctacgtgtagggaggaagagaaatctccaaaatatatctgcttgtctgatatggtag

SEQ ID NO: 1812 - DNA, 120 bp, synthetic construct
  misc_feature 1..120: note = Artificially Synthesized Probe
  source 1..120: mol_type = other DNA
ccaccgtgcccgacctgagttgtacattttaaaagggtgacatatagtaagtgaattaaatcttaattttttaaaaatgatgattgagtggaaaacgtttaagtatttttgcaactactt

SEQ ID NO: 1813 - DNA, 120 bp, synthetic construct
  misc_feature 1..120: note = Artificially Synthesized Probe
  source 1..120: mol_type = other DNA
gaagtaaaatatatcatcagtaattttgatatactagtagattattatcaaatattaaaaggttatagtcacattattagtgggttgtggttttgcaactttttacaaaatgttgaaatg

SEQ ID NO: 1814 - DNA, 120 bp, synthetic construct
  misc_feature 1..120: note = Artificially Synthesized Probe
  source 1..120: mol_type = other DNA
ccctgaaggggacttatcaggtcctagctggaaataactttgctagggattttccccgatgatgagcatgtgcactgctccgaaaacaccctagagttgtgttttgctcattatcatagt

SEQ ID NO: 1815 - DNA, 120 bp, synthetic construct
  misc_feature 1..120: note = Artificially Synthesized Probe
  source 1..120: mol_type = other DNA
agttagacaggaactaaggattcccacagttcctggtaacaacacctctgtggtaaccagggcagagaataaagtgccaagaaacatagggttgattgagtttggataaaatgagatgac

SEQ ID NO: 1816 - DNA, 120 bp, synthetic construct
  misc_feature 1..120: note = Artificially Synthesized Probe
  source 1..120: mol_type = other DNA
agtgaaatacatcccggacatggaggacttcaggatgaattttcacgagccccagacacatctgccttgggaacttcttctccataaaaagaactaaaaattatatcccacaaatgtact

SEQ ID NO: 1817 - DNA, 120 bp, synthetic construct
  misc_feature 1..120: note = Artificially Synthesized Probe
  source 1..120: mol_type = other DNA
acaaaaacagcttgacactaccagcaagtaaatgaaattggactggactaggctttgactcaaactgcactttcctcaaacatgatagacaggctttaattgggttctggatctccataa

SEQ ID NO: 1818 - DNA, 120 bp, synthetic construct
  misc_feature 1..120: note = Artificially Synthesized Probe
  source 1..120: mol_type = other DNA
atttactcacactctggaataatcaatccaagtgtcttgggatagtaacatttagccattctttttctgacccccaatgggccaaaggaattacacaattctggagaaaagtacagccca

SEQ ID NO: 1819 - DNA, 120 bp, synthetic construct
  misc_feature 1..120: note = Artificially Synthesized Probe
  source 1..120: mol_type = other DNA
tctctttgtttcacttaagacttatttcacgtgagatctaaagtctcacctgattcaaaaactgaatgcatgcatgaatgaagaagggctgcctgttcactcatcgagtttggcaggtct

SEQ ID NO: 1820 - DNA, 120 bp, synthetic construct
  misc_feature 1..120: note = Artificially Synthesized Probe
  source 1..120: mol_type = other DNA
cccaccccgtgggacctactcctggccaggcccaggtggctggcccgcgcgtgctgccgccgcagctctgtgatgtagttgcagcagtccaggaagaccttcttgcacgcctcgcccagg

SEQ ID NO: 1821 - DNA, 120 bp, synthetic construct
  misc_feature 1..120: note = Artificially Synthesized Probe
  source 1..120: mol_type = other DNA
ggccaggctgacaattgggatcccccacatatgcacctgtgtatctcttcccaaatgaccccaccctgtcccactctcatctcccccattcctgcttctgcccttcctttctctttctct

SEQ ID NO: 1822 - DNA, 120 bp, synthetic construct
  misc_feature 1..120: note = Artificially Synthesized Probe
  source 1..120: mol_type = other DNA
ttccaaatcttatctccatttcccctctgattccatctgcattcccatcctcactcctgatcccaagccaaccccatctccatcttcgtccctactccggaaaccttccccactgaatga

SEQ ID NO: 1823 - DNA, 120 bp, synthetic construct
  misc_feature 1..120: note = Artificially Synthesized Probe
  source 1..120: mol_type = other DNA
agacagggagagagacggagagacagggagagagggagagagacggagagacagagagagggagagtgaggggggagagagggaaagggaaagagggagagaaagggagagggagagaga

SEQ ID NO: 1824 - DNA, 120 bp, synthetic construct
  misc_feature 1..120: note = Artificially Synthesized Probe
  source 1..120: mol_type = other DNA
atgggattaagttagggatctggagatggaatcattatcctggattatgtaggtggagctaatgtaatcataagggtctttattaagcaggggcaggggagaaaggagagacagagacag

SEQ ID NO: 1825 - DNA, 120 bp, synthetic construct
  misc_feature 1..120: note = Artificially Synthesized Probe
  source 1..120: mol_type = other DNA
ctctatgcagatgagagtatctctatgcaaatggcaggacccctctgcgcaggagagaacctctctatgcagatgagaatatctgtatgcaaatgacaggaccccactgtgcaaacacca

SEQ ID NO: 1826 - DNA, 120 bp, synthetic construct
  misc_feature 1..120: note = Artificially Synthesized Probe
  source 1..120: mol_type = other DNA
aggctggaatccatcttcatactcggcctcccctctcagactgggcctaccccatcagactgaaccccactttcactctgagcctccctccttagactaggctttctcttctgacctggt

SEQ ID NO: 1827 - DNA, 120 bp, synthetic construct
  misc_feature 1..120: note = Artificially Synthesized Probe
  source 1..120: mol_type = other DNA
ctcctcttaccgtactccttcacctcaaactcagtggagaagacctgctgtggtgagttttcatagtaggctcggatcttccactggcccatgctgtgaggagggcggatgagtggtctc

SEQ ID NO: 1828 - DNA, 120 bp, synthetic construct
  misc_feature 1..120: note = Artificially Synthesized Probe
  source 1..120: mol_type = other DNA
tgctcaatgtgcaaatcttgaaacaggagattataatggcacctactgtgttggcttgggacatagttcatatgagtaggggctcattttttcagtgtctctctgaatactaataactag

SEQ ID NO: 1829 - DNA, 120 bp, synthetic construct
  misc_feature 1..120: note = Artificially Synthesized Probe
  source 1..120: mol_type = other DNA
tggccaaaaatctgtttttctagcttctgttggaaacaaggaaatttctgtggatagtgtactctggttagcaggagacatctaattggagctgggcaactgttgtgcctttacaagaga

SEQ ID NO: 1830 - DNA, 120 bp, synthetic construct
  misc_feature 1..120: note = Artificially Synthesized Probe
  source 1..120: mol_type = other DNA
acaaacataacaattccttcctggagggatttaggttcaatagagggcgaggcgatgggagaagcaattatcaaatgaataaatctcatttgcaggacatggcaggaaggaggagtgtgt

SEQ ID NO: 1831 - DNA, 120 bp, synthetic construct
  misc_feature 1..120: note = Artificially Synthesized Probe
  source 1..120: mol_type = other DNA
gttgtgtgtgttgtgtggtcgtgtatgttgtgtgtttgtgtgtgttgcattgtgtgtgtgcattgtgtgtgcacatgtgtctgcatatctctttgcctctgtgtgtgtattgtgtgctgt

SEQ ID NO: 1832 - DNA, 120 bp, synthetic construct
  misc_feature 1..120: note = Artificially Synthesized Probe
  source 1..120: mol_type = other DNA
gggaacttagaaagtgatggagactaagaggggaggagttcagaagaggagacttcgagggggaggggcttggaaaaggaattcagtgggagggacttagagggggaggagactcagaag

SEQ ID NO: 1833 - DNA, 120 bp, synthetic construct
  misc_feature 1..120: note = Artificially Synthesized Probe
  source 1..120: mol_type = other DNA
taaatacaatcaattccaaatgccccaactatacatgaacccgaagtagccaatctttaaacccacactgaaaattgcaagtccccaagctgcaaactcccaaatcttgtaaagtccaaa

SEQ ID NO: 1834 - DNA, 120 bp, synthetic construct
  misc_feature 1..120: note = Artificially Synthesized Probe
  source 1..120: mol_type = other DNA
tcacttacccttgtcaggatgcctgagtgactttggtggtgaaaaaagtcatcactgaggaaagtcctcatttctagagcttttgtacctgtctaatgtcaatatcctcttaggatatta

SEQ ID NO: 1835 - DNA, 120 bp, synthetic construct
  misc_feature 1..120: note = Artificially Synthesized Probe
  source 1..120: mol_type = other DNA
ttcgttttttcatgaacaatatacctcagaggctatttcacctcagtgagcaaagaactgcctcattcttacaggttacaggcctcttgttatattgtgagaaagtaaccagcctcctac

SEQ ID NO: 1836 - DNA, 120 bp, synthetic construct
  misc_feature 1..120: note = Artificially Synthesized Probe
  source 1..120: mol_type = other DNA
tgaaatgaattgtcagtttcttccacagcctcatcacaagggcatgttgatgaacttgaagatttttgccagccttatgggtgaaaactggtaccctggtgtcattttttttgttttgtt

SEQ ID NO: 1837 - DNA, 120 bp, synthetic construct
  misc_feature 1..120: note = Artificially Synthesized Probe
  source 1..120: mol_type = other DNA
aaattaaaaaaaggaaagaaactggatctcccaattgccccattccatcttctatcccccactttctcctcaagccaccccatttcctggtttcattctagactcaagcattcggcactg

SEQ ID NO: 1838 - DNA, 120 bp, synthetic construct
  misc_feature 1..120: note = Artificially Synthesized Probe
  source 1..120: mol_type = other DNA
tgaggcccacccagcccagcattcccggaatcaaggagggagagtgtggccaaccgggctgaccattcgtgggttatctggaagctacatatactgaaaaagtagttgttatttatctga

SEQ ID NO: 1839 - DNA, 120 bp, synthetic construct
  misc_feature 1..120: note = Artificially Synthesized Probe
  source 1..120: mol_type = other DNA
cctttctagtcttggagtggaagtcccaagtggcacccaggaaacaatccttaacccagcgccctgcgcatactgagcgctcagtacacttgaactgtactttttgtttttgttttttga

SEQ ID NO: 1840 - DNA, 120 bp, synthetic construct
  misc_feature 1..120: note = Artificially Synthesized Probe
  source 1..120: mol_type = other DNA
acaacaacaacaaataccctacctttgtattcctttgaccgatcatgagcgcactgacgctcacaaacgcctatgagatgcgggtggcagcaacttatctatttcacgtattttaaccct

SEQ ID NO: 1841 - DNA, 120 bp, synthetic construct
  misc_feature 1..120: note = Artificially Synthesized Probe
  source 1..120: mol_type = other DNA
aatctcccccattttaagagccttaatcccatgcacaaagtcccttttgccgtgtgacagaacatatcatatccacaggtcttgaggattcagacgtgcacacctttttttttttttttt

SEQ ID NO: 1842 - DNA, 120 bp, synthetic construct
  misc_feature 1..120: note = Artificially Synthesized Probe
  source 1..120: mol_type = other DNA
ctcaaggaggtttcttaccctctctgtgcctcacaggctttttaacaaattaaaatccacagaagccttaatagacagcgtggcgtagcaatcactctgtgttacctcgtattatttttt

SEQ ID NO: 1843 - DNA, 120 bp, synthetic construct
  misc_feature 1..120: note = Artificially Synthesized Probe
  source 1..120: mol_type = other DNA
acagcgaaaacaggtttctacattgtaaacacaacctccgtgtagaccccaacccccaaaaaggcaagacaacggcgtagccaaacagattggtcattattgtacacatagctggaaggg

SEQ ID NO: 1844 - DNA, 120 bp, synthetic construct
  misc_feature 1..120: note = Artificially Synthesized Probe
  source 1..120: mol_type = other DNA
ttgggagtcacttaactcttcaggacctgggttattacaggttataagtgtgggaccgtcggattccatgtggctaagattctttctatgtgattattgtggttagaaatagaatatgct

SEQ ID NO: 1845 - DNA, 120 bp, synthetic construct
  misc_feature 1..120: note = Artificially Synthesized Probe
  source 1..120: mol_type = other DNA
tggaaactatattctaaggggtttggaaacttattagcttagactaataagcctggtgaatgtgctgctatctgaggaaatgcagctgctgggctgggagtcagaaatgaatagatattt

SEQ ID NO: 1846 - DNA, 120 bp, synthetic construct
  misc_feature 1..120: note = Artificially Synthesized Probe
  source 1..120: mol_type = other DNA
cgtctctcaatttaaaggtttgtccagtgttttctaatgattggggtgagattatgcattgttggccagaacacaaagacacattatctttgtgtctttctcagtgcatcacatggagtc

SEQ ID NO: 1847 - DNA, 120 bp, synthetic construct
  misc_feature 1..120: note = Artificially Synthesized Probe
  source 1..120: mol_type = other DNA
attttgagttccccctgcatcctagctgattttagttgtttttgcggtatgaattatgactgatttctgagagtcagagctacacacaaaggtatactcagagaagtgtctttcccttct

SEQ ID NO: 1848 - DNA, 120 bp, synthetic construct
  misc_feature 1..120: note = Artificially Synthesized Probe
  source 1..120: mol_type = other DNA
ttacaggcatgagccactgcgcccggcccctcattaatttttaaaaacatctttattgaggccaggcatggtggctcacgcctgtaatcccagactttgggaggctgaggtgggcagatc

SEQ ID NO: 1849 - DNA, 120 bp, synthetic construct
  misc_feature 1..120: note = Artificially Synthesized Probe
  source 1..120: mol_type = other DNA
ttgctgggttgaaaggtaaatgcatatgtagttttctcagatatagtcaaatttccctccagaagggttgtaccaatttccaacagtgtatgagaatagcgcctgtttctccacaacctc

SEQ ID NO: 1850 - DNA, 120 bp, synthetic construct
  misc_feature 1..120: note = Artificially Synthesized Probe
  source 1..120: mol_type = other DNA
tttagccattcatctgtcatgaacagttgggttgctttcaccatttttttttttttcttagcttcagcttaaaggaggccacctttcgactattgtaagtaatgctgtgtccctcagttg

SEQ ID NO: 1851 - DNA, 120 bp, synthetic construct
  misc_feature 1..120: note = Artificially Synthesized Probe
  source 1..120: mol_type = other DNA
tgtacttgagtctaattctggacctcatctttttgtgtacatatgcagcagtacctcactgtttcattatgaaggctttgtacagtaggttttaatgtctgttatacctatcccccctta

SEQ ID NO: 1852 - DNA, 120 bp, synthetic construct
  misc_feature 1..120: note = Artificially Synthesized Probe
  source 1..120: mol_type = other DNA
ccaccatgccccgcctgctgagttattattgaataaattttatcattgattttggggttttccaggtagtatatcatattatctacaattagtgatagcttttctttacccttttttttt

SEQ ID NO: 1853 - DNA, 120 bp, synthetic construct
  misc_feature 1..120: note = Artificially Synthesized Probe
  source 1..120: mol_type = other DNA
gtgtgtgtgtgaatgtgctgtgagcactggagaagaatatatcatttctgttatcaaggtgtggagtttgatatacatctatatcatctcctctgttatgttgtttagatcaatcatctg

SEQ ID NO: 1854 - DNA, 120 bp, synthetic construct
  misc_feature 1..120: note = Artificially Synthesized Probe
  source 1..120: mol_type = other DNA
ttacaggtgcacactgccatacttggtgcgtgatctgtcttgttttgagattggtttgaagcctctaatttttagggtgttactgtttatgtgtccttgcatctcctttgggttattctt

SEQ ID NO: 1855 - DNA, 120 bp, synthetic construct
  misc_feature 1..120: note = Artificially Synthesized Probe
  source 1..120: mol_type = other DNA
ttccattcctatcagcagtgtatgattcttccagttgctctgtgttggcattatcagtttttaaaaaaatacagctattttaataggtgcatatggtagctcatcatggttttaattcat

SEQ ID NO: 1856 - DNA, 120 bp, synthetic construct
  misc_feature 1..120: note = Artificially Synthesized Probe
  source 1..120: mol_type = other DNA
ttgatttacatttcctggatgactaatttacaattccctgataagcatcttatgcacttacaggtgtttttatatcttctttagagaaaatgtcttttgaaagtcatttacctgtttttt

SEQ ID NO: 1857 - DNA, 120 bp, synthetic construct
  misc_feature 1..120: note = Artificially Synthesized Probe
  source 1..120: mol_type = other DNA
tttcttcgaataatttttctacccctttctctcttctccctcagatactcatatgatacatacgttagttttctagatggtatcccccatatgtccgtatgtctctattcatttttcttt

SEQ ID NO: 1858 - DNA, 120 bp, synthetic construct
  misc_feature 1..120: note = Artificially Synthesized Probe
  source 1..120: mol_type = other DNA
aggaatgggggatggtagctgagtcaagttattcttttaccaaatatcagcagcctctgctcatcaaacgctctgctggttgttttaagtgttcagtcaggttgcaaagttttgttttgt

SEQ ID NO: 1859 - DNA, 120 bp, synthetic construct
  misc_feature 1..120: note = Artificially Synthesized Probe
  source 1..120: mol_type = other DNA
ccatgcctggccaggttccagagtttgaaacagtagattttgatgattattttcctagtttactggttgttttggtggaaggactgaccttttcattcttgtagcagtgtcttttgtaaa

SEQ ID NO: 1860 - DNA, 120 bp, synthetic construct
  misc_feature 1..120: note = Artificially Synthesized Probe
  source 1..120: mol_type = other DNA
cagcaccaaattgactaagatacagattgaggaggtctcttccactttgggtctactggcaggttttttttttttttaatcattacagtcatgcttcagagatattgtgggtttggttcc

SEQ ID NO: 1861 - DNA, 120 bp, synthetic construct
  misc_feature 1..120: note = Artificially Synthesized Probe
  source 1..120: mol_type = other DNA
agaaagatttgactgaaaagttaaatgtgtcctatcctccagtcgtttttttccagcccttgttctgtctttgttatggagaggtgcagttgtatgactattccatccttaggaatatgg

SEQ ID NO: 1862 - DNA, 120 bp, synthetic construct
  misc_feature 1..120: note = Artificially Synthesized Probe
  source 1..120: mol_type = other DNA
tggtagttgctagtaaaggggattatacagtacatgttcaaagcccccacagtcttcccaatgtgtccattattctggcttcttcttaattttgctactggaaattttggagtagctgag

SEQ ID NO: 1863 - DNA, 120 bp, synthetic construct
  misc_feature 1..120: note = Artificially Synthesized Probe
  source 1..120: mol_type = other DNA
catagaacaattttgaaaataattaggaagcctgaaatttgtatttgttctcctacactgtggactgttttcagggtgtttgggttctgctgatcatggtactcagggagctgttgcttc

SEQ ID NO: 1864 - DNA, 120 bp, synthetic construct
  misc_feature 1..120: note = Artificially Synthesized Probe
  source 1..120: mol_type = other DNA
acaactcagccacactctaaaatcttcctattccaaatccagtgtcctttccatttttccttcttacaaccccaggtctaggtaggacagctgatttttacagtaagatagtggtgaaaa

SEQ ID NO: 1865 - DNA, 120 bp, synthetic construct
  misc_feature 1..120: note = Artificially Synthesized Probe
  source 1..120: mol_type = other DNA
acagcctagatggagggttttaatgctatagtttctactttttttcatattgtatagtggtcccagtgtccattttggcatagcttatgataaagttgcagtttctggccaggcatggtg

SEQ ID NO: 1866 - DNA, 120 bp, synthetic construct
  misc_feature 1..120: note = Artificially Synthesized Probe
  source 1..120: mol_type = other DNA
ttccccttcatccctgctgtcacgggtccatctgggatcctggcatctttttaaaaataagagctttgtaatttacatgccatgtagtttcccctaaagtgtacaaattcagtggttttt

SEQ ID NO: 1867 - DNA, 120 bp, synthetic construct
  misc_feature 1..120: note = Artificially Synthesized Probe
  source 1..120: mol_type = other DNA
ttttctattatctttctaaaacataggcaaaacattttgttctccctaaaacacccattgattccctgttgcctacaggtaaagttcatggcctctgtgttgtcacttggccctcaacta

SEQ ID NO: 1868 - DNA, 120 bp, synthetic construct
  misc_feature 1..120: note = Artificially Synthesized Probe
  source 1..120: mol_type = other DNA
acagttgctggaaagacataaagttaacatgttttgttgaaatctgttgttccattacctgggtcttctactgtgttgagctgttgctggggtgtccccagtgtctgttgcttttgcagt

SEQ ID NO: 1869 - DNA, 120 bp, synthetic construct
  misc_feature 1..120: note = Artificially Synthesized Probe
  source 1..120: mol_type = other DNA
attttgaaagatggctagctctccatctcctgttaaacctgttttacttagcagacgatcatatagaggagaaattatatttattctatcagtgtatgtgaaggccagctcagcccccag

SEQ ID NO: 1870 - DNA, 120 bp, synthetic construct
  misc_feature 1..120: note = Artificially Synthesized Probe
  source 1..120: mol_type = other DNA
caatggaaaccattcacactgaacattttactcacaacccttctgatatcatatgtttggggtattttccccccataccaattctccaactctccatataccaactgggtgtcctacaat

SEQ ID NO: 1871 - DNA, 120 bp, synthetic construct
  misc_feature 1..120: note = Artificially Synthesized Probe
  source 1..120: mol_type = other DNA
ccccacctctaggtatctgcctcattgagtttttatgagggttgagtaaatccagtgaagcatgtaaaatgattcctggtgtaagtgcttgttaaaggccagctatcgttattacttaat

SEQ ID NO: 1872 - DNA, 120 bp, synthetic construct
  misc_feature 1..120: note = Artificially Synthesized Probe
  source 1..120: mol_type = other DNA
agcatctgttccttctctcacccacggtttttctttgtattcctaattatatagcttgtcaagattctttggttactggttacagtgctttggaattagtggtatgggacttgtgacctc

SEQ ID NO: 1873 - DNA, 120 bp, synthetic construct
  misc_feature 1..120: note = Artificially Synthesized Probe
  source 1..120: mol_type = other DNA
aattacagaggtcagacactaacgttttagttaaattagcaattgtctatgctcatgtgatgagttatagagttgggagctcagtctcttgattcctaatcctggagtgcctgcagtgaa

SEQ ID NO: 1874 - DNA, 120 bp, synthetic construct
  misc_feature 1..120: note = Artificially Synthesized Probe
  source 1..120: mol_type = other DNA
ttgctgctcagtgcacgtgtggctgtgagtgagttattcagtctcttggtatctctaggtctacaccaatatagtggtaataataaagaagagcatagttgtgaaagttaaatgagttgg

SEQ ID NO: 1875 - DNA, 120 bp, synthetic construct
  misc_feature 1..120: note = Artificially Synthesized Probe
  source 1..120: mol_type = other DNA
taacttggtccctgtaactttttatatgccattatcactctagatcttggaaacgtgcgactccaggaaagatgagctggcattacttgtcagttataagatagtcatggcacttttgcc

SEQ ID NO: 1876 - DNA, 120 bp, synthetic construct
  misc_feature 1..120: note = Artificially Synthesized Probe
  source 1..120: mol_type = other DNA
aagccaaagttaacactgaaggggtttgccagactgtcagggagaatggcaatgttcttagatttctgctttattctgcatctctttcttgatttgttaaatgccttgtagtaataaagt

SEQ ID NO: 1877 - DNA, 120 bp, synthetic construct
  misc_feature 1..120: note = Artificially Synthesized Probe
  source 1..120: mol_type = other DNA
cagtataatcccacctttctggcttctgagatacctgattaaatctgtggttcatgcccacactgatcttataagaaaattgttggtcagtcacactcatagtgttctcagaacaaactt

SEQ ID NO: 1878 - DNA, 120 bp, synthetic construct
  misc_feature 1..120: note = Artificially Synthesized Probe
  source 1..120: mol_type = other DNA
gtatcacctttaacaatccttacataccaatattcactttttccagtgtacacctcgaaactctttaagcttatacccagttctaaagctctttccaacaccaggtgtggtagctacagg

SEQ ID NO: 1879 - DNA, 120 bp, synthetic construct
  misc_feature 1..120: note = Artificially Synthesized Probe
  source 1..120: mol_type = other DNA
ccttccttcctcaactgacttctttagttctttgcacccctctctcattgtagaagaagttatgcttggtaaactcaagtctttgtgggaagatttaggttggagtattgtattagggtt

SEQ ID NO: 1880 - DNA, 120 bp, synthetic construct
  misc_feature 1..120: note = Artificially Synthesized Probe
  source 1..120: mol_type = other DNA
catttaaaacaaaaaattaaagcagcatgttaaattgactctcagtggcattttatgtatttgatatgagtagggagggatgctgctgggttaaggcctgcggactgcctcttgttctga

SEQ ID NO: 1881 - DNA, 120 bp, synthetic construct
  misc_feature 1..120: note = Artificially Synthesized Probe
  source 1..120: mol_type = other DNA
tccttgaccatctatgtagtggctgcttggcaacctattgtgtggaattggacatactttatttaaccaggtgccatggtgggacagagtggttttgagatttttttttttccttgaaac

SEQ ID NO: 1882 - DNA, 120 bp, synthetic construct
  misc_feature 1..120: note = Artificially Synthesized Probe
  source 1..120: mol_type = other DNA
agaagatttttgaggagcagccttgtctccggaaggactctctcagaatgttcctcaaatggtaagtcctgcctcttcccatgccatgtgtgcacgcttactgtgtggctggtgaaggtc

SEQ ID NO: 1883 - DNA, 120 bp, synthetic construct
  misc_feature 1..120: note = Artificially Synthesized Probe
  source 1..120: mol_type = other DNA
tccaagcccctgccctttctgtatttttgggtcgtgatacactttggtgagcttcacttttccgatgactttttgttggcatgggcagtataggatagttacattcttttaagattttct

SEQ ID NO: 1884 - DNA, 120 bp, synthetic construct
  misc_feature 1..120: note = Artificially Synthesized Probe
  source 1..120: mol_type = other DNA
ggcaaattggtatcggcggttccctggagttgggatagtttagtcccttagcgagctctggaattcaatttctgtatttaaaattctgacattgaatctttaagtttagcatgacttagc

SEQ ID NO: 1885 - DNA, 120 bp, synthetic construct
  misc_feature 1..120: note = Artificially Synthesized Probe
  source 1..120: mol_type = other DNA
taaatttgggatttggtcattaaaggaagagtgtagattccctctctggtagcagaggacatgatgcttttatagtaatctccatctattccgggggtcagcaaaacttttcctttaaag

SEQ ID NO: 1886 - DNA, 120 bp, synthetic construct
  misc_feature 1..120: note = Artificially Synthesized Probe
  source 1..120: mol_type = other DNA
tgctacaagtgataccaggggtaatcagtcacccagagaaagcagcacatgcctcaagctgatgggggctgtgaggagagaagcgcagtgctggaaggcctctgaacaaggttcctgctg

SEQ ID NO: 1887 - DNA, 120 bp, synthetic construct
  misc_feature 1..120: note = Artificially Synthesized Probe
  source 1..120: mol_type = other DNA
gcataaaacagattcgtggcagcaggggagttccacaagtgttttaaagacttgaccttcctgaggaggagtttttgaagtgagtcaatggatttcatacatacctacttgagtctgaaa

SEQ ID NO: 1888 - DNA, 120 bp, synthetic construct
  misc_feature 1..120: note = Artificially Synthesized Probe
  source 1..120: mol_type = other DNA
tcccctcttctggtcctgctctcttgctgactgtgtacatcctgagttctttgatcttagaaaacagtcagcaaagttaccaaccaccatatgttttattgatttttattattgctagag

SEQ ID NO: 1889 - DNA, 120 bp, synthetic construct
  misc_feature 1..120: note = Artificially Synthesized Probe
  source 1..120: mol_type = other DNA
tttttctcgcctcttcccacctctgaaattcctgaagtcaggagctgtgacttgttcatcttttgagagctagaagcaacatactcatgtccctgtgtatttacaagacatctatttgtt

SEQ ID NO: 1890 - DNA, 120 bp, synthetic construct
  misc_feature 1..120: note = Artificially Synthesized Probe
  source 1..120: mol_type = other DNA
tggggcatcctcgcctatcttctgtctttgtgagtttataccttttttactccttcgttgttactggaatggagtttgggagctaaccatatgtgttcgatatgccatctttaaacagga

SEQ ID NO: 1891 - DNA, 120 bp, synthetic construct
  misc_feature 1..120: note = Artificially Synthesized Probe
  source 1..120: mol_type = other DNA
aaatgttgagattacaatcttgagcaaccacacttaacttagtttctgcttctttgaatggtcaaggcaagagcaacatggtagctcgcctgatggagtcaccctgggagtgtgtgcaat

SEQ ID NO: 1892 - DNA, 120 bp, synthetic construct
  misc_feature 1..120: note = Artificially Synthesized Probe
  source 1..120: mol_type = other DNA
tgctttcttatggccaaattcagagacttcgctttgcaaattgaatctatataagcacacctgttgagtgtgtatcagtgtataactgttgagtgagattagtgcacatggcagcacttg

SEQ ID NO: 1893 - DNA, 120 bp, synthetic construct
  misc_feature 1..120: note = Artificially Synthesized Probe
  source 1..120: mol_type = other DNA
cgggttgtttactgagtcacaggaagccttgccaggagaagctggaggaaagggaaacatttggtttgtttgagttggcaaggactgtgactgaggcttttgttgttgttgtttgagaca

SEQ ID NO: 1894 - DNA, 120 bp, synthetic construct
  misc_feature 1..120: note = Artificially Synthesized Probe
  source 1..120: mol_type = other DNA
gcctctcccaagtcttgtcccaacatacatccatgtggctctttttatgttctggcgagtagccactgattatcacttatgaaatggcaagtggatagaaagaattatatttttatcaaa

SEQ ID NO: 1895 - DNA, 120 bp, synthetic construct
  misc_feature 1..120: note = Artificially Synthesized Probe
  source 1..120: mol_type = other DNA
cacctccctgctttgctgttacacaagattgaaggaagtgggatctcagttttggtgtgactgttcaatgcagtgctttatgtattatgtagcttcagtaatttttctggtgatacggat

SEQ ID NO: 1896 - DNA, 120 bp, synthetic construct
  misc_feature 1..120: note = Artificially Synthesized Probe
  source 1..120: mol_type = other DNA
caagattgccttggcatcttgactctttgcttatgttttcctgagagagcccgagcaagtgaataaacagatacagagctttctaggagggaattattcacctgttttatgagagttctg

SEQ ID NO: 1897 - DNA, 120 bp, synthetic construct
  misc_feature 1..120: note = Artificially Synthesized Probe
  source 1..120: mol_type = other DNA
catccaggtggaggcaggggctgaacgaagagacattgtcatccggctgcccaacctccataatgactctgtggtttccctggaggaggtaagtgagaattttcgtttgtttgtttgttt

SEQ ID NO: 1898 - DNA, 120 bp, synthetic construct
  misc_feature 1..120: note = Artificially Synthesized Probe
  source 1..120: mol_type = other DNA
ggcagaggcgctccccacatctcagacgatgggcggccgggcagagacgctccttacttcctagatgggatggtgtccgggcagagacgctcctcactttccagactgggcagccaggca

SEQ ID NO: 1899 - DNA, 120 bp, synthetic construct
  misc_feature 1..120: note = Artificially Synthesized Probe
  source 1..120: mol_type = other DNA
acaaggctgtccagctatcttggtggatgctttcctggaactcctctgcttctgagtagtttttggtttttgatgtgcttgttttttaaagaattggatgcctagccattaatagaaata

SEQ ID NO: 1900 - DNA, 120 bp, synthetic construct
  misc_feature 1..120: note = Artificially Synthesized Probe
  source 1..120: mol_type = other DNA
caagataaaataaagaccaatgtgttgaagaaaaataacactagccttatgtttgaaacctcgtgtgccctcctgaatccttctgtgcttctgttcctcaggaggtaaactcttaccaag

SEQ ID NO: 1901 - DNA, 120 bp, synthetic construct
  misc_feature 1..120: note = Artificially Synthesized Probe
  source 1..120: mol_type = other DNA
ttgcacagattgcacgaagcattttaatcattaacattgttgaactgggaaatagttaagaggtgcgactatgggaacaaatggaagcacctcagtcatggggaaagggtaagaaagagt

SEQ ID NO: 1902 - DNA, 120 bp, synthetic construct
  misc_feature 1..120: note = Artificially Synthesized Probe
  source 1..120: mol_type = other DNA
attatgtcatattttagagcaccgttagcaggtccttgtcttgtccctgactttcacaatgactctggttgcatttagtagtctttatcatgctggaaaataatcctctggctctcacat

SEQ ID NO: 1903 - DNA, 120 bp, synthetic construct
  misc_feature 1..120: note = Artificially Synthesized Probe
  source 1..120: mol_type = other DNA
aaaaaaaaaaaaaaaggagctttgcgaaaagcagtggtttccaaagagaagcttttaaaatagaagtaacagttcagtgtggtgttctgagagttcttccatgtgccaggcactgtgctg

SEQ ID NO: 1904 - DNA, 120 bp, synthetic construct
  misc_feature 1..120: note = Artificially Synthesized Probe
  source 1..120: mol_type = other DNA
ggtatgtctctgtgacatcctgcttcttcagtagttcatagctttcattgctaattaggcacccaaaggggacatgatggcttctttggttggaactttcgggatctgaggaggggtttg

SEQ ID NO: 1905 - DNA, 120 bp, synthetic construct
  misc_feature 1..120: note = Artificially Synthesized Probe
  source 1..120: mol_type = other DNA
cagcacatagtaggtactgagggtatcagtaactgcatgtggcatgaaggagagtagtgtgactatcattggacactatgggtctctgtccgatgacatgctgaggatctgctaggttac

SEQ ID NO: 1906 - DNA, 120 bp, synthetic construct
  misc_feature 1..120: note = Artificially Synthesized Probe
  source 1..120: mol_type = other DNA
aggaaagagtcatccctattccaactgctcagagaaaaccagagttaacatgtggtttttctccttcccttcacattctctctataattttattcactgctcagaaagttaccagctgct

SEQ ID NO: 1907 - DNA, 120 bp, synthetic construct
  misc_feature 1..120: note = Artificially Synthesized Probe
  source 1..120: mol_type = other DNA
gtgaggatattatcacccaggaaaaataataacagttatcacatactgaattctctggaagcagatactaagacagggtttataaggaaggcggaggaagcagaattgggcttttgagct

SEQ ID NO: 1908 - DNA, 120 bp, synthetic construct
  misc_feature 1..120: note = Artificially Synthesized Probe
  source 1..120: mol_type = other DNA
ggtaaacaaatgtgtaactggaattcagtagttctttttcctcctgttttactctttttcttctgtattattcaggtagacctaaatctaagaacttttaaggccaggcgccatggctca

SEQ ID NO: 1909 - DNA, 120 bp, synthetic construct
  misc_feature 1..120: note = Artificially Synthesized Probe
  source 1..120: mol_type = other DNA
gtagtagttgctcattcaatagctattattacatccattcagtcactaaatgattagtgagagcacatacacttccttgcacttgtcagttgtgattgactggaagtagctccctgggtt

SEQ ID NO: 1910 - DNA, 120 bp, synthetic construct
  misc_feature 1..120: note = Artificially Synthesized Probe
  source 1..120: mol_type = other DNA
taaatatgggttaaaggagagtatgcatatgtatagagctcatgtatgtatagagcttgacagtttgcaagacacttaggctgaatatgtgatttgtccaggagacccatctggcccagg

SEQ ID NO: 1911 - DNA, 120 bp, synthetic construct
  misc_feature 1..120: note = Artificially Synthesized Probe
  source 1..120: mol_type = other DNA
atggtctgcaggtaaaaggattccatcttgagagtgatttgaggccaacatcagggagaccttttgtgtggattattttcttagatagaatggaaatgttctctgagagaaatcctcttg

SEQ ID NO: 1912 - DNA, 120 bp, synthetic construct
  misc_feature 1..120: note = Artificially Synthesized Probe
  source 1..120: mol_type = other DNA
aacagttttatacttttgatagctgtgtgggaattcctgcacatctgtgtcagccctaggtacagtagacttaaatgttgatgcccatctgaaaggcatgaaatggtatttcattgttct

SEQ ID NO: 1913 - DNA, 120 bp, synthetic construct
  misc_feature 1..120: note = Artificially Synthesized Probe
  source 1..120: mol_type = other DNA
ttagtctcttggctattcttggccttttcctcttctgtaccattgtacgatcactctgtaatgttttatgatatccaaccccctaacgcaaacctgccattggaattttgattggaataa

SEQ ID NO: 1914 - DNA, 120 bp, synthetic construct
  misc_feature 1..120: note = Artificially Synthesized Probe
  source 1..120: mol_type = other DNA
aggctgttcatggtttctgcttatgctttaaaaagttctgtggtacctcgagttatgcccctttttcattgctaaaatagtttgtgctttctccccccaccttttaaaaaccagtctttc

SEQ ID NO: 1915 - DNA, 120 bp, synthetic construct
  misc_feature 1..120: note = Artificially Synthesized Probe
  source 1..120: mol_type = other DNA
gcatgaactgctgcatccagccagtattcacttttctaatgcctgtattgaagactgtaagttttcccagatacatctttgtctgactcccatatattctgatatttggtgtttgctatt

SEQ ID NO: 1916 - DNA, 120 bp, synthetic construct
  misc_feature 1..120: note = Artificially Synthesized Probe
  source 1..120: mol_type = other DNA
tcatatttgtcaacagtcatcttggcagtcctgcttggagttgcatcagaaggaggagagaagacggtctgatgagtgtatcaaaggacaagggtttttcttgcaaaaacttattttcat

SEQ ID NO: 1917 - DNA, 120 bp, synthetic construct
  misc_feature 1..120: note = Artificially Synthesized Probe
  source 1..120: mol_type = other DNA
gacaaagtgcgtttctatggaggaatgcaattttccttcttcatttaccctgaatgtgttactaatctgccttctgtctttttttcaaggtggatcttatatgggaggatgcactgttca

SEQ ID NO: 1918 - DNA, 120 bp, synthetic construct
  misc_feature 1..120: note = Artificially Synthesized Probe
  source 1..120: mol_type = other DNA
ttaactatggttgccttcttggggacaagtaatagaaaaactcaagccagagttctcttttttgctctgatgcagtgcactgttagcagtagcgattgtcatgatagtacatgtagaaga

SEQ ID NO: 1919 - DNA, 120 bp, synthetic construct
  misc_feature 1..120: note = Artificially Synthesized Probe
  source 1..120: mol_type = other DNA
atttgattgctgccttttctgttctttgtactagcattcagcaagtctcagactatcaagtgctcagagatcatcttagtcttggtgtctctgtggccattcctcctctcagacaggttt

SEQ ID NO: 1920 - DNA, 120 bp, synthetic construct
  misc_feature 1..120: note = Artificially Synthesized Probe
  source 1..120: mol_type = other DNA
agagtacttactgcatgcctattaggcgctgggtgattaaaatacattttgtctcataatgcccacagctcttctcttgaggtaggtcttcttagccctgtgtcacaggttaggaatgaa

SEQ ID NO: 1921 - DNA, 120 bp, synthetic construct
  misc_feature 1..120: note = Artificially Synthesized Probe
  source 1..120: mol_type = other DNA
aaaaattactcttaaatcttacaagggacacaggcttctctaaatcagttgcagtatacaatattaagggcaaagctcaaatccctctggctgcccctactacctcagaaacaggcttgt

SEQ ID NO: 1922 - DNA, 120 bp, synthetic construct
  misc_feature 1..120: note = Artificially Synthesized Probe
  source 1..120: mol_type = other DNA
tcccaccaatgatggcaaatgagatttggcagagtgggagttttccaggaaataaatagggtgagaagtcagagttccctttctgccattggcacttgtttgtagagctttgtttgtaga

SEQ ID NO: 1923 - DNA, 120 bp, synthetic construct
  misc_feature 1..120: note = Artificially Synthesized Probe
  source 1..120: mol_type = other DNA
tagtgacttggtccaggtcacacagctacaaagcaattcaagtagaaggacatccttttagccattgccttttacttcagcacatttgccacagaatcccatcttgaaggggatgtgatg

SEQ ID NO: 1924 - DNA, 120 bp, synthetic construct
  misc_feature 1..120: note = Artificially Synthesized Probe
  source 1..120: mol_type = other DNA
tttctacacttcggtgtcaccagctgtgaaatggtgagggcatttctgtgtcttggttgttaagaggagtataaacttgcaaataggtcggcagagctttgtacaggaaaaagtctgatc

SEQ ID NO: 1925 - DNA, 120 bp, synthetic construct
  misc_feature 1..120: note = Artificially Synthesized Probe
  source 1..120: mol_type = other DNA
ccagtttggagtcttctgattgttgttcaagaaaagagcagttctttactccctggattttctctcatggtttccagagtgtttctgatgaatgctgtcactgttgcttatagcagtctt

SEQ ID NO: 1926 - DNA, 120 bp, synthetic construct
  misc_feature 1..120: note = Artificially Synthesized Probe
  source 1..120: mol_type = other DNA
cattctgatcaacaatggctacttgccccaaggtcgtactgactgatgagagtgtttgctttccctcagccatattgatgaggttctctttttaatatttgctaattttgtgagcaaaca

SEQ ID NO: 1927 - DNA, 120 bp, synthetic construct
  misc_feature 1..120: note = Artificially Synthesized Probe
  source 1..120: mol_type = other DNA
gagagcaagcacacatagttaatttggggggcaacccattccatgcaaccattgtagctatgtaactttgagtcagctggtaaatatgtatatcttgtgttaaaaatgacatttctggcc

SEQ ID NO: 1928 - DNA, 120 bp, synthetic construct
  misc_feature 1..120: note = Artificially Synthesized Probe
  source 1..120: mol_type = other DNA
gctataaacagaaatccaacctagtccttgtttcagggagtccagagttcagtggggagacagatgtagaaactcactttctatgggtgcccactgaagggcacaaagagaacagcagca

SEQ ID NO: 1929 - DNA, 120 bp, synthetic construct
  misc_feature 1..120: note = Artificially Synthesized Probe
  source 1..120: mol_type = other DNA
aatgtgttgttcagagggttgctacacagtaaacagtaaactagaactcatggagtccctaggacccatctggaaactcccatttgctgggccaaggtatttctgttgagtctgagaagg

SEQ ID NO: 1930 - DNA, 120 bp, synthetic construct
  misc_feature 1..120: note = Artificially Synthesized Probe
  source 1..120: mol_type = other DNA
ttttataaaaatgaactacagaaggtattgttttagagtttgctttttcccctgacagtgggtctgggcaacagtccatggagatagtaccccagtcacttcattctttctagtggctac

SEQ ID NO: 1931 - DNA, 120 bp, synthetic construct
  misc_feature 1..120: note = Artificially Synthesized Probe
  source 1..120: mol_type = other DNA
cagcttagtgatgcctgcattgttcagcagcacattgttactgctctgtccttctgaaggttgagggaaggccgtgactagttctaagtctgtcacccctgagaatccagataagttgtt

SEQ ID NO: 1932 - DNA, 120 bp, synthetic construct
  misc_feature 1..120: note = Artificially Synthesized Probe
  source 1..120: mol_type = other DNA
ttcagttctgcagactttccctgttaagatcctctctccccttcttagttaagttaatcaccctgttcccaaacttttactcttgagaatattgagaaaacatactagcagcaaacccct

SEQ ID NO: 1933 - DNA, 120 bp, synthetic construct
  misc_feature 1..120: note = Artificially Synthesized Probe
  source 1..120: mol_type = other DNA
aaatatggtttcagtggttgcacagttttgaacatttgtttaaaaaaaatgtcttcaaagtgattcctgtcaaagacacaaagccatcaggatcccatggcccatctttgcccagtccca

SEQ ID NO: 1934 - DNA, 120 bp, synthetic construct
  misc_feature 1..120: note = Artificially Synthesized Probe
  source 1..120: mol_type = other DNA
cttgggcatggttaggagaccttgcattggagctgccttcccacattggtatgcctttgcttcaaaaccagaaatcagctaggatcaattctgatttggtttaagatttagaaaagattt

SEQ ID NO: 1935 - DNA, 120 bp, synthetic construct
  misc_feature 1..120: note = Artificially Synthesized Probe
  source 1..120: mol_type = other DNA
acagaatggcttggttcgtcacttggcctggctcagccctgctttgggatgtgttgatagtgcctttcttggactaaaatccttgctctctgcctgtcgtgctccatgtcacttcagaat

SEQ ID NO: 1936 - DNA, 120 bp, synthetic construct
  misc_feature 1..120: note = Artificially Synthesized Probe
  source 1..120: mol_type = other DNA
cacctccagcaggtggcccagtcctatatttccattgctttgctctttcttgctttaaaataaacaacaaaggcaacagactctaacataccaaattatctttacaaggacaaaggtgta

SEQ ID NO: 1937 - DNA, 120 bp, synthetic construct
  misc_feature 1..120: note = Artificially Synthesized Probe
  source 1..120: mol_type = other DNA
gaagaattcctggagaaggtgagtctctagagaggcctgcaggcccatttagacatggagcttggagagtcctacagcttttggatactgaggtgactggggtggatgaaaaagagactt

SEQ ID NO: 1938 - DNA, 120 bp, synthetic construct
  misc_feature 1..120: note = Artificially Synthesized Probe
  source 1..120: mol_type = other DNA
attaattagtatgagcaggttttgtgtgggcagatttttaaaagaacattctgaaaaaaagagcaaggccaacctatagcctgcttgctagtgccattcttctttcctgttggcctccaa

SEQ ID NO: 1939 - DNA, 120 bp, synthetic construct
  misc_feature 1..120: note = Artificially Synthesized Probe
  source 1..120: mol_type = other DNA
aattccctctccacacatactcaaagactccccagttcacttgggcagcatgagagtggtgcattatggtgctaggctgcgttcagctgtctgggaagcgggtggagtatggctcaggga

SEQ ID NO: 1940 - DNA, 120 bp, synthetic construct
  misc_feature 1..120: note = Artificially Synthesized Probe
  source 1..120: mol_type = other DNA
ttgacttttagtatttgaaatcagggtcattttaaataggctgtgccaaccctttcagacacacaagatctgaaaggagcagaaaatgggccttgggccttgagtcccttttggtggctc

SEQ ID NO: 1941 - DNA, 120 bp, synthetic construct
  misc_feature 1..120: note = Artificially Synthesized Probe
  source 1..120: mol_type = other DNA
atcccatgtatgtgtcagggacagaggtaggaagacaatggcaatcgtgttaaaaaacctgaagtgggggcctagagcagcaaaatcatttggccaagatcacccaacccctaagtggca

SEQ ID NO: 1942 - DNA, 120 bp, synthetic construct
  misc_feature 1..120: note = Artificially Synthesized Probe
  source 1..120: mol_type = other DNA
catggaaactgaagtataaataattatggcatttacagaggctctcagagatagtaggtgacagagcagaatttcagttctatcagcctggatcttccagagtccaggctttcaactttt

SEQ ID NO: 1943 - DNA, 120 bp, synthetic construct
  misc_feature 1..120: note = Artificially Synthesized Probe
  source 1..120: mol_type = other DNA
aaatgtagttgttgccttagggttaacaaaatacacctttaattcattgcagtctgccttcaggtgatactgtactacttcgtaggcagtggaagagctgctcatcttttgcactcgttt

SEQ ID NO: 1944 - DNA, 120 bp, synthetic construct
  misc_feature 1..120: note = Artificially Synthesized Probe
  source 1..120: mol_type = other DNA
tttaaatatttctactgtcctgtttcaccctcatctccttttgtgactccgattagcatgttggatcatttggatgctctgttctgattcctcctgtccactctttttctctgggtttgg

SEQ ID NO: 1945 - DNA, 120 bp, synthetic construct
  misc_feature 1..120: note = Artificially Synthesized Probe
  source 1..120: mol_type = other DNA
acgtgtaggacagaagaaactgaaataagtaatatttatgcctggaataggcttccctcttttgtttctaggcttttagtagggaaagttgagttaggctagtcagaaattgagctggct

SEQ ID NO: 1946 - DNA, 120 bp, synthetic construct
  misc_feature 1..120: note = Artificially Synthesized Probe
  source 1..120: mol_type = other DNA
agtgagtacaaactccttttacatctgtggctcccagagatctagagttcttccagatcacacctggcttttactaacaggttaaaaatgtttcctgaattctttcccacttcatttgtt

SEQ ID NO: 1947 - DNA, 120 bp, synthetic construct
  misc_feature 1..120: note = Artificially Synthesized Probe
  source 1..120: mol_type = other DNA
actcttttctgtgctgggcactgtgttaattcatttggttctcccaagcaccctagaaaaaaagcacaatgactattcccattttatagctgaagaatatgagattcagagaaggtctgg

SEQ ID NO: 1948 - DNA, 120 bp, synthetic construct
  misc_feature 1..120: note = Artificially Synthesized Probe
  source 1..120: mol_type = other DNA
aaaaataagatttttaaaacttatcagacaagtaagacctaccatgtgtgctctgtggcctgtcaagccgtgactgctgtaggtgccattgtgtcatcatgagcttctttcccacttaaa

SEQ ID NO: 1949 - DNA, 120 bp, synthetic construct
  misc_feature 1..120: note = Artificially Synthesized Probe
  source 1..120: mol_type = other DNA
agtagagatttatttatttgatctagggagaaagttgtccacagtttcatcacttaaacacaagcccactctatcatatcgttctgagggcaagagggtaaaacccaaagcagagttgac

SEQ ID NO: 1950 - DNA, 120 bp, synthetic construct
  misc_feature 1..120: note = Artificially Synthesized Probe
  source 1..120: mol_type = other DNA
tttacttgctttttcttggtagaaggaagttttctcatcttcacgcagctagggttagaattggacatcctggccgggaaacgtggtgtagtcctgttggcatttctgaccctctttctt

SEQ ID NO: 1951 - DNA, 120 bp, synthetic construct
  misc_feature 1..120: note = Artificially Synthesized Probe
  source 1..120: mol_type = other DNA
cattttgaacacattagaaacctggcacattttttaataaagtgatggtatcccctgtaagatgggtgccagccctaagctgtgggacgcaggcaacttcttgagctcacatgagaagac

SEQ ID NO: 1952 - DNA, 120 bp, synthetic construct
  misc_feature 1..120: note = Artificially Synthesized Probe
  source 1..120: mol_type = other DNA
atcacttcaccaaggcgcctccgttactggtggtagaccactgcatggacagggcctaaaaccagggtgactttctttcccttcttctcaactgtaggaaaaaacgaggagtcattggag

SEQ ID NO: 1953 - DNA, 120 bp, synthetic construct
  misc_feature 1..120: note = Artificially Synthesized Probe
  source 1..120: mol_type = other DNA
ataataggggtgactttattttcctttagtctctcacccaggaggtgttggggagtgtcctggtcgttgtcctgcaccatgtagctacattctaagggggaggcagacttaaaaacatac

SEQ ID NO: 1954 - DNA, 120 bp, synthetic construct
  misc_feature 1..120: note = Artificially Synthesized Probe
  source 1..120: mol_type = other DNA
gagtaaagcaagtctcatttgaacaataccacagagaaaataacggggggcatagaggggtgagggtgctgttgtgcctctgcaaagacaccttttgtgctgagacctgtattgtagggg

SEQ ID NO: 1955 - DNA, 120 bp, synthetic construct
  misc_feature 1..120: note = Artificially Synthesized Probe
  source 1..120: mol_type = other DNA
tacagcctgccccttctcttgatgatttttttagaagtagaaaacagtatttatgtcaaaattaaaagttggagggaggtaaccacaattctgccaccctaaaactagctctcttgggtc

SEQ ID NO: 1956 - DNA, 120 bp, synthetic construct
  misc_feature 1..120: note = Artificially Synthesized Probe
  source 1..120: mol_type = other DNA
tcagtatccccagacaacccccagtagccattagcctcagtttctgccagcttttctgttcgttgcattcccaggctgagttccttggttctcagaaatggaatgctatcttgaatctta

SEQ ID NO: 1957 - DNA, 120 bp, synthetic construct
  misc_feature 1..120: note = Artificially Synthesized Probe
  source 1..120: mol_type = other DNA
gttgccctgcacactgtgcacaccttagatggggatgatcatttatgctgatagccataagggccctaattctagctaccgtatcacttactctctggatcacaatcttcaccaagattt

SEQ ID NO: 1958 - DNA, 120 bp, synthetic construct
  misc_feature 1..120: note = Artificially Synthesized Probe
  source 1..120: mol_type = other DNA
gtttcaaaacatactacaaatctataatatactaatcaaaacagtatggaatattagccttaaaaaggggggaaattcggtcacatcagacagcatgggaaacctagaggacataatgct

SEQ ID NO: 1959 - DNA, 120 bp, synthetic construct
  misc_feature 1..120: note = Artificially Synthesized Probe
  source 1..120: mol_type = other DNA
aataggtttgagcactctgccagcagcttttattaccaataatattgtttaagcttggaaaagagaatgaaactacccacaactgtcccacaagccatgacatggcagaagtgtttgtgt

SEQ ID NO: 1960 - DNA, 120 bp, synthetic construct
  misc_feature 1..120: note = Artificially Synthesized Probe
  source 1..120: mol_type = other DNA
aaaaaaagctaaactaaaaaaacaaaaaactgtcgcaaggttgtggaagaagacaggctccatgtggcctgagtgtgtcagagacactactgggctgatatgtaaagagtgagttggggg

SEQ ID NO: 1961 - DNA, 120 bp, synthetic construct
  misc_feature 1..120: note = Artificially Synthesized Probe
  source 1..120: mol_type = other DNA
acacaggattctcggggcggggggagggtgggcacagcttttacactaactccttaatatttggctttatccaaacagacattctaattataatttttcatgattagaagtatcaggaat

SEQ ID NO: 1962 - DNA, 120 bp, synthetic construct
  misc_feature 1..120: note = Artificially Synthesized Probe
  source 1..120: mol_type = other DNA
ctgttgccctcctccctcaacctgacatacgcttccttcccattttatgaaaggtcagactgctcagcttcttttcattcttcctgtgggcaactattgcacccttttctgtgagcttca

SEQ ID NO: 1963 - DNA, 120 bp, synthetic construct
  misc_feature 1..120: note = Artificially Synthesized Probe
  source 1..120: mol_type = other DNA
ctttaagcagaggagttagatgtcccctctgccttctgctgtgaagcagggatggtccagatagtaggcaagggaggacataaggtgcctgtatgcttctacgattctttgccctacttc

SEQ ID NO: 1964 - DNA, 120 bp, synthetic construct
  misc_feature 1..120: note = Artificially Synthesized Probe
  source 1..120: mol_type = other DNA
ctgtgctttctcttgtgtccccagccagaaggaagtctttgtcgaggctttactttcttggtattcttaggaaaatgatggctactggagatgcttcttcaagtcagggtctcacatctc

SEQ ID NO: 1965 - DNA, 120 bp, synthetic construct
  misc_feature 1..120: note = Artificially Synthesized Probe
  source 1..120: mol_type = other DNA
tgatgcaggttgtgagcccctttcttgggcttcctgagacctgagtcttcctcttggagccctgctctactcactaatctttgagctaatctttggttttattccttttaatgaagcata

SEQ ID NO: 1966 - DNA, 120 bp, synthetic construct
  misc_feature 1..120: note = Artificially Synthesized Probe
  source 1..120: mol_type = other DNA
gacacttgaaagtaaactacaggttgttcctcctagggtgctagagctcagaagttgaaggtcaggactgggtattttactgttttctgtgagtttgagcaaagtggcctctgttctcag

SEQ ID NO: 1967 - DNA, 120 bp, synthetic construct
  misc_feature 1..120: note = Artificially Synthesized Probe
  source 1..120: mol_type = other DNA
ctcttctgcgagaggaacaagaccaatttcttcaacgtgagtactttgccttgttgatttccaaggctgtttgttgccactgcttttcactgaaggcgcatgaattgaccccctaggtgg

SEQ ID NO: 1968 - DNA, 120 bp, synthetic construct
  misc_feature 1..120: note = Artificially Synthesized Probe
  source 1..120: mol_type = other DNA
tcttaaaaaaaaaaagagtgtgaccaatattgggcttttagtgaacttcagccctgatattgcgtgtcaggtggagacttactccttgagcagggcagggccaatcacctaggcctgcct

SEQ ID NO: 1969 - DNA, 120 bp, synthetic construct
  misc_feature 1..120: note = Artificially Synthesized Probe
  source 1..120: mol_type = other DNA
catttacaagctagtgcacatagatgcgcataaaaggcaaaagtgcacacacttctgccccttgtattttttcgctaaacaatatctctaacagtatctcttggagatactgttagaacc

SEQ ID NO: 1970 - DNA, 120 bp, synthetic construct
  misc_feature 1..120: note = Artificially Synthesized Probe
  source 1..120: mol_type = other DNA
tttatatatcaatgaagtgagccctttgtcagtgttttgaaaatctgtttttctgcagttgataggcgagttggagctagacaagttgcttaatttccctgtcctgggttcctcaccttg

SEQ ID NO: 1971 - DNA, 120 bp, synthetic construct
  misc_feature 1..120: note = Artificially Synthesized Probe
  source 1..120: mol_type = other DNA
gttgctcagcctgtcatccttagagcttgggtggggggcacgtgccttctgttattttttaatgataatttttgaaaattgtgagagttgtagtttaggaaaaattcaaaccccttttcc

SEQ ID NO: 1972 - DNA, 120 bp, synthetic construct
  misc_feature 1..120: note = Artificially Synthesized Probe
  source 1..120: mol_type = other DNA
ttgtcatatatatcataatatcacagtgatataagaccacattttcactgccaacagttcagacacatagagtccacatacctttgtttgcccatcgccaggcactgtgcccttctcaga

SEQ ID NO: 1973 - DNA, 120 bp, synthetic construct
  misc_feature 1..120: note = Artificially Synthesized Probe
  source 1..120: mol_type = other DNA
gaggagatgcccacatgaatatttgtggattaatttcattcatccctttcccctcagcagttggtctccaagctcattctcctggatcagccagtgctggatgttgtaggagtcaggcaa

SEQ ID NO: 1974 - DNA, 120 bp, synthetic construct
  misc_feature 1..120: note = Artificially Synthesized Probe
  source 1..120: mol_type = other DNA
catagcactccactgtctggttgtcctggtggtctacctcccctcttcctagcggataggtggcttttggttttccactattagaaaaagaatgctgctatctctgatctcctttctcac

SEQ ID NO: 1975 - DNA, 120 bp, synthetic construct
  misc_feature 1..120: note = Artificially Synthesized Probe
  source 1..120: mol_type = other DNA
tgtttgtcctgactgtgttgcttaaactgatgggaggtacagtcatcatgagctgtctttgtttcttgaaaacatttatgccctgtgctgtcccagccctggagcctgagtgctcactga

SEQ ID NO: 1976 - DNA, 120 bp, synthetic construct
  misc_feature 1..120: note = Artificially Synthesized Probe
  source 1..120: mol_type = other DNA
caagcctggattagtagtcacctttcaaagaggtgctaggaagtaaagtgacttggccatggtcctatcactagtctgtgctggaggaggggtgtgtacttcactatgtatagtgtggaa

SEQ ID NO: 1977 - DNA, 120 bp, synthetic construct
  misc_feature 1..120: note = Artificially Synthesized Probe
  source 1..120: mol_type = other DNA
aataatggcccaagatcacaagctagcaagtggccaggctaccattcaaggtctgtctgaatccaaggcctgcactctcagccactatgtcgttggaaattcagaggtcacatctaagct

SEQ ID NO: 1978 - DNA, 120 bp, synthetic construct
  misc_feature 1..120: note = Artificially Synthesized Probe
  source 1..120: mol_type = other DNA
attcctcagggctccaaagtgctgtgtttggcacttctacatacaatggcttgttgaattctcataattcatgagatgtaggtagtgccattgtccctgcctcgcaaattaagaaaacga

SEQ ID NO: 1979 - DNA, 120 bp, synthetic construct
  misc_feature 1..120: note = Artificially Synthesized Probe
  source 1..120: mol_type = other DNA
ggactgtcaggggatcaaaggaaacccagtcacataacagtgggaatcataggacagaaaagaaagaaaaaagtttaaattgaggaaataagagctacttggctgtagtaggaattgctg

SEQ ID NO: 1980 - DNA, 120 bp, synthetic construct
  misc_feature 1..120: note = Artificially Synthesized Probe
  source 1..120: mol_type = other DNA
tgccctgggtattcagtcaggagctcgctgtttaacattcctgaatagaggagcatttttcagcatgaacttcatttcccaccacaagttatttttcagaggtttgttcttggaatgtat

SEQ ID NO: 1981 - DNA, 120 bp, synthetic construct
  misc_feature 1..120: note = Artificially Synthesized Probe
  source 1..120: mol_type = other DNA
ccatggcccagagatggacaatgtttgagctgttccaatagaagagtgtgtctttatggcagggccatatggattcattctcatggcagccaagagcctggggctaccccagactctcta

SEQ ID NO: 1982 - DNA, 120 bp, synthetic construct
  misc_feature 1..120: note = Artificially Synthesized Probe
  source 1..120: mol_type = other DNA
cacaacttttttcctatttggcaagtttgaccaagttgcatctgagagagctgcattgggattgaaatccaaaagcagagcttggtgcctgattaccatgatgacaggctgcagctgaca

SEQ ID NO: 1983 - DNA, 120 bp, synthetic construct
  misc_feature 1..120: note = Artificially Synthesized Probe
  source 1..120: mol_type = other DNA
catagggatattgagtcatttgtttagactgctcagagcctgctattgggaaccccaggctggagaaagcacacagcaagaactggccaccataggtccagctctgagctttatttccag

SEQ ID NO: 1984 - DNA, 120 bp, synthetic construct
  misc_feature 1..120: note = Artificially Synthesized Probe
  source 1..120: mol_type = other DNA
tgggtcaagtctttctggtcacatctcaaatttgtccctctagtttgggggtgactctgtagggcaagcatgggcaagtttgttccctttctgaggcaacacaggggattgaaggatttc

SEQ ID NO: 1985 - DNA, 120 bp, synthetic construct
  misc_feature 1..120: note = Artificially Synthesized Probe
  source 1..120: mol_type = other DNA
ttcctcatctctgcgtcctcactcatggctcacacagagcatttggactcagtgacatctaaagttcagcacaggctggacaatttctgagtagcagaagctctagcctgcaagaatcaa

SEQ ID NO: 1986 - DNA, 120 bp, synthetic construct
  misc_feature 1..120: note = Artificially Synthesized Probe
  source 1..120: mol_type = other DNA
cttgtgtcctggacatccaggtgctttgtgggtaattaggtcccacagggttttcctgcatagggtgctgacagtgccagtaagcgcagctctttgagcccagagaatcctcaaggatca

SEQ ID NO: 1987 - DNA, 120 bp, synthetic construct
  misc_feature 1..120: note = Artificially Synthesized Probe
  source 1..120: mol_type = other DNA
accacagacaacacacagtttcttcctggcctgggtgtgatgagcagatgttctcagcttcctttggtccaacttgatcttacaggaagtagataaggtatgaagtaaggtcatgagctg

SEQ ID NO: 1988 - DNA, 120 bp, synthetic construct
  misc_feature 1..120: note = Artificially Synthesized Probe
  source 1..120: mol_type = other DNA
taggacaggtgtcaccaggataggggctaaatgggtctgaggcccctgggtgtctgtggagggaggaacggcgctatgtgataagagagaagctcgctatgtgataagagagaagctcat

SEQ ID NO: 1989 - DNA, 120 bp, synthetic construct
  misc_feature 1..120: note = Artificially Synthesized Probe
  source 1..120: mol_type = other DNA
acagatgccacggcggagccggcgggtaggaacttggcgggggcgggggccgggactggggccgggactggggccggggctggggctgcgcaaccgcttcgcctccgctgcccgtctggg

SEQ ID NO: 1990 - DNA, 120 bp, synthetic construct
  misc_feature 1..120: note = Artificially Synthesized Probe
  source 1..120: mol_type = other DNA
tcttatttggcaggagaggctggaaacgagcgggcgccagctgcaggcaaattgcaggctttcccagcccttgtctgcagagagaatcattacctgtggatggcgcggggaatcccttgc

SEQ ID NO: 1991 - DNA, 120 bp, synthetic construct
  misc_feature 1..120: note = Artificially Synthesized Probe
  source 1..120: mol_type = other DNA
gggtgatctatcttgaagagagggagaaaagctttgtggagaagtatgttcagcccagcattcttcatcagaatccttaagtcccagagccagatgctcaccagtagcccacttcactgt

SEQ ID NO: 1992 - DNA, 120 bp, synthetic construct
  misc_feature 1..120: note = Artificially Synthesized Probe
  source 1..120: mol_type = other DNA
acatgagggaggacaagacacttttccagccctcttgggaatcagagtcaccttagggctacaccaagggcaaagggatgtggaggccaggatttgtgggttttacctggaatactactt

SEQ ID NO: 1993 - DNA, 120 bp, synthetic construct
  misc_feature 1..120: note = Artificially Synthesized Probe
  source 1..120: mol_type = other DNA
agtcttaagaggcaccttttcaaaaccgaggtgaactggcatcactgcattctccatgcttccatttctacatctgtaaaacagggaggctgccaatttcttgttcctctgagtgttaag

SEQ ID NO: 1994 - DNA, 120 bp, synthetic construct
  misc_feature 1..120: note = Artificially Synthesized Probe
  source 1..120: mol_type = other DNA
cagagggaagaccaccaaagtcttaaggctgtaggcagggtttggtaacttgtatcaggcactcagcttagagtctggggcttcataaattattcagattgttaaaatctctctctgtga

SEQ ID NO: 1995 - DNA, 120 bp, synthetic construct
  misc_feature 1..120: note = Artificially Synthesized Probe
  source 1..120: mol_type = other DNA
gtatcatccttctcatgggtctcttgctgcaaacacagaagcccagctccacctggtgtaggcagaaagccagttggcttgctaccaccctgctggctcgtgactctgcctggtggcttc

SEQ ID NO: 1996 - DNA, 120 bp, synthetic construct
  misc_feature 1..120: note = Artificially Synthesized Probe
  source 1..120: mol_type = other DNA
attttccatggactcactgcctgatttgtttggtcttccatcctttctgaaatcagcagtgttatgttacaaaaggaaacggaaaggagatagggatccaaactgtgctggtgtgtgtga

SEQ ID NO: 1997 - DNA, 120 bp, synthetic construct
  misc_feature 1..120: note = Artificially Synthesized Probe
  source 1..120: mol_type = other DNA
gacaggtccagcaaacatatgagatgcagccatacaaaagaggaggctgcagagcagtgggtctgtctgtcatttgctgccactcatgagaaggaagggggtggggatacacttctgtct

SEQ ID NO: 1998 - DNA, 120 bp, synthetic construct
  misc_feature 1..120: note = Artificially Synthesized Probe
  source 1..120: mol_type = other DNA
tacccagcctttcctttcctcctgcttcccccaactcagggctctcggggtgctgtcaggttgtagggaaaacagatgttcagaagatagctgtggttccccagacaaaggccagtaaca

SEQ ID NO: 1999 - DNA, 120 bp, synthetic construct
  misc_feature 1..120: note = Artificially Synthesized Probe
  source 1..120: mol_type = other DNA
acccatcctgtcttcctaggcagggaaggtcagccgtggtaatgaatgcacatgaattcagtgagtcatggatgcacttggtgattagtaagagccatagtgactccatgaaactgagct

SEQ ID NO: 2000 - DNA, 120 bp, synthetic construct
  misc_feature 1..120: note = Artificially Synthesized Probe
  source 1..120: mol_type = other DNA
acagagtcaggcaagacacttctgttggatgcctaccgtgtgtggcagcagggccagaagggtgtggcctatgacctgggccgtgtggagaggatcatgtcggagacctacatgctcatc

SEQ ID NO: 2001 - DNA, 120 bp, synthetic construct
  misc_feature 1..120: note = Artificially Synthesized Probe
  source 1..120: mol_type = other DNA
taaaattattcccataggaagaatctccaaaactttagtgactggttcagatgggatgaccatccctgacatacagtattccctctaatcatgtcagtttgcaatgcatcctacccccaa

SEQ ID NO: 2002 - DNA, 120 bp, synthetic construct
  misc_feature 1..120: note = Artificially Synthesized Probe
  source 1..120: mol_type = other DNA
agccaccttttctgtaacaaggaggatggcccctagccagctgacctcaactgggaaggtcattccgtttggaacagaagtagaagcagcaatgttagagccagtctggttaggagccag

SEQ ID NO: 2003 - DNA, 120 bp, synthetic construct
  misc_feature 1..120: note = Artificially Synthesized Probe
  source 1..120: mol_type = other DNA
atcactcaggagataggagggctgtttctgcttttgacgtccttaaaagatagacccacacaggaaacccccccacaaccccacactgtagcgtgagaagaaagggctactgagttggca

SEQ ID NO: 2004 - DNA, 120 bp, synthetic construct
  misc_feature 1..120: note = Artificially Synthesized Probe
  source 1..120: mol_type = other DNA
tggcagtaggtcacagtgggttgtggtatcaagcccaggaagcaaactcttgcagcatcccactagctccctcaggactctcccatgagtggccattgggaagtcaccctccaagactga

SEQ ID NO: 2005 - DNA, 120 bp, synthetic construct
  misc_feature 1..120: note = Artificially Synthesized Probe
  source 1..120: mol_type = other DNA
agggggtggtgaggagggagggagcaaacaccatcacggacgtgtttgctactgtttcctccccacaaagccttatagtaagtaggaaggatggcttggtcaggtaggaaaaggatacta

SEQ ID NO: 2006 - DNA, 120 bp, synthetic construct
  misc_feature 1..120: note = Artificially Synthesized Probe
  source 1..120: mol_type = other DNA
agttgagaagtcttcctcagctctttcccacggtggctcaagcagcaagcaggtgctgatgttttcacctgatgccatccacactgctttgaggattgtgaacatgtaggcatcctctag

SEQ ID NO: 2007 - DNA, 120 bp, synthetic construct
  misc_feature 1..120: note = Artificially Synthesized Probe
  source 1..120: mol_type = other DNA
cccttttcttctttctgcctcagtttcctgcataaaatggataagatgaagataatagcactgcaggatttggaatgctgcttggcgttaagcagagacttggtatgggttttttttttt

SEQ ID NO: 2008 - DNA, 120 bp, synthetic construct
  misc_feature 1..120: note = Artificially Synthesized Probe
  source 1..120: mol_type = other DNA
atctaagaaagaggatctgtttcctagcataccttcttcagcctggagagttgatccttttctattcccattcccaaaaccaaattaaatggccttttgccaggatggaactgttgaatg

SEQ ID NO: 2009 - DNA, 120 bp, synthetic construct
  misc_feature 1..120: note = Artificially Synthesized Probe
  source 1..120: mol_type = other DNA
gtcttagttgggttgtttggattttggtcctgacctcgtttctgaatgctgcttatgtgagctggagggagagtggacactgcccccccatcccctctcactgccttgtgatgggatctt

SEQ ID NO: 2010 - DNA, 120 bp, synthetic construct
  misc_feature 1..120: note = Artificially Synthesized Probe
  source 1..120: mol_type = other DNA
atgcatcctaggatggttgtggaaatacgacagttcatgcaagcatgatgcctggaggtcttacagaacccagcaaggctcagggagtctcaggtcctgggctttgagttcatggtgtta

SEQ ID NO: 2011 - DNA, 120 bp, synthetic construct
  misc_feature 1..120: note = Artificially Synthesized Probe
  source 1..120: mol_type = other DNA
gaggaggggcccgccttagccatgtgaaggtggattggtcgccatctgcacgccaggcggcatccttttctatgaagtgttgactttgtaaatctgcccacacccagctggccatatcca

SEQ ID NO: 2012 - DNA, 120 bp, synthetic construct
  misc_feature 1..120: note = Artificially Synthesized Probe
  source 1..120: mol_type = other DNA
taatttttcccgacagcagctcttcctcctcttcctcgcgggccttcttcatttcctccttggcctgtatggcatccatctccctttctggaccctggagaaagaaagaaaaaacataag

SEQ ID NO: 2013 - DNA, 120 bp, synthetic construct
  misc_feature 1..120: note = Artificially Synthesized Probe
  source 1..120: mol_type = other DNA
aatgaaatagtgatgtaggaagagttaatcacgtgcttcataccttggtttcgccccaggtggccttgccaaaattatctgcgtactcttcatcatctgtgatcagaaagttatcaaaaa

SEQ ID NO: 2014 - DNA, 120 bp, synthetic construct
  misc_feature 1..120: note = Artificially Synthesized Probe
  source 1..120: mol_type = other DNA
tagtgtatactataacagcaattagaatagtaggtggtgcttaaacccatttctagaatatcctttccctctaaggcactggttccttaaacgtggctgcacatcgggatcaccaaaact

SEQ ID NO: 2015 - DNA, 120 bp, synthetic construct
  misc_feature 1..120: note = Artificially Synthesized Probe
  source 1..120: mol_type = other DNA
acacgcaaaaaatctaaagtaaagttaaaaccaaatgacctgccaaagctccaggccaatggcaccaatgttctcaaattctgagaggtcatactgcgtcaaatagtcggtattcttcat

SEQ ID NO: 2016 - DNA, 120 bp, synthetic construct
  misc_feature 1..120: note = Artificially Synthesized Probe
  source 1..120: mol_type = other DNA
gatttttctccctaacctgccatatgactttagccctttcctgcatgctatggagaggagcagcggtgtggaaacctcaagtagtggctagagtgaaaaatgatggtgcaaaaagtgatg

SEQ ID NO: 2017 - DNA, 120 bp, synthetic construct
  misc_feature 1..120: note = Artificially Synthesized Probe
  source 1..120: mol_type = other DNA
atgctgccggattcaattgactgaccatcaattttcacatcataagaaagatctggtcttaaaattagagtgtacaggtgtgtgaagccatcaacctgcatattttagggggaaaagcgt

SEQ ID NO: 2018 - DNA, 120 bp, synthetic construct
  misc_feature 1..120: note = Artificially Synthesized Probe
  source 1..120: mol_type = other DNA
aatgggccccctaaactggaaactggaaacaggaggtatgtctacaaagacccatccctggctcagttaagtattttattatcaaaactattttttctaaacttagtctggcaggagtta

SEQ ID NO: 2019 - DNA, 120 bp, synthetic construct
  misc_feature 1..120: note = Artificially Synthesized Probe
  source 1..120: mol_type = other DNA
agccactgcatctggtcacatgtgtgaatatcttattattgttgttaaaggacaatgtcctggctttccactcacttttgagtgtgttctgaagcttatttaaatattcaaagtggcctg

SEQ ID NO: 2020 - DNA, 120 bp, synthetic construct
  misc_feature 1..120: note = Artificially Synthesized Probe
  source 1..120: mol_type = other DNA
cagcaagctcccctcacactaatggctggcgctgactcattgcaacaaagtgtcccaatagtaacagagtgggtttgagtaaaatggaactgttgaattaaaaactgaaatactaagaaa

SEQ ID NO: 2021 - DNA, 120 bp, synthetic construct
  misc_feature 1..120: note = Artificially Synthesized Probe
  source 1..120: mol_type = other DNA
gccaagatggtctcaatctcctgacctcgtgatctgcccacctcggcctcccaaagtgctgggattacaggtgtgagccaccgcgcccggctctaattttgtatttttaatagaaacggg

SEQ ID NO: 2022 - DNA, 120 bp, synthetic construct
  misc_feature 1..120: note = Artificially Synthesized Probe
  source 1..120: mol_type = other DNA
tccaaccagttaaaaacgtaaaaaacatttttagttcacaggttatataaacacaggcagtgggccaatttggcccacggccaaggtttactgagtactgaaggattcaaaacacaggtt

SEQ ID NO: 2023 - DNA, 120 bp, synthetic construct
  misc_feature 1..120: note = Artificially Synthesized Probe
  source 1..120: mol_type = other DNA
aatagtgcttggatccgatacactcaatactactacaaaccttggatccgatatactcaatactactaccttcactacattagcaaagtcttagtctaaagatcctgtgaagtgggaggg

SEQ ID NO: 2024 - DNA, 120 bp, synthetic construct
  misc_feature 1..120: note = Artificially Synthesized Probe
  source 1..120: mol_type = other DNA
tgcgctaagtaacgcaggaagttaaatcgatgtccttcccttactcccaaacataaatgtcctaaccatttacagtgatctacagtgccaacagagcattatacaataatgcataatggg

SEQ ID NO: 2025 - DNA, 120 bp, synthetic construct
  misc_feature 1..120: note = Artificially Synthesized Probe
  source 1..120: mol_type = other DNA
tggacactaaactttctttctttcttttcttttttcttttgagacagaggctcgctctattgcccagactgaatctctgctcactgcaacctccgcctcccaggttcaagcgattctcct

SEQ ID NO: 2026 - DNA, 120 bp, synthetic construct
  misc_feature 1..120: note = Artificially Synthesized Probe
  source 1..120: mol_type = other DNA
ataaaaaccttgagcaagttgtgtgatctgagtcatgcagcatgcaggtgtaacctctgcttcttaaatcatagataaaccttcttcctcattgttcttgtttggcaaatgactaggaca

SEQ ID NO: 2027 - DNA, 120 bp, synthetic construct
  misc_feature 1..120: note = Artificially Synthesized Probe
  source 1..120: mol_type = other DNA
ctcaagtgattcgcttgccttatcttgacctgcctgtacaaaagtaaaagctcattgtgttgtaccctgaagaatgtgcaggcgacaagatgtaatgtttatctctgtatttttttcttt

SEQ ID NO: 2028 - DNA, 120 bp, synthetic construct
  misc_feature 1..120: note = Artificially Synthesized Probe
  source 1..120: mol_type = other DNA
aaattaaaatgagaaaaagtacccactaaccttttccttctgaggggcatggcccttgatcctcaaatgcacttgactagtgtctattaagaggggcaattttggtaatgcctactaata

SEQ ID NO: 2029 - DNA, 120 bp, synthetic construct
  misc_feature 1..120: note = Artificially Synthesized Probe
  source 1..120: mol_type = other DNA
cttcatctgtaaaacgggaataaaagcgttttggctgtgccacaactacctagagaggttgctatggaaatgtaacattaggctcaatttggtcctgattctacactaacctttatcttt

SEQ ID NO: 2030 - DNA, 120 bp, synthetic construct
  misc_feature 1..120: note = Artificially Synthesized Probe
  source 1..120: mol_type = other DNA
ctgacatgaatacatcagcaaggtctcaattcagccacagtcccaagtcccccaaccttcctgattgcatctctattttaaatgacccagcctggacatcaaggacaatgatctaggagg

SEQ ID NO: 2031 - DNA, 120 bp, synthetic construct
  misc_feature 1..120: note = Artificially Synthesized Probe
  source 1..120: mol_type = other DNA
ctttaattaaagcaggttaataattaaaacttcaaagtactgcacagccacagaattttcttgaagggagaaagcggtcactggccatatgatgcggagatggttttatctgaggcctga

SEQ ID NO: 2032 - DNA, 120 bp, synthetic construct
  misc_feature 1..120: note = Artificially Synthesized Probe
  source 1..120: mol_type = other DNA
ctgctctccaggattctggaaggttctgtgttctcggttatcccatgcagggaacctgcagcacccgctcccttgaagcctcctcccgttccaccgagagctgcctgtgagctgcatcag

SEQ ID NO: 2033 - DNA, 120 bp, synthetic construct
  misc_feature 1..120: note = Artificially Synthesized Probe
  source 1..120: mol_type = other DNA
ctatgtctaaaataaaaaacggttttggaggcaaatgcaggaggaagcaggttcccagcgactgggctgtggaagccacactgtgggctggggcaggcgtctcttacctggcggctggat

SEQ ID NO: 2034 - DNA, 120 bp, synthetic construct
  misc_feature 1..120: note = Artificially Synthesized Probe
  source 1..120: mol_type = other DNA
tttttaaactgatttatttaaaataagcctaactttgaaggctgccacagttcaggctgtgtgggagcctgtgttctaccgtgtattcttatcatccctacaccctggtgttctaacttc

SEQ ID NO: 2035 - DNA, 120 bp, synthetic construct
  misc_feature 1..120: note = Artificially Synthesized Probe
  source 1..120: mol_type = other DNA
ggatacagccgaaaacatcttggagagattccccacgtctcccacaggcctctagcgataagctcttcctcctagaaactgctcagtgtgaagtgacagtaggctatgctcctggctaag

SEQ ID NO: 2036 - DNA, 120 bp, synthetic construct
  misc_feature 1..120: note = Artificially Synthesized Probe
  source 1..120: mol_type = other DNA
aaacagtatttcactactctgtggccattcttactcccttggcttaatgaattcccgactctagattcccgactctagcagtatctttgcttactttcattcggcaagacgtgaagtctt

SEQ ID NO: 2037 - DNA, 120 bp, synthetic construct
  misc_feature 1..120: note = Artificially Synthesized Probe
  source 1..120: mol_type = other DNA
gagaagatacaaaaacagggtgacaattccacatggaactttcggacagtcctaggttttagccccagggtgaggttcaaggagtgaacaaggcacatacgtggaacctgctgctcagag

SEQ ID NO: 2038 - DNA, 120 bp, synthetic construct
  misc_feature 1..120: note = Artificially Synthesized Probe
  source 1..120: mol_type = other DNA
gatcacaggtgcgagcacccgcacccccccttacctgcatttctgacatgcgtcttagacatttcaagacacgagtcctgtgcagcttttccctcaagcctacttgctcctcgtctcccc

SEQ ID NO: 2039 - DNA, 120 bp, synthetic construct
  misc_feature 1..120: note = Artificially Synthesized Probe
  source 1..120: mol_type = other DNA
aaagagatgccaggtgagccattagccacttcttcaacagcccctctgcactctaccgggggccccaccttaggcatattatgaacccacaacctggatcaagcaccccaaagatcgagc

SEQ ID NO: 2040 - DNA, 120 bp, synthetic construct
  misc_feature 1..120: note = Artificially Synthesized Probe
  source 1..120: mol_type = other DNA
ccaccttgtcaccattttacctccagaccccacactcccacagacactcaactgctgctgaataaatggcgaatctgttaatgaaggaaaacccttccctgagtccccggcacctctgtc

SEQ ID NO: 2041 - DNA, 120 bp, synthetic construct
  misc_feature 1..120: note = Artificially Synthesized Probe
  source 1..120: mol_type = other DNA
ctggtcaagaccatctcaaatcaccctccacaaaactgacagaataatttttccaaaaagcaagtctggattccaagtctagtagatcccaatgccttccatctgaaggacaaacgtctc

SEQ ID NO: 2042 - DNA, 120 bp, synthetic construct
  misc_feature 1..120: note = Artificially Synthesized Probe
  source 1..120: mol_type = other DNA
tttaaatgctcgctttattgtgaaaagattgacaaacccagtgcctgcagagtaatggtttgattttagataatcagcaacaagaggactcagggactacagcaaagtcatgggttctgt

SEQ ID NO: 2043 - DNA, 120 bp, synthetic construct
  misc_feature 1..120: note = Artificially Synthesized Probe
  source 1..120: mol_type = other DNA
ggagaggggagttagggaggggggagttagggagaggagttaaggagaggggagttagggaggggagttagggagaggggagttagggagaggggagctgggggggagttatggagcaag

SEQ ID NO: 2044 - DNA, 120 bp, synthetic construct
  misc_feature 1..120: note = Artificially Synthesized Probe
  source 1..120: mol_type = other DNA
caaggcagaagccaaggccttcacacactcatgctaacagcgcctgagagaacacgggtggcgcatctcaaagaaacacttattaatgcctgctatgggccagactccttgaaaacgtta

SEQ ID NO: 2045 - DNA, 120 bp, synthetic construct
  misc_feature 1..120: note = Artificially Synthesized Probe
  source 1..120: mol_type = other DNA
cttcagaaccctctacggtttgcagttactgccttgtaaagaggctgtgtctgcttaatttgtatcatcgatgttacacctggaggaattttagccaaaaggcgaccttctcagttgaaa

SEQ ID NO: 2046 - DNA, 120 bp, synthetic construct
  misc_feature 1..120: note = Artificially Synthesized Probe
  source 1..120: mol_type = other DNA
tgtgatagtactgacccatttcaggacctggacaatagttccaagtctcagatcttctgtttttgaaagagaaaacactacagcatttatacatctacctatctacctatacggttgcca

SEQ ID NO: 2047 - DNA, 120 bp, synthetic construct
  misc_feature 1..120: note = Artificially Synthesized Probe
  source 1..120: mol_type = other DNA
atttccaaacctctgctttgttgaaaatgtggtaggaaaggccatagggcatacaacctcaagaataaaataagaaatggagctgggacactaagagacggcttttccaggggtcactaa

SEQ ID NO: 2048 - DNA, 120 bp, synthetic construct
  misc_feature 1..120: note = Artificially Synthesized Probe
  source 1..120: mol_type = other DNA
caaactaattagaaggggggtgtcccacactaatcagagcggggaggagtcacataatcagaggggggaggtgcccacactaatcagaggggaatggtccccacactaattagagaggag

SEQ ID NO: 2049 - DNA, 120 bp, synthetic construct
  misc_feature 1..120: note = Artificially Synthesized Probe
  source 1..120: mol_type = other DNA
gtttacttccagaagattggtggagcttgatctgaaggtatgtaattaacaacccttcttactccagagtctcatgcttgaatcttttcctttgcttcatggcttcgtgttgtagaaact

SEQ ID NO: 2050 - DNA, 120 bp, synthetic construct
  misc_feature 1..120: note = Artificially Synthesized Probe
  source 1..120: mol_type = other DNA
tagaataccatagtttatagactagtcagatggaaacattgactcatgtaatttttatcttccttcgctgatttgagcaactcttgtctaaaatcaccctttccttctgaggtctaggag

SEQ ID NO: 2051 - DNA, 120 bp, synthetic construct
  misc_feature 1..120: note = Artificially Synthesized Probe
  source 1..120: mol_type = other DNA
ctccaatcaggctaccaggcttgagaaaaattgtgctgtgtccctccatcttaactttctctctctgggaacattttgatttgggagaaatcaaggtgaattgaattccaatataagcac

SEQ ID NO: 2052 - DNA, 120 bp, synthetic construct
  misc_feature 1..120: note = Artificially Synthesized Probe
  source 1..120: mol_type = other DNA
ctgtttcccggggtcttgagaagagagtaatgcatacttggagtgaaataagcaagatgaaaaaagagatgtgtttctggggtagggagggatgtcatttatgccatgtctagttataga

SEQ ID NO: 2053 - DNA, 120 bp, synthetic construct
  misc_feature 1..120: note = Artificially Synthesized Probe
  source 1..120: mol_type = other DNA
taaacatctgagggacagtctctgacacataggggtgttagtatgtggatgaaatcctcactgtttctggttgtggattatatctcgaagctggggtagttttcttcccttttcaatata

SEQ ID NO: 2054 - DNA, 120 bp, synthetic construct
  misc_feature 1..120: note = Artificially Synthesized Probe
  source 1..120: mol_type = other DNA
gggcaatcgtatgacttccttctaggattgttgggagaattagctggaataatgttcatgaagcattagcatgaggccaatatttggtatagcattcagtaaatgctcacttctgttgga

SEQ ID NO: 2055 - DNA, 120 bp, synthetic construct
  misc_feature 1..120: note = Artificially Synthesized Probe
  source 1..120: mol_type = other DNA
atacccggccacatattagaattgtatcatttcgttttcccttcatccattatttggttacccagtgatacagcttatatgtgaatccttgattcttttctttcagttattttttttttt

SEQ ID NO: 2056 - DNA, 120 bp, synthetic construct
  misc_feature 1..120: note = Artificially Synthesized Probe
  source 1..120: mol_type = other DNA
ttgtatattttctacccagtcctggaatctctcatttctcccaaaaatcctgacttcttttaatgagagatgtcatttcaagaccacaaactcgatgctggcatgctcattgcttttgag

SEQ ID NO: 2057 - DNA, 120 bp, synthetic construct
  misc_feature 1..120: note = Artificially Synthesized Probe
  source 1..120: mol_type = other DNA
aaaggaaacgtaactgtgcttagctgtggcatggaattgtgatattaccaggtcaaattcaggaaaaccatatttcctctttggattccaaatgatctcagcttttttttgttgggggcg

SEQ ID NO: 2058 - DNA, 120 bp, synthetic construct
  misc_feature 1..120: note = Artificially Synthesized Probe
  source 1..120: mol_type = other DNA
tctttggtgtccctcttttgctggcttcctaagcagtatcatttaaagctgtgacttagagttcagtggttaataacatagactttggcatcagattgtaccagctctgccattaattag

SEQ ID NO: 2059 - DNA, 120 bp, synthetic construct
  misc_feature 1..120: note = Artificially Synthesized Probe
  source 1..120: mol_type = other DNA
tgacatgcctggaggacctctgcaaaacagttgtacctaaacttttgagaaacatagagaaatacaaaagagagaaaggtaagtagcttgtgattgctaacttggaccagaccatggaaa

SEQ ID NO: 2060 - DNA, 120 bp, synthetic construct
  misc_feature 1..120: note = Artificially Synthesized Probe
  source 1..120: mol_type = other DNA
ggcaaaagtcaaacctggctgccttaccacgtgtcagtacgctaaatatctgtgtttttctgagttcatttctccactgttaagcaagcgctatacataaaaactcatgagtgtattcat

SEQ ID NO: 2061 - DNA, 120 bp, synthetic construct
  misc_feature 1..120: note = Artificially Synthesized Probe
  source 1..120: mol_type = other DNA
ttctgctgttaagatgaaagactaaaggactaaagagtaggtgtgcagactttagacttttctgtaagtgtgtgtgatccaaagtccaagctaggatactggctttatttaaggaccacc

SEQ ID NO: 2062 - DNA, 120 bp, synthetic construct
  misc_feature 1..120: note = Artificially Synthesized Probe
  source 1..120: mol_type = other DNA
gtaaacaacatgatatcaaccagagtgcacattttctgaaaatttaacagttggctgacactagctgactagtgagagctagttagtttgagttctcgctagttagtttgagctgactcc

SEQ ID NO: 2063 - DNA, 120 bp, synthetic construct
  misc_feature 1..120: note = Artificially Synthesized Probe
  source 1..120: mol_type = other DNA
agataaggttttgctatgttgcccaggctggtctcaaattcttgggctcaagcaatcctcccgccttatcctcccaaagtgctgagattacagccatgtaccaccacgcccagccacata

SEQ ID NO: 2064 - DNA, 120 bp, synthetic construct
  misc_feature 1..120: note = Artificially Synthesized Probe
  source 1..120: mol_type = other DNA
acatttccaccagctgtgcacacatcctcagcaacacttcctcaccaagacgtattattctctttcatttttgatagtaggcatcctaatggaagtgaggtcctatttccctgtggtttt

SEQ ID NO: 2065 - DNA, 120 bp, synthetic construct
  misc_feature 1..120: note = Artificially Synthesized Probe
  source 1..120: mol_type = other DNA
attccaattttgtctgttgaacccaataatgtccttgacagtttttaaaccatctagtacaaaattccacataggatcctatataaatgcaacacaaggctgggtatgttggctcacacc

SEQ ID NO: 2066 - DNA, 120 bp, synthetic construct
  misc_feature 1..120: note = Artificially Synthesized Probe
  source 1..120: mol_type = other DNA
agtgctggagagacattttaagattctgtaaatatcctgctgcacatgaaaagtttccccctagattgagcgtctgctgatgattcttgtgtgatccagcatttactatgttggttgtaa

SEQ ID NO: 2067 - DNA, 120 bp, synthetic construct
  misc_feature 1..120: note = Artificially Synthesized Probe
  source 1..120: mol_type = other DNA
gagctattgtgcatggccatcccagaagctctttaaaatgtggttttccagcactgacattttaggattccctaattctaagttaaattgtctgctaaatgtaactcttcccacccactt

SEQ ID NO: 2068 - DNA, 120 bp, synthetic construct
  misc_feature 1..120: note = Artificially Synthesized Probe
  source 1..120: mol_type = other DNA
aatcgatttttttgagtgtggcataaggttttcttaaggagaggcatgtctctctatggaggagacctaacacctgcttctttataaggccttattggacccctcttgaaaactatcaaa

SEQ ID NO: 2069 - DNA, 120 bp, synthetic construct
  misc_feature 1..120: note = Artificially Synthesized Probe
  source 1..120: mol_type = other DNA
tccactatgtggacataccacagctttttcaatcacttcctattggtggacattaggctatttccagtccttagtgtaaataatgctgcaatgagtaagtacccttgagcatatgtcaca

SEQ ID NO: 2070 - DNA, 120 bp, synthetic construct
  misc_feature 1..120: note = Artificially Synthesized Probe
  source 1..120: mol_type = other DNA
atccctgcccagaaaccataaccttaggaaaatattccagaatctgccatcaggttaaactgcttatgaacaaacaggctttggcgaagtctttctgtggtatgtaaagtttgtcacaga

SEQ ID NO: 2071 - DNA, 120 bp, synthetic construct
  misc_feature 1..120: note = Artificially Synthesized Probe
  source 1..120: mol_type = other DNA
aaaaagaaaactgtttgatgttacattttcctgttagtgccatgtgacaaataatgcattgctgactttctctctgtgatagagtcttttccagaggaatcagggagttggcaggaacac

SEQ ID NO: 2072 - DNA, 120 bp, synthetic construct
  misc_feature 1..120: note = Artificially Synthesized Probe
  source 1..120: mol_type = other DNA
gtttgtttcagacttgtttctccctctctctgtaattatctctgttcttcccacctttttctgtatcaatcagaagtgactgatccctttgactgtggaggaaatgctgttacactttga

SEQ ID NO: 2073 - DNA, 120 bp, synthetic construct
  misc_feature 1..120: note = Artificially Synthesized Probe
  source 1..120: mol_type = other DNA
aactctctgcctctgatactgggagtggcatcctgaaagaaaggaactgtctaatctttagtgcaaatgagatttatcctttgtcctgggctctaggacttaaaaaagaatctttgaaat

SEQ ID NO: 2074 - DNA, 120 bp, synthetic construct
  misc_feature 1..120: note = Artificially Synthesized Probe
  source 1..120: mol_type = other DNA
cttccatatacgtgtaaggatgatatcatgtttctgagcctcttatatatccctggggagtcatcagtctgctaaagagtggcaagaatctttgactattcacaattctgaatagaggag

SEQ ID NO: 2075 - DNA, 120 bp, synthetic construct
  misc_feature 1..120: note = Artificially Synthesized Probe
  source 1..120: mol_type = other DNA
ttttttgtttttaaacagagatcctgagtcatgtgttccagtggcttgggttcacagtgcatatacacaataatgtgacgaaagtggaaatggagatggtcctgcagaagcagaagtgca

SEQ ID NO: 2076 - DNA, 120 bp, synthetic construct
  misc_feature 1..120: note = Artificially Synthesized Probe
  source 1..120: mol_type = other DNA
aatgacaaatagatgttaggtaaagaatcaggtgaaagatgtgctgggcagagggaatagcatgaacaaaagcatgggggccttttatttgttcgtttatttatcactcactcttacgtc

SEQ ID NO: 2077 - DNA, 120 bp, synthetic construct
  misc_feature 1..120: note = Artificially Synthesized Probe
  source 1..120: mol_type = other DNA
aactggggacagggggtgcaactgtgtacaagagagacaaaatctgctctccagggagctaaaagtccagtgaaggaaggacagataataaaaatataagtgaatatttaaattattatt

SEQ ID NO: 2078 - DNA, 120 bp, synthetic construct
  misc_feature 1..120: note = Artificially Synthesized Probe
  source 1..120: mol_type = other DNA
attagtgatgttgaggggtggaagcgggtaagtaggaaaactcccaccacaactatagtgctagagtgaagtagggctgagactggggttgggccttccaaggcggaaggaagtcagggg

SEQ ID NO: 2079 - DNA, 120 bp, synthetic construct
  misc_feature 1..120: note = Artificially Synthesized Probe
  source 1..120: mol_type = other DNA
tcctaagaccaatggataactctcatcctctaaaagttgagaaaactatgttgttaggcatggaggcatgagttagcagttcttgcaaactttatcggtaaataagaagttgcggacttc

SEQ ID NO: 2080 - DNA, 120 bp, synthetic construct
  misc_feature 1..120: note = Artificially Synthesized Probe
  source 1..120: mol_type = other DNA
gtgcttatacatgggctttgggaagtcataggtgaagtcagtataggggtatttttactatgaaggccattatacatgccaatcacatgagattgttggatcaggagattggtagttctt

SEQ ID NO: 2081 - DNA, 120 bp, synthetic construct
  misc_feature 1..120: note = Artificially Synthesized Probe
  source 1..120: mol_type = other DNA
gttggaaattgaaagtagcaaagcaaggcctaccctggctttgcaggcagcaaatactggtagagtaatgggtattacatttgctagggtgaagtgtatatttaaagctataagggtatt

SEQ ID NO: 2082 - DNA, 120 bp, synthetic construct
  misc_feature 1..120: note = Artificially Synthesized Probe
  source 1..120: mol_type = other DNA
gcattaaatctgtaggtcaccttgggtagtatggtcattttaacaagattattcttctaacccatgaacacgagatatctttccatttatttgtgtcctcttcactttctttcatcaatg

SEQ ID NO: 2083 - DNA, 120 bp, synthetic construct
  misc_feature 1..120: note = Artificially Synthesized Probe
  source 1..120: mol_type = other DNA
tctcctctgaacttgcagtggaaccttgacctttcatttggtgttgaccacattctgccttgtgttatgaatattgtgtatatgccatcctcggtaaatgtttcatatctgcattctaag

SEQ ID NO: 2084 - DNA, 120 bp, synthetic construct
  misc_feature 1..120: note = Artificially Synthesized Probe
  source 1..120: mol_type = other DNA
cacctggccagaaaactttcattattgaagacttggattgtagccttggttttggatgtctattctgaagacagagtaattggctttggtttgtgcaggtactttttctttgagacagag

SEQ ID NO: 2085 - DNA, 120 bp, synthetic construct
  misc_feature 1..120: note = Artificially Synthesized Probe
  source 1..120: mol_type = other DNA
cataggaagtttttatttggttagagacaggtttccctgtaggaagatgatggctcatttacactcagctgctctgcaagcagaaactttacaacctgatgtcatattccattttggact

SEQ ID NO: 2086 - DNA, 120 bp, synthetic construct
  misc_feature 1..120: note = Artificially Synthesized Probe
  source 1..120: mol_type = other DNA
gaactggaatgccttggggcgtggaagggcattaggagtgtttcatttgatatgtgaatgctcataaaaaaatgtcaaggaatgaagaacaacaactctcagtggtgcctgcatttataa

SEQ ID NO: 2087 - DNA, 120 bp, synthetic construct
  misc_feature 1..120: note = Artificially Synthesized Probe
  source 1..120: mol_type = other DNA
gtcctgattcctttgctcagagacactaactaaatcaagctagcttttttcagccttgtctgtaaagtagagaaaacattagctgttgggaagacgaaaaagaatgtgtcctatgtgtgc

SEQ ID NO: 2088 - DNA, 120 bp, synthetic construct
  misc_feature 1..120: note = Artificially Synthesized Probe
  source 1..120: mol_type = other DNA
gtgcatgtctgcgtgaattttgagttcaggaataacaggtgatttgatcacagctatttgacagtggtgatagtcattgtatgccaagatgtttatgaggggaataggtagattgagtga

SEQ ID NO: 2089 - DNA, 120 bp, synthetic construct
  misc_feature 1..120: note = Artificially Synthesized Probe
  source 1..120: mol_type = other DNA
acaggtaatttttgtgccatacatgattcacagaaccttccagatctgatgctttctgagtgatctggtcaatttgttctcaacctggaattcttgggcccttaggtgtttgtaaatttg

SEQ ID NO: 2090 - DNA, 120 bp, synthetic construct
  misc_feature 1..120: note = Artificially Synthesized Probe
  source 1..120: mol_type = other DNA
aactccggagccataccaaacaactgtaactgtcctctggtgagatttgcgttgtatgtgacaaatcttttaacttttttctgttagggtttcagttttgttggaagtctgcagtttgct

SEQ ID NO: 2091 - DNA, 120 bp, synthetic construct
  misc_feature 1..120: note = Artificially Synthesized Probe
  source 1..120: mol_type = other DNA
gctatgtattttcccattattcactctgtgtttgtcacagatttttccccaccctttttcaatgagtgtatcctccatgtccccccaatcatgcatccagtaaactttgtcattactacc

SEQ ID NO: 2092 - DNA, 120 bp, synthetic construct
  misc_feature 1..120: note = Artificially Synthesized Probe
  source 1..120: mol_type = other DNA
acccactatggagctgtcatttgtgaatttaagaagaaacacttgcctcttgactattttaaaacatcaaaaacaacatttaaaaattgaaggatgaggccggggtgtggtggctcgcgc

SEQ ID NO: 2093 - DNA, 120 bp, synthetic construct
  misc_feature 1..120: note = Artificially Synthesized Probe
  source 1..120: mol_type = other DNA
agtcttttatgttgcttataaattaatatgtatattgtacaaatatacagatgcatgggggtgatgagaagtttagagtagtagttgcctgggatgggattgggtcttggggggacaggg

SEQ ID NO: 2094 - DNA, 120 bp, synthetic construct
  misc_feature 1..120: note = Artificially Synthesized Probe
  source 1..120: mol_type = other DNA
acccacaacgcccaaattgctgctggcattcctccactctgaatgcacaattagaagctcagcactctattggataaggctgctatttcaccatttgaagaaccttcaaaaaggtcttta

SEQ ID NO: 2095 - DNA, 120 bp, synthetic construct
  misc_feature 1..120: note = Artificially Synthesized Probe
  source 1..120: mol_type = other DNA
ttgtaaacaaataaaaaaatagactgctccattactgatgagaaatatgagtcattctgccaggaattgaaagtacagctgcccataaaaaagctatgccggggtccagcctctccaggt

SEQ ID NO: 2096 - DNA, 120 bp, synthetic construct
  misc_feature 1..120: note = Artificially Synthesized Probe
  source 1..120: mol_type = other DNA
agagttcatcagctttccttccaacgcgagaaacattttctctgcaaagaaacggtctccgctcgctttgggctttcgctttccttgaaagggcgcattcatagatgcccggaggcattt

SEQ ID NO: 2097 - DNA, 120 bp, synthetic construct
  misc_feature 1..120: note = Artificially Synthesized Probe
  source 1..120: mol_type = other DNA
tatgaaaaaaaaaaaaaagttactacggagaaataaacaggccggcttcacctccaacctagtggggaaaaaaagcctaagagggagtgaaatgaaggatgggggagcagaagtctccac

SEQ ID NO: 2098 - DNA, 120 bp, synthetic construct
  misc_feature 1..120: note = Artificially Synthesized Probe
  source 1..120: mol_type = other DNA
ttcggatgcagactaaagtttgagaatcaccgacctcgttcttaaaaattgttttaaaattaacttgtttttcctttagttgttaggagttaggatccactttgtcatgtgagtttcagg

SEQ ID NO: 2099 - DNA, 120 bp, synthetic construct
  misc_feature 1..120: note = Artificially Synthesized Probe
  source 1..120: mol_type = other DNA
gccctccaaggtgatgggcccacatctagctcatctctggaccttggtatctgttttagcattacaacttttcctatattcctttcttcttataccatactttctcaagttgattcagaa

SEQ ID NO: 2100 - DNA, 120 bp, synthetic construct
  misc_feature 1..120: note = Artificially Synthesized Probe
  source 1..120: mol_type = other DNA
gtgaaatgacagctgtgctggggtacagggaagcttgcttccttgaggattttattccccaagaagttaactgtggattcttagaactgtggtttttattaaaaatgtgcttgctttttc

SEQ ID NO: 2101 - DNA, 120 bp, synthetic construct
  misc_feature 1..120: note = Artificially Synthesized Probe
  source 1..120: mol_type = other DNA
agaaagcctgcagggagaactgcaggtgctttgaaggggatggagtttctaaatgcaaatctgagccaatataaacgcacattttaaaaactctcctttttacacagaaggtaacatttc

SEQ ID NO: 2102 - DNA, 120 bp, synthetic construct
  misc_feature 1..120: note = Artificially Synthesized Probe
  source 1..120: mol_type = other DNA
aaaaaaaaaaaatgcatttaacgcatctgacctaccaaacaccataggtcagcctcgtctagcttcaaggtgctttgaacgcttacattagcctatagtctggcaaagtcatctaacaca

SEQ ID NO: 2103 - DNA, 120 bp, synthetic construct
  misc_feature 1..120: note = Artificially Synthesized Probe
  source 1..120: mol_type = other DNA
tagccgccaagtttctgagaacaaagctgtttagaaagcaatgaagaacacaacatcactgatgtagtattcctggccaaaatattgatgtgactctcctcatgagaacagaccaattca

SEQ ID NO: 2104 - DNA, 120 bp, synthetic construct
  misc_feature 1..120: note = Artificially Synthesized Probe
  source 1..120: mol_type = other DNA
gctagtttccaaggacagagtgagggtatctcttgtgggattggggtccacaagaatgtgcagctcccttgcaatgggaacttgtggggaatgccattcagaaaatgaaataaaatctac

SEQ ID NO: 2105 - DNA, 120 bp, synthetic construct
  misc_feature 1..120: note = Artificially Synthesized Probe
  source 1..120: mol_type = other DNA
aaaaaaaagtgatgagataaaaaccaggatggaaaaacagcccattccacacgtgaagtgtccataatgaaggacagacagagtcatccccagggattccttactgctggttgtggcact

SEQ ID NO: 2106 - DNA, 120 bp, synthetic construct
  misc_feature 1..120: note = Artificially Synthesized Probe
  source 1..120: mol_type = other DNA
ccccccctgtcactgatggaggtgtgttcttccccttgggagaatagggccaaaaaaattaaatcccatgggtgcatagattttatgccttctatagtcacatttttaatctttttttaa

SEQ ID NO: 2107 - DNA, 120 bp, synthetic construct
  misc_feature 1..120: note = Artificially Synthesized Probe
  source 1..120: mol_type = other DNA
agtggttgtacctctgtgatatgctttcatatatttatcattctgtttcagggagagtggtgaatatcagtagtttgcagtgtttaagggcttttgaaaactgcagtgaagatctgcagg

SEQ ID NO: 2108 - DNA, 120 bp, synthetic construct
  misc_feature 1..120: note = Artificially Synthesized Probe
  source 1..120: mol_type = other DNA
gccgacttctctctcaatatttccttggtgaaacatcctaagaggaagttacattagagaaaatcacatatttcatctcataggccgtaaacagggccatttaggaagccatgtgttaac

SEQ ID NO: 2109 - DNA, 120 bp, synthetic construct
  misc_feature 1..120: note = Artificially Synthesized Probe
  source 1..120: mol_type = other DNA
gtctctaaaaacagacaaaaaccccttgccaccatgggcagcacacagcttccatctctggcctgattctgtcttcacccctcctgctttctcctggcaagcgtagacccggtgttaatg

SEQ ID NO: 2110 - DNA, 120 bp, synthetic construct
  misc_feature 1..120: note = Artificially Synthesized Probe
  source 1..120: mol_type = other DNA
agacggtggtgacaagcgtggacatgctccaggaagacttgatttggggaccctgacattggaatttgcatctttttttttttctgagatgttcaaacacaagtaaatgtgagattaaga

SEQ ID NO: 2111 - DNA, 120 bp, synthetic construct
  misc_feature 1..120: note = Artificially Synthesized Probe
  source 1..120: mol_type = other DNA
atcagtggctcctgtgagacccacatgaggcttccattcagagcagccctccgaatgccagggtcaggacttgaaacccttctagatgtttctgggcttgtccctgagaatccccaagac

SEQ ID NO: 2112 - DNA, 120 bp, synthetic construct
  misc_feature 1..120: note = Artificially Synthesized Probe
  source 1..120: mol_type = other DNA
cgcgaatgacctccttaagtccccaaaacacggctggtgtggatgagcctgcactgatgagagcctgctctccggctgctgcacttgtaaagtgggtgcttctcagcttcatggtttgag

SEQ ID NO: 2113 - DNA, 120 bp, synthetic construct
  misc_feature 1..120: note = Artificially Synthesized Probe
  source 1..120: mol_type = other DNA
gacctccaggtgggcccaggacagcctgcacacaaagggtgggtgggctgaggtctgagggcctggagtgagcacggcagccctgccccaggctgctcagggaccggcaaggggcctcca

SEQ ID NO: 2114 - DNA, 120 bp, synthetic construct
  misc_feature 1..120: note = Artificially Synthesized Probe
  source 1..120: mol_type = other DNA
tcgctcaggcactcagataaacacgtcctctcatgctcgctctctgcccctcacacactcacacgcacaggtacacatggcaggctggccaagtatgtggggagatggtgttcttgcact

SEQ ID NO: 2115 - DNA, 120 bp, synthetic construct
  misc_feature 1..120: note = Artificially Synthesized Probe
  source 1..120: mol_type = other DNA
aaggatccgtcaagaggggttgcctcggggagaggggctgggaggaccccacttctccgtgagcatcggcttcttccttgtgcaccatggagtttctgtgtccactcggggcttcataat

SEQ ID NO: 2116 - DNA, 120 bp, synthetic construct
  misc_feature 1..120: note = Artificially Synthesized Probe
  source 1..120: mol_type = other DNA
aaatggtttttcaatcaagactttcttccaatctctagtttggggctcagctaacgggggacttggccatgctgagggctggtttccttccactttccctgtcaccacccccaaagtgac

SEQ ID NO: 2117 - DNA, 120 bp, synthetic construct
  misc_feature 1..120: note = Artificially Synthesized Probe
  source 1..120: mol_type = other DNA
tctctgctctccctcaggccaaagtcagctttttggctcttaacagacttttccggggccttaattttcacacgttttccctgctccctgcctgtgccacctgggctacatcccttggtg

SEQ ID NO: 2118 - DNA, 120 bp, synthetic construct
  misc_feature 1..120: note = Artificially Synthesized Probe
  source 1..120: mol_type = other DNA
cctcagaggcaggatgagaaacccaagaacccaggctccaagtattaaagcggtaatgacctaaatgttcagtgcagggcgctcagaagtaaaggcaggtgcctgggaggaactgacctc

SEQ ID NO: 2119 - DNA, 120 bp, synthetic construct
  misc_feature 1..120: note = Artificially Synthesized Probe
  source 1..120: mol_type = other DNA
gcagagggaggctgtgaattaaccacctccgtgggctgttggatgtttgcgtggtgtgagtgagttaactgaatttacacaggaaatggaatcagtcttttaggcttcagcgcagaaact

SEQ ID NO: 2120 - DNA, 120 bp, synthetic construct
  misc_feature 1..120: note = Artificially Synthesized Probe
  source 1..120: mol_type = other DNA
cccttagggcccagggaagagggttctgtgggattccaaaattgcccaacatggctgcttctgccttcaagtgcagggggagagaggctgccagaggcagaaataaaaggtacacgtcaa

SEQ ID NO: 2121 - DNA, 120 bp, synthetic construct
  misc_feature 1..120: note = Artificially Synthesized Probe
  source 1..120: mol_type = other DNA
attacctgatacaccccagggtgggggacgggcttgggggtctgtgggttctgaaaaattgccacctctccactcacctcccctacacctgcacctgggcactagcctatcagagcttct

SEQ ID NO: 2122 - DNA, 120 bp, synthetic construct
  misc_feature 1..120: note = Artificially Synthesized Probe
  source 1..120: mol_type = other DNA
ttccaaaacctacttcaagggcaaccaccaagtttagacgtcatcctgtacggagcacagtgagccagccacgcgtgctgcgtacgagttaagggtccctattgtctgacaaatgagcac

SEQ ID NO: 2123 - DNA, 120 bp, synthetic construct
  misc_feature 1..120: note = Artificially Synthesized Probe
  source 1..120: mol_type = other DNA
tcccaatcttgttgattctgaccataggggtgtccccgattttcttcagaatatctggcaagatttttggagattttgccctgaaacagaggagtccacaattattcaggaaaaaaaaaa

SEQ ID NO: 2124 - DNA, 120 bp, synthetic construct
  misc_feature 1..120: note = Artificially Synthesized Probe
  source 1..120: mol_type = other DNA
accataggaagcaaaaaagtgtcagggcagagactccttagaccagggacaatggctgcaaagcgcaggcgggatgtctagccctgcacagaaaatgtcaggcacgtggcagactcagag

SEQ ID NO: 2125 - DNA, 120 bp, synthetic construct
  misc_feature 1..120: note = Artificially Synthesized Probe
  source 1..120: mol_type = other DNA
cactgtcacttctttctttctattgctgcactgagagtacacccagccacccccacccattctgaactgtaaatcaacaaccataaacgctggtagtggtggacacaaaataggaatcat

SEQ ID NO: 2126 - DNA, 120 bp, synthetic construct
  misc_feature 1..120: note = Artificially Synthesized Probe
  source 1..120: mol_type = other DNA
ggaaagacttgttggctaaatgaatgtgtcgtatcttctattgcagttatgtaaaatgaggtaactgcaaacatctatctaccccgtagagggcttacaaaatgatggcttcttcaccga

SEQ ID NO: 2127 - DNA, 120 bp, synthetic construct
  misc_feature 1..120: note = Artificially Synthesized Probe
  source 1..120: mol_type = other DNA
actgctgcactattcacaagtcaaaacgtggaggcagcccacgtatccgcagacggatgaacacacacagtaggctcatacacacactagaatattactcagccctaagagaaatgaatt

SEQ ID NO: 2128 - DNA, 120 bp, synthetic construct
  misc_feature 1..120: note = Artificially Synthesized Probe
  source 1..120: mol_type = other DNA
cctggaatagaaaagggcagtgaggagaaaactctgcaaatctgactcaagcgcggactttggttaatgtcaacaatggttatgtgatcgtggaattggctcattaattgtaacaaatag

SEQ ID NO: 2129 - DNA, 120 bp, synthetic construct
  misc_feature 1..120: note = Artificially Synthesized Probe
  source 1..120: mol_type = other DNA
cggcctaaaactgctttttttttaaaaagcctattaaaaaagaaaaagttgcggaagccggctgcctttggaagcccttggagtatgctgttcaggtggtctctgcgcacaggccctacc

SEQ ID NO: 2130 - DNA, 120 bp, synthetic construct
  misc_feature 1..120: note = Artificially Synthesized Probe
  source 1..120: mol_type = other DNA
agcgtttaccgccaccccacacggtccgccaaaaagggcgatttgcaaacagccatttcccatccacaatgcagcgaactcaatgctgggcaccgaaacgtgcatctcccccggattccc

SEQ ID NO: 2131 - DNA, 120 bp, synthetic construct
  misc_feature 1..120: note = Artificially Synthesized Probe
  source 1..120: mol_type = other DNA
ccggtggtgtcttctacctggtgttccgatgctgttttacttggttaacttcttgcccttcgggaatttaaggaacctttactgatgagcttgaaacgtgcgtcctggtgggtggggggc

SEQ ID NO: 2132 - DNA, 120 bp, synthetic construct
  misc_feature 1..120: note = Artificially Synthesized Probe
  source 1..120: mol_type = other DNA
ctcggttgtcaccagacacactgtgagggaaggtggaggggacagggggaactctcagagcaaacaatcacaaacacactgtgaaatcaaaaataaattataaaaactaaatagtataaa

SEQ ID NO: 2133 - DNA, 120 bp, synthetic construct
  misc_feature 1..120: note = Artificially Synthesized Probe
  source 1..120: mol_type = other DNA
gtctctttgtttctgtctatattcctctttccccttgactcttcatagtgggttctctgtttctctatgtgatccagatacctgaatggactgttctcttagctctcttcatggaatttt

SEQ ID NO: 2134 - DNA, 120 bp, synthetic construct
  misc_feature 1..120: note = Artificially Synthesized Probe
  source 1..120: mol_type = other DNA
tggaactgcttggaagtggctgtcctgtttgtgagaaaacatgcagaaagattatcaagcttttcatttctctttattgtagttttctttcctttttgcagcaccactgtgcaactatgc

SEQ ID NO: 2135 - DNA, 120 bp, synthetic construct
  misc_feature 1..120: note = Artificially Synthesized Probe
  source 1..120: mol_type = other DNA
tttttttcttccttttttgtcttaattattaattcaggggtgtttgtccactgttgtcaaaggaggggcacaaggggaattggcccccggcctcctagaactttttgttttatgtacttt

SEQ ID NO: 2136 - DNA, 120 bp, synthetic construct
  misc_feature 1..120: note = Artificially Synthesized Probe
  source 1..120: mol_type = other DNA
tggagtttctttgaaattgctgtgttggtattctggatgcttcacatacagattctcagacttcgcataattcagcttccaaattgttttttccaagtgctctcaggaaccccagaatca

SEQ ID NO: 2137 - DNA, 120 bp, synthetic construct
  misc_feature 1..120: note = Artificially Synthesized Probe
  source 1..120: mol_type = other DNA
ctcttttgtttttggagggacttacatctctccaaagacccaggttgaagttaacaggaaatccggtgttaggactcagtcatgggttcacaaaagtagttgttgatcaacaactgaaat

SEQ ID NO: 2138 - DNA, 120 bp, synthetic construct
  misc_feature 1..120: note = Artificially Synthesized Probe
  source 1..120: mol_type = other DNA
ttgcacgtagcctgatgtggcccacacctcagtttagctctagcaccatagctcactgcccactgccagcttttctttttgcctctttagacatgttataaaaaaattatatatatatat

SEQ ID NO: 2139 - DNA, 120 bp, synthetic construct
  misc_feature 1..120: note = Artificially Synthesized Probe
  source 1..120: mol_type = other DNA
cccctcctcccccaagggcaacctgctgatttactgatgactaaattgccattacaagcttgactgctgaaataaagcttagtaaagctgcattttcactgaagcatttattatgcaaaa

SEQ ID NO: 2140 - DNA, 120 bp, synthetic construct
  misc_feature 1..120: note = Artificially Synthesized Probe
  source 1..120: mol_type = other DNA
ctgtgtgtgaaggtttggagctaaatataaccaaagcatcctgtacataaaggggaatacttcagtggctgagaagagtgaaccgggttgtaaatgcttcatcctgtgtctcataatctg

SEQ ID NO: 2141 - DNA, 120 bp, synthetic construct
  misc_feature 1..120: note = Artificially Synthesized Probe
  source 1..120: mol_type = other DNA
aaatgacaacccgctggggatcatgttttagagaagtagtttgaccgtgcttagtttgcataattgcctgcactgatttgcaaaaaccaggcacctaactacataacattttctttctga

SEQ ID NO: 2142 - DNA, 120 bp, synthetic construct
  misc_feature 1..120: note = Artificially Synthesized Probe
  source 1..120: mol_type = other DNA
ttgttgatgaacaattcttaattgttgatgaattgttttcatgttgtcctgggacctgtggtcctgagcactgaacacggcagcacatattaagcactcgatgcttcctgttattaaaac

SEQ ID NO: 2143 - DNA, 120 bp, synthetic construct
  misc_feature 1..120: note = Artificially Synthesized Probe
  source 1..120: mol_type = other DNA
taggctcaaaaagataggaggtggagttctagacaaagacacggagactgggcaaaacaagggctcacctggagccccagaatcatttatctgagcaagttgtctctttacacagccaaa

SEQ ID NO: 2144 - DNA, 120 bp, synthetic construct
  misc_feature 1..120: note = Artificially Synthesized Probe
  source 1..120: mol_type = other DNA
atgtgaggtctcctctactcacattgtacaggccttcctgagggttcttccttctctgctaggaaagacaacgggaagacgttagagggagagaaacacaaacccaagccatgaaagtac

SEQ ID NO: 2145 - DNA, 120 bp, synthetic construct
  misc_feature 1..120: note = Artificially Synthesized Probe
  source 1..120: mol_type = other DNA
aagacaaagatgcccacactcactacttctattcaatatagtaacataggtcccagccgagcaattagcaaaaggtgccaagaatatacaatgggaaatgaatggtctcttcaataaacg

SEQ ID NO: 2146 - DNA, 120 bp, synthetic construct
  misc_feature 1..120: note = Artificially Synthesized Probe
  source 1..120: mol_type = other DNA
aaaaaaaaaagaaaacaaaacaaaagaaaccaataaccaagttatggaatcaacctaagtgtccatcaaagaatgaacagataaagagactgtggaacatacacacaatagaatactatt

SEQ ID NO: 2147 - DNA, 120 bp, synthetic construct
  misc_feature 1..120: note = Artificially Synthesized Probe
  source 1..120: mol_type = other DNA
caaaacatcgtactcctctcttcgtcctagattgagctcctataacagataagaaagtgtcagacacaggacggaggaacctcagaaggatggagccagctggactggggagtgtggttt

SEQ ID NO: 2148 - DNA, 120 bp, synthetic construct
  misc_feature 1..120: note = Artificially Synthesized Probe
  source 1..120: mol_type = other DNA
ctagactaagctcgttccatgcatcaagacattaaagcatgtaatctttatggcgccctttgagacaggtacaattactacacctgttttgtgggttagaaaactgaggttaaacaagtt

SEQ ID NO: 2149 - DNA, 120 bp, synthetic construct
  misc_feature 1..120: note = Artificially Synthesized Probe
  source 1..120: mol_type = other DNA
aaataaaatattatgccaaagtccaaaattcaaacaagaaatgggttgagaagcactgaagtgatgactgggactggattctcccctttactcctaaattcttccaatctctgcccacac

SEQ ID NO: 2150 - DNA, 120 bp, synthetic construct
  misc_feature 1..120: note = Artificially Synthesized Probe
  source 1..120: mol_type = other DNA
actcctagtgccatattaacctttgtcaagctgtagttaatgcacgtttagttggcactgccattggagtacaatgggctgaagaatgcagatacactaaatactctggttaaataaaag

SEQ ID NO: 2151 - DNA, 120 bp, synthetic construct
  misc_feature 1..120: note = Artificially Synthesized Probe
  source 1..120: mol_type = other DNA
gtgtttttatttggaacatcattgcactgtgaatgaggagactcagattttagtctgaccatacttcctactaggtaaacgtgcagcaactcaacctgtaaaacagggtgtggtacccat

SEQ ID NO: 2152 - DNA, 120 bp, synthetic construct
  misc_feature 1..120: note = Artificially Synthesized Probe
  source 1..120: mol_type = other DNA
gagataaccgtggcgatttatgggactggttgagactcagaagaaaatccaggagaaaatcactcagctgcttgtcacagaaaattagaacagaaaaattactggacagtaaatttagca

SEQ ID NO: 2153 - DNA, 120 bp, synthetic construct
  misc_feature 1..120: note = Artificially Synthesized Probe
  source 1..120: mol_type = other DNA
gtatttctaccaattccatcccaaagggaccagcagctgcttcctaggaggtttcagggtattacatggtagctacttttctgtaaaagtggagaagctgttttatttaatgttcctgat

SEQ ID NO: 2154 - DNA, 120 bp, synthetic construct
  misc_feature 1..120: note = Artificially Synthesized Probe
  source 1..120: mol_type = other DNA
acagagtatctaggcatacgggtcattgtatctaagtgttgtgagtctaattagtgacagtgagcctcgccatccctttgtagccttttgtcatcttcattaaaaaaaaagccctgaatt

SEQ ID NO: 2155 - DNA, 120 bp, synthetic construct
  misc_feature 1..120: note = Artificially Synthesized Probe
  source 1..120: mol_type = other DNA
caggcttagagaagagcaaagaacataataagtctttgagtcagaaagactctaagactcaaatgtggaatctgccccattattggcttgttttggaacagttttcttaacctctctgag

SEQ ID NO: 2156 - DNA, 120 bp, synthetic construct
  misc_feature 1..120: note = Artificially Synthesized Probe
  source 1..120: mol_type = other DNA
aatatctctggtgacaggaagctcagcacccagcaatcactggtggagagctctaattttcagagttaaaaaaaaaactttgaacctagttctgccttcagaagcacaaatcacacagat

SEQ ID NO: 2157 - DNA, 120 bp, synthetic construct
  misc_feature 1..120: note = Artificially Synthesized Probe
  source 1..120: mol_type = other DNA
gaataactaactttcactgcagcagaaaagatataggctagacacacagagtaatagttataaccactggttgaagatttgttctgggccaggaaccacacgtgtgagttttctcattca

SEQ ID NO: 2158 - DNA, 120 bp, synthetic construct
  misc_feature 1..120: note = Artificially Synthesized Probe
  source 1..120: mol_type = other DNA
agggttccaagggaagagggaagaacagggctgtatgatttcttaggggtagcgctttatgagcaaatgtttctcttcttgtatttttatttccattaaagttgttatgttttgagcgat

SEQ ID NO: 2159 - DNA, 120 bp, synthetic construct
  misc_feature 1..120: note = Artificially Synthesized Probe
  source 1..120: mol_type = other DNA
tccaagagataaatcagcaaaagatataaataggcaattcgcagagacaggaaaacagattacttacaaacatataaaaagacatactgggagcagtggctcatgccaatcccagcactt

SEQ ID NO: 2160 - DNA, 120 bp, synthetic construct
  misc_feature 1..120: note = Artificially Synthesized Probe
  source 1..120: mol_type = other DNA
gacacattatgtttttatttaaaatatggtaataacatttcaaagaaaaaattaaagccaactggaacaaggcaaggttcacagttgccttgggcccctgggctaactggagatgccccg

SEQ ID NO: 2161 - DNA, 120 bp, synthetic construct
  misc_feature 1..120: note = Artificially Synthesized Probe
  source 1..120: mol_type = other DNA
aaacaaatcatcccacgagagaggggcacagggtgctaaggaaacatgagggagggacgatgcctgcagtcacgctctgggagtaaacaatgacaggcaagtgatctcctttggtgagca

SEQ ID NO: 2162 - DNA, 120 bp, synthetic construct
  misc_feature 1..120: note = Artificially Synthesized Probe
  source 1..120: mol_type = other DNA
cacgcagcacactgccctcaagttttgctcttgaaaattagcaccatttcaaaaaaatctactttcgagcaaaccccttatgtcaaaattccaggcagtattttgccatttctctgagaa

SEQ ID NO: 2163 - DNA, 120 bp, synthetic construct
  misc_feature 1..120: note = Artificially Synthesized Probe
  source 1..120: mol_type = other DNA
tctgcagaggagccacgggagggggaggctgggtgaatttcacttattttccaccttacacctttttgtggtgtttggaactctaactatgatagtatataatatttataatactaaaca

SEQ ID NO: 2164 - DNA, 120 bp, synthetic construct
  misc_feature 1..120: note = Artificially Synthesized Probe
  source 1..120: mol_type = other DNA
tgcaccgagtttttcggaggctgggagaggaaatgccacttggattttaaaaccgtcaccgatacgctataggtgaatatttcgctgggattttaaagagacgagcttcagcctgctaag

SEQ ID NO: 2165 - DNA, 120 bp, synthetic construct
  misc_feature 1..120: note = Artificially Synthesized Probe
  source 1..120: mol_type = other DNA
gctgagttgacagccactgatagagctttttcctgattgtctctggcttgagctaaccaggtggcatgacaaagtacttaacaaaaactacagatgcagagaattttggaaatttttaaa

SEQ ID NO: 2166 - DNA, 120 bp, synthetic construct
  misc_feature 1..120: note = Artificially Synthesized Probe
  source 1..120: mol_type = other DNA
gaggttagttgaccagagacaacgagtccaattcccaaacagaccagaatgaccagcaaaggagaaaagaacaaggacacattgcagccaaaatggagctagaatcttgcctctgtccat

SEQ ID NO: 2167 - DNA, 120 bp, synthetic construct
  misc_feature 1..120: note = Artificially Synthesized Probe
  source 1..120: mol_type = other DNA
cttacgatgaaatttttcagcttgacgaacttttactcatctttcaaggctcggctcaaatgttatttccctgggaaaactgcgctactttcagcaaaatgcatttccttttgatgggca

SEQ ID NO: 2168 - DNA, 120 bp, synthetic construct
  misc_feature 1..120: note = Artificially Synthesized Probe
  source 1..120: mol_type = other DNA
tgtaacctttagatatgttttcaggtgaagtacctctaaatgtaaagaaatgggtccaattgttaattttttttaaaggttcaagaaatacactactttctctggctttttccttacaac

SEQ ID NO: 2169 - DNA, 120 bp, synthetic construct
  misc_feature 1..120: note = Artificially Synthesized Probe
  source 1..120: mol_type = other DNA
aaataaaaataaagaaataagattatgaccaagagccgtatgtctcagatgttgaagggcaatatacctgtgcttcagaaaaatctgccctgtgtgccaaaatgtgcagaaaggagagcc

SEQ ID NO: 2170 - DNA, 120 bp, synthetic construct
  misc_feature 1..120: note = Artificially Synthesized Probe
  source 1..120: mol_type = other DNA
agatccactatcagagccaatggcagcatcggcagcactctagagctatttctacttgattctaaacctagatttatactatgtgtagccagctagaaatacagatctcactgtagaaaa

SEQ ID NO: 2171 - DNA, 120 bp, synthetic construct
  misc_feature 1..120: note = Artificially Synthesized Probe
  source 1..120: mol_type = other DNA
atgctggattaaagattggttctgaccaattcacagagtataggatgcccacaggaggaaagctgaatatttagcatggtgtaagtctcatgggacttggccactgtcacaggctaactg

SEQ ID NO: 2172 - DNA, 120 bp, synthetic construct
  misc_feature 1..120: note = Artificially Synthesized Probe
  source 1..120: mol_type = other DNA
tcccttctgacttcaaatacctaaagcccctcatatctggaagcagagacctgaaaaagtcatcatttctttttttaaaaggagaaagggagagggaggctaacacacatacacttattc

SEQ ID NO: 2173 - DNA, 120 bp, synthetic construct
  misc_feature 1..120: note = Artificially Synthesized Probe
  source 1..120: mol_type = other DNA
taaagcctaatttataaatggaaataagaagtttctaatttcccccaagcagatgccactctccttgaactaaaatcaccttgggattgcagtggagtccagcatgaagatgcggttttc

SEQ ID NO: 2174 - DNA, 120 bp, synthetic construct
  misc_feature 1..120: note = Artificially Synthesized Probe
  source 1..120: mol_type = other DNA
ttattggtttcactatctcttgctttttctcttctccctccaatactcaatcttcctgtccatatatttatttctttccttccttccccacctcctttcttctccttcagagacctatcc

SEQ ID NO: 2175 - DNA, 120 bp, synthetic construct
  misc_feature 1..120: note = Artificially Synthesized Probe
  source 1..120: mol_type = other DNA
agttcgaggctcagcacagatctcagtattactaccaatcacagcacttagaagtacctaaaatcaaacaaatgcacaaacagaagaattcctcccccttgcacagttttctgactattt

SEQ ID NO: 2176 - DNA, 120 bp, synthetic construct
  misc_feature 1..120: note = Artificially Synthesized Probe
  source 1..120: mol_type = other DNA
tattacagatgctcattgcggtgcacttttaaaatttatcgtggactccaagcttgttaacaaagatttgccattcgctcctggctaatttcaaggttaacataatctgcttttctgcgg

SEQ ID NO: 2177 - DNA, 120 bp, synthetic construct
  misc_feature 1..120: note = Artificially Synthesized Probe
  source 1..120: mol_type = other DNA
atttattattgaacagagtcaattttttcttctgaatcatttttcaaacctctcatagctcaggcctctctgatgggagctctgacatgaagccaaaacacctcttccagacacagagag

SEQ ID NO: 2178 - DNA, 120 bp, synthetic construct
  misc_feature 1..120: note = Artificially Synthesized Probe
  source 1..120: mol_type = other DNA
aagatggagacgtatttgattttcagttgtaagatccagttaaacaagggaattcactggagaaggaaatcgagtctttccctgtcctctggcattggattacttcccagtatgcttaag

SEQ ID NO: 2179 - DNA, 120 bp, synthetic construct
  misc_feature 1..120: note = Artificially Synthesized Probe
  source 1..120: mol_type = other DNA
ccttttctcagtactttaaaatatcatccgtatactgttgaccccaccatttagatctacagccccagttctctcctgaaatccagactcgaacatccattcaatatctaacggacaact

SEQ ID NO: 2180 - DNA, 120 bp, synthetic construct
  misc_feature 1..120: note = Artificially Synthesized Probe
  source 1..120: mol_type = other DNA
tcagctctaaattttctgggctatttaaacttagggctgacttactttccagaaagacaaaaccaatttacattcagcagtttttgagagactctaattcattgtgttctcaccacactg

SEQ ID NO: 2181 - DNA, 120 bp, synthetic construct
  misc_feature 1..120: note = Artificially Synthesized Probe
  source 1..120: mol_type = other DNA
tttaggctgcagttcaggttggcagaattatgcctatggccaaatgtgtttgtatgcactcacacacagtgtgtgcacatgcgggaaagcaagtctagcaaaatttattttatctattta

SEQ ID NO: 2182 - DNA, 120 bp, synthetic construct
  misc_feature 1..120: note = Artificially Synthesized Probe
  source 1..120: mol_type = other DNA
atgtcatttagccgcgctcacagccagtgattcacagagcttctcgccaactccttcaaccccaactgcagcttgagaatgaggcgctgttattattcccattagaaaaaaaaatgggaa

SEQ ID NO: 2183 - DNA, 120 bp, synthetic construct
  misc_feature 1..120: note = Artificially Synthesized Probe
  source 1..120: mol_type = other DNA
cccacttccttcttcctaaatatttctctctgatttcattcgcaagagaaatctgcctaattatagatggatagagatactgaatagtctcactgccctctttttcttctccctggctct

SEQ ID NO: 2184 - DNA, 120 bp, synthetic construct
  misc_feature 1..120: note = Artificially Synthesized Probe
  source 1..120: mol_type = other DNA
aaaaccccaccatttttattataaaattatcaaacacacataagagtggaatagtagaatgagcctctgtgcacctgtcgcacaacatcaacgatgatcagctcacggctcttcctgttt

SEQ ID NO: 2185 - DNA, 120 bp, synthetic construct
  misc_feature 1..120: note = Artificially Synthesized Probe
  source 1..120: mol_type = other DNA
tctttacttttctacatgttgaaacaggaagagttgtcctggaaaatagtcctggggtcccccttcagaagaaaagcagttggtgagaagtgaagcgctataacattatgggttgaaatg

SEQ ID NO: 2186 - DNA, 120 bp, synthetic construct
  misc_feature 1..120: note = Artificially Synthesized Probe
  source 1..120: mol_type = other DNA
tactgttaaaaggatattactctgagaggggtgacaaattaaacctctgcctacctggaatgccttaatatgaaattatcaggttactctccctcctctatcaggacccttagagaaaat

SEQ ID NO: 2187 - DNA, 120 bp, synthetic construct
  misc_feature 1..120: note = Artificially Synthesized Probe
  source 1..120: mol_type = other DNA
tgagtacctaacatggcaaagggccttcggaacatgaagaatagcagagataagaatgttaagcttagaaaagacttgaggactttaaagctgctttcctatttgaaaggctgtctcatg

SEQ ID NO: 2188 - DNA, 120 bp, synthetic construct
  misc_feature 1..120: note = Artificially Synthesized Probe
  source 1..120: mol_type = other DNA
cacgtgaaaatgcagactggagggaaacaggtggcactggttatggttactctggggatgtggatgagaaattgtttgtttctgtattcttttctgtactttcagagttttctaaattac

SEQ ID NO: 2189 - DNA, 120 bp, synthetic construct
  misc_feature 1..120: note = Artificially Synthesized Probe
  source 1..120: mol_type = other DNA
gagagaaagaaacagttttctcactttgagcatttcagtgtttggtttagagagctgctgaggtcttggcagggcgatgaaaatgggaaaccgtttagaaagtggaataaaaataaaaag

SEQ ID NO: 2190 - DNA, 120 bp, synthetic construct
  misc_feature 1..120: note = Artificially Synthesized Probe
  source 1..120: mol_type = other DNA
aaacaggtagagtcaaacttatacctatattaaaatcatttttactcatttgctttccaaaagatttcatgacgcaggggagaaagttgggagcagagggaggatgggttcatacaagcc

SEQ ID NO: 2191 - DNA, 120 bp, synthetic construct
  misc_feature 1..120: note = Artificially Synthesized Probe
  source 1..120: mol_type = other DNA
tttctttttaccctctggacaactcttagaaggaggctcaacctctgaactgtctcagcatgaatgagaggtcttctaggtcctgtgaaaagttctctggcctgaggatgaccatgaacc

SEQ ID NO: 2192 - DNA, 120 bp, synthetic construct
  misc_feature 1..120: note = Artificially Synthesized Probe
  source 1..120: mol_type = other DNA
cccctccctaccctgctttcccaccaaccttgaagattctgatattttgttaaaaattcatgctagtttttcccacaagggagctggaatttattatcatctcctatgttcctaacactg

SEQ ID NO: 2193 - DNA, 120 bp, synthetic construct
  misc_feature 1..120: note = Artificially Synthesized Probe
  source 1..120: mol_type = other DNA
tgagatcacagctctctcaagcctcattcctcgtgccccacacaggcagagtcttgagtcctccctttgttcctttcttgtttctctgggggtaatttggccttttagagaccacttcct

SEQ ID NO: 2194 - DNA, 120 bp, synthetic construct
  misc_feature 1..120: note = Artificially Synthesized Probe
  source 1..120: mol_type = other DNA
ctcatggatgcagatggcatggactccttcacttggttacaacccacactcacctggggtcttttctgccttctgtggacctattggaagatctaaggggggcatttgaaaatgaaaagg

SEQ ID NO: 2195 - DNA, 120 bp, synthetic construct
  misc_feature 1..120: note = Artificially Synthesized Probe
  source 1..120: mol_type = other DNA
aaagaaattagcaacatggaaaagtgagtggaaagaaaacatgttttcatcacaagatcaagaaactggtttggttcttgcaccagccccctcggttgtcaaatgagaagtcaaattcag

SEQ ID NO: 2196 - DNA, 120 bp, synthetic construct
  misc_feature 1..120: note = Artificially Synthesized Probe
  source 1..120: mol_type = other DNA
aacaaacaaaagaaaaaacgaagaaagaaaaggcagctccatggcaggcaggttcaggccagctgatgccccttcctccaggtgggcatccctggacccacactgccagggagcaggtac

SEQ ID NO: 2197 - DNA, 120 bp, synthetic construct
  misc_feature 1..120: note = Artificially Synthesized Probe
  source 1..120: mol_type = other DNA
ttctagctgtgttcccctgaggaactcattcaaactcagtttctccagctatcacatggaaataacaattgttaccccaaaaggtttgttaaaggcacaaatgagatgataatatgagca

SEQ ID NO: 2198 - DNA, 120 bp, synthetic construct
  misc_feature 1..120: note = Artificially Synthesized Probe
  source 1..120: mol_type = other DNA
aagagggaagtgtcacagtggaataaaaatgaaagagataaaggagagttcctagaaggatccaaccccccttccccaccccaaactctgcttataggttcttatatgataatttaaact

SEQ ID NO: 2199 - DNA, 120 bp, synthetic construct
  misc_feature 1..120: note = Artificially Synthesized Probe
  source 1..120: mol_type = other DNA
ctctgcctgcaaagcttctccaccttccccgtcatctgacctcatctttcttaatttttcttctctcattctttctatcttcccctctctatctctttcttcctttagaaattatatttg

SEQ ID NO: 2200 - DNA, 120 bp, synthetic construct
  misc_feature 1..120: note = Artificially Synthesized Probe
  source 1..120: mol_type = other DNA
ttctatatttacaatttttgaaatcctagttttggcacgtcttgcctcttaaaaaatttatatcaccctttactcgttggaatggctacttgtttaaaaaacagaaaatcacaagtgttg

SEQ ID NO: 2201 - DNA, 120 bp, synthetic construct
  misc_feature 1..120: note = Artificially Synthesized Probe
  source 1..120: mol_type = other DNA
ccttgcctctctattattctcccactggctgttgcttatttttgttagtccaatattttccactgctctcagagacaaaggtaggcaacagtttgcaaaatttagacgcttatgtgtgca

SEQ ID NO: 2202 - DNA, 120 bp, synthetic construct
  misc_feature 1..120: note = Artificially Synthesized Probe
  source 1..120: mol_type = other DNA
tcctttttccttctccatctgttcctttctgcttctcagaataagcatctctatccttagcttcaaatcataaacaacttagaaacagttacttagctgagtactgtctctgtgccaggc

SEQ ID NO: 2203 - DNA, 120 bp, synthetic construct
  misc_feature 1..120: note = Artificially Synthesized Probe
  source 1..120: mol_type = other DNA
agcaaaacctctgtcaacaaatagaggatttgtttaatcttttctgaaagagtccgatgttatctaagtgaggactggccaggtaattggaacgttctagagactgttgggttgacttgg

SEQ ID NO: 2204 - DNA, 120 bp, synthetic construct
  misc_feature 1..120: note = Artificially Synthesized Probe
  source 1..120: mol_type = other DNA
cgtaagaaaaagtttccagcaacagcattgtggttagtattgcaggctttggagtgagacagtcctgggtttaaatcttggctgtctacctagtatctatgtggtctacgatatgttaca

SEQ ID NO: 2205 - DNA, 120 bp, synthetic construct
  misc_feature 1..120: note = Artificially Synthesized Probe
  source 1..120: mol_type = other DNA
gcctgtctccgtctttaattgttagttctatatgggatctgggattttgttgctgctgtggttcagtttgttcatgattgtttcaaaagcacctagactgttcctgctacatagtaaata

SEQ ID NO: 2206 - DNA, 120 bp, synthetic construct
  misc_feature 1..120: note = Artificially Synthesized Probe
  source 1..120: mol_type = other DNA
attccaaagaaatagccacaaatgtgagcacagatgtatgcacaggaatgtccacagtgacactattcataatgcgtccaaacatgaagccatctaaatgtctgacaaaagacagtggta

SEQ ID NO: 2207 - DNA, 120 bp, synthetic construct
  misc_feature 1..120: note = Artificially Synthesized Probe
  source 1..120: mol_type = other DNA
tcactgcagctcacagacttcggttgtctttcacaccccaggtaagatcaactgctaaaaccaacaatgccttgacatccttctacatgaatccacatcttcctaacatctattttggaa

SEQ ID NO: 2208 - DNA, 120 bp, synthetic construct
  misc_feature 1..120: note = Artificially Synthesized Probe
  source 1..120: mol_type = other DNA
ttttatttctgggaaattgttgctagggttaaactgtatagatttagccacgactgaaggtgtccacatcctgttaagctagatggtgggcattgtgtatttttttccagctgcccttat

SEQ ID NO: 2209 - DNA, 120 bp, synthetic construct
  misc_feature 1..120: note = Artificially Synthesized Probe
  source 1..120: mol_type = other DNA
gcactaaaatgagaatgctcaggatgattaggtggagagcatttatgatgcagctttccattctccatgtgatgaaaacttgacatgacccaatgctttattgtcctacagtaattcctg

SEQ ID NO: 2210 - DNA, 120 bp, synthetic construct
  misc_feature 1..120: note = Artificially Synthesized Probe
  source 1..120: mol_type = other DNA
tggggagaggcttacagactcattttcaaacagagatggaaaactgggagtcagaagaggtggaggtatatatggacccagccatccgacttctgatcctattgttcttttttttttttt

SEQ ID NO: 2211 - DNA, 120 bp, synthetic construct
  misc_feature 1..120: note = Artificially Synthesized Probe
  source 1..120: mol_type = other DNA
aaacaactcccccagatagtcttggaagaagctgggaggcatattcttagatttaagcaagaaattacaatgttgactcaaatcaggatttttgcaagggacttgttacactgtgctagg

SEQ ID NO: 2212 - DNA, 120 bp, synthetic construct
  misc_feature 1..120: note = Artificially Synthesized Probe
  source 1..120: mol_type = other DNA
ttctcataacttcctcttagagccctcactctgtattctgcaggtcacttaataggtgttccctgaaaaaccagatgccaagaggggtgaaattaatttccattgcattgcataactcta

SEQ ID NO: 2213 - DNA, 120 bp, synthetic construct
  misc_feature 1..120: note = Artificially Synthesized Probe
  source 1..120: mol_type = other DNA
tcctctagaaatgtgagtactttgagagcagcaactgtaatgcagccgctgacatacaatcgcttgctcagaaaatacactgaaagtgaattaatgcgcagctatgttctgcattttatt

SEQ ID NO: 2214 - DNA, 120 bp, synthetic construct
  misc_feature 1..120: note = Artificially Synthesized Probe
  source 1..120: mol_type = other DNA
cctagcgatcaatcttgcctaccttttgggatctcatccgttggtgaacaactgacaggaaaatctgggcacgtctctatttttgaaaagttaatatatctgtcgattctacaaaaatcc

SEQ ID NO: 2215 - DNA, 120 bp, synthetic construct
  misc_feature 1..120: note = Artificially Synthesized Probe
  source 1..120: mol_type = other DNA
atctgtattatttttctctagggccatcatttctcccctggtaaaatccagaagtggaacttgaaggtatctataatactttccaggtcaaatattccgagattctgacataccagccca

SEQ ID NO: 2216 - DNA, 120 bp, synthetic construct
  misc_feature 1..120: note = Artificially Synthesized Probe
  source 1..120: mol_type = other DNA
cctgaattttttttttttttaaccttcaaagagaaggaatggtgattggagagagagatgatgacccagggtcaaagttggtagagaaagaccatgggtttgaaggactctacagggaaa

SEQ ID NO: 2217 - DNA, 120 bp, synthetic construct
  misc_feature 1..120: note = Artificially Synthesized Probe
  source 1..120: mol_type = other DNA
agactttgtgtttacagccatagctaaaaactaacagatgtgtcttccaaaccgacaaaatcaagaaattgtcatgaagatcaaaaatggcttccaaaatcttaccctccgtgtcctccc

SEQ ID NO: 2218 - DNA, 120 bp, synthetic construct
  misc_feature 1..120: note = Artificially Synthesized Probe
  source 1..120: mol_type = other DNA
actgttggtttgatttggggcacatgagaggtgcttggtaaatatttactcaattggtaagtcaagtggcctgtcagatggtttaaataatcagatattaaaaatcatggctgggcgcgg

SEQ ID NO: 2219 - DNA, 120 bp, synthetic construct
  misc_feature 1..120: note = Artificially Synthesized Probe
  source 1..120: mol_type = other DNA
gagttgaagtaatgtttgcccttccttctatggagctgtcctgctgccaccaaactcctcctaaacacacacaccatacatacaaaatcactcactgctgcacataaaaacacatccctg

SEQ ID NO: 2220 - DNA, 120 bp, synthetic construct
  misc_feature 1..120: note = Artificially Synthesized Probe
  source 1..120: mol_type = other DNA
tcaacagcacaaggatttgcactacctgcaccgagcctgcaggtgaaccccaggctaaaatatgacgtaaataattgtgaatagattatagacatttgtcattcaaagataactctccca

SEQ ID NO: 2221 - DNA, 120 bp, synthetic construct
  misc_feature 1..120: note = Artificially Synthesized Probe
  source 1..120: mol_type = other DNA
ctatttatttttttctccttgagcctgaaaattagttgctgagtagcacaaatcaaaacaggcaagcaaagtggacagtgcaaacgcctaacattttcaccactgcaatttggctgcttc

SEQ ID NO: 2222 - DNA, 120 bp, synthetic construct
  misc_feature 1..120: note = Artificially Synthesized Probe
  source 1..120: mol_type = other DNA
agaggagacacaaaggcttggagatggtaacagagagttagagaaacattttctttccttgatgggattgttttcaacagaagtctagagcatcctgcaaaatgctgttttactttaacc

SEQ ID NO: 2223 - DNA, 120 bp, synthetic construct
  misc_feature 1..120: note = Artificially Synthesized Probe
  source 1..120: mol_type = other DNA
agtggaaatttcatatggtccaaccagaaaactttaataatggcagggttttatcttaaaccatccttacaactcatttcaaataattctaatcactcaaactgccctgtcccctccact

SEQ ID NO: 2224 - DNA, 120 bp, synthetic construct
  misc_feature 1..120: note = Artificially Synthesized Probe
  source 1..120: mol_type = other DNA
ggctagtaagcctgagaaacgctaaaattgaaaaatgaaatagctcatttggatgagcagagctaggcgattggagggcgaaacaatctgatggtgaaaatgccattgatgaaaaatttg

SEQ ID NO: 2225 - DNA, 120 bp, synthetic construct
  misc_feature 1..120: note = Artificially Synthesized Probe
  source 1..120: mol_type = other DNA
caacagatggagaaaatgcccactgctgctttataacatattgaaagcaaatgaagaatcccagccatgggtttccatctcctgttttgagaacaagaagacagtccgagatgtaataat

SEQ ID NO: 2226 - DNA, 120 bp, synthetic construct
  misc_feature 1..120: note = Artificially Synthesized Probe
  source 1..120: mol_type = other DNA
ttgtctattagctttatctaaaatagctaaaatatcagtctccatagaggcaaagtaagtggcactgagaagcaaaaaatccagccaatgtgcagttttctcctcctgccccctatttgt

SEQ ID NO: 2227 - DNA, 120 bp, synthetic construct
  misc_feature 1..120: note = Artificially Synthesized Probe
  source 1..120: mol_type = other DNA
attttccgatcctgtccagcttctgtgaaacactccctctccgtttctctaccctgggcctgcctcggttgctctcttgcttccttcttccttcctctcttatcactcgaaaaatctgta

SEQ ID NO: 2228 - DNA, 120 bp, synthetic construct
  misc_feature 1..120: note = Artificially Synthesized Probe
  source 1..120: mol_type = other DNA
aggcttgcactgagcaccgctgtggggaacagatggacagaggagtaaggagggggaaggcaagagcccccacacccaccaagctccatacacatggggatgggagttctgcagctcatc

SEQ ID NO: 2229 - DNA, 120 bp, synthetic construct
  misc_feature 1..120: note = Artificially Synthesized Probe
  source 1..120: mol_type = other DNA
gttagccaccgtgcccggccttttttaaatttttttgagacagagttttgctgtcacccagactggtgtgcagtggcccaatctcagctcactgcaacctctgcctcccaggttcaagcg

SEQ ID NO: 2230 - DNA, 120 bp, synthetic construct
  misc_feature 1..120: note = Artificially Synthesized Probe
  source 1..120: mol_type = other DNA
gctccgccccctgcaactgttaactccactttctaaggacaggcctccctgcaagctcttcccctgagaccccactagctctaccttcctacaagcccactttattctatttgtttgttt

SEQ ID NO: 2231 - DNA, 120 bp, synthetic construct
  misc_feature 1..120: note = Artificially Synthesized Probe
  source 1..120: mol_type = other DNA
ctgcgagatggatgcaaatgaagcctgggaagctggaggctggacctttctccaagagcacagtagtcactggctgtgatccgcaggagacaggcgaagtcccgggatataggaaccaca

SEQ ID NO: 2232 - DNA, 120 bp, synthetic construct
  misc_feature 1..120: note = Artificially Synthesized Probe
  source 1..120: mol_type = other DNA
acaccctgtgttttcccctcaattttcagatctcagctgatttcctgggagggttctcatgtccctcttggagacctaggaagcactgcctcccatgtctaacaactgtccttaaagccc

SEQ ID NO: 2233 - DNA, 120 bp, synthetic construct
  misc_feature 1..120: note = Artificially Synthesized Probe
  source 1..120: mol_type = other DNA
cgggagtgtgtatccctctgcaaagtggacagtagagcacagcagtccccgcctcatagggtgtaagcctgacaggagttacagtgaccagtgactttctctcctggcctcagtttcctc

SEQ ID NO: 2234 - DNA, 120 bp, synthetic construct
  misc_feature 1..120: note = Artificially Synthesized Probe
  source 1..120: mol_type = other DNA
agcctgctaagagctttcctgaccacgctggtatgaagggcggcttggaggtgacaatgggggacgacagggcacagcaggtgtggagacggtgtgcagggccggagcaaaaccgttaaa

SEQ ID NO: 2235 - DNA, 120 bp, synthetic construct
  misc_feature 1..120: note = Artificially Synthesized Probe
  source 1..120: mol_type = other DNA
gctgggaagtatattttaaatctgggtagctaagagctcagctaaaaattgagggttctattaccaagaaggagaaaatagactttggggacagctaaagcgatagctgagatctgaaga

SEQ ID NO: 2236 - DNA, 120 bp, synthetic construct
  misc_feature 1..120: note = Artificially Synthesized Probe
  source 1..120: mol_type = other DNA
agtacggtgtgtcatgaaatgagaagtagcacacagtactatatgctacagatgaagtacaatgctgtcaaataggggtacttgtgttaattgttggagtcgcaagctgaactagagttt

SEQ ID NO: 2237 - DNA, 120 bp, synthetic construct
  misc_feature 1..120: note = Artificially Synthesized Probe
  source 1..120: mol_type = other DNA
atggaatctttcttgccatctttttcttgccgcttaacagtggcagtgacagtttgactcctgatttaagcctgattctgcttaactttttcccttgactttggcattttcactttgaca

SEQ ID NO: 2238 - DNA, 120 bp, synthetic construct
  misc_feature 1..120: note = Artificially Synthesized Probe
  source 1..120: mol_type = other DNA
aactgagcttttgcgtatgaattgccctaaaagttgcagatacatatctttagataaatatgtcatttaagaaacggattcgaaaagaattggtggtaggggtctcatgaggccgggaga

SEQ ID NO: 2239 - DNA, 120 bp, synthetic construct
  misc_feature 1..120: note = Artificially Synthesized Probe
  source 1..120: mol_type = other DNA
tcagatgaaagagcccctgaggacagcgttagagacactcgggagatgatttccctctttcaatgtgggagcacttacataggagaggtctatatctagataaaaactcctcccaccact

SEQ ID NO: 2240 - DNA, 120 bp, synthetic construct
  misc_feature 1..120: note = Artificially Synthesized Probe
  source 1..120: mol_type = other DNA
gtgttgccattttggtctcttctctttctcagtctctctttgcctcactttggatctatgctctgtgcatctgtcttgcttctcagaatttcttcttttcctctttttttgtactaccct

SEQ ID NO: 2241 - DNA, 120 bp, synthetic construct
  misc_feature 1..120: note = Artificially Synthesized Probe
  source 1..120: mol_type = other DNA
taaacacttcaccatcactggtggctagtctcccttcctcctttttcagaaacctccttcctgacctcttttcttcctacttccccggtttaaacaaaattgtatctatctatcatctat

SEQ ID NO: 2242 - DNA, 120 bp, synthetic construct
  misc_feature 1..120: note = Artificially Synthesized Probe
  source 1..120: mol_type = other DNA
ctccaactcctgacctaaagtgatccacccaccttggtttcccaaagtgctgggattacaggcgtgagccaccgtgcctggacatatatctatcttttttttttttgagatggagtctcg

SEQ ID NO: 2243 - DNA, 120 bp, synthetic construct
  misc_feature 1..120: note = Artificially Synthesized Probe
  source 1..120: mol_type = other DNA
tggttcaagagattgtagaaagggggttattcacataggttaagggaatcaatcaatttgaagcacagacactattaacagcaggaagagtcctgaagaagtgaaaatggtgtttctgga

SEQ ID NO: 2244 - DNA, 120 bp, synthetic construct
  misc_feature 1..120: note = Artificially Synthesized Probe
  source 1..120: mol_type = other DNA
aattaatatggtgaatagagaaagaagaaatcagtgactttcgctcctccatacaattcaatttggcttaagttagccaaagccataccaagtcctctctctatgtctcagctgctgcca

SEQ ID NO: 2245 - DNA, 120 bp, synthetic construct
  misc_feature 1..120: note = Artificially Synthesized Probe
  source 1..120: mol_type = other DNA
tcagaatggggacacctctcccctttcctctccatctaacttatggttttcaaacttgagcgtgatcagttacctggagatttgtgaaaacccagatgactagacccacccccagtttct

SEQ ID NO: 2246 - DNA, 120 bp, synthetic construct
  misc_feature 1..120: note = Artificially Synthesized Probe
  source 1..120: mol_type = other DNA
tctcctgcctcagcctcccgagtagctgggactacaggcgcccgccaccacgcccggctaatttttttgtatttttttagtagagatggggtttcaccgtgttcaccaggatggtctcga

SEQ ID NO: 2247 - DNA, 120 bp, synthetic construct
  misc_feature 1..120: note = Artificially Synthesized Probe
  source 1..120: mol_type = other DNA
agcatcactttgctatatttcatggccttttctatgtgttttttttctctttttcctcaagctgcctaagctttagccagcatgtgccttttggttgacaggtgggttgcttagtttctt

SEQ ID NO: 2248 - DNA, 120 bp, synthetic construct
  misc_feature 1..120: note = Artificially Synthesized Probe
  source 1..120: mol_type = other DNA
gggcttgggttgacagaaactcagtggcattcttatccagagtttctctacaccaactgctggtggcccagggaaaggtggtatgtgaatttcaatattttaatatttaatattcatgaa

SEQ ID NO: 2249 - DNA, 120 bp, synthetic construct
  misc_feature 1..120: note = Artificially Synthesized Probe
  source 1..120: mol_type = other DNA
agttcaagaccagtctggccaacatggtgaaacccggtctctactaaaaatacaaaaattagccaggtgtgggggtgcagtcctgtacttccagctactcaggaggctgaggcaggagac

SEQ ID NO: 2250 - DNA, 120 bp, synthetic construct
  misc_feature 1..120: note = Artificially Synthesized Probe
  source 1..120: mol_type = other DNA
atgagccactgcatgtggcctattttcttccactgttgttcggcgtggagaatattatatacataattacgtaaatgatatcatactgtatataccttttttcctactccttccttaagt

SEQ ID NO: 2251 - DNA, 120 bp, synthetic construct
  misc_feature 1..120: note = Artificially Synthesized Probe
  source 1..120: mol_type = other DNA
agccaccgcactcggcctagactaactatttaaagtaatctggcaatgtttaacgaatacaaaactctaaaacccttggacctaataatagctattttggaaagtctacttgacagaaat

SEQ ID NO: 2252 - DNA, 120 bp, synthetic construct
  misc_feature 1..120: note = Artificially Synthesized Probe
  source 1..120: mol_type = other DNA
tgcaggaataagacaaagatgtctgctcttactactcttattcaacataatactgcaatcccttgccagtgcaataaggcaagaaaaatgaaataaaaggaaaactgatcagaaagaaag

SEQ ID NO: 2253 - DNA, 120 bp, synthetic construct
  misc_feature 1..120: note = Artificially Synthesized Probe
  source 1..120: mol_type = other DNA
atctaaaaaacatgcgtagggccaggtgcagtggctcatgcctgtaatcccagcactttgggaagttgaggctggcggatcacttgaagtcgggagtttgagaccagcctggccaacatg

SEQ ID NO: 2254 - DNA, 120 bp, synthetic construct
  misc_feature 1..120: note = Artificially Synthesized Probe
  source 1..120: mol_type = other DNA
ttcacaatccacatacttagcaaaggactggtatctagaatatgataaacaactctcaaaactcaaaaccaaaaaaatgaacaattcaattagaaaacaggccgaaaaggacatacagtt

SEQ ID NO: 2255 - DNA, 120 bp, synthetic construct
  misc_feature 1..120: note = Artificially Synthesized Probe
  source 1..120: mol_type = other DNA
ggaaggggtatggctacaaaaagcaacaaccttatggcgccggaaatgttctgtattctgattgtgtcaatgtgagcatactggttgagatatagtgctacagttttgcaagttattacc

SEQ ID NO: 2256 - DNA, 120 bp, synthetic construct
  misc_feature 1..120: note = Artificially Synthesized Probe
  source 1..120: mol_type = other DNA
aagtttacctttttttttaaatttttcttcttttccttccctactttgtgagataattttcttctttttaaaaagccaagagcttacttctgtaagtaaagattatcttaagacaactta

SEQ ID NO: 2257 - DNA, 120 bp, synthetic construct
  misc_feature 1..120: note = Artificially Synthesized Probe
  source 1..120: mol_type = other DNA
ttgttctcccaatttctgaaacacagagtcatgtttttttctctgcttcaatccctggtttcctatcgtcatcaattatgacctttccttgctttgaaagtgttttgggccgggcatgat

SEQ ID NO: 2258 - DNA, 120 bp, synthetic construct
  misc_feature 1..120: note = Artificially Synthesized Probe
  source 1..120: mol_type = other DNA
ttcatattatcttgccatagctttttcaaagtatgggacagcatggacaagcaggccatggttttcttttgaagagaagcaaggaggcagagttattttaggaggagggttatacatttc

SEQ ID NO: 2259 - DNA, 120 bp, synthetic construct
  misc_feature 1..120: note = Artificially Synthesized Probe
  source 1..120: mol_type = other DNA
ctgtttgctatgtaaatttagcttctaaagccctgttctacagagattttggagcttccactgcacccagaaaatgcacagctaaagagaaaacttcccttggtgatggttattagattt

SEQ ID NO: 2260 - DNA, 120 bp, synthetic construct
  misc_feature 1..120: note = Artificially Synthesized Probe
  source 1..120: mol_type = other DNA
ataattttttttagagacgagggtctcgattggctgcctaggttggtcccagactcctgacgggctgcattttaatcctagctccaccacttacgggagtcaaaattcaaaagatagaaa

SEQ ID NO: 2261 - DNA, 120 bp, synthetic construct
  misc_feature 1..120: note = Artificially Synthesized Probe
  source 1..120: mol_type = other DNA
acaaatagtagactgtttaacatctcgctttattcagttagtgatgtttcttagatacgggtccaaattagtacacaaagcacttcctcattcctctcttacggctgcatagcagtccac

SEQ ID NO: 2262 - DNA, 120 bp, synthetic construct
  misc_feature 1..120: note = Artificially Synthesized Probe
  source 1..120: mol_type = other DNA
aaggatatgattttatttgtatttgtgagctactgtcccagccaggtaaatggatatgatgagacctccttgccagaccgggtttctctgattagaacgaggagcagatgttgcaggaaa

SEQ ID NO: 2263 - DNA, 120 bp, synthetic construct
  misc_feature 1..120: note = Artificially Synthesized Probe
  source 1..120: mol_type = other DNA
gttactaaacctctctgcaccttggtttcagcctctgtgaaatggggatgatgttaactgccatagtgactacctcgtattaagttgaggactgatatacgtaaggcactgaaaatggtg

SEQ ID NO: 2264 - DNA, 120 bp, synthetic construct
  misc_feature 1..120: note = Artificially Synthesized Probe
  source 1..120: mol_type = other DNA
tctgggtttggggctggttttgaactgagacatccatgagccagcctggggctggcttcactgaagatccccaaagcacttgggctaagaaccagggttccagttcttcctataaccaac

SEQ ID NO: 2265 - DNA, 120 bp, synthetic construct
  misc_feature 1..120: note = Artificially Synthesized Probe
  source 1..120: mol_type = other DNA
gattcaaatccaataccactggaccccaaacgctgtttttcctcgtaggactgcatgaaaacctgctctaaaaggctaaaagaaggtcacccatatagagtatcattttaattgttctac

SEQ ID NO: 2266 - DNA, 120 bp, synthetic construct
  misc_feature 1..120: note = Artificially Synthesized Probe
  source 1..120: mol_type = other DNA
cccacacactgtcgtacacgtacactcacacacttatacactcacatccgcacacgcattattcacacatgtgcacacacgcgcgcgcacatgcatgcagtcacgcacacacattcatac

SEQ ID NO: 2267 - DNA, 120 bp, synthetic construct
  misc_feature 1..120: note = Artificially Synthesized Probe
  source 1..120: mol_type = other DNA
ttgagtgttgctctctagtttccagaggcttaatcacaccgtcctccacgccatttccttttccttcaagcctagcccttctctcattatttctctctgaccctctccccactgctcatt

SEQ ID NO: 2268 - DNA, 120 bp, synthetic construct
  misc_feature 1..120: note = Artificially Synthesized Probe
  source 1..120: mol_type = other DNA
catcctctgtctatttgagacttagaaaaatcctacaaggctggcagtgacagaactaagatgatcatctccagtttatagaccagaaccagagctcagagaggctagatgattgattac

SEQ ID NO: 2269 - DNA, 120 bp, synthetic construct
  misc_feature 1..120: note = Artificially Synthesized Probe
  source 1..120: mol_type = other DNA
atgctgcaaacttgcatgtcatctctttcaggtgtggcatttcaagggggcttgtgtcttgaaaacagcaactgtgaggacacttgatagtcatttccttcagttctgcttttgtctccc

SEQ ID NO: 2270 - DNA, 120 bp, synthetic construct
  misc_feature 1..120: note = Artificially Synthesized Probe
  source 1..120: mol_type = other DNA
cacgtcacactccagctaattgaagacatttaccaccctgagtaggtcctgctgcttcattaagagtttttcttcctaacactgtacctcttgaacgaactagtagagaaaataaacaat

SEQ ID NO: 2271 - DNA, 120 bp, synthetic construct
  misc_feature 1..120: note = Artificially Synthesized Probe
  source 1..120: mol_type = other DNA
cttgggtcttctgactacaaatccaatgatgacccttccacttgaccatgcctctctagattcacatttgtgggcaatctgtttacagatgtaaatactttatgtatacaatttgtgggc

SEQ ID NO: 2272 - DNA, 120 bp, synthetic construct
  misc_feature 1..120: note = Artificially Synthesized Probe
  source 1..120: mol_type = other DNA
ggtactgttgtggaatatgagtgccgtccaggttacagaagagaaccttctctatcaccaaaactaacttgccttcagaatttaaaatggtccacagcagtcgaattttgtaaaagtgag

SEQ ID NO: 2273 - DNA, 120 bp, synthetic construct
  misc_feature 1..120: note = Artificially Synthesized Probe
  source 1..120: mol_type = other DNA
tttgtattctattctagagaaatcatgccctaatccgggagaaatacgaaatggtcagattgatgtaccaggtggcatattatttggtgcaaccatctccttctcatgtaacacagggta

SEQ ID NO: 2274 - DNA, 120 bp, synthetic construct
  misc_feature 1..120: note = Artificially Synthesized Probe
  source 1..120: mol_type = other DNA
gtgacccgttgccagagtgcagaggtaagagttaaaaaatctaagcactcagattgtgaggctgagtactcaatgataaattaatttctgccccttaagaatattagcacagtgtgtatt

SEQ ID NO: 2275 - DNA, 120 bp, synthetic construct
  misc_feature 1..120: note = Artificially Synthesized Probe
  source 1..120: mol_type = other DNA
cattgctacccagtagcacctttcccattttcgttgtccagtaagagacattgtaaatgatagtaaattaaagatagaaaacaaggaaaagctgggccatatcttttgtttgacccaggc

SEQ ID NO: 2276 - DNA, 120 bp, synthetic construct
  misc_feature 1..120: note = Artificially Synthesized Probe
  source 1..120: mol_type = other DNA
ttcaaacttgtgttttgctctccatctgtatatttctagcatagtttattattcctcctgtggactattgcaattagggccacccctaacattttcagggcccaggcaagaatataaatg

SEQ ID NO: 2277 - DNA, 120 bp, synthetic construct
  misc_feature 1..120: note = Artificially Synthesized Probe
  source 1..120: mol_type = other DNA
tgccccttctttacttagctatattttccttactaagagttagttccctagcccatcagaaagattcccaggctggctacttcgggatgacccttgcattttttattgaaatcatttctg

SEQ ID NO: 2278 - DNA, 120 bp, synthetic construct
  misc_feature 1..120: note = Artificially Synthesized Probe
  source 1..120: mol_type = other DNA
gcatggtacatattaggtttaaactcaagttctatttccctgcccaagtcttctctgactacactgctttcatctctaaaatcctgcagcattcacttttcctagcaccgttttgatatg

SEQ ID NO: 2279 - DNA, 120 bp, synthetic construct
  misc_feature 1..120: note = Artificially Synthesized Probe
  source 1..120: mol_type = other DNA
agggagaatcttagattgaaggctctagatagtgatcatacctgttgcaacaactgggaaactcttgccatctgttgacttcactgaattaacattcaattcttttctgcctccagaatt

SEQ ID NO: 2280 - DNA, 120 bp, synthetic construct
  misc_feature 1..120: note = Artificially Synthesized Probe
  source 1..120: mol_type = other DNA
agattaccaaaaaattatattttttaaggcataagatacagctgtggaagcaacaaggtctgaatgaactaaaattcctgggggcaggtggtgaaggcaacccatcctgatgtaaggcag

SEQ ID NO: 2281 - DNA, 120 bp, synthetic construct
  misc_feature 1..120: note = Artificially Synthesized Probe
  source 1..120: mol_type = other DNA
tctgaaattaagaacacaatagataggtttagctattcaggcagagcaggaaacagtattaggaactgaaagatcggttaaaaatacccaaactgatgcacaaagagaaaaaggaatgtg

SEQ ID NO: 2282 - DNA, 120 bp, synthetic construct
  misc_feature 1..120: note = Artificially Synthesized Probe
  source 1..120: mol_type = other DNA
taatgtcctgtggggtctgaattatacatagaatacaaatgcacaataacaatgcgaaaggcagaaagaggtaaattcatttaaaggttacacagttctagcagtactgaaaaggtggta

SEQ ID NO: 2283 - DNA, 120 bp, synthetic construct
  misc_feature 1..120: note = Artificially Synthesized Probe
  source 1..120: mol_type = other DNA
gatggggctggcaacagtcatcctggatgatgtaatctcttgcttcagggacagacactgtgaaatagcttactcaattatttcccttaatccttcctcaataataattactcaatctgt

SEQ ID NO: 2284 - DNA, 120 bp, synthetic construct
  misc_feature 1..120: note = Artificially Synthesized Probe
  source 1..120: mol_type = other DNA
taaatgttccaactacagaagtctcaccaacttctcagaaaaccaccacaaaaaccaccacaccaaatgctcaaggtacagagactccatcagttcttcaaaaacacaccacagaaaatg

SEQ ID NO: 2285 - DNA, 120 bp, synthetic construct
  misc_feature 1..120: note = Artificially Synthesized Probe
  source 1..120: mol_type = other DNA
tcattgatagagatccatccctcaaagtatgctaaggaatcttcccggattccctagagttgcagatctgctaaagcatctcaatagtgtcgtctaagtaattgaaaatacagagatcct

SEQ ID NO: 2286 - DNA, 120 bp, synthetic construct
  misc_feature 1..120: note = Artificially Synthesized Probe
  source 1..120: mol_type = other DNA
tagagattaattcatccagttcatatccagtgcacagtttaatcctgcactttttctgctgagtaatattgcttgttctaaatggcactcttgagtcaatgtgttcacctcgcttaggag

SEQ ID NO: 2287 - DNA, 120 bp, synthetic construct
  misc_feature 1..120: note = Artificially Synthesized Probe
  source 1..120: mol_type = other DNA
ttaaacgtcactcaaatagggaaaatagtacagtgaatcctcatatactcgctcggattcagcaattttcaactcatggatacccacttcacccacactccctggattatttggaagata

SEQ ID NO: 2288 - DNA, 120 bp, synthetic construct
  misc_feature 1..120: note = Artificially Synthesized Probe
  source 1..120: mol_type = other DNA
gcttcaataaatatgtgaatgcacatatctttttgatatattggttttattttcctttggataaatacccagtagtgggattgctggatcctaagatagttatatttttttatgttttca

SEQ ID NO: 2289 - DNA, 120 bp, synthetic construct
  misc_feature 1..120: note = Artificially Synthesized Probe
  source 1..120: mol_type = other DNA
actcttttggttccacaatcattttaggacttttttttttctatttctgtgaaaaatggcattgatatcttgataggggttgtactgaatctttagattgctttggcagtgtagtcattt

SEQ ID NO: 2290 - DNA, 120 bp, synthetic construct
  misc_feature 1..120: note = Artificially Synthesized Probe
  source 1..120: mol_type = other DNA
agttagggaaagtttcctcctcttcaattttttggaattgtttcaggagaattggtattagttctcttttgtatgtttggtagcatttggctttgaatccatccagtcctgggcttttct

SEQ ID NO: 2291 - DNA, 120 bp, synthetic construct
  misc_feature 1..120: note = Artificially Synthesized Probe
  source 1..120: mol_type = other DNA
tccaatgtttctttgtgaattttttgtccagatgagctaatgctgacagtgggatgttgaagttcttaacaattattgtattggagtctatccctttagattggacaatatttgctttat

SEQ ID NO: 2292 - DNA, 120 bp, synthetic construct
  misc_feature 1..120: note = Artificially Synthesized Probe
  source 1..120: mol_type = other DNA
gcaccgggccagagaagacctttttaaattgtatctacttggtgatctctgagcctcctgtgtcaggatgtctacatttcttgttagacttgagaaattttcctctgttgttttagtaat

SEQ ID NO: 2293 - DNA, 120 bp, synthetic construct
  misc_feature 1..120: note = Artificially Synthesized Probe
  source 1..120: mol_type = other DNA
tagtttctgtatgactttcagctgtaaatatcatcagtggtatctgtcatttcctcagtgctttaggatgcggttactagtggagatttgctagggaataggatgccatgtgggccaatg

SEQ ID NO: 2294 - DNA, 120 bp, synthetic construct
  misc_feature 1..120: note = Artificially Synthesized Probe
  source 1..120: mol_type = other DNA
tctcaaaatagtcttgtgctgtggctgcttaggactcagtggtttatagtactcagtgtgaacttactctctggagtaatgccatcacactgtctccaggcagcttcctatgttagatct

SEQ ID NO: 2295 - DNA, 120 bp, synthetic construct
  misc_feature 1..120: note = Artificially Synthesized Probe
  source 1..120: mol_type = other DNA
ataatatttcatcacccaggtagtgagcttagtacccaataggtagtttattgattctcaccctcctcccaccttccattctcaaataagccctggtggccattgttcccttctttgcat

SEQ ID NO: 2296 - DNA, 120 bp, synthetic construct
  misc_feature 1..120: note = Artificially Synthesized Probe
  source 1..120: mol_type = other DNA
atgtcagaatggtatttcctaggttttcttctagagtttttatacttttaggttttaagtttaattctttaatccatattgagttgatttttgtatatggtgaaaggtaggggtccattt

SEQ ID NO: 2297 - DNA, 120 bp, synthetic construct
  misc_feature 1..120: note = Artificially Synthesized Probe
  source 1..120: mol_type = other DNA
tattgtgaataggattgcattcttgatttggctgtcagcttgacattgttggtgtatagaaatgcttctgatttttgtaccccgaagctttactgatgttgtttaacagttctaaaagct

SEQ ID NO: 2298 - DNA, 120 bp, synthetic construct
  misc_feature 1..120: note = Artificially Synthesized Probe
  source 1..120: mol_type = other DNA
gtttatgtacatagaggtgttcaaaatagtctctgagggtgttttgtatttctgtggggttggtggtaatgtcccctttgtcatctgagattgtgtttatttggatgttctctctcttta

SEQ ID NO: 2299 - DNA, 120 bp, synthetic construct
  misc_feature 1..120: note = Artificially Synthesized Probe
  source 1..120: mol_type = other DNA
tcacctgctcaatggcactcaatgaaggtttgaaatgcctttttttcctgaaattctttaagtattataccctttgattttctagaaaactttccttagtcggcattccagcttgtgtta

SEQ ID NO: 2300 - DNA, 120 bp, synthetic construct
  misc_feature 1..120: note = Artificially Synthesized Probe
  source 1..120: mol_type = other DNA
tccaagcacagtcctaaaagttgaataaatattagcttaaggaagtcactgcatgcaatcactattattttcctaagctggatttctgataatttcatcactccctctggccacaccaaa

SEQ ID NO: 2301 - DNA, 120 bp, synthetic construct
  misc_feature 1..120: note = Artificially Synthesized Probe
  source 1..120: mol_type = other DNA
tgaagaaatacagaggtacagaaaatccaacgatgatggcaagacacttaaagggtcctgtggatgtctctctgaggaagcagagttgaatctgcatttacaaaatggaaaatttaaggg

SEQ ID NO: 2302 - DNA, 120 bp, synthetic construct
  misc_feature 1..120: note = Artificially Synthesized Probe
  source 1..120: mol_type = other DNA
atgagaggtgatcaaatgagataataggtggcaaactgctttgcaatgttttcaacactgcaatacagttctacatgatggggaaccttactaaaatactccttttgtgggggagaaaac

SEQ ID NO: 2303 - DNA, 120 bp, synthetic construct
  misc_feature 1..120: note = Artificially Synthesized Probe
  source 1..120: mol_type = other DNA
gggggctgttggtgaggaaagagagaatgaggatggtgagagaaaagggcaaatgggtgcatttgagaagaaagattgtgtaagctataaaaatgatttgatgttgatcaacttatttga

SEQ ID NO: 2304 - DNA, 120 bp, synthetic construct
  misc_feature 1..120: note = Artificially Synthesized Probe
  source 1..120: mol_type = other DNA
aacatactgtgaaattgcctgtgattagggctttttctcacttatattaatagatgccagtccagctcaaaacagcacagtggttaaggcagcagacaaatgggggaaatatagtaccta

SEQ ID NO: 2305 - DNA, 120 bp, synthetic construct
  misc_feature 1..120: note = Artificially Synthesized Probe
  source 1..120: mol_type = other DNA
gggcagcaagatgtgataagtttaccaggtgctgtctcttggctttcatcagtttctttacatactttggtaaggtgattggctgtgatacttgtatgtcctattaaggacataaagtac

SEQ ID NO: 2306 - DNA, 120 bp, synthetic construct
  misc_feature 1..120: note = Artificially Synthesized Probe
  source 1..120: mol_type = other DNA
tgacatatcgtcagttctggacttggtagcagtaatgcttatcatctcatcctacattttgaactcagtttattgtaacgattagatgctataatgccacaaatattcggggggaaaggg

SEQ ID NO: 2307 - DNA, 120 bp, synthetic construct
  misc_feature 1..120: note = Artificially Synthesized Probe
  source 1..120: mol_type = other DNA
ttttttaattttcagggcacacgtgtttcacgttgacaggtttgcttgggacgctagtaaccatgggcttgctgacttagccaaagaagagttaagaagaaaatacacacaagtatacag

SEQ ID NO: 2308 - DNA, 120 bp, synthetic construct
  misc_feature 1..120: note = Artificially Synthesized Probe
  source 1..120: mol_type = other DNA
ttccctacctgcttcctacaagcagttcagaatgccatgccttggttgtcctagtgtgaataattttcagctactttaaaattatattgtactttctcaagcatgtcatatcctttccta

SEQ ID NO: 2309 - DNA, 120 bp, synthetic construct
  misc_feature 1..120: note = Artificially Synthesized Probe
  source 1..120: mol_type = other DNA
tagatgagattatagtggcaggatggtcgaagtaggaaaggcttagagcaagggctagactatgtcatgtgttctgtgtagaagtgaaaatttgtaagctctagactttttattctgctc

SEQ ID NO: 2310 - DNA, 120 bp, synthetic construct
  misc_feature 1..120: note = Artificially Synthesized Probe
  source 1..120: mol_type = other DNA
gcccatggtggcagcttttggaaattgatttcacatttcttctgttttctcagggacatatacatcaaggtcatcataaaaatgatgacacatgaggaggtgttatgtttgaagacaggc

SEQ ID NO: 2311 - DNA, 120 bp, synthetic construct
  misc_feature 1..120: note = Artificially Synthesized Probe
  source 1..120: mol_type = other DNA
atgtgctaaagataacagaaccacagaaaggaaggagcttgagtcattgctttgaggagagctgtctgctgatcaagaacacccactttagatttcatgtgaagaagaaataaacttctg

SEQ ID NO: 2312 - DNA, 120 bp, synthetic construct
  misc_feature 1..120: note = Artificially Synthesized Probe
  source 1..120: mol_type = other DNA
actttttttttctaccatcctatcaccaaaggatggctccccttccttttgaccttttcctcttttaggaactacacctttcaaaggctatcaactcagatcacattatgtttatggccc

SEQ ID NO: 2313 - DNA, 120 bp, synthetic construct
  misc_feature 1..120: note = Artificially Synthesized Probe
  source 1..120: mol_type = other DNA
caaggatattcaccaaaacattgtttgtcattgcaaaagactggaaaccacctaaatgctcatatgtaggacttgctcaataagctatgttatatccaaacagtggagcattatgcagct

SEQ ID NO: 2314 - DNA, 120 bp, synthetic construct
  misc_feature 1..120: note = Artificially Synthesized Probe
  source 1..120: mol_type = other DNA
agcagtttcaacactgcattctaagatggggtaggtaagcaaatatattgcaaataatgagtcaggattctcactgttgaagggaattacaaataagggaacactagcatggagcctgtg

SEQ ID NO: 2315 - DNA, 120 bp, synthetic construct
  misc_feature 1..120: note = Artificially Synthesized Probe
  source 1..120: mol_type = other DNA
ctgggagaaatggctgatttctgggctagggtagggaaagtaaaagatgaacctggaaatatcttgtggtatcacaaattaagtgttctgaaaataagtgctgaaaaaattattgtgaca

SEQ ID NO: 2316 - DNA, 120 bp, synthetic construct
  misc_feature 1..120: note = Artificially Synthesized Probe
  source 1..120: mol_type = other DNA
aaaatatgagaatatggcaggcaactttatgccaataaattcaataaactggggatcacgattatgatcaacattcacttttgaaagggccatggaggaaaatgaaccaggaagatcctc

SEQ ID NO: 2317 - DNA, 120 bp, synthetic construct
  misc_feature 1..120: note = Artificially Synthesized Probe
  source 1..120: mol_type = other DNA
tctaattaagggcatcttcaaaaacctacatctttcactgtactcaatattgaaagcctcaatgctttctacctaagataaggaacaaggcagggatatctattctgccatttctgttca

SEQ ID NO: 2318 - DNA, 120 bp, synthetic construct
  misc_feature 1..120: note = Artificially Synthesized Probe
  source 1..120: mol_type = other DNA
tttggaggtcagaattaaggtgtaggtcaacttcctactgctgcttctatttccagcaagataagatcagccacaggtgattgtggtggtctttttctactttcatttatctagtcatca

SEQ ID NO: 2319 - DNA, 120 bp, synthetic construct
  misc_feature 1..120: note = Artificially Synthesized Probe
  source 1..120: mol_type = other DNA
tgggcactcctcagcccttgggcagtcgatgggaccaggcgtggcagagcagggggcagcacccatctgggaggctcaggccacgcaggagcccaccggtaggggggctcaggcatggtg

SEQ ID NO: 2320 - DNA, 120 bp, synthetic construct
  misc_feature 1..120: note = Artificially Synthesized Probe
  source 1..120: mol_type = other DNA
ccacactagaggcacacagtattgagtataatgagacttacagagaagaatatagcaatctggggaagcagaccacacttactgaaagtagcactgcagaagtagtgtttattaatttag

SEQ ID NO: 2321 - DNA, 120 bp, synthetic construct
  misc_feature 1..120: note = Artificially Synthesized Probe
  source 1..120: mol_type = other DNA
tcatcacctgaaaaaggcagagaaaaaaagaacaaaaggaagaagtgttctagaggtctcatctagtttgtatagggaagaaagttgaggtaatacagctgtgtgggaaaagggatagat

SEQ ID NO: 2322 - DNA, 120 bp, synthetic construct
  misc_feature 1..120: note = Artificially Synthesized Probe
  source 1..120: mol_type = other DNA
tcttaccagaacatgtcaagtgaaggttttacacaactacaatgccactcctatgggctgacagctgtaaagagatgcatcccaattctagagatgttaacacgtgagaaaaatgtttct

SEQ ID NO: 2323 - DNA, 120 bp, synthetic construct
  misc_feature 1..120: note = Artificially Synthesized Probe
  source 1..120: mol_type = other DNA
gcctggggatcacaaaatgcttgaggatggcactgcgtcctgggtctgtacagtatggtttgcaataaaactcaaaatcttccagccgagataagaaaaaaaataattacaaattacatg

SEQ ID NO: 2324 - DNA, 120 bp, synthetic construct
  misc_feature 1..120: note = Artificially Synthesized Probe
  source 1..120: mol_type = other DNA
tcccagtgtgattataagagttgcatgcccatgaagccagccctgactaacataccatgcatgcatttatttttacactgaaacagctgagagaagacatagagctttttaataccccaa

SEQ ID NO: 2325 - DNA, 120 bp, synthetic construct
  misc_feature 1..120: note = Artificially Synthesized Probe
  source 1..120: mol_type = other DNA
aaaaaaatacaaaaccatgaattaaaatttagtttctactgccttggaaggaaccatacaaggaaagccccctgaagcattaacatcaagggtaaaccttcctctggccacatcccacct

SEQ ID NO: 2326 - DNA, 120 bp, synthetic construct
  misc_feature 1..120: note = Artificially Synthesized Probe
  source 1..120: mol_type = other DNA
attgctttggttgtgggttttaattatttgttcagccagccaagaacccaacttgcagtcaaggctttccatccagtagcaatattttgttagctggcttacttatgttaagtgttgctc

SEQ ID NO: 2327 - DNA, 120 bp, synthetic construct
  misc_feature 1..120: note = Artificially Synthesized Probe
  source 1..120: mol_type = other DNA
cacagagcttgaaagacttccaagctgcattttcagctttcgctcctcagcctgctcaccaacatccaaataatccttcaattttcattatttagatgtctgcgtctttcttttgtcatt

SEQ ID NO: 2328 - DNA, 120 bp, synthetic construct
  misc_feature 1..120: note = Artificially Synthesized Probe
  source 1..120: mol_type = other DNA
ttcccacttttaaagatacaacatttaagtgccatttgcatccattttctttttcagtatttttttcctcaatatgaaaggatacttaagagttttctggcatttcctgatgtttctcag

SEQ ID NO: 2329 - DNA, 120 bp, synthetic construct
  misc_feature 1..120: note = Artificially Synthesized Probe
  source 1..120: mol_type = other DNA
acaggaatcttattcctgcaccaaggaaaaaggaagctcaattagctcattcagaacttttcttccttaagttcatgtgacattacttcaattatatcgtgaatttaaaggaggacatct

SEQ ID NO: 2330 - DNA, 120 bp, synthetic construct
  misc_feature 1..120: note = Artificially Synthesized Probe
  source 1..120: mol_type = other DNA
tgggtcttcaatgttagtgaggaaagacatgggaaaaagcagcaaagtgatttcaggtagagtaagtgccataaaggtaatatagcagtgtgataggagagagaataaatggtagaagga

SEQ ID NO: 2331 - DNA, 120 bp, synthetic construct
  misc_feature 1..120: note = Artificially Synthesized Probe
  source 1..120: mol_type = other DNA
caaagaagttctctattctcattatctctgatttctcacctgcctttctctcttgaatccaatctaattaagccccctttcccatcaccccaccaaaatggctcttgtcaaaattactga

SEQ ID NO: 2332 - DNA, 120 bp, synthetic construct
  misc_feature 1..120: note = Artificially Synthesized Probe
  source 1..120: mol_type = other DNA
ctccttcactctaatgtactcaagcctgatttttgcaaagaaggcatgacattgctttttgttacatttgttactgctaagtccttcttcccttgacactccaaagtctcaaatgggcta

SEQ ID NO: 2333 - DNA, 120 bp, synthetic construct
  misc_feature 1..120: note = Artificially Synthesized Probe
  source 1..120: mol_type = other DNA
acccagatgtgtggattttttttccagcaattttcagctgctaaagtccacatacgtagaaagagtagatgattgaattcatccagggttggagcatatgtatgctagagagaaattgag

SEQ ID NO: 2334 - DNA, 120 bp, synthetic construct
  misc_feature 1..120: note = Artificially Synthesized Probe
  source 1..120: mol_type = other DNA
atcttcctttacattaatttatcagacttagcctcttcttctgctggtagtattaatctcaaggacaaagtcaaaagtatttataaggattcaaagaggtgctcatagagctattgagaa

SEQ ID NO: 2335 - DNA, 120 bp, synthetic construct
  misc_feature 1..120: note = Artificially Synthesized Probe
  source 1..120: mol_type = other DNA
tgccggggtctgggggttgccagtcttgagtggagcagagagaggggggagcggcaggagtgcccctctctggggggctgggggccaggtttctatagggactccctgcggtgggcacag

SEQ ID NO: 2336 - DNA, 120 bp, synthetic construct
  misc_feature 1..120: note = Artificially Synthesized Probe
  source 1..120: mol_type = other DNA
tcgagagagaatgcacataaagggcttagcggtgctcacagtattcattgctcttgtggtcctggggtggtcagggagtgctggacacagtgagtaagggaagccactcctttcccagcc

SEQ ID NO: 2337 - DNA, 120 bp, synthetic construct
  misc_feature 1..120: note = Artificially Synthesized Probe
  source 1..120: mol_type = other DNA
gtgttcgtaaaccccattcccacctcgcagtggtgtttgtagactgcagcaagcgcccagtgtgtgcagagctttcttacacagcagccccttggggttgagtgtcaggctaggagcaga

SEQ ID NO: 2338 - DNA, 120 bp, synthetic construct
  misc_feature 1..120: note = Artificially Synthesized Probe
  source 1..120: mol_type = other DNA
gtggctggatttccttcagagcatgcggttcagagcctaatctgggtctcagaccccacgtgactcctggctctgtctgtgtggctttgagcaaatgcctcaggctctctgaacctcact

SEQ ID NO: 2339 - DNA, 120 bp, synthetic construct
  misc_feature 1..120: note = Artificially Synthesized Probe
  source 1..120: mol_type = other DNA
ctggccatgccaacatctccttcccggcccccgcccactcagacttaccagcccccaaccgctgcctcctctcaaggccacatgcccccacgtcccggcccctgcctagactgaagtctc

SEQ ID NO: 2340 - DNA, 120 bp, synthetic construct
  misc_feature 1..120: note = Artificially Synthesized Probe
  source 1..120: mol_type = other DNA
taaccacaatgaggtgaaaggggaacacagctcctcacttttgccaggcacatttcaagggctcagcagccccatgtggcctgtgggtcttggatggtgaatatctagaacattctggca

SEQ ID NO: 2341 - DNA, 120 bp, synthetic construct
  misc_feature 1..120: note = Artificially Synthesized Probe
  source 1..120: mol_type = other DNA
taggagctgggtacggtgaccgcatttttaaaaccagaaaattcaggatgtgcttttggggtcactacgagtgcccctctccacctggctcttggacttgggtcccttctctaggcctca

SEQ ID NO: 2342 - DNA, 120 bp, synthetic construct
  misc_feature 1..120: note = Artificially Synthesized Probe
  source 1..120: mol_type = other DNA
gctgcagacagcctggctgctgagtgggcccagtaggagactcgggggcagctggatgggggctttgagggccagtacttggggtgtggccaccaaggccctggctcagtccgacggggg

SEQ ID NO: 2343 - DNA, 120 bp, synthetic construct
  misc_feature 1..120: note = Artificially Synthesized Probe
  source 1..120: mol_type = other DNA
tggacatactccacgttaggctgcacgctcgggcgtgatttttgtgtgcgtgttcgccgacgctgagtagatggaggtgaaggtgaactgccttgcgtgggcctcagcttcacataccca

SEQ ID NO: 2344 - DNA, 120 bp, synthetic construct
  misc_feature 1..120: note = Artificially Synthesized Probe
  source 1..120: mol_type = other DNA
accacacctggccccaaaataatgttgatcccagtggccgccactgttctgggcagtggggttagtcagggaagaaaccactgatgccccttgggggctgggattctcagagaaggggca

SEQ ID NO: 2345 - DNA, 120 bp, synthetic construct
  misc_feature 1..120: note = Artificially Synthesized Probe
  source 1..120: mol_type = other DNA
ccttcaggcgcctgccctcccccagcctcccctcccccagcctgccctcccccagcctgccctcccccagcctcccctcccccagcctgccctcccccagcctcccctcccccagcctgc

SEQ ID NO: 2346 - DNA, 120 bp, synthetic construct
  misc_feature 1..120: note = Artificially Synthesized Probe
  source 1..120: mol_type = other DNA
cctcctttagactttgagaaccagtccttgtatcccttacatcaaaagttattagagagtatttctcacttggaaactgtaattgtgcccattctccgaaaggatgggaggcagtttaaa

SEQ ID NO: 2347 - DNA, 120 bp, synthetic construct
  misc_feature 1..120: note = Artificially Synthesized Probe
  source 1..120: mol_type = other DNA
aaaaataagtaaacaagtctccgaggcaggtccgtttccacaggtcaactcctgccacttcccattccaacataaatttcaaacccaaaaatctgagcctgggagtggaggtttttcagg

SEQ ID NO: 2348 - DNA, 120 bp, synthetic construct
  misc_feature 1..120: note = Artificially Synthesized Probe
  source 1..120: mol_type = other DNA
ggactgactgccccatctggggtcagccgtgctggaaccggggagcctgtgcacacgaggtgcccccacgcccctcacaatgcccccagcccatcggccctgtggacgttggccctcacg

SEQ ID NO: 2349 - DNA, 120 bp, synthetic construct
  misc_feature 1..120: note = Artificially Synthesized Probe
  source 1..120: mol_type = other DNA
tcctggttacactgttacgtggtctttgtccatttctgttcctgccactaaccacggttccccagggcagggacccaagctcactggtgtgctaggtgcccagcacagagtaggtgctct

SEQ ID NO: 2350 - DNA, 120 bp, synthetic construct
  misc_feature 1..120: note = Artificially Synthesized Probe
  source 1..120: mol_type = other DNA
tgctctgtaaacgcttaccccgggcacacaaggtgctctgtaaacacttacccagcacagaataggtgctctgcaaacgcttacccagtgcagagtaggtgctctgtaaacgcttaccca

SEQ ID NO: 2351 - DNA, 120 bp, synthetic construct
  misc_feature 1..120: note = Artificially Synthesized Probe
  source 1..120: mol_type = other DNA
gcattgcagagcaagtctccctccggcctttgctgtatgggaagggagcacgaagctgagcccacagaggaggaccatgggggcacgtgggggacagtgactcacaaaacagacaaacct

SEQ ID NO: 2352 - DNA, 120 bp, synthetic construct
  misc_feature 1..120: note = Artificially Synthesized Probe
  source 1..120: mol_type = other DNA
acccacacacagatgcccacacacaggtgcccacacacagatgttggcacacacaggtgcccacacacagatgccggcacacacagatgcccacacacagatgcccacacacagatgccc

SEQ ID NO: 2353 - DNA, 120 bp, synthetic construct
  misc_feature 1..120: note = Artificially Synthesized Probe
  source 1..120: mol_type = other DNA
ctgctccccaaccaccaccacacacaaccagcattttaataatattctttgtgccttcttgtcctgcataatttgttttttcaaggttaaaaaggggcagaaggaaagtacaggtgctct

SEQ ID NO: 2354 - DNA, 120 bp, synthetic construct
  misc_feature 1..120: note = Artificially Synthesized Probe
  source 1..120: mol_type = other DNA
actggccgttcgcatctcatttcactccaagcctggccctgtgtatccctgtctgtgtccacggggcccgggaagggccagcaccaactgaggcttaactaggttgccacacaattgtct

SEQ ID NO: 2355 - DNA, 120 bp, synthetic construct
  misc_feature 1..120: note = Artificially Synthesized Probe
  source 1..120: mol_type = other DNA
ctcggacgggggcaggagggtgaggggcatgcaaacccgtggtcctgcaacaggtcccctcccgccaccccccccaccactgcatcctcccgtggggcagggttactcattgtgcccaga

SEQ ID NO: 2356 - DNA, 120 bp, synthetic construct
  misc_feature 1..120: note = Artificially Synthesized Probe
  source 1..120: mol_type = other DNA
cctccgcaacaccacccactcattaccagccacgccgcttccacccaacccgccccctgctcgccaaccccgccccctcattactagccacgccccttcctccccagctccgcctcctcc

SEQ ID NO: 2357 - DNA, 120 bp, synthetic construct
  misc_feature 1..120: note = Artificially Synthesized Probe
  source 1..120: mol_type = other DNA
atcccctgggcttcggtggctgtcagcggaatcagggcctccatagaagaccctctggacacagcgttaatgattccctgccatccacaggatgaatgtgcacacggggaatctggggtg

SEQ ID NO: 2358 - DNA, 120 bp, synthetic construct
  misc_feature 1..120: note = Artificially Synthesized Probe
  source 1..120: mol_type = other DNA
cctccatgtgtcttgagctctccgggcctctttatagggcttggaggctgcagatagtgaccccagtgtgccgccttacgacacagccctcatctatgactacgagggtgacggctcggt

SEQ ID NO: 2359 - DNA, 120 bp, synthetic construct
  misc_feature 1..120: note = Artificially Synthesized Probe
  source 1..120: mol_type = other DNA
cctcacgtttttcttctctgacaaatgtttgaaattcagtgaaataccaaaggagtcaaggatgaaggggacacaggatggaatcagaaaaaacataaatggaatccaggcagttctatg

SEQ ID NO: 2360 - DNA, 120 bp, synthetic construct
  misc_feature 1..120: note = Artificially Synthesized Probe
  source 1..120: mol_type = other DNA
gctctcactggatctcgctgtaagaatataggacctaatgttccacactatggagtgtatatgtcccacactatagagtgtataagcacctgacaaagttcctgaactttatatatactt

SEQ ID NO: 2361 - DNA, 120 bp, synthetic construct
  misc_feature 1..120: note = Artificially Synthesized Probe
  source 1..120: mol_type = other DNA
tgagaccccctttagatgcatgaatcagagtccagtgtgacacactggatcatgggagaaaagatcagatgctgagagaacaatcaataatacttagaataatcctagtccttcttttaa

SEQ ID NO: 2362 - DNA, 120 bp, synthetic construct
  misc_feature 1..120: note = Artificially Synthesized Probe
  source 1..120: mol_type = other DNA
ccggaaacaacttccttccacacaactgcagaatgtaactgaaaagcaggacagtatttggtaggataaattctcaagtgaatagttgcagaatcccatatcaaagacaagaatctcctc

SEQ ID NO: 2363 - DNA, 120 bp, synthetic construct
  misc_feature 1..120: note = Artificially Synthesized Probe
  source 1..120: mol_type = other DNA
acagccttcctgtgcttaggaattctagatagcacttcagcactatagttcaaagccatttttttttttatcatgggtcatcttttaggtttgaccctgtgtggttttttttaatacttt

SEQ ID NO: 2364 - DNA, 120 bp, synthetic construct
  misc_feature 1..120: note = Artificially Synthesized Probe
  source 1..120: mol_type = other DNA
gttctttgtagattctggatattagccctttgtcagatgggtagattgcagaaatgttcttccattctgtatgttgcctgttcactctgatggtagtttcttttgctgtgcagaagctct

SEQ ID NO: 2365 - DNA, 120 bp, synthetic construct
  misc_feature 1..120: note = Artificially Synthesized Probe
  source 1..120: mol_type = other DNA
gcttatcagcttaaggagattttgggctgagacaatagggttttctaaatatacaatcatgtcatgtgcaaacagggacaatttgacttcctcttttcctaattgaataccctttatttc

SEQ ID NO: 2366 - DNA, 120 bp, synthetic construct
  misc_feature 1..120: note = Artificially Synthesized Probe
  source 1..120: mol_type = other DNA
ttgcgtctatttgattcttctctcttttcttctttattagtcttgctagcagtctatcaattttgttgatcttttcaaaaaaccagctcctggattcattgtttttttgaggggtttttt

SEQ ID NO: 2367 - DNA, 120 bp, synthetic construct
  misc_feature 1..120: note = Artificially Synthesized Probe
  source 1..120: mol_type = other DNA
gatcttcctccatccttttattttgagtctatgtgtttctctgcacgtgagatgggtctcccaacagcacactgatgggtcttgactctttatccaatttgccagtctgtgtcttttaat

SEQ ID NO: 2368 - DNA, 120 bp, synthetic construct
  misc_feature 1..120: note = Artificially Synthesized Probe
  source 1..120: mol_type = other DNA
ggtcttctctacactgtttattctagttagccattcatctaaccctttttcaaggtttttagcttccttgcgttgggttcaaatgtgctcctttagctcagagaagtttgttattaccaa

SEQ ID NO: 2369 - DNA, 120 bp, synthetic construct
  misc_feature 1..120: note = Artificially Synthesized Probe
  source 1..120: mol_type = other DNA
gaaacgtgaaaaacagcgcactacataaactgcaaaaagtaaaaaaaaacctaactaacttaacaatgtgagagctgggaatatgtgtgtccagtatttttcaccaccctgccagtgtcc

SEQ ID NO: 2370 - DNA, 120 bp, synthetic construct
  misc_feature 1..120: note = Artificially Synthesized Probe
  source 1..120: mol_type = other DNA
gaaactagagtttacagagcagagtcccagagagagctgcaaagagaatgcacactaaagagatttatagaggggtctcttaaggctttagctgagtactgatcagtgtatttatatgaa

SEQ ID NO: 2371 - DNA, 120 bp, synthetic construct
  misc_feature 1..120: note = Artificially Synthesized Probe
  source 1..120: mol_type = other DNA
acatcaaattacttaaaagtaataagagaatatcttaaaagcacccagagaaaaaagaatacaaacattcaatggaacaaggaagaaccatagtgggcagggcacccccggtggctcatg

SEQ ID NO: 2372 - DNA, 120 bp, synthetic construct
  misc_feature 1..120: note = Artificially Synthesized Probe
  source 1..120: mol_type = other DNA
ctctaaatgcctgtttaacaaaaagatctcaaattaatggcatcagcttccaccttaatgaaaacagaacacgaacaaaaacacagtgtaggaagaataaaggaaacaataaagatctag

SEQ ID NO: 2373 - DNA, 120 bp, synthetic construct
  misc_feature 1..120: note = Artificially Synthesized Probe
  source 1..120: mol_type = other DNA
gaaaggctaaatgctttcttcctaagatcatgaacaagtcaagtatttctgctcttactacctctatttgacatttcactgaaggtttcagccagtaataaacaaaaggcatacagactg

SEQ ID NO: 2374 - DNA, 120 bp, synthetic construct
  misc_feature 1..120: note = Artificially Synthesized Probe
  source 1..120: mol_type = other DNA
tcctgtctcaatgttggtggttgctgaaggctgggatggctgtggcaatttctgaaaataagacaacaatgaagtttgttgcacttattgactcttcctttcatgagagagccctctgta

SEQ ID NO: 2375 - DNA, 120 bp, synthetic construct
  misc_feature 1..120: note = Artificially Synthesized Probe
  source 1..120: mol_type = other DNA
ttttaggaatgctaaattagggttggctttaacttaaagtcaccagctgcattagccctaacaagagccagcctgtcctttgaggctttgaagccaggcatttacttctctagctatgga

SEQ ID NO: 2376 - DNA, 120 bp, synthetic construct
  misc_feature 1..120: note = Artificially Synthesized Probe
  source 1..120: mol_type = other DNA
agagacatggggaaacagccagtctgtggagcgtcagaacgtacgtcgacgtcgcactgacagattaagtttgtcgtcttatgtgagtatggctccgggtgtcccaaaataattataata

SEQ ID NO: 2377 - DNA, 120 bp, synthetic construct
  misc_feature 1..120: note = Artificially Synthesized Probe
  source 1..120: mol_type = other DNA
gatgaaattattgaaaatgaaaactatagtaatggaaagcacttcaatggttgcctggggagaggggatgggtgggaagcagagattataatagggcatgaaatatcttctggaggtggt

SEQ ID NO: 2378 - DNA, 120 bp, synthetic construct
  misc_feature 1..120: note = Artificially Synthesized Probe
  source 1..120: mol_type = other DNA
atattacttcaaaataattgtgaaaactgagctcagaagttgtgtaacttgcccaaggcagagaggttttcaatccaagaggtctaactctagcactcacaccttcacttgctctttagc

SEQ ID NO: 2379 - DNA, 120 bp, synthetic construct
  misc_feature 1..120: note = Artificially Synthesized Probe
  source 1..120: mol_type = other DNA
tttatgattcctgtctctcttctccaattcagctctcaaccctggccctcacattttgaaagtttttttccggggctgtggtgggggagtctaaaaacatatttattgagtaatttgttt

SEQ ID NO: 2380 - DNA, 120 bp, synthetic construct
  misc_feature 1..120: note = Artificially Synthesized Probe
  source 1..120: mol_type = other DNA
ccttctcatccttccactttaaggttgtgatattctggtgttttggccctgtcagttttcttatcctccctcccatttcaacccatgtatcttctgataatctgtgttcctttttttttg

SEQ ID NO: 2381 - DNA, 120 bp, synthetic construct
  misc_feature 1..120: note = Artificially Synthesized Probe
  source 1..120: mol_type = other DNA
gttcttaggcaagtgagatagacagataaacagttgattccaataaaatgtggtaaacacaacagagggggccctatggaatccaagagaagtttacaggaatcagcaaagtctttctga

SEQ ID NO: 2382 - DNA, 120 bp, synthetic construct
  misc_feature 1..120: note = Artificially Synthesized Probe
  source 1..120: mol_type = other DNA
ggtgccttggagcaggctggaagcagggagaagcaggtggattctgaatatatttcaataaaagaatctataatatttgctgaaggattggattcaaatccattgggtgctaacagattt

SEQ ID NO: 2383 - DNA, 120 bp, synthetic construct
  misc_feature 1..120: note = Artificially Synthesized Probe
  source 1..120: mol_type = other DNA
tactttttaaggcaaatctgtgtgggtcttactgaactgaaaaaaaggaattgctaagatggaaatatttacacattttgtttagccacctcagccagagcaccagcttctccaggggtg

SEQ ID NO: 2384 - DNA, 120 bp, synthetic construct
  misc_feature 1..120: note = Artificially Synthesized Probe
  source 1..120: mol_type = other DNA
aacactagaggctcaggattttctgctttgaacacaatgttggaaacagctgctgtttcaaaatcaagaggctgtgtaggagaaagagagaaaattaattttggggtgattagctccctt

SEQ ID NO: 2385 - DNA, 120 bp, synthetic construct
  misc_feature 1..120: note = Artificially Synthesized Probe
  source 1..120: mol_type = other DNA
gttagaatgacttatcaaaaagacaaaaaacaaacattggtgaggatgtggagaaaagggaaccctgtacactgttggtaagaatgtaaattacaatagccattgtggaaaacagtatgg

SEQ ID NO: 2386 - DNA, 120 bp, synthetic construct
  misc_feature 1..120: note = Artificially Synthesized Probe
  source 1..120: mol_type = other DNA
cagaaatgtattgattctcccaagacattctcaggtgacagcttgagaaatgcttacatagagatttccattttttatgggaaatgattttccaagggcctcaaaactcaagcccccaaa

SEQ ID NO: 2387 - DNA, 120 bp, synthetic construct
  misc_feature 1..120: note = Artificially Synthesized Probe
  source 1..120: mol_type = other DNA
catgactcactctctagttcataagtgctgtgggacaatttttcacgtagaagggtgggaactgtgtgtgaagactcggggttgagaaagaagaatcaattgaaatttgttcaaatatat

SEQ ID NO: 2388 - DNA, 120 bp, synthetic construct
  misc_feature 1..120: note = Artificially Synthesized Probe
  source 1..120: mol_type = other DNA
aattcaaaaggatcagccatagtagagaagtgacaaaatttgcaagttaaaataaggcagaaccctgaatttcaagaaacaggatctcaggagagttattgttgagccaggcagggctca

SEQ ID NO: 2389 - DNA, 120 bp, synthetic construct
  misc_feature 1..120: note = Artificially Synthesized Probe
  source 1..120: mol_type = other DNA
acatttgttatatttttattctatatcctagtggggaattggctaacatttggtgtgtcctaatcaagaatccacagcccagggttggttgttgcttagcatctgaaagaacctaatccg

SEQ ID NO: 2390 - DNA, 120 bp, synthetic construct
  misc_feature 1..120: note = Artificially Synthesized Probe
  source 1..120: mol_type = other DNA
ataatagacacttgaaatagaaccacatataaagtaaggatgtgacaaagagtttggtcagaggcctactctactgtagcatacctctcgtgtcaagttgtgagggaggatacttacagc

SEQ ID NO: 2391 - DNA, 120 bp, synthetic construct
  misc_feature 1..120: note = Artificially Synthesized Probe
  source 1..120: mol_type = other DNA
tgggcttagcaatacagtaaaaggtgaaagtaaagcagcggagagggggattaaaaagacacttgtctattaaaccttggaaggagacccagcagttgcattattcaaaaggtatctctg

SEQ ID NO: 2392 - DNA, 120 bp, synthetic construct
  misc_feature 1..120: note = Artificially Synthesized Probe
  source 1..120: mol_type = other DNA
gcagttgattttaacatcagtcatactcatgagctgatatccattgtaccaaagaacgcaatacctcagagagctactggtaggattctaaaacaaattccccctcccatatccaatttg

SEQ ID NO: 2393 - DNA, 120 bp, synthetic construct
  misc_feature 1..120: note = Artificially Synthesized Probe
  source 1..120: mol_type = other DNA
gttgcaggcttgtccctattttgatttatgaacatcatcacagggctctgggctgcctcataactgacttcaaaaataacataacagtctagtcaaataggcttcttgctccttcaaaat

SEQ ID NO: 2394 - DNA, 120 bp, synthetic construct
  misc_feature 1..120: note = Artificially Synthesized Probe
  source 1..120: mol_type = other DNA
aaaccatgcattaatatcagaaatctgcaagaaaatacttggcaagtgaagtgacagccatagccacaattttgcaattgacatgcaatttgtgcagagagtgggctctctgtttcccac

SEQ ID NO: 2395 - DNA, 120 bp, synthetic construct
  misc_feature 1..120: note = Artificially Synthesized Probe
  source 1..120: mol_type = other DNA
cattcatcttcatgataacttcatgttgtaggtgctactgtcattcccatttaattaacagatgaggaagccagggaatagagaagttcaggtaacctaaccagggtcacacaactaact

SEQ ID NO: 2396 - DNA, 120 bp, synthetic construct
  misc_feature 1..120: note = Artificially Synthesized Probe
  source 1..120: mol_type = other DNA
cccactttaaactctatcttcaaattgctccaggtcctcatgtatttccacatggattcccactctcccataagtcctacatgattttgtaacttgtcatattcatccttcaaagcccag

SEQ ID NO: 2397 - DNA, 120 bp, synthetic construct
  misc_feature 1..120: note = Artificially Synthesized Probe
  source 1..120: mol_type = other DNA
tacagtagagtcctttcagtctgaaagcaagaattgggaaatacaattcattttcctgtttgtgattatgttctgcagaatgtgcctggcagacctccaacaacagggttgttaattgac

SEQ ID NO: 2398 - DNA, 120 bp, synthetic construct
  misc_feature 1..120: note = Artificially Synthesized Probe
  source 1..120: mol_type = other DNA
cctgtcatgtgcagtaagggtcccgatactgttacctatgaggaaggaaagaaggaaaacccaccattacaggctccacataatctattaaaatagtttcactaaaataagcacattcct

SEQ ID NO: 2399 - DNA, 120 bp, synthetic construct
  misc_feature 1..120: note = Artificially Synthesized Probe
  source 1..120: mol_type = other DNA
atttgttgctgtagccctaggacgctaatacacatggcaaatggtatcactaaacaaagagaagccaaccctagattgcatctaagcaacttcatggaacaattgcagaaactgactcta

SEQ ID NO: 2400 - DNA, 120 bp, synthetic construct
  misc_feature 1..120: note = Artificially Synthesized Probe
  source 1..120: mol_type = other DNA
ttagggaggtggggtttttatgagagtctaaattttctgtatgaatacataagacttggtggcaagtgggattcaagaataaatgttagtgttgctaagacttggggacacgagttccac

SEQ ID NO: 2401 - DNA, 120 bp, synthetic construct
  misc_feature 1..120: note = Artificially Synthesized Probe
  source 1..120: mol_type = other DNA
tgttggctactgttacactactgtgactgtgagaagattcttccttataacgaactgaagtccttcaagctggcattaactcttcctgttgtggcaagagttgagaaaaatgaaacagag

SEQ ID NO: 2402 - DNA, 120 bp, synthetic construct
  misc_feature 1..120: note = Artificially Synthesized Probe
  source 1..120: mol_type = other DNA
agtgataatggtagtagcggtaatggtagctataaaagccccaatttaagaatactatccagatactgtttgatcccaaatacggtccttacgtgactcccaaggtacagtcaacctcta

SEQ ID NO: 2403 - DNA, 120 bp, synthetic construct
  misc_feature 1..120: note = Artificially Synthesized Probe
  source 1..120: mol_type = other DNA
aggaaatgtttcttctctaaagcaattcttcacaaaccctctacagggtttctgggctgctttcttttggaagtctgactgtgaaagctttctatccacgaaccatccatttaagaaaca

SEQ ID NO: 2404 - DNA, 120 bp, synthetic construct
  misc_feature 1..120: note = Artificially Synthesized Probe
  source 1..120: mol_type = other DNA
tgagttctttgcagcatttaccaatccctttgggagtaacctgaataatagctatgaagactttagtctaggcccccaatcagaaattctcatggtaatgagtgctgacatgctttcttt

SEQ ID NO: 2405 - DNA, 120 bp, synthetic construct
  misc_feature 1..120: note = Artificially Synthesized Probe
  source 1..120: mol_type = other DNA
tcagcctaagatgggcaagtctattgggtcaagattttttccacaataagaagcagcagcctttcaaatctatttgcaacccccaaatcaaaccatgtccatacatagtgcaccataaat

SEQ ID NO: 2406 - DNA, 120 bp, synthetic construct
  misc_feature 1..120: note = Artificially Synthesized Probe
  source 1..120: mol_type = other DNA
gtggccggatcatccaggtctgtggcattgacatacaagaagggctttcctgtttaacaagacgtacccagaaaaaaaaaaaaaaagatattaattgaaacccaaaccaaccatagctac

SEQ ID NO: 2407 - DNA, 120 bp, synthetic construct
  misc_feature 1..120: note = Artificially Synthesized Probe
  source 1..120: mol_type = other DNA
tagaaaattctacaaatcagagctttgtccccctagaaaaatagctgttaagcctttaccaggacaccactggatataacccacctgtctaaaagttctctggagtcctcagtaaatttt

SEQ ID NO: 2408 - DNA, 120 bp, synthetic construct
  misc_feature 1..120: note = Artificially Synthesized Probe
  source 1..120: mol_type = other DNA
ctctgaccaaaaaaagaattatcagacccaagatgtcaatacatagtgctgcattgagagaccatgctctggagcaatagagatagtgaaacaactcccaaatcagtgtgaaatgtaggt

SEQ ID NO: 2409 - DNA, 120 bp, synthetic construct
  misc_feature 1..120: note = Artificially Synthesized Probe
  source 1..120: mol_type = other DNA
gtaccagacagaaagcttttatctcactcttttttccatagtaggctctctgactttcctaggtattcagataccaacggtgaaaactaaaggagaaagagagggagacgggtcttttta

SEQ ID NO: 2410 - DNA, 120 bp, synthetic construct
  misc_feature 1..120: note = Artificially Synthesized Probe
  source 1..120: mol_type = other DNA
cagaagtggagaaaataccgaccaccatattcatagatatggctatatcacttttaagaccacagcaacagaaaattcacataaaactaagaaaacataaaagctgttcaaccttaagtt

SEQ ID NO: 2411 - DNA, 120 bp, synthetic construct
  misc_feature 1..120: note = Artificially Synthesized Probe
  source 1..120: mol_type = other DNA
tatcattatctatcctgttggcatttccctgggaacatctacttacaacacttatcttcatttgaccggactcagaattcatacaccacacacaatttttcccctggggcatttgttgaa

SEQ ID NO: 2412 - DNA, 120 bp, synthetic construct
  misc_feature 1..120: note = Artificially Synthesized Probe
  source 1..120: mol_type = other DNA
ttcccagagaccagtgaaacaccatcaagcagaaaaacacatacataataaaagttccagaaggaaaggaaaaagggggaaaaaagattatttgaagacagaatgacccaaaacttcaca

SEQ ID NO: 2413 - DNA, 120 bp, synthetic construct
  misc_feature 1..120: note = Artificially Synthesized Probe
  source 1..120: mol_type = other DNA
cacctaacaatggacctcaaaacacatgaaagaaaagctgacagaatggaaaggaaattaaataattcaacagtaataattgacgatttcaagactttactttaaataatagaatagaaa

SEQ ID NO: 2414 - DNA, 120 bp, synthetic construct
  misc_feature 1..120: note = Artificially Synthesized Probe
  source 1..120: mol_type = other DNA
ctagaagagtaaggaacacttattcaattcattctatgaggccaatatcctgatacccaaaccagaaaaaagtcaatgcaagaaaacttcagactaatgtctcttttgaatataggcaca

SEQ ID NO: 2415 - DNA, 120 bp, synthetic construct
  misc_feature 1..120: note = Artificially Synthesized Probe
  source 1..120: mol_type = other DNA
tacaaaggtgtagttccagataatgcagtactggcataaacatatatagatcaatggaatcatagtgggaggccagaaacaattcaattgatttctgatgaggatgctaaattcagtggg

SEQ ID NO: 2416 - DNA, 120 bp, synthetic construct
  misc_feature 1..120: note = Artificially Synthesized Probe
  source 1..120: mol_type = other DNA
cactaggatagctataattaaaaaaaaaaaaaagacagataataacaagtgctaaggatatggagaaattggaactcatacattactggtgaaaatgtaaaatggttcagctgctttgga

SEQ ID NO: 2417 - DNA, 120 bp, synthetic construct
  misc_feature 1..120: note = Artificially Synthesized Probe
  source 1..120: mol_type = other DNA
tcagtttccccatttttaaaacaagcggttgtaccaaaactccccagtgtgttttctagcatgaagcttctgtgattctaaaaagaaaatccccttcatcttcctctcactactctgtca

SEQ ID NO: 2418 - DNA, 120 bp, synthetic construct
  misc_feature 1..120: note = Artificially Synthesized Probe
  source 1..120: mol_type = other DNA
tcttttttccatatggcttcatttatcactcagctagcccctaagagcagttgagataactcaccacagacaggtatctatgtcatatccaagcactctattggcacctatataaggaag

SEQ ID NO: 2419 - DNA, 120 bp, synthetic construct
  misc_feature 1..120: note = Artificially Synthesized Probe
  source 1..120: mol_type = other DNA
ctgcttcctgactgtgagcacctgctcgtttttgagtactcagtttaggagtcaatgaaacctcttctgttcgctcactaccatctttatttgaaattgatcattcttagattttaagtg

SEQ ID NO: 2420 - DNA, 120 bp, synthetic construct
  misc_feature 1..120: note = Artificially Synthesized Probe
  source 1..120: mol_type = other DNA
tgccttaagctggtaccaatgaaagaaaggggaagagagatagctttcagcctctcctctgtggaggggaactgtccagcacaatacagttgtcccttggcattggtgggggctcattcc

SEQ ID NO: 2421 - DNA, 120 bp, synthetic construct
  misc_feature 1..120: note = Artificially Synthesized Probe
  source 1..120: mol_type = other DNA
cactcgccccagagatgattgaggaagtccaaatagaatgtcaggtacaattcttatgatactgaggccactcatctctctgtttaacttagcttctgaaatcattcttgataatgagaa

SEQ ID NO: 2422 - DNA, 120 bp, synthetic construct
  misc_feature 1..120: note = Artificially Synthesized Probe
  source 1..120: mol_type = other DNA
aaaaataaaagtacaaaatgtttactttaagcagtagccccacaatggttccaaaatccaaagaccctaaacttgaaagctaagcaggctctgcagacacccaagtcaagactggagtag

SEQ ID NO: 2423 - DNA, 120 bp, synthetic construct
  misc_feature 1..120: note = Artificially Synthesized Probe
  source 1..120: mol_type = other DNA
tcaaaaaatggtgtagcaaagaaaagtagcccaagtctctgcaacatcatggaattgctaaacctgccctggattgcctacttcagacttcttgttatctgaggaaaataaacccctatt

SEQ ID NO: 2424 - DNA, 120 bp, synthetic construct
  misc_feature 1..120: note = Artificially Synthesized Probe
  source 1..120: mol_type = other DNA
aaaatgagaatcaagtcttggttccagggttcaaagttgcgtgcttgtattggggcaacaaatctctcttcctgccaataaacatgactattggggctataaagatttcaaagtgcatgt

SEQ ID NO: 2425 - DNA, 120 bp, synthetic construct
  misc_feature 1..120: note = Artificially Synthesized Probe
  source 1..120: mol_type = other DNA
accctctgataaatctatctcttggaaaagaacagaagatctactcgcagtctggagtaaattagtgcttctgttgaataaagccctatgcagaaggcaagattcttcaagcaaacttcc

SEQ ID NO: 2426 - DNA, 120 bp, synthetic construct
  misc_feature 1..120: note = Artificially Synthesized Probe
  source 1..120: mol_type = other DNA
taaatcttataatctcgtttcataatgcagcaattttgggggcaacctttatgaacctcagcagtcacgtagattttaaaaaaaggcacctactgtttaccccaaggtcaagggtgagga

SEQ ID NO: 2427 - DNA, 120 bp, synthetic construct
  misc_feature 1..120: note = Artificially Synthesized Probe
  source 1..120: mol_type = other DNA
atatggagcagcccagtcttccagaagcttcatgcacatcatccatagcaatatgcaagccaacatctcaaaacatgctcacaataattccatttatctaactgctttgctttgttatga

SEQ ID NO: 2428 - DNA, 120 bp, synthetic construct
  misc_feature 1..120: note = Artificially Synthesized Probe
  source 1..120: mol_type = other DNA
agacatgtcatgactaattgattttaagatgtgagagaaattttccacatggcctggaaaacagtgttgttacctgtcataagtttggactgcccctccccaaaagacagtcaaggaaat

SEQ ID NO: 2429 - DNA, 120 bp, synthetic construct
  misc_feature 1..120: note = Artificially Synthesized Probe
  source 1..120: mol_type = other DNA
caggtagagaatccatctgcataataaaagattaggccagcttcttcaagcactatgcaaacatcacacctggtccaaccaatctctccggccctgtgtaaatcagataccgcctcctca

SEQ ID NO: 2430 - DNA, 120 bp, synthetic construct
  misc_feature 1..120: note = Artificially Synthesized Probe
  source 1..120: mol_type = other DNA
aaagacatacagctaggaagtgacattaccttgcctccaaccagattatcaattccagagtttaaactctggaatttcaactcttgctactgtgctttatatagtttgatagctacctag

SEQ ID NO: 2431 - DNA, 120 bp, synthetic construct
  misc_feature 1..120: note = Artificially Synthesized Probe
  source 1..120: mol_type = other DNA
gcttctcacatcttaccatctaagttcaacttaattatttaaatagcaatgaactacaccacttctagtatgtcccagataccgtgccaagaactggggtaccaaaataaggggtacagg

SEQ ID NO: 2432 - DNA, 120 bp, synthetic construct
  misc_feature 1..120: note = Artificially Synthesized Probe
  source 1..120: mol_type = other DNA
tggaatactgttggccaaaaattcattttgccactcacgtttgcttagtcaaaactgtaaacattgtccaacaggacatttctcttcacaattcccaacttttggtggcccactaatgaa

SEQ ID NO: 2433 - DNA, 120 bp, synthetic construct
  misc_feature 1..120: note = Artificially Synthesized Probe
  source 1..120: mol_type = other DNA
acgacaaaggcagcaaacattgactgaaaacaatttgctgcatgcaccgataagacttggtggtgaaaaactatcttgctgatttctcagaacaactctatggagcagatgctattataa

SEQ ID NO: 2434 - DNA, 120 bp, synthetic construct
  misc_feature 1..120: note = Artificially Synthesized Probe
  source 1..120: mol_type = other DNA
cagcccacccaaggcttccttgattctcccaccaggctccaagctcccaaggggattaacggcattcatttatttttttttagttacataattaggttcttcttaagaaatttagaacac

SEQ ID NO: 2435 - DNA, 120 bp, synthetic construct
  misc_feature 1..120: note = Artificially Synthesized Probe
  source 1..120: mol_type = other DNA
gataatatcaaggcattttgtgaagtttaaatagccaggcatcaccattcttgtcacctcaactgggtttgtaacggttgcgagattcttttcaatcttgggtttagcagctaagtacct

SEQ ID NO: 2436 - DNA, 120 bp, synthetic construct
  misc_feature 1..120: note = Artificially Synthesized Probe
  source 1..120: mol_type = other DNA
tacacacatgcaaaattagaggtgatgatttgttctaccaataggttcatgatagggaagatgggctcacgggaggctaaatggtcccctggagaacttaaaatggtttagattgatata

SEQ ID NO: 2437 - DNA, 120 bp, synthetic construct
  misc_feature 1..120: note = Artificially Synthesized Probe
  source 1..120: mol_type = other DNA
aattattcttattaaagaaaagaataacaagttccaagaaatatttgagagaggtgtcatgttgttcctggttggcgtttgttcccccagtgctccccaagacagagcaagggaaggatc

SEQ ID NO: 2438 - DNA, 120 bp, synthetic construct
  misc_feature 1..120: note = Artificially Synthesized Probe
  source 1..120: mol_type = other DNA
agcaaatgctcaacaaatgcaagctaagttaaacactttggacaacttacttgaacaacacaatcatataatgtgggtcctgttgttatcccacagagcaggaaactgatgcttagagcg

SEQ ID NO: 2439 - DNA, 120 bp, synthetic construct
  misc_feature 1..120: note = Artificially Synthesized Probe
  source 1..120: mol_type = other DNA
ctttcctcctcagagctgttgctgttaatgtggaagaaaaatgagggacacatccttctagacattttttttgacaatggaacgagaagtagagtttctgccaggatatattttgcacat

SEQ ID NO: 2440 - DNA, 120 bp, synthetic construct
  misc_feature 1..120: note = Artificially Synthesized Probe
  source 1..120: mol_type = other DNA
agagggcatctgtccctataaagtcacctgtcataaaagaccaagacagaggcaaatatcggaccattgaagataccaataagctgtgtgtggcttaacataaaaataaccacacattag

SEQ ID NO: 2441 - DNA, 120 bp, synthetic construct
  misc_feature 1..120: note = Artificially Synthesized Probe
  source 1..120: mol_type = other DNA
caagaagttagagtggaaaagtttttgtgtatccaactatctctagagtgtgaggttcatgacatcaaagactttccatattttgtacccccaacacttagcacaggagacttgatcagc

SEQ ID NO: 2442 - DNA, 120 bp, synthetic construct
  misc_feature 1..120: note = Artificially Synthesized Probe
  source 1..120: mol_type = other DNA
ataaagtgtgcttgttctacaaaatcaaatcgcttccacttgccacatgtttcagttcctggaatcaagggcaagcatctcatcacacagcattgttcataaagaagtttgggtcttctt

SEQ ID NO: 2443 - DNA, 120 bp, synthetic construct
  misc_feature 1..120: note = Artificially Synthesized Probe
  source 1..120: mol_type = other DNA
ggataccaggttaacaagattctgagagctgttcatatattccttacatggtttagacatccttccagattaaatccaaatgttaagaatgtgcacgtttcaggtagccaccactgcatt

SEQ ID NO: 2444 - DNA, 120 bp, synthetic construct
  misc_feature 1..120: note = Artificially Synthesized Probe
  source 1..120: mol_type = other DNA
catgattacctgcaggctcaaccaaggccaataggaacccagaaaagcaaataattttgaaccccctgaaacctagagttcacagtttttgttccacatttatttagtggaatgaagtga

SEQ ID NO: 2445 - DNA, 120 bp, synthetic construct
  misc_feature 1..120: note = Artificially Synthesized Probe
  source 1..120: mol_type = other DNA
agtaaagattttcttccccactatctactctgacagaagtggacccactttgtactttgtttattccaggaagatttttaacttcatctatagatgctggctccaagcaactgcccagca

SEQ ID NO: 2446 - DNA, 120 bp, synthetic construct
  misc_feature 1..120: note = Artificially Synthesized Probe
  source 1..120: mol_type = other DNA
taaattccaagaaatgaccatcattcttattggttttctgagacctatctctgtctcttatcagatttcacctaacaagcttttgctcccatccagctcatgctcagatcacagtgtctg

SEQ ID NO: 2447 - DNA, 120 bp, synthetic construct
  misc_feature 1..120: note = Artificially Synthesized Probe
  source 1..120: mol_type = other DNA
acaccgttaagaaagtgaaagacaattcatagaaggaaagaaaatatttgtaagtcgcgtatctgacaaatgaactgtatctagaagatataaacaactcttacagcaacccaatcaaaa

SEQ ID NO: 2448 - DNA, 120 bp, synthetic construct
  misc_feature 1..120: note = Artificially Synthesized Probe
  source 1..120: mol_type = other DNA
ttttaaaatgtgaataagaacatttcagtacacaaagattatctttgccctggataaagtagaaaatgacaatgtgggcataatggcccctcagcccctctgatagtgtctcagcccagg

SEQ ID NO: 2449 - DNA, 120 bp, synthetic construct
  misc_feature 1..120: note = Artificially Synthesized Probe
  source 1..120: mol_type = other DNA
ttcccaagtctgctctcctaagtatgagaaacaaagggaattgcctagaaccaggactatatctaaagggatttacaggacagaggtagctgtacttcttctaagttaccactttatact

SEQ ID NO: 2450 - DNA, 120 bp, synthetic construct
  misc_feature 1..120: note = Artificially Synthesized Probe
  source 1..120: mol_type = other DNA
gggccaggctgagaaagagcccagcacagccccgcagcagatcccgggcactcacgctcatttctatggggacaggtgccaggtagaacacaggatgcccaattccatttgaatttcaga

SEQ ID NO: 2451 - DNA, 120 bp, synthetic construct
  misc_feature 1..120: note = Artificially Synthesized Probe
  source 1..120: mol_type = other DNA
tggccagtctcaattgcacagggatcacgccactggcacaaggagacacagatgcctcgcaggggatgcccacgatgcctgcatgtgttgcttctggttcctttcctccagttccaaccg

SEQ ID NO: 2452 - DNA, 120 bp, synthetic construct
  misc_feature 1..120: note = Artificially Synthesized Probe
  source 1..120: mol_type = other DNA
ccacctcttggccggcttccctagtgggaacactggttgaaccagtttcctctaagattctgggagcaggacacccccagggataaggagaggaacaggaatcctaaagccctgagcatt

SEQ ID NO: 2453 - DNA, 120 bp, synthetic construct
  misc_feature 1..120: note = Artificially Synthesized Probe
  source 1..120: mol_type = other DNA
agattttcctcagcacccctcaccccaaacaaccagtggcggttcacagaaagacccggaagctggagtagaatcatgagatgcaggaggcccttggtagctgtagtaaaataaaagatg

SEQ ID NO: 2454 - DNA, 120 bp, synthetic construct
  misc_feature 1..120: note = Artificially Synthesized Probe
  source 1..120: mol_type = other DNA
agacaggcagacaggctgaggctcagagagaaaccaggagagcagagctgagtgagagacagagaacaataccttgaggcagagacagctgtggacacagaagtggcaggacacagacag

SEQ ID NO: 2455 - DNA, 120 bp, synthetic construct
  misc_feature 1..120: note = Artificially Synthesized Probe
  source 1..120: mol_type = other DNA
ccccttctttattcttatctcccatgagttacagactcccctttgagaagctgatgaacatttggggccccctcccccacctcatgcattcatatgcagtcatttgcatataattttagg

SEQ ID NO: 2456 - DNA, 120 bp, synthetic construct
  misc_feature 1..120: note = Artificially Synthesized Probe
  source 1..120: mol_type = other DNA
atttttggctgatggactggaacccagccctgagagagggagctccttctccatcagttccctcagtggcttctaagtttcctccttcctgcttcaggcccagcaaagagagagaggaga

SEQ ID NO: 2457 - DNA, 120 bp, synthetic construct
  misc_feature 1..120: note = Artificially Synthesized Probe
  source 1..120: mol_type = other DNA
tgtgcactgagagaacactggacaatagtttctatccactgactcttatgggcctcaactttgcccataatttcagcccaccaccacattaaaaatcttcatgtaataatagccaattat

SEQ ID NO: 2458 - DNA, 120 bp, synthetic construct
  misc_feature 1..120: note = Artificially Synthesized Probe
  source 1..120: mol_type = other DNA
gggaaacagttgagggcctataccttgtccaatctaattgaagaatgcacattcacttggagagcaaaatatttcttgatactgaattctagaaggaaggtgcctcacaatgttttgtgg

SEQ ID NO: 2459 - DNA, 120 bp, synthetic construct
  misc_feature 1..120: note = Artificially Synthesized Probe
  source 1..120: mol_type = other DNA
ctgggaaccctacactacggaaaacagcggctacctggagatcaccaagaagatgggcagcagctccatgaagcggagcctgagaaccaacttcctgcgctactggaccctcacctatct

SEQ ID NO: 2460 - DNA, 120 bp, synthetic construct
  misc_feature 1..120: note = Artificially Synthesized Probe
  source 1..120: mol_type = other DNA
tatttattacccaataaaaatattcacccagtgcttcagcttacggtaaactaaacacatctattatttacaacatagaaaattaaaggcgatgcccaagtcccggccttccgcaggggc

SEQ ID NO: 2461 - DNA, 120 bp, synthetic construct
  misc_feature 1..120: note = Artificially Synthesized Probe
  source 1..120: mol_type = other DNA
cccgatttaaaacagtgctatagtatataaatcagctcgcttccgtctgctgcaacaaaggttccacttttccccaaatgagtgctcgaaatatttctttgacgagggacagctgataga

SEQ ID NO: 2462 - DNA, 120 bp, synthetic construct
  misc_feature 1..120: note = Artificially Synthesized Probe
  source 1..120: mol_type = other DNA
agacacctgagttggctacatcactgtgtcattccacagactctgaattttagagtagtaaactgtctcttgatgcttgtgaaaactgatacttgatgctttagggccacagtagaaaga

SEQ ID NO: 2463 - DNA, 120 bp, synthetic construct
  misc_feature 1..120: note = Artificially Synthesized Probe
  source 1..120: mol_type = other DNA
ctcaagcaatcttcccacctaagcctcctagagtgctgggattataggcatgagccactgtacccagtcatattgataattactcttatagaaagagtacaagaatgggccgggcacggt

SEQ ID NO: 2464 - DNA, 120 bp, synthetic construct
  misc_feature 1..120: note = Artificially Synthesized Probe
  source 1..120: mol_type = other DNA
cactattttgtctagctttgatgaacagaggccacattttcagagccattatcattgtccttggcaaatagcagtcccagcactggatgtttccaagaatgtaaaatcatgaccagatat

SEQ ID NO: 2465 - DNA, 120 bp, synthetic construct
  misc_feature 1..120: note = Artificially Synthesized Probe
  source 1..120: mol_type = other DNA
ccgattaccagctggtcatctcctgaaattctgctcactgaaacggacatgtgaggacatggtttggaaatcatttttaaactcagcaatctggatatgagaacttcaaaacaaaattta

SEQ ID NO: 2466 - DNA, 120 bp, synthetic construct
  misc_feature 1..120: note = Artificially Synthesized Probe
  source 1..120: mol_type = other DNA
gtgtctgggagaagccaagcaagagtccgctgttatcttggcttgggatatttattttcaacacatttaaatcacagttctctagatctgcagcaaaataaccattgaagagcaaataca

SEQ ID NO: 2467 - DNA, 120 bp, synthetic construct
  misc_feature 1..120: note = Artificially Synthesized Probe
  source 1..120: mol_type = other DNA
attttgctatggcttagaaagattttgagacagaaagtgtacacctcctttaatgaacagtggctcatgcactacgatttattctgaggctcttaagaccccttcttggctctaagatct

SEQ ID NO: 2468 - DNA, 120 bp, synthetic construct
  misc_feature 1..120: note = Artificially Synthesized Probe
  source 1..120: mol_type = other DNA
gatcttagagccaagaaggggtcttaagagcctcagaataaatcgtagtgcatgagccactgttcattaaaggaggtgtacactttctgtctcaaaatctttctaagccatagcaaaatt

SEQ ID NO: 2469 - DNA, 120 bp, synthetic construct
  misc_feature 1..120: note = Artificially Synthesized Probe
  source 1..120: mol_type = other DNA
tgtatttgctcttcaatggttattttgctgcagatctagagaactgtgatttaaatgtgttgaaaataaatatcccaagccaagataacagcggactcttgcttggcttctcccagacac

SEQ ID NO: 2470 - DNA, 120 bp, synthetic construct
  misc_feature 1..120: note = Artificially Synthesized Probe
  source 1..120: mol_type = other DNA
ctccataccgatccacagtgcatcttccagtgccaggccacatagcatttagcaaagtagatcgattcatcattgaagaaagtcgcattcattgggaatcatatagtgaattaaattttg

SEQ ID NO: 2471 - DNA, 120 bp, synthetic construct
  misc_feature 1..120: note = Artificially Synthesized Probe
  source 1..120: mol_type = other DNA
ggatatctggtcatgattttacattcttggaaacatccagtgctgggactgctatttgccaaggacaatgataatggctctgaaaatgtggcctctgttcatcaaagctagacaaaatag

SEQ ID NO: 2472 - DNA, 120 bp, synthetic construct
  misc_feature 1..120: note = Artificially Synthesized Probe
  source 1..120: mol_type = other DNA
ttacaggcgtgagccaccgtgcccggcccattcttgtactctttctataagagtaattatcaatatgactgggtacagtggctcatgcctataatcccagcactctaggaggcttaggtg

SEQ ID NO: 2473 - DNA, 120 bp, synthetic construct
  misc_feature 1..120: note = Artificially Synthesized Probe
  source 1..120: mol_type = other DNA
agtctaagggggtggttctttctactgtggccctaaagcatcaagtatcagttttcacaagcatcaagagacagtttactactctaaaattcagagtctgtggaatgacacagtgatgta

SEQ ID NO: 2474 - DNA, 120 bp, synthetic construct
  misc_feature 1..120: note = Artificially Synthesized Probe
  source 1..120: mol_type = other DNA
cctgctctatcagctgtccctcgtcaaagaaatatttcgagcactcatttggggaaaagtggaacctttgttgcagcagatggaagcgagctgatttatatactatagcactgttttaaa

SEQ ID NO: 2475 - DNA, 120 bp, synthetic construct
  misc_feature 1..120: note = Artificially Synthesized Probe
  source 1..120: mol_type = other DNA
taatagatgtgtttagtttaccgtaagctgaagcactgggtgaatatttttattgggtaataaatattttcatgaaagcgcctttggctccagatccttgggagagggacacgtgtgtcc

SEQ ID NO: 2476 - DNA, 120 bp, synthetic construct
  misc_feature 1..120: note = Artificially Synthesized Probe
  source 1..120: mol_type = other DNA
actaatggaaggctctgaacgctgaaaaattctagaaaattcagattggaaatcggaactttctggagtcagcttttcttgcagacagagtctgaacgtctgcgtggaaaacttcatctg

SEQ ID NO: 2477 - DNA, 120 bp, synthetic construct
  misc_feature 1..120: note = Artificially Synthesized Probe
  source 1..120: mol_type = other DNA
agagcccgggtgcggtggggggagtcggctggcaccgaccgcggactccgtccggtccccagggccgacgggaaggtgcaggttctcctgggcgcgcactccctgtcgcagccggagccc

SEQ ID NO: 2478 - DNA, 120 bp, synthetic construct
  misc_feature 1..120: note = Artificially Synthesized Probe
  source 1..120: mol_type = other DNA
cccctgccctggcagcgcgtggaccgcgacgtggcaccgggaactctctgcgacgtggccggctggggcatagtcaaccacgcgggccgccgcccggacagcctgcagcacgtgctcttg

SEQ ID NO: 2479 - DNA, 120 bp, synthetic construct
  misc_feature 1..120: note = Artificially Synthesized Probe
  source 1..120: mol_type = other DNA
gagtggggactgagcagagcaggtggccactgagacgcgttagggcagaagtgggatccacggcaagtcaaagcttggaagagcaggaatgaggtgtgggacccccatactggaaagggc

SEQ ID NO: 2480 - DNA, 120 bp, synthetic construct
  misc_feature 1..120: note = Artificially Synthesized Probe
  source 1..120: mol_type = other DNA
acaaaaaaaaaaaaaaaattctgcgtggtggctcacgcctgtaatcccagcactttgggaggccgaggcgggcggatcatttgaggtcaggagttcctgatcagcctgaccaacatggtg

SEQ ID NO: 2481 - DNA, 120 bp, synthetic construct
  misc_feature 1..120: note = Artificially Synthesized Probe
  source 1..120: mol_type = other DNA
cagcactttgggaggccgaggcgggcagatcacaaggtcaggagattgagaccatcctggccaacacggtgaaatcccatctccactaaaaatacaaaaaaattagccgggcgtggtggc

SEQ ID NO: 2482 - DNA, 120 bp, synthetic construct
  misc_feature 1..120: note = Artificially Synthesized Probe
  source 1..120: mol_type = other DNA
cctgctcttaggaatttggtaaatactgcactgcacggaagggggcccattcagccgtctggtgaccaccacgaagttggagctcactgtgtgaatttcacgtttttgtttttgttgttt

SEQ ID NO: 2483 - DNA, 120 bp, synthetic construct
  misc_feature 1..120: note = Artificially Synthesized Probe
  source 1..120: mol_type = other DNA
tagaggcattttcacttctgagtcgggcactgggtgactctgatctcccggcccctgaagctgcccacgagcctgcgtcccacaacgcatgggcaccctcaccagtgctcccatctcctc

SEQ ID NO: 2484 - DNA, 120 bp, synthetic construct
  misc_feature 1..120: note = Artificially Synthesized Probe
  source 1..120: mol_type = other DNA
gagacacagaaacagcatgcagagacacagagaccatacacagagaagtgcagagataccagagacacgcagaaacaaggagagcacgcagagacagtatagagacaggcagacaacaca

SEQ ID NO: 2485 - DNA, 120 bp, synthetic construct
  misc_feature 1..120: note = Artificially Synthesized Probe
  source 1..120: mol_type = other DNA
aaatgagggaaaacctgctatactaacggtggcaaggtgaagtattagtgtaattctgcatacactctgcaatgccactaactagaacaatcaatctcaaaaagatttggccaccttcaa

SEQ ID NO: 2486 - DNA, 120 bp, synthetic construct
  misc_feature 1..120: note = Artificially Synthesized Probe
  source 1..120: mol_type = other DNA
aatccagtctctgggagaaacttcagtgaaattctatctaaaggttgcctagatgttaaatgatctgtaagtgtgtgttacactgtcatttaggtgtctactgagagacctgccaaacag

SEQ ID NO: 2487 - DNA, 120 bp, synthetic construct
  misc_feature 1..120: note = Artificially Synthesized Probe
  source 1..120: mol_type = other DNA
aaatacagtataaaatattaaaaacggcagacttgtatagggcttttaccatgaatagggtgtgcaggactgaaagttactctcagtaagtcattacatgagtggtgagtgaatgtgatg

SEQ ID NO: 2488 - DNA, 120 bp, synthetic construct
  misc_feature 1..120: note = Artificially Synthesized Probe
  source 1..120: mol_type = other DNA
aaattggtggttgtgtaaaggaggcttgcaagaagacattaacactcctagctagcaccattgcagatatgcacaatgaatacttgatgaatgtcatagaattctttctgaagcataggt

SEQ ID NO: 2489 - DNA, 120 bp, synthetic construct
  misc_feature 1..120: note = Artificially Synthesized Probe
  source 1..120: mol_type = other DNA
tttctacattgttttaatatatcttgcaccatagtgtgtatggatgtatttatacatatatacagtagtcctttagcatcctcaaggaattggttccaggacgctacccacccccagcag

SEQ ID NO: 2490 - DNA, 120 bp, synthetic construct
  misc_feature 1..120: note = Artificially Synthesized Probe
  source 1..120: mol_type = other DNA
acatatccaacatctttactgcaccagaaaaaaaaataggacagagtttctggcagagacacctatggcagtcaatgagaatagagaaaataagtaaattgagagctaagaacaacccta

SEQ ID NO: 2491 - DNA, 120 bp, synthetic construct
  misc_feature 1..120: note = Artificially Synthesized Probe
  source 1..120: mol_type = other DNA
gaccaaagaagctggaaagatgggagatgtagtccccctattttgagatgcctcctataagaatcaatgaagaataaatatgtcaactgtcttgtgttacctggaaatgctctacgtgtt

SEQ ID NO: 2492 - DNA, 120 bp, synthetic construct
  misc_feature 1..120: note = Artificially Synthesized Probe
  source 1..120: mol_type = other DNA
tcatgtgtagaacggggctggtccacccctcccaaatgcaggtccactggtaagtacaatgctgttctctcatatgctgttatctattataaagtttgagagaaataaatcttttttaca

SEQ ID NO: 2493 - DNA, 120 bp, synthetic construct
  misc_feature 1..120: note = Artificially Synthesized Probe
  source 1..120: mol_type = other DNA
gatttgctactcaaaatgaacactaggtggaaccacttcttttttttctactcagacacttcctgtgtgaatccgcccacagtacaaaatgctcatatactgtcgagacagatgagtaaa

SEQ ID NO: 2494 - DNA, 120 bp, synthetic construct
  misc_feature 1..120: note = Artificially Synthesized Probe
  source 1..120: mol_type = other DNA
tccattcatcctttcatggcctgttaactggtgcacttggaccaattacacttaacataattattgatatataggacttaaacctctgtcatttatttgtttctgtctgttccctctggg

SEQ ID NO: 2495 - DNA, 120 bp, synthetic construct
  misc_feature 1..120: note = Artificially Synthesized Probe
  source 1..120: mol_type = other DNA
tcttggtttccctttctctgagaatgtctatatttacccctttacttgtaaaagatcgtgtcactggatatcaaatttggagttgacagttctttgaacacttgaaaactgtgccacatg

SEQ ID NO: 2496 - DNA, 120 bp, synthetic construct
  misc_feature 1..120: note = Artificially Synthesized Probe
  source 1..120: mol_type = other DNA
gttgagtaccaatgccagaacttgtatcaacttgagggtaacaagcgaataacatgtagaaatggacaatggtcagaaccaccaaaatgcttacgtaagtactttaatattcacgtggct

SEQ ID NO: 2497 - DNA, 120 bp, synthetic construct
  misc_feature 1..120: note = Artificially Synthesized Probe
  source 1..120: mol_type = other DNA
aatcagctgaatttgtgtgtaaacggggatatcgtctttcatcacgttctcacacattgcgaacaacatgttgggatgggaaactggagtatccaacttgtgcaaaaagatagaatcaat

SEQ ID NO: 2498 - DNA, 120 bp, synthetic construct
  misc_feature 1..120: note = Artificially Synthesized Probe
  source 1..120: mol_type = other DNA
tgtgtgtgtgtgtgtttagagatagtcggggtaaaagttagggtttaattcttttgtatatatcggtatcctctgatttttctacctttaacatatatcactttggaaacaaaagtacaa

SEQ ID NO: 2499 - DNA, 120 bp, synthetic construct
  misc_feature 1..120: note = Artificially Synthesized Probe
  source 1..120: mol_type = other DNA
ttcccactatggtgccttcctactatgtccttacaatgtggaaggggcaagggagttccatgactcttctttgtaaaaagactaatccaatgtattagggtggaatcctcatgacctaat

SEQ ID NO: 2500 - DNA, 120 bp, synthetic construct
  misc_feature 1..120: note = Artificially Synthesized Probe
  source 1..120: mol_type = other DNA
gcagtataaagggatgtctagagatatgaatgactccatgaagatcctaataaagcaagtaactttgtatctcaggaaactagaaaatgaagaaaaaaattaacccaaagctactggaaa

SEQ ID NO: 2501 - DNA, 120 bp, synthetic construct
  misc_feature 1..120: note = Artificially Synthesized Probe
  source 1..120: mol_type = other DNA
tcaacaaattagccataaaagaaattaccccaagacaataaaggctacatatcacaagctcacatttaacattatactcaagagtgaaaagttgaaacatttttgtctatgatcagaaaa

SEQ ID NO: 2502 - DNA, 120 bp, synthetic construct
  misc_feature 1..120: note = Artificially Synthesized Probe
  source 1..120: mol_type = other DNA
ctcaaaacattctcttaagaagcaaatgtttctctttggccttccagaactcaactagtaaaatgccttggccatctcacaaactgttgccatgatgttttctcctgactggcctgcttt

SEQ ID NO: 2503 - DNA, 120 bp, synthetic construct
  misc_feature 1..120: note = Artificially Synthesized Probe
  source 1..120: mol_type = other DNA
gaccttgtgggtttcctgtgctaatggacaaggtaagttaaaagagatctaaacactcagcttccctcttaaatgtaacttcatgtaatatctagctttgtatgtctataattattttat

SEQ ID NO: 2504 - DNA, 120 bp, synthetic construct
  misc_feature 1..120: note = Artificially Synthesized Probe
  source 1..120: mol_type = other DNA
ttacttactttcttaaaagcactatagaaaagaatgatgacaaattctttcttatctgatattccagtggaaaacttgcctcctccaatgaactctttgtaagagtaaacttgagcaaaa

SEQ ID NO: 2505 - DNA, 120 bp, synthetic construct
  misc_feature 1..120: note = Artificially Synthesized Probe
  source 1..120: mol_type = other DNA
agaagctggcttctgtgtatatttcacgtgtccccattacactttggcataacaaaaggtcccaggatttccttgacttttcctactacagaccaagttccaataatttccctatgaaat

SEQ ID NO: 2506 - DNA, 120 bp, synthetic construct
  misc_feature 1..120: note = Artificially Synthesized Probe
  source 1..120: mol_type = other DNA
cttcagactaaatagcctgcaatcataagaaaatgtaagagtatctcaggaggttacacagtgcagggagatttagattttccaatatggaggagacactcagcagaaaactgtgcatcc

SEQ ID NO: 2507 - DNA, 120 bp, synthetic construct
  misc_feature 1..120: note = Artificially Synthesized Probe
  source 1..120: mol_type = other DNA
aacattttgagactccttcaggaagttactgggattacattcattgcacacaaaatgggtggtcaccagcagtaccatgtctcagtaagtaatcctctgaactgctacacatgtataaaa

SEQ ID NO: 2508 - DNA, 120 bp, synthetic construct
  misc_feature 1..120: note = Artificially Synthesized Probe
  source 1..120: mol_type = other DNA
agtaagtacaccgctctgagatcccagcatgttcatgtctttctaagtaacacggacgacagtctcagacttgtctatattaactgtggcaaaatgtttttgtcaacttgttttgccaac

SEQ ID NO: 2509 - DNA, 120 bp, synthetic construct
  misc_feature 1..120: note = Artificially Synthesized Probe
  source 1..120: mol_type = other DNA
acatgaactcatcattttttatggctgcatagaattccatggtgtatatgtgccacattttcttaatccagtctatcattgttggacatttgggttggttccaagtctttgctattgtga

SEQ ID NO: 2510 - DNA, 120 bp, synthetic construct
  misc_feature 1..120: note = Artificially Synthesized Probe
  source 1..120: mol_type = other DNA
agatagttgtagatatgcagcgttatttctgagggctctgttctgttccattgatctatatctctgttttggtagcagtaccatgctgttttggttactgtagccttgtagtatagtttg

SEQ ID NO: 2511 - DNA, 120 bp, synthetic construct
  misc_feature 1..120: note = Artificially Synthesized Probe
  source 1..120: mol_type = other DNA
ctgtctatatgctggattacatttattgatttgcgtatattgaactagccttgcatccccgggatgaagaccacttgatcatggtggataagctttttgatgtgctgttggattcggttt

SEQ ID NO: 2512 - DNA, 120 bp, synthetic construct
  misc_feature 1..120: note = Artificially Synthesized Probe
  source 1..120: mol_type = other DNA
cagtagtcattcaggagcagtttgttcagtttccatgtagttgagcagttttgagtgagtttcttaatcctgagttctagtttgattgcactgtggtctgagagacagtttgttataatt

SEQ ID NO: 2513 - DNA, 120 bp, synthetic construct
  misc_feature 1..120: note = Artificially Synthesized Probe
  source 1..120: mol_type = other DNA
tatttctccttcacttatgaagcttagtttggctggatatgaaattctgggttgaaaattcttctctttaagaatgttgaatattggcccccactctcttctggcttgtagagtttctgc

SEQ ID NO: 2514 - DNA, 120 bp, synthetic construct
  misc_feature 1..120: note = Artificially Synthesized Probe
  source 1..120: mol_type = other DNA
caggaccctcagctgcaggtctgttggagtttgctagaggtccactctagaccctgtttgcctgggtatctgcagcagtggctgcagaacagcggattttcatgaaccgcgaatgctgct

SEQ ID NO: 2515 - DNA, 120 bp, synthetic construct
  misc_feature 1..120: note = Artificially Synthesized Probe
  source 1..120: mol_type = other DNA
aattatggaataattgagacgaaagataatgggaatcttcctacaccattataggagcaactgtcctcaacaatagcctaagcccctgaaagaaaagtccctttttctcctgccataagc

SEQ ID NO: 2516 - DNA, 120 bp, synthetic construct
  misc_feature 1..120: note = Artificially Synthesized Probe
  source 1..120: mol_type = other DNA
agtctcaaggattctttgctttcattctgcccttccctgtgttcaacatttccttcagaaattcgtggtttcctttaagaacacggatgtctaggaaacttccagttttgctgttttcaa

SEQ ID NO: 2517 - DNA, 120 bp, synthetic construct
  misc_feature 1..120: note = Artificially Synthesized Probe
  source 1..120: mol_type = other DNA
gtgctcacgctcagaaaagttgtacatgtcgggggagaaatgagtgcttaattctgaatttctgctagcgtcaggagaatcagaccttaataatttgtatcaatgatgctactgaggata

SEQ ID NO: 2518 - DNA, 120 bp, synthetic construct
  misc_feature 1..120: note = Artificially Synthesized Probe
  source 1..120: mol_type = other DNA
agtcgagtaccaatgccagccctactatgaacttcagggttctaattatgtaacatgtagtaatggagagtggtcggaaccaccaagatgcatacgtaagttcttaaaattctagatcct

SEQ ID NO: 2519 - DNA, 120 bp, synthetic construct
  misc_feature 1..120: note = Artificially Synthesized Probe
  source 1..120: mol_type = other DNA
tctcctcttcccttataccagaatcaaaatgaatacactaaaaacccctcaagccagtaatataggtatacttccagaattttgtcccccaagtactatgaacttgaagcaacacaactc

SEQ ID NO: 2520 - DNA, 120 bp, synthetic construct
  misc_feature 1..120: note = Artificially Synthesized Probe
  source 1..120: mol_type = other DNA
tttggctgatcttacaatgggctaaaccttaattattgtcccctacttaagtatccacttctgtagatgatcatgtccaagtttgagctccaaactatgcaagtggtaagactgaagaag

SEQ ID NO: 2521 - DNA, 120 bp, synthetic construct
  misc_feature 1..120: note = Artificially Synthesized Probe
  source 1..120: mol_type = other DNA
attagcaaaatgtgagtacatttggagtgcttgtagtcacggcttgtcgaatgggggaaaggaggataagtaaccatgactccaatggaacatgttagcataatcctttttgatatgaag

SEQ ID NO: 2522 - DNA, 120 bp, synthetic construct
  misc_feature 1..120: note = Artificially Synthesized Probe
  source 1..120: mol_type = other DNA
tgaaaaaagaaaagaggttttgctaaccctttcagagcattgggaacacagccagaagtgcattaaatgtatatattaacttgggcaatgttgacactttaggatgctgaagccaggtgc

SEQ ID NO: 2523 - DNA, 120 bp, synthetic construct
  misc_feature 1..120: note = Artificially Synthesized Probe
  source 1..120: mol_type = other DNA
ttacccccagttagcatatggttagtgagaagttgcagggtaagaagaaaacaatgttccctttcccaacacttttcctgattatagagaaaaaagcatgaacttgtataatgatctagt

SEQ ID NO: 2524 - DNA, 120 bp, synthetic construct
  misc_feature 1..120: note = Artificially Synthesized Probe
  source 1..120: mol_type = other DNA
gcagtgggggtggtccgggcccctcagcctgcacccgggaggagacgcccccttttcacgccccgcccccggtggccgaggccggattcggacagctcggggtcagtcgacggagcacac

SEQ ID NO: 2525 - DNA, 120 bp, synthetic construct
  misc_feature 1..120: note = Artificially Synthesized Probe
  source 1..120: mol_type = other DNA
tcactctggactaggcatttaactacgtgcctcagtttccctttctcaataatacggagattatcgataccctctatactgggttgttgcaagactggaatgagatgatacaagtaattt

SEQ ID NO: 2526 - DNA, 120 bp, synthetic construct
  misc_feature 1..120: note = Artificially Synthesized Probe
  source 1..120: mol_type = other DNA
tccttgcaagctcctgaatattgtgagcaaatcaatggagacaaatagttattactggatgggtgtgagtactggctatggcaactcattaaaatctctttcagggtatgtttgtaccca

SEQ ID NO: 2527 - DNA, 120 bp, synthetic construct
  misc_feature 1..120: note = Artificially Synthesized Probe
  source 1..120: mol_type = other DNA
attttccctaaaaatctagcagcaatgcacttggaatgcttaagttagtccagagacaaatggtaagagtaggaaaacatgacagattgggaggtgttgagttctgaatttggggaccta

SEQ ID NO: 2528 - DNA, 120 bp, synthetic construct
  misc_feature 1..120: note = Artificially Synthesized Probe
  source 1..120: mol_type = other DNA
tgtatcactgggttaggaagctcaatgaatgagttggattgatcacaaagtagagtagagctgtggttgcttggcaacctgacattattctgccatttctggtatatttatccagtaaac

SEQ ID NO: 2529 - DNA, 120 bp, synthetic construct
  misc_feature 1..120: note = Artificially Synthesized Probe
  source 1..120: mol_type = other DNA
tagtttcttctttagaaacggggaaatagccatacttagctcacatgtcacatgtgttcttgtggacattgtatggggcaatctatgcagacagattagtagcacggttttttattgtag

SEQ ID NO: 2530 - DNA, 120 bp, synthetic construct
  misc_feature 1..120: note = Artificially Synthesized Probe
  source 1..120: mol_type = other DNA
ttaaatactggagatttcatgtaaaattcatatttctggcttatcttaaaaggattgatgttctcacagtattggacctgaatgcccaggtggcagaatgccacaggttagaacccagtg

SEQ ID NO: 2531 - DNA, 120 bp, synthetic construct
  misc_feature 1..120: note = Artificially Synthesized Probe
  source 1..120: mol_type = other DNA
tgacatagcagagagaataatgtaaaagatgtattccagcttctatggtaatggttggcatttttagcagaggttcctccctaacaaaagcttttgctgtaagtggtgattctcctggga

SEQ ID NO: 2532 - DNA, 120 bp, synthetic construct
  misc_feature 1..120: note = Artificially Synthesized Probe
  source 1..120: mol_type = other DNA
gtcaccgtataaactgagagctgtctaggggaaaaattgaaaatgttaccagttatattttgagagttgaacgtagtcctggccaaagatagggagatagacttttccaaagcatcctga

SEQ ID NO: 2533 - DNA, 120 bp, synthetic construct
  misc_feature 1..120: note = Artificially Synthesized Probe
  source 1..120: mol_type = other DNA
catttgtggaaaagtagacataaaggaatcctactgaggtattagatgataatgcatacctattccaggaatggtggcattaaatatgaggttttaaaacctgccagaggtggtggtgca

SEQ ID NO: 2534 - DNA, 120 bp, synthetic construct
  misc_feature 1..120: note = Artificially Synthesized Probe
  source 1..120: mol_type = other DNA
atgcataatataaatagcattctcagatgctgagtggctccaaaaggctcctttttgtgtactagaaagtggcaagaataagtttgtttcctgctttggctagacaggagatcccacttc

SEQ ID NO: 2535 - DNA, 120 bp, synthetic construct
  misc_feature 1..120: note = Artificially Synthesized Probe
  source 1..120: mol_type = other DNA
tctgcagtgtaattttggacagcaggccttaaaaacccattactgtatttaacagtaaaacaatctgccacagcctagtatttactgcctcaattaagcatgcattccacttcctttgcc

SEQ ID NO: 2536 - DNA, 120 bp, synthetic construct
  misc_feature 1..120: note = Artificially Synthesized Probe
  source 1..120: mol_type = other DNA
gatgtctcagctttcaacagctacttcaggtattcaaatgctaggccaatatctaaaagttgaacaaaagaagcctcaaagcaacctagatctctttcttggcaaaaattcactaaaatg

SEQ ID NO: 2537 - DNA, 120 bp, synthetic construct
  misc_feature 1..120: note = Artificially Synthesized Probe
  source 1..120: mol_type = other DNA
taactcatacctttaaacagtaacttcaaacaacagacattttatgaaatctcatgaattgtaggtgaggaatttaggcagggctccgctgggtgatttcttctgccccatttggtgaca

SEQ ID NO: 2538 - DNA, 120 bp, synthetic construct
  misc_feature 1..120: note = Artificially Synthesized Probe
  source 1..120: mol_type = other DNA
ccttctatttattgattacagccacaaatggaaaaggaagcaggctttctgccctgaaataatgatgatacatcgggctgcagagctcctatacctataactctcaaaagcaaatggaaa

SEQ ID NO: 2539 - DNA, 120 bp, synthetic construct
  misc_feature 1..120: note = Artificially Synthesized Probe
  source 1..120: mol_type = other DNA
ggtggtgagaatgagctgagaagggtggtaataaactgaggtttctacaacgagtttgcattaaaaaaaacttgttgggggttctggaacccaatcaattctcagatgtttccatagtct

SEQ ID NO: 2540 - DNA, 120 bp, synthetic construct
  misc_feature 1..120: note = Artificially Synthesized Probe
  source 1..120: mol_type = other DNA
tagtaagaagaattgaaaaataattcacagagaattgattcccatgatgcgttcacctatgtcctgctcagaacacatctaggatcatttcagcgctgatagactgttcaaggagatgca

SEQ ID NO: 2541 - DNA, 120 bp, synthetic construct
  misc_feature 1..120: note = Artificially Synthesized Probe
  source 1..120: mol_type = other DNA
caataatctattgaggtgcttttcgattgtgagacgaccaagaaattagctgatcccagcagaaaaacagagctccttccttacttttcagctgcgttaatttcttctctacgtttcaga

SEQ ID NO: 2542 - DNA, 120 bp, synthetic construct
  misc_feature 1..120: note = Artificially Synthesized Probe
  source 1..120: mol_type = other DNA
ggagtctgaaaaagctgatgtcacaaaagtacagagttattagtgactccggaatgtatcaaggaggggaggataggaagagattggtcaatgacataaaattacaattagacaggagaa

SEQ ID NO: 2543 - DNA, 120 bp, synthetic construct
  misc_feature 1..120: note = Artificially Synthesized Probe
  source 1..120: mol_type = other DNA
atgaatgaaagactagcctttgaaccctaggagagtcaactctacaccaaccctgtctattaaaaaaagtctgtgcttacagatgtcttgtgtgagatgtggctttaccaaaagtatctg

SEQ ID NO: 2544 - DNA, 120 bp, synthetic construct
  misc_feature 1..120: note = Artificially Synthesized Probe
  source 1..120: mol_type = other DNA
gaaaaaagaacaataacagaaaaaaaattacccatggggttgcagctgtgctcccagatacaaaacagggaaagaaaacaggtctctccaagcaaagggtatatgtgtatacgtgtgtgt

SEQ ID NO: 2545 - DNA, 120 bp, synthetic construct
  misc_feature 1..120: note = Artificially Synthesized Probe
  source 1..120: mol_type = other DNA
ggatgggtgaaattttgtgagcttctggattggatgagggtgtgctcttgcagaaagaattcctgaatactttctgcactgacagaacctgcttattaattcttacagcagttatgtttt

SEQ ID NO: 2546 - DNA, 120 bp, synthetic construct
  misc_feature 1..120: note = Artificially Synthesized Probe
  source 1..120: mol_type = other DNA
gtcaaaaaataaaagatgcaggtgaggttgtgtggagaaaaaggaagagaaagtacactgttagcgggggtgtaaattaggtcaaccgttgtagaagacagtgtggtgactcctcaaaga

SEQ ID NO: 2547 - DNA, 120 bp, synthetic construct
  misc_feature 1..120: note = Artificially Synthesized Probe
  source 1..120: mol_type = other DNA
ttgtttttaaagactggggagggtggttgacgactgacatgatgggaatactgtgtgctgattgtggtggtattaataccccatctacctttgtcaatattcattgaattgtacctttac

SEQ ID NO: 2548 - DNA, 120 bp, synthetic construct
  misc_feature 1..120: note = Artificially Synthesized Probe
  source 1..120: mol_type = other DNA
atcagtgcattttgagccctcagttgttcaagtactatcacagaagatcgatatcaacttttgtttcagctccagattaaaaggtgagcctattagagtgtttatgtgtagcagacccta

SEQ ID NO: 2549 - DNA, 120 bp, synthetic construct
  misc_feature 1..120: note = Artificially Synthesized Probe
  source 1..120: mol_type = other DNA
ttggagctcaggggaagctgccctcttgcccttggatggtttgctgaaaaatgaagccacaataaggcatgttaataagaagaaagcataaaatttatttacccatatgcatgtggagaa

SEQ ID NO: 2550 - DNA, 120 bp, synthetic construct
  misc_feature 1..120: note = Artificially Synthesized Probe
  source 1..120: mol_type = other DNA
cataatccaggacaatatctccctctcaaaatcctgaatcaccttacatttgcaaagtcctatttccaatgtaaggtaatattctcaggtcctagcaactaggacacgaacatctttggg

SEQ ID NO: 2551 - DNA, 120 bp, synthetic construct
  misc_feature 1..120: note = Artificially Synthesized Probe
  source 1..120: mol_type = other DNA
tcttcttacatgaagtcacttcttgggtgggagctccaggactggttgaattagttccttggtatgagtcacagatcctggtggagtcagctggcctgcccaaatgcaagagtctgaaaa

SEQ ID NO: 2552 - DNA, 120 bp, synthetic construct
  misc_feature 1..120: note = Artificially Synthesized Probe
  source 1..120: mol_type = other DNA
atgagcaactcagaatgatctccaccctcagagagtgtacagtctacctcagtatgtagatgattaatagacaaacaataagtgttgaatgttgcacaaactgtcctttatttgatcctt

SEQ ID NO: 2553 - DNA, 120 bp, synthetic construct
  misc_feature 1..120: note = Artificially Synthesized Probe
  source 1..120: mol_type = other DNA
tgagtagctgggactacaggcatgcaccactatgcccagctaattttttatatttttagtagagacggggttttaccatgttggccacgctaatgttgagctcctggtgtcatgtgatcc

SEQ ID NO: 2554 - DNA, 120 bp, synthetic construct
  misc_feature 1..120: note = Artificially Synthesized Probe
  source 1..120: mol_type = other DNA
acaggtttaagaagcgtaaatgttgtccacctcttctttccatcccatgcacatcttacttttactctagtaactaccacccatgaatgtccatctattaaacccaagcagagagtagtt

SEQ ID NO: 2555 - DNA, 120 bp, synthetic construct
  misc_feature 1..120: note = Artificially Synthesized Probe
  source 1..120: mol_type = other DNA
tacccaggtgatgtgcttttcgacaggattacatttagtctaagaggtagaaaaacgtcaccaacgacaccttaaaggcttaccccaaccaccagaaaaatatttgtactatttccttct

SEQ ID NO: 2556 - DNA, 120 bp, synthetic construct
  misc_feature 1..120: note = Artificially Synthesized Probe
  source 1..120: mol_type = other DNA
gtttacacaggattaattgtgtaattttgcaagcaaccagcacagtgaacactgatttttgcattagccccatgtgttgtttccaaggggactctgctttctattttaaggtggtgttac

SEQ ID NO: 2557 - DNA, 120 bp, synthetic construct
  misc_feature 1..120: note = Artificially Synthesized Probe
  source 1..120: mol_type = other DNA
cttaaaatgtgtcctgagtgacaaactggcccccactggaagaactctttaaaacactctgttaccagagcttcaaaaagggcttgtttctgaaggatcaaaggatctcttgtataataa

SEQ ID NO: 2558 - DNA, 120 bp, synthetic construct
  misc_feature 1..120: note = Artificially Synthesized Probe
  source 1..120: mol_type = other DNA
gcacgtgcatatttatggagaaagaatccttagctttccccagatgctcacatgtgtttgtgatcctaatggggttaagaacccttaacctgataatctcaaccaattttcctttcacat

SEQ ID NO: 2559 - DNA, 120 bp, synthetic construct
  misc_feature 1..120: note = Artificially Synthesized Probe
  source 1..120: mol_type = other DNA
cttaactgagaaggttttggtgtctaccattactgacctcactgtgaggaggcaccggagaatcatgatctcattctgtgtattggcatgtcattacacattattaatttggtcttttga

SEQ ID NO: 2560 - DNA, 120 bp, synthetic construct
  misc_feature 1..120: note = Artificially Synthesized Probe
  source 1..120: mol_type = other DNA
tgatcttgtcatttcttactacaaatccacgatggtcttttacaagataaagtttaattatctgagcatgacacctagggctcttcacattctgtgcgatccaacttttcagcctcgtct

SEQ ID NO: 2561 - DNA, 120 bp, synthetic construct
  misc_feature 1..120: note = Artificially Synthesized Probe
  source 1..120: mol_type = other DNA
ttagaataaaacaaaactcccacaattatccaccttaaccaattgctgtctcctacaaatcctttccaaccagacttcatgggtagaaagcgagtttctgctggtgaaagggtgaaacta

SEQ ID NO: 2562 - DNA, 120 bp, synthetic construct
  misc_feature 1..120: note = Artificially Synthesized Probe
  source 1..120: mol_type = other DNA
atgctatccctcccccctctttctaaacattattaaaaatatttgtgtcactaatcttgcggccataaagaacaagagtttgctttaaaggtgtactgatgctgcgataacacctatggc

SEQ ID NO: 2563 - DNA, 120 bp, synthetic construct
  misc_feature 1..120: note = Artificially Synthesized Probe
  source 1..120: mol_type = other DNA
agctagtaagtggcagagcttattcattcactcaagaaaatatttagtgatgacctgttttgtgctacatgctggagctggatgaaaaccccaaagtgtctgagtgttactgatatcatc

SEQ ID NO: 2564 - DNA, 120 bp, synthetic construct
  misc_feature 1..120: note = Artificially Synthesized Probe
  source 1..120: mol_type = other DNA
acgtcattaatagggagtgttactgacatagcaaggaatcaaactcgttaggacctctgacttgccttggaatgttctttgctgatatctctctattacgctgttggcttctaatatggt

SEQ ID NO: 2565 - DNA, 120 bp, synthetic construct
  misc_feature 1..120: note = Artificially Synthesized Probe
  source 1..120: mol_type = other DNA
tattgagtattttggcacacattttgagggtctgggcctccatgatttgaatcaagaactgattcctttcgggtaaatgttagctgatgaccaaaaaagaggtattttcaatcccagttt

SEQ ID NO: 2566 - DNA, 120 bp, synthetic construct
  misc_feature 1..120: note = Artificially Synthesized Probe
  source 1..120: mol_type = other DNA
tcacagagcaccggctagatctcagcctagtgctaagcaatttttgcatgttagtaccattcctccaagccattctgcaaaacagatactattatcccttatttaccaatgagacaacta

SEQ ID NO: 2567 - DNA, 120 bp, synthetic construct
  misc_feature 1..120: note = Artificially Synthesized Probe
  source 1..120: mol_type = other DNA
ggattgctgaatcaaatggtagagctacttttagttctgtaaggaatctccgtactgttttccatagtggttgtgctagttgacattctcaccagcagtgtagaagtgctccctttccat

SEQ ID NO: 2568 - DNA, 120 bp, synthetic construct
  misc_feature 1..120: note = Artificially Synthesized Probe
  source 1..120: mol_type = other DNA
gaaaggagtcatgtcataaaatgacatgtctcaaaatgtcttgtgaagccaagttttcttccagcatggcaagcaatcaccatttctcttgctgagcatctaatgaagtcataggtttga

SEQ ID NO: 2569 - DNA, 120 bp, synthetic construct
  misc_feature 1..120: note = Artificially Synthesized Probe
  source 1..120: mol_type = other DNA
atatttcttgtttcattctaaaggatggtctgtgcatctctttccagagatcatgcacctacaacatgaaggaatgaaagaaaacctaataatacagagactggctgagcgcggtggctc

SEQ ID NO: 2570 - DNA, 120 bp, synthetic construct
  misc_feature 1..120: note = Artificially Synthesized Probe
  source 1..120: mol_type = other DNA
aagtcatgtaacattcacctcagcaaatggaacagcagggtcagcaaatctcattttgagtcaacaaatgcaaacattgcattatttcttttccccactgagagactgtcgtaacacaca

SEQ ID NO: 2571 - DNA, 120 bp, synthetic construct
  misc_feature 1..120: note = Artificially Synthesized Probe
  source 1..120: mol_type = other DNA
tgagagatgacctcttgagttgaaggcttatgttcactctgtagttcagaggtctgatctttcaatgcttcctgacgaagctctcctcgttttggtccatatcgttttattttgaaagat

SEQ ID NO: 2572 - DNA, 120 bp, synthetic construct
  misc_feature 1..120: note = Artificially Synthesized Probe
  source 1..120: mol_type = other DNA
gagctcacgcttcatagtctgaacgacttacagcttcagtcactgttccttgaatttgaatccgtttgaaatctgacctgaatccttgattggagttttttcaaattctttgtgcaacac

SEQ ID NO: 2573 - DNA, 120 bp, synthetic construct
  misc_feature 1..120: note = Artificially Synthesized Probe
  source 1..120: mol_type = other DNA
ttgccctccactatttttagatcttcacttgggaactttctccaagaggggttctccatacagactttctaaccacagggcatctgaaagtctcttgtaacattaaaaatggtttgaagt

SEQ ID NO: 2574 - DNA, 120 bp, synthetic construct
  misc_feature 1..120: note = Artificially Synthesized Probe
  source 1..120: mol_type = other DNA
gccttctcttggtggtctgtgaagtttttataaagatattgattattttccaatgacacacaaatctactgctagagaccattcaaatgcttagttacaccagggcttggctcctgtacc

SEQ ID NO: 2575 - DNA, 120 bp, synthetic construct
  misc_feature 1..120: note = Artificially Synthesized Probe
  source 1..120: mol_type = other DNA
ttccttagccaaacaccccattcccttcatcctctctcagctgttctttggattacctccaaattgcatacataattttggtattgaggtgccaaaaatgcatttgtttcaactggagtt

SEQ ID NO: 2576 - DNA, 120 bp, synthetic construct
  misc_feature 1..120: note = Artificially Synthesized Probe
  source 1..120: mol_type = other DNA
tctcttctaaacagtggattttattggactgcacacgcgtgcagagatttggcagatatttgaggtcttggaaaggaaacaaaccagcgaaatatatcactattatcaccaacacaactg

SEQ ID NO: 2577 - DNA, 120 bp, synthetic construct
  misc_feature 1..120: note = Artificially Synthesized Probe
  source 1..120: mol_type = other DNA
gcttctaggagcagttaattgtgagaagttaagtatatgggcaaacctagtggaagattagggttatttttagtaagatttgtctgtgcagatctatctcagtactgagtttctatctcc

SEQ ID NO: 2578 - DNA, 120 bp, synthetic construct
  misc_feature 1..120: note = Artificially Synthesized Probe
  source 1..120: mol_type = other DNA
atttgacctgtggtggtcagagaaagcttctctgagcaacaaatgcctgatcagagttgagaagtaaactaaaccagaaagtaagactagaaggatccatttgattgggaactttattag

SEQ ID NO: 2579 - DNA, 120 bp, synthetic construct
  misc_feature 1..120: note = Artificially Synthesized Probe
  source 1..120: mol_type = other DNA
ctgagttggaaatcgaaatccaaggactgcaaaatcaaatgataataaaccaaccataaggttaaactttccaaccaccacaaacttagagaccaccagaaatttgtgttacttgtttct

SEQ ID NO: 2580 - DNA, 120 bp, synthetic construct
  misc_feature 1..120: note = Artificially Synthesized Probe
  source 1..120: mol_type = other DNA
tattatgattaacaatgcttttattgccctagccatggctgtgatgtatctcgttatgaaccaattatgctcccttagcaccatagttatagaggatgggacagttaatgcgagttaggt

SEQ ID NO: 2581 - DNA, 120 bp, synthetic construct
  misc_feature 1..120: note = Artificially Synthesized Probe
  source 1..120: mol_type = other DNA
attatatacattttgaacttgatgatattatctccattttacgaatgcacaaatggagggacaaagagctaaagtcaaattggtggcctcctggttctctgctcagaccgacctttgaga

SEQ ID NO: 2582 - DNA, 120 bp, synthetic construct
  misc_feature 1..120: note = Artificially Synthesized Probe
  source 1..120: mol_type = other DNA
tataccccttcattcttaacctgctcactggtttcctaccataattacagtctcaaacagtggttgcattctggcaaaacgatgttttgagttagagttgttatgcagttagtcagttgt

SEQ ID NO: 2583 - DNA, 120 bp, synthetic construct
  misc_feature 1..120: note = Artificially Synthesized Probe
  source 1..120: mol_type = other DNA
gcatctatcaataatgcctttagttcctcactttgagttctgcttagagctaaacatattctaagcgaagtaaggaggtttcatgcttctgtgtatgcataagtgtgcctgacaaagaga

SEQ ID NO: 2584 - DNA, 120 bp, synthetic construct
  misc_feature 1..120: note = Artificially Synthesized Probe
  source 1..120: mol_type = other DNA
atgcctcctccatggattttccatggtgtctcacattctctaattagttattccttaaagttttgtccacctgtgtatctttagtggtatggcttcatgtcacctcaaatatggaggcat

SEQ ID NO: 2585 - DNA, 120 bp, synthetic construct
  misc_feature 1..120: note = Artificially Synthesized Probe
  source 1..120: mol_type = other DNA
tggctgtctgtccaggcagaagcaacatgacctctggtttgaaaggcctctcagattaagagagaatattgtgtcttggggaaatcaatcatattattatgaatcatagaattatgagtc

SEQ ID NO: 2586 - DNA, 120 bp, synthetic construct
  misc_feature 1..120: note = Artificially Synthesized Probe
  source 1..120: mol_type = other DNA
atatagtgggggtggggcaggagataggaattgcagagaaatacgaacagttaaacataaagagaaactggaaatttgaaaatatatgaagtgtctgaccccaagttcaagctgagaagc

SEQ ID NO: 2587 - DNA, 120 bp, synthetic construct
  misc_feature 1..120: note = Artificially Synthesized Probe
  source 1..120: mol_type = other DNA
atttttgggtcccaagctgggcctacagaattagaatttctggtcatggggcccgtttaacttacttttctagtgtttcatctgtgttctaaaattttagcaagactgaaagtgcacaca

SEQ ID NO: 2588 - DNA, 120 bp, synthetic construct
  misc_feature 1..120: note = Artificially Synthesized Probe
  source 1..120: mol_type = other DNA
ctctcagctagtcagaagggcacaccctatggctttacccttgatcattgcacaaaaagaagagccaagactgtgtaacccaagtgtaatcaaagttacataaaaattacttagtgaagc

SEQ ID NO: 2589 - DNA, 120 bp, synthetic construct
  misc_feature 1..120: note = Artificially Synthesized Probe
  source 1..120: mol_type = other DNA
gaaattgaacaatatatgttcttaataacttcctttagtcaataatcgagtttgggaatttttagcagcttgagtatatttaagcccagatctacacagtactcacagggcaggattcac

SEQ ID NO: 2590 - DNA, 120 bp, synthetic construct
  misc_feature 1..120: note = Artificially Synthesized Probe
  source 1..120: mol_type = other DNA
ttgaaacatgaagaccacttcaagtgctatgcaaagtgagggaaatttggagagtagattcttctgaagatttctctgctaaataagttgcactcaactgaaatccagatgtgccagcac

SEQ ID NO: 2591 - DNA, 120 bp, synthetic construct
  misc_feature 1..120: note = Artificially Synthesized Probe
  source 1..120: mol_type = other DNA
aagacggatagtattgatggactgcactatcacagtcttagacttgcagaaatgccttggagttttttgtttgacatttctttgtcccttgggtactttgctctgactctgtcatttaga

SEQ ID NO: 2592 - DNA, 120 bp, synthetic construct
  misc_feature 1..120: note = Artificially Synthesized Probe
  source 1..120: mol_type = other DNA
accatttactaggcttattggccgtgtgccaagtgctgtgtttatttcttattttcataggatatgttatttaattaacgggtagctaagagagagggttccagagacaaactgctaagg

SEQ ID NO: 2593 - DNA, 120 bp, synthetic construct
  misc_feature 1..120: note = Artificially Synthesized Probe
  source 1..120: mol_type = other DNA
aggttagtagcatggccaattttgttgtacagtatcctcagttaagcatgtataccaggagaaggatccatctttcttgcactttgaaggatttggtaacttattcaggacttggtccta

SEQ ID NO: 2594 - DNA, 120 bp, synthetic construct
  misc_feature 1..120: note = Artificially Synthesized Probe
  source 1..120: mol_type = other DNA
catttcaccctccccttacttgaaatactaggaatcaagtctgcaggaagctggctgatcacaaatcacgtgtcagcacctccataacatttacctgcataatttgtccttattattttt

SEQ ID NO: 2595 - DNA, 120 bp, synthetic construct
  misc_feature 1..120: note = Artificially Synthesized Probe
  source 1..120: mol_type = other DNA
catgctttggtttcatttcacagctgctaatttatttacttcacatttgttgtcattatcgcattctctgtttattcttgcttcaaatgtgttttgccccgacacatgttcaatagatac

SEQ ID NO: 2596 - DNA, 120 bp, synthetic construct
  misc_feature 1..120: note = Artificially Synthesized Probe
  source 1..120: mol_type = other DNA
tactaaagagagaagcaaaaaattatggtcagaatcctgtctcaggagcttcttaagagttgaaagaaaaaactcaatttccccaaccatcaaccagctgctcggcttgtgcacaaaaag

SEQ ID NO: 2597 - DNA, 120 bp, synthetic construct
  misc_feature 1..120: note = Artificially Synthesized Probe
  source 1..120: mol_type = other DNA
aatcaaaaaagagacaacgctcttttattttcatttcagctccttccagccatagttctggccagaaatggggggaagggggaaatattttgaatcaaactgagttttagtgacagaagg

SEQ ID NO: 2598 - DNA, 120 bp, synthetic construct
  misc_feature 1..120: note = Artificially Synthesized Probe
  source 1..120: mol_type = other DNA
gctccaatcaaaaaaaaattcttatattttggccaaagttccatttcctaaggattgtggggagggggaaggaaagtttttgtgaactcgggcaagtcattttaactcgctgattttcag

SEQ ID NO: 2599 - DNA, 120 bp, synthetic construct
  misc_feature 1..120: note = Artificially Synthesized Probe
  source 1..120: mol_type = other DNA
agaaaccacagagagaggaaggggaaatcaaagtgaacattgatgaatgtgggtaaggatattgtgtgttggggaagcatcttagttcttccatttaatacacatgtgatgtttgaagca

SEQ ID NO: 2600 - DNA, 120 bp, synthetic construct
  misc_feature 1..120: note = Artificially Synthesized Probe
  source 1..120: mol_type = other DNA
ttggtagtatttcacaaacagtgaggaggtgggagtaaattcagcactttatgaagttttgtgcattcttcagtgttgttggcatcagtgagtgtgcgatagctagaaacaggtcaataa

SEQ ID NO: 2601 - DNA, 120 bp, synthetic construct
  misc_feature 1..120: note = Artificially Synthesized Probe
  source 1..120: mol_type = other DNA
cttctcacttcaccagtttccattcactgaccttttcctccttagtttctgttctccatgccagtctgaaaacagagaatttgcatgtactcatttgtcgtgttcactacatttttttcc

SEQ ID NO: 2602 - DNA, 120 bp, synthetic construct
  misc_feature 1..120: note = Artificially Synthesized Probe
  source 1..120: mol_type = other DNA
gtttttatgagacaagaagcaatatctctcttttctaactaagcatttagacagtaaattctctttgcatggatagcagtgtggtcctactcaccactgcaacttcgttgcctagcatgg

SEQ ID NO: 2603 - DNA, 120 bp, synthetic construct
  misc_feature 1..120: note = Artificially Synthesized Probe
  source 1..120: mol_type = other DNA
cttgagctttgaaggttgggattgtcacaacattaagagtgttataacctttcttctcagacatttttgaggagttggagataggaaactgcagagtttagcctgtttggaagaaagctg

SEQ ID NO: 2604 - DNA, 120 bp, synthetic construct
  misc_feature 1..120: note = Artificially Synthesized Probe
  source 1..120: mol_type = other DNA
aaaaaaaaaaaaaagagtatgggctccgggccagattatccgggttccattctaaagcactccacttattagctggtgacttttcaaatgacttctctatacccaaatgatctcatctga

SEQ ID NO: 2605 - DNA, 120 bp, synthetic construct
  misc_feature 1..120: note = Artificially Synthesized Probe
  source 1..120: mol_type = other DNA
cccagtacttcctcaactcatgactgaaactttgttccagttcaagaaggaaataaagagcccttcaaaatagaatactgaatactttcttcatccgctctatagaaatcaggccaggaa

SEQ ID NO: 2606 - DNA, 120 bp, synthetic construct
  misc_feature 1..120: note = Artificially Synthesized Probe
  source 1..120: mol_type = other DNA
atggtttcaagcaaccttgagcttcctctctcttctctctatatttctcacgctcagatcttagtattctaatggggacgcacgaaaaagggacccacagaaaaacaatattcagaatga

SEQ ID NO: 2607 - DNA, 120 bp, synthetic construct
  misc_feature 1..120: note = Artificially Synthesized Probe
  source 1..120: mol_type = other DNA
agaagtgggcagtgattggaagggaatccgaagtagggattggggacttaaaggctgcttagacttgattaataaatgctgtataaatgaaatgctgagacaagggataaaattgcactt

SEQ ID NO: 2608 - DNA, 120 bp, synthetic construct
  misc_feature 1..120: note = Artificially Synthesized Probe
  source 1..120: mol_type = other DNA
agtaatgacttgtattactggtttctcaagggtagagaccagtgattctcctaaattctcctacaacacccagcatatctcctcacaacaaggaattattcagttggaaatttcaagggc

SEQ ID NO: 2609 - DNA, 120 bp, synthetic construct
  misc_feature 1..120: note = Artificially Synthesized Probe
  source 1..120: mol_type = other DNA
ggtagaattgatgcctggtgtttctatgtctttgcttttttattccttcatatctgccttgtttttcattaaataaatattgtctggcatgccattttattaccttgtttcttttgttgt

SEQ ID NO: 2610 - DNA, 120 bp, synthetic construct
  misc_feature 1..120: note = Artificially Synthesized Probe
  source 1..120: mol_type = other DNA
ctgctctgattgtttccttgtattccagttttctgcctaatcacatgcagaaccattccattcacatagtgaatacatctctcacttgacacagggatcctcatttatgggaaagaaaca

SEQ ID NO: 2611 - DNA, 120 bp, synthetic construct
  misc_feature 1..120: note = Artificially Synthesized Probe
  source 1..120: mol_type = other DNA
atccactaagtactttgccaggtagaggggatacattcgtgaaatgtaagtttctgccctgatggggcttacagactttcggtggaactagataaaacaacgaaacaaaagatattacta

SEQ ID NO: 2612 - DNA, 120 bp, synthetic construct
  misc_feature 1..120: note = Artificially Synthesized Probe
  source 1..120: mol_type = other DNA
aaccttgtttgaggaagacattatgacagctgggtgacttgggcatttaaatggaatctgatgaagtccctcccaccattttctctataaaatgccaatggcatttaaaagtagtgtcac

SEQ ID NO: 2613 - DNA, 120 bp, synthetic construct
  misc_feature 1..120: note = Artificially Synthesized Probe
  source 1..120: mol_type = other DNA
gaatataatacataaagtttattacccccattttcataattctgattccaagttagagatccccttccaagataggctccatagcctcctgtgtaagatgtctctgcccaccctacccca

SEQ ID NO: 2614 - DNA, 120 bp, synthetic construct
  misc_feature 1..120: note = Artificially Synthesized Probe
  source 1..120: mol_type = other DNA
gtaaattctagtaggtcagtgaagaaatctgtcttgttcaccactccctctctagacaatagctctgtgccaggtacatgcagacactcaatgtatattgaatgttgaagaacttttcct

SEQ ID NO: 2615 - DNA, 120 bp, synthetic construct
  misc_feature 1..120: note = Artificially Synthesized Probe
  source 1..120: mol_type = other DNA
agccactatgacccgccttcactggaattctttagctagccttattttacttggattctgattgaaatatgttctcctcagaatacaggatgaaacaaagctaatttaaggtgaccaagt

SEQ ID NO: 2616 - DNA, 120 bp, synthetic construct
  misc_feature 1..120: note = Artificially Synthesized Probe
  source 1..120: mol_type = other DNA
cttcctttggaaaacaggtcaaatgacaatgcgaagggtgatcaaggagaaaatgtgtgaagtagaagcctagaactcaagagaaatgaataatatcttggcatcacttactttgcttta

SEQ ID NO: 2617 - DNA, 120 bp, synthetic construct
  misc_feature 1..120: note = Artificially Synthesized Probe
  source 1..120: mol_type = other DNA
atagcaccgtaactcacccctcattgaagcttgttcaacacagtttttttctctgtaaggcatgttatagcctccttgtgcttaagaaaactagggagcacttctgcattatttttaaac

SEQ ID NO: 2618 - DNA, 120 bp, synthetic construct
  misc_feature 1..120: note = Artificially Synthesized Probe
  source 1..120: mol_type = other DNA
aagaatgcataaacccctttcctcatttggaactttatggaattgctgagaacatcagatggcaataaggtgattggagctgtaatcacacacaaaaagttgtctattttaattagccag

SEQ ID NO: 2619 - DNA, 120 bp, synthetic construct
  misc_feature 1..120: note = Artificially Synthesized Probe
  source 1..120: mol_type = other DNA
aatgttcattttgatgtcagcactaaccaggagaaagaaaaggtggaaacgattcctcttgcacgtttcagagtgttagaaaccgcctattatttgtgtcttgttctttgctgctctgta

SEQ ID NO: 2620 - DNA, 120 bp, synthetic construct
  misc_feature 1..120: note = Artificially Synthesized Probe
  source 1..120: mol_type = other DNA
gagtacgtttcaacaggagatgtggttgagacagatatccaagctgtatcaccaagtgaactaccgaagctttttattgatttgtattaagccaacacatgggtttacccagtaactcat

SEQ ID NO: 2621 - DNA, 120 bp, synthetic construct
  misc_feature 1..120: note = Artificially Synthesized Probe
  source 1..120: mol_type = other DNA
caaaataaataggtacgtacatacctacatacgtactagaatcaagggggttgtttctgagttcattgagttaacgaggaaggtaaattaatcaggaccttcccaagttacccatgtaat

SEQ ID NO: 2622 - DNA, 120 bp, synthetic construct
  misc_feature 1..120: note = Artificially Synthesized Probe
  source 1..120: mol_type = other DNA
tcttttctttctttgcctccttcttttgtgtagccataaacaggagtctactgggtcgtttctgtttgtaaggcacaatctgcctcccaatccccctcccaaaaaaactaacaaaattta

SEQ ID NO: 2623 - DNA, 120 bp, synthetic construct
  misc_feature 1..120: note = Artificially Synthesized Probe
  source 1..120: mol_type = other DNA
ccatcctaactactgattgctttatatttttgatgtggtgaggagttcagaccccttcttagtgaatgcaatgtttagcacattctttggaatatactgcttgagtctcttggtgcatca

SEQ ID NO: 2624 - DNA, 120 bp, synthetic construct
  misc_feature 1..120: note = Artificially Synthesized Probe
  source 1..120: mol_type = other DNA
tatatgtgcatgtaattatatcagcaaactacatagtgaagtcagggagacagattagagagataggaagagtgggagggagagaatgtgcaaaacaagcaacagaaagaagagtgggga

SEQ ID NO: 2625 - DNA, 120 bp, synthetic construct
  misc_feature 1..120: note = Artificially Synthesized Probe
  source 1..120: mol_type = other DNA
ggtctggtacagctgtaaggtacaggggtagagaatattaggtggtcatcttgataatcatttgtgttatgttaatgcactccaaagtggacttgtttcttctacctgagtgtatataca

SEQ ID NO: 2626 - DNA, 120 bp, synthetic construct
  misc_feature 1..120: note = Artificially Synthesized Probe
  source 1..120: mol_type = other DNA
atacttattctgctgacatttattgagtaacctcccatgtgccagacattatctgacgtgaaatgaaagagaattcctggtttccgtgagtttttagtcttagagaagacacagtcacgt

SEQ ID NO: 2627 - DNA, 120 bp, synthetic construct
  misc_feature 1..120: note = Artificially Synthesized Probe
  source 1..120: mol_type = other DNA
gttggccgcctctcccttgaaggttttagtaggagaatgaaaggatcagtattgggtttcagaaagataaattgcttaccaattgatggaaaatggcagcttagagaatctgtggttaga

SEQ ID NO: 2628 - DNA, 120 bp, synthetic construct
  misc_feature 1..120: note = Artificially Synthesized Probe
  source 1..120: mol_type = other DNA
acatgtaattgaagctcaggagggggaagagagatgagagatgtgtgtagagtccagagcactcagaatttgcagaataataaggattttgatccatgttctgagtaatgacatgccatt

SEQ ID NO: 2629 - DNA, 120 bp, synthetic construct
  misc_feature 1..120: note = Artificially Synthesized Probe
  source 1..120: mol_type = other DNA
gtggtgcatggttttctgatcttgtgatagcttgctgagaatgatggtttccagctttatccatgtccctgcaaaggacaagaactcatcctttttatggttgcatagtattccatggtg

SEQ ID NO: 2630 - DNA, 120 bp, synthetic construct
  misc_feature 1..120: note = Artificially Synthesized Probe
  source 1..120: mol_type = other DNA
aatagggaatctttttcccattgctagtgtgtgtcaggtttgtcaaaaatcagttggttgtagctgcgtggtgttatttctgaggcctccattctgttccactggtctatatatctgttt

SEQ ID NO: 2631 - DNA, 120 bp, synthetic construct
  misc_feature 1..120: note = Artificially Synthesized Probe
  source 1..120: mol_type = other DNA
gcttttgtcattggttctgtttgtgtgatggattgcatgtattgatttgcatatgttgaaccagccttgcatcccaggtacgaagccaacttcgtacctggtggtaagctttttgatgtg

SEQ ID NO: 2632 - DNA, 120 bp, synthetic construct
  misc_feature 1..120: note = Artificially Synthesized Probe
  source 1..120: mol_type = other DNA
ctctctgataaattatactggtagtcatatctggtcacggataaactttatttcgtttttgactgtcaggcatgttgaattcaaattgcatgccaaaccataacatttaggaaaacatca

SEQ ID NO: 2633 - DNA, 120 bp, synthetic construct
  misc_feature 1..120: note = Artificially Synthesized Probe
  source 1..120: mol_type = other DNA
atattgccttcctgttcttatttcttattcatggaaaacgaggacaagatatgaagggtttagggatctaggtcattggcccgggatttggcattaattcttctcatacaagcacaggga

SEQ ID NO: 2634 - DNA, 120 bp, synthetic construct
  misc_feature 1..120: note = Artificially Synthesized Probe
  source 1..120: mol_type = other DNA
cctagctaccagatgctatgtggcaaggacagtcttaggatgaaattgtccagacaaacaaatatgtattagccatcaaatgtacacatatgctcataagtatgtgtacacatgcacaag

SEQ ID NO: 2635 - DNA, 120 bp, synthetic construct
  misc_feature 1..120: note = Artificially Synthesized Probe
  source 1..120: mol_type = other DNA
tttcctatattctaggcaagcgcaaaaataatgaataggatctggcaactgcctcataaaatgtacagtctcctacaaatatgtagacaaggcaggtacaaaaaattgtgagcccttgtt

SEQ ID NO: 2636 - DNA, 120 bp, synthetic construct
  misc_feature 1..120: note = Artificially Synthesized Probe
  source 1..120: mol_type = other DNA
acgacagaagctcgccctgctggaactgctcctccagaagactgctgtttgcggcattcattttcctttcattatatttttttctgaatttgttctggatcgttttttgtttaaaatctc

SEQ ID NO: 2637 - DNA, 120 bp, synthetic construct
  misc_feature 1..120: note = Artificially Synthesized Probe
  source 1..120: mol_type = other DNA
aagggacagacctttcagcttacctggaagtgcctcatttcttttttgaaaattcctgccatggtactgatcaatgttgatatatatgtgaaaaaaataaagaggagacaaacagagggg

SEQ ID NO: 2638 - DNA, 120 bp, synthetic construct
  misc_feature 1..120: note = Artificially Synthesized Probe
  source 1..120: mol_type = other DNA
gccttttccagagtgtcgtgtagttagaatcaaacagtatctggtgttttcaaattggcctgttcacttaatgtgcctttaggtttccttcacctcttttcatggctgatagctcatttc

SEQ ID NO: 2639 - DNA, 120 bp, synthetic construct
  misc_feature 1..120: note = Artificially Synthesized Probe
  source 1..120: mol_type = other DNA
atcaatttgcttataataacatcgacattcctttgatctactgtgtacaaaatgtgccagctctgcagggatgatgagttaacactctaagcagttcttttgtcgtgtcactgcggtgtt

SEQ ID NO: 2640 - DNA, 120 bp, synthetic construct
  misc_feature 1..120: note = Artificially Synthesized Probe
  source 1..120: mol_type = other DNA
caacttaatgctgtttcttagtgaagaggaatgtcaacgtagcatgcttttttttcccttcttttttggctgtgtgcattccatgttgtcaatgaaaatggcagatggactgtcactgac

SEQ ID NO: 2641 - DNA, 120 bp, synthetic construct
  misc_feature 1..120: note = Artificially Synthesized Probe
  source 1..120: mol_type = other DNA
ctgatttctgatttccaaagactgaataaacattaaaaatgtttccattaggaaaatgttaaaatgcacccccaatagaaagattagcataacctccccccaatcttgcactctctctct

SEQ ID NO: 2642 - DNA, 120 bp, synthetic construct
  misc_feature 1..120: note = Artificially Synthesized Probe
  source 1..120: mol_type = other DNA
cttcttaggaggagctacaaagtcttattacagagagtgtgaccacaaagaggggaagagaatcagagaagattttgcaatcaatctactacactctcacacttttggggagagtatttt

SEQ ID NO: 2643 - DNA, 120 bp, synthetic construct
  misc_feature 1..120: note = Artificially Synthesized Probe
  source 1..120: mol_type = other DNA
ttgtccatgttaaactaatgtcttgaaatcagtgtattcttaattcttatcccactagtcgtactggagaacctgagggagtcaggaaggttccattgcattgaagcgactgcattgtct

SEQ ID NO: 2644 - DNA, 120 bp, synthetic construct
  misc_feature 1..120: note = Artificially Synthesized Probe
  source 1..120: mol_type = other DNA
aagaaacataccctttatgaattctggcaatgaaactaagactgactttccgttttcaatctgaaagctattttggagctttcatcgtcagctaatggagtcttacttgaacggggtcac

SEQ ID NO: 2645 - DNA, 120 bp, synthetic construct
  misc_feature 1..120: note = Artificially Synthesized Probe
  source 1..120: mol_type = other DNA
atacatgagtcattttttccaattcccattttaagatgggtcagttgaggtcagccagagtagaataatgccattactctaattcaggacaaagattcacaacttttttggaggtgggag

SEQ ID NO: 2646 - DNA, 120 bp, synthetic construct
  misc_feature 1..120: note = Artificially Synthesized Probe
  source 1..120: mol_type = other DNA
gcatcttacgcctttgtcttctgcttgaaccaaactcacatttgtaaatttcagttaaaatggtggcctttattcttttgttctttattatttctttcctctatcttgctggaactatcc

SEQ ID NO: 2647 - DNA, 120 bp, synthetic construct
  misc_feature 1..120: note = Artificially Synthesized Probe
  source 1..120: mol_type = other DNA
ctgtaaaccaaaagtgagaggagacattaagattttcattcttaccgggttgtcttcttcctgaagagcaatggagccgcttttacttggaagaggactaatcgtatatctaatgttcct

SEQ ID NO: 2648 - DNA, 120 bp, synthetic construct
  misc_feature 1..120: note = Artificially Synthesized Probe
  source 1..120: mol_type = other DNA
agtctgccatgtatagatcttgcagatttttcttgtattacatgcatatgggttctaaaagacccacgagaggttattaagacatttttatccgtatcattcaggaataatctctattgc

SEQ ID NO: 2649 - DNA, 120 bp, synthetic construct
  misc_feature 1..120: note = Artificially Synthesized Probe
  source 1..120: mol_type = other DNA
tgctgagcctttacaaccttagcaaatttaggaaagaataatgttctaataaacaagttgttcacaagttattagctgatatctaagggactgtggccactgtgtatcatccctcaccgt

SEQ ID NO: 2650 - DNA, 120 bp, synthetic construct
  misc_feature 1..120: note = Artificially Synthesized Probe
  source 1..120: mol_type = other DNA
tgtgagtgttcaagaaaacattagaattgtggaggacatgtattgtccactgtaagcttgagagcttcccgatacttaatactgctgattagatcagtggcaattctaacaagtgtcaat

SEQ ID NO: 2651 - DNA, 120 bp, synthetic construct
  misc_feature 1..120: note = Artificially Synthesized Probe
  source 1..120: mol_type = other DNA
aacacgttgagaacaatttatctaggctaaatccttaatattacaaatgagaaaacagagagtggttcagggcctggtccaatgtcacaggttttagggcctcatttgcaactctactgt

SEQ ID NO: 2652 - DNA, 120 bp, synthetic construct
  misc_feature 1..120: note = Artificially Synthesized Probe
  source 1..120: mol_type = other DNA
ggtgtgaggcaccaagtgtggcccactccctactttttaaaattgtgtttgtcttgtagattacttatcaaacactaacagagtttgtcacaagaggaggggatatttgaatatgaagaa

SEQ ID NO: 2653 - DNA, 120 bp, synthetic construct
  misc_feature 1..120: note = Artificially Synthesized Probe
  source 1..120: mol_type = other DNA
atgtgaagctaaaggaaatccagaaccaacgtgagtattgtttcaaacgaagtggttctttaaatgcgtgctgttctttatgctgctctttactcttaccatcacaagcctgttggacta

SEQ ID NO: 2654 - DNA, 120 bp, synthetic construct
  misc_feature 1..120: note = Artificially Synthesized Probe
  source 1..120: mol_type = other DNA
tgtcaaaaggtaataccatacacttgtcaacagtgaaatataagacacacagagagaagtaaaataagtcaggagggtggctgggtaggcctactcctaatgagaatacatgtccattga

SEQ ID NO: 2655 - DNA, 120 bp, synthetic construct
  misc_feature 1..120: note = Artificially Synthesized Probe
  source 1..120: mol_type = other DNA
cagttttatgttttagattttcgtggactaaggatggcaaccctttttatttcactgaccatcggataattccatcgaacaattcaggaacattcaggatcccaaacgaggggcacatat

SEQ ID NO: 2656 - DNA, 120 bp, synthetic construct
  misc_feature 1..120: note = Artificially Synthesized Probe
  source 1..120: mol_type = other DNA
aagaagttatgcaggcaactcctactcatgttttgttaggtggggcaaagcaagttgcatagtcccatctaacatcaatagtatgatgctcattaggaaaggagaaacagctattggtaa

SEQ ID NO: 2657 - DNA, 120 bp, synthetic construct
  misc_feature 1..120: note = Artificially Synthesized Probe
  source 1..120: mol_type = other DNA
tttgctcactcaagcagagaaaaacatcagtgagcatatagaagatttaaagaatacaatcacaagctccatctaatgaaaacacatagaatattgtaactaacacggcaaaatgagttt

SEQ ID NO: 2658 - DNA, 120 bp, synthetic construct
  misc_feature 1..120: note = Artificially Synthesized Probe
  source 1..120: mol_type = other DNA
gccattatggttctgtgcagggttacacaaatcagaatagcatagtaaacccagaaacagaccatcacatgtgtaaaaatagttgagggaattggcatgttagcatggatctctctctct

SEQ ID NO: 2659 - DNA, 120 bp, synthetic construct
  misc_feature 1..120: note = Artificially Synthesized Probe
  source 1..120: mol_type = other DNA
aacagaatacgtatccactactgatgacagtccagtttactgcgtgatctttggaaaacattttctaatcccctccttcgttgaagatgctcttacttatgaccaaacaattccgttccc

SEQ ID NO: 2660 - DNA, 120 bp, synthetic construct
  misc_feature 1..120: note = Artificially Synthesized Probe
  source 1..120: mol_type = other DNA
atgattcctaacctaaattctaggggttgctatggagacacaaaggaaaaggcagcagctagatctattgcaaagaaaggagcggcagaatttggtttaagattctgcaattaaaggatt

SEQ ID NO: 2661 - DNA, 120 bp, synthetic construct
  misc_feature 1..120: note = Artificially Synthesized Probe
  source 1..120: mol_type = other DNA
ccactttctagtaatttgggatttaacagtgaataaaaacaaagactgtcctccagaaatatacatcctgtgcatgtatatggtgattgggtctggaaaggaagggagctactctcttgc

SEQ ID NO: 2662 - DNA, 120 bp, synthetic construct
  misc_feature 1..120: note = Artificially Synthesized Probe
  source 1..120: mol_type = other DNA
tagaaatattcatgcactaggtttctacatttgtgttaacatacttcctcagattcctcaggacaatttccttaagataaaccctggctttttaccaccctgattttggagggggagtgt

SEQ ID NO: 2663 - DNA, 120 bp, synthetic construct
  misc_feature 1..120: note = Artificially Synthesized Probe
  source 1..120: mol_type = other DNA
ctccctgtccctttggcctaccttgtctctgtgcgtttggctgtaccatgcaaagtgaaaatatttgaggagtagccaagatgtattgaataatttttaagtgcttgctcctattttaat

SEQ ID NO: 2664 - DNA, 120 bp, synthetic construct
  misc_feature 1..120: note = Artificially Synthesized Probe
  source 1..120: mol_type = other DNA
tggttgtgccttgatagttgtggtaataagactcctgtgcagctagcttgtctgtagggaagtgtttccatgatggatttcaactggggaagttttcaaaaacctagatgtgaatatatt

SEQ ID NO: 2665 - DNA, 120 bp, synthetic construct
  misc_feature 1..120: note = Artificially Synthesized Probe
  source 1..120: mol_type = other DNA
cccaaagtgcaaacattcttgaaattctgcttagctagactgttatgtgcaagttgattctgatccctttgcagagaggccattcaggatcaagtccagtcttgttgaaacaaagttaag

SEQ ID NO: 2666 - DNA, 120 bp, synthetic construct
  misc_feature 1..120: note = Artificially Synthesized Probe
  source 1..120: mol_type = other DNA
atcgaagtggattacatgccctttccattttctaatccatattttatttcctctgctgcctcttgtatctgagtatagatagattcaccaactacccaacagcaccactgacttcaatgc

SEQ ID NO: 2667 - DNA, 120 bp, synthetic construct
  misc_feature 1..120: note = Artificially Synthesized Probe
  source 1..120: mol_type = other DNA
tcaagttgggactgttataactgccttcctaagatccttctcctccacaagagactgtgtaattctataatgcaaattcccccaccaaaagttgaaagatatcaatgtaatgctcaggaa

SEQ ID NO: 2668 - DNA, 120 bp, synthetic construct
  misc_feature 1..120: note = Artificially Synthesized Probe
  source 1..120: mol_type = other DNA
tgtcctcccatgcaatcctcccaaaggcctcccacctttacacatttattggatgaatattggtaagtaatgctccgttccatcaaaaaagggggacattttaattctatccatcatatc

SEQ ID NO: 2669 - DNA, 120 bp, synthetic construct
  misc_feature 1..120: note = Artificially Synthesized Probe
  source 1..120: mol_type = other DNA
tcttttcagaattagaacacatcgaacaagatgaaagagtatacatgagccaaaagggagatctatacttcgcaaacgtggaagaaaaggacagtcgcaatgactactgttgctttgctg

SEQ ID NO: 2670 - DNA, 120 bp, synthetic construct
  misc_feature 1..120: note = Artificially Synthesized Probe
  source 1..120: mol_type = other DNA
ttccttccgtttttttatttcagtaaagcatgctaatgactcaagttcatccacagaaattggttccaagggtaagttgaacccatgtggagtgttggcatttgtgtatagctcattgtc

SEQ ID NO: 2671 - DNA, 120 bp, synthetic construct
  misc_feature 1..120: note = Artificially Synthesized Probe
  source 1..120: mol_type = other DNA
aggtagtgaggatgcttactagtcatttcctaaaactgtgtttttctttaaggagctgagactacaggtagagttgccgaaagagcttgataaattcatagatgcctagtgtctaccaca

SEQ ID NO: 2672 - DNA, 120 bp, synthetic construct
  misc_feature 1..120: note = Artificially Synthesized Probe
  source 1..120: mol_type = other DNA
gatctctctgtcaatttatgatattgtggatggaggggatgatgataacattctccttagttaagtttaagaagcctgaggttgttggtagtcagtccctcacttttggtgctgagtttt

SEQ ID NO: 2673 - DNA, 120 bp, synthetic construct
  misc_feature 1..120: note = Artificially Synthesized Probe
  source 1..120: mol_type = other DNA
gataccttgggaaaatgcattccagcttcctagcacctgggattactcatttgaaatataatctgttcgtaagctaagggctttggggactctagttagtggactaggatttgaaattca

SEQ ID NO: 2674 - DNA, 120 bp, synthetic construct
  misc_feature 1..120: note = Artificially Synthesized Probe
  source 1..120: mol_type = other DNA
atatgttgttgtgaggacatgaaaattcttgatgcgctgtcctaagacttttcacctgaagtagtttcttcttactcatactgattttgtgttgggtaatcctgtctgatctgggtcgtc

SEQ ID NO: 2675 - DNA, 120 bp, synthetic construct
  misc_feature 1..120: note = Artificially Synthesized Probe
  source 1..120: mol_type = other DNA
gcgtgccatgtgctcttagcctggtaaaatataagattattattccaggctgcacagcacgttagtgtttgaggcttgaaggaagaaggaaaagagtagatatatagagattaaagagcc

SEQ ID NO: 2676 - DNA, 120 bp, synthetic construct
  misc_feature 1..120: note = Artificially Synthesized Probe
  source 1..120: mol_type = other DNA
tgttttacacaaacagggaatagggctgttatcactggctgccccaaaccacccactgggagattttcacacttggaaaatatcttggtaatattatttcaatgagctccagctattttt

SEQ ID NO: 2677 - DNA, 120 bp, synthetic construct
  misc_feature 1..120: note = Artificially Synthesized Probe
  source 1..120: mol_type = other DNA
aggattatgatgaaaggaagtattaaaatgagcctggaagaaagcttggatttaacttgctgtgccctttgccatttatttcactctccgtacctcaggctcttcaccaaagaagtgaaa

SEQ ID NO: 2678 - DNA, 120 bp, synthetic construct
  misc_feature 1..120: note = Artificially Synthesized Probe
  source 1..120: mol_type = other DNA
gaaagatttatgttatgtatatttttagtcatcatttgatgtttctatataatttggctacatcgtgcaacaggggtatttttctgtaaccccctcctcccctccctggcacacacacac

SEQ ID NO: 2679 - DNA, 120 bp, synthetic construct
  misc_feature 1..120: note = Artificially Synthesized Probe
  source 1..120: mol_type = other DNA
atactatgagcttgtaatttaggttgcaacatcctaaatataaaatcagactgcacttcaaatcctataatatgtatgagcaaaagcagccaggatgtcttgactaggtacaactgtata

SEQ ID NO: 2680 - DNA, 120 bp, synthetic construct
  misc_feature 1..120: note = Artificially Synthesized Probe
  source 1..120: mol_type = other DNA
taagataacactaaattagaaacaaaaaccacatgacttcagagtctaaatgctgctcatccatagttgctgtgtatttatctgtggaatggcgagaacaggaactggagcttcctttgc

SEQ ID NO: 2681 - DNA, 120 bp, synthetic construct
  misc_feature 1..120: note = Artificially Synthesized Probe
  source 1..120: mol_type = other DNA
tattgttacactggagcattagggcatagaaagatacaggtaattttaaggtatattttgctgcattgttttgactgcagaaagctaaacactgcttttgggcttctctctctcccctct

SEQ ID NO: 2682 - DNA, 120 bp, synthetic construct
  misc_feature 1..120: note = Artificially Synthesized Probe
  source 1..120: mol_type = other DNA
ggccctggtttgacgggattaatgatggtcagacgtgtgtaaaatgaagttggtatgtggttggattagcaggacagatacaaccagcaaatcagagattgtttatttctaagcaatttg

SEQ ID NO: 2683 - DNA, 120 bp, synthetic construct
  misc_feature 1..120: note = Artificially Synthesized Probe
  source 1..120: mol_type = other DNA
cttcaaacccatttcttcatcagtaaattgggataaaaataacactgactcacggggttgttttgtggattaaaggaaacatcatgcagagaatgcttagcacggggactgccacaaaaa

SEQ ID NO: 2684 - DNA, 120 bp, synthetic construct
  misc_feature 1..120: note = Artificially Synthesized Probe
  source 1..120: mol_type = other DNA
gagaattttaagcagaagagtgacacaatctaatttacatttttacaaggtattttcctggcctttgaatggagaatggactgtgtgattgatactaggtaggaggccatctgagaggct

SEQ ID NO: 2685 - DNA, 120 bp, synthetic construct
  misc_feature 1..120: note = Artificially Synthesized Probe
  source 1..120: mol_type = other DNA
ggggtgtggaagtgaagagtgggattagagactcagtgctttgcagcattcctaaagagtttagcctttaaaaacttggaagagctactcatcttgctaatttgcaagaaataagtgata

SEQ ID NO: 2686 - DNA, 120 bp, synthetic construct
  misc_feature 1..120: note = Artificially Synthesized Probe
  source 1..120: mol_type = other DNA
gccatgtaaatgctgatccatcgagttctgagcagtgtcagtgagatcatgcatgtgccacatccagtagagtttttggtccttaaatgcatcagaaatgttaggtattcttttttttct

SEQ ID NO: 2687 - DNA, 120 bp, synthetic construct
  misc_feature 1..120: note = Artificially Synthesized Probe
  source 1..120: mol_type = other DNA
tctaaattcagaagagtaacagagtgtcacttcatcataggtcttgaatgcctaaaggataatccagaatagtgccatgagtataggtatggaaattctgggaggtccagatgagcagat

SEQ ID NO: 2688 - DNA, 120 bp, synthetic construct
  misc_feature 1..120: note = Artificially Synthesized Probe
  source 1..120: mol_type = other DNA
aatgatgatttccaatttcatccatgtccctacaaaggacatgaactcatcattttttatggctgcatagtattccatggtgtatatgtgccacattttcttaatccagtctatcataga

SEQ ID NO: 2689 - DNA, 120 bp, synthetic construct
  misc_feature 1..120: note = Artificially Synthesized Probe
  source 1..120: mol_type = other DNA
ttgacaggctgtattgtgtctatattgttacatgtacccagtacctctgagacataaggtaacaaacttaccggtccaggaaattagctctactgaaagcattggctagatttctaggat

SEQ ID NO: 2690 - DNA, 120 bp, synthetic construct
  misc_feature 1..120: note = Artificially Synthesized Probe
  source 1..120: mol_type = other DNA
ccatttagtaccctggagcaatcattaactaaagagttcaccatcaataagccagaaaatatttattaagctctgaggacacatgcaaaccggtgctggtggctatgacaaatacagcag

SEQ ID NO: 2691 - DNA, 120 bp, synthetic construct
  misc_feature 1..120: note = Artificially Synthesized Probe
  source 1..120: mol_type = other DNA
cttctcacttcagggcacagtcctgggagctgttaatagtttcttgggcttcactgatattttgattttaatattgctcagagaatcttcaagaaaacacaaaatggaaaggatcttcgg

SEQ ID NO: 2692 - DNA, 120 bp, synthetic construct
  misc_feature 1..120: note = Artificially Synthesized Probe
  source 1..120: mol_type = other DNA
ccttgagaaaaatgtacatagccaatatcagagtataattatagaattggaggtcagcttgtgcagttggtctctgggaggtccccaaaatgccaaatgccacattaagagtatacttac

SEQ ID NO: 2693 - DNA, 120 bp, synthetic construct
  misc_feature 1..120: note = Artificially Synthesized Probe
  source 1..120: mol_type = other DNA
gcctggatggaaagaaaataataatgacatacaatgttaggaaattacagtgggacaaaccctgcatgaggattggacagttatggtgacaatttgggttacttaacttgcaggcactta

SEQ ID NO: 2694 - DNA, 120 bp, synthetic construct
  misc_feature 1..120: note = Artificially Synthesized Probe
  source 1..120: mol_type = other DNA
gcccagagaagatggcatccattttccttctacttttcaatctcacatgagtttatttaactcactagcaaaacctaaatcatatctgggattcttcctgccagagagtactgagaagta

SEQ ID NO: 2695 - DNA, 120 bp, synthetic construct
  misc_feature 1..120: note = Artificially Synthesized Probe
  source 1..120: mol_type = other DNA
ccaagtacttagaaaacattaacatacagagcacttagaaaataccaactgcacagtccatttttgcttttgtgatttgtactgctaatttcttcatttttttccttatgacaaatttct

SEQ ID NO: 2696 - DNA, 120 bp, synthetic construct
  misc_feature 1..120: note = Artificially Synthesized Probe
  source 1..120: mol_type = other DNA
cccagcgcttcgatttgtcagttttgtcaaagatcagatgattatagatgtgtggtgttatttttgaggtctctgttctgctccatttgtctatatgtctgttttcataccagtaccatg

SEQ ID NO: 2697 - DNA, 120 bp, synthetic construct
  misc_feature 1..120: note = Artificially Synthesized Probe
  source 1..120: mol_type = other DNA
atgtggattttgtctttggttctgtttatgtgatgaattacatttattgatctgaatatgttgaatcagccttgaatcccagagatgaagctgacttgttcatggtggataagttttttg

SEQ ID NO: 2698 - DNA, 120 bp, synthetic construct
  misc_feature 1..120: note = Artificially Synthesized Probe
  source 1..120: mol_type = other DNA
tatttacctaggagtcattcaggagcaagtttatcaatttccatgtagttgtgtggttttgcgtgagtttcttaatcctgagttctaatttgattgcattgtggtctgagagacggtttg

SEQ ID NO: 2699 - DNA, 120 bp, synthetic construct
  misc_feature 1..120: note = Artificially Synthesized Probe
  source 1..120: mol_type = other DNA
cttcacttgtgaagcttagtttgacaggatatgaaattctgggctgaaaattcttttctttaagaatattgaatattggcctccactctcttctggcttgtagagtttcttctgagaggt

SEQ ID NO: 2700 - DNA, 120 bp, synthetic construct
  misc_feature 1..120: note = Artificially Synthesized Probe
  source 1..120: mol_type = other DNA
ggtctaccttctgtagggctgctgcagtttgctgggggtccacttcagtccctattcatctggttcacgcctatgcctggagatgtcactcaaggaggctggagaacagccaagatgggt

SEQ ID NO: 2701 - DNA, 120 bp, synthetic construct
  misc_feature 1..120: note = Artificially Synthesized Probe
  source 1..120: mol_type = other DNA
caaaggcattggtctcagccttggttcttgatttattctctcccctccttccgatatatacaaaggtttgcagaaaggcagtgtatgtattacaaccagttctcattgaaacacgagatt

SEQ ID NO: 2702 - DNA, 120 bp, synthetic construct
  misc_feature 1..120: note = Artificially Synthesized Probe
  source 1..120: mol_type = other DNA
accggaagctttaacctaaagggaggttaaacttctaatcaaatatacatggtgaacaatgagaagtgaaaattccttcttctcttctcgcttgtcccctttcttgtgtagggatgcagt

SEQ ID NO: 2703 - DNA, 120 bp, synthetic construct
  misc_feature 1..120: note = Artificially Synthesized Probe
  source 1..120: mol_type = other DNA
caatgttttgttcaaggttgtacaaataataattgatggaactgagccgcaaacacaggtctccaaagagagaatcgttttgtcatagtgccttcagggaaacacggatattactcagct

SEQ ID NO: 2704 - DNA, 120 bp, synthetic construct
  misc_feature 1..120: note = Artificially Synthesized Probe
  source 1..120: mol_type = other DNA
cttggcaagatttcagctactatgggccctcgtgcagggcacagaagtcctatttcaagaggttattaaagtatattctttcatctaagaaggtacatttttcaaaaattgtcaggatat

SEQ ID NO: 2705 - DNA, 120 bp, synthetic construct
  misc_feature 1..120: note = Artificially Synthesized Probe
  source 1..120: mol_type = other DNA
tgaccatatctaatgtaactttagaggaccaaggtatttactgctgttcagctcatactgctctagacagtgctgccgatataactcaagtaactgttcttggtaagtgcactaactaat

SEQ ID NO: 2706 - DNA, 120 bp, synthetic construct
  misc_feature 1..120: note = Artificially Synthesized Probe
  source 1..120: mol_type = other DNA
ggaactatcgtaaatttgtgtgagttattcattgattttctgcagggaccctaacagctacagacatttgttctgtttcggtggccaccatgtagtctttcttttagtttgcagacattc

SEQ ID NO: 2707 - DNA, 120 bp, synthetic construct
  misc_feature 1..120: note = Artificially Synthesized Probe
  source 1..120: mol_type = other DNA
gttgcaagttcatcagttctagctccatacgattctcagaagagccagattttaatatcagatgcaatacacagccttagtttattccaggaagcttcagaaatcagtggactcagtaaa

SEQ ID NO: 2708 - DNA, 120 bp, synthetic construct
  misc_feature 1..120: note = Artificially Synthesized Probe
  source 1..120: mol_type = other DNA
aacaaatatgtactggacaaacagaaatgattcatttgagatacatcatgtttcccagacttgggtatacctaatccccatccaaggaacttgtttgcaaatgcagattcctgggcccac

SEQ ID NO: 2709 - DNA, 120 bp, synthetic construct
  misc_feature 1..120: note = Artificially Synthesized Probe
  source 1..120: mol_type = other DNA
tgtctgaggaagggaatcaggtaaacaaaggcaattatctacattttcccttcctttattaattagatgttccggatccaccagaaaaccttcacttgtctgaaagacagaacaggagtg

SEQ ID NO: 2710 - DNA, 120 bp, synthetic construct
  misc_feature 1..120: note = Artificially Synthesized Probe
  source 1..120: mol_type = other DNA
gcctagccagccgtcagaccatcatgaaacaccaccagcaggtatgcaggttctcacatcaggtttctaacaaaatatttgtttgtccccatctttgaacatctaaaaaaaaaagattga

SEQ ID NO: 2711 - DNA, 120 bp, synthetic construct
  misc_feature 1..120: note = Artificially Synthesized Probe
  source 1..120: mol_type = other DNA
tccacaaaacataagggttcaagcctctcaacccaaggaaatgattataaagtgggaggtgtgtatttcttaatacgttatgtatttctttgtgcttttctcttcctcttaggtctgcat

SEQ ID NO: 2712 - DNA, 120 bp, synthetic construct
  misc_feature 1..120: note = Artificially Synthesized Probe
  source 1..120: mol_type = other DNA
taacagtggggcattttattttctctctactacttggatgtatttaatgaccagtatattggcctacctaaaaggaaattatcattcaaccattctgatgagtaataggcctccaacatt

SEQ ID NO: 2713 - DNA, 120 bp, synthetic construct
  misc_feature 1..120: note = Artificially Synthesized Probe
  source 1..120: mol_type = other DNA
gaggagcaaacgacatgtcatttagtaattaattgactagaggaaggaagtagtcacaggatttggatctaggctgacagttacattcccaatatgtcccatggtgtctcctattatctt

SEQ ID NO: 2714 - DNA, 120 bp, synthetic construct
  misc_feature 1..120: note = Artificially Synthesized Probe
  source 1..120: mol_type = other DNA
cttaaaggacaccaaaagcaaaaccaaaagcccaaaaccccactaatgttgggaagcaggaacatctttaattacctggttatataatcgcatccaagatagttaactcctaatggatct

SEQ ID NO: 2715 - DNA, 120 bp, synthetic construct
  misc_feature 1..120: note = Artificially Synthesized Probe
  source 1..120: mol_type = other DNA
gcccatggcctaattcactgggacaatgctaaagcccctggtgaatttatatccatttcacactctaaaatatcttggagcaaaactttccaatgaatccaagtattaacaaggtctgca

SEQ ID NO: 2716 - DNA, 120 bp, synthetic construct
  misc_feature 1..120: note = Artificially Synthesized Probe
  source 1..120: mol_type = other DNA
agaaccaggtgcaagaaagagttctcttcaaaaagccatgggagaatcccattcacaaccaaagaattcgtggccatattattttttatttcagcctgttctttgaaaatgaaaaggcgg

SEQ ID NO: 2717 - DNA, 120 bp, synthetic construct
  misc_feature 1..120: note = Artificially Synthesized Probe
  source 1..120: mol_type = other DNA
tgggcttcagtggcatgtctggagctttcctaatactgatgagatatatacccagatttatatgtagaattatatgcacacacaccttctgatgccatagtaactgctgcaaataggtta

SEQ ID NO: 2718 - DNA, 120 bp, synthetic construct
  misc_feature 1..120: note = Artificially Synthesized Probe
  source 1..120: mol_type = other DNA
atggggtggacgttataaacagtacattagttaaagttacctggtcaacagttccaaaggacagagtacatggacgtctgaaaggctatcaggtttttatcatcatggtttttcctcttc

SEQ ID NO: 2719 - DNA, 120 bp, synthetic construct
  misc_feature 1..120: note = Artificially Synthesized Probe
  source 1..120: mol_type = other DNA
aacttgttaatgtttcattttttggttgaatattctctgtgctatgttgggagtctaatgatcacttaaggccatggtttgtaagctgccgttcttccttgtagcccaggggtctgtaaa

SEQ ID NO: 2720 - DNA, 120 bp, synthetic construct
  misc_feature 1..120: note = Artificially Synthesized Probe
  source 1..120: mol_type = other DNA
acatcagctcaagacttccagcaatccaggtcacgtatttgctttagtttctgatggtttctgctgaaattagcacgtatgtttaaatacatacaggcataatcccaacggaagtagact

SEQ ID NO: 2721 - DNA, 120 bp, synthetic construct
  misc_feature 1..120: note = Artificially Synthesized Probe
  source 1..120: mol_type = other DNA
tttttaacctctatggtatcttggactgggagtcaagaggatttattctacattccttcttgccactaacagctgcactatcttgggtgtatttcatctcttggactattgttacagtaa

SEQ ID NO: 2722 - DNA, 120 bp, synthetic construct
  misc_feature 1..120: note = Artificially Synthesized Probe
  source 1..120: mol_type = other DNA
accttaggagaagggagtaagtacatgaggcttctctttttaatagaggctttaaaaagagactgcatctttttaaacagctgcactgaaaggaaagcaccgtgccagtcattgtaaatt

SEQ ID NO: 2723 - DNA, 120 bp, synthetic construct
  misc_feature 1..120: note = Artificially Synthesized Probe
  source 1..120: mol_type = other DNA
cacgaagtgaaacagagagagatttatgtagggcttaggctgttcaggcatggaaggatattggagaaagaaaagaaggatgtagaagatggcagaaagggaaatagagttgtttattta

SEQ ID NO: 2724 - DNA, 120 bp, synthetic construct
  misc_feature 1..120: note = Artificially Synthesized Probe
  source 1..120: mol_type = other DNA
gctctttttcaggaatccacattttcagtattccagctaactgcccccttcccgagttgacactgatttctattctataggcatgtcttgctataagtacagggaaaaaaattacaatct

SEQ ID NO: 2725 - DNA, 120 bp, synthetic construct
  misc_feature 1..120: note = Artificially Synthesized Probe
  source 1..120: mol_type = other DNA
aggccatattcagtttcgcattaggtttgcgaaaatccaaattgcacaaaattatattgtataatttttttaagtctgtggttttgaaccattcatgtgaccaggcagatttacagtacc

SEQ ID NO: 2726 - DNA, 120 bp, synthetic construct
  misc_feature 1..120: note = Artificially Synthesized Probe
  source 1..120: mol_type = other DNA
aaagactgtttctagtttacaatgctgtgacttctctttctaccacagaatatgctggtttatatgatgacatctccactcaaggctggtttattggactgatgtgtgcgattgctcttc

SEQ ID NO: 2727 - DNA, 120 bp, synthetic construct
  misc_feature 1..120: note = Artificially Synthesized Probe
  source 1..120: mol_type = other DNA
tgacccatgtatagcacgcctctctctatgcatgacatacatgactcatatttttcgcactagtgcattctaatattactggctccactggtcaattttgttggtgttaatcattactag

SEQ ID NO: 2728 - DNA, 120 bp, synthetic construct
  misc_feature 1..120: note = Artificially Synthesized Probe
  source 1..120: mol_type = other DNA
tgttccaggaagaacaatttgtatttgagggctttttttttttttttaagtaaagggaacaagagctttttggtcttatattccactaataagagaaatcagccaggcatagtggtggct

SEQ ID NO: 2729 - DNA, 120 bp, synthetic construct
  misc_feature 1..120: note = Artificially Synthesized Probe
  source 1..120: mol_type = other DNA
atactttgtacaaatagggcccacttaagtgctagcaaccaaatttctgtgtgtgtgatgagggtgtataaataattaccgtctaggcagaaatgtcaggtaggacacttttcttgaagc

SEQ ID NO: 2730 - DNA, 120 bp, synthetic construct
  misc_feature 1..120: note = Artificially Synthesized Probe
  source 1..120: mol_type = other DNA
ctgattgatcctgattctctcatctctggattcattactctagcaagggatatggagtattttcattagctaattggtagacatttgggcttacctgtacctccattttgtggtatactt

SEQ ID NO: 2731 - DNA, 120 bp, synthetic construct
  misc_feature 1..120: note = Artificially Synthesized Probe
  source 1..120: mol_type = other DNA
tagctgatgtgttttccaacctctttcccccaaactacatatttatcaggataattgtctactttccacattatcccaggagacacttttataagatgctgtgcccttgcataagtcctc

SEQ ID NO: 2732 - DNA, 120 bp, synthetic construct
  misc_feature 1..120: note = Artificially Synthesized Probe
  source 1..120: mol_type = other DNA
attttatcaggatataagagaatcaaaaggatcagaagtaaaggcagaagatcaagacttggaggccaggagctccaaaagttcatgacagcaagggaaattgcatttgttctctgtctg

SEQ ID NO: 2733 - DNA, 120 bp, synthetic construct
  misc_feature 1..120: note = Artificially Synthesized Probe
  source 1..120: mol_type = other DNA
caacatatgtaagcaacgctactggttcaccccaaccttccatatttatctgttcaaaggagcaagaactttcatataggaatagaaacatgctggccgaagatttcatccagaagtcaa

SEQ ID NO: 2734 - DNA, 120 bp, synthetic construct
  misc_feature 1..120: note = Artificially Synthesized Probe
  source 1..120: mol_type = other DNA
aacaaattcagggaatttattttctggcagttgtgctccagtccttttaaaattgtacatgaacatgttttagaaacaatatggaggatgatgcatacatgtcggtcaagttcagcgctc

SEQ ID NO: 2735 - DNA, 120 bp, synthetic construct
  misc_feature 1..120: note = Artificially Synthesized Probe
  source 1..120: mol_type = other DNA
cctacacttcgtgttcccctttagctgcctgaaaatcaagattgctcctgctcagatcttctgagtggctaaaacttatggatatgaaaaatgagattgaatgatgactatgctttgcta

SEQ ID NO: 2736 - DNA, 120 bp, synthetic construct
  misc_feature 1..120: note = Artificially Synthesized Probe
  source 1..120: mol_type = other DNA
aagtagggttcagccaaagctttctttgttttgtaccttaaattgttcgattacgtcatcaaaagagatgaaaggtatgtagaacaggttcacgtgattacctttttcttttggcttgga

SEQ ID NO: 2737 - DNA, 120 bp, synthetic construct
  misc_feature 1..120: note = Artificially Synthesized Probe
  source 1..120: mol_type = other DNA
agatggtggagcagagtcttttctaacgcgcccccggggaaagggagattccctttccggctctgctaagtaacgggtgccttccccaggcactgacgtgaccgctagaccaaggagccc

SEQ ID NO: 2738 - DNA, 120 bp, synthetic construct
  misc_feature 1..120: note = Artificially Synthesized Probe
  source 1..120: mol_type = other DNA
aaaataatgaagacctatcaggatggcggcaccttaattactactggaattaaaaacagtggctctaccatgtaatagccactgtgaaagggtgggggcagtgcttagagcattttttgt

SEQ ID NO: 2739 - DNA, 120 bp, synthetic construct
  misc_feature 1..120: note = Artificially Synthesized Probe
  source 1..120: mol_type = other DNA
caaagtcagcaacagcaaccattgtagcccacgcaataaacaaacaggtccagactgatagaaataatggagtggggaggggtcctccctagaatcccaatagaaccagtgatttcattt

SEQ ID NO: 2740 - DNA, 120 bp, synthetic construct
  misc_feature 1..120: note = Artificially Synthesized Probe
  source 1..120: mol_type = other DNA
tgcacagagaccatgtactgtgcaactgttaggcaagttttaaattatttcaaagtaagcagagaactgaacatgggagattgtcggtttggatggggcccgagaatgagcatagccatc

SEQ ID NO: 2741 - DNA, 120 bp, synthetic construct
  misc_feature 1..120: note = Artificially Synthesized Probe
  source 1..120: mol_type = other DNA
aaaacaaaacctggaagcctcaagacaatgaagtaaactttaggaaatggaaaagacagcaggctgtgcccaaagcctctctcagcctcccagcaagtccttcccaagagctgctggtga

SEQ ID NO: 2742 - DNA, 120 bp, synthetic construct
  misc_feature 1..120: note = Artificially Synthesized Probe
  source 1..120: mol_type = other DNA
tgtcctgagataacatgagtgacaggccttggaaacagacatgccctgtcccactcttacctgatctgttaggaagggtgcagtattctaaagtgtactgcagacgtgtgtaaacgccat

SEQ ID NO: 2743 - DNA, 120 bp, synthetic construct
  misc_feature 1..120: note = Artificially Synthesized Probe
  source 1..120: mol_type = other DNA
tgtatggacgtccaggttctgcacctgctgctcgaacctgtccatcactgaggagaccttctgcaggtccatggtgctcagggccttgtccagggctttggtcacctgggccatattctt

SEQ ID NO: 2744 - DNA, 120 bp, synthetic construct
  misc_feature 1..120: note = Artificially Synthesized Probe
  source 1..120: mol_type = other DNA
aggccgccgacgtggagacccagcgcggggtcggtggagaaaaggccgccgacgtggagacccagcgcggggtcggtggagaaaaggccgccgacgtggagacccagcgcggggtcggtg

SEQ ID NO: 2745 - DNA, 120 bp, synthetic construct
  misc_feature 1..120: note = Artificially Synthesized Probe
  source 1..120: mol_type = other DNA
aaaatatatatttaaaaaaaaaaaagcccaagtcttatcaagaggtccttcctggggcatcagtgcaagctcagggtgcagcctcacctgtgtccctgccagcatttcccaccccacgct

SEQ ID NO: 2746 - DNA, 120 bp, synthetic construct
  misc_feature 1..120: note = Artificially Synthesized Probe
  source 1..120: mol_type = other DNA
ctccctgggagcctggctgtgggtgaagagttaccaaagtccaatacgctgggacctacttcaccgattacgcagttttaagagctgcacaagatcctaccttcttttcttttttttctt

SEQ ID NO: 2747 - DNA, 120 bp, synthetic construct
  misc_feature 1..120: note = Artificially Synthesized Probe
  source 1..120: mol_type = other DNA
tatatatatatatgtacctcaaggtgacgattaaatcatgatgtagaaagtgccctgcccctccccaaaaggcatcaaaacaaaacaggacacaaaaataagggcagaaaaggacagaag

SEQ ID NO: 2748 - DNA, 120 bp, synthetic construct
  misc_feature 1..120: note = Artificially Synthesized Probe
  source 1..120: mol_type = other DNA
gatggcttttcaacgtcaaagaaagactgaaggaaactcatttcaggctacccccaagtcataacacagaactccaggtaaaaacacacctgaaagtgttatctcgagagaatgctgtgg

SEQ ID NO: 2749 - DNA, 120 bp, synthetic construct
  misc_feature 1..120: note = Artificially Synthesized Probe
  source 1..120: mol_type = other DNA
tgcaacctccaccccacgtgggaggaatactcagaaagctctccttcaaatgatctcaaagaatgagtccacacagcggaacaccaaggcctaatgcccaagttgtcttttttttttttc

SEQ ID NO: 2750 - DNA, 120 bp, synthetic construct
  misc_feature 1..120: note = Artificially Synthesized Probe
  source 1..120: mol_type = other DNA
tgtgaggacagaagaggtcatggacgcagcatcttttggccatggttagaatccaaaagatggtggtttataattaatgcaactttgcaaatgtcccttgggattctttcccaatttaaa

SEQ ID NO: 2751 - DNA, 120 bp, synthetic construct
  misc_feature 1..120: note = Artificially Synthesized Probe
  source 1..120: mol_type = other DNA
aaaaatattttttttaaaaagtaggattgatctcaattcattcaactgctaaatttggagagcgaccctgaccccagattcctgaaagggctttaccacactagccacaacgaggaaatg

SEQ ID NO: 2752 - DNA, 120 bp, synthetic construct
  misc_feature 1..120: note = Artificially Synthesized Probe
  source 1..120: mol_type = other DNA
gtggcgggaggtagatgttatctttcatcttctctcagggcagaaaatctctacacatttccttcatgatgatgacacggtggtactatagcttttcacacttctaactaaaagaatttt

SEQ ID NO: 2753 - DNA, 120 bp, synthetic construct
  misc_feature 1..120: note = Artificially Synthesized Probe
  source 1..120: mol_type = other DNA
ccgggagaaggggtcccgggtcggtggtagaggccctggggaaggggttccgggtcggggatcgagggtcgaggcccgggaaaaggggtcccgggttggtggtctaggccctggggaagg

SEQ ID NO: 2754 - DNA, 120 bp, synthetic construct
  misc_feature 1..120: note = Artificially Synthesized Probe
  source 1..120: mol_type = other DNA
gtctgaaagatgttaaaacattaacagatgcagaaaataaacatgcataacggatagagtgccatgcacacaccggcacctccattcctaatcaccgacagctgcaagcaaagtccacta

SEQ ID NO: 2755 - DNA, 120 bp, synthetic construct
  misc_feature 1..120: note = Artificially Synthesized Probe
  source 1..120: mol_type = other DNA
gacgcaaatacgccaacattgttgtcaaggttaatttggcgtggtgggaatatggtgctttatttggattttttttttgagcctcaaaaaaaaaaagaaagggaaaggggtcttccccca

SEQ ID NO: 2756 - DNA, 120 bp, synthetic construct
  misc_feature 1..120: note = Artificially Synthesized Probe
  source 1..120: mol_type = other DNA
actcccatgaggcttctcagggacttcctgccccgagggtcccagcatctcccaggtggaggtcctcaaggatgcccccaccagctccccacagctactgtagcaggaagtccttcttcc

SEQ ID NO: 2757 - DNA, 120 bp, synthetic construct
  misc_feature 1..120: note = Artificially Synthesized Probe
  source 1..120: mol_type = other DNA
ctcctgaggccacagtccaactggaagcagctccacactcggtctccccagaggccgtgtccccgtccaaggccgtcttacagcagacacagaacaggaaggaaaatttggcaaacgtgt

SEQ ID NO: 2758 - DNA, 120 bp, synthetic construct
  misc_feature 1..120: note = Artificially Synthesized Probe
  source 1..120: mol_type = other DNA
gcctcctgctctgattgtttatagcaatcccgggtctcctgatggtgttaaactgaaccaaaacggccgcatttatctacgggaagcctgaaggcaaacggggtcacttataaataaagt

SEQ ID NO: 2759 - DNA, 120 bp, synthetic construct
  misc_feature 1..120: note = Artificially Synthesized Probe
  source 1..120: mol_type = other DNA
aggctgctctcgtgaccccagaatgttctggaacctgcaggaggttttgcagcttcttgggattcagtggggtggctgtgtggggcgagcaactccctcacttttcatgggtatggagca

SEQ ID NO: 2760 - DNA, 120 bp, synthetic construct
  misc_feature 1..120: note = Artificially Synthesized Probe
  source 1..120: mol_type = other DNA
ttacacaccaggaagaaagggcgtccgccggttccgtctgggtcagaggcgcccaacacagccatgggcgggacttaccgagaagtctgtgtcttcggccttcaggtggtctgcaatgta

SEQ ID NO: 2761 - DNA, 120 bp, synthetic construct
  misc_feature 1..120: note = Artificially Synthesized Probe
  source 1..120: mol_type = other DNA
cgaagaccgtgatgacgatggacagggtgacgaagatcatggtgaacagcaggtactcgccgatgagtgggatgaccagtgaggtggacgggatgatctcggtgatgagcagcaggaaga

SEQ ID NO: 2762 - DNA, 120 bp, synthetic construct
  misc_feature 1..120: note = Artificially Synthesized Probe
  source 1..120: mol_type = other DNA
cacctcagtttatcatccctgagctgggcgtagcacgtggttcagagaacgggaagggacctacgagtgcctgacacacataatcactgctgctggtgattacccttatccatgagtggc

SEQ ID NO: 2763 - DNA, 120 bp, synthetic construct
  misc_feature 1..120: note = Artificially Synthesized Probe
  source 1..120: mol_type = other DNA
taccaccaagtcagtctgggtggaatcaggctcaagtttgctccctctccccagcccatctctccaaaaaccaacgccctccaccttctgaggcacaaattaaaagattctcatatggca

SEQ ID NO: 2764 - DNA, 120 bp, synthetic construct
  misc_feature 1..120: note = Artificially Synthesized Probe
  source 1..120: mol_type = other DNA
cggtgacaatcccagccccaaagagaaaactggggtcaccccactacatcccacaggccatggtgaggaggagacacaggagaacatggggtggcagcaatccctgctctcctgagctgt

SEQ ID NO: 2765 - DNA, 120 bp, synthetic construct
  misc_feature 1..120: note = Artificially Synthesized Probe
  source 1..120: mol_type = other DNA
gctgtggtcaggcaagaactgtgatccttgtgggggctgcagttctgcaggaggcactgtagccctagggtgggatgaagtcctgggaggactgtggtcctggcagggaatgtggtcctg

SEQ ID NO: 2766 - DNA, 120 bp, synthetic construct
  misc_feature 1..120: note = Artificially Synthesized Probe
  source 1..120: mol_type = other DNA
tgagtatgcagagaaagcagaggccctagtggcatgagaaccatctggggcttcctcacccctctccagggcaccctgcagtccacactattctcccagaaaggccaggatggggtctga

SEQ ID NO: 2767 - DNA, 120 bp, synthetic construct
  misc_feature 1..120: note = Artificially Synthesized Probe
  source 1..120: mol_type = other DNA
cttcacccatacgttcgtggtcatcatctggttcttctcatcctagggcaccgagagaggaagggggccagtgaccccttggtgtctttctctggccctaggtttcctcatctacagcca

SEQ ID NO: 2768 - DNA, 120 bp, synthetic construct
  misc_feature 1..120: note = Artificially Synthesized Probe
  source 1..120: mol_type = other DNA
ccgtcattctcagtcgcccttgaagctggagggcaggtcaacactgcacatttcaccaccactcagcactggcctgggctggttggaaaagcactgggtcttccagaccctcctctgcag

SEQ ID NO: 2769 - DNA, 120 bp, synthetic construct
  misc_feature 1..120: note = Artificially Synthesized Probe
  source 1..120: mol_type = other DNA
ccctggggtgtggcccactcagcctgggatagtgaagcagctctcaccccgtttcacaggccccaggcccagggttacccaacacgcacggcaccagcctcccaaagagaggaaattctc

SEQ ID NO: 2770 - DNA, 120 bp, synthetic construct
  misc_feature 1..120: note = Artificially Synthesized Probe
  source 1..120: mol_type = other DNA
tggaccagtaggcttcctcccagcagccttcttgggccccccaccagaaagaacatatcttcagacaaacagacttcgcccaagactcccccaaaccccacattccagatctgtgggtga

SEQ ID NO: 2771 - DNA, 120 bp, synthetic construct
  misc_feature 1..120: note = Artificially Synthesized Probe
  source 1..120: mol_type = other DNA
cccgcttcctacggaacctcccctggttcatcaatcccctgatgcccgaggagtgtttcagatgcagaccccaacgaggtgccagccccctccgcaccccagcctgcccgtgctgttggg

SEQ ID NO: 2772 - DNA, 120 bp, synthetic construct
  misc_feature 1..120: note = Artificially Synthesized Probe
  source 1..120: mol_type = other DNA
aacttcatgcctcccgcgcctcgcgggccgcttcggccgccgggcccggttcgtcttctcctgtggggcgcggtgcggcggcggcgcggcagggagcgccgggctgtgggctccgtggcg

SEQ ID NO: 2773 - DNA, 120 bp, synthetic construct
  misc_feature 1..120: note = Artificially Synthesized Probe
  source 1..120: mol_type = other DNA
ccaggttgagctcatggctcctcatacacctgctttgggacgggcaggagctcttcctcactggccagagctgtctgtccgctctgtgggcagtgcctacaattagagctttcagaacac

SEQ ID NO: 2774 - DNA, 120 bp, synthetic construct
  misc_feature 1..120: note = Artificially Synthesized Probe
  source 1..120: mol_type = other DNA
tacatgaagcccctccatgggccagttctgtgccaggaactagaaggttccaagctggatggatatttgggctgagcaagcagctggtaaacacagggaggggagaagagcaaagtcccc

SEQ ID NO: 2775 - DNA, 120 bp, synthetic construct
  misc_feature 1..120: note = Artificially Synthesized Probe
  source 1..120: mol_type = other DNA
ggtgacacagccctgcggccgagtgcacacgctcacacacatctgtccaacctcactggctttccctttggatttgctaatgcagcaagattaatcaggtctaactcattaatttgcaca

SEQ ID NO: 2776 - DNA, 120 bp, synthetic construct
  misc_feature 1..120: note = Artificially Synthesized Probe
  source 1..120: mol_type = other DNA
ggggtgatttttctctctccctcactgctgtctacctgcccatggtaaccgagggtttgtagtaaaggtgagcattgcggggcaccagctgagcctgagccgcacccaaggagatggctg

SEQ ID NO: 2777 - DNA, 120 bp, synthetic construct
  misc_feature 1..120: note = Artificially Synthesized Probe
  source 1..120: mol_type = other DNA
agagaagagatctttgagcccctgtctttgtccgttttgttcagcacaggttttgaagaccgttaagtgtaagagaaacatgggaatcgggcccggattgccaaaggggcaacatgttct

SEQ ID NO: 2778 - DNA, 120 bp, synthetic construct
  misc_feature 1..120: note = Artificially Synthesized Probe
  source 1..120: mol_type = other DNA
caggctctttgtagacagttactgatctcccattggctccggttttgtggctctaagtgcttctggccctccctccacactccctgcctctctgctgagtagttaattcactataagcac

SEQ ID NO: 2779 - DNA, 120 bp, synthetic construct
  misc_feature 1..120: note = Artificially Synthesized Probe
  source 1..120: mol_type = other DNA
tgtgaggaattacgtcccgacaggtcactgacacagaaaagccctttgtcccagccagctggccgcctgctaatgacatccagcctgcaccttccaaggccacctctgcatccagaaagg

SEQ ID NO: 2780 - DNA, 120 bp, synthetic construct
  misc_feature 1..120: note = Artificially Synthesized Probe
  source 1..120: mol_type = other DNA
atggactgtttcatgagatgtatatgtatacagggtgtgtgtgtgcaggtggtacatgcttcatgagatgtgccgtgtgtatgtgcgcacaggatgtgtgtgcagtgtgtatgtgtgcat

SEQ ID NO: 2781 - DNA, 120 bp, synthetic construct
  misc_feature 1..120: note = Artificially Synthesized Probe
  source 1..120: mol_type = other DNA
ctttttcagcctgtggttatggggactcaggtccccaggcccaggggctaatttcagagggagaggtttcctttgccaggcaattggattttcacatcagcacattcctctgaaagtggg

SEQ ID NO: 2782 - DNA, 120 bp, synthetic construct
  misc_feature 1..120: note = Artificially Synthesized Probe
  source 1..120: mol_type = other DNA
tttgcagcacgaagcccttgtcagcttccagcgtgttctaacatttgtcataccagatggattgtcacgagcatatggggtgacattattattctgttactcccatgatgacagagccaa

SEQ ID NO: 2783 - DNA, 120 bp, synthetic construct
  misc_feature 1..120: note = Artificially Synthesized Probe
  source 1..120: mol_type = other DNA
gatctcacttcagagtggcctgggcatggcctcaggttaggtcaggtgaagactctattcctggctcaggaaaaccaccaggacaggtgagcccagcagcatctcgtggagggaggctct

SEQ ID NO: 2784 - DNA, 120 bp, synthetic construct
  misc_feature 1..120: note = Artificially Synthesized Probe
  source 1..120: mol_type = other DNA
tggctgattctcattcaggccttgaatgaaaggccatcttcccaagagtcctccctgactcccctctcacgggacaggtccctcctgttccccgccatggagactgttggttaactctcg

SEQ ID NO: 2785 - DNA, 120 bp, synthetic construct
  misc_feature 1..120: note = Artificially Synthesized Probe
  source 1..120: mol_type = other DNA
gggttctggtgctcaggcagtttcctccacctacatgagccccgactttctcatccgtagagtgggacgaacaacgcccagtgctcagtgtgatattagaagagcccaagacagtggagg

SEQ ID NO: 2786 - DNA, 120 bp, synthetic construct
  misc_feature 1..120: note = Artificially Synthesized Probe
  source 1..120: mol_type = other DNA
caaacttccggttaatgaacaacctccacactggggaaactgctaattaaggtggctgcactttggcttctggcttagttagctgcaacacccccagtgcccgcaggaactcttttctct

SEQ ID NO: 2787 - DNA, 120 bp, synthetic construct
  misc_feature 1..120: note = Artificially Synthesized Probe
  source 1..120: mol_type = other DNA
gttcagaaactgcccgctctgctcatgtccgtaactcagatcttttgttaattttctcagcaacaagtgataactcaaccatttttggggagaagatactcccaggttcactgatttttc

SEQ ID NO: 2788 - DNA, 120 bp, synthetic construct
  misc_feature 1..120: note = Artificially Synthesized Probe
  source 1..120: mol_type = other DNA
acagcctggacccctcaggacagtttccctggaagagaggttcctgttttcacccttgactcacagttcagaggccaagcaaacaaagtgcctgtggcaggtgcatcagcagctcacatc

SEQ ID NO: 2789 - DNA, 120 bp, synthetic construct
  misc_feature 1..120: note = Artificially Synthesized Probe
  source 1..120: mol_type = other DNA
acaccaaccctcccagtgctggtgagaattccggagcagctggtttactccgtctggcaggcgtttccctcccaacagcaaagcatcccgggcttctagcatctaccttgtaaatatcaa

SEQ ID NO: 2790 - DNA, 120 bp, synthetic construct
  misc_feature 1..120: note = Artificially Synthesized Probe
  source 1..120: mol_type = other DNA
gagaggatttctttatttcgcgttcagacccaacacactcggacaccttggggccctgtgagggctaagcagggtggtggcgtcagctcccggggaggccccactccctggggaggaaat

SEQ ID NO: 2791 - DNA, 120 bp, synthetic construct
  misc_feature 1..120: note = Artificially Synthesized Probe
  source 1..120: mol_type = other DNA
ccggtagggaggtcacacacacacagctgatccctggaggtaaagaaacctagacgaggagagtggaggctgggcctgcgcaaggaggcgccaaggggggagaccactgcccacaacagg

SEQ ID NO: 2792 - DNA, 120 bp, synthetic construct
  misc_feature 1..120: note = Artificially Synthesized Probe
  source 1..120: mol_type = other DNA
cggctgcccctccccgaggctctggaccccaccccctgctgttcagtcccaggccccacgcccatgcccatgccctgcacatgcctggggcaccgtgtagggggaggggttcatgaactc

SEQ ID NO: 2793 - DNA, 120 bp, synthetic construct
  misc_feature 1..120: note = Artificially Synthesized Probe
  source 1..120: mol_type = other DNA
gggcagatgcagccccactgggtcccaataaaaaccaacctccaaacacccagtgtccacgtctaaaagacacacagcagtggccgagctgtgtgtcctgtcagggcctcctgacaaagt

SEQ ID NO: 2794 - DNA, 120 bp, synthetic construct
  misc_feature 1..120: note = Artificially Synthesized Probe
  source 1..120: mol_type = other DNA
atacccagctgggcagcagctcccatcagggcgtatttgccggggtccgcccagatctgtgggaggtgacacggaggaggtgtcagtgtggtggcaggcccaaacccaccaagatacaca

SEQ ID NO: 2795 - DNA, 120 bp, synthetic construct
  misc_feature 1..120: note = Artificially Synthesized Probe
  source 1..120: mol_type = other DNA
cttacaggttttcagtcttatttaagcgactgaaatgagaaacagaagacacataagagaacccagtcccagcagaggcaggcagagaaggaaggcctgcgggggctgaggtctggaggg

SEQ ID NO: 2796 - DNA, 120 bp, synthetic construct
  misc_feature 1..120: note = Artificially Synthesized Probe
  source 1..120: mol_type = other DNA
aggtgaaaggccggcactccaaggtcgcggtctgcgcttccgtgaaacacttgtggtcgagcgaggccaggccgtggtcttggtgtgggagtcaccaggctgggttttcttttgtttttt

SEQ ID NO: 2797 - DNA, 120 bp, synthetic construct
  misc_feature 1..120: note = Artificially Synthesized Probe
  source 1..120: mol_type = other DNA
ggcctctaggctctccctgttctggatgtttcatgttaatggggctacgtcgcgtgacctcacgtgtggttcctctgagcgtagtgctttccagggcaaccgtgtcacagtgcagatgga

SEQ ID NO: 2798 - DNA, 120 bp, synthetic construct
  misc_feature 1..120: note = Artificially Synthesized Probe
  source 1..120: mol_type = other DNA
tcctcttccctggggtaaagactcctcggcagcaacttctccagatgtgtgggaagtggcgctacccgtgccccggctgtacccgacagtattgaaatcagcacagaccaagaaggaaga

SEQ ID NO: 2799 - DNA, 120 bp, synthetic construct
  misc_feature 1..120: note = Artificially Synthesized Probe
  source 1..120: mol_type = other DNA
cttccttccagggcaaaggtgtccagcagagcaataaatactggtgggagcaattctatctcttacaggaaatcccatccatccctgcagccctgtggtttttgccaacagagataaaca

SEQ ID NO: 2800 - DNA, 120 bp, synthetic construct
  misc_feature 1..120: note = Artificially Synthesized Probe
  source 1..120: mol_type = other DNA
ctccgagtcaaaccttccgaagttgatgaggcctgggctggacaggtcccacatgttcccgtggtaaatgctcagaacaaaattcagggtgaacgtggagatcatggaagcaaagaactg

SEQ ID NO: 2801 - DNA, 120 bp, synthetic construct
  misc_feature 1..120: note = Artificially Synthesized Probe
  source 1..120: mol_type = other DNA
aagtcccgcttctctgtgtctctgcggaagtactcgaagatctgcaacagggacagaccagggtcggggcaggttccttgagggcacggctctcagaaagggagagcaactgccaggaca

SEQ ID NO: 2802 - DNA, 120 bp, synthetic construct
  misc_feature 1..120: note = Artificially Synthesized Probe
  source 1..120: mol_type = other DNA
aaaaaaatacaatcacacacaaatgcagctcaatccccatcaacatgctggggacttttttggggaaaaagtgttccaaagtgtgtcttgacaaataaacaacaggtgggcacacttggt

SEQ ID NO: 2803 - DNA, 120 bp, synthetic construct
  misc_feature 1..120: note = Artificially Synthesized Probe
  source 1..120: mol_type = other DNA
acaagggcgcagaccctaaacacaagggcgctgagtgtgtgggggaggactgtatgttaaagatgccgagcaaactcaaccctcagccaacaaaagttatagagcaacatccaagaaggt

SEQ ID NO: 2804 - DNA, 120 bp, synthetic construct
  misc_feature 1..120: note = Artificially Synthesized Probe
  source 1..120: mol_type = other DNA
cacagctgtgtcacacatgcaccacgcaagcatttctgtatgactactcatttcttacgtaatttaatatgtgcaaataccagttgttaccactttcagaaaaaaaggtgaccccttcac

SEQ ID NO: 2805 - DNA, 120 bp, synthetic construct
  misc_feature 1..120: note = Artificially Synthesized Probe
  source 1..120: mol_type = other DNA
agcagcacacacttcggggccccagggaaggggagctcagcacacacgtcggggcctcagggaagggaagagcagcacacacgttggggccccagggaagggtctcatgtcgttggggta

SEQ ID NO: 2806 - DNA, 120 bp, synthetic construct
  misc_feature 1..120: note = Artificially Synthesized Probe
  source 1..120: mol_type = other DNA
gtgaattcccaacaacttcacagccagcggttgttatgctgggcaccgcatctggcggccgtaagagcagccttcttggttacggtgaccgtgaccctcccactgtctctagaaaccaga

SEQ ID NO: 2807 - DNA, 120 bp, synthetic construct
  misc_feature 1..120: note = Artificially Synthesized Probe
  source 1..120: mol_type = other DNA
aaccacggatgcaaagatctttggtaagacacaagcaaagtgattccagcaatgccaggagcaaggtgaattcagcctaggaatacaagttagtttaacatccaaaaatcaatccatgag

SEQ ID NO: 2808 - DNA, 120 bp, synthetic construct
  misc_feature 1..120: note = Artificially Synthesized Probe
  source 1..120: mol_type = other DNA
ctggcatgaagatggccacaaaagaatggaagagaattgagagagtccagaaagaaatccaaaacatgtacgatcaattgatttcccacaacagtgtcaaaacatttcaacagagaaagg

SEQ ID NO: 2809 - DNA, 120 bp, synthetic construct
  misc_feature 1..120: note = Artificially Synthesized Probe
  source 1..120: mol_type = other DNA
ttgagcaacaaaagacaccactgagaaagtgaacagaaaacccactgaacgggagaaaacttctataaatcatgtattggatgagagatttgcatctatgtataaagaactcctgcagct

SEQ ID NO: 2810 - DNA, 120 bp, synthetic construct
  misc_feature 1..120: note = Artificially Synthesized Probe
  source 1..120: mol_type = other DNA
aaaccgaggccggcgggagatgcccccgaggggaaggaagacgagcacgctgccgctgagctcaggactcccagggcagccactggcacgggaacatctaaacccctgccctctgaagtc

SEQ ID NO: 2811 - DNA, 120 bp, synthetic construct
  misc_feature 1..120: note = Artificially Synthesized Probe
  source 1..120: mol_type = other DNA
tgaggccaggctaggaggagccaagacctcagcctcctttccccaaagagatcctttggagacgactccaatttccactatctcctgaatctttagcaacatctggggacatgaagggaa

SEQ ID NO: 2812 - DNA, 120 bp, synthetic construct
  misc_feature 1..120: note = Artificially Synthesized Probe
  source 1..120: mol_type = other DNA
atcacgattaccacacacaggcaaggacacagaagcagagaaggaaggtttgggatctgaggtcactgcgagccaggggtgggggtcctgctttctctggagtgctcacccctgaaggag

SEQ ID NO: 2813 - DNA, 120 bp, synthetic construct
  misc_feature 1..120: note = Artificially Synthesized Probe
  source 1..120: mol_type = other DNA
gccaccctctccatcactcaagatgtcagcacttctctctaacgccactcaaggcctgccgtgcttctcaggctattccttgctggaaataacggatcattctggccggacgtggtggct

SEQ ID NO: 2814 - DNA, 120 bp, synthetic construct
  misc_feature 1..120: note = Artificially Synthesized Probe
  source 1..120: mol_type = other DNA
aacacgacgtttacttcaagttcagcaatgcattccgtgcggttactttcttttttaaatgcaagctcttataaattaaacactagatgctgttcctcaaactcctgccacacacggcaa

SEQ ID NO: 2815 - DNA, 120 bp, synthetic construct
  misc_feature 1..120: note = Artificially Synthesized Probe
  source 1..120: mol_type = other DNA
acagcagcaccgttcacaatgaccaaaatgcggaagcacctgctgtgccgatggatgagtgagtcaaggaaatgcagcctctccccgcaatggaataattcagccataaagaggaatgac

SEQ ID NO: 2816 - DNA, 120 bp, synthetic construct
  misc_feature 1..120: note = Artificially Synthesized Probe
  source 1..120: mol_type = other DNA
aaatttatggtatgtgttctttaccacagttttttttaaaacttaaagcaggattaaagaccatttgctgttctgctcggcctgtgttgcgtcctaacattcagcaggcctctgccagga

SEQ ID NO: 2817 - DNA, 120 bp, synthetic construct
  misc_feature 1..120: note = Artificially Synthesized Probe
  source 1..120: mol_type = other DNA
aaatccagtagctactcaggaagttggacaggaaagtcacaacgaacacgaatccctcttgtgttgctggttttaacacgaccgggcacgactcacgtttcttcagagcgtagtttgtga

SEQ ID NO: 2818 - DNA, 120 bp, synthetic construct
  misc_feature 1..120: note = Artificially Synthesized Probe
  source 1..120: mol_type = other DNA
aaccccaagcacattcagtcccaagagaaactcaaattcaacctccatcaaggttcctaatctttacctttcagcccttaaagttgggtttattccttctaccttgtgaacttcagattt

SEQ ID NO: 2819 - DNA, 120 bp, synthetic construct
  misc_feature 1..120: note = Artificially Synthesized Probe
  source 1..120: mol_type = other DNA
cgtgccctgccgtccttcctaatctttaagcacaagacaagtgtttaaaggactagacaagagaaaatgtaaagaataactgcaaagcagattaagacccatcaacaaaacggtccatta

SEQ ID NO: 2820 - DNA, 120 bp, synthetic construct
  misc_feature 1..120: note = Artificially Synthesized Probe
  source 1..120: mol_type = other DNA
tgcaatcttaactgtttccatctcccagggggtcaaaaacgcaaacaaaattagttgctcgtgtaggatgacaatttttaaaagtcacctgaacagaaagccacttgcacccctttaggg

SEQ ID NO: 2821 - DNA, 120 bp, synthetic construct
  misc_feature 1..120: note = Artificially Synthesized Probe
  source 1..120: mol_type = other DNA
cggggcgtgggcgggggcgggagggttcgaggccggccggtgggcgtgggcgggagctggctggggtgtgccccaacttccccgttgcttgtaggagaggagggggcactgcttggggtg

SEQ ID NO: 2822 - DNA, 120 bp, synthetic construct
  misc_feature 1..120: note = Artificially Synthesized Probe
  source 1..120: mol_type = other DNA
gtttcgtgcaggagaaatagcgtgaataagggcttggagtcagaaaaggaggctattgggttagagaaacagcttaggatttaaggaacttagacctgcgttgagcacaggatgcattct

SEQ ID NO: 2823 - DNA, 120 bp, synthetic construct
  misc_feature 1..120: note = Artificially Synthesized Probe
  source 1..120: mol_type = other DNA
atcctcatctgtaaaattgggatccttatggtatctggcttttagggttgttaggagaactgtgtgccctgtgacagagtagatgtcctataagtgttgttgctgccgtacagagtggct

SEQ ID NO: 2824 - DNA, 120 bp, synthetic construct
  misc_feature 1..120: note = Artificially Synthesized Probe
  source 1..120: mol_type = other DNA
ctggcctggttctgagctctttaaattcattccttcatttgtggatattttaataaggttgcctacattttacagataagaatatcctggcacaaagaggtggctgtgtctgcccttgat

SEQ ID NO: 2825 - DNA, 120 bp, synthetic construct
  misc_feature 1..120: note = Artificially Synthesized Probe
  source 1..120: mol_type = other DNA
tgggataattggttggctgcattgatgatgaaggttgtgtgttaggtgaggaccagcaaatctgggcattcagggagttcatgagctgatgggggaggcagacccgtggtcaattagcca

SEQ ID NO: 2826 - DNA, 120 bp, synthetic construct
  misc_feature 1..120: note = Artificially Synthesized Probe
  source 1..120: mol_type = other DNA
caatgtgcagcattgagcttccacaagcttttactaaattgggaagacatccgccctgcttcctgacaatgtaaacaatatcagccctttccagaaacatttcaaggccagacactttga

SEQ ID NO: 2827 - DNA, 120 bp, synthetic construct
  misc_feature 1..120: note = Artificially Synthesized Probe
  source 1..120: mol_type = other DNA
catctgaaaggggcttgtgtgttcttcatctgattccagaaaggacttgaggtgatttacaaagataaacgcagtataaccagattaaaagtaaatgagaaaattaggccaggcatcagg

SEQ ID NO: 2828 - DNA, 120 bp, synthetic construct
  misc_feature 1..120: note = Artificially Synthesized Probe
  source 1..120: mol_type = other DNA
agtctgtggtcctttgtaatgacagccatagcagactaatatagtccctaagaccagcatttgttcccttgcagacaccatcgtccccagttacttgctgatcagcagtgggtcgccttt

SEQ ID NO: 2829 - DNA, 120 bp, synthetic construct
  misc_feature 1..120: note = Artificially Synthesized Probe
  source 1..120: mol_type = other DNA
atccagaggagggcactttaatgcattcatatattcactaaacatgtatttttgagctcctctatggtctgggtgctgtcctaggtaccgagaacccagcaatgaacaagatatgcaaag

SEQ ID NO: 2830 - DNA, 120 bp, synthetic construct
  misc_feature 1..120: note = Artificially Synthesized Probe
  source 1..120: mol_type = other DNA
ttctatttttaaaaaacgtttaagtaaaaaagttgcgcccagtgagaggaagggcattctaggaacccggcatggcacgtgcaaaagcctggacgtgtgacctagtggatatgaatgtgg

SEQ ID NO: 2831 - DNA, 120 bp, synthetic construct
  misc_feature 1..120: note = Artificially Synthesized Probe
  source 1..120: mol_type = other DNA
caagcgattctcctgcctcagcctcccaagtagctagattacaggcatgtgcccccatgcccggctaattttgtatttttagtagagacagggtttctccatgttggttaggctggtctc

SEQ ID NO: 2832 - DNA, 120 bp, synthetic construct
  misc_feature 1..120: note = Artificially Synthesized Probe
  source 1..120: mol_type = other DNA
tggtagacatataccgcattttctttatccagtcctcccttgacggacacatatgttgattccatatctttgctcttgtgaattgtgctgtgatcaacataccagtgctggtatcctttg

SEQ ID NO: 2833 - DNA, 120 bp, synthetic construct
  misc_feature 1..120: note = Artificially Synthesized Probe
  source 1..120: mol_type = other DNA
gccaccatgcctggccttattgactcattctaatggtaatggatgtgtgggttattttcagcgttggacctttttttgtggctggtggttctgagcatgccaactctgtgtgtgtgtcta

SEQ ID NO: 2834 - DNA, 120 bp, synthetic construct
  misc_feature 1..120: note = Artificially Synthesized Probe
  source 1..120: mol_type = other DNA
ctaaaactgaggaaccacagccctgagctcggacatagtgagaaaggtagcatgtgggaccggaacccaggcttctagactcaacccttgcttgtctcccagctgcaggtgccagagaag

SEQ ID NO: 2835 - DNA, 120 bp, synthetic construct
  misc_feature 1..120: note = Artificially Synthesized Probe
  source 1..120: mol_type = other DNA
agcctggcctggcagtgagcattttggggtcctctctgttgggggcttgcctcttggtggctgtgcagtggagataatgtttccttctccctccccttgtgtctcttatttttttttttt

SEQ ID NO: 2836 - DNA, 120 bp, synthetic construct
  misc_feature 1..120: note = Artificially Synthesized Probe
  source 1..120: mol_type = other DNA
aaaaaaaaagtttaagaaatctgttagatattcaaaggagtagacaggatacattgaacacccatgtgcaccccatagggctaggaaacaaaccttagaaatataacaaaggctgggcat

SEQ ID NO: 2837 - DNA, 120 bp, synthetic construct
  misc_feature 1..120: note = Artificially Synthesized Probe
  source 1..120: mol_type = other DNA
agtcaccgcacccggtcacattttagggatctgcttccatctcagcagcccccagctggcttctctccctgcaccccaacccccccccaccgcccctgctgccagttcaccatcatcctc

SEQ ID NO: 2838 - DNA, 120 bp, synthetic construct
  misc_feature 1..120: note = Artificially Synthesized Probe
  source 1..120: mol_type = other DNA
gccaatttatcatcaagtcccagcgttttccaagaatccctctctcttcctctgtcccaccagcacagctgagtcacacgagggcaggtggcctcccccttcttcctgttcactattctc

SEQ ID NO: 2839 - DNA, 120 bp, synthetic construct
  misc_feature 1..120: note = Artificially Synthesized Probe
  source 1..120: mol_type = other DNA
catgtgatcctgaggtctctgtgggccgaaggtcctgagagacttcctggaggaggtggcatcaggctaggtgtcagtaggtaatgcaaataggagaagtgaagcaggtgggagaaaaga

SEQ ID NO: 2840 - DNA, 120 bp, synthetic construct
  misc_feature 1..120: note = Artificially Synthesized Probe
  source 1..120: mol_type = other DNA
gcctcggccgtcttttcatgtgcttatgggctgtttatatatcttctttggtgaaatgtgtattcaaagtgctgagattacaggcgtgagccaccatgcccggccctttttaaaaaattt

SEQ ID NO: 2841 - DNA, 120 bp, synthetic construct
  misc_feature 1..120: note = Artificially Synthesized Probe
  source 1..120: mol_type = other DNA
ctgcattctgtgtatacggttttgaaatttcatatgaacggattcatacaatatggagtccttcgtgtctagtttcttctacttagcaaaatgttttaaacattcatccggccgggcgtg

SEQ ID NO: 2842 - DNA, 120 bp, synthetic construct
  misc_feature 1..120: note = Artificially Synthesized Probe
  source 1..120: mol_type = other DNA
ggttgatggagattttacttttgggctgttatgagtaaagctggtatgaacacttgtttataaaactttctatggacacatatttttgcttctcttgggtggttgggttatatgggaggt

SEQ ID NO: 2843 - DNA, 120 bp, synthetic construct
  misc_feature 1..120: note = Artificially Synthesized Probe
  source 1..120: mol_type = other DNA
cagtctctacaaaaaataaaaaacaattagccaggcatggtagggtgcacctgtagtcctagctatccaggaggctgagacgggaggattgcttgagcccaggagttggaggctgcagtg

SEQ ID NO: 2844 - DNA, 120 bp, synthetic construct
  misc_feature 1..120: note = Artificially Synthesized Probe
  source 1..120: mol_type = other DNA
tcatcggatgccctcacgcacattcctgacgcgagcattgtgggttggcatctgtattcatcagaatttttttggaaatgcaaatgacattgtccctcaaataggtttaggaaaaaaaaa

SEQ ID NO: 2845 - DNA, 120 bp, synthetic construct
  misc_feature 1..120: note = Artificially Synthesized Probe
  source 1..120: mol_type = other DNA
gagacgcctcacctgatcttctctgatggccaggcctgcattatgcatcccctctaggagtgggaatcgggtcaacccacataagtcatatgaaccaaggatggggaaaatgtaggctgg

SEQ ID NO: 2846 - DNA, 120 bp, synthetic construct
  misc_feature 1..120: note = Artificially Synthesized Probe
  source 1..120: mol_type = other DNA
ataataacaaaatgagtgaagaaaaggtttcttcaaaatctgtgaccacagatatggctggacagacaagggcatctcctgtatcagagatttcctgtgtttccgaggtccagacatgag

SEQ ID NO: 2847 - DNA, 120 bp, synthetic construct
  misc_feature 1..120: note = Artificially Synthesized Probe
  source 1..120: mol_type = other DNA
cccgccaacatgcccagctaatttttgtatttttagcagagttggggtttccgccacgttggccaggctggtctcaaactcctgacctcaggtgatccgcccacctcagcctctcaaggt

SEQ ID NO: 2848 - DNA, 120 bp, synthetic construct
  misc_feature 1..120: note = Artificially Synthesized Probe
  source 1..120: mol_type = other DNA
tgggatgacaggccactgtacccagtctaaaagtggtctttgttgcaaacagtttgatggatgctcttgggatagaagatgaaacatctttcaattgtaataaatttctgcaaccaaata

SEQ ID NO: 2849 - DNA, 120 bp, synthetic construct
  misc_feature 1..120: note = Artificially Synthesized Probe
  source 1..120: mol_type = other DNA
tacatgggatgagtgttcttctggaagagccccaggagcacaggccactctgtgaccaatctgatgggggacgctgagtgtcatgagctcctgtaatggggcctgatcaacactgggagg

SEQ ID NO: 2850 - DNA, 120 bp, synthetic construct
  misc_feature 1..120: note = Artificially Synthesized Probe
  source 1..120: mol_type = other DNA
taaaaaaaaaatgacgatcgtttgttacttatcactttgataaatgatgctgtgatgaacatctttgtgcacaaagcctggctttgatgatactccagccagcaggataggtcactgccc

SEQ ID NO: 2851 - DNA, 120 bp, synthetic construct
  misc_feature 1..120: note = Artificially Synthesized Probe
  source 1..120: mol_type = other DNA
agagagagaaagaagaaaagtctggatggagaggagtgtgaaaagaggttagggagggcagccaggacagatctgaaggacacagggtttgggtttgttttaagagtggtgggggctggg

SEQ ID NO: 2852 - DNA, 120 bp, synthetic construct
  misc_feature 1..120: note = Artificially Synthesized Probe
  source 1..120: mol_type = other DNA
aaaaacaaaacaaaaaaaggatggtgggagcggctggaggataccaatggaagagtgatgggaccttgttcacatcccttgggccactgtgcagagaacggattgtagggttaagagcca

SEQ ID NO: 2853 - DNA, 120 bp, synthetic construct
  misc_feature 1..120: note = Artificially Synthesized Probe
  source 1..120: mol_type = other DNA
gaccatgtttatcgtggtcccacaggattctaacagagctgagcatttcctattgccgacattggcagttcctgagttttagccattgtcatgttgcagcgcaattactttattttattt

SEQ ID NO: 2854 - DNA, 120 bp, synthetic construct
  misc_feature 1..120: note = Artificially Synthesized Probe
  source 1..120: mol_type = other DNA
acaggcgtgagccactacacctgtcccattgtttatctttgttttttgctgttgttgtttgtttttttgagatggagtctcgctctgtcaccaggctcaagtgcagtggcgcgatcttgg

SEQ ID NO: 2855 - DNA, 120 bp, synthetic construct
  misc_feature 1..120: note = Artificially Synthesized Probe
  source 1..120: mol_type = other DNA
cggcctcccaaagtgctgggatcacaggcatgagccagtgcgcctggccctggcctagatgtcttatgttcagatgtacaaacacttcccctcgtgttacagttgccttcagcattgagt

SEQ ID NO: 2856 - DNA, 120 bp, synthetic construct
  misc_feature 1..120: note = Artificially Synthesized Probe
  source 1..120: mol_type = other DNA
aaggaggtggccagcctggagcaaaaccgagttggctgagacagccaaactccaggagagagaaagggagaattctgctgcttttgttcctgttccaagatcttgagaaaaaaaaaaaaa

SEQ ID NO: 2857 - DNA, 120 bp, synthetic construct
  misc_feature 1..120: note = Artificially Synthesized Probe
  source 1..120: mol_type = other DNA
atctcaaaacaacaaaaaaaagttggggggctgggctgcagtgacctggatcctgggtgaggactgatgggactgatgagcacaggggccaaccatgtgccattgttttcattttaaaga

SEQ ID NO: 2858 - DNA, 120 bp, synthetic construct
  misc_feature 1..120: note = Artificially Synthesized Probe
  source 1..120: mol_type = other DNA
tgttacccacccttagacggggagttgggctatgtgaggcaaggcccacctcctatatgctatcctcagctgctctctagtacacacacagggctgggcccagagcattttttttttttt

SEQ ID NO: 2859 - DNA, 120 bp, synthetic construct
  misc_feature 1..120: note = Artificially Synthesized Probe
  source 1..120: mol_type = other DNA
agagcaggtaggattgtccccattttaagtgacttgtctgagatgttgggcaaattcgtcccttcaagggcaacttctcggctctccactgaccacatcctaaactttttaatggcatca

SEQ ID NO: 2860 - DNA, 120 bp, synthetic construct
  misc_feature 1..120: note = Artificially Synthesized Probe
  source 1..120: mol_type = other DNA
ccttaggtgatcctaagggtaaagtgctgtactcaaggcagaaggatggagctttgcctgaaacagcctgcttgatgcctgtggtattggtaaaatgcctttttttcttttcttttattt

SEQ ID NO: 2861 - DNA, 120 bp, synthetic construct
  misc_feature 1..120: note = Artificially Synthesized Probe
  source 1..120: mol_type = other DNA
cgtgctcattggtacatcaaaggctctgaaaagtcctgcagacaagtacccttcactttgttgaagttgctgtttctcaagcttctttgaacttggaggttaaattgtttgtttgtttgt

SEQ ID NO: 2862 - DNA, 120 bp, synthetic construct
  misc_feature 1..120: note = Artificially Synthesized Probe
  source 1..120: mol_type = other DNA
tggatgtcgggatgctcctgaactctgctgtgtcaccaagaatcacatcataaacactgtcctacataacctggacaaataatgttttaaaggttgcttaataatctgaataatgtgacc

SEQ ID NO: 2863 - DNA, 120 bp, synthetic construct
  misc_feature 1..120: note = Artificially Synthesized Probe
  source 1..120: mol_type = other DNA
ccagccgggatcagtttcattctacatcttcctgtgtcatttgaatcatttacaaggagagtgtatttgtgtcttaaagaaaaaaatgtggtcacatgtaggcagtagctaaagctgtag

SEQ ID NO: 2864 - DNA, 120 bp, synthetic construct
  misc_feature 1..120: note = Artificially Synthesized Probe
  source 1..120: mol_type = other DNA
gaaatacccacacccacatcattcgaggtggagccctccctcccgctcccccgggtaccacattttgggttccttcctcagttacgcacatggcgtggcaagctgaattgtagttgctgg

SEQ ID NO: 2865 - DNA, 120 bp, synthetic construct
  misc_feature 1..120: note = Artificially Synthesized Probe
  source 1..120: mol_type = other DNA
tatggaccgaggaagctcctgttaaccaggtttcaaaaactccatcgtatatacattggctcccctgggaggagacgtaggacatggagaatgtcagcgctggaaaggaccttagctatt

SEQ ID NO: 2866 - DNA, 120 bp, synthetic construct
  misc_feature 1..120: note = Artificially Synthesized Probe
  source 1..120: mol_type = other DNA
gctctaagcacagagggcaggtagaaacagaccttagctgggctacagtggttctgttcagttagcagaggtcacagagctctctctgcataggaaagtgccctagaaatggatatgggg

SEQ ID NO: 2867 - DNA, 120 bp, synthetic construct
  misc_feature 1..120: note = Artificially Synthesized Probe
  source 1..120: mol_type = other DNA
ggtgtgagccactgtgcctggcttattttccttccttccttccttccttccttccttccttgcttccttcctttctctttttttctttctttttttcttccttccttcctttctttcttt

SEQ ID NO: 2868 - DNA, 120 bp, synthetic construct
  misc_feature 1..120: note = Artificially Synthesized Probe
  source 1..120: mol_type = other DNA
tacctcccaaaacgtggaaattatgggagctacaattcaagatgagatttgggtggggacacagccaaaccaaatcagtcctgctgcctattgtctgggagctcaggtgaagcacctgat

SEQ ID NO: 2869 - DNA, 120 bp, synthetic construct
  misc_feature 1..120: note = Artificially Synthesized Probe
  source 1..120: mol_type = other DNA
gttaggagggttttctttcctgtcccaagagagacagaaggggacatctttatgcaagaagtctgtggctgtgtccctctattaggaaataggctggtagccttttgtgggccctgtaac

SEQ ID NO: 2870 - DNA, 120 bp, synthetic construct
  misc_feature 1..120: note = Artificially Synthesized Probe
  source 1..120: mol_type = other DNA
tctctacccaaaaatacaaatcagccacctcccaaccctagactctgtgctcctggggccacccaggggccagccctaacagccacctctttccctttccctctccttctctgcaggctc

SEQ ID NO: 2871 - DNA, 120 bp, synthetic construct
  misc_feature 1..120: note = Artificially Synthesized Probe
  source 1..120: mol_type = other DNA
tgagccccagcgccctaccaaaatgggaattttaatcgtacttcagtcatagttggagatgcattaaaacgtatcactcatttagacagtgcctaatactaagtacccatacattttggc

SEQ ID NO: 2872 - DNA, 120 bp, synthetic construct
  misc_feature 1..120: note = Artificially Synthesized Probe
  source 1..120: mol_type = other DNA
tctcaaaaaagcaataataataacagtggtaatggttataaccccttgcccagggccaggaggtgcagacaccttatcagctacaactcgagtgatcagtgttattgaagttgagagaat

SEQ ID NO: 2873 - DNA, 120 bp, synthetic construct
  misc_feature 1..120: note = Artificially Synthesized Probe
  source 1..120: mol_type = other DNA
gtttaataacttgtctgaagtgacatgtgacaagtgcctgcccactgttcactgagttgtatttcctgtctgccctgccctggccatggtgagggctctgcttttcttttcttttttttt

SEQ ID NO: 2874 - DNA, 120 bp, synthetic construct
  misc_feature 1..120: note = Artificially Synthesized Probe
  source 1..120: mol_type = other DNA
aaaacaaaaaaaaagaaactgaaaagagcagggaggctgagtgggcagtgggggaagccagggaaagatcacatcccagaggctgacctgggtgaccccacagggccagggacctgggat

SEQ ID NO: 2875 - DNA, 120 bp, synthetic construct
  misc_feature 1..120: note = Artificially Synthesized Probe
  source 1..120: mol_type = other DNA
attcattcattcattctccatgtgtctgttcagcaaaatggccatggcccagcactcttgttttgctttatgcttttatggagagcattaagagagctgatggcagccgggcacggtggc

SEQ ID NO: 2876 - DNA, 120 bp, synthetic construct
  misc_feature 1..120: note = Artificially Synthesized Probe
  source 1..120: mol_type = other DNA
ttgaccttagcttctcaatctttaagtagattgcatcctatggttgaaacactgctttctgggagggcatacctcacactgggcactgtgcctagcatggttttttttgagacaaggtct

SEQ ID NO: 2877 - DNA, 120 bp, synthetic construct
  misc_feature 1..120: note = Artificially Synthesized Probe
  source 1..120: mol_type = other DNA
agagaaagaggaagaaagaaatatttaggttcagataaacatggtaaataaacatacacatttattttcaatctctcctgaatttgcactagaacaacactgaagagatgtttgggtttt

SEQ ID NO: 2878 - DNA, 120 bp, synthetic construct
  misc_feature 1..120: note = Artificially Synthesized Probe
  source 1..120: mol_type = other DNA
catgcagctatgaagataaatttttttaaaagagctagtggtaggggaagaggagaagcaatcagtgtccatccggaaaccctagatgttcagtaactggccgcatgttggcctctagaa

SEQ ID NO: 2879 - DNA, 120 bp, synthetic construct
  misc_feature 1..120: note = Artificially Synthesized Probe
  source 1..120: mol_type = other DNA
acgcctactccctctacaatggagattacaggaaacttctctggagaaaacagctggtcctctgagaaataagagaaggtgatacaggcattaaatatgaacaaaaacgccactgaatat

SEQ ID NO: 2880 - DNA, 120 bp, synthetic construct
  misc_feature 1..120: note = Artificially Synthesized Probe
  source 1..120: mol_type = other DNA
gaaaatcaaataattaattcaagaaaattccccagattgataagggtgtttcttgattgaaagggcccctaggagcccaggacagtggatggaaaaaggctcacatcaaagcacctcatt

SEQ ID NO: 2881 - DNA, 120 bp, synthetic construct
  misc_feature 1..120: note = Artificially Synthesized Probe
  source 1..120: mol_type = other DNA
cctgctgcaatatgattggaccttgaaaacatgatgctaagtgaaagaagccagacacaaatggccacatattgtgtgattccatttccttttgagataaagtctcactcttgtcaccca

SEQ ID NO: 2882 - DNA, 120 bp, synthetic construct
  misc_feature 1..120: note = Artificially Synthesized Probe
  source 1..120: mol_type = other DNA
ttacattatgtgaatttttacctccattaaaaaaaagagtgagccaggcacagtggctcacgcctgtaattccagcactctgggaggctgaggaaggaagattgtttgaggccaagggtt

SEQ ID NO: 2883 - DNA, 120 bp, synthetic construct
  misc_feature 1..120: note = Artificially Synthesized Probe
  source 1..120: mol_type = other DNA
ataaaatacaataacataacctaaaataagtagtaaaccaagaaagaagagtcaggggatccagaaaacaggagcaagcccaggacagaggtgaaatggttgacaggagactccaggcca

SEQ ID NO: 2884 - DNA, 120 bp, synthetic construct
  misc_feature 1..120: note = Artificially Synthesized Probe
  source 1..120: mol_type = other DNA
ctggaaaggaaaagtaactacaatacatcatcctcatctatgagtactatctacttagtcatagtactgcaatcctggagtcagatcaaaatttagatatggaatacaaaaattagctgg

SEQ ID NO: 2885 - DNA, 120 bp, synthetic construct
  misc_feature 1..120: note = Artificially Synthesized Probe
  source 1..120: mol_type = other DNA
acagcttctaagtgacagagtttgaatgcaggtctgtgtgtctgtcttcaaagcctgtgcccttgcctgtgtcagccctgggaggcactggttaacctgtctccatctcaatcatcctta

SEQ ID NO: 2886 - DNA, 120 bp, synthetic construct
  misc_feature 1..120: note = Artificially Synthesized Probe
  source 1..120: mol_type = other DNA
aaataaataaataaaaggtgaggcagcagtccctgtcatctggcattggggtcccctgaatgacacatgaaataatcagacaatgcccagcgctatatggccagaggcaggcctcacaga

SEQ ID NO: 2887 - DNA, 120 bp, synthetic construct
  misc_feature 1..120: note = Artificially Synthesized Probe
  source 1..120: mol_type = other DNA
ggaatccgtgaccagagaggtcttgacagaagacgagaatccagggtttccataacaatgctttgccttcctgtttgcaagatgaatgtttcttttgactcacttttgctttcagaattc

SEQ ID NO: 2888 - DNA, 120 bp, synthetic construct
  misc_feature 1..120: note = Artificially Synthesized Probe
  source 1..120: mol_type = other DNA
ggtgaggatgtaagagatccaggtgttctggtctgcccctgacttactctagttccagtttgggatttttgaacaaagaagaaagtgcatatcttttaatagggaaaattgagccattta

SEQ ID NO: 2889 - DNA, 120 bp, synthetic construct
  misc_feature 1..120: note = Artificially Synthesized Probe
  source 1..120: mol_type = other DNA
cccgctttccagagataagcctcagtgacctggtgaatttccttccagtcttttctgcctatgtataaggatacatacacctactttcagaatctggttacaagcttgtatatcctgctt

SEQ ID NO: 2890 - DNA, 120 bp, synthetic construct
  misc_feature 1..120: note = Artificially Synthesized Probe
  source 1..120: mol_type = other DNA
cttttcttccccggctacttattatactgcaagcattttctaggtcctggcaaattcctcatcattcttttttttttttattttatttttttcttttagagatagggccttgctttgttg

SEQ ID NO: 2891 - DNA, 120 bp, synthetic construct
  misc_feature 1..120: note = Artificially Synthesized Probe
  source 1..120: mol_type = other DNA
tttcagattatttttttgagcagattctagggttgaatttcaggaaagtgactccttgccccaagccttggggctgctgctatctcgtgtctggttttttctctgatgtttgtctcccgt

SEQ ID NO: 2892 - DNA, 120 bp, synthetic construct
  misc_feature 1..120: note = Artificially Synthesized Probe
  source 1..120: mol_type = other DNA
agtgaggtgttggtcctgtcttctgcaggcagttgggagaactcttcatataactggagtaaagcacccagcacggtgccgggcacagagggacaccacatttttaaaaatttttttgaa

SEQ ID NO: 2893 - DNA, 120 bp, synthetic construct
  misc_feature 1..120: note = Artificially Synthesized Probe
  source 1..120: mol_type = other DNA
tacacatcaggaaactgaagttaagagaaacagcagccaagggactcctgaaatgccctgtgtccaggtgtcagccctgtgctgtgtgcttcgctggtgtcatcgctttcaaggccagat

SEQ ID NO: 2894 - DNA, 120 bp, synthetic construct
  misc_feature 1..120: note = Artificially Synthesized Probe
  source 1..120: mol_type = other DNA
tgtcggattcagggagatgagggtgtatttatatttgcctgagacagccatagtggcctacacatctggttcccatggcgatgtgcctgacgccaacaaacacagatctttttttctttt

SEQ ID NO: 2895 - DNA, 120 bp, synthetic construct
  misc_feature 1..120: note = Artificially Synthesized Probe
  source 1..120: mol_type = other DNA
atgagaacaagatcaacagcaaaggaagcccactttccttctctcctttccttcctccccacaggttgttccttgtggtagtgtctgttccccgcagtgatgaaaacagtgttgtcagct

SEQ ID NO: 2896 - DNA, 120 bp, synthetic construct
  misc_feature 1..120: note = Artificially Synthesized Probe
  source 1..120: mol_type = other DNA
ttcttcttaggcaatagccctaaaggtgccccttcgttcatcttggattccaggtaaaattttggctgaaagtagcttgctgagtcacagaatttataggtaggaaaactgaggctcaga

SEQ ID NO: 2897 - DNA, 120 bp, synthetic construct
  misc_feature 1..120: note = Artificially Synthesized Probe
  source 1..120: mol_type = other DNA
cccatgcaacgttttattgtagcaaactgaattgtgatcatattcatggcaaccagaaggcaaaatgaccaaagtcccactcatcccctcatccccacccttttttttcttttttggaga

SEQ ID NO: 2898 - DNA, 120 bp, synthetic construct
  misc_feature 1..120: note = Artificially Synthesized Probe
  source 1..120: mol_type = other DNA
tttgacatctccacccaattgaggaagaagcaagcacctgtatcaatttcctggggctgcaataatgcacagccacaaatgtgtggcttaaaacagcacaaacatatgctttcgcagttc

SEQ ID NO: 2899 - DNA, 120 bp, synthetic construct
  misc_feature 1..120: note = Artificially Synthesized Probe
  source 1..120: mol_type = other DNA
gaaatttaagaagtcactattcaacccaggaccacagcccaaattgaacatgtcctaaccacatctatccaggcctcccctaacaccaccccccttacggttcccatctcagatattggc

SEQ ID NO: 2900 - DNA, 120 bp, synthetic construct
  misc_feature 1..120: note = Artificially Synthesized Probe
  source 1..120: mol_type = other DNA
ccctagcaccatgccatggatagccctctccttcgtcttctgttcctccaaagtccattctccacactgaatctagtcttttttaaaaatatcgttttcatttttaatgttggaaatttt

SEQ ID NO: 2901 - DNA, 120 bp, synthetic construct
  misc_feature 1..120: note = Artificially Synthesized Probe
  source 1..120: mol_type = other DNA
gcaggaggatcctttgagtccaggaggttgaggctacagtgagctatgatggcgccactgcactccagcctgggtgacagagcaagaccccatctctaaaaataaataaataaaaatttt

SEQ ID NO: 2902 - DNA, 120 bp, synthetic construct
  misc_feature 1..120: note = Artificially Synthesized Probe
  source 1..120: mol_type = other DNA
tgaaacacttgcgcctcttcctcttgtgcctgccttgtacaaggagtccttcttatccttcagaactcactgtaaattacatgtttcctctatttcacgttcattccagttactctctcc

SEQ ID NO: 2903 - DNA, 120 bp, synthetic construct
  misc_feature 1..120: note = Artificially Synthesized Probe
  source 1..120: mol_type = other DNA
gaggagaaggagagaggaggggagagagagaactttttttgttgttccttaaggaaaattcaagaaataaaataggccaaaggacataatcatctcaatgtctcttaatgaattgcagga

SEQ ID NO: 2904 - DNA, 120 bp, synthetic construct
  misc_feature 1..120: note = Artificially Synthesized Probe
  source 1..120: mol_type = other DNA
ccaagatctgttctgtgaaatgcaaaagccagtcttgacaccctgagaatgctggcctttgtcagcagatgaagcagatattgtcgagctgggacaaaagtgcccttgtgatttgtggag

SEQ ID NO: 2905 - DNA, 120 bp, synthetic construct
  misc_feature 1..120: note = Artificially Synthesized Probe
  source 1..120: mol_type = other DNA
caaaaacaaaacaaaaagaaatgtgcttatgttccctggctcagtgttgcttattggggtggagttgggggtgggggtggtctttgttttttgggacttggctccccagcttattgcccc

SEQ ID NO: 2906 - DNA, 120 bp, synthetic construct
  misc_feature 1..120: note = Artificially Synthesized Probe
  source 1..120: mol_type = other DNA
agagcaagcaaaaacaggcagcaagtgatgactggaaaagcaccccataaacagtatgtagatgtagaaggagcagtggtcagtttctgcatgttggtctccgtgcacaagtggctgtgt

SEQ ID NO: 2907 - DNA, 120 bp, synthetic construct
  misc_feature 1..120: note = Artificially Synthesized Probe
  source 1..120: mol_type = other DNA
aaaaaaaaaaaaaaaaagctgtaacctcaaataggtggtttcttttaaccaccaatttgtccaagccacctaggtagaggagtggcgacagttggctctgaatctttggggtacagccag

SEQ ID NO: 2908 - DNA, 120 bp, synthetic construct
  misc_feature 1..120: note = Artificially Synthesized Probe
  source 1..120: mol_type = other DNA
aggagatcggcgagctgaaggcagtgatggagggcatcaagatggagcaccagctggagctgggtaacttgcaggccaagcatgacctggagaccgccatgcacgtgaaggagaaggagg

SEQ ID NO: 2909 - DNA, 120 bp, synthetic construct
  misc_feature 1..120: note = Artificially Synthesized Probe
  source 1..120: mol_type = other DNA
gagtgcccaagacaacaggaattaattcataggagggatggctagcaacggactcttgcctgtatacaaattgtactcagagattcttgagtttccagttcccccacatacatttttttt

SEQ ID NO: 2910 - DNA, 120 bp, synthetic construct
  misc_feature 1..120: note = Artificially Synthesized Probe
  source 1..120: mol_type = other DNA
agtgtgaggctgtgactcaagaaaatacacaaaccaaaaaaacccgagaatttagcatgtgggcagtaagttctcaggactaatgaatccagggggctttttttgtctaaaaggaaatct

SEQ ID NO: 2911 - DNA, 120 bp, synthetic construct
  misc_feature 1..120: note = Artificially Synthesized Probe
  source 1..120: mol_type = other DNA
acactggggcttagtctaaacgcatatgtccccatgttcagaggtttaggcctaagcacaactggacttttggtctcaggtagtaaatatgggaattttaaaaattattttagtggccag

SEQ ID NO: 2912 - DNA, 120 bp, synthetic construct
  misc_feature 1..120: note = Artificially Synthesized Probe
  source 1..120: mol_type = other DNA
gtcttgtctctgggagacagagaaacaaattcccaggacaaatttctgtaggcattgcagggaaggagccatctgtttaatataataaacattttcaacaaaggaagggtaggaggtatt

SEQ ID NO: 2913 - DNA, 120 bp, synthetic construct
  misc_feature 1..120: note = Artificially Synthesized Probe
  source 1..120: mol_type = other DNA
gtctaaacttcaaatggttcaaagggcatatggcaaactaactcttcactgttctctattcttccctccctgaaggcgcagtgttagcttctttatatcccctttccagaaatattttgt

SEQ ID NO: 2914 - DNA, 120 bp, synthetic construct
  misc_feature 1..120: note = Artificially Synthesized Probe
  source 1..120: mol_type = other DNA
tttagaagctctttatgtatgacattgcagacattttccccactttgtcatttgcctttttacttttttcttatggtggtgttggccatgcagatatttaaaaaatcaggccaggtatgg

SEQ ID NO: 2915 - DNA, 120 bp, synthetic construct
  misc_feature 1..120: note = Artificially Synthesized Probe
  source 1..120: mol_type = other DNA
ataacatacaatcagccattttaaagcaaacacttcaatggcatttagcgcagtcaacaatgtagtacacccagcacttctatctggtttccaaaacattctcatgggctggatttggtg

SEQ ID NO: 2916 - DNA, 120 bp, synthetic construct
  misc_feature 1..120: note = Artificially Synthesized Probe
  source 1..120: mol_type = other DNA
tacttgttaagtacctgttttcagtgctttggggtatatacctagaagagtagaatgctaggtcatatgattttttttttttttttttttttgagatggagtctcactctgtcacccagg

SEQ ID NO: 2917 - DNA, 120 bp, synthetic construct
  misc_feature 1..120: note = Artificially Synthesized Probe
  source 1..120: mol_type = other DNA
aaaatcgtgttggtatttttagtggtattacattccctttataaattaacttgcagaaggtggagatgtttctgggtacttggcatccattctgtcctttatggctgtgaggagcaccca

SEQ ID NO: 2918 - DNA, 120 bp, synthetic construct
  misc_feature 1..120: note = Artificially Synthesized Probe
  source 1..120: mol_type = other DNA
aggagcattgatgcttctcgtctctcctctctcccctaggcctgcaggacaagctgaacaagagggacaaagaggtgacagccttgacctcccagaccgagatgctcagggcccaagtaa

SEQ ID NO: 2919 - DNA, 120 bp, synthetic construct
  misc_feature 1..120: note = Artificially Synthesized Probe
  source 1..120: mol_type = other DNA
ctataatgcctccccgccagcttctgtccccagagccagctctgtgttctctgtgtcctgaaattctatccattctatcccaggttccctctttctggtcctgaagactttctggtttct

SEQ ID NO: 2920 - DNA, 120 bp, synthetic construct
  misc_feature 1..120: note = Artificially Synthesized Probe
  source 1..120: mol_type = other DNA
tagccaggcatggtggtgggcacctgtaatctcagctacttgggaggttgaggcaggagaattgctgcaacctgggaggcggaggttgcagtgagctgagaacatgccattgcactcctg

SEQ ID NO: 2921 - DNA, 120 bp, synthetic construct
  misc_feature 1..120: note = Artificially Synthesized Probe
  source 1..120: mol_type = other DNA
atagagctggtgggccaggtggccgatctcgagcgatcaccctgctctcctctaagctccgataaagtctccaaagcctctacactgttttccaagcagagcttatagaaaagagtaggg

SEQ ID NO: 2922 - DNA, 120 bp, synthetic construct
  misc_feature 1..120: note = Artificially Synthesized Probe
  source 1..120: mol_type = other DNA
tattgaggatccccaaagagcttttgtttgtttattctatatttaccatattagaattaagactgaaaaagtgtaagatacgaatccatcttaaaataagaagccaggccaggcgtggtg

SEQ ID NO: 2923 - DNA, 120 bp, synthetic construct
  misc_feature 1..120: note = Artificially Synthesized Probe
  source 1..120: mol_type = other DNA
aagggacccactgggatttcctcagaacacactttagcatccaatgagctagattcagtcgatagacatggtttgtgtggtccctctgagcctttaagaaattagactaacaattaaaaa

SEQ ID NO: 2924 - DNA, 120 bp, synthetic construct
  misc_feature 1..120: note = Artificially Synthesized Probe
  source 1..120: mol_type = other DNA
cagagtgagactccatctcaaaaaaaaaaaaaagaaaaggaaagaaaagaaaatagctgggcgtggagcacacgcctgtgggtcccagctactcaggaggctgcggtagtaggattactt

SEQ ID NO: 2925 - DNA, 120 bp, synthetic construct
  misc_feature 1..120: note = Artificially Synthesized Probe
  source 1..120: mol_type = other DNA
tgccgggcccagcatttgcatttcaacccaagttaaaggaatctctttgaagcacagacatccttttgtaaaagaagaaatgctacctcctttccttctatacagattaagagttgctct

SEQ ID NO: 2926 - DNA, 120 bp, synthetic construct
  misc_feature 1..120: note = Artificially Synthesized Probe
  source 1..120: mol_type = other DNA
gcacagacatccttttgtaaaagaagaaatgccatctcctttccttctatacagattaggagttgctctagctacatttgctacaaatctaacacctttctagaaactgtagccctgccc

SEQ ID NO: 2927 - DNA, 120 bp, synthetic construct
  misc_feature 1..120: note = Artificially Synthesized Probe
  source 1..120: mol_type = other DNA
agcctggcctcatccccgtctccctgctgtcaacagctgtcaacagcctccttccatccttcagttctcatcagttatgagattcctcccttctaggataccttctttttcttcttcttt

SEQ ID NO: 2928 - DNA, 120 bp, synthetic construct
  misc_feature 1..120: note = Artificially Synthesized Probe
  source 1..120: mol_type = other DNA
ccaaatgtggcctcagaaccattatcatcatagtactccaggtagatcctgtcagttgattaagaggtgacatgggagataaaacccatttgacatcaggtatttaaaatgtcttgctgg

SEQ ID NO: 2929 - DNA, 120 bp, synthetic construct
  misc_feature 1..120: note = Artificially Synthesized Probe
  source 1..120: mol_type = other DNA
ttccttgctcagggtcctgcagtggggcttcacacatcagtctcaggaaggagacaagaacttgaaagtctacagcaagcctgggattctgggtggctgagttttttttgtttttttttt

SEQ ID NO: 2930 - DNA, 120 bp, synthetic construct
  misc_feature 1..120: note = Artificially Synthesized Probe
  source 1..120: mol_type = other DNA
cggtcgagatttcttttctattatgaataggaacctgacttcactgagtctgcagagacgggttggggtaggcaggtgatgctggtagcatagcacaggaccatccccatcccttggcca

SEQ ID NO: 2931 - DNA, 120 bp, synthetic construct
  misc_feature 1..120: note = Artificially Synthesized Probe
  source 1..120: mol_type = other DNA
cttgtctcatcatctccctgcactgtgtccacgggagaacttgggaagccttggtgtgtgggtagaagcctcttgatttcaggatggaggttctgttgggaggtggtttggagggtcaga

SEQ ID NO: 2932 - DNA, 120 bp, synthetic construct
  misc_feature 1..120: note = Artificially Synthesized Probe
  source 1..120: mol_type = other DNA
gaacccagagacaaagtgaggctggaagactttcctgcctagagttgagacgcccaccaacacacacacgcacactcatgtactcttccactctcctgccacttccaggacaaagagaaa

SEQ ID NO: 2933 - DNA, 120 bp, synthetic construct
  misc_feature 1..120: note = Artificially Synthesized Probe
  source 1..120: mol_type = other DNA
ggcagacctctctggagaaaatccttgaaacgtcactaagaatacacacaaagatgcattctgcaagaagctttacagtagggtccctcagggagggtgctgttgcaggcaaacttgatt

SEQ ID NO: 2934 - DNA, 120 bp, synthetic construct
  misc_feature 1..120: note = Artificially Synthesized Probe
  source 1..120: mol_type = other DNA
atcgcgccactggactccagcctgggcgacagagcgagactccatctcaaaaaaaaaaaaaaccaaaaaaaaaaaaaaatacaaaattagctgggtagggtggcgcacacctgtaatccc

SEQ ID NO: 2935 - DNA, 120 bp, synthetic construct
  misc_feature 1..120: note = Artificially Synthesized Probe
  source 1..120: mol_type = other DNA
acaaacaaaaaacctgcttcttcccctcggctccgcttcccatcagcacctcccaccccacctgctgtctcacacagccacaaacacacagcagggagacacttcctgcctcagggcctt

SEQ ID NO: 2936 - DNA, 120 bp, synthetic construct
  misc_feature 1..120: note = Artificially Synthesized Probe
  source 1..120: mol_type = other DNA
ccaacaccaacacacacacacctctaagctgctggccgaagatgtcaccaaggccaaagacacagtattatgaaggtttggaaacccctctcctcacctcccaccgtgaccttgggcaaa

SEQ ID NO: 2937 - DNA, 120 bp, synthetic construct
  misc_feature 1..120: note = Artificially Synthesized Probe
  source 1..120: mol_type = other DNA
ctattaacagccgtctagaagcgatgctttagtggcctaacccagggtcaaatacagctctttctagcaaaatcaggcagctctgccccatcggtaggggcaccgattagtctactaaca

SEQ ID NO: 2938 - DNA, 120 bp, synthetic construct
  misc_feature 1..120: note = Artificially Synthesized Probe
  source 1..120: mol_type = other DNA
aagtatttactcagtgcttgtttgtgccaggcacttgggcattttctttgccaaaatgagaaaggattccaccgatgaataaagaaaggcatgcttcaactttaaggaatgacagtatat

SEQ ID NO: 2939 - DNA, 120 bp, synthetic construct
  misc_feature 1..120: note = Artificially Synthesized Probe
  source 1..120: mol_type = other DNA
tgatgtttccacaagccaaggaatgacagggactgccagaagttgaaagagtcaaggaataattctccccttaaacttttggagggagcagggccctaccacatcttgattttgacttct

SEQ ID NO: 2940 - DNA, 120 bp, synthetic construct
  misc_feature 1..120: note = Artificially Synthesized Probe
  source 1..120: mol_type = other DNA
tctcatttatggctgggtactcaggaccctgcacagagcctggctcatgtttatgagatgaatgaataagtgaatagctagtggatattttgtcttgaaagtattaaacgaagacatgtt

SEQ ID NO: 2941 - DNA, 120 bp, synthetic construct
  misc_feature 1..120: note = Artificially Synthesized Probe
  source 1..120: mol_type = other DNA
tatatgtaataggggtgtggaggaggcaagggagctgaattgggggcagataggggaacagtttggagatttatacaatctttgtgaatatcttcctttttttcttcgagttaggttaga

SEQ ID NO: 2942 - DNA, 120 bp, synthetic construct
  misc_feature 1..120: note = Artificially Synthesized Probe
  source 1..120: mol_type = other DNA
gctacccacagaggctgtgaaggtcatagtcacgctgccaatcttcagcaggaagacagccttggaatccacaccatggaaaacatggaaattcacaaagctgcatgcaaagaccacact

SEQ ID NO: 2943 - DNA, 120 bp, synthetic construct
  misc_feature 1..120: note = Artificially Synthesized Probe
  source 1..120: mol_type = other DNA
gcaacaagcagaagtgacttgtgagatttttggccttccattttccaaaagactaatcctaagacttccttttgaagcaagggaaatcccaaaaggtcaaaaccaagaggaaatcaaaac

SEQ ID NO: 2944 - DNA, 120 bp, synthetic construct
  misc_feature 1..120: note = Artificially Synthesized Probe
  source 1..120: mol_type = other DNA
ggagcgattcactttctaaacaggttgtataggaataccacatataaaggcccgtgaaatttgagttcacaatgcaaaatgcataaggaaacatgagcaagagtcagcagaaacgtcaga

SEQ ID NO: 2945 - DNA, 120 bp, synthetic construct
  misc_feature 1..120: note = Artificially Synthesized Probe
  source 1..120: mol_type = other DNA
atgaaggattgagtaaaaatgtttatatctcagaggagtgttagagaggataaacagagaaaactggtggtgggcaatagtcaaagaggtagtagtaaagaattatccatccagcctggg

SEQ ID NO: 2946 - DNA, 120 bp, synthetic construct
  misc_feature 1..120: note = Artificially Synthesized Probe
  source 1..120: mol_type = other DNA
tcactaacagactttcactgaaggaacatctaaagaatgtgcattttagaaggaaattcaacccaaagggaagaaaagaacggcaagaaagaatagtgagcaagtaagttgacaaatatg

SEQ ID NO: 2947 - DNA, 120 bp, synthetic construct
  misc_feature 1..120: note = Artificially Synthesized Probe
  source 1..120: mol_type = other DNA
gtttcaacatagcagtcagggtgatcctttaaaaatataggatcttgtcatttctctgtcccaaaccctgcatagctccctagtccactatgtaaaagccaaagtccttagtgttatggt

SEQ ID NO: 2948 - DNA, 120 bp, synthetic construct
  misc_feature 1..120: note = Artificially Synthesized Probe
  source 1..120: mol_type = other DNA
atataaattaatataaaatgatctgttgtataaaattgtattctgaccacataaaatttatttagaaattaataattaaggctgggcgtggtggcttacacctgtaatcccagcactttg

SEQ ID NO: 2949 - DNA, 120 bp, synthetic construct
  misc_feature 1..120: note = Artificially Synthesized Probe
  source 1..120: mol_type = other DNA
cctcaggtatggatctttaaaaacacacttcgggatcccttcgtagttcataagcgtgatgactggttttcacgctcacgtgtgagatgttcctcaaacctatgatgacattgtcacgtt

SEQ ID NO: 2950 - DNA, 120 bp, synthetic construct
  misc_feature 1..120: note = Artificially Synthesized Probe
  source 1..120: mol_type = other DNA
aaggagagcaaccacaatgaagaaaaatacagggcatgagagagaaatggtcaataatcctttgaaaagatgcgtaacctcaatagtagacagagaaatgtgtttcactcccatcagatc

SEQ ID NO: 2951 - DNA, 120 bp, synthetic construct
  misc_feature 1..120: note = Artificially Synthesized Probe
  source 1..120: mol_type = other DNA
tccttaaggagagtttagaggatttatgagtagataaaagtgaagagaacttgcaggcaggaatataacattttagagaatctggagggattttccccagactggagttgaaaaccgagc

SEQ ID NO: 2952 - DNA, 120 bp, synthetic construct
  misc_feature 1..120: note = Artificially Synthesized Probe
  source 1..120: mol_type = other DNA
attagagttatgcttattgctatttcacagataataaaaggtcggcaatgttaaagcattgggctgaggccacacggctggtcgaggtcagaactaaggctttattatttctggaccttt

SEQ ID NO: 2953 - DNA, 120 bp, synthetic construct
  misc_feature 1..120: note = Artificially Synthesized Probe
  source 1..120: mol_type = other DNA
gcctggtgcattataagagctcaataaatgtcagttcttattacaacccaacgactttaaaatttttaagaggataggtgcttcttgcaatctgcataacccctgtttataaaacaggta

SEQ ID NO: 2954 - DNA, 120 bp, synthetic construct
  misc_feature 1..120: note = Artificially Synthesized Probe
  source 1..120: mol_type = other DNA
ttgaaaaacctctcttctaatccaacgccatcattttgccatccagaaaacagtccaagaatggggatataatttgcctaaggtcacccaacatatgagcagcagagctgcaattatcca

SEQ ID NO: 2955 - DNA, 120 bp, synthetic construct
  misc_feature 1..120: note = Artificially Synthesized Probe
  source 1..120: mol_type = other DNA
agccccccgaagttaaagttaaaaaaaaaaaattaaccgtctgtcccaagaaacattaaccatatctaccctccacatattttgtaggctccttaaactcctgcttctttctcccctgca

SEQ ID NO: 2956 - DNA, 120 bp, synthetic construct
  misc_feature 1..120: note = Artificially Synthesized Probe
  source 1..120: mol_type = other DNA
cagtgtgccagcagagttctgaatattaagaatcaccgatgcatgcaaaaacattttgtgacctgatgctgtacagatgtaagagtaaaagagaagcgggagtctttctgaacctattct

SEQ ID NO: 2957 - DNA, 120 bp, synthetic construct
  misc_feature 1..120: note = Artificially Synthesized Probe
  source 1..120: mol_type = other DNA
ttaccaaattcatgtcactgtacctggtttacagtaggtatctaatcaaaggcaggagatgcttaatagagttagtttatagtgttcttacaggattctgtgccaggcatgggggctctg

SEQ ID NO: 2958 - DNA, 120 bp, synthetic construct
  misc_feature 1..120: note = Artificially Synthesized Probe
  source 1..120: mol_type = other DNA
ccactgctcctggctggcctccctctgttctttgtagcccttgattgcagttgtaataaagttttctgggatttggggctgtagactgtggggttttttgaccaaatcttttgtgtgtgt

SEQ ID NO: 2959 - DNA, 120 bp, synthetic construct
  misc_feature 1..120: note = Artificially Synthesized Probe
  source 1..120: mol_type = other DNA
aaaaaaaagcccaaatcttacctctttttataactactttgatagcaaaacccacctcctccaagaagcattctctggtctccctttattgagtcttactgcacagaccactgtctacct

SEQ ID NO: 2960 - DNA, 120 bp, synthetic construct
  misc_feature 1..120: note = Artificially Synthesized Probe
  source 1..120: mol_type = other DNA
aggaaagaatgtgtaatgtataggttaagagcaaaggattgttattaaggtcttctatctatagtccctttctctaatgtctacgggttatcaaagaaactcagtcttccctgtggggcc

SEQ ID NO: 2961 - DNA, 120 bp, synthetic construct
  misc_feature 1..120: note = Artificially Synthesized Probe
  source 1..120: mol_type = other DNA
atctatccagaagccacctactctctcttgtcccagtattgccatttgtaaagaagattgggggataacgatgagtgcttggcactgtgctagcactttctacacattatctcatttaaa

SEQ ID NO: 2962 - DNA, 120 bp, synthetic construct
  misc_feature 1..120: note = Artificially Synthesized Probe
  source 1..120: mol_type = other DNA
tgtccatttatttgaaaactaggatcccatccagttgctttgcattctcccctcccatctccaaacaaatacttggtaaattaactgactaattagaaatctgcaacactgccgggcatg

SEQ ID NO: 2963 - DNA, 120 bp, synthetic construct
  misc_feature 1..120: note = Artificially Synthesized Probe
  source 1..120: mol_type = other DNA
ggtgaggggccctgataccacgcacaatcttttgtctttatttccaggggcaaatcccatctattttctctctctttttgacttttatttttctgaccattttttctcagtaatgccttc

SEQ ID NO: 2964 - DNA, 120 bp, synthetic construct
  misc_feature 1..120: note = Artificially Synthesized Probe
  source 1..120: mol_type = other DNA
tgccaggagtggttttttgatgagatctcaaaaggtccttcaaacatggcagttatgcaattaatcacatggggcagaaaacaggggtgttgtcagattgcaaaagagctggcgagagaa

SEQ ID NO: 2965 - DNA, 120 bp, synthetic construct
  misc_feature 1..120: note = Artificially Synthesized Probe
  source 1..120: mol_type = other DNA
tgttgcaatatgttgttgtggtttaactatgtgaagaaaataaatttgccactctctcctgagtgcttcctttgtggcaggcactgtgaaaggccttttacaagcactgtgtccttttct

SEQ ID NO: 2966 - DNA, 120 bp, synthetic construct
  misc_feature 1..120: note = Artificially Synthesized Probe
  source 1..120: mol_type = other DNA
agatagactgtctcattttcacgatcttatctatgaggaaccagaggctcagctagactggatttgccgaggtcacaaagtttgtaaatggcagagtcagaattcagactcatatatctg

SEQ ID NO: 2967 - DNA, 120 bp, synthetic construct
  misc_feature 1..120: note = Artificially Synthesized Probe
  source 1..120: mol_type = other DNA
aaagaaaagaaagaaagagggaaggaaggaaagagagagagagaaagaaagaaagagaaagaaagaaagagaaagaaagaaagagaaagaaagagaaagaaaggaaagagaaagaaagga

SEQ ID NO: 2968 - DNA, 120 bp, synthetic construct
  misc_feature 1..120: note = Artificially Synthesized Probe
  source 1..120: mol_type = other DNA
actagaatggtcgctccaagggagttaaggcttattatttgttttgttcactcccgtatcttaagtgcacctgcctcacccatggtcactgctcagtaactctttctttttttaattgta

SEQ ID NO: 2969 - DNA, 120 bp, synthetic construct
  misc_feature 1..120: note = Artificially Synthesized Probe
  source 1..120: mol_type = other DNA
ttgttcaacctggaccgggtgttcaaaccagaccgggaaggtgttactggatctgtccgacatgaatttggtcagattctgagccagaactaccccaagcctcttgagctcaatcttcac

SEQ ID NO: 2970 - DNA, 120 bp, synthetic construct
  misc_feature 1..120: note = Artificially Synthesized Probe
  source 1..120: mol_type = other DNA
tcgatctcatcactgtacacgtactttaataggatcagaaaggctgcgggctccacgtctggaatgtgaatttcagatttgacttccgccaggtcccagtagaacatggcatagaagacg

SEQ ID NO: 2971 - DNA, 120 bp, synthetic construct
  misc_feature 1..120: note = Artificially Synthesized Probe
  source 1..120: mol_type = other DNA
agggtgaaaatgggattgtggggagcttcactttaacaatagctagttgtgtaaaatgcaattaatcctcacagtaagtcaggaagggtggtcctattatcatcatctctgttttgcaga

SEQ ID NO: 2972 - DNA, 120 bp, synthetic construct
  misc_feature 1..120: note = Artificially Synthesized Probe
  source 1..120: mol_type = other DNA
aaaattatttgatgctctgtgatattacagcataaatgactgataagcatgtgtggatctctttcaccctgagggtagcctgttactgtgaaatctgtcagccatcgggaagtatgcatt

SEQ ID NO: 2973 - DNA, 120 bp, synthetic construct
  misc_feature 1..120: note = Artificially Synthesized Probe
  source 1..120: mol_type = other DNA
agctgatcctcctgtaagttccttctacctctctctaatagaattaattaaggtgcatttgtgcatctgttggcttttggtccctgggaccataacaaagaacacatgttgcaatctctg

SEQ ID NO: 2974 - DNA, 120 bp, synthetic construct
  misc_feature 1..120: note = Artificially Synthesized Probe
  source 1..120: mol_type = other DNA
aatatgtctcaggcccctatttgcatgcctctctgtatatgccttgcaggtgtagatctcttttatacccagtacaggaaaagacagaatacatctttctctcttcttaccaacctttga

SEQ ID NO: 2975 - DNA, 120 bp, synthetic construct
  misc_feature 1..120: note = Artificially Synthesized Probe
  source 1..120: mol_type = other DNA
tcagattaagagcaaaaacgatgtaaagccatatatcagccaaagctgtagctgaatgattaattgcctggttgtgagtcatgagctagtttgttctatcaccactaactactgcttttt

SEQ ID NO: 2976 - DNA, 120 bp, synthetic construct
  misc_feature 1..120: note = Artificially Synthesized Probe
  source 1..120: mol_type = other DNA
actaatttttaaaaaaatggaaacaggcatcaagaccttctaatgatgtgaaccttctggaacatctccctccctagtgggaaaagctggtagaaagtagtgggaagacagacttgggtt

SEQ ID NO: 2977 - DNA, 120 bp, synthetic construct
  misc_feature 1..120: note = Artificially Synthesized Probe
  source 1..120: mol_type = other DNA
ttgattcccaccacaatatggcttggttctggatccagattgacctggacttgagtctcagctttgccattaccaccagttatgggactgtggacaagtctctctccttctttttttttt

SEQ ID NO: 2978 - DNA, 120 bp, synthetic construct
  misc_feature 1..120: note = Artificially Synthesized Probe
  source 1..120: mol_type = other DNA
aaactgaggttcagaaaggtgatgtaacttgccccaggttgcctgagtaattgatgagggagacttgggtttccatgtgattccatgtgattgatagcacaagctctgaacccacagcgc

SEQ ID NO: 2979 - DNA, 120 bp, synthetic construct
  misc_feature 1..120: note = Artificially Synthesized Probe
  source 1..120: mol_type = other DNA
gagattaaatttcctcctagcccagtaggatgaggctcagggtcctattgaatgtgacttcaactgaataaagaaaagatcaatttatgcacacccgagggtgtgcagtaagagtgactg

SEQ ID NO: 2980 - DNA, 120 bp, synthetic construct
  misc_feature 1..120: note = Artificially Synthesized Probe
  source 1..120: mol_type = other DNA
tgtgaggattaaataaatccaaccactaaaggctcttagggcagcgcctggcacacagtaaggccatctctgtgtgtgtgattcttgtctctgtaatgaaatgaaagccaaagtcctgat

SEQ ID NO: 2981 - DNA, 120 bp, synthetic construct
  misc_feature 1..120: note = Artificially Synthesized Probe
  source 1..120: mol_type = other DNA
gcaggaggcgccggagccggacggagcggggcggggtggccggagtcccgcccattcattctccccgcggggtccgggccgggaggggtgcgcggtgcgagcggccggagtccccgcgcg

SEQ ID NO: 2982 - DNA, 120 bp, synthetic construct
  misc_feature 1..120: note = Artificially Synthesized Probe
  source 1..120: mol_type = other DNA
agtagcatagacctttcaaaaaagtagctagcttataagtagatgtattgaaaacacctgcttgttgagtcgtagacaattcctcatttactgtgtgaactctagggggtgaaacacggg

SEQ ID NO: 2983 - DNA, 120 bp, synthetic construct
  misc_feature 1..120: note = Artificially Synthesized Probe
  source 1..120: mol_type = other DNA
catttttttctggccaagaatgatgcatctttccatgtctctgtgctacacttgatccctagaaaagtcttttgcttttttgtgtcaggattggtcgctgtgatgctgaggttcttgaat

SEQ ID NO: 2984 - DNA, 120 bp, synthetic construct
  misc_feature 1..120: note = Artificially Synthesized Probe
  source 1..120: mol_type = other DNA
acatgcatacacgggcatgcacaattgtgcacacaggtgcacattcccagtcacgcgaagtgcaggggcacaactgtgtacatgcacacacacacaaaagtgcacatgtgtgtgcacaca

SEQ ID NO: 2985 - DNA, 120 bp, synthetic construct
  misc_feature 1..120: note = Artificially Synthesized Probe
  source 1..120: mol_type = other DNA
tcctgggaaactaaaatgcatgttgggcgcccttatacgatgatgatatttggtacattttgaaatactgtggcccatgaagatcctgaaagcagtttggggcactgtggggtgttctgt

SEQ ID NO: 2986 - DNA, 120 bp, synthetic construct
  misc_feature 1..120: note = Artificially Synthesized Probe
  source 1..120: mol_type = other DNA
gttcgtttgctcatttatttttggtctgaagtccatgcttttgtatttccccaccgttccgttgagcagcttcaacatttgccgcagttaggcctctctggaatctgtgcttagagattg

SEQ ID NO: 2987 - DNA, 120 bp, synthetic construct
  misc_feature 1..120: note = Artificially Synthesized Probe
  source 1..120: mol_type = other DNA
atcctgtcttttaaaaaccttgctaatttggttgatggaaaatatcatctcagagttctgttttgtgagtccccattgccatgcgggcaaacattttcatccactaaggggccgtcgtgt

SEQ ID NO: 2988 - DNA, 120 bp, synthetic construct
  misc_feature 1..120: note = Artificially Synthesized Probe
  source 1..120: mol_type = other DNA
agctgttagcgtcttgactctgcctttgtggatatggaattagagatgcttctcacagtagtggctaaactgtcaggaagcctggccgtcatctatggtcctctttgccctcatgggtgg

SEQ ID NO: 2989 - DNA, 120 bp, synthetic construct
  misc_feature 1..120: note = Artificially Synthesized Probe
  source 1..120: mol_type = other DNA
tctgtgctttgtaaagtttagcctcatgtgctgcctctgaggaggagttcagagaacatccgcttcctttctgttatcatctcagccttccagccagaaagaaggaagcgtccatggatc

SEQ ID NO: 2990 - DNA, 120 bp, synthetic construct
  misc_feature 1..120: note = Artificially Synthesized Probe
  source 1..120: mol_type = other DNA
ttgttagtcacacgtttctattgtgaaaatgactgagaatgttgtgggaggtttggaaaccaggaagaccacctgtcccaattcagcctttcctgtcatcacaggggacgtctggcattt

SEQ ID NO: 2991 - DNA, 120 bp, synthetic construct
  misc_feature 1..120: note = Artificially Synthesized Probe
  source 1..120: mol_type = other DNA
aatacgagcacttcctgcacacccagggccaccccaggctgcaggctttgtggagacttaaagatgagtcctcggccttcggaatctcctgactcaatggaacctctggtcttcaggtcc

SEQ ID NO: 2992 - DNA, 120 bp, synthetic construct
  misc_feature 1..120: note = Artificially Synthesized Probe
  source 1..120: mol_type = other DNA
tctgcatatcctcgttctgcatttcctcgtctgaattgcaagctggtcttgctctcgagagagtgacagtgctttcagtgtcaggtatgttttcttgttccgtgagttttcagatatttg

SEQ ID NO: 2993 - DNA, 120 bp, synthetic construct
  misc_feature 1..120: note = Artificially Synthesized Probe
  source 1..120: mol_type = other DNA
ttgtcagggccttgtgggattcttagcctcttaatggatacgaatggcaccggcttgccttacctccttctggcgcttgcttctctgtgcttgtgggctgttccactgtagtctctggat

SEQ ID NO: 2994 - DNA, 120 bp, synthetic construct
  misc_feature 1..120: note = Artificially Synthesized Probe
  source 1..120: mol_type = other DNA
tcagtgctgggctcattcttcccacgtcaaggcagccgtcccttcttggtggtttcccttgctttgtggcaggagctggtggcctgggaacagctgccgggtgtttagatgaattcccgg

SEQ ID NO: 2995 - DNA, 120 bp, synthetic construct
  misc_feature 1..120: note = Artificially Synthesized Probe
  source 1..120: mol_type = other DNA
ggaggacctggggccacttggttgcattgtgaaatgttcatgatttttaaacagttttattttttaaaattactgaagtccaacaggagcattattcagcatttgaggccccagccagta

SEQ ID NO: 2996 - DNA, 120 bp, synthetic construct
  misc_feature 1..120: note = Artificially Synthesized Probe
  source 1..120: mol_type = other DNA
tccttcatccctgctgtcagctcatgacaccggacaatttgggtcccaattatatctagagaaccaggggaaaggtcacgttgtctagacattaatccagcactgtggcattttttcctg

SEQ ID NO: 2997 - DNA, 120 bp, synthetic construct
  misc_feature 1..120: note = Artificially Synthesized Probe
  source 1..120: mol_type = other DNA
tcctggcttgtcatgctgttaattagattggaaaacctcggccttccatttcttaaattgctcactcctgcagtcctcttctcttgcctgcaggcctggaaggtgtggagcgggtcaggt

SEQ ID NO: 2998 - DNA, 120 bp, synthetic construct
  misc_feature 1..120: note = Artificially Synthesized Probe
  source 1..120: mol_type = other DNA
acacacatgcaggcacacacaggctcactgtgaggtttaatctcagcaaagtctgagcacctggacttggctcagggaccctggcacacccgcttgctctctgtctgtagaggggcagga

SEQ ID NO: 2999 - DNA, 120 bp, synthetic construct
  misc_feature 1..120: note = Artificially Synthesized Probe
  source 1..120: mol_type = other DNA
tggccattgagtgactccagttaatgctgaattaggtacctcaggcttgagtcaaatattaacagaggaggccggccagagctccccagtgtttggaggatagcttggttttctccctga

SEQ ID NO: 3000 - DNA, 120 bp, synthetic construct
  misc_feature 1..120: note = Artificially Synthesized Probe
  source 1..120: mol_type = other DNA
cctgcgtggtcacctcccacagtgccaaggcgctcccccaaggcccctgcggcccacctgaccagtggagaactcgcgagcactcggccagtggtgcctccaatttgcagcctccaatcc

SEQ ID NO: 3001 - DNA, 120 bp, synthetic construct
  misc_feature 1..120: note = Artificially Synthesized Probe
  source 1..120: mol_type = other DNA
aggggacactgttttccaaagcaaagccagagcgccaagggctctcgggattcacgagatccacatttatcccaagttagaacagcacatctgtgcgtgcaaacttcattctgacttcgg

SEQ ID NO: 3002 - DNA, 120 bp, synthetic construct
  misc_feature 1..120: note = Artificially Synthesized Probe
  source 1..120: mol_type = other DNA
tctgcacgtgctgctgattgcccacttcgtccagcaggtttgggagcttgtggctgcatcctcctgcagacacttgcccattctggggcctcctctctgtcttttctcctctgttgaggg

SEQ ID NO: 3003 - DNA, 120 bp, synthetic construct
  misc_feature 1..120: note = Artificially Synthesized Probe
  source 1..120: mol_type = other DNA
ttctctctcgaccttttaaatcacagtgtcacctccccctgctgtcctgccagtggcccctggaggcttctccccacccctttcttctggggcaattcttaaggctggcattgaatcagg

SEQ ID NO: 3004 - DNA, 120 bp, synthetic construct
  misc_feature 1..120: note = Artificially Synthesized Probe
  source 1..120: mol_type = other DNA
cccacaattcatcccttttcatgggtgtgtaatagtccaccatagattctctacgttttaaagcatgttttatgtgcctgaaatgtctctgcactcgagactatagcttgctttctttct

SEQ ID NO: 3005 - DNA, 120 bp, synthetic construct
  misc_feature 1..120: note = Artificially Synthesized Probe
  source 1..120: mol_type = other DNA
ctgcatagaacatggcccaggaaggctccacttcctgtctcctcttctcccctctccagtctcatgatggggctggaggcatcttctagttttgagttctgagctaatgaacatgctcat

SEQ ID NO: 3006 - DNA, 120 bp, synthetic construct
  misc_feature 1..120: note = Artificially Synthesized Probe
  source 1..120: mol_type = other DNA
aactctgtggtggtcagagctaaggttctgaataggtcgaagcacctccccggtgcctctcaccctgaatgctctgggaggacacagccttttcataggctacgactgacatggcaggag

SEQ ID NO: 3007 - DNA, 120 bp, synthetic construct
  misc_feature 1..120: note = Artificially Synthesized Probe
  source 1..120: mol_type = other DNA
ggcggcccaggggagggggcaggcaggacccggcggcccaggggaggggggcaggcaggactcggcggcccaggggaggggggcaggcaggaccaggcggccctgggggtcaggggtgga

SEQ ID NO: 3008 - DNA, 120 bp, synthetic construct
  misc_feature 1..120: note = Artificially Synthesized Probe
  source 1..120: mol_type = other DNA
gggtctcagtgagagtctgtggcaggcagccttgcagatgccgctgagggaccccccacttcatgttgtgggtgatgtggtccattgattgcctccaggtttaaatcaggtggatattta

SEQ ID NO: 3009 - DNA, 120 bp, synthetic construct
  misc_feature 1..120: note = Artificially Synthesized Probe
  source 1..120: mol_type = other DNA
cttacggctcttaaaagccctttatttttataggtaacatgctttaaacaaactttaaaatttgaggttgctagtacccattgtgtgtggattggaccagctccatgagagtggagcccg

SEQ ID NO: 3010 - DNA, 120 bp, synthetic construct
  misc_feature 1..120: note = Artificially Synthesized Probe
  source 1..120: mol_type = other DNA
acagcctttaaaaaatcatggagaagaacccagtgcatcttctcctcagagggtggcagaggctgaatgaatttgcatctggacgttccacttccacctccttcctaaccaaagactgta

SEQ ID NO: 3011 - DNA, 120 bp, synthetic construct
  misc_feature 1..120: note = Artificially Synthesized Probe
  source 1..120: mol_type = other DNA
atgggtgggttggttaggtctgggttcagaagccccttcagtgtaggtgctcagctgggccatggagtcctggccttccctctgagcacagacccaccaggaatgggcagcccgttctta

SEQ ID NO: 3012 - DNA, 120 bp, synthetic construct
  misc_feature 1..120: note = Artificially Synthesized Probe
  source 1..120: mol_type = other DNA
atctgtgttcattttcctgacttccttcatttcttgtgattttaaagctggggagtggagattctacttcctgctctatctggaaggagagggctttcggttcggcaaaaaagtcgtctt

SEQ ID NO: 3013 - DNA, 120 bp, synthetic construct
  misc_feature 1..120: note = Artificially Synthesized Probe
  source 1..120: mol_type = other DNA
ctcactcacagacagacacacaggcactctcctgcacacactcacactcacacacaggcactctcctgcacacacacactcagacacacaggcactctcctgcacacacacacacacaga

SEQ ID NO: 3014 - DNA, 120 bp, synthetic construct
  misc_feature 1..120: note = Artificially Synthesized Probe
  source 1..120: mol_type = other DNA
gcatctaatccttgcaggcagagtggcttattagacacgttagcaggtctgtctgtgcagccggaaggaagaaagtgaagttagatgcccacatgtgacttggcatccagaggcacattc

SEQ ID NO: 3015 - DNA, 120 bp, synthetic construct
  misc_feature 1..120: note = Artificially Synthesized Probe
  source 1..120: mol_type = other DNA
taaaaactacacttaacgttttttaattcgagaaaacctatctgttgctgttatgtacagtgctgtaatcagcaaacgtgttccttggtcatttccgcaacagaacacagtgggaggggc

SEQ ID NO: 3016 - DNA, 120 bp, synthetic construct
  misc_feature 1..120: note = Artificially Synthesized Probe
  source 1..120: mol_type = other DNA
cctggctccaggtcctgggcctccgtgccatgttccccgcaagcagtcggggcctgctggggtttgagccacgttccccggaagcagtcggggcctgctggggtttgagccacgttcccc

SEQ ID NO: 3017 - DNA, 120 bp, synthetic construct
  misc_feature 1..120: note = Artificially Synthesized Probe
  source 1..120: mol_type = other DNA
attttggttctgtactgggagagggggaagcaatggggcaagacgctgcccctactgtccccagaagatgagggacagcacagatgcccaggtagagttttcctgtgttaaatcataaaa

SEQ ID NO: 3018 - DNA, 120 bp, synthetic construct
  misc_feature 1..120: note = Artificially Synthesized Probe
  source 1..120: mol_type = other DNA
cttgctttttctcctttaaatcccacctgtgagttttatttttgtaactgcagagcatgatgaaaaccgtgaagccacagaggcacacgtcgtgtctgtggggagggcccctcactctct

SEQ ID NO: 3019 - DNA, 120 bp, synthetic construct
  misc_feature 1..120: note = Artificially Synthesized Probe
  source 1..120: mol_type = other DNA
tgaaaacacaaatcaagtgccaatttcctggtgaagagtctttatgagagcaatgcggccccgtgcccctttacgcggctctgctggtggagaggaatagctgagctgcagcactaagga

SEQ ID NO: 3020 - DNA, 120 bp, synthetic construct
  misc_feature 1..120: note = Artificially Synthesized Probe
  source 1..120: mol_type = other DNA
gtgctcctcgaacatgctggtactaggtttgaaaaccaacattagcagcaaagatgactccgtgtccataccctagtttttaaaagttgatatagcccctctaaaaatgagtttgaaagc

SEQ ID NO: 3021 - DNA, 120 bp, synthetic construct
  misc_feature 1..120: note = Artificially Synthesized Probe
  source 1..120: mol_type = other DNA
gaacacttgtgtacaagtttcagtgtggacgtgtgtcttcgtttctctcgggtatatacctaaggtggaatcactgggactatggtaactgtgtttactcatttgagcagccgccagcct

SEQ ID NO: 3022 - DNA, 120 bp, synthetic construct
  misc_feature 1..120: note = Artificially Synthesized Probe
  source 1..120: mol_type = other DNA
tgtccttgcgccactcccacactgtcctgttaccatcgcattgtaagtcttaaaactgggaatgtaagtcctttgacttttttctaatccaatactatgaacaaaatagatggcagatga

SEQ ID NO: 3023 - DNA, 120 bp, synthetic construct
  misc_feature 1..120: note = Artificially Synthesized Probe
  source 1..120: mol_type = other DNA
ttatggattggaagacagaatactccctaaatcaactagagtccacacaactcctgccagaatccccactggctatagaaattgtcaaagtgaccccaatacttaaattgaatttcaagg

SEQ ID NO: 3024 - DNA, 120 bp, synthetic construct
  misc_feature 1..120: note = Artificially Synthesized Probe
  source 1..120: mol_type = other DNA
tggcatagggagtttgccagaagacatcaggaagaaacctctattttctctacaaacatcctttgagaacatttcaaacctgcattgacgttgatacgatgatcagaaaacgctcataca

SEQ ID NO: 3025 - DNA, 120 bp, synthetic construct
  misc_feature 1..120: note = Artificially Synthesized Probe
  source 1..120: mol_type = other DNA
ttggcattaatttaggagccaagaaggctcccaccactcgtgatcacccagtggaggattggggttgaagacctcaggctccccacctcatagtccccaggctctgccgagcggtcagag

SEQ ID NO: 3026 - DNA, 120 bp, synthetic construct
  misc_feature 1..120: note = Artificially Synthesized Probe
  source 1..120: mol_type = other DNA
ctttgccccctgatgaaccagtttcccctgttcacgtgtggatgtttgtacctttttaaaaaaagaaaataaaagaccacactatttaggaatttaaaccagacaggccaacaagacagg

SEQ ID NO: 3027 - DNA, 120 bp, synthetic construct
  misc_feature 1..120: note = Artificially Synthesized Probe
  source 1..120: mol_type = other DNA
ggtaccacagcactgtagcctagcaacagaggagacccattttctcatcagggatagagcagggagtcaacccaaggtcaaactccacacgcactgggacaggctgtgatgatgtgcaac

SEQ ID NO: 3028 - DNA, 120 bp, synthetic construct
  misc_feature 1..120: note = Artificially Synthesized Probe
  source 1..120: mol_type = other DNA
tatgtgagcttgtgtatgcatgtattcatgtgtgacgtgtgtgtatatatgtgagcttgtgtatgcatgtgagtactcacgtgtgacatgtgagcatatatgtacgtgtgtgtttctgta

SEQ ID NO: 3029 - DNA, 120 bp, synthetic construct
  misc_feature 1..120: note = Artificially Synthesized Probe
  source 1..120: mol_type = other DNA
gtgacatgtaagcatgtatgtacatgtgtgagcttgtgtatgcatgtgagcattcatgtatgacatgtaagcattatgtatgtgtgtgggcttgtgtatgcgagtattcacatgtgacat

SEQ ID NO: 3030 - DNA, 120 bp, synthetic construct
  misc_feature 1..120: note = Artificially Synthesized Probe
  source 1..120: mol_type = other DNA
cataaaatcacagcagcagcagtcagttttcaagcaaagagacttctctgggcatctctgagacgagtttgagcagtgtggggattcgttttgggagcacggcctcactgacatgcagat

SEQ ID NO: 3031 - DNA, 120 bp, synthetic construct
  misc_feature 1..120: note = Artificially Synthesized Probe
  source 1..120: mol_type = other DNA
gtgggaaagaagttataaatccttgggtgctggaacccccgggtgctgggcaccttgattccaaggctggtgccttctttccttctgcaagagtggggggtggaagacagccggccagag

SEQ ID NO: 3032 - DNA, 120 bp, synthetic construct
  misc_feature 1..120: note = Artificially Synthesized Probe
  source 1..120: mol_type = other DNA
cttctcctctgggctcccgggcgcactgtctcaggtcgcagtcaccactttaaccagggacagcggtgcttgggtctcccacgtggctaactctgtggggccgggtcttgctaataactc

SEQ ID NO: 3033 - DNA, 120 bp, synthetic construct
  misc_feature 1..120: note = Artificially Synthesized Probe
  source 1..120: mol_type = other DNA
ggtgctgccgcgtgggcagtgcagagaccctaccagcgtggggaccagggaggtctgcagggcccgtcctgagagggagcctttcatgtccccctccccatcctgaagcacacagcctcc

SEQ ID NO: 3034 - DNA, 120 bp, synthetic construct
  misc_feature 1..120: note = Artificially Synthesized Probe
  source 1..120: mol_type = other DNA
tctcgtagggctggagctctctgaggcaggggccgtgcccacggctgttggcatctcatagggctggagctctctgaggcaggggctgtgcccgcgaatgttggcatctcagggcttaga

SEQ ID NO: 3035 - DNA, 120 bp, synthetic construct
  misc_feature 1..120: note = Artificially Synthesized Probe
  source 1..120: mol_type = other DNA
cagacttcgaggccccgaaagtgggggtgctgggctgtgatccgggcaccagaacagagccctcgaggcccacagaggtccctggctgcatctccagggatcagggagtatgtgcccctg

SEQ ID NO: 3036 - DNA, 120 bp, synthetic construct
  misc_feature 1..120: note = Artificially Synthesized Probe
  source 1..120: mol_type = other DNA
cagccactggcacacaggtgtccttatatggtgcttacctcttgctcctttagtcaaatgcagaatttgagaaaatgtcccttctccttaaaatgctttgatttgtttgatgtttccatg

SEQ ID NO: 3037 - DNA, 120 bp, synthetic construct
  misc_feature 1..120: note = Artificially Synthesized Probe
  source 1..120: mol_type = other DNA
tgagaaaacttaagatctactcaagtttgaagtgccatatgcgatacagtattctagctgtaatcaccatgtgtacattagacctctagaacttacttttcctgcataactgaaactttg

SEQ ID NO: 3038 - DNA, 120 bp, synthetic construct
  misc_feature 1..120: note = Artificially Synthesized Probe
  source 1..120: mol_type = other DNA
tctgtttgcagcttccacggcatgcatgcttccttgtctcttgatggtggccacaagccccttaggctcttttcacctttctttcatcttttgtctttgaaaatttccattatcttatct

SEQ ID NO: 3039 - DNA, 120 bp, synthetic construct
  misc_feature 1..120: note = Artificially Synthesized Probe
  source 1..120: mol_type = other DNA
aaagagttctaagacaaattctgcccatgcacttgttaattagttggggagatggattcctggcgctttccatctgccatttaccagagtactccagaatcattttcaaacacgtttctt

SEQ ID NO: 3040 - DNA, 120 bp, synthetic construct
  misc_feature 1..120: note = Artificially Synthesized Probe
  source 1..120: mol_type = other DNA
cctgcagtggtcaggtgggggcaccgtgtccatccccccatgggtttgtgccaatttgcatataggtatgtagcttcctattggcgactgtaagaaattgccacaaattcagtggcttaa

SEQ ID NO: 3041 - DNA, 120 bp, synthetic construct
  misc_feature 1..120: note = Artificially Synthesized Probe
  source 1..120: mol_type = other DNA
acatgtgtacatatgcatgggagtcttactttgcattaatgggattgccctgtgtctgaaagttcctctttcctttatcctgcatctcaggagtctccataactccagggagatgctctg

SEQ ID NO: 3042 - DNA, 120 bp, synthetic construct
  misc_feature 1..120: note = Artificially Synthesized Probe
  source 1..120: mol_type = other DNA
gggcatatttaaaggggcctctgttaacacacacaggcctccagaaccatccacacttctggctggcctgattcctgagggggaaatggtctttaaagaagcaagcaccttgatccaaag

SEQ ID NO: 3043 - DNA, 120 bp, synthetic construct
  misc_feature 1..120: note = Artificially Synthesized Probe
  source 1..120: mol_type = other DNA
ccttctgaccctgggctactgagtcgaagtgaagtcaagctccgcctgggcaggaatgagtggagtgagtcacccggcgctgtggggcatttgcacggagcagcggggctggtggggaga

SEQ ID NO: 3044 - DNA, 120 bp, synthetic construct
  misc_feature 1..120: note = Artificially Synthesized Probe
  source 1..120: mol_type = other DNA
acggatgaccccgacgtcgggctggcctacgtctttgggccagatgccaacagtggccaagtggcccggtaccacttccccagcctcttcttccgtgacttctcactgctgttccacatc

SEQ ID NO: 3045 - DNA, 120 bp, synthetic construct
  misc_feature 1..120: note = Artificially Synthesized Probe
  source 1..120: mol_type = other DNA
taaacccatgtggggtctgtgtccaaagcccctgcatttctgggaacctttggctgggaacagccacgtgggtgacctcagctggcactgtctcacaagtccctgaattctagcattcaa

SEQ ID NO: 3046 - DNA, 120 bp, synthetic construct
  misc_feature 1..120: note = Artificially Synthesized Probe
  source 1..120: mol_type = other DNA
cgtgtgtaggaagagggggtctgggtgtttaattttgcatttcttggactgtgaagatagactttcattttgtcacttgtttattgtctgtttgtatttcttcctttgtgactgaccggt

SEQ ID NO: 3047 - DNA, 120 bp, synthetic construct
  misc_feature 1..120: note = Artificially Synthesized Probe
  source 1..120: mol_type = other DNA
gacagacttgttcagcacaagattttctcagacttctgaattgagatacttgggaaagaaacattcaagttgtgtgactcataatttttggcagaaacaagcacagagctttgggagcag

SEQ ID NO: 3048 - DNA, 120 bp, synthetic construct
  misc_feature 1..120: note = Artificially Synthesized Probe
  source 1..120: mol_type = other DNA
ctggagtgcagtggcacgattgcggctcactgcaagctctgcctcccgggttcacgccattctcctgcctcagcctcccaagtagctgggactacaggcgcccgccaccaggccaggctg

SEQ ID NO: 3049 - DNA, 120 bp, synthetic construct
  misc_feature 1..120: note = Artificially Synthesized Probe
  source 1..120: mol_type = other DNA
agattgggtccggacggaatgggcgcagagatccaggaaactcccctacatctgcggcgtttctgtccttggcttctgggttttgtttttgatgaaaaggtgaagttcaaagaaagcaaa

SEQ ID NO: 3050 - DNA, 120 bp, synthetic construct
  misc_feature 1..120: note = Artificially Synthesized Probe
  source 1..120: mol_type = other DNA
aaaatataccacttggggcactgggaagctgcgataccatttctgtgctctcctgtagcacctcagagcccttccttgccctgaactttcccataaaaacaaatacaaagcatgatataa

SEQ ID NO: 3051 - DNA, 120 bp, synthetic construct
  misc_feature 1..120: note = Artificially Synthesized Probe
  source 1..120: mol_type = other DNA
gacccgattggacacgacttactgaagctcagatggtgcctgggcagggaaggccagcgtgcccaccccagcggccccccggagagcaccagagagggctggacgaggcgagagggggcc

SEQ ID NO: 3052 - DNA, 120 bp, synthetic construct
  misc_feature 1..120: note = Artificially Synthesized Probe
  source 1..120: mol_type = other DNA
gtttcagaggatttttctttatctttcttgcgatcttaagtatttcatttcacaaaccaagcaagtctccaccgggcatctgccggccgaataacaggccacctcccctctcgtcctcca

SEQ ID NO: 3053 - DNA, 120 bp, synthetic construct
  misc_feature 1..120: note = Artificially Synthesized Probe
  source 1..120: mol_type = other DNA
gttggttttcatttttattttaagtaaaagttaagagggaaaaaggaaaagggacaaagcatgctgggtgataagaaggcattctggggggccagggtctcttgtaacaaattcaggaag

SEQ ID NO: 3054 - DNA, 120 bp, synthetic construct
  misc_feature 1..120: note = Artificially Synthesized Probe
  source 1..120: mol_type = other DNA
agggctttgttgccagtgacactctttttaaacgcgacccagtgaggagactgtacagcaaaaccattttgaaagtggaattttgtaaagaaaagatgagtgtaactgttgatgggaaat

SEQ ID NO: 3055 - DNA, 120 bp, synthetic construct
  misc_feature 1..120: note = Artificially Synthesized Probe
  source 1..120: mol_type = other DNA
acattacacataccacacgtggatacacacatacacataccacgtgtgcacacatgtgcacaccatggattatgcacaccatacatgcacactcacacatcacacatacatatcacacat

SEQ ID NO: 3056 - DNA, 120 bp, synthetic construct
  misc_feature 1..120: note = Artificially Synthesized Probe
  source 1..120: mol_type = other DNA
ctgagctgaggggtcacaggtgtggtgggagcccccatccacctgccttcaggcttctctgggggcagcagaggggccgtggtttctcagctccttgtagaaacagctcgatatgcagct

SEQ ID NO: 3057 - DNA, 120 bp, synthetic construct
  misc_feature 1..120: note = Artificially Synthesized Probe
  source 1..120: mol_type = other DNA
cgatgggcattcaccgtcaccatcggctctgaggcctctctgggtgccgcatggcaagtgctccccagaatccattctgaggggaatttgggcttaaagaacatgcctaatccatattca

SEQ ID NO: 3058 - DNA, 120 bp, synthetic construct
  misc_feature 1..120: note = Artificially Synthesized Probe
  source 1..120: mol_type = other DNA
aattcataaccctgtgatgatgagtggactcacgggttttaagaacatgggcaccctgcgagatctgagatcttactccaagcttccacgttggttacggggcagtggccatgagcctct

SEQ ID NO: 3059 - DNA, 120 bp, synthetic construct
  misc_feature 1..120: note = Artificially Synthesized Probe
  source 1..120: mol_type = other DNA
cttgtcacttttgtgatgtggcttccgccgagctctggtctgccggtgaactgagagtagacgcgccctggaagctgagctcatctggaaacaagctccgtgtggcaagcgcgataaagc

SEQ ID NO: 3060 - DNA, 120 bp, synthetic construct
  misc_feature 1..120: note = Artificially Synthesized Probe
  source 1..120: mol_type = other DNA
ccagcatatgtgcacatacacatagccagcacatgtgcacacagctctcatgtatgtgcacgtgtatctctagcatacatgcacacatgtatctggtgtatatgtgcaacacatgtatct

SEQ ID NO: 3061 - DNA, 120 bp, synthetic construct
  misc_feature 1..120: note = Artificially Synthesized Probe
  source 1..120: mol_type = other DNA
gatttttaaagacgataaaaggatgccaggcactaagacagattaaagccaagaaagtaaaatctaagattctcatgaagttagccctcaagttaagtgggtggtacatggtgcccacct

SEQ ID NO: 3062 - DNA, 120 bp, synthetic construct
  misc_feature 1..120: note = Artificially Synthesized Probe
  source 1..120: mol_type = other DNA
ctagccccagtggtcccagggtcctgagcctcctctcctctctcctctcttctccccttgcctgccggggagccagggctggtcccagggtcctgagcctcctctcctctctcctctctt

SEQ ID NO: 3063 - DNA, 120 bp, synthetic construct
  misc_feature 1..120: note = Artificially Synthesized Probe
  source 1..120: mol_type = other DNA
cttggcccagccatgccccagcacccgtgccctgaccaagagcgaatgagctgacccgagacgggctgccccgggggggctccacccaggccctgccaccaggtagacagtccccatctg

SEQ ID NO: 3064 - DNA, 120 bp, synthetic construct
  misc_feature 1..120: note = Artificially Synthesized Probe
  source 1..120: mol_type = other DNA
gagactcagcctgttgagagcacgggtggctgggacacatttcttacttggagcaaaacgaatgagaaatttcaattaggcagaaactaattgattccatagtaagttagaatggcttta

SEQ ID NO: 3065 - DNA, 120 bp, synthetic construct
  misc_feature 1..120: note = Artificially Synthesized Probe
  source 1..120: mol_type = other DNA
ttgagctttgctttcatttgcaagacatcgggacactcaaaaggctgacttatgggaagggccgtgtgtttgctttcttaaattgtttgaatgaggccgtctcagcggggttcctcttgc

SEQ ID NO: 3066 - DNA, 120 bp, synthetic construct
  misc_feature 1..120: note = Artificially Synthesized Probe
  source 1..120: mol_type = other DNA
tcgccacgtccacgggtgccccggactcctcgtgggggtccctgcattcctgggcgtgtggccaatgccctgcgtcctccatgtgaccctttcagggagaagttggagcagatggagtcc

SEQ ID NO: 3067 - DNA, 120 bp, synthetic construct
  misc_feature 1..120: note = Artificially Synthesized Probe
  source 1..120: mol_type = other DNA
tggccagagcggttgagatgaaatgccggacgcgtggcctcctcttccagggagatccagggaaggacggagtcgggcagccgggcctccctggcccccccggacccccgggacctgtgg

SEQ ID NO: 3068 - DNA, 120 bp, synthetic construct
  misc_feature 1..120: note = Artificially Synthesized Probe
  source 1..120: mol_type = other DNA
actggaaagcaacattttccttgaatttcctggtttggtgttttgttgatctgtaagtcgctcgagtccagttgaattttaaacgcggctctttgtttccgatttttccttttgctcgtg

SEQ ID NO: 3069 - DNA, 120 bp, synthetic construct
  misc_feature 1..120: note = Artificially Synthesized Probe
  source 1..120: mol_type = other DNA
acctgcaggacccaagggcaacctgggctctaagggcgaacgaggctccccgggacccaaggtaaggggctcaggtgctgtccctcaaccccctttgtgacccaggggtggctccagcct

SEQ ID NO: 3070 - DNA, 120 bp, synthetic construct
  misc_feature 1..120: note = Artificially Synthesized Probe
  source 1..120: mol_type = other DNA
ccaggcccagtgagagctccactatcccacccagctgtgcattggagctggggcctgtggcaaccaggacactgcgtggcacatgccctccaccctccaccctccacccctgcttcaggg

SEQ ID NO: 3071 - DNA, 120 bp, synthetic construct
  misc_feature 1..120: note = Artificially Synthesized Probe
  source 1..120: mol_type = other DNA
tggaggcagacagggcagtgggcctgtgtgtgctaggctcagtcacctcctcccaaaagggtccttgtgcaggaaaggggtgagaagggccggggtagcctgagagctgggaacgtgtga

SEQ ID NO: 3072 - DNA, 120 bp, synthetic construct
  misc_feature 1..120: note = Artificially Synthesized Probe
  source 1..120: mol_type = other DNA
tatacatacactcatacatgtgcacgtatccacatgtgtatccacatacatgactatgagccctccctggcccattccatgatgggcatacacactgcacatgtatactcatgcacacat

SEQ ID NO: 3073 - DNA, 120 bp, synthetic construct
  misc_feature 1..120: note = Artificially Synthesized Probe
  source 1..120: mol_type = other DNA
gagccccaccttccttcccgtgccagcagcagtgagactcccccagtggcccaaggccagtgctacacgcccagcccacgccccagttccgatgaccttggcccttcctgcgggccctcc

SEQ ID NO: 3074 - DNA, 120 bp, synthetic construct
  misc_feature 1..120: note = Artificially Synthesized Probe
  source 1..120: mol_type = other DNA
aaaggacaagaattcccccctgagccccacctccattgagggtggcagggctgcttggatgtcctgccaagaccactgagaacagctggataaaatgtgagaaaaccactgtttgaggat

SEQ ID NO: 3075 - DNA, 120 bp, synthetic construct
  misc_feature 1..120: note = Artificially Synthesized Probe
  source 1..120: mol_type = other DNA
ccctcattcgaaggatcaacaattagagtgacgagatttctcaacaaaacgggagaagccagaagaccataaatggtttccaaaatatccaagaaagtcaattgccagtgtagactccga

SEQ ID NO: 3076 - DNA, 120 bp, synthetic construct
  misc_feature 1..120: note = Artificially Synthesized Probe
  source 1..120: mol_type = other DNA
agaaactagggaataaacagtagatttaggtcccgatacatctacaggtgctgtaagtatgacgagggtagatacatccattgaaggacagacattgtcaatgggatatggctaaaccat

SEQ ID NO: 3077 - DNA, 120 bp, synthetic construct
  misc_feature 1..120: note = Artificially Synthesized Probe
  source 1..120: mol_type = other DNA
tgcatctaatgagatagcctcaagatatgacaagtgaaaaattggcaaagtgaaaaagaaaaacacaaatcaatcattatagggggactttcagcccagggagatctgaacatcaggtct

SEQ ID NO: 3078 - DNA, 120 bp, synthetic construct
  misc_feature 1..120: note = Artificially Synthesized Probe
  source 1..120: mol_type = other DNA
aggtcccacctggaaggagaaggggttttgtcatctccgttgacaaaattacagctttaagtagtacctgtttctacacatcagcctaagatgttaaagaacaaacagcatttaaagaac

SEQ ID NO: 3079 - DNA, 120 bp, synthetic construct
  misc_feature 1..120: note = Artificially Synthesized Probe
  source 1..120: mol_type = other DNA
aactctcaggatgagtaagtcaatgtaccgaagtcaccagatggaagggcagtctagaaaaaccaccaccgagtcctaagcaattaaaaatgaagttttaaaaaggcaccattgtgaata

SEQ ID NO: 3080 - DNA, 120 bp, synthetic construct
  misc_feature 1..120: note = Artificially Synthesized Probe
  source 1..120: mol_type = other DNA
ataaaaaggcaccattaacaaaaacatcagaaagtatcggttaactaggaagaacctaattaaatacgcgatctctaccgcgaaatggctagaagggcctcaggcaaacccaccagtgct

SEQ ID NO: 3081 - DNA, 120 bp, synthetic construct
  misc_feature 1..120: note = Artificially Synthesized Probe
  source 1..120: mol_type = other DNA
caggaagcgtctcttgtcgccgtccgtagggtcccaagggagagagcatccggggccagcccggcccacctggacctcagggaccccccggcatcggctacgaggggcgccagggccctc

SEQ ID NO: 3082 - DNA, 120 bp, synthetic construct
  misc_feature 1..120: note = Artificially Synthesized Probe
  source 1..120: mol_type = other DNA
ggatgggagcaggtggcagccagcgcttcttaaactttcaaacttttggtaaagtttagtaaaatacttttgtgagcagttttgggtttaaagaaaagtgagctcaagcttctgaaagtg

SEQ ID NO: 3083 - DNA, 120 bp, synthetic construct
  misc_feature 1..120: note = Artificially Synthesized Probe
  source 1..120: mol_type = other DNA
ctgccgtggactgggagggctgggtgctgggcagggagggcaccctcctgtgggctgggagggccgggtgttggggagggagaggcgggtgctgggcagggagggcaccctcctgtgggc

SEQ ID NO: 3084 - DNA, 120 bp, synthetic construct
  misc_feature 1..120: note = Artificially Synthesized Probe
  source 1..120: mol_type = other DNA
caaggtcaaaatccttggggccaaaatccacatcttgtgtctttgccttccctcacccaaagtgccagacacaagaatggatatctctaagagtggtgggtgactgggtgggtgaatcaa

SEQ ID NO: 3085 - DNA, 120 bp, synthetic construct
  misc_feature 1..120: note = Artificially Synthesized Probe
  source 1..120: mol_type = other DNA
ggcacgtggtgagtgattgctgcggcttctgagcacggctgggtctgtggggcctgagcagaggtgacccgcgatccggcgccacggcaggcaggactccccacccttgctgctgcctac

SEQ ID NO: 3086 - DNA, 120 bp, synthetic construct
  misc_feature 1..120: note = Artificially Synthesized Probe
  source 1..120: mol_type = other DNA
tcaacagccccctgtcaggcggcatgcggggcatccgcggggccgacttccagtgcttccagcaggcgcgggccgtggggctggcgggcaccttccgcgccttcctgtcctcgcgcctgc

SEQ ID NO: 3087 - DNA, 120 bp, synthetic construct
  misc_feature 1..120: note = Artificially Synthesized Probe
  source 1..120: mol_type = other DNA
gcgggctcctatctgcagtttccccccgagtttttggacaaatcttatacatgctcattactttaaaattacaaaatccaaaagagcattgagaaaaatgagaactgctctgagaagtca

SEQ ID NO: 3088 - DNA, 120 bp, synthetic construct
  misc_feature 1..120: note = Artificially Synthesized Probe
  source 1..120: mol_type = other DNA
gcagccccctggtaaccccagggctggcctcctgcctccacctttcctgcccggggagcggcctctgccctaagcagagcaggtctgggtttgactgacggcccggcgcgtcttacaggc

SEQ ID NO: 3089 - DNA, 120 bp, synthetic construct
  misc_feature 1..120: note = Artificially Synthesized Probe
  source 1..120: mol_type = other DNA
tccaacaccaagcacagcagcctggggctggcctcccaaatgagccatgagatgatacatccaaagcagacagctccaccctggccgagtccaagctgggagattcaagggacccatgag

SEQ ID NO: 3090 - DNA, 120 bp, synthetic construct
  misc_feature 1..120: note = Artificially Synthesized Probe
  source 1..120: mol_type = other DNA
atccgtttgacccctcacctggcagtgagtccagacgcacggcccccccgacccccgttctagaagaagtcgtgcgctgctggttctgaatccagcgagaaaccttcccgtgaggtctca

SEQ ID NO: 3091 - DNA, 120 bp, synthetic construct
  misc_feature 1..120: note = Artificially Synthesized Probe
  source 1..120: mol_type = other DNA
accctggtttgttccgtgggcagtgagagcctctacctgggtcctggatcccacgttctgaaggtccccgactcgggagccaggaggggtgtcgctctgcagccccagggcccccaggct

SEQ ID NO: 3092 - DNA, 120 bp, synthetic construct
  misc_feature 1..120: note = Artificially Synthesized Probe
  source 1..120: mol_type = other DNA
ccacagggcaagtccagctgtgtgtcagccacggccagggtggggcagcctgtccatctgggtgacgtcgcgccctgggacgggtagcgatggcgccaggggccgcccgcctcacgcccg

SEQ ID NO: 3093 - DNA, 120 bp, synthetic construct
  misc_feature 1..120: note = Artificially Synthesized Probe
  source 1..120: mol_type = other DNA
ggacagacagagacagagagaccggaaacagaggcagagagactgagagactgagagagacggggtggttttccccacagcatcaacaccaagcagggctaggatcactgaaacagactc

SEQ ID NO: 3094 - DNA, 120 bp, synthetic construct
  misc_feature 1..120: note = Artificially Synthesized Probe
  source 1..120: mol_type = other DNA
tcctgggagggcgtggattttccaaagcagtttagagaaatgagacccacaggcgttatttcccatggtgaggttcttttcagtaacccccaccgtatagccaggatcagcaaagagagg

SEQ ID NO: 3095 - DNA, 120 bp, synthetic construct
  misc_feature 1..120: note = Artificially Synthesized Probe
  source 1..120: mol_type = other DNA
ggaaagtaattctgcgtttccatttctctttccagaaaaataacgtggagcaagtggtaagagccctccccaccacccccagccgtgagtctgcacacgtccacccacacgtccacctgt

SEQ ID NO: 3096 - DNA, 120 bp, synthetic construct
  misc_feature 1..120: note = Artificially Synthesized Probe
  source 1..120: mol_type = other DNA
atggaggggacggcggggtccagatggaggggacggcggggtccagatggaggggacggcggggtccagatggaggggacgtcggggctccagatggaggggacggcgggagtccagatg

SEQ ID NO: 3097 - DNA, 120 bp, synthetic construct
  misc_feature 1..120: note = Artificially Synthesized Probe
  source 1..120: mol_type = other DNA
aaggtgctttaaagcccttgatccctgaaggctggatgaagcgtctttttaaaaacctgtttcgtgagccagctttttagaaagaaacggggctgccccaaccttgacctgttttgtgtt

SEQ ID NO: 3098 - DNA, 120 bp, synthetic construct
  misc_feature 1..120: note = Artificially Synthesized Probe
  source 1..120: mol_type = other DNA
caggcacccagcaaaggcgcctgtgtcactttcaccccaccccagagcaggggtcccccgggcggttaccctctgcggagccgggggtcccccgggcggttaccctctgcggagccgggg

SEQ ID NO: 3099 - DNA, 120 bp, synthetic construct
  misc_feature 1..120: note = Artificially Synthesized Probe
  source 1..120: mol_type = other DNA
cgtcagattttctagttttcttcctctttccagggggagatggggtacccaggcctgccaggctgcaagggctcgcccgggtttgacgtaagtcacttcctctcactgatactttaaaac

SEQ ID NO: 3100 - DNA, 120 bp, synthetic construct
  misc_feature 1..120: note = Artificially Synthesized Probe
  source 1..120: mol_type = other DNA
atctcatcttcaagttcccagattaccctccaggccctagatttgagtttgccaatttgccagcctggcaaagctgtgccttctctaatgggaaccaaatcctgccccttagacaagatg

SEQ ID NO: 3101 - DNA, 120 bp, synthetic construct
  misc_feature 1..120: note = Artificially Synthesized Probe
  source 1..120: mol_type = other DNA
cccactttcccaccaggcggcttccacgtttctgcatccgagcttgggttcttctttggaataattttccttagttaaaattcccagcgtgaggaagttgggtcagtaccccagacggga

SEQ ID NO: 3102 - DNA, 120 bp, synthetic construct
  misc_feature 1..120: note = Artificially Synthesized Probe
  source 1..120: mol_type = other DNA
agcagggatcgtgtgacttagtgactcagactgccttctaggcccactcctctgagatcaggatatgagactgacagccaggcagagcccagaggaagggccagccacgcagctccagct

SEQ ID NO: 3103 - DNA, 120 bp, synthetic construct
  misc_feature 1..120: note = Artificially Synthesized Probe
  source 1..120: mol_type = other DNA
gagaggccgtcccagtgcaagtcacatttgtatttctgtgcacgaggtgaaatcgtgcttttgtggtgccaacgggtgttacacagctgttaaaaatacctgtgtcatagatgaggacca

SEQ ID NO: 3104 - DNA, 120 bp, synthetic construct
  misc_feature 1..120: note = Artificially Synthesized Probe
  source 1..120: mol_type = other DNA
gaggccaggacttgctcggagaattctaaccacaccctgcctgttttatatgttcagttttcaaagtaatcaatagccactataagaaaaaaacaaagccactttcaaagggttgtggta

SEQ ID NO: 3105 - DNA, 120 bp, synthetic construct
  misc_feature 1..120: note = Artificially Synthesized Probe
  source 1..120: mol_type = other DNA
agagcaatacactagatgcctcctgtctgcctggtggaggccacggggtcaggatggtgaatgggccaagtctggtagtggggaagttgtaaacatttgaaccaccggacaggcctcatc

SEQ ID NO: 3106 - DNA, 120 bp, synthetic construct
  misc_feature 1..120: note = Artificially Synthesized Probe
  source 1..120: mol_type = other DNA
gagccccaggacctgccggaccccctggagacccggggctgatgggtgaaagggtgagtgtccaacagctcgggccctagggcggaggcctggccgccagaggccctgggaagccccagc

SEQ ID NO: 3107 - DNA, 120 bp, synthetic construct
  misc_feature 1..120: note = Artificially Synthesized Probe
  source 1..120: mol_type = other DNA
ccagtttctccagcccaggaaatgtgtgtggtgggggaagggaagagaagagtgcctctcttatctttatttttttccttttaaaatttccacttcctaaaaacaaaataaaacccttgt

SEQ ID NO: 3108 - DNA, 120 bp, synthetic construct
  misc_feature 1..120: note = Artificially Synthesized Probe
  source 1..120: mol_type = other DNA
tgtgtgaggaccatagaggggacatgtgaggatcatgggggacatgtgaggatcatgggggggacgtgtgaggatcatgggaggacgtgaggatcatggagggggacatgtgaggatcat

SEQ ID NO: 3109 - DNA, 120 bp, synthetic construct
  misc_feature 1..120: note = Artificially Synthesized Probe
  source 1..120: mol_type = other DNA
attttggacatcatcatgaaaatgtgctgtgagtatctctgagaagccgtcctcgttagggagagcagggccgccagcctggcctgttccactcctagaagggtgtctccactgttgggg

SEQ ID NO: 3110 - DNA, 120 bp, synthetic construct
  misc_feature 1..120: note = Artificially Synthesized Probe
  source 1..120: mol_type = other DNA
gggagggtctccccctctccttgaagggcggtagtctggggtcctgagtgctgggtgtgggcttgtccctcgtggacagaacccaggagggcttcatccaccaaggaagattgctttgca

SEQ ID NO: 3111 - DNA, 120 bp, synthetic construct
  misc_feature 1..120: note = Artificially Synthesized Probe
  source 1..120: mol_type = other DNA
ccacaccgatactgtctgtccccacaggtggtctccgtgggcatcaaagacgtgtttgacttcatcccaggctcagaccagctcaatgtcatttcttgccaaggcctggcaccatcccag

SEQ ID NO: 3112 - DNA, 120 bp, synthetic construct
  misc_feature 1..120: note = Artificially Synthesized Probe
  source 1..120: mol_type = other DNA
cgggtggcggtggtgcagtacagcggcacgggccagcagcgcccagagcgggcgtcgctgcagttcctgcagaactacacggccctggccagtgccgtcgatgccatggactttatcaac

SEQ ID NO: 3113 - DNA, 120 bp, synthetic construct
  misc_feature 1..120: note = Artificially Synthesized Probe
  source 1..120: mol_type = other DNA
catagctggtttttcccaccaatcctcacctaacagttactttacaattaaactcaaagcaagctcttctcctcagcttggggcagccattggcctctgtctcgttttgggaaaccaagg

SEQ ID NO: 3114 - DNA, 120 bp, synthetic construct
  misc_feature 1..120: note = Artificially Synthesized Probe
  source 1..120: mol_type = other DNA
gcggttcgggtccggctccggcccgcggggaagacgccccggctggctgggacctccgggggcgcagggcctctccccgggccggacggaaggggcggcggggcggggggaggaggggct

SEQ ID NO: 3115 - DNA, 120 bp, synthetic construct
  misc_feature 1..120: note = Artificially Synthesized Probe
  source 1..120: mol_type = other DNA
aaaaaaaaaggaaagaaaggcccggtgagatgctttctcttaaacacggccctgcacgttgagttgctgcctcctgtggcctatttcacgtttatgcaaagtcgggcgcctgatgcgggg

SEQ ID NO: 3116 - DNA, 120 bp, synthetic construct
  misc_feature 1..120: note = Artificially Synthesized Probe
  source 1..120: mol_type = other DNA
tactgtgaatgatgtggccatgaacacaccacacagatacctcttggagatcccactttcacttcttttgagtatgttcccagaagtggaaatgtggatcatttgattttttcatttttt

SEQ ID NO: 3117 - DNA, 120 bp, synthetic construct
  misc_feature 1..120: note = Artificially Synthesized Probe
  source 1..120: mol_type = other DNA
ttctctgggttctttttactctgttaatgatgtcctttcactagatagatgcaaaaaatgtttttaaattttggtgtaatctgatttatctattttttcttattgtcatacccaagaaat

SEQ ID NO: 3118 - DNA, 120 bp, synthetic construct
  misc_feature 1..120: note = Artificially Synthesized Probe
  source 1..120: mol_type = other DNA
tgattgatttttttttttttgtatgttgaactatccttgcactccagaaataaatcctacttggtcaattcattaaattccatttaattgcatcaaattataccaaatttagtttactat

SEQ ID NO: 3119 - DNA, 120 bp, synthetic construct
  misc_feature 1..120: note = Artificially Synthesized Probe
  source 1..120: mol_type = other DNA
tcctttgtggtctgaaaagatatcttgtatgatgtagatctttcaaaatctattgacacagactttgttgttgcaactaaccccgtcattgcaagcccttctccgtctggttgaagtgac

SEQ ID NO: 3120 - DNA, 120 bp, synthetic construct
  misc_feature 1..120: note = Artificially Synthesized Probe
  source 1..120: mol_type = other DNA
gaaataaaaagattgaataaaggtgatcagagcctaaggggtctgtgggataccatcaagcaaaccaacataaacattgtaggagccccagaagaagagagagcaaagggagcagagaga

SEQ ID NO: 3121 - DNA, 120 bp, synthetic construct
  misc_feature 1..120: note = Artificially Synthesized Probe
  source 1..120: mol_type = other DNA
aaaagggttggggacagagccattcagggagcagagttttgtttatgccattgaagctaaactggtataaattcagtgtagactgttataattttaggatgttaaaatgcaatccccatg

SEQ ID NO: 3122 - DNA, 120 bp, synthetic construct
  misc_feature 1..120: note = Artificially Synthesized Probe
  source 1..120: mol_type = other DNA
taacagtccatcaaaatatttatatcttacactgggaagattgttgctggctctcagtctgcttccagtctgctcatattgcttttgttgtaatgatggtcatatgtgggagctcagtgt

SEQ ID NO: 3123 - DNA, 120 bp, synthetic construct
  misc_feature 1..120: note = Artificially Synthesized Probe
  source 1..120: mol_type = other DNA
cttactagtgtaaatagcatttttctgcaacattttctaactggttgttagaaaatgtttcttctaactgatagaagaaaatcaataactttttgtatgttgaggactaagctctgattt

SEQ ID NO: 3124 - DNA, 120 bp, synthetic construct
  misc_feature 1..120: note = Artificially Synthesized Probe
  source 1..120: mol_type = other DNA
acccagggttagatctacgaatggaatccctgaattcctggacatgatttctgtatatgagcatctatgcatttgtgtaaggtgaaattgtgtagactcttaaaagggtccatgaccaca

SEQ ID NO: 3125 - DNA, 120 bp, synthetic construct
  misc_feature 1..120: note = Artificially Synthesized Probe
  source 1..120: mol_type = other DNA
ccccagcctgaaggtggggcttcactggggacccatcctcttctgcccaggagcctatctgcctcctgcagccatccatggtgcccaggctgctggtaccaaggggcaccggtgcccagc

SEQ ID NO: 3126 - DNA, 120 bp, synthetic construct
  misc_feature 1..120: note = Artificially Synthesized Probe
  source 1..120: mol_type = other DNA
aaaaagtttatctttttatgttctaaaacaagttaaatagcatgaagtgcttgtccttgaagctgtgaaactcacccacaaactgcctgagctggcacctttgggaacggacttcattcc

SEQ ID NO: 3127 - DNA, 120 bp, synthetic construct
  misc_feature 1..120: note = Artificially Synthesized Probe
  source 1..120: mol_type = other DNA
aggacttcagggccacaggtgctgccaagatgctccagggcacctgctccgtgctcctgctctggggaatcctgggggccatccaggcccagcagcaggaggtcatctcgccggacacta

SEQ ID NO: 3128 - DNA, 120 bp, synthetic construct
  misc_feature 1..120: note = Artificially Synthesized Probe
  source 1..120: mol_type = other DNA
aaccagaacctgaaggagcagggcctgcgggacatcgccagcacgccgcacgagctctaccgcaacgactacgccaccatgctgcccgactccaccgagatcgaccaggacaccatcaac

SEQ ID NO: 3129 - DNA, 120 bp, synthetic construct
  misc_feature 1..120: note = Artificially Synthesized Probe
  source 1..120: mol_type = other DNA
tcgctgctcagtaacagtggtttcattgccgtgtacaaatggtgcctccctcaccagtgccccttgctcttccatccttttgtaaaatttattcttttatatttgtttttttagagacag

SEQ ID NO: 3130 - DNA, 120 bp, synthetic construct
  misc_feature 1..120: note = Artificially Synthesized Probe
  source 1..120: mol_type = other DNA
attgctcattaatatgaaggaacctcttttgtggcttactaaataagcagttttagggagcctggtttgaatgtcccctgcattttctggtttgaacatcccctgcattttcctaacaga

SEQ ID NO: 3131 - DNA, 120 bp, synthetic construct
  misc_feature 1..120: note = Artificially Synthesized Probe
  source 1..120: mol_type = other DNA
ttaattccaagagagtgtaacctttatgtggtgttctgaagtcctgatctgtctaaagttacttagataaaggaattaatctttgtagtgacggtgacccaggcatcgctggagaatcag

SEQ ID NO: 3132 - DNA, 120 bp, synthetic construct
  misc_feature 1..120: note = Artificially Synthesized Probe
  source 1..120: mol_type = other DNA
cagttaccaaggaacagaagcacctcgataacttgatggccgtcccaaaacccagcctccagcccgacccagggctcagcctcctccgcagactgtttgtcgagaacactagatgccagc

SEQ ID NO: 3133 - DNA, 120 bp, synthetic construct
  misc_feature 1..120: note = Artificially Synthesized Probe
  source 1..120: mol_type = other DNA
tctccttcagggcaagctggggcgcatcggacctcctggctgcaagggagaccctggaaaccgggtaagggccgtttgcacccctccttcagcctcggcccagggggtgtgggtgcctga

SEQ ID NO: 3134 - DNA, 120 bp, synthetic construct
  misc_feature 1..120: note = Artificially Synthesized Probe
  source 1..120: mol_type = other DNA
ttttttctgggagcttggacttagggcttcccactttctgtccaccttccctcagcccaagcccaagtctggctgagtcctctgagcagatgcacaggcgtcctgcccgtgacacacact

SEQ ID NO: 3135 - DNA, 120 bp, synthetic construct
  misc_feature 1..120: note = Artificially Synthesized Probe
  source 1..120: mol_type = other DNA
tgggagtgaccgcagtgactggacagcaccaggtccccaccaggccccagcccatcacctaaaacgccactcaccagacatccaactccacctggagcctccccagatcattcctaaatc

SEQ ID NO: 3136 - DNA, 120 bp, synthetic construct
  misc_feature 1..120: note = Artificially Synthesized Probe
  source 1..120: mol_type = other DNA
tgttgcaggtcccccgggacagacggggttcttcctcccaggcccccttccccaacccccggccacacccgcctctcacatgggacccaggccggaggcctcagctgagacccgtggggc

SEQ ID NO: 3137 - DNA, 120 bp, synthetic construct
  misc_feature 1..120: note = Artificially Synthesized Probe
  source 1..120: mol_type = other DNA
tcctggatgggccacagggaaaggaggagctgggaccctcaagacagaggtccacggcccccacaggcagcaggaggagctgcggccatgtggcctggtggtcagggctggacggggcat

SEQ ID NO: 3138 - DNA, 120 bp, synthetic construct
  misc_feature 1..120: note = Artificially Synthesized Probe
  source 1..120: mol_type = other DNA
tgagctctgggggagctgtcagccactggctggtcccttttcaaccaaagttcaggctttgcaaaaaaaccacatagatgctcccgtttaaaggaccccaaaatgccagatcgatttttc

SEQ ID NO: 3139 - DNA, 120 bp, synthetic construct
  misc_feature 1..120: note = Artificially Synthesized Probe
  source 1..120: mol_type = other DNA
cacagttatcccccagaaggtgctctgtgcctccaaatccctagcctggccaagggtttaaccagggctgcaggttggtctggaactgagcacaaaacaagggatggataacgatggatg

SEQ ID NO: 3140 - DNA, 120 bp, synthetic construct
  misc_feature 1..120: note = Artificially Synthesized Probe
  source 1..120: mol_type = other DNA
gatgggtgattgggcgaatgggcgaatgggtggatgggtgggcgtggagttggtgggtacatgataatggggtggaatacccatggattggaatgagctgttttggctgctatttctggg

SEQ ID NO: 3141 - DNA, 120 bp, synthetic construct
  misc_feature 1..120: note = Artificially Synthesized Probe
  source 1..120: mol_type = other DNA
ggtcttcgtcatcgacagctccgagagcattgggtacaccaacttcacactggagaagaacttcgtcatcaacgtggtcaacaggctgggtgccatcgctaaggaccccaagtccgagac

SEQ ID NO: 3142 - DNA, 120 bp, synthetic construct
  misc_feature 1..120: note = Artificially Synthesized Probe
  source 1..120: mol_type = other DNA
catgttccacgagaagcacgagagtgaaaacctctactccatcgcctgcgacaagccacagcaggtgcgcaacatgacgctgttctccgacctggtcgctgagaagttcatcgatgacat

SEQ ID NO: 3143 - DNA, 120 bp, synthetic construct
  misc_feature 1..120: note = Artificially Synthesized Probe
  source 1..120: mol_type = other DNA
ggtcgcggtgtgcgttcgggcgttccatggggagctcccggtgggtgagctgggccactgagcacattcacaggccctgaggctgccccaggggaggagccgtggactcagagccgaggt

SEQ ID NO: 3144 - DNA, 120 bp, synthetic construct
  misc_feature 1..120: note = Artificially Synthesized Probe
  source 1..120: mol_type = other DNA
ctgacacctcatccccgacactcagagctcatcctccttcccagctgtttccaatttcaaagtgaactcgaccttgtggctccaggagatgcagcagggacagtgttaaatcggctttca

SEQ ID NO: 3145 - DNA, 120 bp, synthetic construct
  misc_feature 1..120: note = Artificially Synthesized Probe
  source 1..120: mol_type = other DNA
ccacggagctcacgcaggacccggccgcctactcccagctggtggccgtgctggtctacaccgccgagcgggccaagttcgccaccggggtagagcggcaggactggatggagctgttca

SEQ ID NO: 3146 - DNA, 120 bp, synthetic construct
  misc_feature 1..120: note = Artificially Synthesized Probe
  source 1..120: mol_type = other DNA
ttccccgtctcctccaggccccacagacactgatgaatggacagagacccccaaaaccagctgccccttgcatgtctgtctccatatgtttggtgacagcagtgaaaatgttattagttt

SEQ ID NO: 3147 - DNA, 120 bp, synthetic construct
  misc_feature 1..120: note = Artificially Synthesized Probe
  source 1..120: mol_type = other DNA
ccagcgattgaggggtcaggctgggggtgtcagagccagggtcctccttaagtacctcccacactacacagacagtggcccttttgtgggcagcaaattcttgagccatgaaaggatgct

SEQ ID NO: 3148 - DNA, 120 bp, synthetic construct
  misc_feature 1..120: note = Artificially Synthesized Probe
  source 1..120: mol_type = other DNA
cgcagcccgcgtggcggggcccggaggcacgcagagctgtccttcgtgttcctcacggacggcgtcacgggcaacgacagtctgcacgagtcggcgcactccatgcgcaagcagaacgtg

SEQ ID NO: 3149 - DNA, 120 bp, synthetic construct
  misc_feature 1..120: note = Artificially Synthesized Probe
  source 1..120: mol_type = other DNA
ctacacctttctgctaagttttctcaagcccccaccctgtctttgagctgttgtctctgaactctcacagtgcctctccatgagaccataagctcctgtatgacagaagccatgttcttt

SEQ ID NO: 3150 - DNA, 120 bp, synthetic construct
  misc_feature 1..120: note = Artificially Synthesized Probe
  source 1..120: mol_type = other DNA
tcctgcctcagcctccagagtagctgggactacaggtgcccgccaccacgcccggctaattttttgtgtttttagtagagatggggtttcactgtgttagccaggatggtctcgatatcc

SEQ ID NO: 3151 - DNA, 120 bp, synthetic construct
  misc_feature 1..120: note = Artificially Synthesized Probe
  source 1..120: mol_type = other DNA
tctttgaactgttgctcccttggcctctctctttctggtcttatcctctcctttggttttgcttattacctccatatgtatctgaaacatagcttcccttctaagctgtatctatctaaa

SEQ ID NO: 3152 - DNA, 120 bp, synthetic construct
  misc_feature 1..120: note = Artificially Synthesized Probe
  source 1..120: mol_type = other DNA
tggcgcgatctctgctcactgcgagctccgcctcccgggttcatgccattctcctgcctcagcctcctgagtagctgggactacaggcacccgccaccatgcccggctaatttttttgta

SEQ ID NO: 3153 - DNA, 120 bp, synthetic construct
  misc_feature 1..120: note = Artificially Synthesized Probe
  source 1..120: mol_type = other DNA
tttgctaattggatattagggaaaaccacaggatggattaagacaagagagggaaggtaaggttctagacagcaggattatgtctgttagttggttttatgtcacttttctagccaagct

SEQ ID NO: 3154 - DNA, 120 bp, synthetic construct
  misc_feature 1..120: note = Artificially Synthesized Probe
  source 1..120: mol_type = other DNA
cctgcctcaaaggcaatgttcagcccttagggtttactctgagaagtatttacatgtctgtacccatgtctgacccctctaaaccagcgaatcctgagctttactttcaatttttttttg

SEQ ID NO: 3155 - DNA, 120 bp, synthetic construct
  misc_feature 1..120: note = Artificially Synthesized Probe
  source 1..120: mol_type = other DNA
gaacacagtcttgcctttcactgcagtttctgtcagtcttcgtgcagcttgcacataccccaaccccgtccttgatggacatcatgctctggttgttgtttctttaaaaataaatatgta

SEQ ID NO: 3156 - DNA, 120 bp, synthetic construct
  misc_feature 1..120: note = Artificially Synthesized Probe
  source 1..120: mol_type = other DNA
aatttcagttccctcaacagagtagcacctaggaacacattcatagtcccaaattgagggacattttgttccagatgagggattctctactaaactttctcttgtttcctagcttggaat

SEQ ID NO: 3157 - DNA, 120 bp, synthetic construct
  misc_feature 1..120: note = Artificially Synthesized Probe
  source 1..120: mol_type = other DNA
tgtaggcacattttatttgcccttttgaatcatagagttcctaaatgatatcttccagtatccctatgagactttacctagacataggggccattcagtatagagtgcagacagaccaag

SEQ ID NO: 3158 - DNA, 120 bp, synthetic construct
  misc_feature 1..120: note = Artificially Synthesized Probe
  source 1..120: mol_type = other DNA
aacaatgatacggttcttccttgatgccaggcaacatcccaaacaactttaattaatttatttaactctcccaccagccctatgagatagggcctgcgattatccccttttgtcagtaaa

SEQ ID NO: 3159 - DNA, 120 bp, synthetic construct
  misc_feature 1..120: note = Artificially Synthesized Probe
  source 1..120: mol_type = other DNA
attacaggtgtgaaccattgtgctccacccaaaatcacaggtattcttataccacattataacagcaaatgtcacaaaatactatattcattcatgattacttcaaaattgtattttttt

SEQ ID NO: 3160 - DNA, 120 bp, synthetic construct
  misc_feature 1..120: note = Artificially Synthesized Probe
  source 1..120: mol_type = other DNA
aaaaaagaaaaaaaaaaacattcagcgagaggtttctgggattcatcagactgctgaggagtttgtggcaccaaaaagattaagaatctttgcagtgtagattatgccaacaacggaggc

SEQ ID NO: 3161 - DNA, 120 bp, synthetic construct
  misc_feature 1..120: note = Artificially Synthesized Probe
  source 1..120: mol_type = other DNA
tcccttttattctgaacatccttactctggaaggcccatgcctctcatcacctgctgttcaggtccaggctagggttacaaactttagttcctgcaatgattttttttttaatttaaatt

SEQ ID NO: 3162 - DNA, 120 bp, synthetic construct
  misc_feature 1..120: note = Artificially Synthesized Probe
  source 1..120: mol_type = other DNA
gcctggcctccccaccttctttatgtcctgtctggaacacagcaccccgctctccccagtagagaagtgacgccactaactgggggttatcacatctttgtttttggttttggtttttgt

SEQ ID NO: 3163 - DNA, 120 bp, synthetic construct
  misc_feature 1..120: note = Artificially Synthesized Probe
  source 1..120: mol_type = other DNA
aggctggtctcgatctcctgacctcatgatctgcctgcctcggcctcccaaagtgctgagattacaggcgtgagccaccgtgcctggccaattttttgtattttttttttttttttgaga

SEQ ID NO: 3164 - DNA, 120 bp, synthetic construct
  misc_feature 1..120: note = Artificially Synthesized Probe
  source 1..120: mol_type = other DNA
acctcaaaaaaaaaaaaaaatgtgttccaactcttgatctgggctgacttgaacccctttcttcacagacttccaccgctgtcagaaggcaatgaccgctaaaggaggcgatatctctgt

SEQ ID NO: 3165 - DNA, 120 bp, synthetic construct
  misc_feature 1..120: note = Artificially Synthesized Probe
  source 1..120: mol_type = other DNA
atcacccaaagtgaatagttatcaggatttatccacggtttcttcatctaccccttttcgttttcttctttcctttgctgaagtattctaaagcaagtcccagacacgtcatttcacccc

SEQ ID NO: 3166 - DNA, 120 bp, synthetic construct
  misc_feature 1..120: note = Artificially Synthesized Probe
  source 1..120: mol_type = other DNA
ttgcagaacaatctatatagtaggagtcaatttgcaaggatggagtttttatggtgtggtatgtgtatgtaaataaagtaggcacataccgctggcacttattatgggccagctatgttg

SEQ ID NO: 3167 - DNA, 120 bp, synthetic construct
  misc_feature 1..120: note = Artificially Synthesized Probe
  source 1..120: mol_type = other DNA
cctgccttatagcataaaatgtgagcgtgtatgtatataaaaacgtttatgcttgtaactgcttgtgaggtccacaaagagtagagtgttactttcagggagtgttaacttgacataggc

SEQ ID NO: 3168 - DNA, 120 bp, synthetic construct
  misc_feature 1..120: note = Artificially Synthesized Probe
  source 1..120: mol_type = other DNA
ttttgcacttgactatgtatcttgaagatccatccattcatgccagaacataaatcagcctcgttttttttcacagctgcctgctattccatctcccctgtttggacaaacagcatagtg

SEQ ID NO: 3169 - DNA, 120 bp, synthetic construct
  misc_feature 1..120: note = Artificially Synthesized Probe
  source 1..120: mol_type = other DNA
agacgtggcgttgatcctagtgaaagggaacttggggatccgacaaacctgagttctggtcctagaaacttaactgtgaggcaacttagcacacctgagtctgtttgctcttctgtaaaa

SEQ ID NO: 3170 - DNA, 120 bp, synthetic construct
  misc_feature 1..120: note = Artificially Synthesized Probe
  source 1..120: mol_type = other DNA
ttaggcaccagaaagtaacctgtcaggtgcagagatgtgataaaacgtacaatcttatttttaggagagaagcatgcccagtaagttaagcaatctgttgtcaacgcttaggaatttgtg

SEQ ID NO: 3171 - DNA, 120 bp, synthetic construct
  misc_feature 1..120: note = Artificially Synthesized Probe
  source 1..120: mol_type = other DNA
tgcaagactgcaggatcaccgaaaagcgagaaatctcaactcctatgatcaggaaaggatgagtgaaaggtatatggctttactagcacttaaagagtgaatctagaaacagattgcata

SEQ ID NO: 3172 - DNA, 120 bp, synthetic construct
  misc_feature 1..120: note = Artificially Synthesized Probe
  source 1..120: mol_type = other DNA
tggtcctcatataggatctggtttggttatccctgctaggtaaaggtgcaagatagaagggaagttccaatttgctttctgtgctttgtggtgtattttggtttacatatgctcagatga

SEQ ID NO: 3173 - DNA, 120 bp, synthetic construct
  misc_feature 1..120: note = Artificially Synthesized Probe
  source 1..120: mol_type = other DNA
ggttgacagctcatattgcaacagacatgaaagtgatgatgtgttaattgtgcatatagcacagaatacatcaacttgctttgaatggaatatctgaaccaggagaatgtgaaagtgggc

SEQ ID NO: 3174 - DNA, 120 bp, synthetic construct
  misc_feature 1..120: note = Artificially Synthesized Probe
  source 1..120: mol_type = other DNA
taaggggaaggaacttctttccaagaatggttcattcaatttgctttgttactttaggtctcattccttcctctcgttgcaagctttgctgtgacatttaccctctctcaatacagcttt

SEQ ID NO: 3175 - DNA, 120 bp, synthetic construct
  misc_feature 1..120: note = Artificially Synthesized Probe
  source 1..120: mol_type = other DNA
agacaagggcttccttgcttaacaactgctggcttaataaagcaaatgtgtgatgatggatacaggctgtctgggaaaaataagtaagaaatatgagctttcttggagcatcatcctttg

SEQ ID NO: 3176 - DNA, 120 bp, synthetic construct
  misc_feature 1..120: note = Artificially Synthesized Probe
  source 1..120: mol_type = other DNA
taacaatcacaggcttcagggatcagaacatggatatctctgagaggtccttacttagcctaccacacctttccatatagattctcaaaattttagctgagcctaataagggagttcatt

SEQ ID NO: 3177 - DNA, 120 bp, synthetic construct
  misc_feature 1..120: note = Artificially Synthesized Probe
  source 1..120: mol_type = other DNA
agagaggaagccacagcacaggcacttactgattaactaaattttgaagctgtgaaatgcaccttatcctttagtgaaagatgatataaatagcttagttgccttcaaactggcagagac

SEQ ID NO: 3178 - DNA, 120 bp, synthetic construct
  misc_feature 1..120: note = Artificially Synthesized Probe
  source 1..120: mol_type = other DNA
gcaccccttggctattattgaagtgttctttttcttttttgatcacatctatgaagtatattggagagaaagagaaggtagaatgggaatttcaacagggtcacggtggctcactcctgt

SEQ ID NO: 3179 - DNA, 120 bp, synthetic construct
  misc_feature 1..120: note = Artificially Synthesized Probe
  source 1..120: mol_type = other DNA
gtgagtttcctcaaggtagcaaaatctgtggaaccatcagaactgcgtgtgttcctcagtaagctacaggcaggttgagaccttatgtactaaaaaaagtttttagtttactctacttgg

SEQ ID NO: 3180 - DNA, 120 bp, synthetic construct
  misc_feature 1..120: note = Artificially Synthesized Probe
  source 1..120: mol_type = other DNA
gaactcccgtttctgtctctgtcctcacatggccgtcttccctctgggtctgtgtcctcacatgctgttttcctgtctgtgtatggctgtgtcgaaagtgctctcttttaataaggacac

SEQ ID NO: 3181 - DNA, 120 bp, synthetic construct
  misc_feature 1..120: note = Artificially Synthesized Probe
  source 1..120: mol_type = other DNA
tattccctgcatgtgaatctgattatctcaaagtaaaaagttttttttttttttaaagttcctactaaatttccaaggggatgggcttcccctcagatcactaccccttttcagggagca

SEQ ID NO: 3182 - DNA, 120 bp, synthetic construct
  misc_feature 1..120: note = Artificially Synthesized Probe
  source 1..120: mol_type = other DNA
ctggctccccttacaataagtagcatggattttgtctctctgccttacttcctccaaacattctgaatgagaagtgttcaaaccactatttgttcaattgcttaatctactttgggacac

SEQ ID NO: 3183 - DNA, 120 bp, synthetic construct
  misc_feature 1..120: note = Artificially Synthesized Probe
  source 1..120: mol_type = other DNA
taaccatgactgttatttgacattgcttcattccttcatgtatagtactatcaagtttgaccctaccctcactatgactagtttcacccaaccatctatcacaacagagagtctaacgtg

SEQ ID NO: 3184 - DNA, 120 bp, synthetic construct
  misc_feature 1..120: note = Artificially Synthesized Probe
  source 1..120: mol_type = other DNA
ttgacctgtgtctttagaatgtaacattccttattttttgcctctagataccgactcattggttcctcgtctgccacatgcatcatctcaggtgatactgtcatttgggataatgaaaca

SEQ ID NO: 3185 - DNA, 120 bp, synthetic construct
  misc_feature 1..120: note = Artificially Synthesized Probe
  source 1..120: mol_type = other DNA
tacacctatgtagtgagggccaggctgaggctgagagaaatacagtgtataacatctttgtcttactcttctctttggataactggactcctttacttttcttcttggtatttaaaaatg

SEQ ID NO: 3186 - DNA, 120 bp, synthetic construct
  misc_feature 1..120: note = Artificially Synthesized Probe
  source 1..120: mol_type = other DNA
actttcagagtggaatggctgttgcttaacttctgcctctcaaatatcaggctaatttctcatgctataaccctagtccagaaccgtacagagaaagtaagtctggaaaacttaattcca

SEQ ID NO: 3187 - DNA, 120 bp, synthetic construct
  misc_feature 1..120: note = Artificially Synthesized Probe
  source 1..120: mol_type = other DNA
ttggcattatttcttctttaaaaataattcaccagaaaaggtatgtggcctggagtttacgttcttgggaagtttttttttttccaaccattttcctgtaccatgtagacttttggctga

SEQ ID NO: 3188 - DNA, 120 bp, synthetic construct
  misc_feature 1..120: note = Artificially Synthesized Probe
  source 1..120: mol_type = other DNA
cgtcactcagattaagatatagaacattatcagcaccccagaagccttcccgatgccctttcccagttatcttcccaaagaaaccactattctgatttataacactaatagttttgttgc

SEQ ID NO: 3189 - DNA, 120 bp, synthetic construct
  misc_feature 1..120: note = Artificially Synthesized Probe
  source 1..120: mol_type = other DNA
gcaatagatctaatatcatctattaaaaagactattccttgcatagtgcaatgcgacaccaccatgaccataagtcaggtgaccttatgagtggatctcattccagagaggttctgtttc

SEQ ID NO: 3190 - DNA, 120 bp, synthetic construct
  misc_feature 1..120: note = Artificially Synthesized Probe
  source 1..120: mol_type = other DNA
attgattgatgtttaaaagacaaacgctgaattcctagaataaacctatgttgcttgtgatgtgttatagatgattatcctatgtatgggggatatgcgtgtgtgtgtgtgcaggattgc

SEQ ID NO: 3191 - DNA, 120 bp, synthetic construct
  misc_feature 1..120: note = Artificially Synthesized Probe
  source 1..120: mol_type = other DNA
cacaaacttagtggcttcaaagaagagaaatttactctcttaacagtttggaggccagaaatccagttaagatgtcaataggattggttccatctgcaagctgttctgtgcctctctcca

SEQ ID NO: 3192 - DNA, 120 bp, synthetic construct
  misc_feature 1..120: note = Artificially Synthesized Probe
  source 1..120: mol_type = other DNA
ttgtacttttaccactctccaaacaacgcaagtaccgaaactattaatagttaattccatttatgtcctccccctctttttgtattgttgccatacgttttgcaaaaagaaaagcttcag

SEQ ID NO: 3193 - DNA, 120 bp, synthetic construct
  misc_feature 1..120: note = Artificially Synthesized Probe
  source 1..120: mol_type = other DNA
ctctgtgtgatcttcaggcgtgccatacccccagcccgtaataaaatctttactgccatcttgtgtttcttgtaatgactgaagaggttttctctatcataaagatcctaaatgaaaaca

SEQ ID NO: 3194 - DNA, 120 bp, synthetic construct
  misc_feature 1..120: note = Artificially Synthesized Probe
  source 1..120: mol_type = other DNA
ccaccgtgccaggcctgtatagccttttgaacctgtaatttaatgatgtcttgcatcagtcttggaaaattctcagttattaattcttcaaatgttgtttatgctcagttctctctctct

SEQ ID NO: 3195 - DNA, 120 bp, synthetic construct
  misc_feature 1..120: note = Artificially Synthesized Probe
  source 1..120: mol_type = other DNA
caagcccaaatacccagctctcaactggattctcatcttctcctagatcatggcccaggaatgcttcactagtttgttagctttctgatgctttaacagataaatatttttaattctcca

SEQ ID NO: 3196 - DNA, 120 bp, synthetic construct
  misc_feature 1..120: note = Artificially Synthesized Probe
  source 1..120: mol_type = other DNA
aatagctatagtttagtgactcatgagatttctgtcattcattatttaaactgactgttatttatcctgctcttcctttttccaggaattccttgtgggctaccccccaccatcaccaat

SEQ ID NO: 3197 - DNA, 120 bp, synthetic construct
  misc_feature 1..120: note = Artificially Synthesized Probe
  source 1..120: mol_type = other DNA
ttattaggtagttaccagttgttctatgtttgtctgtattgttttgcttgagatactgtcttgatctgtcactcacgttgaactgctgtggtgccatcatgacttacttcaacctccgcc

SEQ ID NO: 3198 - DNA, 120 bp, synthetic construct
  misc_feature 1..120: note = Artificially Synthesized Probe
  source 1..120: mol_type = other DNA
tgctttttaatttggtatatatgcctccaattggcagaacctaaccagagcccagctatcaaggaagatgaacaattgtagttttaaggcttcctttgctagctgtcaaaagacagtgca

SEQ ID NO: 3199 - DNA, 120 bp, synthetic construct
  misc_feature 1..120: note = Artificially Synthesized Probe
  source 1..120: mol_type = other DNA
tgtgaaatcttagttgcatactttagatgaaaaacaatgaattggagatacctctgttttagtcacagttgtgccacgtgtcagttctatgactgatggcaagacatcttccttgccctg

SEQ ID NO: 3200 - DNA, 120 bp, synthetic construct
  misc_feature 1..120: note = Artificially Synthesized Probe
  source 1..120: mol_type = other DNA
gggttgggaatcagtctaaaaaggggagatttggtgtggcacacacacacacaccttcagagagatgaactttcgaaagtatacctaggaagaaaggaaagaaacatatagaactaataa

SEQ ID NO: 3201 - DNA, 120 bp, synthetic construct
  misc_feature 1..120: note = Artificially Synthesized Probe
  source 1..120: mol_type = other DNA
ctaaggtcctaataatcctgaaattggggctgggccttagattgtgaactaagggttctcttggctgaaacagctcacactattcactcctattttcttctttagatttcaattaaaagg

SEQ ID NO: 3202 - DNA, 120 bp, synthetic construct
  misc_feature 1..120: note = Artificially Synthesized Probe
  source 1..120: mol_type = other DNA
tccccatgttgtttccactcagttggggaaagggacaagaaaaaaaataaatacgatgctatgaagatagtagagcaaagcatttaggcatgagggaaaagtgaggagcaacattagaca

SEQ ID NO: 3203 - DNA, 120 bp, synthetic construct
  misc_feature 1..120: note = Artificially Synthesized Probe
  source 1..120: mol_type = other DNA
attgcaaaaatgttctcccattctgtaggttgtctgttcactctgatggtagtttcttttgctgtgcagaagctctttagtttaattatatcccctttgtcaattttggcttttgttgcc

SEQ ID NO: 3204 - DNA, 120 bp, synthetic construct
  misc_feature 1..120: note = Artificially Synthesized Probe
  source 1..120: mol_type = other DNA
tcagcactctgtccccaggatcctgatgagtggctgacacaggacaagtgcttaattaatatatattgactaaatgaatgagcaacccttcaaaatggctatttttctttttcaaatgtt

SEQ ID NO: 3205 - DNA, 120 bp, synthetic construct
  misc_feature 1..120: note = Artificially Synthesized Probe
  source 1..120: mol_type = other DNA
atttccccacatcccaaatgggttcagaatatctaacccaggccctccatatttccgtaattacaatgtggtatttatttgtgcatttgccacaatggaatgccaaaccaatgatagatg

SEQ ID NO: 3206 - DNA, 120 bp, synthetic construct
  misc_feature 1..120: note = Artificially Synthesized Probe
  source 1..120: mol_type = other DNA
tatcacatgtctagataacctggtctggtcaagtcccaaagatgtctgtaaacgtgcgtaaacttgcgttggatctttcccatgtctgcaaaagcttcttatggaattatttcaaatgtg

SEQ ID NO: 3207 - DNA, 120 bp, synthetic construct
  misc_feature 1..120: note = Artificially Synthesized Probe
  source 1..120: mol_type = other DNA
aaatgaacaaagataggagaagattagggggaaaatctgtatccttgctggaaaccagggcagtgcacatataaagagtatgctgttcactggatgggaaggaaaaaaacttagaagtgt

SEQ ID NO: 3208 - DNA, 120 bp, synthetic construct
  misc_feature 1..120: note = Artificially Synthesized Probe
  source 1..120: mol_type = other DNA
ttggttcctgaggtttaaggaaagaagccctctccataacataaaggtccaaggtgaagcagccagtgctcatatagaagttgcagcaagttatctagaaaatctagctaagatcactga

SEQ ID NO: 3209 - DNA, 120 bp, synthetic construct
  misc_feature 1..120: note = Artificially Synthesized Probe
  source 1..120: mol_type = other DNA
gttgcttctcatgaatcagcagagaaagtggtttttttgaggtggagtgtcttcctggtgatgatgacatgagcattgtgaaaatgaccacaaaggatacagaatattacaaaaacttag

SEQ ID NO: 3210 - DNA, 120 bp, synthetic construct
  misc_feature 1..120: note = Artificially Synthesized Probe
  source 1..120: mol_type = other DNA
aaggaagtttgtggtgtccagcacatttgccagcataggcctcacagaccacaacacctagaatctgacaaaaattagaataaatccgatgtctccttttctctctttttttaagcattt

SEQ ID NO: 3211 - DNA, 120 bp, synthetic construct
  misc_feature 1..120: note = Artificially Synthesized Probe
  source 1..120: mol_type = other DNA
acaccacattgattctatattgtataagatatattgtataacactaaattgtagaagatagcacttctcttgagccaagctaatatgcacacctagaggctccaggtacacattaaagga

SEQ ID NO: 3212 - DNA, 120 bp, synthetic construct
  misc_feature 1..120: note = Artificially Synthesized Probe
  source 1..120: mol_type = other DNA
aaaaggaatagcaaggaatccatttttctcttccaccagaaataagctccctcatgtttgggtcaggtcactttattcattgctttctccacatcctcatcattaggcatcatgaaatca

SEQ ID NO: 3213 - DNA, 120 bp, synthetic construct
  misc_feature 1..120: note = Artificially Synthesized Probe
  source 1..120: mol_type = other DNA
ttccaccttcagctagaaatgcttttttattttttcttatctcaaggtctaattttttttaaactagtctttagctcacttaaacagtcccccaatttcatcctctgttgggtgaacacc

SEQ ID NO: 3214 - DNA, 120 bp, synthetic construct
  misc_feature 1..120: note = Artificially Synthesized Probe
  source 1..120: mol_type = other DNA
aagtggactctaataatacatggacacatttagtgaaataaacttaactgagtagagcagaacttataatattttaaaactgtaagaacatgtctgtacattagcaaatagtagatgaga

SEQ ID NO: 3215 - DNA, 120 bp, synthetic construct
  misc_feature 1..120: note = Artificially Synthesized Probe
  source 1..120: mol_type = other DNA
gagcaaattttctaagtagtgaacatgaaattcaggtgtgtagacatgcacatgtgctgaaattgagaagcaaagctcaacctgggcaagggatatgatgtttctttggggttcttataa

SEQ ID NO: 3216 - DNA, 120 bp, synthetic construct
  misc_feature 1..120: note = Artificially Synthesized Probe
  source 1..120: mol_type = other DNA
aacattctgagacagtaacttgcagacaaaactggattgcaagtccacctcactccagagccttggctttgctcatcagcattcagtcatgaaatcaaaacttactctagatactttcaa

SEQ ID NO: 3217 - DNA, 120 bp, synthetic construct
  misc_feature 1..120: note = Artificially Synthesized Probe
  source 1..120: mol_type = other DNA
gagatccaaatgtgttttgatttcccaagatcagatcaactacattaagagagagcctgagatgccgttacaatatgttgtgtgaaattacactctcattatggtgacagtaggtctttc

SEQ ID NO: 3218 - DNA, 120 bp, synthetic construct
  misc_feature 1..120: note = Artificially Synthesized Probe
  source 1..120: mol_type = other DNA
ggttgggaatcagtctaaaaaggggagatttggtgtggcacacacacacacaccttcagagagatgaactttcgaaagtatacctaggaagaaaggaaagaaacatatagaactaataac

SEQ ID NO: 3219 - DNA, 120 bp, synthetic construct
  misc_feature 1..120: note = Artificially Synthesized Probe
  source 1..120: mol_type = other DNA
aatttgtaataggactgaaaatgtaaaaatcagcattttttaaaaaaatccagccatatatcatctggttaatcatgggctctgggctctgagctggggtcctgatggctgctgttaata

SEQ ID NO: 3220 - DNA, 120 bp, synthetic construct
  misc_feature 1..120: note = Artificially Synthesized Probe
  source 1..120: mol_type = other DNA
tggttgtgaatcaaatgtatacatcacctgtctttggaaccatctgatctgtctctgtccttctgtattctgtgttctagtgcgataaatcctatggtagcatgattctaggtcaggaga

SEQ ID NO: 3221 - DNA, 120 bp, synthetic construct
  misc_feature 1..120: note = Artificially Synthesized Probe
  source 1..120: mol_type = other DNA
tgtccctaaaaaggacatgaactcatcaatttttatggctgcatagtattccatggtgtatatgtgccacattttcttaatccagtctatcattgatggacatttgggttggttccaagt

SEQ ID NO: 3222 - DNA, 120 bp, synthetic construct
  misc_feature 1..120: note = Artificially Synthesized Probe
  source 1..120: mol_type = other DNA
gacttggcaatgcaggctttttaaataatgtcatttttaaaaaatgagccccatatgttcaataatgagtagactactgatttctcctagtctccccatttataatttccccaatagaag

SEQ ID NO: 3223 - DNA, 120 bp, synthetic construct
  misc_feature 1..120: note = Artificially Synthesized Probe
  source 1..120: mol_type = other DNA
cctcagcactctgtccccaggatcctgatgagtggctgacacaggacaagtgcttaattaatatatattgactaaatgaatgagcaacccttcaaaatggctatttttctttttcaaatg

SEQ ID NO: 3224 - DNA, 120 bp, synthetic construct
  misc_feature 1..120: note = Artificially Synthesized Probe
  source 1..120: mol_type = other DNA
accagacaggaaaggtggaacctgggcagaaaaactctttctggcttcctaaaaatgtgaaaaattaaatgggagctatctttacattaaattatatgagcattagctgagcgtggtggc

SEQ ID NO: 3225 - DNA, 120 bp, synthetic construct
  misc_feature 1..120: note = Artificially Synthesized Probe
  source 1..120: mol_type = other DNA
tctatcacatgtctagataacctggtctggtcaagtcccaaagatgtctgtaaacgtgcgtaaacttgcgttggatctttcccatgtctgcaaaagcttcttatggaattatttcaaatg

SEQ ID NO: 3226 - DNA, 120 bp, synthetic construct
  misc_feature 1..120: note = Artificially Synthesized Probe
  source 1..120: mol_type = other DNA
tgttcgtcggcatcatttatccaacagcgtgtgttgacttcgtgtctctgtgtagcattttgattattctcacagtatcccagatgttttcattattatcatgtctgtgatagtgatctg

SEQ ID NO: 3227 - DNA, 120 bp, synthetic construct
  misc_feature 1..120: note = Artificially Synthesized Probe
  source 1..120: mol_type = other DNA
tgcggcatagtttactgaatattttaagcccactgttgagatctagtgctcagaaaaacagattcctttcaaaatattactgctcattgacattgcacctaagcagccaagagctctaat

SEQ ID NO: 3228 - DNA, 120 bp, synthetic construct
  misc_feature 1..120: note = Artificially Synthesized Probe
  source 1..120: mol_type = other DNA
cttccttggcatgtggcagcagaactccaatttctgtctctgtcctcatatggccatcttccctctgggtctgtgtcctcatatgctgttctctctgtgcatgtctgtttccaaagtttt

SEQ ID NO: 3229 - DNA, 120 bp, synthetic construct
  misc_feature 1..120: note = Artificially Synthesized Probe
  source 1..120: mol_type = other DNA
tttcctgactgtaccctactcatcttgcattgctgaataagtgaggaacctctctatggcatgaagcagaaaaccattgagcttatgagaagaaacaggaaatacatgtaaaagagacca

SEQ ID NO: 3230 - DNA, 120 bp, synthetic construct
  misc_feature 1..120: note = Artificially Synthesized Probe
  source 1..120: mol_type = other DNA
agatatattgtataacactaaattgtagaagatagcacttctcttgagccaagctaatatgcacacctagaggctccaggtacacattaaaggataagcaaagacacaaaaattgtacca

SEQ ID NO: 3231 - DNA, 120 bp, synthetic construct
  misc_feature 1..120: note = Artificially Synthesized Probe
  source 1..120: mol_type = other DNA
tggtgccagttacagtccgcaatgaagcgaagatattaagaagcaaagtgggccaggagaaattagagcagaaatatctctttcaatagtgagagaataggaaaaagaagtagaaaagct

SEQ ID NO: 3232 - DNA, 120 bp, synthetic construct
  misc_feature 1..120: note = Artificially Synthesized Probe
  source 1..120: mol_type = other DNA
aggaatataaaatgtgtataatcctgggtttagtgatggtgtgaggaaatcagcaatttcaaacccagttggtgggaggataagtgggaacaaactttgtagaaggccaataaactggct

SEQ ID NO: 3233 - DNA, 120 bp, synthetic construct
  misc_feature 1..120: note = Artificially Synthesized Probe
  source 1..120: mol_type = other DNA
aatagtagatgagaatagtattttcaatatttacttctggtaatttggaattaaaaaaaaaacttttgggaaaatttacaataaagtatgattttaacaaaccaggctaggcgtggtggc

SEQ ID NO: 3234 - DNA, 120 bp, synthetic construct
  misc_feature 1..120: note = Artificially Synthesized Probe
  source 1..120: mol_type = other DNA
cgaggagcaaattttctaagtagtgaacatgaaattcaggtgtgtagacatgtacatgtgctgaaattgagaagcaaagctcaacctgggcaagggatatgatgtttctttggggttctt

SEQ ID NO: 3235 - DNA, 120 bp, synthetic construct
  misc_feature 1..120: note = Artificially Synthesized Probe
  source 1..120: mol_type = other DNA
ttctgccatcatcctgctttttaatttggtatatatgcctccaattggcagaacctaaccagagcctagctatcaaggaagatgaacgatttatttttaaggcctccattgttagctgtc

SEQ ID NO: 3236 - DNA, 120 bp, synthetic construct
  misc_feature 1..120: note = Artificially Synthesized Probe
  source 1..120: mol_type = other DNA
ttgatttcccaagatcagatcaactacattaagagagagcctgagatgccgttacaatatgttgtgtgaaattacactctcattatggtgacagtaggtctttcagattttgttcgacag

SEQ ID NO: 3237 - DNA, 120 bp, synthetic construct
  misc_feature 1..120: note = Artificially Synthesized Probe
  source 1..120: mol_type = other DNA
cgtttttctttatctccagtgaaatcctgtgatgacttcatgggccaacttcttaatggccgtgtgctatttccagtaaatctccagcttggagcaaaagtggattttgtttgtgatgaa

SEQ ID NO: 3238 - DNA, 120 bp, synthetic construct
  misc_feature 1..120: note = Artificially Synthesized Probe
  source 1..120: mol_type = other DNA
cacccagtaagagttaggagggcatcagggtccaaaagactgagaattttcgacaattgcatacaaaaatcatgtcctctcttctttcctttttcccctagaatattcatgcttactctt

SEQ ID NO: 3239 - DNA, 120 bp, synthetic construct
  misc_feature 1..120: note = Artificially Synthesized Probe
  source 1..120: mol_type = other DNA
catactttgtgcctgatgttcatctagccactggagttatatcaatgaacaagatggatgaattccctgtccccatgttgtttctacttaggtggggagagggacaagaaaaaaaataaa

SEQ ID NO: 3240 - DNA, 120 bp, synthetic construct
  misc_feature 1..120: note = Artificially Synthesized Probe
  source 1..120: mol_type = other DNA
agcacacatatatacatttgagaaatatttcctaagaatgtaggctccttcctcagcgctgtgtccccaggatcctgatgaagggctgacacaggataagtgctcaattaatatatattg

SEQ ID NO: 3241 - DNA, 120 bp, synthetic construct
  misc_feature 1..120: note = Artificially Synthesized Probe
  source 1..120: mol_type = other DNA
tcatttccccacatccctaatgggttcagaatatctaacccagcccctccatatttccataattacagtgtagtatttatttgtatgtatgcatttgccacaatggaatgccaaaccaat

SEQ ID NO: 3242 - DNA, 120 bp, synthetic construct
  misc_feature 1..120: note = Artificially Synthesized Probe
  source 1..120: mol_type = other DNA
gtctggtcaagtcccaaagatgtctgtaaacgtgcgtaaacttgcgttggatctttcccatgtctgcaaaagcttcttatggaattatttcaaatgtgggatatgagaaaccttttctga

SEQ ID NO: 3243 - DNA, 120 bp, synthetic construct
  misc_feature 1..120: note = Artificially Synthesized Probe
  source 1..120: mol_type = other DNA
attagggggaaaatctgtatccttgctggaaaccagggcagtgcacatataaagagtatgctgttcactggatgggaaagaaaaaaacttagaagtgtagtagtcaaagcacacaaacaa

SEQ ID NO: 3244 - DNA, 120 bp, synthetic construct
  misc_feature 1..120: note = Artificially Synthesized Probe
  source 1..120: mol_type = other DNA
ttaggagctaatgccgctggtgactttgagttgaagccaatgttcaccgaccattctaaaaatcctagggcccttaagcattaagttaaatataccttgcctgtgtctataaatggaaga

SEQ ID NO: 3245 - DNA, 120 bp, synthetic construct
  misc_feature 1..120: note = Artificially Synthesized Probe
  source 1..120: mol_type = other DNA
tgcttctcatgaatcagcagagaaagtggtttttttgaggtggagtgtcttcctggtgatgatgacatgagcattgtgaaaatgaccacaaaggatacagaatattacaaaaacttaggt

SEQ ID NO: 3246 - DNA, 120 bp, synthetic construct
  misc_feature 1..120: note = Artificially Synthesized Probe
  source 1..120: mol_type = other DNA
ggtgtccagcacacttgccagcataggcctcacagaccacagcacctagaatctgacaaaaattagaataaatccgatgtctccttttctctcttttttttaagcatttttaaatgcaat

SEQ ID NO: 3247 - DNA, 120 bp, synthetic construct
  misc_feature 1..120: note = Artificially Synthesized Probe
  source 1..120: mol_type = other DNA
tgtagaagatagcatttctcttgagccaagctaatattcacacctagaggctccagatacacattaaaggataagaaagacacaaaaattgtaccatttaagtatgtttcccaggtaatt

SEQ ID NO: 3248 - DNA, 120 bp, synthetic construct
  misc_feature 1..120: note = Artificially Synthesized Probe
  source 1..120: mol_type = other DNA
cgtgccagttgcagtccacagtgaagccaagatattaagaagcaatgtgggccaggagaagttagagcagaaatatctctttcaataatgaaagaataagaaaaagaaatagaagagctg

SEQ ID NO: 3249 - DNA, 120 bp, synthetic construct
  misc_feature 1..120: note = Artificially Synthesized Probe
  source 1..120: mol_type = other DNA
tttagtgatggtgtgaggaaatcagcaatttcaaacccagttggtggcaggataagtgggaacaaactttgtagaaggccaataaactggctgggcactgccctacagtagagtaggaca

SEQ ID NO: 3250 - DNA, 120 bp, synthetic construct
  misc_feature 1..120: note = Artificially Synthesized Probe
  source 1..120: mol_type = other DNA
aacacatggactctaataatacatggatacatttagtgaaataaggttaactgagtagagcagcactcataacattttaaaactataagaacatgtctgtacattagcaaatattagatg

SEQ ID NO: 3251 - DNA, 120 bp, synthetic construct
  misc_feature 1..120: note = Artificially Synthesized Probe
  source 1..120: mol_type = other DNA
tgcacccatgcatatgtgtcttcatttggaaagcaagaccttaattagccaagaaaaaagctattttggactcacctattatttgattctcagggcaaagtaccagctgcaatctctctc

SEQ ID NO: 3252 - DNA, 120 bp, synthetic construct
  misc_feature 1..120: note = Artificially Synthesized Probe
  source 1..120: mol_type = other DNA
aggttgatgttaaaatgggttctgatgccctaagcatgaacgaacaggactataaataaaggcagatgttgagtcaaatactctccaaataatatgccctctcgtgacaaaggactgtct

SEQ ID NO: 3253 - DNA, 120 bp, synthetic construct
  misc_feature 1..120: note = Artificially Synthesized Probe
  source 1..120: mol_type = other DNA
caaatcgggattaccttcctaggaaatatgtagatggagaatccaccaatactgataacttcacattggatagccagagctaggagaaaatacctcatgccctgtagatttacaagtgaa

SEQ ID NO: 3254 - DNA, 120 bp, synthetic construct
  misc_feature 1..120: note = Artificially Synthesized Probe
  source 1..120: mol_type = other DNA
gtaagtagaaatattctaaattccaattacatgtgattgacagctctgccagctattattgctttgtcctcactgaaagctacactttttccaaaatgatttggcttctgagcccgtcaa

SEQ ID NO: 3255 - DNA, 120 bp, synthetic construct
  misc_feature 1..120: note = Artificially Synthesized Probe
  source 1..120: mol_type = other DNA
gaaatgttcaaatgatactaagtgttattaagaaaatgctcttaattgagtcagtgctgtcaattgagaatgtagctgaggacccaaaaggcaagtgtagcccagcaaacctctgggtgt

SEQ ID NO: 3256 - DNA, 120 bp, synthetic construct
  misc_feature 1..120: note = Artificially Synthesized Probe
  source 1..120: mol_type = other DNA
gaggtaacaagtggaagtttcagtggagtgctggcaaacactgattggaatgaattctagggagaatgaatgggaggaactgtaacagatcatagacaatattttagaggagttttcatg

SEQ ID NO: 3257 - DNA, 120 bp, synthetic construct
  misc_feature 1..120: note = Artificially Synthesized Probe
  source 1..120: mol_type = other DNA
ctccatcttagcagaggcctaatacatttattttgcagtttctactttccttaagaagaaaagtacgcttaattggcaacacagtcacagtatgacaactgtagaatcaccttggattat

SEQ ID NO: 3258 - DNA, 120 bp, synthetic construct
  misc_feature 1..120: note = Artificially Synthesized Probe
  source 1..120: mol_type = other DNA
aggttttaaactagtgttctgctgcatgggctaagtaaccaaaaagactctctttgtcttgacttaaagtttgtccacttgtcatcttgcctccaggctgtcttaatctttgtacttgaa

SEQ ID NO: 3259 - DNA, 120 bp, synthetic construct
  misc_feature 1..120: note = Artificially Synthesized Probe
  source 1..120: mol_type = other DNA
atttcacagttttgtaggctgaaattgagatgttggcagaggtattttcccatcttctaaggctctggaaaataaccaattctttacttcttccatctgctgctggttcctgggattcct

SEQ ID NO: 3260 - DNA, 120 bp, synthetic construct
  misc_feature 1..120: note = Artificially Synthesized Probe
  source 1..120: mol_type = other DNA
tttgctattcttgtaagtctctttgtttctgtgatccacctatcagcttaattgaagagaaagaggaggtagggtggaagtctctctgctaactttgatattcctgtggtttttctctcc

SEQ ID NO: 3261 - DNA, 120 bp, synthetic construct
  misc_feature 1..120: note = Artificially Synthesized Probe
  source 1..120: mol_type = other DNA
gattacaggcgagagcccatacataacctttattaggaggtgcaagatagtctttttcaaagttgtgttcgtagctacatgattctgaagttgtctgccaagtttcctcaaagcagtcaa

SEQ ID NO: 3262 - DNA, 120 bp, synthetic construct
  misc_feature 1..120: note = Artificially Synthesized Probe
  source 1..120: mol_type = other DNA
gcttacaaataaggaaaaggaaaaaaggtagttgaaccatgtaaacctccttaactgagatcagtaggtaatacagttgagttggaggaccctgaagcagagtttgggagggtaaacatt

SEQ ID NO: 3263 - DNA, 120 bp, synthetic construct
  misc_feature 1..120: note = Artificially Synthesized Probe
  source 1..120: mol_type = other DNA
tcaacattcttaaagaaaagaattttcaacccagaatttcatatctagccaaactaagcttcataagtgaaggagaaataaaatcctttacagacaagcaaatgctgagggattttgtca

SEQ ID NO: 3264 - DNA, 120 bp, synthetic construct
  misc_feature 1..120: note = Artificially Synthesized Probe
  source 1..120: mol_type = other DNA
caaaactgcacaactacatggaaactgaacagcctgctctgaatgactactgggtaaataacgaaatgaaagcagaaataagtaagttctttgaaaccgatgaaaacaaagacacaatgt

SEQ ID NO: 3265 - DNA, 120 bp, synthetic construct
  misc_feature 1..120: note = Artificially Synthesized Probe
  source 1..120: mol_type = other DNA
tcaataaacgtaatccatcacattaacagaaccaatgataaaaaccacatgattatctcaatagatgcagacaagggcttcgataaaattcaacagcccttcatgctaaaaactctcaat

SEQ ID NO: 3266 - DNA, 120 bp, synthetic construct
  misc_feature 1..120: note = Artificially Synthesized Probe
  source 1..120: mol_type = other DNA
taatgccacacatctacaaccatctgatctttgatgaacctgacaaaaacaagcaatggggaaaggattccctatttaataaatggtgttgggaaaactggctagccagatgcagaaaac

SEQ ID NO: 3267 - DNA, 120 bp, synthetic construct
  misc_feature 1..120: note = Artificially Synthesized Probe
  source 1..120: mol_type = other DNA
gactgtgtactcatttttggttgccatgataaattcagagaggaaaaacatgatatatattaaattttactgcaacaactaactgccccttgtcatcagcctattctgtcactagagtga

SEQ ID NO: 3268 - DNA, 120 bp, synthetic construct
  misc_feature 1..120: note = Artificially Synthesized Probe
  source 1..120: mol_type = other DNA
ggagcctgcccccaacccccggaaaaaaaaaaaaaaaacaccaaagggataatgaagacaagattgaattctccagaattcatcaaggaccagacttgaaatgacacatatatacacaca

SEQ ID NO: 3269 - DNA, 120 bp, synthetic construct
  misc_feature 1..120: note = Artificially Synthesized Probe
  source 1..120: mol_type = other DNA
gggcgaaaccacttggtccataaaacaaaagaggggtgagagaaacaagagctagcaagctttctgtctctcttttgggaaactagcattattacgttaaagtgaattaatacatgtatt

SEQ ID NO: 3270 - DNA, 120 bp, synthetic construct
  misc_feature 1..120: note = Artificially Synthesized Probe
  source 1..120: mol_type = other DNA
cttaggaatcaatttaatcaaggaggcacaagacctgtgcactgaaaactcagtaactgaaaatgagcaaatgatgtgatagacatgtctccaagggaaatatacaaatgcccaataaac

SEQ ID NO: 3271 - DNA, 120 bp, synthetic construct
  misc_feature 1..120: note = Artificially Synthesized Probe
  source 1..120: mol_type = other DNA
gtggaaggagagaatagggagttacaactcaatacatccagtttctcattgggatggtgaaaatttttggaactaagcagtgataatggttgtataatgttgtgaatgtcattgatgcca

SEQ ID NO: 3272 - DNA, 120 bp, synthetic construct
  misc_feature 1..120: note = Artificially Synthesized Probe
  source 1..120: mol_type = other DNA
tcagggagaaagaggatggtcaccatcccaaccagattggccattagatctatgtatcaacagagtgacatacgggagaattaaaattctagtatgcaaaaatacaccgtatgttaacag

SEQ ID NO: 3273 - DNA, 120 bp, synthetic construct
  misc_feature 1..120: note = Artificially Synthesized Probe
  source 1..120: mol_type = other DNA
aaatacgtgctatagaacaaatttggcctgtgagccatagggtgacaatctccggttagatgaagggattgagagcattatttttcttcaattcttgtcattatgcaaagtcagagaatt

SEQ ID NO: 3274 - DNA, 120 bp, synthetic construct
  misc_feature 1..120: note = Artificially Synthesized Probe
  source 1..120: mol_type = other DNA
ttaaaactatccatgaaatgtaccatgtcagaagaaaaatacaatttaccaggtgtagtttaaaataggcagaattgctgataaacccatatctgtttgagtccatattttcaattcttt

SEQ ID NO: 3275 - DNA, 120 bp, synthetic construct
  misc_feature 1..120: note = Artificially Synthesized Probe
  source 1..120: mol_type = other DNA
ggacagctggcctctcccagaatgagcatctcaaaaagagaagaaaacattgcagtgctttttgtggttagcctctgaagttgcacactatatcatttccactttattctaatcattaga

SEQ ID NO: 3276 - DNA, 120 bp, synthetic construct
  misc_feature 1..120: note = Artificially Synthesized Probe
  source 1..120: mol_type = other DNA
ggcacaaatatgttgtagtgtaattatgttgtaatttttcctgacctgatgtcccacgtctgtaaaattcttttattgaagcctaggctctttccctaggactccctgtctggaatcata

SEQ ID NO: 3277 - DNA, 120 bp, synthetic construct
  misc_feature 1..120: note = Artificially Synthesized Probe
  source 1..120: mol_type = other DNA
ctttcagtacatattgccaaagtgccctccactaaactttgaccatgacctacggagtgagtcacaacagtgactctttctttgagtttatattactgctaggttttgtcaatttgccaa

SEQ ID NO: 3278 - DNA, 120 bp, synthetic construct
  misc_feature 1..120: note = Artificially Synthesized Probe
  source 1..120: mol_type = other DNA
aaaaatattcactgtgtttttttcagccatacataggctggaaccttcttcacattttggctccaacaatctagcttagtcacagcgagcacatctaaaacaacctctaggaggccaaaa

SEQ ID NO: 3279 - DNA, 120 bp, synthetic construct
  misc_feature 1..120: note = Artificially Synthesized Probe
  source 1..120: mol_type = other DNA
ccagttaaaaatagagggttccattactaatgaaggagaggaaagtggatactagggatggcaccagtagtctttgctacaaatggttactgccctgatcacatttcttacataatcaag

SEQ ID NO: 3280 - DNA, 120 bp, synthetic construct
  misc_feature 1..120: note = Artificially Synthesized Probe
  source 1..120: mol_type = other DNA
tctatcctttgctttaggtttcgactcattggttccccatctactacttgtctcgtctcaggcaataatgtcacatgggataagaaggcacctatttgtgagagtaagttgaaatacttt

SEQ ID NO: 3281 - DNA, 120 bp, synthetic construct
  misc_feature 1..120: note = Artificially Synthesized Probe
  source 1..120: mol_type = other DNA
tggctatcagtttttcggaaaggtaaaaaagtgcaccaggaggaattaaaggttgagatgcctcatccaagtggaaaaagtacatctatgtagctacatgactgattattattcagccac

SEQ ID NO: 3282 - DNA, 120 bp, synthetic construct
  misc_feature 1..120: note = Artificially Synthesized Probe
  source 1..120: mol_type = other DNA
aagctgttttaccatactcttccttctctcagtcatatcttgtgagccacctccaaccatatccaatggagacttctacagcaacaatagaacatcttttcacaatggaacggtggtaac

SEQ ID NO: 3283 - DNA, 120 bp, synthetic construct
  misc_feature 1..120: note = Artificially Synthesized Probe
  source 1..120: mol_type = other DNA
gtggggcagtaggcaagtgagccatgaggaccaaaatgagagcatcaaatcaaaaaggccttggacttcaacttcaactttttctcattataattgaaaagactgaagctcagaaaaagt

SEQ ID NO: 3284 - DNA, 120 bp, synthetic construct
  misc_feature 1..120: note = Artificially Synthesized Probe
  source 1..120: mol_type = other DNA
ctgtgctccataaccagtagttgaaagcaagaggaatatgctgccttatagtctttggaacatgtttcagtagaaaaaacacagacaaggtgttggagagactttgattctagtcacagt

SEQ ID NO: 3285 - DNA, 120 bp, synthetic construct
  misc_feature 1..120: note = Artificially Synthesized Probe
  source 1..120: mol_type = other DNA
tagggactaagtggcaccactttcagaaggcaatgagaaaatggcacatacagctcaatgtcaggtacaaacctaaatacagtcactgatcttgagtacacagttggaacttgaaatgaa

SEQ ID NO: 3286 - DNA, 120 bp, synthetic construct
  misc_feature 1..120: note = Artificially Synthesized Probe
  source 1..120: mol_type = other DNA
tattgagtgacaaaacagcttctcagcggagacgagacacgagggtggaccccagatgaagtcagggggtcattctctctctcagcgtggctggttctggggcttttatggacacagaat

SEQ ID NO: 3287 - DNA, 120 bp, synthetic construct
  misc_feature 1..120: note = Artificially Synthesized Probe
  source 1..120: mol_type = other DNA
tgaagaattcagatccctaatgaactaagacttttagctgggcctgaacctaagacctaaatgatagtcgaggaggaaatggtagtgaggaagctgagcatctattagcgaagaaatcaa

SEQ ID NO: 3288 - DNA, 120 bp, synthetic construct
  misc_feature 1..120: note = Artificially Synthesized Probe
  source 1..120: mol_type = other DNA
catgtgccaggactttccatgtgtagaaaaagcaatgaatagtgaatgaatagtgaagacacctccctactttcctgggatgtattttcttgttgggaagcagactatgaacaaggaaat

SEQ ID NO: 3289 - DNA, 120 bp, synthetic construct
  misc_feature 1..120: note = Artificially Synthesized Probe
  source 1..120: mol_type = other DNA
tttccaaattcattgtgaacataggtacctgagtggtccaggaacactgtctttgggcttttgcaataaactgtaatttaggtctcacttcagttagttgcctctcaacaaaagccttac

SEQ ID NO: 3290 - DNA, 120 bp, synthetic construct
  misc_feature 1..120: note = Artificially Synthesized Probe
  source 1..120: mol_type = other DNA
ggatttatactttttatgttgtttccaagggtttgttcaagccactgactatgtttgtttgatccttcacctcaacattaacaaagggaactcaggaggccctggagaagcagagtttaa

SEQ ID NO: 3291 - DNA, 120 bp, synthetic construct
  misc_feature 1..120: note = Artificially Synthesized Probe
  source 1..120: mol_type = other DNA
ggagccaattggatcattattgcaaaggtgacttatttcttggtattccttattcttgctgggttgtatggaatgcatgaggcttgtaaggctgagagacattgaaatgagcttaatgaa

SEQ ID NO: 3292 - DNA, 120 bp, synthetic construct
  misc_feature 1..120: note = Artificially Synthesized Probe
  source 1..120: mol_type = other DNA
acttctttgttctatgtgcagaaattggccagaattatgcatttaataaagagcagagtgccagtatttgttgtgaagccagacagaattaacatggtactcctgttccctcacagcgtg

SEQ ID NO: 3293 - DNA, 120 bp, synthetic construct
  misc_feature 1..120: note = Artificially Synthesized Probe
  source 1..120: mol_type = other DNA
tctcatacttctcactgcagctctgcaccttttttgtctatatcactttgtggttgcatgagccacacagtaatgatttatttacagcctacgagccttacaagaaatgttttcagcatg

SEQ ID NO: 3294 - DNA, 120 bp, synthetic construct
  misc_feature 1..120: note = Artificially Synthesized Probe
  source 1..120: mol_type = other DNA
tccattgcactctggtctcggtgacaagagcaaaacattttttaaaaattgtccattaaattaacaataaaaaggttgttaggtgaacacccaatacaaagcaaggatgtgatgaaactg

SEQ ID NO: 3295 - DNA, 120 bp, synthetic construct
  misc_feature 1..120: note = Artificially Synthesized Probe
  source 1..120: mol_type = other DNA
ttcatcagtgtcaaaaattctttatttgaatgtggtgggagaatgcaacttcttctttcagttgtaacctggagtatgcttccagatggtgatcctgctcatttgcacaaatagaaagcc

SEQ ID NO: 3296 - DNA, 120 bp, synthetic construct
  misc_feature 1..120: note = Artificially Synthesized Probe
  source 1..120: mol_type = other DNA
agcacagaaaagggtaagtatagccatattatcccaagaaatgtaaactgtacttaccccctcttggaagtcaaaagaaagtaaaagacaaacaaacccattgctacataaacagatgtg

SEQ ID NO: 3297 - DNA, 120 bp, synthetic construct
  misc_feature 1..120: note = Artificially Synthesized Probe
  source 1..120: mol_type = other DNA
aagaaacgtctttgacagggaagagaacctacacagcttttgtactggttgattgaattataacaacctcaatgaggccagaatcaataatatcaatgttatatggttgatgagcaagtt

SEQ ID NO: 3298 - DNA, 120 bp, synthetic construct
  misc_feature 1..120: note = Artificially Synthesized Probe
  source 1..120: mol_type = other DNA
catttcttcatgttttccatctcgtaaaacctgcctcctatttttttcatattctttaaagtgtaatgtccatggcacaaccattctctctctgaccagtggctaccagaaatgtggcag

SEQ ID NO: 3299 - DNA, 120 bp, synthetic construct
  misc_feature 1..120: note = Artificially Synthesized Probe
  source 1..120: mol_type = other DNA
aataacacatagctaaaactgggaaaaagaagtaataaacttaaataatcagaaggcagaggtcccttctttcggaaggagttgggctgattaatcatgcagtcatacctccttgagtgg

SEQ ID NO: 3300 - DNA, 120 bp, synthetic construct
  misc_feature 1..120: note = Artificially Synthesized Probe
  source 1..120: mol_type = other DNA
tagagaaatagaaggaatacacacacagaaatgatctcaccttctttaaaatgctcctcaaggaggtctactttaactatcctagtaaagatgacatgaccccacccccacattcctagt

SEQ ID NO: 3301 - DNA, 120 bp, synthetic construct
  misc_feature 1..120: note = Artificially Synthesized Probe
  source 1..120: mol_type = other DNA
ctcaccatccctgctccctggactatgatcccctgtgagcagggaccacctatatccacccaaagcaatttttatttaatgattttttaatctctacttgtacagcagtcaaaattaata

SEQ ID NO: 3302 - DNA, 120 bp, synthetic construct
  misc_feature 1..120: note = Artificially Synthesized Probe
  source 1..120: mol_type = other DNA
cctcgtacccactcccatttctacacaaaacagccttgtacacagtcaaaatttcaaagtttccattgttgtgatgtttagaatgataaaatacttaaggccatcctctgtgaagtctcc

SEQ ID NO: 3303 - DNA, 120 bp, synthetic construct
  misc_feature 1..120: note = Artificially Synthesized Probe
  source 1..120: mol_type = other DNA
ctaaccgtggatattgcttgtacagaaaacagaacacatatcttcactataggagaaaaaggaagcctcgtgtaacactgcagtgcaaagtcattcatgttgtgcagcttaagtgtcaaa

SEQ ID NO: 3304 - DNA, 120 bp, synthetic construct
  misc_feature 1..120: note = Artificially Synthesized Probe
  source 1..120: mol_type = other DNA
ctcattcccttgggcttattaaatacctaacctttcattctacctattcaaagcaggcttactgcaagctgttgtgcagtacacattgctaaagatttggggtgaaaagggaaattatac

SEQ ID NO: 3305 - DNA, 120 bp, synthetic construct
  misc_feature 1..120: note = Artificially Synthesized Probe
  source 1..120: mol_type = other DNA
gtttatctggcctgatccttctcaaatgggcatatgtatacactgggggatacatggctaatgctaatataccaaggggatataaaaatcataagatgaaaatggcatggtttcctagag

SEQ ID NO: 3306 - DNA, 120 bp, synthetic construct
  misc_feature 1..120: note = Artificially Synthesized Probe
  source 1..120: mol_type = other DNA
aaacacttttccgcctttctttctatctaaattccctgaacccagctccagctctgaattcaatcaaccaagatgctctcccaaacaactctagtccaaaatgatatctctctttgaaac

SEQ ID NO: 3307 - DNA, 120 bp, synthetic construct
  misc_feature 1..120: note = Artificially Synthesized Probe
  source 1..120: mol_type = other DNA
ttaagattagaattttgaccacagtgttccatgggaacaaagtgaatcatctgtggcaaaatatgctagtcaagaagtgagttagaatctgtgccaagcgttaagaccttgtgcacccag

SEQ ID NO: 3308 - DNA, 120 bp, synthetic construct
  misc_feature 1..120: note = Artificially Synthesized Probe
  source 1..120: mol_type = other DNA
tctctgttttctactaatgtctccattttcgccatactttctatgtcctacatagcagccatcacagagggcaataaacacttctaatgaccgtgtaatttatatggaatgctgaagggg

SEQ ID NO: 3309 - DNA, 120 bp, synthetic construct
  misc_feature 1..120: note = Artificially Synthesized Probe
  source 1..120: mol_type = other DNA
acaacagacaaaacaggcacacaaggattaatatgaaatttataatcgtagtacttccgatggtcttaacccaagtgacagggttaagatttgcgaggccatcagcaactcctgcgattg

SEQ ID NO: 3310 - DNA, 120 bp, synthetic construct
  misc_feature 1..120: note = Artificially Synthesized Probe
  source 1..120: mol_type = other DNA
aagactgtaattttttagcttatgtttgtctaaactttctgttaagtcgctatcaacagctagactcacttgtgcactgggacacgactgagtttgtcctgtgcaattgtggtagaattg

SEQ ID NO: 3311 - DNA, 120 bp, synthetic construct
  misc_feature 1..120: note = Artificially Synthesized Probe
  source 1..120: mol_type = other DNA
caactatggcctgtctgtgggaattatagggaattcctgttgtatgtgaaactttccactgatgtaagaatttttggaaagctttactacagtatcctggtccattgtcagttttgatct

SEQ ID NO: 3312 - DNA, 120 bp, synthetic construct
  misc_feature 1..120: note = Artificially Synthesized Probe
  source 1..120: mol_type = other DNA
aagaacatctcgaatacaattttggtgggaaaggagccaattgatttcaacagaatcagatctgagcttcataaagtctttgaagtgacttcacagagacgcagacatgtgcacttgaag

SEQ ID NO: 3313 - DNA, 120 bp, synthetic construct
  misc_feature 1..120: note = Artificially Synthesized Probe
  source 1..120: mol_type = other DNA
aaccactcctaatattttgattcattttctgcctatcttctttcacatatgtgtttttttacatacgtacttttcccccttagtttgtttccttttattttatagagcagaaccctagtc

SEQ ID NO: 3314 - DNA, 120 bp, synthetic construct
  misc_feature 1..120: note = Artificially Synthesized Probe
  source 1..120: mol_type = other DNA
tctccacccaacaaaaatgggcaaaggacatacagctaggtcaccaagaaagaagggcaaataggtggtgagtatatgtaaagatacttgataggacttttgcttagttgaatctttagc

SEQ ID NO: 3315 - DNA, 120 bp, synthetic construct
  misc_feature 1..120: note = Artificially Synthesized Probe
  source 1..120: mol_type = other DNA
tttcttccaggtccccctgcctcctaggagcgggcacttggggaggctgtgaaggcctgagaggcaagcggcatctctagctagggcctctctccagcactttttattttattttatttt

SEQ ID NO: 3316 - DNA, 120 bp, synthetic construct
  misc_feature 1..120: note = Artificially Synthesized Probe
  source 1..120: mol_type = other DNA
gcttgattttagccaagcacatcatttagcgggtagcatcagctccttcttacaggtggggaatggaggcccagagcagggtggaaactcatccaaagtcacacagcaatttggagttag

SEQ ID NO: 3317 - DNA, 120 bp, synthetic construct
  misc_feature 1..120: note = Artificially Synthesized Probe
  source 1..120: mol_type = other DNA
cctcccaaagtgctgggattataggcgtgagccaccacacccggcccttttttctctttctttctctctctctctcgtttctctctctctctctctctctctctctctctctctctcccc

SEQ ID NO: 3318 - DNA, 120 bp, synthetic construct
  misc_feature 1..120: note = Artificially Synthesized Probe
  source 1..120: mol_type = other DNA
gaggaagaagcagtaactcatcttggagaagggaaggacacctaaggcccaaagagggtcactggtttccctggggccacacactaatctaaaaagagtgagcacttcctaattcctact

SEQ ID NO: 3319 - DNA, 120 bp, synthetic construct
  misc_feature 1..120: note = Artificially Synthesized Probe
  source 1..120: mol_type = other DNA
ccacccagcctgtagatgctcaataaaagtgcatgaggttaccaggtcctaggttccagggtgctcctcctagacgtggggaacagcagatcagtaatgatttactctattgattaagca

SEQ ID NO: 3320 - DNA, 120 bp, synthetic construct
  misc_feature 1..120: note = Artificially Synthesized Probe
  source 1..120: mol_type = other DNA
taacagccactcccttttgaatcagccggtgtctcctgacaatgtcctgtgtcttcctcagccttgtgggacggacagaaccaagccctgttgaatttgggtccccatcttttttttttt

SEQ ID NO: 3321 - DNA, 120 bp, synthetic construct
  misc_feature 1..120: note = Artificially Synthesized Probe
  source 1..120: mol_type = other DNA
gaatttgcccacagttagagaccattccagtcctgggctcactgtcgcctgggctggggtgtcttcctctgtagtacttagtagtaacaatagcaacaacaactaaaagctaaaactggc

SEQ ID NO: 3322 - DNA, 120 bp, synthetic construct
  misc_feature 1..120: note = Artificially Synthesized Probe
  source 1..120: mol_type = other DNA
ccagcagctgggactacaggagcatgccgcgccacctgtctaatttttcttttcttttttttttttttttttgagacggagtcttgctctgtcacctaggctggagtgcagtggcgtgat

SEQ ID NO: 3323 - DNA, 120 bp, synthetic construct
  misc_feature 1..120: note = Artificially Synthesized Probe
  source 1..120: mol_type = other DNA
taagtcacacagcatgcaagtggcagactcagggttttgaaatcctgtttctccaatgccaaaggttatcctgataatctctagtgaaggccagggtgcccctggcaactagagggatat

SEQ ID NO: 3324 - DNA, 120 bp, synthetic construct
  misc_feature 1..120: note = Artificially Synthesized Probe
  source 1..120: mol_type = other DNA
gcaacagagtgaaaccccatctctacaaaaaattcaaaattagccaagcatggcggtacgctctgtggttccagctactcgggaagctgaagctggagaatcgcttgagcccgggaggcg

SEQ ID NO: 3325 - DNA, 120 bp, synthetic construct
  misc_feature 1..120: note = Artificially Synthesized Probe
  source 1..120: mol_type = other DNA
ccaaagtgctgggactacagacgtgagccaccttttctttttttttttttttgagacagagtcttactctgtctctcaggctggagtgcagtggtgtgatctgggctcactggaacctct

SEQ ID NO: 3326 - DNA, 120 bp, synthetic construct
  misc_feature 1..120: note = Artificially Synthesized Probe
  source 1..120: mol_type = other DNA
ctggctatgtgtctcacctttagaacacccgtactagaatgctatgctgtgtctgtcaccagagccaaaacaatcagtcagaagccccattgtaaattcaactcagagggtaattatcaa

SEQ ID NO: 3327 - DNA, 120 bp, synthetic construct
  misc_feature 1..120: note = Artificially Synthesized Probe
  source 1..120: mol_type = other DNA
caaaacaaaatccaaaaaaccaactcaattacttgaatgtcctctgtttcatattctcaaacctccatatgcaccagtcaatggctgggtagctgtttgggttctctagctaaccacagt

SEQ ID NO: 3328 - DNA, 120 bp, synthetic construct
  misc_feature 1..120: note = Artificially Synthesized Probe
  source 1..120: mol_type = other DNA
ccgtgcctggccccatctgtttctattgttgttgttgtttgttttgagataggatctcactttgtcgctcaggctggagtgcagtggtacaatctgcaggtagcagctaactgcaacctt

SEQ ID NO: 3329 - DNA, 120 bp, synthetic construct
  misc_feature 1..120: note = Artificially Synthesized Probe
  source 1..120: mol_type = other DNA
agaaacgtaagaaagaagaaaaaaattattaattagtcttaaaacacttgctgtcgccagggaaaggtgatgtttccagggatggccacaaggtggtggagtggtacccatgcccaaagt

SEQ ID NO: 3330 - DNA, 120 bp, synthetic construct
  misc_feature 1..120: note = Artificially Synthesized Probe
  source 1..120: mol_type = other DNA
ctaaggccacacagcttagagtctgacaaaattggaggtgattctcctctctgggagagatcatgcttcttactgattgcagggatggaaagatgcctagtgatggtgtaggacaagggt

SEQ ID NO: 3331 - DNA, 120 bp, synthetic construct
  misc_feature 1..120: note = Artificially Synthesized Probe
  source 1..120: mol_type = other DNA
cagctttgaatgaagccccctccatattaatgcagaaatgggacctaggaaccaggcagatgtgggttcaaatcccagccctgtctgacctgccgagtaaccttggatgaatgacttccc

SEQ ID NO: 3332 - DNA, 120 bp, synthetic construct
  misc_feature 1..120: note = Artificially Synthesized Probe
  source 1..120: mol_type = other DNA
gccgagatcgcaccactgcactccagcctgggtgacagagcaaggctctgtctcaaaaataaataaataaggcctggtgtggtggctcacgcctgtaatcccagcactttgggaggctga

SEQ ID NO: 3333 - DNA, 120 bp, synthetic construct
  misc_feature 1..120: note = Artificially Synthesized Probe
  source 1..120: mol_type = other DNA
ttgctgtcctttgccctcatcatcctcccctccatcagcccttttggccccaacaaaaccgagagccctggggactttgcgcctgtacgaggtaggggatccccacctttgaaacccttg

SEQ ID NO: 3334 - DNA, 120 bp, synthetic construct
  misc_feature 1..120: note = Artificially Synthesized Probe
  source 1..120: mol_type = other DNA
cggacagacagacagacacagcctgaaacagacctagacagacagacacagattgaaacagacccagacaaacagacagacacagcctgaaacagacccagacacagcctgaaacagacc

SEQ ID NO: 3335 - DNA, 120 bp, synthetic construct
  misc_feature 1..120: note = Artificially Synthesized Probe
  source 1..120: mol_type = other DNA
tggacaagggagcagcctgaatccacctttgctttcctccatcagctcatgacccatgtgtgctttgtaaggcaccagccacatactggaaaccccaagagcagcccatccaggcatgcg

SEQ ID NO: 3336 - DNA, 120 bp, synthetic construct
  misc_feature 1..120: note = Artificially Synthesized Probe
  source 1..120: mol_type = other DNA
cgattgaccctaacggaccaaccaacccgtaacgacccctcctaccataaccagtagccagccagcccataaccagccaacttatctataaccagccacctgaccatagccaaacaacca

SEQ ID NO: 3337 - DNA, 120 bp, synthetic construct
  misc_feature 1..120: note = Artificially Synthesized Probe
  source 1..120: mol_type = other DNA
atgaaccctacctgaggaagccagtccccgacggcatagctgcatccgcttggaatgctttacaggcattgacaccttcgcctcacagcagcactttggaaccagtgtcctcattattcc

SEQ ID NO: 3338 - DNA, 120 bp, synthetic construct
  misc_feature 1..120: note = Artificially Synthesized Probe
  source 1..120: mol_type = other DNA
accctgagggcggggtgtctgtcttcctttgcttcccttttttcctttccaccttctcacatggaatgagggtttgagagagcagccaggagagcttagggtctcagggtgtcccagacc

SEQ ID NO: 3339 - DNA, 120 bp, synthetic construct
  misc_feature 1..120: note = Artificially Synthesized Probe
  source 1..120: mol_type = other DNA
cacctttgtgacttaggaaaactcatgggtggctgtgagcacaagagtcatcaggcaggctccagacctgttattgaaatataaactgttgggtgtgtgcacatctttaaatttttgtaa

SEQ ID NO: 3340 - DNA, 120 bp, synthetic construct
  misc_feature 1..120: note = Artificially Synthesized Probe
  source 1..120: mol_type = other DNA
tcattctgttcctctgattgtacagaaagggctgctttggcctagacaggtgagtaacttggttatgtggcaagttagtattgaaattccatgttcagtcagtctagtgaataaaaccaa

SEQ ID NO: 3341 - DNA, 120 bp, synthetic construct
  misc_feature 1..120: note = Artificially Synthesized Probe
  source 1..120: mol_type = other DNA
atttctccaggacgttgagttccagctcagcagctctttatacacaatttacagctaaccctcgaacaacttgctttggtctgcgagggccacctttatgtagatgtttttcagtaaatc

SEQ ID NO: 3342 - DNA, 120 bp, synthetic construct
  misc_feature 1..120: note = Artificially Synthesized Probe
  source 1..120: mol_type = other DNA
agttcccagaattgcacgtgggctgttttataattgacttatcttgaccacctctaaaagttctcttgaagttacagattcctgagatctttatctgggagagcaagcatttggttgaag

SEQ ID NO: 3343 - DNA, 120 bp, synthetic construct
  misc_feature 1..120: note = Artificially Synthesized Probe
  source 1..120: mol_type = other DNA
ccagagcgtagattagaacgtcagtctaaacagttctttatagcatggaattttaacaaagaaagaagaatcccacgtgggtatgtgtgagtgagccttgtgtagcttagtgtcggttac

SEQ ID NO: 3344 - DNA, 120 bp, synthetic construct
  misc_feature 1..120: note = Artificially Synthesized Probe
  source 1..120: mol_type = other DNA
gtcaccatctttcagaaactaagtcttttttttcctgcagatttctttgctttggctttttcccagtcactcacagggaggtatttaaatcgccacagaaaggggaaggtacctaaaatg

SEQ ID NO: 3345 - DNA, 120 bp, synthetic construct
  misc_feature 1..120: note = Artificially Synthesized Probe
  source 1..120: mol_type = other DNA
ttcaaacgttttgctttgtttttcccacttttcacctaacagaaaaccactgggccttgttacttgcttggttttgttcgtctgtgatttacctttgtcatgggtttttaggtatctccg

SEQ ID NO: 3346 - DNA, 120 bp, synthetic construct
  misc_feature 1..120: note = Artificially Synthesized Probe
  source 1..120: mol_type = other DNA
tggcttctccagttcactggtgggcatgcaccgcagcagttggcttcgtcagttcactggtgggcctgcaccagagcagttggcttctccagttcactggtgggcctgcaccgcagcagt

SEQ ID NO: 3347 - DNA, 120 bp, synthetic construct
  misc_feature 1..120: note = Artificially Synthesized Probe
  source 1..120: mol_type = other DNA
cagtgttgaagctttccagccacggctctgtggatgtgtgcagtgttgggaatcaggctgggctgcccttgttccttctttacattcctcagacgttgtgctttacagccacagtttcag

SEQ ID NO: 3348 - DNA, 120 bp, synthetic construct
  misc_feature 1..120: note = Artificially Synthesized Probe
  source 1..120: mol_type = other DNA
tgtgcactctggtgagactgtcccagagcctgcgtttagtgaaggtggtgtctgttgtaaaaagttacaacttttcctgttgtaattcagtatcttgaaagagatactttgttaccacat

SEQ ID NO: 3349 - DNA, 120 bp, synthetic construct
  misc_feature 1..120: note = Artificially Synthesized Probe
  source 1..120: mol_type = other DNA
gagagctgagaggccagaaccccacagagtttggtacttactatacttgtgtattttgaggcaaataacttgtttagaagttgcatgtcatggctttctcatggattttctttaggacaa

SEQ ID NO: 3350 - DNA, 120 bp, synthetic construct
  misc_feature 1..120: note = Artificially Synthesized Probe
  source 1..120: mol_type = other DNA
catttccagccctcacctgcttcctactcgtctgtcaagacccagctgttacagctgctgtgacactgttctagaagcttccttcctcgtgtagaactaggcatctgctgtagtcatctg

SEQ ID NO: 3351 - DNA, 120 bp, synthetic construct
  misc_feature 1..120: note = Artificially Synthesized Probe
  source 1..120: mol_type = other DNA
tcgtctgtcggtcatacctttgagtctttctggactcctctgttccatgcgtttatgttgtatgcctgataagttctgaagtcaggtagtaaaagttctctgttatttttgaaaattgag

SEQ ID NO: 3352 - DNA, 120 bp, synthetic construct
  misc_feature 1..120: note = Artificially Synthesized Probe
  source 1..120: mol_type = other DNA
atcatacttgtcaccttagaaagtttaacacactttttcaaacaaggtgtcactattttgttgtctggtttaagaaaaaaacctgatacaggttgagtctcccatatccaaactgcttgg

SEQ ID NO: 3353 - DNA, 120 bp, synthetic construct
  misc_feature 1..120: note = Artificially Synthesized Probe
  source 1..120: mol_type = other DNA
tgagtgctgggcggcctcatgtctgcagggcagggtggtcggagcagcccggctgggatgggagtgtgggggctacaggcacctaggggtgggcgctgagtgctgggcggtctcatgtcc

SEQ ID NO: 3354 - DNA, 120 bp, synthetic construct
  misc_feature 1..120: note = Artificially Synthesized Probe
  source 1..120: mol_type = other DNA
tgccctcaaggggtgatgtcacctgcctacaaagttatgcaagggttagtgtagaattggtacaaaaacctagattttaaaattcttacttgggggctcttttgataaaccaagagattt

SEQ ID NO: 3355 - DNA, 120 bp, synthetic construct
  misc_feature 1..120: note = Artificially Synthesized Probe
  source 1..120: mol_type = other DNA
ccgacagaatcaagtctgtgctaagatagcagcgtgtgtccgttaaaacatcagctagaatcctgtcacttagagcccagtgtgcatctgtgcgcagagactcagctgaaagccctgaac

SEQ ID NO: 3356 - DNA, 120 bp, synthetic construct
  misc_feature 1..120: note = Artificially Synthesized Probe
  source 1..120: mol_type = other DNA
ggaaaagcaaaatgccagatacaggattctgggttttctgaattaccaaactttaaacaaatgtaaaatgtgtatgcgtaaaccaaagctggcaagtttgagggtgaagggaggaggaag

SEQ ID NO: 3357 - DNA, 120 bp, synthetic construct
  misc_feature 1..120: note = Artificially Synthesized Probe
  source 1..120: mol_type = other DNA
cagcagatgtcgaataaagtgagtgcagtcagcatctacggacagtttcccaggaaccgcgggtcctagaattttgattcagaagtgtgttctcttgttttttagatgatttcccgtagg

SEQ ID NO: 3358 - DNA, 120 bp, synthetic construct
  misc_feature 1..120: note = Artificially Synthesized Probe
  source 1..120: mol_type = other DNA
tgtgttagtcatttgtgtgtctcgtggcatcttacacagcagtctattcttctgtgcagtataaactgtgactagatattttcagattgcttcgttcatacccgctactctactcactaa

SEQ ID NO: 3359 - DNA, 120 bp, synthetic construct
  misc_feature 1..120: note = Artificially Synthesized Probe
  source 1..120: mol_type = other DNA
gctgttacagggagctgtagtcagtgatctttgaggtcactgttgtcatagttgcttcatcagtgttctgtcagctatagggatttgtggtcagtgatctttgaggtcactgttgtcatt

SEQ ID NO: 3360 - DNA, 120 bp, synthetic construct
  misc_feature 1..120: note = Artificially Synthesized Probe
  source 1..120: mol_type = other DNA
agagctctgatggagacgtacaggagaggaatgttgttttcatgctgctgacaccacatccaccctgcagcccagggctcaagaaatgatttccagcttcaagtcttattatttaagaac

SEQ ID NO: 3361 - DNA, 120 bp, synthetic construct
  misc_feature 1..120: note = Artificially Synthesized Probe
  source 1..120: mol_type = other DNA
aaccttttgtgaaaggaagagttgattgatgggacaaacttcattgtcatcttatttcaagaaatcatcacagccacccccagccttcagtaaacacccctctgatcagtcagcagccat

SEQ ID NO: 3362 - DNA, 120 bp, synthetic construct
  misc_feature 1..120: note = Artificially Synthesized Probe
  source 1..120: mol_type = other DNA
tcttcatgacggtcgtgactaacttagagctagaaaaatgtaactgggaaagttgttactagaacttctcactcctaaaccttgaacagagtagcttcttcatgagggtcgtaactaact

SEQ ID NO: 3363 - DNA, 120 bp, synthetic construct
  misc_feature 1..120: note = Artificially Synthesized Probe
  source 1..120: mol_type = other DNA
tgagtagttagtgtagctgtcatcggtggttatcatgtagttaccgtaggctgttactgttaacgtggtacccagggtggttatcttgaacagttgttgcaggtaggtggttatcctagt

SEQ ID NO: 3364 - DNA, 120 bp, synthetic construct
  misc_feature 1..120: note = Artificially Synthesized Probe
  source 1..120: mol_type = other DNA
tttcctgttttcggtgatggtttcttaaagatgaagaaagaaaagaagctctcctgcaactcagttgtagtcttagggttggccgttgtgcagggggttgtgagaggtaagggaattctg

SEQ ID NO: 3365 - DNA, 120 bp, synthetic construct
  misc_feature 1..120: note = Artificially Synthesized Probe
  source 1..120: mol_type = other DNA
tcatgacctttaattcctcttgtaattgaaatttgaaatattcacctgtaacattatggctgctgctgcatagctgcctgagacagatgatgtgaagacgagtaattatgcacaagggtg

SEQ ID NO: 3366 - DNA, 120 bp, synthetic construct
  misc_feature 1..120: note = Artificially Synthesized Probe
  source 1..120: mol_type = other DNA
caagtgtttctcatttcggatttccttctccaggtctctctctgaagctgggcttctttaggttcgctgtttcacacgtcttgcttatcctttcctgaggtgcatcgatgtttgctggtc

SEQ ID NO: 3367 - DNA, 120 bp, synthetic construct
  misc_feature 1..120: note = Artificially Synthesized Probe
  source 1..120: mol_type = other DNA
tgagaaacaatcgcatttatttctcctttaagcccaagtatcttttggttaatgaaatactaacaaaccagtggtatcagggaacggaaagctcctggcagtactgcatttgaaacgtct

SEQ ID NO: 3368 - DNA, 120 bp, synthetic construct
  misc_feature 1..120: note = Artificially Synthesized Probe
  source 1..120: mol_type = other DNA
ctcagtaaatgttaaatgatcgaatacccttaaacacgttatgtgggtgccatggaatacctatctcttgaggtatgtgcagatttatggcttcagccacttgtatgatgagtagctgaa

SEQ ID NO: 3369 - DNA, 120 bp, synthetic construct
  misc_feature 1..120: note = Artificially Synthesized Probe
  source 1..120: mol_type = other DNA
agtagaattataaacacttatcaacatggtttgtgtttgagaaataagttcaccataagagaaaagaagccccacacgagccacgtcttacctcaaaagggatgaagtgtttggtgccag

SEQ ID NO: 3370 - DNA, 120 bp, synthetic construct
  misc_feature 1..120: note = Artificially Synthesized Probe
  source 1..120: mol_type = other DNA
cccggcctagagcagtatttctgtattgatgttttttaggaatttaacatcccctttccagttttcattgttagcctcagaatacttagaaagttcctttctaacctgtactcccactgt

SEQ ID NO: 3371 - DNA, 120 bp, synthetic construct
  misc_feature 1..120: note = Artificially Synthesized Probe
  source 1..120: mol_type = other DNA
agaagagaatctgaaagtatttacttcagaaacctcctttttgctagttagcgccagagtgagtagattaatcagggcaaaagagaatgagaggtgctgttagtgtgttacagggaaaag

SEQ ID NO: 3372 - DNA, 120 bp, synthetic construct
  misc_feature 1..120: note = Artificially Synthesized Probe
  source 1..120: mol_type = other DNA
atatgaatgcgccccctgggtcccgagaatctcagacgagaaagaaaggtgggtaacctccttcctgattctctagaagaattcacatttgcttattgtttagctcttcttatttcttat

SEQ ID NO: 3373 - DNA, 120 bp, synthetic construct
  misc_feature 1..120: note = Artificially Synthesized Probe
  source 1..120: mol_type = other DNA
ctgctttaacttggaacgttatttaatgtttaatgctaaattgcggtaacttttccttttgcatgcatatttagtaaatcattctcgaggcactgaggtctcagagccatctccgcccgt

SEQ ID NO: 3374 - DNA, 120 bp, synthetic construct
  misc_feature 1..120: note = Artificially Synthesized Probe
  source 1..120: mol_type = other DNA
aggaggaggaggaggacacggatgaggatgaccacctcatctacctggaggagatcctggtccgtgtacacactgactactatgccaagtatgaccgctacctcaacaaggagatcgagg

SEQ ID NO: 3375 - DNA, 120 bp, synthetic construct
  misc_feature 1..120: note = Artificially Synthesized Probe
  source 1..120: mol_type = other DNA
caacctttcagcaataggtgattcttgaaggaagacttaacaccccggtgcttaaaaaacccaaatacctcgttattctagttattctgtgaaaatgctcccataagcacctggattttc

SEQ ID NO: 3376 - DNA, 120 bp, synthetic construct
  misc_feature 1..120: note = Artificially Synthesized Probe
  source 1..120: mol_type = other DNA
tccccctgaattgtgctcacgtttcctttttgcttctgtgtacgtggcctcactgttgagaggctttgctgaacacatgctaagagaggtcctcctgctgctcaggtcacccgctgtgcc

SEQ ID NO: 3377 - DNA, 120 bp, synthetic construct
  misc_feature 1..120: note = Artificially Synthesized Probe
  source 1..120: mol_type = other DNA
cgcttgcagtcttgggtccttttgtttttctctcctgtcttgggtcccaaaactaaaacaaaaccccgaccatcagcttctcagatgttgtccaggcacccgcatgtgcccacctgtggc

SEQ ID NO: 3378 - DNA, 120 bp, synthetic construct
  misc_feature 1..120: note = Artificially Synthesized Probe
  source 1..120: mol_type = other DNA
ggttttctgtttcatagattgtgttttgtcttttacgattctggagagcagcgtgtgcccctctcggctgatttcacggcccttgaggtcatggtggagagtgttgctaagaggaggagt

SEQ ID NO: 3379 - DNA, 120 bp, synthetic construct
  misc_feature 1..120: note = Artificially Synthesized Probe
  source 1..120: mol_type = other DNA
tggtgatgatgtcacctgttgtgtcctggtgacgatgtcatctcctgtcgttaggaaggcgtcctggtgatgctgtcacctcccattgtgtcctggtgatgtcacctcccatcattagga

SEQ ID NO: 3380 - DNA, 120 bp, synthetic construct
  misc_feature 1..120: note = Artificially Synthesized Probe
  source 1..120: mol_type = other DNA
gggaacaggtctctttctgtaacaccagggcttagtgctttggtgctactcttacttctttatttgacttaattaattccaactctccagccagttgacaaagctcctggacacttctga

SEQ ID NO: 3381 - DNA, 120 bp, synthetic construct
  misc_feature 1..120: note = Artificially Synthesized Probe
  source 1..120: mol_type = other DNA
tgaatgacactaataacatggcagccgataactgtgtatgtgtgttctgaaatgtgtataatttacgtgaacagcagcagttcagtttcgaatggcacgtcataaacaactgtttagctg

SEQ ID NO: 3382 - DNA, 120 bp, synthetic construct
  misc_feature 1..120: note = Artificially Synthesized Probe
  source 1..120: mol_type = other DNA
tccatcttggaggaacagtagagtgttttcttctggtttaatccaagagtcccccctgcttgtctgagttcatgtggcgcctgcccagttccctgcactaaatagacctgtgtccgcaat

SEQ ID NO: 3383 - DNA, 120 bp, synthetic construct
  misc_feature 1..120: note = Artificially Synthesized Probe
  source 1..120: mol_type = other DNA
gtccagtggtagatacagttgctaaattggatggtgagtgtgtgtttagctttttaaagaaactgccagacctttttctggaatacctgcatcatcatttcatgttttcagcagcggtga

SEQ ID NO: 3384 - DNA, 120 bp, synthetic construct
  misc_feature 1..120: note = Artificially Synthesized Probe
  source 1..120: mol_type = other DNA
aggagtttgttgattgatatgatggtgtgtgtggtttttcttcttttgcctgtcagtatgtggtggtcacattgactgatttttggacatgaaaacaaccttgcaccccagaaacaattc

SEQ ID NO: 3385 - DNA, 120 bp, synthetic construct
  misc_feature 1..120: note = Artificially Synthesized Probe
  source 1..120: mol_type = other DNA
ttttctctgttgtccaggttgggtgacttctgttagattttcgggttcacagccttcctctgtctccttcatttgttgctagtctgtccaggacattttttggttttagtttttattttc

SEQ ID NO: 3386 - DNA, 120 bp, synthetic construct
  misc_feature 1..120: note = Artificially Synthesized Probe
  source 1..120: mol_type = other DNA
tgagaccccagaggtggggtgtttggcgggagtagagcagttatcataggtttttaacatttagttgaaacatttaattcagtttaaaataacagtgcagttggccctttgaacaacact

SEQ ID NO: 3387 - DNA, 120 bp, synthetic construct
  misc_feature 1..120: note = Artificially Synthesized Probe
  source 1..120: mol_type = other DNA
gacatatccagatcgagaaagatgtgtacagaggagagaaactatttcaaacggagctgcggtttgaacatagcagaaagatccttgaaacagaagattggccctttctagttgatttat

SEQ ID NO: 3388 - DNA, 120 bp, synthetic construct
  misc_feature 1..120: note = Artificially Synthesized Probe
  source 1..120: mol_type = other DNA
cagtcaccctggctcagttagcaaattctgatccattaacctctgaaaagtgtattggcgaaacatcacgtttttcatacgtgttccctgttggggtgtgtgagtgtttacctagtccga

SEQ ID NO: 3389 - DNA, 120 bp, synthetic construct
  misc_feature 1..120: note = Artificially Synthesized Probe
  source 1..120: mol_type = other DNA
cagtaactcaggtcatcacctttagacgccagtttatcttgtgaggatcagacccttttttgaggtgtgctgaatttctctgccatttttctgtctttttgaacattagctgttttttgt

SEQ ID NO: 3390 - DNA, 120 bp, synthetic construct
  misc_feature 1..120: note = Artificially Synthesized Probe
  source 1..120: mol_type = other DNA
gattctcccagtggacacctggattttggtcctgtgaggctcatgttggacttctgacctgcacagctgtgaggttgtgaatttggatcttttgagccgtggcgcctggttattacagca

SEQ ID NO: 3391 - DNA, 120 bp, synthetic construct
  misc_feature 1..120: note = Artificially Synthesized Probe
  source 1..120: mol_type = other DNA
cgttgtaattttatcttaaccatttttaaattctgcatttaatatacgtggaagccaagaaatatgatgaccctgataaaatgcctcaagaacagaggccgggtgtggggccaccatcac

SEQ ID NO: 3392 - DNA, 120 bp, synthetic construct
  misc_feature 1..120: note = Artificially Synthesized Probe
  source 1..120: mol_type = other DNA
aaatcatgtgagacgtaagaactccctaacaggagtgctcccaaaatcatgagatgtaagaactcagctgtcaccaggagcgctcccaaaatcatgtgagacgtaagaactcgctaacat

SEQ ID NO: 3393 - DNA, 120 bp, synthetic construct
  misc_feature 1..120: note = Artificially Synthesized Probe
  source 1..120: mol_type = other DNA
ttcgcttaacaattttctaactttacaatgatgtgcaagtgacgtgtgtttggtagaaaccacactttgaattagaagtcttggctcagaattctgtagaacagcttgttccaagtcggc

SEQ ID NO: 3394 - DNA, 120 bp, synthetic construct
  misc_feature 1..120: note = Artificially Synthesized Probe
  source 1..120: mol_type = other DNA
tgccagcgtccctgggaacatgttacttttagagatcattataatgacctgatgataaagccgctgccttagctaattaaccattggttaaaatgtttctgccttttaatgattcaggcc

SEQ ID NO: 3395 - DNA, 120 bp, synthetic construct
  misc_feature 1..120: note = Artificially Synthesized Probe
  source 1..120: mol_type = other DNA
aagcaaatattctgattattcaccataaaatccaacagtgcaccaggaataaagtccctgttcacataagggacagaaggaatttaaacccaatctttgcctgcgaaccgactgggtttg

SEQ ID NO: 3396 - DNA, 120 bp, synthetic construct
  misc_feature 1..120: note = Artificially Synthesized Probe
  source 1..120: mol_type = other DNA
atctttttgtcacctttaacttggatgacatttctgccatgcagagatgttactattgtgcagatcttacagctgcttggttctgaatcttgtccgagaatcttaaccctgtgtcttttc

SEQ ID NO: 3397 - DNA, 120 bp, synthetic construct
  misc_feature 1..120: note = Artificially Synthesized Probe
  source 1..120: mol_type = other DNA
aatagaataggacacggtgatgctgttccctttcttaaacatctgttttacctggatttgataatcacctcacttttgttagctttcttcctttttgcctgtttctgaatccctggctgc

SEQ ID NO: 3398 - DNA, 120 bp, synthetic construct
  misc_feature 1..120: note = Artificially Synthesized Probe
  source 1..120: mol_type = other DNA
tccaaggagtctgtctgccgtggccatgttagtatctgcggatttgcagcgtgctctttgtatgaacataggtggtttaacctgatagtttttttttctaattaaaagaagaaacccaaa

SEQ ID NO: 3399 - DNA, 120 bp, synthetic construct
  misc_feature 1..120: note = Artificially Synthesized Probe
  source 1..120: mol_type = other DNA
gcggtggggtcttttcagcttcctgtccagctgggtttttgtgactcttggactttggggacctcacttcttccttaaagaccagggacttccagttttatttcattcctgtttatgggg

SEQ ID NO: 3400 - DNA, 120 bp, synthetic construct
  misc_feature 1..120: note = Artificially Synthesized Probe
  source 1..120: mol_type = other DNA
actccttaaaataaatcctcaaaataaaaaaccaaacaagtcatcttcagaatgtttaaggatctcacagacacatcgtcccaacaccagttccaggtaccgaaaagaacaggcgcccag

SEQ ID NO: 3401 - DNA, 120 bp, synthetic construct
  misc_feature 1..120: note = Artificially Synthesized Probe
  source 1..120: mol_type = other DNA
ttgggagggttgcgtgagctcccactcttagacaacagggaatagtgctccaccagaaacactcacacatcaaagttgtttttaatcttggataattaactaagaaagataatctttagg

SEQ ID NO: 3402 - DNA, 120 bp, synthetic construct
  misc_feature 1..120: note = Artificially Synthesized Probe
  source 1..120: mol_type = other DNA
gtcacaaaacgaaataaaacaactctttgtacctaattgtattgttgggcccataccatgtggagatgtaacatttgccagtagccgcgccgaggaggggcctaggattaaatgacagca

SEQ ID NO: 3403 - DNA, 120 bp, synthetic construct
  misc_feature 1..120: note = Artificially Synthesized Probe
  source 1..120: mol_type = other DNA
agcatgagtccaaaattgattctgatcaagcgagatatacgtatgctaaacccaagagcagaagctaaggaagtaactcaaaatacatcgtgaaacagatcatacaagtgtgaaaggagg

SEQ ID NO: 3404 - DNA, 120 bp, synthetic construct
  misc_feature 1..120: note = Artificially Synthesized Probe
  source 1..120: mol_type = other DNA
cccacgacatgtaagttcatgtgagtttcaggcttttccaaagcagttgtaatgactgtggcatggataatttttgtggggaagatgagtggtcagcacacatacgtgtttgactggatt

SEQ ID NO: 3405 - DNA, 120 bp, synthetic construct
  misc_feature 1..120: note = Artificially Synthesized Probe
  source 1..120: mol_type = other DNA
cgttctgtgcccgcgtccctcccgtgcgcgttctgtgcccgcgtccctcccgtgcgcgttctgtgcccgcgtccctcccgtgcgcgttctgtgcccgcgtccctcccgtgcgcgttctgt

SEQ ID NO: 3406 - DNA, 120 bp, synthetic construct
  misc_feature 1..120: note = Artificially Synthesized Probe
  source 1..120: mol_type = other DNA
gacttgaccgtgtgctgccagccactctggtgcctgcagtttagaatttgggtacaaagctgctgaatcaaatagtgttttttaatgattgcccaattttaaatgagagacattaatttt

SEQ ID NO: 3407 - DNA, 120 bp, synthetic construct
  misc_feature 1..120: note = Artificially Synthesized Probe
  source 1..120: mol_type = other DNA
tatctttccggtgccaaatcgtgtgcactgtgacagcccagtgtgtttggaaaactgaaatatgggggtggggtatacatatatattattctgtttgtattcttgccttattcaatgttg

SEQ ID NO: 3408 - DNA, 120 bp, synthetic construct
  misc_feature 1..120: note = Artificially Synthesized Probe
  source 1..120: mol_type = other DNA
catatttctaaacctcaaacagagagtcacagctggcatttcccattctttgccatcctcttgctgccattagaactctgccacggatggcttcctcgcttgattttagaaagaaaagaa

SEQ ID NO: 3409 - DNA, 120 bp, synthetic construct
  misc_feature 1..120: note = Artificially Synthesized Probe
  source 1..120: mol_type = other DNA
aaaagagatgactgatgaatttgttaattgccaaaagcttgttgctgtagcaaccggaggccagactcgtggccctgacagcgtcgttagtgtcagcagagactggaaataaaggaaact

SEQ ID NO: 3410 - DNA, 120 bp, synthetic construct
  misc_feature 1..120: note = Artificially Synthesized Probe
  source 1..120: mol_type = other DNA
ctgcctactccgcttttaaatgatgggatgcattgctttttaagaaaggatctcatggatccaggggtcccagtatgtgatgaaagatggcagttcccatcttacagagcgggctggact

SEQ ID NO: 3411 - DNA, 120 bp, synthetic construct
  misc_feature 1..120: note = Artificially Synthesized Probe
  source 1..120: mol_type = other DNA
ttagctacattgtatctacgttagctaagaaaatattcttagggtactcacatatggtgactgtccctagtttctctcagtgacttttcgggattgtaactgaaggctagtatggctcag

SEQ ID NO: 3412 - DNA, 120 bp, synthetic construct
  misc_feature 1..120: note = Artificially Synthesized Probe
  source 1..120: mol_type = other DNA
tctctttgtttattaagagtcattttagcagtggcctgaggaaatgagaatttccagaccgtggcccacttgatgagctgggaggtgcttgttcacataacactaatagttactctgaca

SEQ ID NO: 3413 - DNA, 120 bp, synthetic construct
  misc_feature 1..120: note = Artificially Synthesized Probe
  source 1..120: mol_type = other DNA
gcagagctccacatacagaaacacattattttgcagaaataggtgtttttaagaagttttactacaggaatgtctacttttgtaagtgacaggtgttaaaggcccaggtgtgctgtgcca

SEQ ID NO: 3414 - DNA, 120 bp, synthetic construct
  misc_feature 1..120: note = Artificially Synthesized Probe
  source 1..120: mol_type = other DNA
cattgatataaccccagcctccagcatgcgccagacctgacgtaggtgttcggcacatattttgtccaatcactctaaaaatacactccatgcccttagaacaggtggggttatgtcctc

SEQ ID NO: 3415 - DNA, 120 bp, synthetic construct
  misc_feature 1..120: note = Artificially Synthesized Probe
  source 1..120: mol_type = other DNA
aactcatttagagctgtgttgatttttaaaattcttcgtataggtaggtgatactgcctgtgaattctgcagcgtaaagggcccgttacaactgttattttaaaggtgttggccaggcat

SEQ ID NO: 3416 - DNA, 120 bp, synthetic construct
  misc_feature 1..120: note = Artificially Synthesized Probe
  source 1..120: mol_type = other DNA
ggtgactggggttgcgtggtttcagctggtttgcctctgggggttgggaatttttcttcctgtgtatacttctctgcactttccaaattttctaccacaaagatacatcagaaataaatg

SEQ ID NO: 3417 - DNA, 120 bp, synthetic construct
  misc_feature 1..120: note = Artificially Synthesized Probe
  source 1..120: mol_type = other DNA
caaagttttactttttttttttctgctcataaatgactctgaaaaagccaatacgcaagaggctaacacaactgtagtctaaaggcaacgtcgaggtcactgatatgtccctcagacaag

SEQ ID NO: 3418 - DNA, 120 bp, synthetic construct
  misc_feature 1..120: note = Artificially Synthesized Probe
  source 1..120: mol_type = other DNA
gactgcactttacagtttgcaaagccttttgcttccatttggcctccggggtgtcccttggaacaacccagtgggtggacagggcggggaatatgaatcccattttacagatgtggcaac

SEQ ID NO: 3419 - DNA, 120 bp, synthetic construct
  misc_feature 1..120: note = Artificially Synthesized Probe
  source 1..120: mol_type = other DNA
ttatagctgggcaatggatctgaagtggatctgaaagtaccttgtaaaaactgcatgggcataaactgctagtgtacaaaatgtgcaggtatgtaagacacctttcaatttcacagcgat

SEQ ID NO: 3420 - DNA, 120 bp, synthetic construct
  misc_feature 1..120: note = Artificially Synthesized Probe
  source 1..120: mol_type = other DNA
gcagcaagctggccccgcccatgccattagaaactgcagtcagaaaggagcaaagcagcctatcacttcctccctttagactgacacatgggtacaggataaaacgctcttttctttgag

SEQ ID NO: 3421 - DNA, 120 bp, synthetic construct
  misc_feature 1..120: note = Artificially Synthesized Probe
  source 1..120: mol_type = other DNA
atcaccagaatgtttcctggggaaggctgagctctgcttttcttacagcaaagaagaaattgagatattacttatacctacatctctatctgaagccgaaaagggaagggcgctttaact

SEQ ID NO: 3422 - DNA, 120 bp, synthetic construct
  misc_feature 1..120: note = Artificially Synthesized Probe
  source 1..120: mol_type = other DNA
agaaactcagtgtgtcaactgcttctgctgttgtgaggaaatgggctcgatgtcccgagagtgggaaaaatggaaaaaactaaaggcggccaagctgcgcgacagcaaaaagggaagaga

SEQ ID NO: 3423 - DNA, 120 bp, synthetic construct
  misc_feature 1..120: note = Artificially Synthesized Probe
  source 1..120: mol_type = other DNA
ggacagggacagggacaggctttgggctagatgaactcaaggaaaaaaatacagaaaatatggaagaaaaagtacctgaaacccttcagaaataatgactgttaggatttttgtgtgcat

SEQ ID NO: 3424 - DNA, 120 bp, synthetic construct
  misc_feature 1..120: note = Artificially Synthesized Probe
  source 1..120: mol_type = other DNA
gactggcaacatcacacagatgggatgtagaaacaaacacaggaatctagctgtcctatgaagccagacattccaaggtttgcaaaaacgtaaaacagaatgatgttttctaaaatagtt

SEQ ID NO: 3425 - DNA, 120 bp, synthetic construct
  misc_feature 1..120: note = Artificially Synthesized Probe
  source 1..120: mol_type = other DNA
cgtggacaaggatatgaatcaggagccagagacaccaacattcaaatcctgccctgacaccctgtagctcaggggcttcgtgcaaatgtctggtcatttgtaagatgggcccctccatgt

SEQ ID NO: 3426 - DNA, 120 bp, synthetic construct
  misc_feature 1..120: note = Artificially Synthesized Probe
  source 1..120: mol_type = other DNA
agcccactggggccccggaactcaatggtgtctccaatctgcatgctctccaggtactgagacatcttccctccagcgggaaacttgggatgggtgtccttgaagtaaacctgcaagaca

SEQ ID NO: 3427 - DNA, 120 bp, synthetic construct
  misc_feature 1..120: note = Artificially Synthesized Probe
  source 1..120: mol_type = other DNA
tttttcatcctcaatttgaatcctcctaatagcttctccacatttggccagagagacttcaacgtgaacagatgcttgagccctcatcacctcctctgtgcttctggacaaagccccaaa

SEQ ID NO: 3428 - DNA, 120 bp, synthetic construct
  misc_feature 1..120: note = Artificially Synthesized Probe
  source 1..120: mol_type = other DNA
gctttggccttgattggggagggtctccaacaccccacatacccactggtctaggctgcttctcaccctctgttctgcaggaaagcttgtatttctttttttttgactggctctcattct

SEQ ID NO: 3429 - DNA, 120 bp, synthetic construct
  misc_feature 1..120: note = Artificially Synthesized Probe
  source 1..120: mol_type = other DNA
tgacccagaggcttcaccttgatgaccaggtccacgaagcccttgtcatcatcgctggagatgggtgtatagggccggacgaccaggtttccatcaattcgagccgagaggtagatgtgc

SEQ ID NO: 3430 - DNA, 120 bp, synthetic construct
  misc_feature 1..120: note = Artificially Synthesized Probe
  source 1..120: mol_type = other DNA
ttacatccaaacgtggcaaagtccacatgtggatggtgtcatcacttagagggggacaacagacctctccaacagggcaggacatcacagatgcccatctcggctcagtacgagaactct

SEQ ID NO: 3431 - DNA, 120 bp, synthetic construct
  misc_feature 1..120: note = Artificially Synthesized Probe
  source 1..120: mol_type = other DNA
taggacatctgccacatgctcccttgtgtaacatccctatgatgaaatactaaaaggatccatgttgtatggctggctacaaaaccaggttatcaaaaaaagaaactgagtgtgcacaca

SEQ ID NO: 3432 - DNA, 120 bp, synthetic construct
  misc_feature 1..120: note = Artificially Synthesized Probe
  source 1..120: mol_type = other DNA
agggaaaataccgttaaaaaacaggtttcaaaatgttattatttcatttgggtaagaaaaaaacatgtgtgcctgcttacataagtataaaacatatcacagggccaggcacggtggctc

SEQ ID NO: 3433 - DNA, 120 bp, synthetic construct
  misc_feature 1..120: note = Artificially Synthesized Probe
  source 1..120: mol_type = other DNA
tcttgctgtcacccaggctggagtgcagtggcgcaatctcggctcactgcaagctccgcctcccaggttcacgtcattctcctgcctcagcctcgccagcggctgggactacaggtgcct

SEQ ID NO: 3434 - DNA, 120 bp, synthetic construct
  misc_feature 1..120: note = Artificially Synthesized Probe
  source 1..120: mol_type = other DNA
ctgtctcaaaaaaaaaaaagtatgaactcactaatgaaagaaagtaagaatcaaacagggcagaggaagcccacacagctcagagcacccagggaatctgcacagatgtgaaaggtgtcc

SEQ ID NO: 3435 - DNA, 120 bp, synthetic construct
  misc_feature 1..120: note = Artificially Synthesized Probe
  source 1..120: mol_type = other DNA
aagctccatttcctctgaagagccaggaccaaaaagagctgtgggtctaagcacatatcctttttcactttggctactaggaagctcagagtaaaattaatcttgagcataatgtatttg

SEQ ID NO: 3436 - DNA, 120 bp, synthetic construct
  misc_feature 1..120: note = Artificially Synthesized Probe
  source 1..120: mol_type = other DNA
cactgtcatcaccaccatttcgcagatgaggaaacagcccagaaaggcaaagcgactcacccagtcacacagctggcaggtgaggagctgacccagagtccacccatcccttataccacg

SEQ ID NO: 3437 - DNA, 120 bp, synthetic construct
  misc_feature 1..120: note = Artificially Synthesized Probe
  source 1..120: mol_type = other DNA
gatggaggttgcagtgagccgagatcgtgccattgcactccagcttgggcaacaagagtgaaactccatctcaaaaaaaaaaaaaggccaggcgctgtagctcacacttgtaatctgagc

SEQ ID NO: 3438 - DNA, 120 bp, synthetic construct
  misc_feature 1..120: note = Artificially Synthesized Probe
  source 1..120: mol_type = other DNA
aataataaatcaaatataatcagatgttaagactggtcttcaaacattctagccaatgatgccacgcttgcctgtgatctctctgacataaaaccacgtcgacacctcagtggccaccaa

SEQ ID NO: 3439 - DNA, 120 bp, synthetic construct
  misc_feature 1..120: note = Artificially Synthesized Probe
  source 1..120: mol_type = other DNA
caacctccaactcccaggttgaagcaattcttctgtctcagcctcccgagtagctgggatcacaggcgcacgtcaccactcctggctcatttttgtatttttagtagagacagggtttca

SEQ ID NO: 3440 - DNA, 120 bp, synthetic construct
  misc_feature 1..120: note = Artificially Synthesized Probe
  source 1..120: mol_type = other DNA
tacgtggactgtcaactatacaggtcagcccctaacccccataccattcaagggtccactgtatggatatgcacacatgtagtatctaatatatttaacatacattagatatatactgta

SEQ ID NO: 3441 - DNA, 120 bp, synthetic construct
  misc_feature 1..120: note = Artificially Synthesized Probe
  source 1..120: mol_type = other DNA
gttcatataaaacactggctctcaagaaagctgtttcagagcttgtttatacaccctccccatatacctccctgattgtagttctcccagcaaatgtgcatgtgtgttctcttatcatta

SEQ ID NO: 3442 - DNA, 120 bp, synthetic construct
  misc_feature 1..120: note = Artificially Synthesized Probe
  source 1..120: mol_type = other DNA
cacatgacactgttatctatccctcagatagatgaagtgacctgccaaggtcatatagccattcagggtgggccgggagtggactctcaatgtccagcccaaagtgctgctcttcctgag

SEQ ID NO: 3443 - DNA, 120 bp, synthetic construct
  misc_feature 1..120: note = Artificially Synthesized Probe
  source 1..120: mol_type = other DNA
tccctcagtcacagaaaccacgcccacgtggaatagagtctagggaaaaagttggccgaagttacattcacaggaaatcaccattgttgggggccctggcaatgaacttgaatgacatta

SEQ ID NO: 3444 - DNA, 120 bp, synthetic construct
  misc_feature 1..120: note = Artificially Synthesized Probe
  source 1..120: mol_type = other DNA
actcctcccacttcaggtgaggaaaccaagcctcaggggacagacttgagcccggggacactttctggccactaaagagaaggggtgggctttttataggtaaaagttcttatctgggga

SEQ ID NO: 3445 - DNA, 120 bp, synthetic construct
  misc_feature 1..120: note = Artificially Synthesized Probe
  source 1..120: mol_type = other DNA
ccaagctccaatgttttcccagtgtggctggcagactccagggccaacccctggcctggatcccacaaagtgttgggagaggcctcccatggggcctgcatgtcttagataagacaccta

SEQ ID NO: 3446 - DNA, 120 bp, synthetic construct
  misc_feature 1..120: note = Artificially Synthesized Probe
  source 1..120: mol_type = other DNA
aaggtatggaacaccaccaaaaacagcagggaagggttgggtggagaccaggggaagctttagagacacaggcaggacatttcaacaataaaggaggcagatgctttctggggaaaaatg

SEQ ID NO: 3447 - DNA, 120 bp, synthetic construct
  misc_feature 1..120: note = Artificially Synthesized Probe
  source 1..120: mol_type = other DNA
gttctgttccttgttgctaaacgtgcaaaaccctctgacatagtgacatcgcacacacacacacgttcagtcgcagtcagtgacatcgcccattcacatactcccgtacacacacacaca

SEQ ID NO: 3448 - DNA, 120 bp, synthetic construct
  misc_feature 1..120: note = Artificially Synthesized Probe
  source 1..120: mol_type = other DNA
cactgtggagtgatctttgtcccacttagctgaaggcctcctgcgtgtttcccccactcccaccccatcccagtggactgtgcgctcccggagggcaaggccctatctggtttgaagtcc

SEQ ID NO: 3449 - DNA, 120 bp, synthetic construct
  misc_feature 1..120: note = Artificially Synthesized Probe
  source 1..120: mol_type = other DNA
attataagcgtgagccacgatgagcagcctaaatacttgttgaatggatgaatttgacagacagtgggcaccttctctgtgtaggctcatgctgggccttagcgtcattctcttgccttg

SEQ ID NO: 3450 - DNA, 120 bp, synthetic construct
  misc_feature 1..120: note = Artificially Synthesized Probe
  source 1..120: mol_type = other DNA
ctcacctactggttttaaagagggaactctgggggcagtgtggagggagggacctactgccatagaatacaaacgtaaatcttgacttgggatcagctaagcattatttcaattttattt

SEQ ID NO: 3451 - DNA, 120 bp, synthetic construct
  misc_feature 1..120: note = Artificially Synthesized Probe
  source 1..120: mol_type = other DNA
agctcccaacacatttcctttctggggtttggatctgcttgcaacagccaagtgaggccccagaacttgctgctttccaggggacactgttaaaatgtccttttttctgccaagcttggt

SEQ ID NO: 3452 - DNA, 120 bp, synthetic construct
  misc_feature 1..120: note = Artificially Synthesized Probe
  source 1..120: mol_type = other DNA
acttgtctgagagagggtgggcagacctcgaggtctttaaagctccttctgcttctgatattttatatttattctccctcagacttttgttcgggaaaaatatttaacgtacagagaagt

SEQ ID NO: 3453 - DNA, 120 bp, synthetic construct
  misc_feature 1..120: note = Artificially Synthesized Probe
  source 1..120: mol_type = other DNA
tttacaaactgcttcgggaagaaaaaaaaaaaaagaaagacccttgtcctattccctcaaagtcctgctgtgattcagaaactccctacaaaccccttttactttgggcatgttagctga

SEQ ID NO: 3454 - DNA, 120 bp, synthetic construct
  misc_feature 1..120: note = Artificially Synthesized Probe
  source 1..120: mol_type = other DNA
gacaccaagctgaaaacggtggggaggaacaccaggctcttcactgatgtgaaatcaagggaggtgacatctgagctctgaggacctaacacgctgttgtgattttatgcaaacgatgga

SEQ ID NO: 3455 - DNA, 120 bp, synthetic construct
  misc_feature 1..120: note = Artificially Synthesized Probe
  source 1..120: mol_type = other DNA
agcaaaattcaggctcctcatcctcttaacctggtgggtctttcgtctgctttacaaaggtggttcagttctggggaaaggctacgatcatttaaaccaagcttgtccaaaccttggcct

SEQ ID NO: 3456 - DNA, 120 bp, synthetic construct
  misc_feature 1..120: note = Artificially Synthesized Probe
  source 1..120: mol_type = other DNA
ccagtcccaccttgtccttccccttgaaactcctgagcctctagaactgaagtcatgtttcctgccagcctggctaagaagggtcttcaagacggaaatgcctttatttttatttttatt

SEQ ID NO: 3457 - DNA, 120 bp, synthetic construct
  misc_feature 1..120: note = Artificially Synthesized Probe
  source 1..120: mol_type = other DNA
gtctcaaaaaaaaaaaaaaaaaaaaaattacccagttgtgatgacacatgcctgtagtcccagctactagggaggctgaggtgggaggatggcttgagcctgggaggcagaggttgcagt

SEQ ID NO: 3458 - DNA, 120 bp, synthetic construct
  misc_feature 1..120: note = Artificially Synthesized Probe
  source 1..120: mol_type = other DNA
gagctcgccttctgtcggatcagcagcagcattagattctcataggagaatcctatcgtgaaccctattgtgaacggtgcatgtgagggatctaggttccatactctttatgagaatcta

SEQ ID NO: 3459 - DNA, 120 bp, synthetic construct
  misc_feature 1..120: note = Artificially Synthesized Probe
  source 1..120: mol_type = other DNA
aaataaaataaaataaaggatattcagaaggatacagaagaacaaccagatggaagagatccatagggcaagggaaggggaagtgtgtggcacctccatgccctctccaggcacactacc

SEQ ID NO: 3460 - DNA, 120 bp, synthetic construct
  misc_feature 1..120: note = Artificially Synthesized Probe
  source 1..120: mol_type = other DNA
attatttgtagatgaagaaaactggttctgtccaaccaatgcagaatagatctcaatggatctttgagcgtccagaaatagacctaagtgtaaaagggggcatttgcagttgagtaggat

SEQ ID NO: 3461 - DNA, 120 bp, synthetic construct
  misc_feature 1..120: note = Artificially Synthesized Probe
  source 1..120: mol_type = other DNA
ttcccgctcatgggctcagagaggtcacgcctgcccctgccgaggacagagcctgtcacaaagaaaacggcacgctctggaagtttcttccatccctttccacctcctccttcaaaacag

SEQ ID NO: 3462 - DNA, 120 bp, synthetic construct
  misc_feature 1..120: note = Artificially Synthesized Probe
  source 1..120: mol_type = other DNA
attacaaacttttaacagttttccctcaggttatcatttttatttcatgagaaagttctggctaatgagaacccaaaacccaaaggaggtgttgatttcaggcacagtgccaggtgcctc

SEQ ID NO: 3463 - DNA, 120 bp, synthetic construct
  misc_feature 1..120: note = Artificially Synthesized Probe
  source 1..120: mol_type = other DNA
catctgtaaaatgggcttaaccatggcctttcctgtgtatcttacaattttgtaattaaatccatccatcagttatcaaataatagtaataaagaaatgagaggctggggcagtggctca

SEQ ID NO: 3464 - DNA, 120 bp, synthetic construct
  misc_feature 1..120: note = Artificially Synthesized Probe
  source 1..120: mol_type = other DNA
cagcaacttgagaaatagaagaagaacaggtctcagaccgcatttattcagatgtcagtgtggataagcaccatgccagtttctgtcctaggcgcaaaaactgccaagatattttttaaa

SEQ ID NO: 3465 - DNA, 120 bp, synthetic construct
  misc_feature 1..120: note = Artificially Synthesized Probe
  source 1..120: mol_type = other DNA
ctggctcctttatatgccctcgtaattctacctgagacctgaatccttcctttttcactcattataatcttgaattttatcataagcagctaaaagaaaatagctggttggccgggcgcg

SEQ ID NO: 3466 - DNA, 120 bp, synthetic construct
  misc_feature 1..120: note = Artificially Synthesized Probe
  source 1..120: mol_type = other DNA
ggatctcttctgtccagattcgggtgtcctgtgttcagccattgccataatcctaggtcaggaatccctcctgcactgatgaagtcaagagaggtgattaaaacaagcgttccagtatat

SEQ ID NO: 3467 - DNA, 120 bp, synthetic construct
  misc_feature 1..120: note = Artificially Synthesized Probe
  source 1..120: mol_type = other DNA
gtaatttcctcactgttctttaagctttcactaacagttttgtcaaggtcctttctactctctggtccccaaaccaatgccaggtgtattttttgtttctgtaccaccctacttttacgt

SEQ ID NO: 3468 - DNA, 120 bp, synthetic construct
  misc_feature 1..120: note = Artificially Synthesized Probe
  source 1..120: mol_type = other DNA
gacagagaaagactccacccccaccccaccccccaaaaaagatgagaaagtttaattaatgcaaggctggccaactggaaggacaggagtttatgattgctctgatcagcctccccagga

SEQ ID NO: 3469 - DNA, 120 bp, synthetic construct
  misc_feature 1..120: note = Artificially Synthesized Probe
  source 1..120: mol_type = other DNA
caggcccctctgttatccgaatctcatggacttttctttagtttagcaaaggtggtttcagtttccaagcaaggaaggaagcagttttagggagggactattactgtctttgctttaaac

SEQ ID NO: 3470 - DNA, 120 bp, synthetic construct
  misc_feature 1..120: note = Artificially Synthesized Probe
  source 1..120: mol_type = other DNA
cgctagacttatctggccgtcataatctttgcaaaggtgatgtcagtcgggcttcctcgcagcacggtatttgggttccgagaaaggaagtggaaacttcctgttctcttaatggtcagg

SEQ ID NO: 3471 - DNA, 120 bp, synthetic construct
  misc_feature 1..120: note = Artificially Synthesized Probe
  source 1..120: mol_type = other DNA
ctccagatacctcttgttaggactggtgtatgtgtgcagaaaggggaagaattatttgaaaccatctttggagatcagctaccacacccctgattacacaaatgaagaagctgagattca

SEQ ID NO: 3472 - DNA, 120 bp, synthetic construct
  misc_feature 1..120: note = Artificially Synthesized Probe
  source 1..120: mol_type = other DNA
tctgagccagtagcaaagtccaaaaaccgttacatttttgccttgggaagtggatttggcattaacaacaaagtggaattgtgcccaagatgctagggagttcaaataaaacaaaatgtg

SEQ ID NO: 3473 - DNA, 120 bp, synthetic construct
  misc_feature 1..120: note = Artificially Synthesized Probe
  source 1..120: mol_type = other DNA
ggggtgtttggatgactttgggggagaagatcaatctttgggccctgactgcccacctctggtctcttacctcagagggaaatacagttccaccttctttacgccattattttattttat

SEQ ID NO: 3474 - DNA, 120 bp, synthetic construct
  misc_feature 1..120: note = Artificially Synthesized Probe
  source 1..120: mol_type = other DNA
cctcccagtcttgaaattcagtggttataggataggacaggttttggttaggctgaggaaacccaaagtttcaaggctctggactggattcggagttttcctttcctttcttttctttta

SEQ ID NO: 3475 - DNA, 120 bp, synthetic construct
  misc_feature 1..120: note = Artificially Synthesized Probe
  source 1..120: mol_type = other DNA
cagaacagagtcatttggggatttttattgcctctcatttttttttaagccttgttttcccagcgtggctgggatgttgagtttcctgttgaagaaatatttgggttgatttggctctga

SEQ ID NO: 3476 - DNA, 120 bp, synthetic construct
  misc_feature 1..120: note = Artificially Synthesized Probe
  source 1..120: mol_type = other DNA
tggcgaaacctcatctctactaaaatacaaaaattggccaggtgtggtggcaggtgcttgtaactccaggtactcatgaggctgaggtaggagaattgtttaaacctggaggtagaggtt

SEQ ID NO: 3477 - DNA, 120 bp, synthetic construct
  misc_feature 1..120: note = Artificially Synthesized Probe
  source 1..120: mol_type = other DNA
gggacatagtgccctgtgtcccagctgtttcagctcctgccatggctaaaaggagccaaggtcaggtcaggccattgcttcagagggtgcaagccccaagccttggtggcgtacacgaag

SEQ ID NO: 3478 - DNA, 120 bp, synthetic construct
  misc_feature 1..120: note = Artificially Synthesized Probe
  source 1..120: mol_type = other DNA
gtgaaaatggagtaatacactgaccttacctcacacttcccatctcattattattattttaatttagtcatggtaaaacaagcctggtgcagtggttcgcttctgtaatttctacacttt

SEQ ID NO: 3479 - DNA, 120 bp, synthetic construct
  misc_feature 1..120: note = Artificially Synthesized Probe
  source 1..120: mol_type = other DNA
atgctctttattttgaatattaccctgcagggttgtggaggtgtgcatttcttgtttctcactgagccttcactgtgatcaatccctgttgtttcctcccagactcaaatagaatgaacg

SEQ ID NO: 3480 - DNA, 120 bp, synthetic construct
  misc_feature 1..120: note = Artificially Synthesized Probe
  source 1..120: mol_type = other DNA
tagctgggactacaggcacctgccaccactcccagctaatttttttgtatttttagtagagacggggtttcaccgtgttagccaggatggtctcgatctcctgacctcgtgatacaactg

SEQ ID NO: 3481 - DNA, 120 bp, synthetic construct
  misc_feature 1..120: note = Artificially Synthesized Probe
  source 1..120: mol_type = other DNA
ttgacttggaagagtaattaacctttcccagagatggacacagtgatcctttggactttgtgtctcctctgggggaagggagtgaaagtatctttctaggaagagaaggtccatcactcg

SEQ ID NO: 3482 - DNA, 120 bp, synthetic construct
  misc_feature 1..120: note = Artificially Synthesized Probe
  source 1..120: mol_type = other DNA
gctgccttcagggttctctttatggctttgtcaatgcctctttagctaactccctacacattaaatactttatggtaaaataactcataaggttcctgttttcctaactggaccctggct

SEQ ID NO: 3483 - DNA, 120 bp, synthetic construct
  misc_feature 1..120: note = Artificially Synthesized Probe
  source 1..120: mol_type = other DNA
cctttcagagttctgtgcagaagagggagagggagtgctttgtgaaaggtaaaatcctgtagccggtgaaaggggttattctacaacctggtcttgtccttgagatgcttgcagcctgca

SEQ ID NO: 3484 - DNA, 120 bp, synthetic construct
  misc_feature 1..120: note = Artificially Synthesized Probe
  source 1..120: mol_type = other DNA
ttgaatttctaaggtaatttttgaggtgaatttcccaggggccccaaggctctaaattccaaggcccagcctggcccctccccactccctggtctggaggcctaactcaccctatcagca

SEQ ID NO: 3485 - DNA, 120 bp, synthetic construct
  misc_feature 1..120: note = Artificially Synthesized Probe
  source 1..120: mol_type = other DNA
atagacaaatggggtctcctataccacaggaaaggacagcaaggccagagaagaaaaagctccctcactccacagagcacagatggacaaaagcccctgctcctaggcccagctgtgcct

SEQ ID NO: 3486 - DNA, 120 bp, synthetic construct
  misc_feature 1..120: note = Artificially Synthesized Probe
  source 1..120: mol_type = other DNA
cagcctcttaatgcaactatgtaaatgggccaggatccagctggccagaaataagagtaggatccagctggccagaaataagagtagcatcctggagaacacagaggcagtgaggacagg

SEQ ID NO: 3487 - DNA, 120 bp, synthetic construct
  misc_feature 1..120: note = Artificially Synthesized Probe
  source 1..120: mol_type = other DNA
ataggcaagcagggagtcgttttcccagcagctctaggggaaggaaaataattcccccttgctggtgtatcaatattcaacttcttgtttaaatattaaattgtaatgtcctctgagtgc

SEQ ID NO: 3488 - DNA, 120 bp, synthetic construct
  misc_feature 1..120: note = Artificially Synthesized Probe
  source 1..120: mol_type = other DNA
ctcaaaaaaaaaaaaagaagattgtttctgtctcacattacagtcccaaggtgagtgctccaaggccactggggccactctgccacccccaaaatgtgccctgcaaagcactccagctgc

SEQ ID NO: 3489 - DNA, 120 bp, synthetic construct
  misc_feature 1..120: note = Artificially Synthesized Probe
  source 1..120: mol_type = other DNA
ttttgccaaatgcagaaatgttgctttcttgtctatgaacattttctcagagccctcttttccagctgacttgccctctcattggccagaatagcattatatgcccatttccactcaaat

SEQ ID NO: 3490 - DNA, 120 bp, synthetic construct
  misc_feature 1..120: note = Artificially Synthesized Probe
  source 1..120: mol_type = other DNA
atatgatttgtattatttaagtaaaacctgctcatttgaaatgctgctgtggctggagaaatcactgacttaacaatcctttgtattcatcaaaaacaaaacctgggccaggtgcagtgg

SEQ ID NO: 3491 - DNA, 120 bp, synthetic construct
  misc_feature 1..120: note = Artificially Synthesized Probe
  source 1..120: mol_type = other DNA
ttattctattgattattctcctgtgtttataatgcgggcggcagggtgggggtttctttaaaatgcttctcctgagcctaaagagcctccccacccagcccctgtctgagggaaggggca

SEQ ID NO: 3492 - DNA, 120 bp, synthetic construct
  misc_feature 1..120: note = Artificially Synthesized Probe
  source 1..120: mol_type = other DNA
ggcaggggatctctgctggcaggttatagagctgccctttctccttgggctctcccacaacgtgccagtagatcatgatggagacgaaaaacgtgaacttgaagccgatgatgaacaggg

SEQ ID NO: 3493 - DNA, 120 bp, synthetic construct
  misc_feature 1..120: note = Artificially Synthesized Probe
  source 1..120: mol_type = other DNA
caccgacaggataggacgctggaacccactaaagggtaacattcattcattcatagttcgataaatactggctgtccatcctgtccatgccaggtgactttctcagcatctcacacatag

SEQ ID NO: 3494 - DNA, 120 bp, synthetic construct
  misc_feature 1..120: note = Artificially Synthesized Probe
  source 1..120: mol_type = other DNA
tacctggtgtgttggaggaacttggtgcatgctgacctgaactgtatcgatgttaacagccagcgggatcaccatcgactctgacttctacgctccatgacaaagtcacaccccctttga

SEQ ID NO: 3495 - DNA, 120 bp, synthetic construct
  misc_feature 1..120: note = Artificially Synthesized Probe
  source 1..120: mol_type = other DNA
cagcacgcagcaggcacatgggaaaatggctcactctgacccattcactcaacagccagcaggatgctttacaagtatatcagccacgtcattctcagctcagaccctgaatgacatgag

SEQ ID NO: 3496 - DNA, 120 bp, synthetic construct
  misc_feature 1..120: note = Artificially Synthesized Probe
  source 1..120: mol_type = other DNA
ctgaaatggtagaacggtgtccagctcttagtatgtggtcaataaataggcagtgattccatgagttaaccaatgagtgaattaatgaatgatcagtaaatgaatgaatgagtgaacgag

SEQ ID NO: 3497 - DNA, 120 bp, synthetic construct; identical to SEQ ID NO: 8
  misc_feature 1..120: note = Artificially Synthesized Probe
  source 1..120: mol_type = other DNA

SEQ ID NO: 3498 - DNA, 120 bp, synthetic construct
  misc_feature 1..120: note = Artificially Synthesized Probe
  source 1..120: mol_type = other DNA
ctttgcactgcggactcatcctgaattttcttgccccctggtgtgagtggccacgaccctcctgtcactctcggtcacatcactcgacatttccttcaatgcccttggtcatgggcctgg

SEQ ID NO: 3499 - DNA, 120 bp, synthetic construct
  misc_feature 1..120: note = Artificially Synthesized Probe
  source 1..120: mol_type = other DNA
ctctcattctgttcctggtgctgacacaggttcagccgacagcaggagctcaacagatactgatgagatgaggaatggccctccaggagagccagaggctatttccactcttctcatgtt

SEQ ID NO: 3500 - DNA, 120 bp, synthetic construct
  misc_feature 1..120: note = Artificially Synthesized Probe
  source 1..120: mol_type = other DNA
aaaggaaacttctcccactaccttctccagagtccccatgaccctaaggtcacatgtggctttgaacatcactaacatagcagctccataaagaatgctcccgccgcagcaggagaaaaa

SEQ ID NO: 3501 - DNA, 120 bp, synthetic construct
  misc_feature 1..120: note = Artificially Synthesized Probe
  source 1..120: mol_type = other DNA
ctggagtgcagtggtgcgatctcggctcactgccaacttccgccgcccgggttcaagcgattctcttgcctcagcctcccaagtactacaggagtgcgccaccatgtctggctaattttt

SEQ ID NO: 3502 - DNA, 120 bp, synthetic construct
  misc_feature 1..120: note = Artificially Synthesized Probe
  source 1..120: mol_type = other DNA
ataaggagtgttttgcaaactctgaaagtgcagaactaggaagctgtccttggcccactcagcagtgatgtcgggaagatgacttgcagtgtgaccttagacaggtcactttcctttttg

SEQ ID NO: 3503 - DNA, 120 bp, synthetic construct
  misc_feature 1..120: note = Artificially Synthesized Probe
  source 1..120: mol_type = other DNA
ccccacaatctttcaaggcacaaataaatataatatttctacccaagaagtaagaatgacagtttttaggaggaagtaattggtataagaaggactgtttgtgcccaggcgcagtggctc

SEQ ID NO: 3504 - DNA, 120 bp, synthetic construct
  misc_feature 1..120: note = Artificially Synthesized Probe
  source 1..120: mol_type = other DNA
tcaccagagaaacccagagaactgtcctggcttctctcccaatttccaccaaaacctcctgttaattgccactccaggaaaattcaactaattcaaatatggaaaaaaatttaaaggcat

SEQ ID NO: 3505 - DNA, 120 bp, synthetic construct
  misc_feature 1..120: note = Artificially Synthesized Probe
  source 1..120: mol_type = other DNA
ttttagattagatttcaagcataacctgtaacctatctctattctctattcaagagacataccttaaacgaagtaacttagaatggttaaaaatataagaacagccgggtgcggtcgctt

SEQ ID NO: 3506 - DNA, 120 bp, synthetic construct
  misc_feature 1..120: note = Artificially Synthesized Probe
  source 1..120: mol_type = other DNA
tgagagactctttctcaaaatataacaccaccaccaccaacaaataccaaaacaccaagtatccatatctacaggatacagctacagcaatgatcaggatatttttagccaccagtgtat

SEQ ID NO: 3507 - DNA, 120 bp, synthetic construct
  misc_feature 1..120: note = Artificially Synthesized Probe
  source 1..120: mol_type = other DNA
aaagctggcttgttggaaaaaagccaataaaatatacaaccaccaactaacctaatcaagataggagggtggggagaaagcttcccatacaaactaggaaacgctaaatgggaaaataac

SEQ ID NO: 3508 - DNA, 120 bp, synthetic construct
  misc_feature 1..120: note = Artificially Synthesized Probe
  source 1..120: mol_type = other DNA
taagtaaagcaaatacttaaaccaaaacctgacaacggcttcacagaatatccttctgaccaatttcacttatgaatattattgtaaaaatccaaaataaaatataagcaaatagaattc

SEQ ID NO: 3509 - DNA, 120 bp, synthetic construct
  misc_feature 1..120: note = Artificially Synthesized Probe
  source 1..120: mol_type = other DNA
tataaataacaagtcactagaaggtatgggaaaagagaagaccccgcttacaacaacagtcgcgatactcagggttaaacttaacaaaagatattaaacatctatgtgaggctgggtgca

SEQ ID NO: 3510 - DNA, 120 bp, synthetic construct
  misc_feature 1..120: note = Artificially Synthesized Probe
  source 1..120: mol_type = other DNA
gcaatttaacaacatctatctcactctggggctttatcctacagatgaatgacatttgcacaaggtcacaggtttgcagttgcaaaagattagaaacaacccaaggtctttcttgaagag

SEQ ID NO: 3511 - DNA, 120 bp, synthetic construct
  misc_feature 1..120: note = Artificially Synthesized Probe
  source 1..120: mol_type = other DNA
ctggcaaatgcaatgcccatggaaagggcatctagaaatcttggtctgagttagaagagtcctgagttcgttctatttgaaagaaagtttccatattgcttcactttcacctgttttact

SEQ ID NO: 3512 - DNA, 120 bp, synthetic construct
  misc_feature 1..120: note = Artificially Synthesized Probe
  source 1..120: mol_type = other DNA
ttcatctgtaaaataaagagctgagaaaagacaatctcttaggacccttctagaaaggccttcctaatctggtctcctggcaccacctctgtccattccatcagaagccaacatcactga

SEQ ID NO: 3513 - DNA, 120 bp, synthetic construct
  misc_feature 1..120: note = Artificially Synthesized Probe
  source 1..120: mol_type = other DNA
tgtctcaaaaaaaaaaaaaaaaaaaaaaaaaaaaaaaaggcaggaatggtggctccctcctgtaattccagaattttggaaggccaaggcgggagcatcacttgagcccaggagtccggg

SEQ ID NO: 3514 - DNA, 120 bp, synthetic construct
  misc_feature 1..120: note = Artificially Synthesized Probe
  source 1..120: mol_type = other DNA
gtgacttacgtcttagagatctaagagagcaatacagcttcataccataaattccaaggcaacattgtctcccaccttaaggtagttcctgccttcatttcatacatttcctatcttgac

SEQ ID NO: 3515 - DNA, 120 bp, synthetic construct
  misc_feature 1..120: note = Artificially Synthesized Probe
  source 1..120: mol_type = other DNA
aaatgtgatctcactgttgtttctgtttgcactgctgacggggtgagaaggcttctccagtgttgagttaacatttattaaaagctcactgtcaggcctggagctgtgtggtttaatagt

SEQ ID NO: 3516 - DNA, 120 bp, synthetic construct
  misc_feature 1..120: note = Artificially Synthesized Probe
  source 1..120: mol_type = other DNA
ggatatgtccagagggaagacaaaggtggcagatgggagaggaaaaggcacttattcaaagagctgccacttcctgatagctacaagaaacagagcctcggagagaagagcaattcccaa

SEQ ID NO: 3517 - DNA, 120 bp, synthetic construct
  misc_feature 1..120: note = Artificially Synthesized Probe
  source 1..120: mol_type = other DNA
aatatctagctgggtccagatacagccattctagaagttcatacgcactgattaccaggttaattccttcccaggaaagatgtggccatgtataaatgtatgcagaaattcaatgtaaca

SEQ ID NO: 3518 - DNA, 120 bp, synthetic construct
  misc_feature 1..120: note = Artificially Synthesized Probe
  source 1..120: mol_type = other DNA
ccattttggagtttatcctctaatactgagctgtcctagcagacaagaaacgacaggcacccaaggcattagaaaaatgtttgagagaaaaactaatgacaacattgggtgtagtggtgt

SEQ ID NO: 3519 - DNA, 120 bp, synthetic construct
  misc_feature 1..120: note = Artificially Synthesized Probe
  source 1..120: mol_type = other DNA
aaatggcgctttaacccactcagggccagaggctcagccgagactatccaggtgggaacttgtccctccggatgacaggtgatgaaactgagggaaggggactcgccctggcagtgaaac

SEQ ID NO: 3520 - DNA, 120 bp, synthetic construct
  misc_feature 1..120: note = Artificially Synthesized Probe
  source 1..120: mol_type = other DNA
gctgcaagttcgaactgatgctacgtttcagtctttcatgaaggtgagtctgtctgtctcctttaatagggctaaaagcaactaatcctatagccagattcacatagaaacttatgactt

SEQ ID NO: 3521 - DNA, 120 bp, synthetic construct
  misc_feature 1..120: note = Artificially Synthesized Probe
  source 1..120: mol_type = other DNA
ctccctatatgccaggttctttggtaagtagtccacatgacttactgtattgactcccttaggagagctgttaacattatactaatgttgtcaatgaaaaagctaagataggccaggcat

SEQ ID NO: 3522 - DNA, 120 bp, synthetic construct
  misc_feature 1..120: note = Artificially Synthesized Probe
  source 1..120: mol_type = other DNA
aaccttatttctcatcttcctatacttatacacatacctaacccataggtctctgcctccttcacttaggtagatctctttctctcatgcatccatctctaactgcccacatccttcaat

SEQ ID NO: 3523 - DNA, 120 bp, synthetic construct
  misc_feature 1..120: note = Artificially Synthesized Probe
  source 1..120: mol_type = other DNA
gatgggccttggcgggagaaagctctggaatggaagaagagggaaaatattaagaatccactgagatttctggcagcttccatattaagagtttacatgatcatgcctgtaatctcagca

SEQ ID NO: 3524 - DNA, 120 bp, synthetic construct
  misc_feature 1..120: note = Artificially Synthesized Probe
  source 1..120: mol_type = other DNA
attagataagaggtagaaatagagacacattttctctacacctgaggctccttgcctggtctctatgggtgattaacaggtctatataaaagcttcaaatgcccatgtaccccagaaatt

SEQ ID NO: 3525 - DNA, 120 bp, synthetic construct
  misc_feature 1..120: note = Artificially Synthesized Probe
  source 1..120: mol_type = other DNA
aatgtattatccttctgttctgaatttcagaagttcaaataggctttcactagctgacaccaacggaccatctgattctctgccttttcggggtgttaaagctgtactccttgtaatcct

SEQ ID NO: 3526 - DNA, 120 bp, synthetic construct
  misc_feature 1..120: note = Artificially Synthesized Probe
  source 1..120: mol_type = other DNA
caagcactgtcctagttccttgccttgcataccagactttatgtaatgtttacaactctatgaccttgtccaaacagcacactcattttgaagatgatgaaacaagttcagaaggtgaag

SEQ ID NO: 3527 - DNA, 120 bp, synthetic construct
  misc_feature 1..120: note = Artificially Synthesized Probe
  source 1..120: mol_type = other DNA
aaaaaaaaaaagaagggagcaaacatgcatggcttgcatctgagatctctttctgctggagcttggaatgcatgatttgccctggcttccctaacaaaaacacctgttttattttgtttt

SEQ ID NO: 3528 - DNA, 120 bp, synthetic construct
  misc_feature 1..120: note = Artificially Synthesized Probe
  source 1..120: mol_type = other DNA
aaaagcatcctagtttgcaggctgtatgaacacaagcagcagggcaaatttgcccaacagacactcatttgcctactcatgtcataaaatctttatgcagcaacattttaagtgtatgtt

SEQ ID NO: 3529 - DNA, 120 bp, synthetic construct
  misc_feature 1..120: note = Artificially Synthesized Probe
  source 1..120: mol_type = other DNA
atttgcacctctgcctgcaggtttcatggtcacatggtcaccgttgcttaggtttctggctgcatcaaattattactgcagtccctgtgtcttcatgttgtccctttttgtgtgtgctct

SEQ ID NO: 3530 - DNA, 120 bp, synthetic construct
  misc_feature 1..120: note = Artificially Synthesized Probe
  source 1..120: mol_type = other DNA
cctccccactccatttttgaggatagctcagttatccccagcttctatcattccctttccagactccattaactgacaaaaacgttccctctttttcatttattcagccaatatttactg

SEQ ID NO: 3531 - DNA, 120 bp, synthetic construct
  misc_feature 1..120: note = Artificially Synthesized Probe
  source 1..120: mol_type = other DNA
ttggcttttaccctgagagtgattgaggtatttggagggatggtgagcagaggatgacatgtacagacatattttacagggctcacactagctatcatatgatggatacaaaagccaaga

SEQ ID NO: 3532 - DNA, 120 bp, synthetic construct
  misc_feature 1..120: note = Artificially Synthesized Probe
  source 1..120: mol_type = other DNA
cactatagatgatttcctgattgtgtctgtgtttttgtctcacatcctcatgattaagagttccagacatctagccacatgttaaaaccttagggttcaaggtgaggtgaggaagaatga

SEQ ID NO: 3533 - DNA, 120 bp, synthetic construct
  misc_feature 1..120: note = Artificially Synthesized Probe
  source 1..120: mol_type = other DNA
acatcattaaagccttggcacccccttctataaatgcagcatctcagagctacaaacacacctcgcaagtacacagtacaatgggcatcaaacatttttagctgtgaaacgttttttaaa

SEQ ID NO: 3534 - DNA, 120 bp, synthetic construct
  misc_feature 1..120: note = Artificially Synthesized Probe
  source 1..120: mol_type = other DNA
attctgttaaaaaaaaaaaagttcctagaaattctgagaatctaagacattgtagttattcaacacacatcgggtccttccaaggggcccacggaaggacctaatgacataatggtgacc

SEQ ID NO: 3535 - DNA, 120 bp, synthetic construct
  misc_feature 1..120: note = Artificially Synthesized Probe
  source 1..120: mol_type = other DNA
atgtggtcttttctgactgcgttctttcactaatacttttttaaaggttcatgctagttgtagcatgaagttctgcttcattcctctttgtggctgaacgaaattgcattgtatggatat

SEQ ID NO: 3536 - DNA, 120 bp, synthetic construct
  misc_feature 1..120: note = Artificially Synthesized Probe
  source 1..120: mol_type = other DNA
taacagttctttgtgtattttgaatgtaagtcctttatcaggtatgtgccctgtaaatatgttctctccgtctgtagcttgtattgtcgttctcttgacaattcttttgcagagcaattt

SEQ ID NO: 3537 - DNA, 120 bp, synthetic construct
  misc_feature 1..120: note = Artificially Synthesized Probe
  source 1..120: mol_type = other DNA
tttgtgggcattaagtgaggtgagcatgcaacggtttttgaacagagctgacacggaggtacttgttcaagaaatgagatgctattattactactctttgtagcatagtttaaggtttcc

SEQ ID NO: 3538 - DNA, 120 bp, synthetic construct
  misc_feature 1..120: note = Artificially Synthesized Probe
  source 1..120: mol_type = other DNA
atctcctttttagggatctgaagaatctgctgtgtgaccctagggaaataaatctctgattctctctgggctttggttttccccgcctctgaaaggggtatgatgtttcctttccttttg

SEQ ID NO: 3539 - DNA, 120 bp, synthetic construct
  misc_feature 1..120: note = Artificially Synthesized Probe
  source 1..120: mol_type = other DNA
acatgaaatttatgtccttaaagcaaaaaggcaaggggaaaggaaaaggagactcatgtcccttgggacagggagtttgtggacatggagttcattcctctccatgtggcaaaaattctg

SEQ ID NO: 3540 - DNA, 120 bp, synthetic construct
  misc_feature 1..120: note = Artificially Synthesized Probe
  source 1..120: mol_type = other DNA
atgagcagcaggaagccgtagtgcagggtggtgctgacggtctcagtgcccccaacgaagaggttcaacgtggtcagcaccaggttcttcaagtagaactctgtgttggggttcttctcc

SEQ ID NO: 3541 - DNA, 120 bp, synthetic construct
  misc_feature 1..120: note = Artificially Synthesized Probe
  source 1..120: mol_type = other DNA
tctgaaccacttagggtaaattacatacaacataggttttacctctcaatactttggagagtatctcctaaaaatggggacattttctgatataactgcagttacatttatcagctatag

SEQ ID NO: 3542 - DNA, 120 bp, synthetic construct
  misc_feature 1..120: note = Artificially Synthesized Probe
  source 1..120: mol_type = other DNA
ctctaatcggcccatctctttccctttctgtgtggttaccaggttactggaggccacttagttgttggttttggttgggactttctggacttcagatctcagccctcgtttactcacccc

SEQ ID NO: 3543 - DNA, 120 bp, synthetic construct
  misc_feature 1..120: note = Artificially Synthesized Probe
  source 1..120: mol_type = other DNA
ttcactgattcctctacccaccgactcattcctttcctcattcattcattcctctgcagttccatgccaaacctttctcacctccctgtcctcccacctcagcctgcttggatccttttc

SEQ ID NO: 3544 - DNA, 120 bp, synthetic construct
  misc_feature 1..120: note = Artificially Synthesized Probe
  source 1..120: mol_type = other DNA
aaacctccttccatggggaccttcccatatagcaatccccagattgaaatcaatccaggatgagaaaacacatcctcttgagcagacagcttgtcttctctctctgctttggtatttacc

SEQ ID NO: 3545 - DNA, 120 bp, synthetic construct
  misc_feature 1..120: note = Artificially Synthesized Probe
  source 1..120: mol_type = other DNA
aggagaagacggatatcccagcagcagaagagagagcaagttcttcctttcctctgccttttgtcctgttcatgccctcaatggattggatggggtctggcgtctcagggtgggtggact

SEQ ID NO: 3546 - DNA, 120 bp, synthetic construct
  misc_feature 1..120: note = Artificially Synthesized Probe
  source 1..120: mol_type = other DNA
ctctgctcacttagtcattcctctcctcactcaactcattcctcactcactcattcctgtcctcactcactcattcctctgctcactctctcattcccctcctcactcactcatttctct

SEQ ID NO: 3547 - DNA, 120 bp, synthetic construct
  misc_feature 1..120: note = Artificially Synthesized Probe
  source 1..120: mol_type = other DNA
aattaaccatcacaggaagtgacagcccttgacttgctttcagatcactcctacagaggagggcttgaagaactcgacccagatgtcggccacctattcccagggctttacggtatggct

SEQ ID NO: 3548 - DNA, 120 bp, synthetic construct
  misc_feature 1..120: note = Artificially Synthesized Probe
  source 1..120: mol_type = other DNA
tgaatccaggtgtcaatgaacattatcagggatctgtctccttttcttaatttcaccatttctctgcatcactttttcttttaaggcagccgttctcttatctgtcaaccatgggtccta

SEQ ID NO: 3549 - DNA, 120 bp, synthetic construct
  misc_feature 1..120: note = Artificially Synthesized Probe
  source 1..120: mol_type = other DNA
ttaaaggtattttgtagagtgtggagctgtgttcagttgttgcagaacatgttgggatatataggagccatgtcaaggcgtgctggggtgtgctatgacctgttaggttgtgtcatagct

SEQ ID NO: 3550 - DNA, 120 bp, synthetic construct
  misc_feature 1..120: note = Artificially Synthesized Probe
  source 1..120: mol_type = other DNA
tagagttattacatcatcatttcaccacattgtactggccaaagaaagtcgaaagtcaaaagtccagtacagactcaaaggggtgtaaaatagaacgcatctcttaatgggagttgctga

SEQ ID NO: 3551 - DNA, 120 bp, synthetic construct
  misc_feature 1..120: note = Artificially Synthesized Probe
  source 1..120: mol_type = other DNA
taagttgtctaagttaattttaataatcctgtgaggttatggttatttttgtcctattgcagatgatgaactgagggccagagagattagggagctggacagagttcaaccagccaggaa

SEQ ID NO: 3552 - DNA, 120 bp, synthetic construct
  misc_feature 1..120: note = Artificially Synthesized Probe
  source 1..120: mol_type = other DNA
aatcaggaaaagtggtatgaagtttatcaagacatttccagagaccttttgtagtttcagctgatgatggatgtgataagagctgagctgtgtgggaaactgatagcccaccaccacgcc

SEQ ID NO: 3553 - DNA, 120 bp, synthetic construct
  misc_feature 1..120: note = Artificially Synthesized Probe
  source 1..120: mol_type = other DNA
acacaatgtttttacctgtaaatgcacaagaatttgcaccaaggagaggggcccccacattatgagtattatagcttatataggacagctagctcatatgctccttctttattacagggt

SEQ ID NO: 3554 - DNA, 120 bp, synthetic construct
  misc_feature 1..120: note = Artificially Synthesized Probe
  source 1..120: mol_type = other DNA
attgaatggtgagtgcaagttcttctggcctgttcctgagcccatcattggttctgctccccaagtgaggaggggtggaggagttgttttgtggattcttccactattgcttagtgggta

SEQ ID NO: 3555 - DNA, 120 bp, synthetic construct
  misc_feature 1..120: note = Artificially Synthesized Probe
  source 1..120: mol_type = other DNA
ttcactcctttcttgtttactctgaattatcatatttttttcaaacatctttacttcctgaatgtttactcttctgttccctaattcctaccctccggtccagtccagggagtcctaagg

SEQ ID NO: 3556 - DNA, 120 bp, synthetic construct
  misc_feature 1..120: note = Artificially Synthesized Probe
  source 1..120: mol_type = other DNA
ccgtgtcctcccgtccaagcctttgctcagcacagcagtcctaaaaggtggcaacactttttatgcttttaaaaaccaagatatcaagtaatactgtgcactttgtaaacaaaaaaaagt

SEQ ID NO: 3557 - DNA, 120 bp, synthetic construct
  misc_feature 1..120: note = Artificially Synthesized Probe
  source 1..120: mol_type = other DNA
ttccttattgtatctcacaggggaccttggggaagtcagacaactagctcaggtgaggtcacaggttgaacgaaatgcccaaatgaatttcttgatataacctcgagtggggatgaactc

SEQ ID NO: 3558 - DNA, 120 bp, synthetic construct
  misc_feature 1..120: note = Artificially Synthesized Probe
  source 1..120: mol_type = other DNA
tggacagtcacatgtagaaaaatgaaactgcatccccatctctcaccttgtacaaaaatcaaaggcttaaatctaagacagaaaccataacaattttataagataaccttggaaaaactc

SEQ ID NO: 3559 - DNA, 120 bp, synthetic construct
  misc_feature 1..120: note = Artificially Synthesized Probe
  source 1..120: mol_type = other DNA
atccatgtaaccaaaccacttatatcccaaatgctattgaaataaaaggaagtaaagaagagacagatctgcacattaacaatatatctttgggagcttttctttttctaaaaatatgag

SEQ ID NO: 3560 - DNA, 120 bp, synthetic construct
  misc_feature 1..120: note = Artificially Synthesized Probe
  source 1..120: mol_type = other DNA
agggttattcttgacattcctgctatcccacctaatatcctccctttctccaagggggcctgtagagatacttatttgtcatctatctgtctgtctgtttacatctatctacatatcttt

SEQ ID NO: 3561 - DNA, 120 bp, synthetic construct
  misc_feature 1..120: note = Artificially Synthesized Probe
  source 1..120: mol_type = other DNA
atttttatgaagttacatttgttcgtattttcttttgtaccacactacccagctatttcccagagttttgtggggcttcctttggcagatgggaagtttccacttattcacatgcccgtc

SEQ ID NO: 3562 - DNA, 120 bp, synthetic construct
  misc_feature 1..120: note = Artificially Synthesized Probe
  source 1..120: mol_type = other DNA
tgagaaaattatttcatagcgccagagtagggataaccttattttgacgtaagtcccaggggctatgaaaaagtgataaactgttaaatgagagaaaagatacacgccagccacggtggt

SEQ ID NO: 3563 - DNA, 120 bp, synthetic construct
  misc_feature 1..120: note = Artificially Synthesized Probe
  source 1..120: mol_type = other DNA
tgccattgcttttggtgttttagacatgaagtccttgcccatgtctatgtcttgaatggtaatgcctcggttttcttctagggtttttatggttttaggtctaacgtttaagtctttatt

SEQ ID NO: 3564 - DNA, 120 bp, synthetic construct
  misc_feature 1..120: note = Artificially Synthesized Probe
  source 1..120: mol_type = other DNA
ctgcctaattgccctggccagaacttccaacactttatgcagccaaaaaacacatgaaaaaatgctcaccatcactggccatcaaagaaatgcaaatcaaaaccacaatgagataccatc

SEQ ID NO: 3565 - DNA, 120 bp, synthetic construct
  misc_feature 1..120: note = Artificially Synthesized Probe
  source 1..120: mol_type = other DNA
attctcaaatgtttgatccccgtggagtttattttgtgatagggagaaaaggtctcatttgcaaatagaaaaggtggagagttgtgtatttgttcccttgataatgactggggctggggt

SEQ ID NO: 3566 - DNA, 120 bp, synthetic construct
  misc_feature 1..120: note = Artificially Synthesized Probe
  source 1..120: mol_type = other DNA
gcagggttttgatgaggaaaatccaacatcacctcaccccaaaacacacacaagtgtctctccaaggctgctggacataggaaatcccactggcaaaccttctttgtctcacctgcaggt

SEQ ID NO: 3567 - DNA, 120 bp, synthetic construct
  misc_feature 1..120: note = Artificially Synthesized Probe
  source 1..120: mol_type = other DNA
ttgctggcttggaggatgagtggttttctaactgaaaccaagcccctggcaacgtcctaatgattcaggctgggcctttctggactttaatcagtttctctgtctttctcaatctaagtg

SEQ ID NO: 3568 - DNA, 120 bp, synthetic construct
  misc_feature 1..120: note = Artificially Synthesized Probe
  source 1..120: mol_type = other DNA
ctgtgaggacctcctcatatgcccacctctgggctgaaatgactcccagaacaaggaaatttttcctctcaagctaagtgggcctctgtgagtggacagtgtgtcttttccttctgcctt

SEQ ID NO: 3569 - DNA, 120 bp, synthetic construct
  misc_feature 1..120: note = Artificially Synthesized Probe
  source 1..120: mol_type = other DNA
tagatagatagaagagggagtttatttcgggaattggctcacaggattatagaagctgagatgcgtcatggactgctgtctgcaggctggataaacagacactggttgtgtaactgagtc

SEQ ID NO: 3570 - DNA, 120 bp, synthetic construct
  misc_feature 1..120: note = Artificially Synthesized Probe
  source 1..120: mol_type = other DNA
atctggactgttatttctgtgatgtccatctctggtgtgggtcaagtccttttaccccatcctgtagtttgtctgccctaagttcattgcttttctgctctaggccctgggaatctccaa

SEQ ID NO: 3571 - DNA, 120 bp, synthetic construct
  misc_feature 1..120: note = Artificially Synthesized Probe
  source 1..120: mol_type = other DNA
gcttgtcttcctttcttggctttagctttttccacgccacttttgctttcaagacagtctttccctcatgacgtcaacaatgagtcctagaagctcaattctcatgggaaagcccacatt

SEQ ID NO: 3572 - DNA, 120 bp, synthetic construct
  misc_feature 1..120: note = Artificially Synthesized Probe
  source 1..120: mol_type = other DNA
ttttaaggtcatgttagaccatctcatgtgcatgttagagcataccatctcatgttaggaattgtcatgtattttgtggccatgtcaggacttgtgaacacatgtcagtgtcatgtctca

SEQ ID NO: 3573 - DNA, 120 bp, synthetic construct
  misc_feature 1..120: note = Artificially Synthesized Probe
  source 1..120: mol_type = other DNA
gaaggtgtctgtttctatgttcgcgtcacccgaaccctgtaaactcaagagggtaatgacaacaattgcataatagctgttgctgataagaaacaacctgaaaactcattggtttaaacc

SEQ ID NO: 3574 - DNA, 120 bp, synthetic construct
  misc_feature 1..120: note = Artificially Synthesized Probe
  source 1..120: mol_type = other DNA
aactctgagaaatttttcaagttaagaacatcagcgtgttgcatttgtgacatgcccagaaagggtgctcaggactcatggaggactacctctacaaacctaggatatttttataatcaa

SEQ ID NO: 3575 - DNA, 120 bp, synthetic construct
  misc_feature 1..120: note = Artificially Synthesized Probe
  source 1..120: mol_type = other DNA
atcagacaaaccttcttggaggagttgttatacctgatcgttgaaggactggtatgaattttatcttgaggtttccagggactcattaaaagggtttgaactggtgggtgtggtcaaagt

SEQ ID NO: 3576 - DNA, 120 bp, synthetic construct
  misc_feature 1..120: note = Artificially Synthesized Probe
  source 1..120: mol_type = other DNA
caggtcagagataggttttggagatagctctgtggactagcacctaccaggggactgctaaatgaaattgtgatgagtctgagatttactctatttataagttaataagctaattggcca

SEQ ID NO: 3577 - DNA, 120 bp, synthetic construct
  misc_feature 1..120: note = Artificially Synthesized Probe
  source 1..120: mol_type = other DNA
agccactgtgccccaccttgtcatgtcttttctatgtctgtgtttatgtctttttctatatctatattttcgttcttgtctatgtctatgtgtctgtgtctatgtctttttcttttctct

SEQ ID NO: 3578 - DNA, 120 bp, synthetic construct
  misc_feature 1..120: note = Artificially Synthesized Probe
  source 1..120: mol_type = other DNA
ccagctttgtgagagattatgtgctttgttctggatgccatattccatagacttacaactcaaatgtctccagggagataagattcatttaccactgtagaatgtgggcaaatatctttg

SEQ ID NO: 3579 - DNA, 120 bp, synthetic construct
  misc_feature 1..120: note = Artificially Synthesized Probe
  source 1..120: mol_type = other DNA
ccaagaaatatttttttgaatgtcttcacttgttgaatgtttgctcttctgttccctaattcctacccttccatccagtccagggatttataagggagacctgggggtaaaattcatcca

SEQ ID NO: 3580 - DNA, 120 bp, synthetic construct
  misc_feature 1..120: note = Artificially Synthesized Probe
  source 1..120: mol_type = other DNA
tcttggactcagtgtcctcccgtccatgcctttgcccagcacagcagtcctgggaagggaagaaacatttttatgcttctaaaataaagaatatttttgcaattttattttttaaaacac

SEQ ID NO: 3581 - DNA, 120 bp, synthetic construct
  misc_feature 1..120: note = Artificially Synthesized Probe
  source 1..120: mol_type = other DNA
aatggtcgaaagactttatgacaaaaatgaagttccttattaagctccaccttagcggtgactacagtcaacagttctctgtgtattcttctagaaaatggctatcccgatgcccacatt

SEQ ID NO: 3582 - DNA, 120 bp, synthetic construct
  misc_feature 1..120: note = Artificially Synthesized Probe
  source 1..120: mol_type = other DNA
aaagagttcttcttgtaccaaatgagacattacagataagactagggttttccttgacaatcctgccacctgacctaatcctttctcattctccaaaggtgtttctagagccatagattt

SEQ ID NO: 3583 - DNA, 120 bp, synthetic construct
  misc_feature 1..120: note = Artificially Synthesized Probe
  source 1..120: mol_type = other DNA
cacgtgtgcacagtgaccattccttacatgcataggcatctctgcaggacaaattctctgaagtgcaattgctgaatcaaagaccatttgcactgtataatcattatttttttgagacag

SEQ ID NO: 3584 - DNA, 120 bp, synthetic construct
  misc_feature 1..120: note = Artificially Synthesized Probe
  source 1..120: mol_type = other DNA
ctgcgactttgtaacaattcttttaaaaagtttatttcgttacagggagaaaaggtctcacttgcaaacagagagaagctggagagttgtgtctttgctcccttgataaggattggggct

SEQ ID NO: 3585 - DNA, 120 bp, synthetic construct
  misc_feature 1..120: note = Artificially Synthesized Probe
  source 1..120: mol_type = other DNA
ctgattcatcaaaagtgaggcctagaattaccctaagaccctgttccacagtcctgtattccatcctagatatctactcaaaataattgagacaagtgttcaaacagaaagacgcttgtg

SEQ ID NO: 3586 - DNA, 120 bp, synthetic construct
  misc_feature 1..120: note = Artificially Synthesized Probe
  source 1..120: mol_type = other DNA
tatagcaatagatgcacagatattcctgtaagatacaggtgtggttagacacttttctagaacaggcatgccctgcaaactccacagacactgactgtttttgtcctattaagaagtaga

SEQ ID NO: 3587 - DNA, 120 bp, synthetic construct
  misc_feature 1..120: note = Artificially Synthesized Probe
  source 1..120: mol_type = other DNA
ccataagtaacgtatgagaattctaggtcctccaaataattagcagtccttcgtagtgtcagtttttgtttcagccttccttatgggtatgctgtggcatatccctgagattttaattcg

SEQ ID NO: 3588 - DNA, 120 bp, synthetic construct
  misc_feature 1..120: note = Artificially Synthesized Probe
  source 1..120: mol_type = other DNA
tgttggaccaataccacactgccctagtcactgttgcattatagtatatctttaaaggagtaatgggaatccttcaactacattttttccccaataatttttggctattctgcttccttt

SEQ ID NO: 3589 - DNA, 120 bp, synthetic construct
  misc_feature 1..120: note = Artificially Synthesized Probe
  source 1..120: mol_type = other DNA
ggtgctcggagccttcccttcgctgccctcctgccccctccctgcttctgcaagcgtgtttcaatttgtacaacgtgcataaaacatgaaattacccttggccacttccaggcgcgcagc

SEQ ID NO: 3590 - DNA, 120 bp, synthetic construct
  misc_feature 1..120: note = Artificially Synthesized Probe
  source 1..120: mol_type = other DNA
aagactacatctctaaaacaaaacagaattcccctccccaccaaaccccacaagtttgttctctaagctctggaggccaaaagtgtgaaatcagggtatcacagggctgcgctccctcca

SEQ ID NO: 3591 - DNA, 120 bp, synthetic construct
  misc_feature 1..120: note = Artificially Synthesized Probe
  source 1..120: mol_type = other DNA
tttcaaataaggtcccattcacaggtcttggggcattgggaagcagacgtatctttttggagcccattaggtaagatgcagggctcctggccaacaatgcctgctcctctcctcccactg

SEQ ID NO: 3592 - DNA, 120 bp, synthetic construct
  misc_feature 1..120: note = Artificially Synthesized Probe
  source 1..120: mol_type = other DNA
cttgtagaagattgaaattattaagaacactcagaaagtttccagaccgtgtaatctgggagtgcagcgtatgttaaaacagttcagaaagttagcaagttgaactggggtctaggctca

SEQ ID NO: 3593 - DNA, 120 bp, synthetic construct
  misc_feature 1..120: note = Artificially Synthesized Probe
  source 1..120: mol_type = other DNA
taggtgaattatcccttcatgtggcttgcttttggagagagagcttgtctagacttctgaaaactcattaagcatcatattcaaaaatctagaccatttgctcaggatggatgctgcaga

SEQ ID NO: 3594 - DNA, 120 bp, synthetic construct
  misc_feature 1..120: note = Artificially Synthesized Probe
  source 1..120: mol_type = other DNA
aagaaataaaaggaagtgtaggtggacagatggatttaggaaaatcaccagttggcaaccatcctagtaactgatttggtctaggataatcaaagatgttaatgggtgaagcttgaggag

SEQ ID NO: 3595 - DNA, 120 bp, synthetic construct
  misc_feature 1..120: note = Artificially Synthesized Probe
  source 1..120: mol_type = other DNA
atgacatcttggtttgtgtgtctcagtgtttgttctgtggtttttcggtgctatctcaatgcatctgtggtgtgtaatcatttccccccatttggcaatgcccatgcccatttcttggca

SEQ ID NO: 3596 - DNA, 120 bp, synthetic construct
  misc_feature 1..120: note = Artificially Synthesized Probe
  source 1..120: mol_type = other DNA
tcatgtgtggggcttgctgtctccagggtttatttcatgtacatgggcagattccttttcccagagcacggaactttggtttctccaaacccctagccactgggtgtgctctaggctttg

SEQ ID NO: 3597 - DNA, 120 bp, synthetic construct
  misc_feature 1..120: note = Artificially Synthesized Probe
  source 1..120: mol_type = other DNA
cctgacccagggtgccagggcgtggcaggcatgaggggatcctgacccagggcgccagggcgtggcaggcgtgaggggatcctgacccagggcgccagggcgtggcaggcgtgaggggat

SEQ ID NO: 3598 - DNA, 120 bp, synthetic construct
  misc_feature 1..120: note = Artificially Synthesized Probe
  source 1..120: mol_type = other DNA
ggcagctgcttggtgcagaggtcgccacggggtgtcctctcacggctctcatgggcccacgtggtggcacaggtgcatggggcccctcggggtgggaggtcttggttcctggccctgggc

SEQ ID NO: 3599 - DNA, 120 bp, synthetic construct
  misc_feature 1..120: note = Artificially Synthesized Probe
  source 1..120: mol_type = other DNA
gtcagaggacacttcatttcataagaaaacaggcttgtgttgcctcattcaccccatcgtgttggttgagtagcttgtggagtaaggttgagggacatgctgtcatttggcatcagttca

SEQ ID NO: 3600 - DNA, 120 bp, synthetic construct
  misc_feature 1..120: note = Artificially Synthesized Probe
  source 1..120: mol_type = other DNA
tgttgtgatgtgtgttccgtattttaagcaatctcaccaggattattattttatggccactttctctgccctccactctcttgtgtccgatcttctgtctgggattatgttgcaaacata

SEQ ID NO: 3601 - DNA, 120 bp, synthetic construct
  misc_feature 1..120: note = Artificially Synthesized Probe
  source 1..120: mol_type = other DNA
tggacgcctgtaatcccagctacttgggaggctgaggcaggagaattgcttcagaccataaggcagaggttacagtgggctgagatcatgccactgcactccagcctgggtgacagagca

SEQ ID NO: 3602 - DNA, 120 bp, synthetic construct
  misc_feature 1..120: note = Artificially Synthesized Probe
  source 1..120: mol_type = other DNA
agttcacaggatgaaattctgtgaaactcccaggtagcaagtcagtgtagggctgtgtcgggctgatccatggtcatgatttatcaggagagtgtttttttttttttttacattattctt

SEQ ID NO: 3603 - DNA, 120 bp, synthetic construct
  misc_feature 1..120: note = Artificially Synthesized Probe
  source 1..120: mol_type = other DNA
gggcagccttgactgcttctgccgacttactctctgggcggcagtgccatctggatcggtggttcctcttcatccaggttttctgtgttctgctctgatcccactccaactgcagtcacc

SEQ ID NO: 3604 - DNA, 120 bp, synthetic construct
  misc_feature 1..120: note = Artificially Synthesized Probe
  source 1..120: mol_type = other DNA
aacacgcctgttggatgaggtcctgagtgcagggaagacctgagtgctgattgtgttaagagaaatgcagccattcccaaaggctgcctgttgctggctctgtgtttgcagaattcccaa

SEQ ID NO: 3605 - DNA, 120 bp, synthetic construct
  misc_feature 1..120: note = Artificially Synthesized Probe
  source 1..120: mol_type = other DNA
tgtgtaaggtttgtagttacacagatttcctgatcttctgcaggaaggacgggaaggaactaagtggctatttttggtgagctgggagactttctttccatttcttcttttctttgtttt

SEQ ID NO: 3606 - DNA, 120 bp, synthetic construct
  misc_feature 1..120: note = Artificially Synthesized Probe
  source 1..120: mol_type = other DNA
acagtgtgggatgtggctgaaatgtgactgggtttcatggctttgagagagtagcctctttggatggaaaatgtattcctggtgtctaggccattttcattaatatttaaaaagtacttc

SEQ ID NO: 3607 - DNA, 120 bp, synthetic construct
  misc_feature 1..120: note = Artificially Synthesized Probe
  source 1..120: mol_type = other DNA
tctgttgactgaggcatgatcaagtgtgcgtccttcctaggtctctgcctgccattcctgcatttttctaagtggactgtgacagtcagctcccttacattctgccgcagtaacaagcaa

SEQ ID NO: 3608 - DNA, 120 bp, synthetic construct
  misc_feature 1..120: note = Artificially Synthesized Probe
  source 1..120: mol_type = other DNA
tctgctgttgtccggtgttggcgaggctctgggcaggtcctgagccattctgctttccactctgtggtctttcccttctgggagccctgggtttttggacatgttgagacaatggggctt

SEQ ID NO: 3609 - DNA, 120 bp, synthetic construct
  misc_feature 1..120: note = Artificially Synthesized Probe
  source 1..120: mol_type = other DNA
tgcgggaattttgggcgccggccggattcccagtggtggcgaggaggtggtatttttttaagtgtcagtgtggcattgtggttgcctcaataaaacagagtctttttttgtctttttttt

SEQ ID NO: 3610 - DNA, 120 bp, synthetic construct
  misc_feature 1..120: note = Artificially Synthesized Probe
  source 1..120: mol_type = other DNA
tcggtgctgtcgtggagcctgggacattcactgtctgggattgattccagggttggagccacacctggtctggggcattcgctgtcctgggtcagagcccctcctggtctgggacattcg

SEQ ID NO: 3611 - DNA, 120 bp, synthetic construct
  misc_feature 1..120: note = Artificially Synthesized Probe
  source 1..120: mol_type = other DNA
cccccagctgctctaccccttcagatgggaggatttcaaaaccacgttcagatcatcttttttctgcagaaaaatcatgctttaacgtgtaagctattaattcataggaagaaaatgttt

SEQ ID NO: 3612 - DNA, 120 bp, synthetic construct
  misc_feature 1..120: note = Artificially Synthesized Probe
  source 1..120: mol_type = other DNA
gtacgggatccccaatatttcagaatatgacctcaagccaggaggaggcttcctcctctccaggtaacttcagtctctcttggccacagataaagcagaccatcttggtgagaaatggaa

SEQ ID NO: 3613 - DNA, 120 bp, synthetic construct
  misc_feature 1..120: note = Artificially Synthesized Probe
  source 1..120: mol_type = other DNA
acttgccagtggagctgtttgggcctggaggtttttttgagggagtattttaaaattatagctcagcttcttcaatagctttaggactttcaagctttcctttcttctagattggtattg

SEQ ID NO: 3614 - DNA, 120 bp, synthetic construct
  misc_feature 1..120: note = Artificially Synthesized Probe
  source 1..120: mol_type = other DNA
tacacagtgatgctaactttcttttatttagtgtttgcctgatgtgttgtttttcctccggttagcttcagcttttccatccttagtgatttagatgtgtttcttgtggacgcccccgga

SEQ ID NO: 3615 - DNA, 120 bp, synthetic construct
  misc_feature 1..120: note = Artificially Synthesized Probe
  source 1..120: mol_type = other DNA
agagcagaaatctaagatctcttaaggaagagaggattctgacccagatggagactcaagctgcagcaccagctcctgctgggatctccagcctgctgacctggacttcagattttagac

SEQ ID NO: 3616 - DNA, 120 bp, synthetic construct
  misc_feature 1..120: note = Artificially Synthesized Probe
  source 1..120: mol_type = other DNA
gtggtgtattctggttctgccttgttcagtcacacataaccctgtcaccatgtcaccatcctgattctgcgtagccagtttgcacacagcttctgcttgaatctcagcctccagaatttt

SEQ ID NO: 3617 - DNA, 120 bp, synthetic construct
  misc_feature 1..120: note = Artificially Synthesized Probe
  source 1..120: mol_type = other DNA
tctctgccgtgtgtgatcggccgtcagatctgtctgctaaggtccacaggccagccatgatgcatttcatctccggaagattggcgtggatatttaaaaattgcttggtcagattttttg

SEQ ID NO: 3618 - DNA, 120 bp, synthetic construct
  misc_feature 1..120: note = Artificially Synthesized Probe
  source 1..120: mol_type = other DNA
acaaaccacagctgtcatccacttaatgccggaagcagttgtgacataatgctgagtatgtgcctgaacacaaaagctaatcctagaaaagggaccgtaaaagtatggtataaaaggtaa

SEQ ID NO: 3619 - DNA, 120 bp, synthetic construct
  misc_feature 1..120: note = Artificially Synthesized Probe
  source 1..120: mol_type = other DNA
atagttttctgtctaccctttctagttcccagctgggatggaccctgcagctacagacagattaacaggagaaataacagaggctcatgacgtgcatgtttcacgtctacttgggagtgg

SEQ ID NO: 3620 - DNA, 120 bp, synthetic construct
  misc_feature 1..120: note = Artificially Synthesized Probe
  source 1..120: mol_type = other DNA
agccccgggctgagggagtaggaagaggggggagaacttggggagatgggagccccgggctgagggagtaggaagaggggggagaacttggggagatgggagccccgggctgagggagta

SEQ ID NO: 3621 - DNA, 120 bp, synthetic construct
  misc_feature 1..120: note = Artificially Synthesized Probe
  source 1..120: mol_type = other DNA
gggggagaagttggggagatgggagccccgggctgagggagtaggaagaggggggagaaggtggggagatgggagccccgggctgagggagtaggaagaggggggagaacttggggagat

SEQ ID NO: 3622 - DNA, 120 bp, synthetic construct
  misc_feature 1..120: note = Artificially Synthesized Probe
  source 1..120: mol_type = other DNA
ccgggctgagggagtaggaagaggggggagaagttggggagatgggagccccgggctgagggagtaggaagaggggggagaagttggggagatgggagccccgggctgagggagtaggaa

SEQ ID NO: 3623 - DNA, 120 bp, synthetic construct
  misc_feature 1..120: note = Artificially Synthesized Probe
  source 1..120: mol_type = other DNA
actgtggcttgtgtctggacaggaatgtgtcatttcccacatcttctagagggctgccagctgggaagacagttatcagggcaagctgtgctctgagtttcgggttctgctcctacaaag

SEQ ID NO: 3624 - DNA, 120 bp, synthetic construct
  misc_feature 1..120: note = Artificially Synthesized Probe
  source 1..120: mol_type = other DNA
aacaggaggatttagaggataaaatgggtgggaaaaaggaagagacaggatgtggcacgtggaatattcagacagagcagctgaaacagccaatgaaagagaacaaattgtcagaggaaa

SEQ ID NO: 3625 - DNA, 120 bp, synthetic construct
  misc_feature 1..120: note = Artificially Synthesized Probe
  source 1..120: mol_type = other DNA
aaaagaagaaaaggggagagggtagcctgagaatgagggggaaaaaatactgctgagaggacactaggaggaggaagggaaaggtttcaaacaggtggctcatgcctaacaaaacagaaa

SEQ ID NO: 3626 - DNA, 120 bp, synthetic construct
  misc_feature 1..120: note = Artificially Synthesized Probe
  source 1..120: mol_type = other DNA
gaagacataaagtcagagcactcagcccttgaagggactagaagagtaaaaaccctagaaaggactagagagatgccccatccgcctcatacctgacatataagggtcactgagaggcat

SEQ ID NO: 3627 - DNA, 120 bp, synthetic construct
  misc_feature 1..120: note = Artificially Synthesized Probe
  source 1..120: mol_type = other DNA
agtgggaaagaaaggacaggagaaccagtcagccatccccctccctggggtacaacaatcttccccgctaaagctcacctcttcgaacagcttctcattctccagcttgtagcatttctt

SEQ ID NO: 3628 - DNA, 120 bp, synthetic construct
  misc_feature 1..120: note = Artificially Synthesized Probe
  source 1..120: mol_type = other DNA
ttctcttttctcctccttgaattatctccatatttcaccctccgatgagtctcctcaaactggggctttaggttgaagatattttacccaagtcccctccctttcaccccaccctaattt

SEQ ID NO: 3629 - DNA, 120 bp, synthetic construct
  misc_feature 1..120: note = Artificially Synthesized Probe
  source 1..120: mol_type = other DNA
taaggaattatagaccctagggggcactagtaatatggctcacagtaactacattaagttagaatttctacattttagggaagaagtcactgaaagaagggccagaaagccgctttaaac

SEQ ID NO: 3630 - DNA, 120 bp, synthetic construct
  misc_feature 1..120: note = Artificially Synthesized Probe
  source 1..120: mol_type = other DNA
ttctggagaaatcataaatgcaaagctcaatactgtaaatactgtactgttcacaggtacttgttggagaagtgaaatgtttgtattcagaccaacaaaattctgacctttcaaaatagg

SEQ ID NO: 3631 - DNA, 120 bp, synthetic construct
  misc_feature 1..120: note = Artificially Synthesized Probe
  source 1..120: mol_type = other DNA
cctatttaagttaaaatctagaaaactggtcaccaacatgtatcttcacaggtcacgcaggaaacaagattatgaagggactacagaatcaagacagtgaagagtggaattagctatgga

SEQ ID NO: 3632 - DNA, 120 bp, synthetic construct
  misc_feature 1..120: note = Artificially Synthesized Probe
  source 1..120: mol_type = other DNA
agtatgtttactccctgttgcgaagatgttaagaacttaattctgctatacggctctactcttctacattatacaggagatccataataataaccccttaaaaaggcttaagcttcatcc

SEQ ID NO: 3633 - DNA, 120 bp, synthetic construct
  misc_feature 1..120: note = Artificially Synthesized Probe
  source 1..120: mol_type = other DNA
ccaacatggatagacggcgggatcagaaatcagatttttctggaattcaactacccacattctcttccactttaccaactctgtctgaatcaacctccaattctttctactcaacatttt

SEQ ID NO: 3634 - DNA, 120 bp, synthetic construct
  misc_feature 1..120: note = Artificially Synthesized Probe
  source 1..120: mol_type = other DNA
taattgtgcgtaactgttatattcataccttgaagtagtcatcttgagtaacaacagagtttctcagtctgttctctggattaaacagacaagataccaccgtttgtatgcttcggtcca

SEQ ID NO: 3635 - DNA, 120 bp, synthetic construct
  misc_feature 1..120: note = Artificially Synthesized Probe
  source 1..120: mol_type = other DNA
agccactgcacccagccaagatctgctttctgtatctaaaattttcttttactatttggtcaagccagtcaactaactcttctctagttaaccttttcaattacaaatttctgctgaagg

SEQ ID NO: 3636 - DNA, 120 bp, synthetic construct
  misc_feature 1..120: note = Artificially Synthesized Probe
  source 1..120: mol_type = other DNA
ctttaaaataacaggaattatatgtttggctaattcactttaccggaggtacaacatagctcctttgctccccaacaggccactgtggtggcatcttaaaaaaaaaaaaaaggaaaccaa

SEQ ID NO: 3637 - DNA, 120 bp, synthetic construct
  misc_feature 1..120: note = Artificially Synthesized Probe
  source 1..120: mol_type = other DNA
tctatctccctaaaaaattgatgaaagtccgtctggctgtttcggctatttgacagcaaagatgaaaaaatacatgctgaaatacagaaggggacaccgaatctcataaaactgttgtag

SEQ ID NO: 3638 - DNA, 120 bp, synthetic construct
  misc_feature 1..120: note = Artificially Synthesized Probe
  source 1..120: mol_type = other DNA
gagaaggagaaagaagaggaggtacaccctacacatttcaagtacatggaaaatgtcaatgaatgaaagacactgaagaactatttcactcctgttttgctactttattttccagcaaag

SEQ ID NO: 3639 - DNA, 120 bp, synthetic construct
  misc_feature 1..120: note = Artificially Synthesized Probe
  source 1..120: mol_type = other DNA
gtgaaagttgatcaaaaacttttcattaccctgccctgtctccaacccttcctgtctgtagttcatgaacctaggtgcccagtcaaaaataaacaggttctaacaagttatgtaagattc

SEQ ID NO: 3640 - DNA, 120 bp, synthetic construct
  misc_feature 1..120: note = Artificially Synthesized Probe
  source 1..120: mol_type = other DNA
gtaaaaatgaggtatgaatacaataccctaacatcaattcctccaacaaaaacagtgtttggcatgattttgccttctggtaaaatatagccttggctggttgcagctgatgaggactgg

SEQ ID NO: 3641 - DNA, 120 bp, synthetic construct
  misc_feature 1..120: note = Artificially Synthesized Probe
  source 1..120: mol_type = other DNA
taacgctgtgttagtatgcctgctttactttggaaatggatcatggaaacattatttgctcacatgtcacagctccttctaaaaaaaggattataatcctcttccctaatgctagggtgt

SEQ ID NO: 3642 - DNA, 120 bp, synthetic construct
  misc_feature 1..120: note = Artificially Synthesized Probe
  source 1..120: mol_type = other DNA
tgtcccttacaggtaagtggttacaagccacttacttgccagccgtgtatctctgggcaaactgctttgagaaggaaatgagataacatctgtgaattcattttgtaaagtataaagtgg

SEQ ID NO: 3643 - DNA, 120 bp, synthetic construct
  misc_feature 1..120: note = Artificially Synthesized Probe
  source 1..120: mol_type = other DNA
tcaggacctcagtttccttgcttgaaaatgaatggttggaaaagatctctggtgtctcttctaattctcataccctatacaagagtaaaacggatacttggcgacaacagtagtttggta

SEQ ID NO: 3644 - DNA, 120 bp, synthetic construct
  misc_feature 1..120: note = Artificially Synthesized Probe
  source 1..120: mol_type = other DNA
cacctaatgatacctggctcagtttccgtgggagttttttcaacttgtaaagaaatagataacttgggtgtatgtttgtgtcagagagaggtgcacatacacatcagacaccagaaataa

SEQ ID NO: 3645 - DNA, 120 bp, synthetic construct
  misc_feature 1..120: note = Artificially Synthesized Probe
  source 1..120: mol_type = other DNA
tttgataggcgaggatactcatcactatactaatgaggggtgtaacttaaaattgttaccaaaggggtaaagcgctttcacccagcaattccacttacagcaattcatctcaaggaatta

SEQ ID NO: 3646 - DNA, 120 bp, synthetic construct
  misc_feature 1..120: note = Artificially Synthesized Probe
  source 1..120: mol_type = other DNA
atgtttatacatggtaatataaactgtgtataaatttcctccctgaagagactgagaattatcaatgcagacacacacacagcatgtaatacgcgcgttcgtgactcagtggttggtctg

SEQ ID NO: 3647 - DNA, 120 bp, synthetic construct
  misc_feature 1..120: note = Artificially Synthesized Probe
  source 1..120: mol_type = other DNA
caaacaggaaagccgaggatgacttcactttccgaccctgcagagccgagtttcacccacgagtgaagactccgccagccttgcccctcgggcctctccctcaactcaccatgatggcgg

SEQ ID NO: 3648 - DNA, 120 bp, synthetic construct
  misc_feature 1..120: note = Artificially Synthesized Probe
  source 1..120: mol_type = other DNA
tatacacacagggctaagtagctatgacctttatccacaaacttcacttctgtactgacggaaagcattaaaatgttactttttgagctggcaaaacggtggacttctataacgtgagca

SEQ ID NO: 3649 - DNA, 120 bp, synthetic construct
  misc_feature 1..120: note = Artificially Synthesized Probe
  source 1..120: mol_type = other DNA
atggggcatctagaatgcctggcagaagcaaacataaaaccgacttgaatgaatgcttctgcaacctaggctgaaagtgattctcataagaaaatgaccctttaatgaaaagctcacaat

SEQ ID NO: 3650 - DNA, 120 bp, synthetic construct
  misc_feature 1..120: note = Artificially Synthesized Probe
  source 1..120: mol_type = other DNA
gcctttaggatgtcttagctctacacaccctcccctctctcagtttataagttattcactattttagttctatcctggtttcatcatataaattagacgtcgttttttagacacacccac

SEQ ID NO: 3651 - DNA, 120 bp, synthetic construct
  misc_feature 1..120: note = Artificially Synthesized Probe
  source 1..120: mol_type = other DNA
agagtttcaaattgttctgcctaataaatgagagtaatcatattacaaggggagaaaccaagcaagacagggaaattggaggtcctagaagctggagaaaagaagtaaccttgcaggtca

SEQ ID NO: 3652 - DNA, 120 bp, synthetic construct
  misc_feature 1..120: note = Artificially Synthesized Probe
  source 1..120: mol_type = other DNA
ctgcagcatgatttcgtgtgtcattcctggagacaacctgaccctttggttcattttgagattctgtgagctagttacccaataaattttaataagttcttttcctgcttaaaccagcca

SEQ ID NO: 3653 - DNA, 120 bp, synthetic construct
  misc_feature 1..120: note = Artificially Synthesized Probe
  source 1..120: mol_type = other DNA
agcagaggtgcacagaggttgtataacttgcctgagatgatagttggtaagtatcagagctgaatttaaacccagtcagactttaaagtctgagttctcaaccattatgctatattagca

SEQ ID NO: 3654 - DNA, 120 bp, synthetic construct
  misc_feature 1..120: note = Artificially Synthesized Probe
  source 1..120: mol_type = other DNA
aatcatgttcgtgtactagtgttttgtggaatattgcttttattatagcagcctgaacagataagacaccaacctacactaatgaattgctccaaaacaattggcccttgaggagcctat

SEQ ID NO: 3655 - DNA, 120 bp, synthetic construct
  misc_feature 1..120: note = Artificially Synthesized Probe
  source 1..120: mol_type = other DNA
gagtagctgggactaatggggtgtaccatcacacccagttactcagaaatttctaatgtcagcatatagatctacctaattccttttaactttggcataattttacataatatggatacg

SEQ ID NO: 3656 - DNA, 120 bp, synthetic construct
  misc_feature 1..120: note = Artificially Synthesized Probe
  source 1..120: mol_type = other DNA
ctctttgaagtgttccagtccagtgtaatgaacgagagttacatcaatttccaagaatttctttccctaaactggagtgatttaagccatgaatcagagagggagggaaatttctggtgt

SEQ ID NO: 3657 - DNA, 120 bp, synthetic construct
  misc_feature 1..120: note = Artificially Synthesized Probe
  source 1..120: mol_type = other DNA
acaatttcaaaacttttttggcaaaaactttgtgtacctgcagctagcatttcagccagcatgagcaagtacgaggaagtgaaaggactaaagaagagaatacagtcaaaggaaaatcat

SEQ ID NO: 3658 - DNA, 120 bp, synthetic construct
  misc_feature 1..120: note = Artificially Synthesized Probe
  source 1..120: mol_type = other DNA
gagtgtaaaagtttggaaaatgtgtaacctcatgatgcgatagaaaagaaaaacccattttctgaagagaaatttaagccagctgcagaaatttgcataagtaacaagaagccaaatgtt

SEQ ID NO: 3659 - DNA, 120 bp, synthetic construct
  misc_feature 1..120: note = Artificially Synthesized Probe
  source 1..120: mol_type = other DNA
tggacttttgggttaaatgctggaatgaattaagactttgggggactgttgggaaggcatgattagttttgaaatgtgaaaaggacatgagatttggaaggagccagggacggaatgata

SEQ ID NO: 3660 - DNA, 120 bp, synthetic construct
  misc_feature 1..120: note = Artificially Synthesized Probe
  source 1..120: mol_type = other DNA
aaagtccagtcaagttttcccttctttgtgaaattttctgtcttgtccagtttatcttcccctctggtagccatttcagtatccacagtatgtaatgtgccattttggatggcaatacgt

SEQ ID NO: 3661 - DNA, 120 bp, synthetic construct
  misc_feature 1..120: note = Artificially Synthesized Probe
  source 1..120: mol_type = other DNA
caatcctgttactctttgggtaactcaggatgccacatgacctctttctactgaccacaactgattagatgggaataaacattaacccaagctgaatcaatcagattctctttcattagg

SEQ ID NO: 3662 - DNA, 120 bp, synthetic construct
  misc_feature 1..120: note = Artificially Synthesized Probe
  source 1..120: mol_type = other DNA
ccgcgcctggctgcagttgcaatcctttttagttaatattttaagctgttccagaagcagataaaaagagaaacatgatgatatgttatctgtcagattagcaaaatgcaattccagatt

SEQ ID NO: 3663 - DNA, 120 bp, synthetic construct
  misc_feature 1..120: note = Artificially Synthesized Probe
  source 1..120: mol_type = other DNA
ttgtcatctttaaaaagccactgccgttgattttataagagttgccagggtcgaatattcacccatgctacatttggatgtgtgagcaaaaggcagcttcctgatatttaactttcattg

SEQ ID NO: 3664 - DNA, 120 bp, synthetic construct
  misc_feature 1..120: note = Artificially Synthesized Probe
  source 1..120: mol_type = other DNA
ctattgtgcaggcttaaggaagtctgtactcctgattttggtgtccttttctttaaaagaagggggtgcactagatgtttcagaaggttccttgaagctctgattgtatgtacataaatc

SEQ ID NO: 3665 - DNA, 120 bp, synthetic construct
  misc_feature 1..120: note = Artificially Synthesized Probe
  source 1..120: mol_type = other DNA
catgatgatgctgcaaaaaaatcaggtgaggacatgcacagtgcacataaccctgtttacattgaacagactgaacagtcaaatgtaaatatgtgtgcagagtttgcttgagacagaagt

SEQ ID NO: 3666 - DNA, 120 bp, synthetic construct
  misc_feature 1..120: note = Artificially Synthesized Probe
  source 1..120: mol_type = other DNA
gataatctgaggctgggagtttaagaccagcctgaccaacatggagaaaccctgtctctactaaaaatacaaaattaggcaggtgtggtggcgcatgcctgtaatcccagctacttggga

SEQ ID NO: 3667 - DNA, 120 bp, synthetic construct
  misc_feature 1..120: note = Artificially Synthesized Probe
  source 1..120: mol_type = other DNA
gcaagttctcaatcagacagaggattaataacttctcaaacaactgtataagaaaaatccaataatccaatgaaaattcggtaaaagatttgaatagacagttctcaaaagaagatatac

SEQ ID NO: 3668 - DNA, 120 bp, synthetic construct
  misc_feature 1..120: note = Artificially Synthesized Probe
  source 1..120: mol_type = other DNA
aagacaaacttcacatgttttcacttatttgtgggagctaaaaaaattaaaacaattaaactcatgggggatagagagtagaatgatggttaccagaggctgagaaggggagtagggttt

SEQ ID NO: 3669 - DNA, 120 bp, synthetic construct
  misc_feature 1..120: note = Artificially Synthesized Probe
  source 1..120: mol_type = other DNA
taaaatcaatgtctaactccttctccctcacccgtctcaactacagaggctgtaaaagctgaacgtttgatttttctagcctttgttacatctaggggaccaaatgacacacttgatata

SEQ ID NO: 3670 - DNA, 120 bp, synthetic construct
  misc_feature 1..120: note = Artificially Synthesized Probe
  source 1..120: mol_type = other DNA
ggtagttccagtgcaaaaaaactcaaaagacgcaaaaaaagaactcactgaaaggaagacaaagtatgacttggtgatttggttgctatacagggatccaagaatttgtggggtttgctg

SEQ ID NO: 3671 - DNA, 120 bp, synthetic construct
  misc_feature 1..120: note = Artificially Synthesized Probe
  source 1..120: mol_type = other DNA
tccaggcaccctctccaccaggtagataggggcacagaagacaagaaaataaagatggcatatttgagtctttaactggtatatgtcgaaaattacagaagtagttaaaggtagaactca

SEQ ID NO: 3672 - DNA, 120 bp, synthetic construct
  misc_feature 1..120: note = Artificially Synthesized Probe
  source 1..120: mol_type = other DNA
tgtactacctaaacttgaaccttgtggatctgatattgaaagtttcaaataaaaggcagtcttgatactgcacaaactgtgtctatctcaaacaagaaaaaaatgagtgcttcaaaatga

SEQ ID NO: 3673 - DNA, 120 bp, synthetic construct
  misc_feature 1..120: note = Artificially Synthesized Probe
  source 1..120: mol_type = other DNA
acatgcaatcctactgtgttcctggaaggaagatagcccaactagtgaatggccctaatgtctatcctctagtttagccattgtccaatggaactataatgagagtcacaaaagtaattt

SEQ ID NO: 3674 - DNA, 120 bp, synthetic construct
  misc_feature 1..120: note = Artificially Synthesized Probe
  source 1..120: mol_type = other DNA
atgtcccttagaaagagtagccttaaatcaagatttgttggccgtgggtgcctataaatggaggttggataaacttctagcattgccactggaatttccctgggcatttcacctcaatgt

SEQ ID NO: 3675 - DNA, 120 bp, synthetic construct
  misc_feature 1..120: note = Artificially Synthesized Probe
  source 1..120: mol_type = other DNA
ccagggttaattagtagagttcatttactgtcaaccgaacacttgggaataaggaatttagaaccaggtcactaggtgagtgtaattcactatgagtgtgcagggcaaagtggtttattt

SEQ ID NO: 3676 - DNA, 120 bp, synthetic construct
  misc_feature 1..120: note = Artificially Synthesized Probe
  source 1..120: mol_type = other DNA
cattcttgatgttctctctgattgaaatcatcttccaccctctcttcacttgcttgctagatgaacctctactcattcctcaagacccaccttgaatttctctctcttttgtaacgtcct

SEQ ID NO: 3677 - DNA, 120 bp, synthetic construct
  misc_feature 1..120: note = Artificially Synthesized Probe
  source 1..120: mol_type = other DNA
tgttttctccacactgcaagagtctgttatggaaacaagagggtctttggacttgtttgtctaactgttttaatcttctcctcccactgcaataaaaaccatctggcatgttgaaaaggt

SEQ ID NO: 3678 - DNA, 120 bp, synthetic construct
  misc_feature 1..120: note = Artificially Synthesized Probe
  source 1..120: mol_type = other DNA
gtgtatttaaaaaaaacccagaaaataaaatgaaaagcctataagggagagagtgaagcaaaacaaggtagggggagaaaacaaggaaggatgtagattcaggtgaagtctagccatggc

SEQ ID NO: 3679 - DNA, 120 bp, synthetic construct
  misc_feature 1..120: note = Artificially Synthesized Probe
  source 1..120: mol_type = other DNA
tcaaaacagattggagaggggatgtgtgaacgctagcctaagtgttttagagtttatgttggtggtggaagccactgaaagtttttgaataaggcagttacatgatcagagctgacaata

SEQ ID NO: 3680 - DNA, 120 bp, synthetic construct
  misc_feature 1..120: note = Artificially Synthesized Probe
  source 1..120: mol_type = other DNA
atgggcttgataaatgagctatgaaccagcgcaacgtaccctggcaagagaaatactgtaaatgtggtgtttaaggtagctatttggagaacatttgtttttggtctttgaacaagtaac

SEQ ID NO: 3681 - DNA, 120 bp, synthetic construct
  misc_feature 1..120: note = Artificially Synthesized Probe
  source 1..120: mol_type = other DNA
acctgaggggcaatgagagttatccagcgggagggggatcgactcttaggagggagttcctttctgactattttttagcttccgtttttaattagagaaatttatattcattattagaaa

SEQ ID NO: 3682 - DNA, 120 bp, synthetic construct
  misc_feature 1..120: note = Artificially Synthesized Probe
  source 1..120: mol_type = other DNA
gctataaattatgtgatctttccacctatgtcctcactagcaaatctagaccccaacactggcaacaagctaaaggaaacaggcttttccctttttagaaggcaggaaagaattgtgaat

SEQ ID NO: 3683 - DNA, 120 bp, synthetic construct
  misc_feature 1..120: note = Artificially Synthesized Probe
  source 1..120: mol_type = other DNA
gcccagaactccttttaagagcagagtggaaatactgctgatttggagtcagaagacctaattttcaaattgtggctttcagttcctcactaacaagatgagcacactgttttgtatact

SEQ ID NO: 3684 - DNA, 120 bp, synthetic construct
  misc_feature 1..120: note = Artificially Synthesized Probe
  source 1..120: mol_type = other DNA
ccaactccaaatcttgaactctttccctaaaaccagaggcacctcacattattttgaaactgacttaatagtcaaggctttcccgttatatctggtacttcttatgacagacaccatctt

SEQ ID NO: 3685 - DNA, 120 bp, synthetic construct
  misc_feature 1..120: note = Artificially Synthesized Probe
  source 1..120: mol_type = other DNA
tttttgttttcctgggaactttcatctctataagcttcccttcctccagttgaacacagtgatctgttgtgattagattaaaaacaagggttgtctgccgctctttttttcctcctatcg

SEQ ID NO: 3686 - DNA, 120 bp, synthetic construct
  misc_feature 1..120: note = Artificially Synthesized Probe
  source 1..120: mol_type = other DNA
aactcaaatggaaacattggctccttttgggtcttgagcctgatgactttcagaataaaacttcaactattgcctctgctggttctcaggacttcaaacttggaaaggatttataccatc

SEQ ID NO: 3687 - DNA, 120 bp, synthetic construct
  misc_feature 1..120: note = Artificially Synthesized Probe
  source 1..120: mol_type = other DNA
caaaataggctctagttaagaacctctgctttatagccatattcctttcccaactacttgctgaaaacttcaggctctaacattagacacagggccttacagagactttataaccaaatc

SEQ ID NO: 3688 - DNA, 120 bp, synthetic construct
  misc_feature 1..120: note = Artificially Synthesized Probe
  source 1..120: mol_type = other DNA
atgaagttatacattaagttctatgaaggaacagtatagagtctttacagagagagatcaaatatagatggcaggggtaagtgaggaggggcgttcctaaagaagtgacgtgggctctga

SEQ ID NO: 3689 - DNA, 120 bp, synthetic construct
  misc_feature 1..120: note = Artificially Synthesized Probe
  source 1..120: mol_type = other DNA
gacttgccatagactgaagtgtagaagactgcagggatatcaagttttcagatcatcagccagtttcagacacattaatttttaggtgtctatcaagttcccatgtcatgtaagtaagac

SEQ ID NO: 3690 - DNA, 120 bp, synthetic construct
  misc_feature 1..120: note = Artificially Synthesized Probe
  source 1..120: mol_type = other DNA
gtttattaaggagagtttattaaggagagtgtgagttggtccacacaaaaaatctttgtcttagaagttatgttgttcaggcttctgagaaatattctagtttattaaggagagttgact

SEQ ID NO: 3691 - DNA, 120 bp, synthetic construct
  misc_feature 1..120: note = Artificially Synthesized Probe
  source 1..120: mol_type = other DNA
tcgtaagccttgaggagttattcttttactttgattattctttaaaagcatttgcaatcaggcatagtccaaaattacttcttcttgaagaagtttcatggaaaggactctggcaagtac

SEQ ID NO: 3692 - DNA, 120 bp, synthetic construct
  misc_feature 1..120: note = Artificially Synthesized Probe
  source 1..120: mol_type = other DNA
aaattgccttggtagcttgcatacatggttgttttacagggttccttgccttgtgatgagtaaagaatgtcaactcctggcaggttcaggagcttaaaaatattttgggaacttcaagaa

SEQ ID NO: 3693 - DNA, 120 bp, synthetic construct
  misc_feature 1..120: note = Artificially Synthesized Probe
  source 1..120: mol_type = other DNA
gccaagacacaactctttaactggattgacctattcctatgtctcttaccactcagctactaaccttgttttcctctctatacgaactcatgttttagtgtatgaaacttctggagaagt

SEQ ID NO: 3694 - DNA, 120 bp, synthetic construct
  misc_feature 1..120: note = Artificially Synthesized Probe
  source 1..120: mol_type = other DNA
taagagcagtctgggttgcatggtgggatcagaagcctgacttcaaaagattaagagagaattgaaagacagaagtagaagacagcaaatataggtaactcctttgaggagtttttcact

SEQ ID NO: 3695 - DNA, 120 bp, synthetic construct
  misc_feature 1..120: note = Artificially Synthesized Probe
  source 1..120: mol_type = other DNA
gatgaaattaagagaccttaagaaaggaagttcatcagagtggactcaacataatcacagggtccttaaaaatggaatggtagaagacagttggaggcagatgtgactacagaagaaggt

SEQ ID NO: 3696 - DNA, 120 bp, synthetic construct
  misc_feature 1..120: note = Artificially Synthesized Probe
  source 1..120: mol_type = other DNA
ctgcagctgatctttattaatgtttactgttcactggtataaactgtgcaactccgaattggattagggggagatctggtctcgattaaagctgtgataaatgagcactgtttacatttc

SEQ ID NO: 3697 - DNA, 120 bp, synthetic construct
  misc_feature 1..120: note = Artificially Synthesized Probe
  source 1..120: mol_type = other DNA
ggatgttattatcatctctattcttggaagtgaaggaagaaagaagaggaaatctgtgtccttcattccagtttcccttctcccaacactagccaccttgggcttaatttaaaactttgt

SEQ ID NO: 3698 - DNA, 120 bp, synthetic construct
  misc_feature 1..120: note = Artificially Synthesized Probe
  source 1..120: mol_type = other DNA
gagtgtggaaatgagatctgggaggtaacaggggaagaggggcagattatatttagttttatagggctttgatttttagtcagcgtgaaatagggagttatcagaggtttttaaagtaag

SEQ ID NO: 3699 - DNA, 120 bp, synthetic construct
  misc_feature 1..120: note = Artificially Synthesized Probe
  source 1..120: mol_type = other DNA
aagccacttccacattttccagcatctttatagcaataccccactctcagtatcaattttctgtgttaggccattcttgcattgctataaagaaatacctgagactggttaatttataaa

SEQ ID NO: 3700 - DNA, 120 bp, synthetic construct
  misc_feature 1..120: note = Artificially Synthesized Probe
  source 1..120: mol_type = other DNA
tagtaaggttttgggggagaacaatgtgataaacaaattttcaagtgtgtgggagtttggctcgcctaatccctgttaggagttcaagggtccattggaaaatgctaaagtattgtctct

SEQ ID NO: 3701 - DNA, 120 bp, synthetic construct
  misc_feature 1..120: note = Artificially Synthesized Probe
  source 1..120: mol_type = other DNA
cattctccagaggaattaagggaagatttctgctgaggactaggtcctgttgatccacgaatttcctccttttgctctgtctgcccccaatactccttattttttaagtcaaatatttta

SEQ ID NO: 3702 - DNA, 120 bp, synthetic construct
  misc_feature 1..120: note = Artificially Synthesized Probe
  source 1..120: mol_type = other DNA
agtgagagtgcccttcctgcttttgctgtttttatcaaaggccaaggtgccatgtttcagagtagcatatcccgaaccccatcaaagccaagtaccttgtatagattgtctagtgcctta

SEQ ID NO: 3703 - DNA, 120 bp, synthetic construct
  misc_feature 1..120: note = Artificially Synthesized Probe
  source 1..120: mol_type = other DNA
tacccaggaggaagaaatgctacaccaagagatcaagaagagtctaaacagagagtccttgctgagttttcaccctcggtttattattattagatcatacctttttatcaatgaaaaaga

SEQ ID NO: 3704 - DNA, 120 bp, synthetic construct
  misc_feature 1..120: note = Artificially Synthesized Probe
  source 1..120: mol_type = other DNA
cactatcacaatagcaaagacatggaatcaacctaggtatccataaatggaggattggataaagaaaatgtggtacatatacaccatggaatactacacagccataaaaaaagaatgaag

SEQ ID NO: 3705 - DNA, 120 bp, synthetic construct
  misc_feature 1..120: note = Artificially Synthesized Probe
  source 1..120: mol_type = other DNA
tgcttcctcctctgtaaaagtgctttctagggctgttataaggattcaagggttaatgcataaaaaccttggctctgtggctggcatgtgttagccattattcttaatattcttgctatt

SEQ ID NO: 3706 - DNA, 120 bp, synthetic construct
  misc_feature 1..120: note = Artificially Synthesized Probe
  source 1..120: mol_type = other DNA
aaaaaagtttgtaatatggtacactggaacaaaacaaggcaaaacttaaggctttggctggaccacattggatacgagagagaaacactgttcaatcctgttggctcctacagaaagcaa

SEQ ID NO: 3707 - DNA, 120 bp, synthetic construct
  misc_feature 1..120: note = Artificially Synthesized Probe
  source 1..120: mol_type = other DNA
aatctgtcctttgctactctaattcacagggcttccactggagaacccaagatggaaagaatttttttttcctttctcacatccccattatccagactaatgtcagagattcaacaagct

SEQ ID NO: 3708 - DNA, 120 bp, synthetic construct
  misc_feature 1..120: note = Artificially Synthesized Probe
  source 1..120: mol_type = other DNA
gtttttttccaaacactgtgtggaatacggtcatctagttgcctggaactagttcctgataaccccggcaacttataggtgaacgtgagtgaactttcctcataaacatgctaaaatttc

SEQ ID NO: 3709 - DNA, 120 bp, synthetic construct
  misc_feature 1..120: note = Artificially Synthesized Probe
  source 1..120: mol_type = other DNA
tgcttgactacatcagtgaggtgacaaaagtggcaagcaagatagagtggagtgaaatgggagggctttgaaggtcactttattttgaagcaatagagacacattgaaaacttttgagga

SEQ ID NO: 3710 - DNA, 120 bp, synthetic construct
  misc_feature 1..120: note = Artificially Synthesized Probe
  source 1..120: mol_type = other DNA
tcttaaaggatgtgaccaacttctttaacagagcagtgaggagctcctgcggccactagttctgtggtgagaattactgttagtaataaagtccccgtggtcatctcagaagataaaaga

SEQ ID NO: 3711 - DNA, 120 bp, synthetic construct
  misc_feature 1..120: note = Artificially Synthesized Probe
  source 1..120: mol_type = other DNA
cctatgctttgtagatagagtagtctctgtattttaaaattgggaaagtaaaattcactggcttagttacccagctaggtaatgccaaggaaggaggcaaacccagtttcctgattccag

SEQ ID NO: 3712 - DNA, 120 bp, synthetic construct
  misc_feature 1..120: note = Artificially Synthesized Probe
  source 1..120: mol_type = other DNA
ccatgcctaacttcaagaggaatagttcatcctaccatataccaggaggaggagaaacagaaacatcagtgaacagcactcatgactagcacgtacccataaaagtttatcaaaatattt

SEQ ID NO: 3713 - DNA, 120 bp, synthetic construct
  misc_feature 1..120: note = Artificially Synthesized Probe
  source 1..120: mol_type = other DNA
gtgtaaagacccttgtgaagattaaaagaatgagttttgtcatggaatatgttggagaggtatgtttcatttgccacgtagtaaatgatggacatgcaaggtttatacttttggaaaatt

SEQ ID NO: 3714 - DNA, 120 bp, synthetic construct
  misc_feature 1..120: note = Artificially Synthesized Probe
  source 1..120: mol_type = other DNA
agtgcagcagccaaatttggttggtaacataaagtactttagacacttttggtttcttaagccgagcgtgtcataaaacttgtgttcttaagagcagaactgtagatgacgatcttagac

SEQ ID NO: 3715 - DNA, 120 bp, synthetic construct
  misc_feature 1..120: note = Artificially Synthesized Probe
  source 1..120: mol_type = other DNA
tatgagtctgatgaattcacagtggatgcggctcgatacggcaatgtgtctcattttgtgaatcacagcgtaagaagacatacgtaaattttagacacgactaacaattcaacctagtac

SEQ ID NO: 3716 - DNA, 120 bp, synthetic construct
  misc_feature 1..120: note = Artificially Synthesized Probe
  source 1..120: mol_type = other DNA
atgtgcatgcctcaaagacctctaagcaataagcaacttaatttccagtggaacttaaactaaatctctaggaaagtaaacattttatatggcatgtagaagggcttgtttacaccgttt

SEQ ID NO: 3717 - DNA, 120 bp, synthetic construct
  misc_feature 1..120: note = Artificially Synthesized Probe
  source 1..120: mol_type = other DNA
cctaaggtacaaagctaatccaacagctaatactagaacccaggtctgcctgagcttcagctgaggaatggttctacatcgtaaattttcagaacttccattttggaaactgatttattt

SEQ ID NO: 3718 - DNA, 120 bp, synthetic construct
  misc_feature 1..120: note = Artificially Synthesized Probe
  source 1..120: mol_type = other DNA
aaatgtattaccgatgcctctgaaaagggggtcactgggtctcatagactgatatgaagtcgacatatttatagtgcttagagaccaaactaatggaaggcagactatttacagcttagt

SEQ ID NO: 3719 - DNA, 120 bp, synthetic construct
  misc_feature 1..120: note = Artificially Synthesized Probe
  source 1..120: mol_type = other DNA
tattgctatgacaacttcactctttcataatatataggataaattgtttacatgattggaccctcagattctgttaaccaaaattgcagaatggggggccaggcctgtgtggtggctcac

SEQ ID NO: 3720 - DNA, 120 bp, synthetic construct
  misc_feature 1..120: note = Artificially Synthesized Probe
  source 1..120: mol_type = other DNA
gcatttgtgttttaagaaaaatcagtcacatagtgtcagtgttaagaaaaggttgtaggtttacaggttgcccccagtggccatactttgaattgtgattctcacgggtttaaagatgtg

SEQ ID NO: 3721 - DNA, 120 bp, synthetic construct
  misc_feature 1..120: note = Artificially Synthesized Probe
  source 1..120: mol_type = other DNA
ctagtttatactattcaaacatttaagtcctggaactcttctccaagataaatgtggctgactgctgagtgtcttctgtgatacatcttggcattttgaaacttcatgtttcggctggac

SEQ ID NO: 3722 - DNA, 120 bp, synthetic construct
  misc_feature 1..120: note = Artificially Synthesized Probe
  source 1..120: mol_type = other DNA
cctggttagtctggtggatccaatactttttggtcggattgccatgcagcatcatgataatgcatatcaagtgttagtttaactgatctgcaaattgttttaagtggtgtctctgctttt

SEQ ID NO: 3723 - DNA, 120 bp, synthetic construct
  misc_feature 1..120: note = Artificially Synthesized Probe
  source 1..120: mol_type = other DNA
tccaagtttgtcaatttaaatcaggtgtgtttatgagcaaagatatgatcatgctgaatgttccatgtgtacttcaggagatacattctgctagtttggggtggtgtgttctataaatgt

SEQ ID NO: 3724 - DNA, 120 bp, synthetic construct
  misc_feature 1..120: note = Artificially Synthesized Probe
  source 1..120: mol_type = other DNA
agagctctgggaatctgcatttgtgctaagatttagcaaacttttttcctcgggtatatgtgtctcactgcttagagtagttggttctccagtactaggaactattgtcacatctttatc

SEQ ID NO: 3725 - DNA, 120 bp, synthetic construct
  misc_feature 1..120: note = Artificially Synthesized Probe
  source 1..120: mol_type = other DNA
aaaaacaggtttctgtatctcattccagacctactgaatccctgaggaagataggaccaaataatttgatttttaagttctacagctgatatctgttcagccaggtttgcaaagcctgtg

SEQ ID NO: 3726 - DNA, 120 bp, synthetic construct
  misc_feature 1..120: note = Artificially Synthesized Probe
  source 1..120: mol_type = other DNA
gtgactatgcctgatcccaaaagacatttatcaaaaaggagtgtggattgggtagatgcataaaaggcacaaaagattaaaggaagaaaggacttttgcttccaggtaagatggagtaac

SEQ ID NO: 3727 - DNA, 120 bp, synthetic construct
  misc_feature 1..120: note = Artificially Synthesized Probe
  source 1..120: mol_type = other DNA
gatccatgggcatttgtaaaagaaccaagaagagccttgcctcagtagtggggaaaattaaccatatactaaatgctactctgttcctgcataacaaaggtaaaagacacgaaaagatca

SEQ ID NO: 3728 - DNA, 120 bp, synthetic construct
  misc_feature 1..120: note = Artificially Synthesized Probe
  source 1..120: mol_type = other DNA
tgtttaagctacctagtatgtgttattttcttagggcagcccaagccaactatatgactccaaaattctaccccccacaagaaataaaacccaacagaaagatacgtaaagacttgtact

SEQ ID NO: 3729 - DNA, 120 bp, synthetic construct
  misc_feature 1..120: note = Artificially Synthesized Probe
  source 1..120: mol_type = other DNA
cagcacagactgggagaagaggaatggaaatatactgctggaacattcctataccatatttggagtaatatatcatttatcttttcactctgatatgttaaagatgtatacggtcagtcc

SEQ ID NO: 3730 - DNA, 120 bp, synthetic construct
  misc_feature 1..120: note = Artificially Synthesized Probe
  source 1..120: mol_type = other DNA
tcaaggcaaaataggcaagtccacaattacaactggagattgcaacacccctctctggcaataattgatagaacaagaatgtagaagacctgaacaacattgtcaactaacttagcctag

SEQ ID NO: 3731 - DNA, 120 bp, synthetic construct
  misc_feature 1..120: note = Artificially Synthesized Probe
  source 1..120: mol_type = other DNA
ataaaaaaaaaaataacctgaatagtcctgtgcctattagagaaatcacatttgtagttaaaaaaaaaaaaccttcccacaaagaaaactcctttcccacccagatggcttcactggtaa

SEQ ID NO: 3732 - DNA, 120 bp, synthetic construct
  misc_feature 1..120: note = Artificially Synthesized Probe
  source 1..120: mol_type = other DNA
aggcagtgacacccactcttgccacttgtttcacactgtagtggtagtctagacaagaaagagaaaaacatcctggctgaaaaggaagaagcaaaactgtctatatacacaaacaatgat

SEQ ID NO: 3733 - DNA, 120 bp, synthetic construct
  misc_feature 1..120: note = Artificially Synthesized Probe
  source 1..120: mol_type = other DNA
tatacacctgatatatttaaaaaaaaaaaacaaaaaaaacttgtatccagaaacttaggaaaacttagtaatatgatgggtgcagtggctcatgcatgtaattccagcactttaggaggc

SEQ ID NO: 3734 - DNA, 120 bp, synthetic construct
  misc_feature 1..120: note = Artificially Synthesized Probe
  source 1..120: mol_type = other DNA
ggatgccttggcatgggtgagaaccggagggaattacaaaggggcataagaaaacttgaaggtgataatttcagtatcttaattgtagtcatggtttctcaagtatatgcatatacaaaa

SEQ ID NO: 3735 - DNA, 120 bp, synthetic construct
  misc_feature 1..120: note = Artificially Synthesized Probe
  source 1..120: mol_type = other DNA
agaaaatgttcaaggataacaaaccagcctctctatgtcctaagaaaatgttcaaggataacaaaccagcctctctttatggcctctactgatcttagggtgtatttccagaaagctgag

SEQ ID NO: 3736 - DNA, 120 bp, synthetic construct
  misc_feature 1..120: note = Artificially Synthesized Probe
  source 1..120: mol_type = other DNA
caaatttatcttgtcattctaggtccttaggctgaaagctaagacaaagtggagataaaatacaaaaaggcagagaaataagatttgaagacgtcctacccctttcgaaggcctcactgc

SEQ ID NO: 3737 - DNA, 120 bp, synthetic construct
  misc_feature 1..120: note = Artificially Synthesized Probe
  source 1..120: mol_type = other DNA
cagctattttaagatcaagcctcctgattctgttgcctcctgttgccatcttgtctctaactttcccttcactgtcaaactttttatatagtctgtcctcagtattttccatttcctcac

SEQ ID NO: 3738 - DNA, 120 bp, synthetic construct
  misc_feature 1..120: note = Artificially Synthesized Probe
  source 1..120: mol_type = other DNA
acccaaagaagaggtaagaaaatggtaatactgtagtaaaagacatccatgaatacgattgcacctctcctttggcttcagttatccattcagtagacacttgacaacctacttggcatg

SEQ ID NO: 3739 - DNA, 120 bp, synthetic construct
  misc_feature 1..120: note = Artificially Synthesized Probe
  source 1..120: mol_type = other DNA
tcctgaacactgagtactagtgggcctagaaatcagtacatttaaatattccccaggtgattctgatccacagtaagagctgagaatcaccaatgggactcaaagattcttttttttttc

SEQ ID NO: 3740 - DNA, 120 bp, synthetic construct
  misc_feature 1..120: note = Artificially Synthesized Probe
  source 1..120: mol_type = other DNA
cagaatgctaaacagaggaactctgtcactattcctcaaaacatctctacaacctagaggaacttcagctttgtctcttattagacattggtgagcttgtgatctcagtcaagttaccta

SEQ ID NO: 3741 - DNA, 120 bp, synthetic construct
  misc_feature 1..120: note = Artificially Synthesized Probe
  source 1..120: mol_type = other DNA
ggagataagagacacccaataaaggagcaccccctctcatttatataagttgactcccttttatcaaatgcctgccttaaaataaggcatcaatagcgccaattctctttattcacagta

SEQ ID NO: 3742 - DNA, 120 bp, synthetic construct
  misc_feature 1..120: note = Artificially Synthesized Probe
  source 1..120: mol_type = other DNA
acaagtccacaaaggatcacaaaagcactgtaaatattgatactgaggtcacaggtcagtttcagtgagtaggccaacacataaaaatagaatccatgaagccaggtgcagtgacttaca

SEQ ID NO: 3743 - DNA, 120 bp, synthetic construct
  misc_feature 1..120: note = Artificially Synthesized Probe
  source 1..120: mol_type = other DNA
aagttaaggaaatgttgctaaaatattaagatcattatagtcactcctctattccaccaagggttctgttctctctgacatcagtttttcctcttagccaagcactcagatgggagggag

SEQ ID NO: 3744 - DNA, 120 bp, synthetic construct
  misc_feature 1..120: note = Artificially Synthesized Probe
  source 1..120: mol_type = other DNA
attccaaattggggaatattgtgcaaaacaactgggctggactcttcaaaaccatcaatgtgaagacaagcaaaaggctagacaaacgatctatatatcaaaggagaccctttagacctg

SEQ ID NO: 3745 - DNA, 120 bp, synthetic construct
  misc_feature 1..120: note = Artificially Synthesized Probe
  source 1..120: mol_type = other DNA
gcctgtaatcccagctacttgggaggctgaggcgggagaatcgcttgaacccaggaggtggagattgcagtgagcccagattgcgccactgcactccagcctgggcaacggagcgaaact

SEQ ID NO: 3746 - DNA, 120 bp, synthetic construct
  misc_feature 1..120: note = Artificially Synthesized Probe
  source 1..120: mol_type = other DNA
actaagctactttgtgggatgtgagaaaattcacagcaaaaagaaatttgccaattcaaggatttatggggcaaggggcccaatactatgagtccaacagaaaaagggacaaaaaggtgt

SEQ ID NO: 3747 - DNA, 120 bp, synthetic construct
  misc_feature 1..120: note = Artificially Synthesized Probe
  source 1..120: mol_type = other DNA
accgtggcctacaggaaaacattccatgctgtggatcagaattctctcttgtttgaaattatgctttatcgtaagggctaggcaactaggcttttggctaatggaaccattattactaca

SEQ ID NO: 3748 - DNA, 120 bp, synthetic construct
  misc_feature 1..120: note = Artificially Synthesized Probe
  source 1..120: mol_type = other DNA
cacaaatgtttaagttataagctataatatattactgatttcattacaaataaatttgaattatcaaacgtgtatgaatagatttcatcagaaaactataaagatctggttgggggtggt

SEQ ID NO: 3749 - DNA, 120 bp, synthetic construct
  misc_feature 1..120: note = Artificially Synthesized Probe
  source 1..120: mol_type = other DNA
ggacactcggctcagggatgtcatttaatgatgttaatgttgtccttcagtccttcaagagaaattcagttaatattcctcgtacacctactatgtgtcgagctttattctaaatgctgg

SEQ ID NO: 3750 - DNA, 120 bp, synthetic construct
  misc_feature 1..120: note = Artificially Synthesized Probe
  source 1..120: mol_type = other DNA
aaaagaaaagaaaagaatgaacagtcaccatacctggactcctaattcttcactaaggttggtgaacagatattcatagccataagccgctttgcagttcagccacacaacatggtacgg

SEQ ID NO: 3751 - DNA, 120 bp, synthetic construct
  misc_feature 1..120: note = Artificially Synthesized Probe
  source 1..120: mol_type = other DNA
tagcagcttctccttgcgccaatctgaagtctcctgtgtacaggacagttccattattgccctgaaataaaaacctgaaaaagaaatatatcccagtgacttctgagtctcatataaact

SEQ ID NO: 3752 - DNA, 120 bp, synthetic construct
  misc_feature 1..120: note = Artificially Synthesized Probe
  source 1..120: mol_type = other DNA
tatttctacaaatacaatatgtgtctacatataataaaatgacaaaataaatgacccccttacataactgatcccggacagtgaccagctggtaagagagtcacaacaatctcttccttc

SEQ ID NO: 3753 - DNA, 120 bp, synthetic construct
  misc_feature 1..120: note = Artificially Synthesized Probe
  source 1..120: mol_type = other DNA
tccactcatatgaaatatccggaataggtgaacccatggagacagagagtccaatacagtagtggttgccgggggttggggaaggagagaatagggagggattgcgatcgctaaaggctt

SEQ ID NO: 3754 - DNA, 120 bp, synthetic construct
  misc_feature 1..120: note = Artificially Synthesized Probe
  source 1..120: mol_type = other DNA
aatcctcactaaactggctctgtagtcctccctcaggataatttgatgggaagaatacttcaacttcaactgtctgatcttcaccaaagaagaaatatctgaaaaggtcagtttctgttc

SEQ ID NO: 3755 - DNA, 120 bp, synthetic construct
  misc_feature 1..120: note = Artificially Synthesized Probe
  source 1..120: mol_type = other DNA
caccagggttcccatcattagcatgtaataaggaacaaatgtgacaaaaaataagccatgcccaatcctttacaacatgggaaataaatacatcactgttaaggactaaatgttcgtgtc

SEQ ID NO: 3756 - DNA, 120 bp, synthetic construct
  misc_feature 1..120: note = Artificially Synthesized Probe
  source 1..120: mol_type = other DNA
ctctgaattctgagtctttgtaaaaacgtggtcctgtgtcctaacttttgtgcctcagaacacagtctggatgggtctgtgacatggatgcttcatacacggttcttttatttttttttt

SEQ ID NO: 3757 - DNA, 120 bp, synthetic construct
  misc_feature 1..120: note = Artificially Synthesized Probe
  source 1..120: mol_type = other DNA
ggtgtgagccactgagctagtcctcttttctaatatatctatttaatgctatcaatttcccttcaaggacaaatttagctatgttccacacattctgacatgccacatttccattgtcca

SEQ ID NO: 3758 - DNA, 120 bp, synthetic construct
  misc_feature 1..120: note = Artificially Synthesized Probe
  source 1..120: mol_type = other DNA
ccttgtttgtactatgtcaactcacctaagctggaactgtttcctagaacccctttccatgttgttgcccacagtaaacattaagaaggcagatgtgaactagtagggattttttaatgc

SEQ ID NO: 3759 - DNA, 120 bp, synthetic construct
  misc_feature 1..120: note = Artificially Synthesized Probe
  source 1..120: mol_type = other DNA
taaacagactctttgtgacactgggacaaattgctctgccaactcccacaatgatttaagaactaatccatgtaatgaacccacattctgttaagtcattgtggttctcctcagatcaag

SEQ ID NO: 3760 - DNA, 120 bp, synthetic construct
  misc_feature 1..120: note = Artificially Synthesized Probe
  source 1..120: mol_type = other DNA
cccttgactacctcatattggacagatgcattttattctgccagaccgaaagttacccattctatctgtattcttctagctgtcatcccttccttatgacagcctgtaatttgtttattt

SEQ ID NO: 3761 - DNA, 120 bp, synthetic construct
  misc_feature 1..120: note = Artificially Synthesized Probe
  source 1..120: mol_type = other DNA
tagcctggcatggttatgaaatctatttcatcatacatctaataattcagaaattacgctggcacaaaatctgttagagtcactctcaacatacctatgcacaccatttcagtgccacca

SEQ ID NO: 3762 - DNA, 120 bp, synthetic construct
  misc_feature 1..120: note = Artificially Synthesized Probe
  source 1..120: mol_type = other DNA
actttttttttctttttttttgagatggagtcttgatctgtcactcaggctggagtgcggtggcgcgatctcggctcaaagcaaccttccgcctcccgggttcaagcgattctcctgtct

SEQ ID NO: 3763 - DNA, 120 bp, synthetic construct
  misc_feature 1..120: note = Artificially Synthesized Probe
  source 1..120: mol_type = other DNA
caaaaaaacatgccaaatggttctagcccctagctgtgtgagttttcccagcccaggtatcagacatggataagggagtcttcagatcttaaggggctgacatctgaagactctgctcac

SEQ ID NO: 3764 - DNA, 120 bp, synthetic construct
  misc_feature 1..120: note = Artificially Synthesized Probe
  source 1..120: mol_type = other DNA
aacgttagctatcattatcaagaagacagagtattgctatcaattagcagagaagcctgacatccactggcccttttcaaatatgtatcttgagaagggggaatttagatgtaggcaatg

SEQ ID NO: 3765 - DNA, 120 bp, synthetic construct
  misc_feature 1..120: note = Artificially Synthesized Probe
  source 1..120: mol_type = other DNA
ggagggaatgagttgggaggtaagaggggtctgggatattggtactgtcctatttcttaatctgggtgatgcgttcattttgtaaatgactatatgcttggatgtatatacttttctgta

SEQ ID NO: 3766 - DNA, 120 bp, synthetic construct
  misc_feature 1..120: note = Artificially Synthesized Probe
  source 1..120: mol_type = other DNA
cgctccacattaacagacacagacaacagaaaggtagcaattagaccgactattacattaagtatatcatgcattccaatatattctgaatctttagcaagtaaaggcccagacaacaat

SEQ ID NO: 3767 - DNA, 120 bp, synthetic construct
  misc_feature 1..120: note = Artificially Synthesized Probe
  source 1..120: mol_type = other DNA
agaacttactgatgatgcttagtaaagcccaccctgcacacagcattggcttccagatggcccacaaataagcatcaggtgggtccatagcctactccgaattatatcaaaatgtgatgt

SEQ ID NO: 3768 - DNA, 120 bp, synthetic construct
  misc_feature 1..120: note = Artificially Synthesized Probe
  source 1..120: mol_type = other DNA
gagatagtccatatcataatcaaagaagcctgtgtcccaaaaaggtgaaaagccaacagaaggcaatgtgagaaacctccaaaagcagaagttgtgttttcacccttgatgagtttatgt

SEQ ID NO: 3769 - DNA, 120 bp, synthetic construct
  misc_feature 1..120: note = Artificially Synthesized Probe
  source 1..120: mol_type = other DNA
gcagtaacttcaacgatttatagtccaagtgattgattccacacacaaaacaacatagctggccttcacaccaaccctgtgaggaaaggctgtgtttggatacctgtaatttactttaaa

SEQ ID NO: 3770 - DNA, 120 bp, synthetic construct
  misc_feature 1..120: note = Artificially Synthesized Probe
  source 1..120: mol_type = other DNA
atggatctgaaacttgttttcttcatacatggtagcgaggctctgagggaagtactaaccctcgccaatctctgatcatcggccaccagcaaagctaccaagagaaactactagcagtgc

SEQ ID NO: 3771 - DNA, 120 bp, synthetic construct
  misc_feature 1..120: note = Artificially Synthesized Probe
  source 1..120: mol_type = other DNA
ttcgcttaaagtgtgttaatgacttgtccagcaagtttctttaccttcccacacccctcttctcaacgtccccccagagtcctcaggggggccttcgacctgcaaaagcctcacaggagt

SEQ ID NO: 3772 - DNA, 120 bp, synthetic construct
  misc_feature 1..120: note = Artificially Synthesized Probe
  source 1..120: mol_type = other DNA
cacgggggcgtgataggtacgtatatgacacacagagcagaaataaatgcttccaaatggtgacagagttattccctagagagcagaattccagctgattataataaaagagcaaaatta

SEQ ID NO: 3773 - DNA, 120 bp, synthetic construct
  misc_feature 1..120: note = Artificially Synthesized Probe
  source 1..120: mol_type = other DNA
gtgttgactctgagctacagaagcttccatcaggttcttccagcaaagaggcaaaggcccagggttgacttttaaaatcagaactactcagttcttttttaaagcaaatttttccatctt

SEQ ID NO: 3774 - DNA, 120 bp, synthetic construct
  misc_feature 1..120: note = Artificially Synthesized Probe
  source 1..120: mol_type = other DNA
aaaacagtgactaaaaatccaattaaaacacaatccaaatctgacttacagtgatccaggcctcacaaatgaaaataatgatgcgtggggcttgctttaaaatgctcagccctcagccca

SEQ ID NO: 3775 - DNA, 120 bp, synthetic construct
  misc_feature 1..120: note = Artificially Synthesized Probe
  source 1..120: mol_type = other DNA
aagtgcttatattggggcccaaatagtgtttgccaggaatgtatacactcagcctctgcagtacactttccctgcttgaggaaattctatcctcctactgaaactgagataaattaaaat

SEQ ID NO: 3776 - DNA, 120 bp, synthetic construct
  misc_feature 1..120: note = Artificially Synthesized Probe
  source 1..120: mol_type = other DNA
tgagccgagattacgccagtgcactccagcctgggcaacaaagtgatactctgtctcaattcaaaaaacaaaacaggccgagttccagtgcggtggctcacacctgtaatcttagaactt

SEQ ID NO: 3777 - DNA, 120 bp, synthetic construct
  misc_feature 1..120: note = Artificially Synthesized Probe
  source 1..120: mol_type = other DNA
gcagagactatcagactagattaaaacctaagatccaaccacattctgtctctaagggaatgcttaagagccaaggacacaaaattagaagtaacaagatgtttgtttatttatatgttt

SEQ ID NO: 3778 - DNA, 120 bp, synthetic construct
  misc_feature 1..120: note = Artificially Synthesized Probe
  source 1..120: mol_type = other DNA
agtgagaatatgaaagagttgaacaatactatcaaccaacctaactgatatctaatactccacccaacagagcagaatatacaagcaacactctccatgataagaccatacgctaggccc

SEQ ID NO: 3779 - DNA, 120 bp, synthetic construct
  misc_feature 1..120: note = Artificially Synthesized Probe
  source 1..120: mol_type = other DNA
ggcagaagggcacacttcccaattgatctgaaaggccagtgttgctctgacaccaacatgaaacaaagacatcacaggacaaaatatagaccagcatctctcataaatatgagaaaaaaa

SEQ ID NO: 3780 - DNA, 120 bp, synthetic construct
  misc_feature 1..120: note = Artificially Synthesized Probe
  source 1..120: mol_type = other DNA
gtggagggctgaataatagaggaactgtggacagtctctctcacgtggctctgcaggggtgtggagggctcaataatggaactgtggacagtctctcttgcgtggctgtgcaggggtgtg

SEQ ID NO: 3781 - DNA, 120 bp, synthetic construct
  misc_feature 1..120: note = Artificially Synthesized Probe
  source 1..120: mol_type = other DNA
actcttgactgcgcctctgccccagtgctgctcagaacgttcttgtcacctccagaatcagctctttcctggcctcagtgcagtttgccccctacattcattcactggaagaccagtatg

SEQ ID NO: 3782 - DNA, 120 bp, synthetic construct
  misc_feature 1..120: note = Artificially Synthesized Probe
  source 1..120: mol_type = other DNA
tttttccagttgtaagacattcagagctccgacattcagtcactcacttcagaaaacaggagcattaggaggaattttggtgctaatttaggttgccccctgcctctactttatttattt

SEQ ID NO: 3783 - DNA, 120 bp, synthetic construct
  misc_feature 1..120: note = Artificially Synthesized Probe
  source 1..120: mol_type = other DNA
accacttgggcctttcgcggtatgccctttgcaaaacttttttttttttttaaactgaaaaataacgttctaggaaggttagaaggagctttggggtctgaattagagtcagaggcagta

SEQ ID NO: 3784 - DNA, 120 bp, synthetic construct
  misc_feature 1..120: note = Artificially Synthesized Probe
  source 1..120: mol_type = other DNA
ccctagggccaaggacagatggtgtgcttcacaagaaagtagtgttgccttctagctcagagtttaaaacacatataaaatgagcccatccggatacaaacaaatgatcaaataaataaa

SEQ ID NO: 3785 - DNA, 120 bp, synthetic construct
  misc_feature 1..120: note = Artificially Synthesized Probe
  source 1..120: mol_type = other DNA
ctgcacatcacacaacaggaacacacctacttttggcaatgcaatagctggtgtactctggtccaggtggaaaaaagccttgtgaatcacatatgctggtttcattataattgattttta

SEQ ID NO: 3786 - DNA, 120 bp, synthetic construct
  misc_feature 1..120: note = Artificially Synthesized Probe
  source 1..120: mol_type = other DNA
aaataataataaaaaagaaaacctagacacaccccggatggagatgaggctgtggttggaggcagcctggtggatcgtgtatcttacaaggagtgctttctttatgacttattcttagag

SEQ ID NO: 3787 - DNA, 120 bp, synthetic construct
  misc_feature 1..120: note = Artificially Synthesized Probe
  source 1..120: mol_type = other DNA
cacggaggcaccatccaggcacagcacagacctatttctgagcttcctaggagtcaaggacattgttactgtccaacttacgtattcttctccctttcatacccttctgtgctgtactat

SEQ ID NO: 3788 - DNA, 120 bp, synthetic construct
  misc_feature 1..120: note = Artificially Synthesized Probe
  source 1..120: mol_type = other DNA
acgaatgcagatttcccatggttaaagctggcaacaatccccttaatagcttcagctgggctacatttgattttttttttttttaaattccagataaaaggccaggcaccgaggctcatg

SEQ ID NO: 3789 - DNA, 120 bp, synthetic construct
  misc_feature 1..120: note = Artificially Synthesized Probe
  source 1..120: mol_type = other DNA
tacctgtggagctgatctcaaagaaatctccacatctaattcagaaccatcatctcaccagaacacaacggccttgctcctgcctgggtgctgtaccatgatggcaccacaatggtccaa

SEQ ID NO: 3790 - DNA, 120 bp, synthetic construct
  misc_feature 1..120: note = Artificially Synthesized Probe
  source 1..120: mol_type = other DNA
tctgctggactctaggagacggccacatcacggaaagcactgtggtcctgtctgctaccatggcttcctgaagctatatgttcatttaagatgtctcaagaaaacggacaaaatagggcc

SEQ ID NO: 3791 - DNA, 120 bp, synthetic construct
  misc_feature 1..120: note = Artificially Synthesized Probe
  source 1..120: mol_type = other DNA
caccctgaaggagtgtgaagcagtatccaccccaagccatggcactgagaggaggaagacagaaacggtatcacattcggagcctctaagtcctgactccagctattcacaccgagagga

SEQ ID NO: 3792 - DNA, 120 bp, synthetic construct
  misc_feature 1..120: note = Artificially Synthesized Probe
  source 1..120: mol_type = other DNA
attttaaggataaagggatttcatgccacatttctctcatagaaatacataaaattactaataaaattcaaagcccagcctttcagggcagggacccagctgacgcagcagcatcagaca

SEQ ID NO: 3793 - DNA, 120 bp, synthetic construct
  misc_feature 1..120: note = Artificially Synthesized Probe
  source 1..120: mol_type = other DNA
acagtatataaactaaaattccaacacacaatcaggaagtactggacgtgtgaagaagggataacaggatccatgatgaagggaaaaagtagccaaaagaagcagatcctgaggctgggc

SEQ ID NO: 3794 - DNA, 120 bp, synthetic construct
  misc_feature 1..120: note = Artificially Synthesized Probe
  source 1..120: mol_type = other DNA
aaaaccctgtctctaataaaaaaatacaaaaaattagctgggcatggtggtgtgtgcctgtaattccagctactcaggaggctgaggcaggagaatcgcttgaaccagggagtcggaggt

SEQ ID NO: 3795 - DNA, 120 bp, synthetic construct
  misc_feature 1..120: note = Artificially Synthesized Probe
  source 1..120: mol_type = other DNA
tttggaccacactatgaaccaccttgacctaatgacattacagaaaacgaaaaccaatgactgaataaaactcttttcaagtgtatatgcaatattcaccacgaaaagtatatacatgat

SEQ ID NO: 3796 - DNA, 120 bp, synthetic construct
  misc_feature 1..120: note = Artificially Synthesized Probe
  source 1..120: mol_type = other DNA
cgaaacttgtctcaaaaaaaaaagaggccaggtgcggtggctcatgcctgtaatcccagcactttgggaggctgaggcaggaggatcacctgaggtcaggagttcaagaccagcctgaca

SEQ ID NO: 3797 - DNA, 120 bp, synthetic construct
  misc_feature 1..120: note = Artificially Synthesized Probe
  source 1..120: mol_type = other DNA
gacacacagtaagtgttcacggtcattatctttgggtgcagggttatagatttttttgcctttaaactttcttttcctctataaatttcagcattaagtagctgtttgtttggaagtata

SEQ ID NO: 3798 - DNA, 120 bp, synthetic construct
  misc_feature 1..120: note = Artificially Synthesized Probe
  source 1..120: mol_type = other DNA
aaaacactaatcacatattgatcagtcatttaaaaaattaagaatctaaaaagctcttctgctcgcctgtcaccattaagacatgcctttcctcccgctttgccatctgccatgatggtg

SEQ ID NO: 3799 - DNA, 120 bp, synthetic construct
  misc_feature 1..120: note = Artificially Synthesized Probe
  source 1..120: mol_type = other DNA
tgtctagtagaatccgtaacaaacccctaacattgaatacggcctgggatgataatcactgttcgttatgtgcttgtctagtagaatctataacaagtacctgatgtgcactgaatgaca

SEQ ID NO: 3800 - DNA, 120 bp, synthetic construct
  misc_feature 1..120: note = Artificially Synthesized Probe
  source 1..120: mol_type = other DNA
tttcttacatagatttggtgggaaaaatatgaatttgacttttgtttacaaaccaaagtccacgttaccgtacccgaaaaagcagctacaacaaaatccatccctgtcctttcctgtggc

SEQ ID NO: 3801 - DNA, 120 bp, synthetic construct
  misc_feature 1..120: note = Artificially Synthesized Probe
  source 1..120: mol_type = other DNA
agcaaccttatttacaaaaaccaaaaccaccttaacaacaatagctgtcacttttctttaggaaaagcttcatttgtaaatgactctccacagctcccttttccagaaaggtggggcagg

SEQ ID NO: 3802 - DNA, 120 bp, synthetic construct
  misc_feature 1..120: note = Artificially Synthesized Probe
  source 1..120: mol_type = other DNA
aaaaagaaaagaaaagaaaactctcacgcaatgttgggaagtcgggtaaaaaactgaccagcaaacaacaaatcactgcctgacatccccccagcacctgacaccccccagcacctgaca

SEQ ID NO: 3803 - DNA, 120 bp, synthetic construct
  misc_feature 1..120: note = Artificially Synthesized Probe
  source 1..120: mol_type = other DNA
tcttacaattggagaagaaagttacaaaggaactagcacaaaccctgaggttctgcactggaactagagacactggggcaaactcatggttttcaacacacacagatttggagcacaaac

SEQ ID NO: 3804 - DNA, 120 bp, synthetic construct
  misc_feature 1..120: note = Artificially Synthesized Probe
  source 1..120: mol_type = other DNA
agtttcttgcgctgtctgtgacagtgaaaaatggaaaacatgcatttgccaccagcaggggagggttcaatcaatcatgtattgatcatatgcaccctttaaaaaagtataatgatggct

SEQ ID NO: 3805 - DNA, 120 bp, synthetic construct
  misc_feature 1..120: note = Artificially Synthesized Probe
  source 1..120: mol_type = other DNA
catttcacttaggaattctttcattggaagcaattctgaggacaataacctgtacatgtgtgaattctttcaaacctacctattttgggatgtgacgttggcaacgcagcttctggaaac

SEQ ID NO: 3806 - DNA, 120 bp, synthetic construct
  misc_feature 1..120: note = Artificially Synthesized Probe
  source 1..120: mol_type = other DNA
tcaaaaaaaaaaaaaaatcagttctaactctattttcctcagtgtggcttctagaatattctccagcacacaaccagctaggctgcatttctgttgcacaactgcagtcaaaagcaggag

SEQ ID NO: 3807 - DNA, 120 bp, synthetic construct
  misc_feature 1..120: note = Artificially Synthesized Probe
  source 1..120: mol_type = other DNA
acccagggcctcaggaaggagctgacagggtgttttagaaagaccttactctataaatgcaaaaacccagacttagttaacaaaagcctattacaaagacattttctcctattgctacct

SEQ ID NO: 3808 - DNA, 120 bp, synthetic construct
  misc_feature 1..120: note = Artificially Synthesized Probe
  source 1..120: mol_type = other DNA
ttttaaataatttatatctcttcattgacattctccagtgaggagacagtgtcttcagaccttccatgcaatctctagctgtggtttccttcagtcctctgaacatactgaggatagcca

SEQ ID NO: 3809 - DNA, 120 bp, synthetic construct
  misc_feature 1..120: note = Artificially Synthesized Probe
  source 1..120: mol_type = other DNA
ctacagtttagtttcttgctctaatggaactgctggcctcctcttaactgcttaccatcaaaatgtccattcttttccagggcacttttaggcttgaacatccccatactgtttcaaatc

SEQ ID NO: 3810 - DNA, 120 bp, synthetic construct
  misc_feature 1..120: note = Artificially Synthesized Probe
  source 1..120: mol_type = other DNA
caggacgtcttttgacgtatttcaatcttccctggtctctctcttcagcattttctttagtatcttccacgtacaaaccctgtacatgatttcctagactgacatctaagtacttcagtg

SEQ ID NO: 3811 - DNA, 120 bp, synthetic construct
  misc_feature 1..120: note = Artificially Synthesized Probe
  source 1..120: mol_type = other DNA
acaaggaaaagcgtgtatgtttagttttagagttaaggcggtgacattataaccgcttttcattatttaaggtttccacaaatgttctttgagcaacatcttgggggccaaccacgtgtt

SEQ ID NO: 3812 - DNA, 120 bp, synthetic construct
  misc_feature 1..120: note = Artificially Synthesized Probe
  source 1..120: mol_type = other DNA
aggctcaggcaggaggatcgcttgaacccgggaggcagaggttacagtgagctgagatcacaccactgcactccagcctgggcaacagagggaggcctttgcctcaaaaaaaaaaaaaat

SEQ ID NO: 3813 - DNA, 120 bp, synthetic construct
  misc_feature 1..120: note = Artificially Synthesized Probe
  source 1..120: mol_type = other DNA
agactgacgagaagttaggtgactttgaaagggtcacacgcattcaaacagaagcgattatcttaacttctactgttttcattttttgtgtatttgacacgccccctttctgcagctatt

SEQ ID NO: 3814 - DNA, 120 bp, synthetic construct
  misc_feature 1..120: note = Artificially Synthesized Probe
  source 1..120: mol_type = other DNA
tgtcttcttaactagttctaggtgccatgattttcatctttctcagcccccaatttatgctaggggggttacaaaggggaatacaactttggagtctgaagtggcagtcctcacctgagc

SEQ ID NO: 3815 - DNA, 120 bp, synthetic construct
  misc_feature 1..120: note = Artificially Synthesized Probe
  source 1..120: mol_type = other DNA
tatcttttccaaagatacctctcaaagacttgaaaacagagccaagaacaagaacagacaatgccgaagtctgtgtggtgctgaggaaaatgcttgccatcatttgtcaaagggaaggaa

SEQ ID NO: 3816 - DNA, 120 bp, synthetic construct
  misc_feature 1..120: note = Artificially Synthesized Probe
  source 1..120: mol_type = other DNA
tactgctgtgcctgagtcaccaaagacctgcagctcttcactggagaaaaggaatgtcttgtgtttgtttaagagtcacagagtatttttcttaggaagggaacacacagttatttcaga

SEQ ID NO: 3817 - DNA, 120 bp, synthetic construct
  misc_feature 1..120: note = Artificially Synthesized Probe
  source 1..120: mol_type = other DNA
caaaacaaacaaataaccactctgctttcaggtatatggagatgatgtcccaggtatgtgaccaaggctgaaaagactacaagtaacaggtgccaatggtcccagggaaaatccctttct

SEQ ID NO: 3818 - DNA, 120 bp, synthetic construct
  misc_feature 1..120: note = Artificially Synthesized Probe
  source 1..120: mol_type = other DNA
aacacgctcgacctacatttctattccattgtctaagtcattcggctcttccaggaaaaagagaggaaatctattcttccccagtaaagccttttacgtgcagtaaaaaatgcatacaac

SEQ ID NO: 3819 - DNA, 120 bp, synthetic construct
  misc_feature 1..120: note = Artificially Synthesized Probe
  source 1..120: mol_type = other DNA
agaatgtcctgtgtccagggcaatctctggcacacagcagatgcttaaaagatactggttgaatgagtcctgaccataccattaacccagcactcaccaaactgccctaaaaatgcctgt

SEQ ID NO: 3820 - DNA, 120 bp, synthetic construct
  misc_feature 1..120: note = Artificially Synthesized Probe
  source 1..120: mol_type = other DNA
aaaatgacaaaaacctgaaatcaacctcatggctccaaatcccaacgtcaaaccagagtttagcgacggacgccaacccctgagagtcacaaagccttccctcacttttttttcttaacc

SEQ ID NO: 3821 - DNA, 120 bp, synthetic construct
  misc_feature 1..120: note = Artificially Synthesized Probe
  source 1..120: mol_type = other DNA
gcgggcgggtcacgtggagcaggtgtgaggggcaggtgtgcagggcgggtggagcgggctggtcacgtggagcaggtgtgagggacaggtgtggcgggctggtcacctgggacagttgtg

SEQ ID NO: 3822 - DNA, 120 bp, synthetic construct
  misc_feature 1..120: note = Artificially Synthesized Probe
  source 1..120: mol_type = other DNA
aggccgagccgagacgagccgaatgtccccgaggccgaatgctcccgaacgtcggttctccacctcttcccttccgaaagtgcccgagcggtgccggacggactaatcgggcctcggccg

SEQ ID NO: 3823 - DNA, 120 bp, synthetic construct
  misc_feature 1..120: note = Artificially Synthesized Probe
  source 1..120: mol_type = other DNA
cttctgctgtctgtgggtacagccagaactcccatacgcgggcgctgaagtgccaaaccttcgtgcgtgttctctagtaattaggtgcattgttttgaaggaataaagaatggctactcc

SEQ ID NO: 3824 - DNA, 120 bp, synthetic construct
  misc_feature 1..120: note = Artificially Synthesized Probe
  source 1..120: mol_type = other DNA
tttttcccccaagccccataacttcaatctataacagtgagcaactagcagacacattggaagtgtttaagaagccagcctttaagaaaaggaacagaagggacaaaaaccccaattaat

SEQ ID NO: 3825 - DNA, 120 bp, synthetic construct
  misc_feature 1..120: note = Artificially Synthesized Probe
  source 1..120: mol_type = other DNA
aatcatgaaaaaagatttgttacaacctaagtcagaaaaggttttcatctagtcatatatgtgtggcaaatacggagaagccacagacggtgagccacagacaatgagagcagctgttgg

SEQ ID NO: 3826 - DNA, 120 bp, synthetic construct
  misc_feature 1..120: note = Artificially Synthesized Probe
  source 1..120: mol_type = other DNA
agactcatgttagcataaacaaataggaaatgtacacagctcaggaaatggctactagatacttaagtcccccaaacagaaatatatttcctctgaagaaactgaaaaaagtggccgggc

SEQ ID NO: 3827 - DNA, 120 bp, synthetic construct
  misc_feature 1..120: note = Artificially Synthesized Probe
  source 1..120: mol_type = other DNA
tacctgggtgagtggactgttaacaccgtgaagaacctgtcctaagagttgctatctgtttccacagcctttcaagagtaattattttatagtgtggttctcagagacattttttatcca

SEQ ID NO: 3828 - DNA, 120 bp, synthetic construct
  misc_feature 1..120: note = Artificially Synthesized Probe
  source 1..120: mol_type = other DNA
gcctcccaaagtgcctggcctcactcccctttttttaaccacacaatttgttcaagggtatgttcttgtacaagattcaaggggtgcagaagtaaaacatggaaattcgccctccccaga

SEQ ID NO: 3829 - DNA, 120 bp, synthetic construct
  misc_feature 1..120: note = Artificially Synthesized Probe
  source 1..120: mol_type = other DNA
gaccagagaaaaatactttgggaatttttcaaaaaaatcccttcagttccacttggaattaggaaaacgtggcagatgcacttgaatcattttagaaaccaaattcacccccgcccacac

SEQ ID NO: 3830 - DNA, 120 bp, synthetic construct
  misc_feature 1..120: note = Artificially Synthesized Probe
  source 1..120: mol_type = other DNA
gagcctccgtccactccagttttatcagcttttgccttttgcacggagtgctaaacaaattctagctctgtgtttttttcccattcccagatttactatcagttctccttaaaaagtatc

SEQ ID NO: 3831 - DNA, 120 bp, synthetic construct
  misc_feature 1..120: note = Artificially Synthesized Probe
  source 1..120: mol_type = other DNA
aaaccatgcagaccagggaaggaccccctccctgaagctggagacctgttgccttcatggttaatggatcctgatacctccagtctcagcgagcacacaaaggcagtggtcacctgttcc

SEQ ID NO: 3832 - DNA, 120 bp, synthetic construct
  misc_feature 1..120: note = Artificially Synthesized Probe
  source 1..120: mol_type = other DNA
gcccaggctgggcagaaaggggggcctggaggagcagctgcactgtgaactcagggctccaggcctggggtgggcatggctgggtcctgcctgacacccacccactcaccgaagcctctg

SEQ ID NO: 3833 - DNA, 120 bp, synthetic construct
  misc_feature 1..120: note = Artificially Synthesized Probe
  source 1..120: mol_type = other DNA
aggatatttttaagccagcgatgggtgactcacctgccccgtcctgcccactcccagctctggggcttggtgggggcaatccctgcgtccggagagcgctggtggtagggaggcttctcc

SEQ ID NO: 3834 - DNA, 120 bp, synthetic construct
  misc_feature 1..120: note = Artificially Synthesized Probe
  source 1..120: mol_type = other DNA
ggagcgacactaccagctgctgtcggcgttacagagcctggtgaaggagttgcccaggtacgcgggcggggcgggcggcggcctgccgaggccgcatcgtgtcccgccggggctcaccgc

SEQ ID NO: 3835 - DNA, 120 bp, synthetic construct
  misc_feature 1..120: note = Artificially Synthesized Probe
  source 1..120: mol_type = other DNA
aagacagtgtagtgcatacgcttgtgctctccaccgaaagttcagtagttaacattttgctctagttcttgacatcccaaaatacatacatgtgacagcatagaattcaccaagagtctt

SEQ ID NO: 3836 - DNA, 120 bp, synthetic construct
  misc_feature 1..120: note = Artificially Synthesized Probe
  source 1..120: mol_type = other DNA
ctttttggcagctcttgagatgatcacgtggtgaatcattttctattactacagtgaattacagtcacttgaattccatcctactgggtcgtgctgtagtatcctttttatgtatgctgg

SEQ ID NO: 3837 - DNA, 120 bp, synthetic construct
  misc_feature 1..120: note = Artificially Synthesized Probe
  source 1..120: mol_type = other DNA
ctctcttcttgccttttggttgcatatctagtggaatctcgtagtggacctggcacttgtagcaatgtttgatcagtagagtgaagatgatgacatttccctgcttccctgtgttatgga

SEQ ID NO: 3838 - DNA, 120 bp, synthetic construct
  misc_feature 1..120: note = Artificially Synthesized Probe
  source 1..120: mol_type = other DNA
acacccctttggcctggctgctctgctgggttggtaaggcaggtgcccatgggtgagggctgctgccgagtcccaccgcctgctgacgggctctcatccctcccagtgctcaggcaggcg

SEQ ID NO: 3839 - DNA, 120 bp, synthetic construct
  misc_feature 1..120: note = Artificially Synthesized Probe
  source 1..120: mol_type = other DNA
ctgggccccattccatctgggatttcactgctggtccctggggagccaggctcagggtatagggggtgaagtggaaggattgaggctctggaaaggatttctgtgccattcccagcatgg

SEQ ID NO: 3840 - DNA, 120 bp, synthetic construct
  misc_feature 1..120: note = Artificially Synthesized Probe
  source 1..120: mol_type = other DNA
acccttcatctgggacttgctgtcaaaccctaggatagtctcataaaggggaggctgggccagcctgctgctgtctgcttcagggccaggcagagagtgaggctgggggttctcacacct

SEQ ID NO: 3841 - DNA, 120 bp, synthetic construct
  misc_feature 1..120: note = Artificially Synthesized Probe
  source 1..120: mol_type = other DNA
ggaagccagagtctgggatgagacttctctgaccctgtctgagccactccctctttgttgcccagagctgaccctgtgtgagggcaaagggctctcagctgcaggaacagtggtttattg

SEQ ID NO: 3842 - DNA, 120 bp, synthetic construct
  misc_feature 1..120: note = Artificially Synthesized Probe
  source 1..120: mol_type = other DNA
gcaggactctgctgggctgccctactcgtctccctggggaggcctcagcccttggccaacaaggcctcccacctgctttccctcccctctcctctctcacctctcctctagctcccttct

SEQ ID NO: 3843 - DNA, 120 bp, synthetic construct
  misc_feature 1..120: note = Artificially Synthesized Probe
  source 1..120: mol_type = other DNA
cagtcaccacactctgaaataacgctgctaacattcaactgataaaagggaccatctcccttgggtaaagtgtcaagcaggattaaatatatataataaacaagcaccatgaggaatctg

SEQ ID NO: 3844 - DNA, 120 bp, synthetic construct
  misc_feature 1..120: note = Artificially Synthesized Probe
  source 1..120: mol_type = other DNA
aactcttttagcaaaaggcttactgctgactgcatatagcaaaggcagagaaagacgctgcccacaacataatgaaagatcatctacattttgcccagcatcaatcttagtcatgcatat

SEQ ID NO: 3845 - DNA, 120 bp, synthetic construct
  misc_feature 1..120: note = Artificially Synthesized Probe
  source 1..120: mol_type = other DNA
aacttcgaaggccgtataccagcctttgtttcttcagcacatttctgacaaagaaagctgctattatctaattggaaggtgctatttggaaggttttctcgtacctcaaactttcctaaa

SEQ ID NO: 3846 - DNA, 120 bp, synthetic construct
  misc_feature 1..120: note = Artificially Synthesized Probe
  source 1..120: mol_type = other DNA
agcactaaaagacagaaaagaaagccatcattatatgtttattaatgctttatttaatagccgtggtttcaaagttccacttggctctctctgacctgcctgagcactgcccgacagtct

SEQ ID NO: 3847 - DNA, 120 bp, synthetic construct
  misc_feature 1..120: note = Artificially Synthesized Probe
  source 1..120: mol_type = other DNA
tgctctcacgcacctgacaaacatgttctatcccagcttgaggcaggagatattttaggaaactcactattgttctaagtgggagagtaagtcagttaggaaaaaaacgcatattttatt

SEQ ID NO: 3848 - DNA, 120 bp, synthetic construct
  misc_feature 1..120: note = Artificially Synthesized Probe
  source 1..120: mol_type = other DNA
tcgatgcacaccttttagcgggaaaccagacagaaaatgcttgagggaggtcacacaagccaattaaaattgttttcttaaaaatacaaaaacggaaggctgtaactgatattcgtagct

SEQ ID NO: 3849 - DNA, 120 bp, synthetic construct
  misc_feature 1..120: note = Artificially Synthesized Probe
  source 1..120: mol_type = other DNA
tgcctctccttctcactgaagttttcccatgtctcatgttacttccagttcccaagtcaacagtcataaaagtattttctgtgcctacatatgtgtgaggtttgttttcttcctatatca

SEQ ID NO: 3850 - DNA, 120 bp, synthetic construct
  misc_feature 1..120: note = Artificially Synthesized Probe
  source 1..120: mol_type = other DNA
tgtgactctatcccacacatgcttctctgtgctactaattctgtgtataagtgggaaaagaaagcatagctcttgctcttgttcatgaacatttccttagctcatagagccaggaaattt

SEQ ID NO: 3851 - DNA, 120 bp, synthetic construct
  misc_feature 1..120: note = Artificially Synthesized Probe
  source 1..120: mol_type = other DNA
gccaagtcctgcctctatttttagcagaactaaggaggtgagaaaggattctggaataagcaaagaattaactatacaagtgcacttttacatgtccatgtcatgaaatacccctggctt

SEQ ID NO: 3852 - DNA, 120 bp, synthetic construct
  misc_feature 1..120: note = Artificially Synthesized Probe
  source 1..120: mol_type = other DNA
acacagaggatactgaaataaaggcagtctaccaagtttgtggccaagcaaccagccaaggcatccctatggggaactgaattaaagcagattagttgaagatttaacaaataggtttta

SEQ ID NO: 3853 - DNA, 120 bp, synthetic construct
  misc_feature 1..120: note = Artificially Synthesized Probe
  source 1..120: mol_type = other DNA
cacagtgcattccttaatttatataactttctcaattaacctcataaagcggaaaaaacacacattcttaataagaaagtcaccctggaaatttcgccagttctggccaccctcagaggg

SEQ ID NO: 3854 - DNA, 120 bp, synthetic construct
  misc_feature 1..120: note = Artificially Synthesized Probe
  source 1..120: mol_type = other DNA
ggtctctgccactttcctggtgaaggacttctcagtaataaaagcaggaacgtggaaagcaaactcaagagccaagaaataaagaaactcagtccatacacattatgtgtttaaatcttt

SEQ ID NO: 3855 - DNA, 120 bp, synthetic construct
  misc_feature 1..120: note = Artificially Synthesized Probe
  source 1..120: mol_type = other DNA
cagttgtttcaatgaagttatttaagatatttacatagagtcaatattacatctcacatcatggcacacacatggatggagggtgatgcttgcagtaatcgctgaaggaagggagtcaca

SEQ ID NO: 3856 - DNA, 120 bp, synthetic construct
  misc_feature 1..120: note = Artificially Synthesized Probe
  source 1..120: mol_type = other DNA
cattcctactgttggaaccaactctgtgaagcattctaacttgcagccatgcaggcaactttataatagaagcaacatgagatgctcttagaattatgtcaatggagaaggaatctgaca

SEQ ID NO: 3857 - DNA, 120 bp, synthetic construct
  misc_feature 1..120: note = Artificially Synthesized Probe
  source 1..120: mol_type = other DNA
catctctcaaacctgcaaagtaactgggaaaatgactctgagctgaaagtaaccatgagtccacttagcattttcagaaaaggaaaagaacacggattacagagtttccttgaaagagct

SEQ ID NO: 3858 - DNA, 120 bp, synthetic construct
  misc_feature 1..120: note = Artificially Synthesized Probe
  source 1..120: mol_type = other DNA
ttacaggtgtagccaccatgcccagccctcactgagatttgaaacacaccaagaacccactcttatgcactcgacacagcagtcttcctctgtaactgacagatgtaccaagaaggagga

SEQ ID NO: 3859 - DNA, 120 bp, synthetic construct
  misc_feature 1..120: note = Artificially Synthesized Probe
  source 1..120: mol_type = other DNA
ctggctgttttaacacagaattgcaagaaactaaagaacttttaggagcctggtagcattatgctaattcaggacttgccatgagaatacctagaatttgcggtgcaacacaaatgtgct

SEQ ID NO: 3860 - DNA, 120 bp, synthetic construct
  misc_feature 1..120: note = Artificially Synthesized Probe
  source 1..120: mol_type = other DNA
gagatatatttgtaacatacacatcagagggctgattccctccatgtgcaaagaactcatagaaatgaaaccaggtgatcttggttgttctcaaaagtagtgttctccacagttacagag

SEQ ID NO: 3861 - DNA, 120 bp, synthetic construct
  misc_feature 1..120: note = Artificially Synthesized Probe
  source 1..120: mol_type = other DNA
agttggttttaaacagtgcacctactttcacatcaaggttacaatttaactgtgtgtctgaataaactcttccagcctggcctctgtctcaccccttatttcttctccagtccagtataa

SEQ ID NO: 3862 - DNA, 120 bp, synthetic construct
  misc_feature 1..120: note = Artificially Synthesized Probe
  source 1..120: mol_type = other DNA
tggcagctaaggtacacagaggatgaggcaagtgttactgtcaaagttgggattttaatatcttgccacttactttgcaaccagtgaagcacataagagcattaaaatcacaaggaacaa

SEQ ID NO: 3863 - DNA, 120 bp, synthetic construct
  misc_feature 1..120: note = Artificially Synthesized Probe
  source 1..120: mol_type = other DNA
gctcgatttctgaacgctaatcccgagcacagacccctgctacctaagaccctaatcacatgcatcaatactctgggtgcatcaatatgctgggtgcatgtaacattagcacttggggag

SEQ ID NO: 3864 - DNA, 120 bp, synthetic construct
  misc_feature 1..120: note = Artificially Synthesized Probe
  source 1..120: mol_type = other DNA
aaaaaaaaaaaaaaaaaaaaaaaaaaaaaaaagaaggctattatcaaaaagacaaaaaatatcaaatgctggtgaggatacagagagaagggaactcttatacactgttggtaggaatgt

SEQ ID NO: 3865 - DNA, 120 bp, synthetic construct
  misc_feature 1..120: note = Artificially Synthesized Probe
  source 1..120: mol_type = other DNA
cacgtatgttcattgcggcactattcacaatagcaaagacttggaaccaacccaaatgcccatcaatgatagactggattaagaaaatgtggcacatatacaccatggaacactatgcag

SEQ ID NO: 3866 - DNA, 120 bp, synthetic construct
  misc_feature 1..120: note = Artificially Synthesized Probe
  source 1..120: mol_type = other DNA
ctgtaccaccgcaggatgactataactaacagtaatttatcattcaaatagctaggaggaagataccaaacattcccaaagaaatgatgcacgctcccgatctaatatcccgatctgcta

SEQ ID NO: 3867 - DNA, 120 bp, synthetic construct
  misc_feature 1..120: note = Artificially Synthesized Probe
  source 1..120: mol_type = other DNA
tcctacttcaatcttcgcttgctgaaatggtccaacttggtttccgtcactttccaccatgaagtgtgactaatgtggatcaactttccctttttgagtaagactagaaagacttgaaaa

SEQ ID NO: 3868 - DNA, 120 bp, synthetic construct
  misc_feature 1..120: note = Artificially Synthesized Probe
  source 1..120: mol_type = other DNA
gccttgagtgcagggctcaccctagcatcaggcttaatattttgttgtcatttctttggcttgccttaattgggaagatttccaaagtcttttttatcttcatgacgttgacatttttga

SEQ ID NO: 3869 - DNA, 120 bp, synthetic construct
  misc_feature 1..120: note = Artificially Synthesized Probe
  source 1..120: mol_type = other DNA
cctgagcgtgtggagaaaccggaactcgctctaagcagccgggcaactccttctccacagaaaggacttgaaaagtatctttttattaaatcataaaagacatcttttattaaacagaaa

SEQ ID NO: 3870 - DNA, 120 bp, synthetic construct
  misc_feature 1..120: note = Artificially Synthesized Probe
  source 1..120: mol_type = other DNA
tgggaactgctcattcgctgcttgtctcatttaggagataaactgaggccctaaaaggtttaacgttacactgacacggcaaagtgaaagaagaaattagagaatgggatgtaaagacta

SEQ ID NO: 3871 - DNA, 120 bp, synthetic construct
  misc_feature 1..120: note = Artificially Synthesized Probe
  source 1..120: mol_type = other DNA
tgaggatcatatgaaacactgagaagctggaggtaaaaagtacagtcatgtacttaacgacaaggcaacatcctgagaaatgagctgtcagtccattgtgtcatcacgcaaacaccacag

SEQ ID NO: 3872 - DNA, 120 bp, synthetic construct
  misc_feature 1..120: note = Artificially Synthesized Probe
  source 1..120: mol_type = other DNA
catgaggctgtagattgatcaacactgcacttgtgagctaagtcatcaccgcacgtggctgtagattcataaacactgtactcgtaagctacactaaatctataagaaaattcccttgtt

SEQ ID NO: 3873 - DNA, 120 bp, synthetic construct
  misc_feature 1..120: note = Artificially Synthesized Probe
  source 1..120: mol_type = other DNA
catatatgcatgtgtgtatacttgtaacaactccacatacaaaatacaaggcaatactaagactcagtgtgcatgtgcacatgcaacacacacacaatactcacatagcccacacactag

SEQ ID NO: 3874 - DNA, 120 bp, synthetic construct
  misc_feature 1..120: note = Artificially Synthesized Probe
  source 1..120: mol_type = other DNA
ttctattctgtggcccctgctctcaggatcttgatacttgggctaaccaatgagtaggaattaatttagtatctatgcttttctggtaataccctttagttatgacttcaggttacaagc

SEQ ID NO: 3875 - DNA, 120 bp, synthetic construct
  misc_feature 1..120: note = Artificially Synthesized Probe
  source 1..120: mol_type = other DNA
ctgtgacagagcctaatgcagatcaagtgagaaaaccaccatcccatttttataggaagagtaacaagaaagaaataagatcagtgcttttagtggctctcatttcactgcctcccgact

SEQ ID NO: 3876 - DNA, 120 bp, synthetic construct
  misc_feature 1..120: note = Artificially Synthesized Probe
  source 1..120: mol_type = other DNA
atattacatgctggtaaaggttgaaagtgatgctggagattaaagctggatgacatttttacctaggaatatttaagggaggtttaaggaaggagagggctttggggctggcttggagga

SEQ ID NO: 3877 - DNA, 120 bp, synthetic construct
  misc_feature 1..120: note = Artificially Synthesized Probe
  source 1..120: mol_type = other DNA
cccagaagtgattatttagaaaactgtatgcccagaaacaagttacctaatctaaaactacatttctgatttttctaagtgttccagactgaactttgtccctggcagctggtggccttg

SEQ ID NO: 3878 - DNA, 120 bp, synthetic construct
  misc_feature 1..120: note = Artificially Synthesized Probe
  source 1..120: mol_type = other DNA
taacccctatttcaagcatcttgacaaaacatttccattcatgtaaagaaatgtgggcaggatgctgacattctacgacgggggcaaaatggtgcataaaataggaaggaaaagaaccga

SEQ ID NO: 3879 - DNA, 120 bp, synthetic construct
  misc_feature 1..120: note = Artificially Synthesized Probe
  source 1..120: mol_type = other DNA
ctctgtacacagaagagcagcatcacgaaggctgcattacaaaccaaaattgtacactcatttttggggaaggcagtacaataccttggttggaaaaagactaaacctacaataaatttg

SEQ ID NO: 3880 - DNA, 120 bp, synthetic construct
  misc_feature 1..120: note = Artificially Synthesized Probe
  source 1..120: mol_type = other DNA
cccgacagtgaaaaatgggatggagaagagggaggggtggggaggagaatgcgaaaagcaggaaacaaaatgaaaagaagatcaaaaacaacatcaaatatggaaatcattaaaattaac

SEQ ID NO: 3881 - DNA, 120 bp, synthetic construct
  misc_feature 1..120: note = Artificially Synthesized Probe
  source 1..120: mol_type = other DNA
tggtcacaaagcccaatggaaaaactgccaccactcacaacagagccaagtctatgaaaataagcaatggttcaagattttaaaagaaaatcacgattccactcttctctgttacttctc

SEQ ID NO: 3882 - DNA, 120 bp, synthetic construct
  misc_feature 1..120: note = Artificially Synthesized Probe
  source 1..120: mol_type = other DNA
cctgagcatctgcagacttaggtatccacagggagtctggaaacctgtcccccattgagggacaaatgtatataccaaaaaataactttcttactgacacagaagtattatatcaattag

SEQ ID NO: 3883 - DNA, 120 bp, synthetic construct
  misc_feature 1..120: note = Artificially Synthesized Probe
  source 1..120: mol_type = other DNA
ttatactactgcattagggattatagttcaacacagaagttttggagggggacacagacattctgacctcagcaatcacatcatccacagttcatttacttttcacgtccttattggtgc

SEQ ID NO: 3884 - DNA, 120 bp, synthetic construct
  misc_feature 1..120: note = Artificially Synthesized Probe
  source 1..120: mol_type = other DNA
gaactcagtgttgtttttattacttccccctacttagttttatttctgcagggactttaagattgactctgccactgactttcggtgtttggacaacaaagcatctgggtgtgattcttc

SEQ ID NO: 3885 - DNA, 120 bp, synthetic construct
  misc_feature 1..120: note = Artificially Synthesized Probe
  source 1..120: mol_type = other DNA
cctgccttttgcacactaaaggttcagagtgcctcagagaaaatgcatccacttttaggactcccctgggattctcatctaccttgcaaataacatactgccatttatgttttttaaaaa

SEQ ID NO: 3886 - DNA, 120 bp, synthetic construct
  misc_feature 1..120: note = Artificially Synthesized Probe
  source 1..120: mol_type = other DNA
gctgtttttgttgaacttactgagtgaatgatgaactcagattcttgctttttggttcaagacatagactaaaagccaggcatgttctgtgactgcgatagagaatcccttgctgaaagc

SEQ ID NO: 3887 - DNA, 120 bp, synthetic construct
  misc_feature 1..120: note = Artificially Synthesized Probe
  source 1..120: mol_type = other DNA
ggtggctcattccctgaggctttcaaaatccccaacagcaccttatttatttccttcacctaaaagcagtgtagggggacaaggaaactgagagctcaagttaatgaaagtcttattatt

SEQ ID NO: 3888 - DNA, 120 bp, synthetic construct
  misc_feature 1..120: note = Artificially Synthesized Probe
  source 1..120: mol_type = other DNA
ctttgtcaattaggaaagttcacttctcagggccttcatctctcatcttaaaacaactaagaattcccttaaagagcatgggaagacctaactagatgctgtctgaatccaatggtccaa

SEQ ID NO: 3889 - DNA, 120 bp, synthetic construct
  misc_feature 1..120: note = Artificially Synthesized Probe
  source 1..120: mol_type = other DNA
aaaaaaaatcaagtatcagtactttgacaaaatgtatccaacatccagaagtgactgtgatgatgtgagatggcactggacactcagggagggagattctttcataaagccatgctctta

SEQ ID NO: 3890 - DNA, 120 bp, synthetic construct
  misc_feature 1..120: note = Artificially Synthesized Probe
  source 1..120: mol_type = other DNA
gtgatgcccttgacacatcctaagccctgctgcacacgggtgaggctccctctctcttttggacaatgttctttgctgagtttgctccctatctcctggagataaaactcttccctctct

SEQ ID NO: 3891 - DNA, 120 bp, synthetic construct
  misc_feature 1..120: note = Artificially Synthesized Probe
  source 1..120: mol_type = other DNA
gttgttagaacagtcagtcgggggtgcggggctccggcgagagaccggcgctgttagaacagtccgtcgggggtgcggggctccggcgagagaccggcgctgttagaacagtcagtcggg

SEQ ID NO: 3892 - DNA, 120 bp, synthetic construct
  misc_feature 1..120: note = Artificially Synthesized Probe
  source 1..120: mol_type = other DNA
cagacacccccgtttccacactcactcacgatgctgctgcttcaaactgaaagctacatttttcaacatctttaaatatttaggtacaaggtttggaattctggcagtgtcttaattttt

SEQ ID NO: 3893 - DNA, 120 bp, synthetic construct
  misc_feature 1..120: note = Artificially Synthesized Probe
  source 1..120: mol_type = other DNA
aggaaatgctgaccgaaaggagttagggataggtcaagtagaaaactgaacatggacaaaaatgcttaaagatgctgccaagattgcaaaataacgccatgacccatgattagaatactg

SEQ ID NO: 3894 - DNA, 120 bp, synthetic construct
  misc_feature 1..120: note = Artificially Synthesized Probe
  source 1..120: mol_type = other DNA
actggtggatggagacaagtgagacatcacactattgctgaacttaagaagcagacttctgcatttcctatttctcctaatgggatagatggcgataaacatttatgaggaacagaaaaa

SEQ ID NO: 3895 - DNA, 120 bp, synthetic construct
  misc_feature 1..120: note = Artificially Synthesized Probe
  source 1..120: mol_type = other DNA
ctttaaaaagtcgaacagcagaggtctggacaaactgctacccctgtcacaaaagttaaaatgttccaggacagagtaagtcctatgaatgcttgttatgaataatggatacgaacgtag

SEQ ID NO: 3896 - DNA, 120 bp, synthetic construct
  misc_feature 1..120: note = Artificially Synthesized Probe
  source 1..120: mol_type = other DNA
tattcaaatgattaagaatggaattacaaacacgtctcaaacaaccacctggagccacagcaagaactgttatgaggaaaaaggttgaggaaaagcaacttcctggctgagacgatgaaa

SEQ ID NO: 3897 - DNA, 120 bp, synthetic construct
  misc_feature 1..120: note = Artificially Synthesized Probe
  source 1..120: mol_type = other DNA
atgcagctgcaacagcaggtctgaagccaaagattctaaatttggctccaggttcgttcagcctaagaacctggaaaggttgcttaatttctctatgacataagtttcctcagctttaaa

SEQ ID NO: 3898 - DNA, 120 bp, synthetic construct
  misc_feature 1..120: note = Artificially Synthesized Probe
  source 1..120: mol_type = other DNA
cattctggttcgttactgtctgtggtcgtggggaaatattcacgttaaaaagattttcatataaaggcagtttgtaagcttcaggtgacgttagattaaacccaggctttgttttggagg

SEQ ID NO: 3899 - DNA, 120 bp, synthetic construct
  misc_feature 1..120: note = Artificially Synthesized Probe
  source 1..120: mol_type = other DNA
tgtttactactatgaattcacaatagataccatacattaaaataaaatatcctagataaatcacgttctaagatttacaatttaattaacgggaacgttctgttgcccaggctagagtag

SEQ ID NO: 3900 - DNA, 120 bp, synthetic construct
  misc_feature 1..120: note = Artificially Synthesized Probe
  source 1..120: mol_type = other DNA
aaaggacacatagccctctgtgtctgtgggttcctcacccctggcttcaaccatgaatcaaagatattcatgaaaaaatctgcatctatacctaacttgtagattttcttatcattagtg

SEQ ID NO: 3901 - DNA, 120 bp, synthetic construct
  misc_feature 1..120: note = Artificially Synthesized Probe
  source 1..120: mol_type = other DNA
ttggcactggcaataaattctgctatggacaagacaaacctacttaagagcaggttgcttattctcaagacattattctctgagaatgttgggaacctgagctgttcttcagatcttaac

SEQ ID NO: 3902 - DNA, 120 bp, synthetic construct
  misc_feature 1..120: note = Artificially Synthesized Probe
  source 1..120: mol_type = other DNA
tatgagaattcgtttttccaccttcttggttactgttgctttgcagtgtaagttttgaagtcagaaaacacgagctctccaactttatttcctgtgttttcggtgacagcattctagtgg

SEQ ID NO: 3903 - DNA, 120 bp, synthetic construct
  misc_feature 1..120: note = Artificially Synthesized Probe
  source 1..120: mol_type = other DNA
ttgaactaacttaggtatatgacgttgagtcaaggtttaatcttttttccttttcatgtgaatgtccgaatttcccagcatctgttgttggaaaaacttttcttcattgaattgctcggg

SEQ ID NO: 3904 - DNA, 120 bp, synthetic construct
  misc_feature 1..120: note = Artificially Synthesized Probe
  source 1..120: mol_type = other DNA
ccagctggttcaggcttttccaccatgaagactctctttcctttaactatttcgtggatggctactatagaaatcctcacttctcatcaagctttccatttgttcatctgtgtatctgaa

SEQ ID NO: 3905 - DNA, 120 bp, synthetic construct
  misc_feature 1..120: note = Artificially Synthesized Probe
  source 1..120: mol_type = other DNA
atacctagcatcttagagatgaagcctacttgggcacggtggattaggtttttgatgagcatatacaattatgtacacaacttaatactttaaccatgatgacaaacaactgttactggt

SEQ ID NO: 3906 - DNA, 120 bp, synthetic construct
  misc_feature 1..120: note = Artificially Synthesized Probe
  source 1..120: mol_type = other DNA
atgtgtgtgtgtgttctgtgaaggcctaggcagctgtgtgtgtgcacgtgtgtcgtggaggcctacgcagctgtgtgtgtgtgttgtggaggcctaggttgatgtgtgtgcacgtgtgtt

SEQ ID NO: 3907 - DNA, 120 bp, synthetic construct
  misc_feature 1..120: note = Artificially Synthesized Probe
  source 1..120: mol_type = other DNA
atttattactgaagaactaaaaatatttttgacaaacttggcgtagccaaagtgtctggtatttacagaggccacaatagtgtgcagtcgtgtcctggcctcacgttcaggtgccgctta

SEQ ID NO: 3908 - DNA, 120 bp, synthetic construct
  misc_feature 1..120: note = Artificially Synthesized Probe
  source 1..120: mol_type = other DNA
tctgagttagtaacattttgcaggaaagatgcttgtcaaatttcatcgcaacctggacaaacccttaaagagtgtattgttattgtgggttcacacggagaacttactttccctgcaaca

SEQ ID NO: 3909 - DNA, 120 bp, synthetic construct
  misc_feature 1..120: note = Artificially Synthesized Probe
  source 1..120: mol_type = other DNA
aatgctgaaatgtgaagctggatgatggtcacgggtgtttattactggacatgctctatgcttacttgcttgaaaacgctccattagaaaatgaactctgaaaactatatgcccaatgct

SEQ ID NO: 3910 - DNA, 120 bp, synthetic construct
  misc_feature 1..120: note = Artificially Synthesized Probe
  source 1..120: mol_type = other DNA
aatgcatgggacttcatacccaaggatacctacaagacaataaagccgcattaaatgcgtggggcctgacacccaaagacatctttaagacaataaggccaaatgaaatgtatgctggcc

SEQ ID NO: 3911 - DNA, 120 bp, synthetic construct
  misc_feature 1..120: note = Artificially Synthesized Probe
  source 1..120: mol_type = other DNA
gctaaaatccaatcatcccatcatgaccagacagtgaagagcttccgcatcttcctcttccctaatccctgtaatagtccccctacagtctgtgtgtaatgtcaattattttgaaataca

SEQ ID NO: 3912 - DNA, 120 bp, synthetic construct
  misc_feature 1..120: note = Artificially Synthesized Probe
  source 1..120: mol_type = other DNA
tggaggtgggagtcctcccactgtaaaacgttccatcactattggaagttctgcctgggagaaggtttcgtaactgttttactatattcatacaggggaacgtagaattattataaaatg

SEQ ID NO: 3913 - DNA, 120 bp, synthetic construct
  misc_feature 1..120: note = Artificially Synthesized Probe
  source 1..120: mol_type = other DNA
taaaacgctagaaagtgcagtgtgcagaaatttatcacagagcgttcggatttgagaaccagcaagagaaaaacattcgcagtgttctactgtcagctgagacagtgttcacataaaaac

SEQ ID NO: 3914 - DNA, 120 bp, synthetic construct
  misc_feature 1..120: note = Artificially Synthesized Probe
  source 1..120: mol_type = other DNA
acttcacacgggtctcctgcttactacatacactaaaaccatgtagctttaacgggcagatgaggttaccgagccctcctgctggctaaggtaggacagagctaggagtctagttgtgga

SEQ ID NO: 3915 - DNA, 120 bp, synthetic construct
  misc_feature 1..120: note = Artificially Synthesized Probe
  source 1..120: mol_type = other DNA
gaaaccccacacgcacccagacacatcgcgcatagttctcccggaaaccccacactcacccaacccagacacatcgcgcatagttctcctggaaaccccacactcacccaacccagacac

SEQ ID NO: 3916 - DNA, 120 bp, synthetic construct
  misc_feature 1..120: note = Artificially Synthesized Probe
  source 1..120: mol_type = other DNA
tcacccggacacattgcgcatagttctcccggaaaccccacacgcacccaacccagacacatcgcgcatagctctcccggaaaccccacacgcacccagacacatcgcgcatagttctcc

SEQ ID NO: 3917 - DNA, 120 bp, synthetic construct
  misc_feature 1..120: note = Artificially Synthesized Probe
  source 1..120: mol_type = other DNA
aggaaaatatagctgaatcctctcaaactcctccagctgtagacgaaggaaaacagatctatactttcaaaaaggagcaggaaacttccacatcttgaggagagggctttggaaaaagcc

SEQ ID NO: 3918 - DNA, 120 bp, synthetic construct
  misc_feature 1..120: note = Artificially Synthesized Probe
  source 1..120: mol_type = other DNA
ggtttttagaacaagcacagacctgtgcaaccaacatgacagtcaattttagaacgtttttagcctcccccaaaactacatatacgttagaggtcaactccattttcttccaactaggta

SEQ ID NO: 3919 - DNA, 120 bp, synthetic construct
  misc_feature 1..120: note = Artificially Synthesized Probe
  source 1..120: mol_type = other DNA
aaattataagcacgtaactaaccgaaacaagcttttcctgaggacacactttacagtcctagttcctttgcagcactctcagatgtgaagacggcttctacagtcatttaacaacctctt

SEQ ID NO: 3920 - DNA, 120 bp, synthetic construct
  misc_feature 1..120: note = Artificially Synthesized Probe
  source 1..120: mol_type = other DNA
attcaaccttctcatcccacacattttccttgattatttccccacttagaggacacctaaaaaattagaaaacagaaactgatttaaagtagaagagcccaagagcaggtggcagcagag

SEQ ID NO: 3921 - DNA, 120 bp, synthetic construct
  misc_feature 1..120: note = Artificially Synthesized Probe
  source 1..120: mol_type = other DNA
catgagtgtaacatgcatgctgtcctttatctttgataaccctgtgaaacacaattttctcaatgctggttgatgtctttcagggctgacataaaaacaaacagcaaagcttccaggcac

SEQ ID NO: 3922 - DNA, 120 bp, synthetic construct
  misc_feature 1..120: note = Artificially Synthesized Probe
  source 1..120: mol_type = other DNA
acacagggaaacacaaagagtctgcccttgtctaaggacacacattcactgtcagtttctgtaaacttgggaccattttaacgtttcacattaaatcaaacaacttgggggaaaaaaaac

SEQ ID NO: 3923 - DNA, 120 bp, synthetic construct
  misc_feature 1..120: note = Artificially Synthesized Probe
  source 1..120: mol_type = other DNA
tctattttcctcctcctgatggtacatgttgcccatgaacgtacccaaatcatgtctgaatctttgcgtatatgggggtctgctacttcttgagctgcccatcaatacctctagattact

SEQ ID NO: 3924 - DNA, 120 bp, synthetic construct
  misc_feature 1..120: note = Artificially Synthesized Probe
  source 1..120: mol_type = other DNA
tcgtgatgctgctggcatttccttttgtcttcaatctgctgcttcgcacactaagattttgatactcagcaattctaaacagccatgactttttgaagagttgcaagtacctatacttgt

SEQ ID NO: 3925 - DNA, 120 bp, synthetic construct
  misc_feature 1..120: note = Artificially Synthesized Probe
  source 1..120: mol_type = other DNA
gtttaaaaacaatccctaggtacaaaagtctcagtcaaaatagcaaaacataaaaagaattcccataagactgaagcaaaaggattcaaagaaagaagcaggagcgctcccaggaaccag

SEQ ID NO: 3926 - DNA, 120 bp, synthetic construct
  misc_feature 1..120: note = Artificially Synthesized Probe
  source 1..120: mol_type = other DNA
gacattttctgaaactttgtatctcctataaacacatttttcttatgaaattatatggtctcttgcaggagaggacaggtagaataaaggaagatctgcagtggtggtccaccaccagcg

SEQ ID NO: 3927 - DNA, 120 bp, synthetic construct
  misc_feature 1..120: note = Artificially Synthesized Probe
  source 1..120: mol_type = other DNA
ctcggtatgttatactgactgaaaaggtcttaggttctgtcaggcccacagtgaggtgtggaagaataaaccaagggctgtcataaagtcatcgcttatccatgagcgatgagatgacta

SEQ ID NO: 3928 - DNA, 120 bp, synthetic construct
  misc_feature 1..120: note = Artificially Synthesized Probe
  source 1..120: mol_type = other DNA
ggagcctcgagtctggactctgtgtaacagtaagatgcctcctacactcggcaaatcatttttgaattttcacgtcgtagttgtgaacagactgaatttcttttcttagttcttaatgaa

SEQ ID NO: 3929 - DNA, 120 bp, synthetic construct
  misc_feature 1..120: note = Artificially Synthesized Probe
  source 1..120: mol_type = other DNA
ctgctattcgggggcaatattcccagggacctttaaagctgtggaattgtaccttgttttgtaactctgtaatatttttgccagctcagctgctgagttaaaggtctcttaatacttttg

SEQ ID NO: 3930 - DNA, 120 bp, synthetic construct
  misc_feature 1..120: note = Artificially Synthesized Probe
  source 1..120: mol_type = other DNA
atcaatcacatgaagcttcatttaatgaagtacattattagagtaaaaagatttccaatctcctgggccactattccccagctaaactcctaaggaagagggctttctgcaggaggtcac

SEQ ID NO: 3931 - DNA, 120 bp, synthetic construct
  misc_feature 1..120: note = Artificially Synthesized Probe
  source 1..120: mol_type = other DNA
ttggggagggtgtttgctggcaccaaggccaggcaataaactccaacttgatgtatactgtcaatcgcctagaaagttaataaagaggaaatcatgttataagaggaagtataaacagta

SEQ ID NO: 3932 - DNA, 120 bp, synthetic construct
  misc_feature 1..120: note = Artificially Synthesized Probe
  source 1..120: mol_type = other DNA
aatttgccgtttcagaactagtgattttctgctaagtgtatgtgccttatactgtcagcacagcacagtcacctccagtaaaagagattgtagctgtaaagataattcaaaggcagcaac

SEQ ID NO: 3933 - DNA, 120 bp, synthetic construct
  misc_feature 1..120: note = Artificially Synthesized Probe
  source 1..120: mol_type = other DNA
agagtccagttgcttcaataacatggaagaggaaacggagacacaatacatttaaggaaactgtgcaactttcaacccttcaaaaccacataaaaaatatggccgaccggaaaccatatg

SEQ ID NO: 3934 - DNA, 120 bp, synthetic construct
  misc_feature 1..120: note = Artificially Synthesized Probe
  source 1..120: mol_type = other DNA
atattttcttacatataacttaaatgttgtgctacttctaaggccaggacctacttggtaaaaagataagagttctgagttgcagcactgaacgtgtgtctgagcccttcattacacagc

SEQ ID NO: 3935 - DNA, 120 bp, synthetic construct
  misc_feature 1..120: note = Artificially Synthesized Probe
  source 1..120: mol_type = other DNA
aataaatatttcaattgctttaatgttaatgcgcaagttgtatttaggggcgtgacatcatctgccatttagatatggggaggaacctcagaactaacatcaggaccacctgccacacca

SEQ ID NO: 3936 - DNA, 120 bp, synthetic construct
  misc_feature 1..120: note = Artificially Synthesized Probe
  source 1..120: mol_type = other DNA
aaaaaaaaaagttcacattaaatttacactgaaagattcttcacccatcagattggtaaaaacaaaagtcaggtaacacggtgggtaaggagtggagaaagaagtgctgctgcttaccgc

SEQ ID NO: 3937 - DNA, 120 bp, synthetic construct
  misc_feature 1..120: note = Artificially Synthesized Probe
  source 1..120: mol_type = other DNA
cacagtcacaaaggagcattttcattgtgtccttcagaaccttttgaagatttcaccatgcagttccatttatttgaaaattaaatattaaagaaatggagccaggggggcctggccaca

SEQ ID NO: 3938 - DNA, 120 bp, synthetic construct
  misc_feature 1..120: note = Artificially Synthesized Probe
  source 1..120: mol_type = other DNA
agacttcagaagactgggagtgaggctctcagcctgagggcacaccacgggaacgcgggaacgtgggaacgcaggctttggtgacatgtgttagaaaagcatttaataactggttaatct

SEQ ID NO: 3939 - DNA, 120 bp, synthetic construct
  misc_feature 1..120: note = Artificially Synthesized Probe
  source 1..120: mol_type = other DNA
gctgcatcccagccctggaaaatgtctagcaatgaatagctgctgactgaatttgcgaacaaataagttaaaatctaagatcacggattacattcctgaaaactaacaattcctcaacgg

SEQ ID NO: 3940 - DNA, 120 bp, synthetic construct
  misc_feature 1..120: note = Artificially Synthesized Probe
  source 1..120: mol_type = other DNA
aaaagatcaccccttgtatctgtgagcttatttggatgcaggggctgttcagacacagatgcccctggacttacaacttgataaacccattgtaaaggcggaaattgaagttgagccacc

SEQ ID NO: 3941 - DNA, 120 bp, synthetic construct
  misc_feature 1..120: note = Artificially Synthesized Probe
  source 1..120: mol_type = other DNA
ttccaggaggctgaatatgttcatattagccacgttaaccttcattaatttaaccttccactgtacatttattcatatttgatagattcccttgctagtcggagaaaacgcacggccccg

SEQ ID NO: 3942 - DNA, 120 bp, synthetic construct
  misc_feature 1..120: note = Artificially Synthesized Probe
  source 1..120: mol_type = other DNA
caaggcaaacatcacagtcaaaaggcaaagtccctgtttctgctccaatcctatgccccacaaataaccacatacagattttttaatgtcaaagtttagactcctagatatgcagttaag

SEQ ID NO: 3943 - DNA, 120 bp, synthetic construct
  misc_feature 1..120: note = Artificially Synthesized Probe
  source 1..120: mol_type = other DNA
ccactaacagaacaggagtattattttctcatctactagaaaagcacctcacactggctgtattgtgttgtggttatatatttaatgacctattctgcacagcaaccctgtggagatggg

SEQ ID NO: 3944 - DNA, 120 bp, synthetic construct
  misc_feature 1..120: note = Artificially Synthesized Probe
  source 1..120: mol_type = other DNA
ttataacaatgcaaacacaccaacaaaaaggaaagaagcaggccagaccttgcaatgtggcctcacgaggaatgtacactatggcttccattgaaccatttgcaccactgacttgtcata

SEQ ID NO: 3945 - DNA, 120 bp, synthetic construct
  misc_feature 1..120: note = Artificially Synthesized Probe
  source 1..120: mol_type = other DNA
tcctctctgggccactctttttcacagcagcagaatgaactaataaattcacagtactggtaaaaatgccctttaaaggacaggagcagttaagcttgtgaactcatttcagcagaaata

SEQ ID NO: 3946 - DNA, 120 bp, synthetic construct
  misc_feature 1..120: note = Artificially Synthesized Probe
  source 1..120: mol_type = other DNA
ctcctttgccaaaaccaacttctcatcatctaattcaccacaaaacagaacacactgtaaaacgcacgtggttgggtgaaattaaacaggaaacttggtttgctattcgatgctacctaa

SEQ ID NO: 3947 - DNA, 120 bp, synthetic construct
  misc_feature 1..120: note = Artificially Synthesized Probe
  source 1..120: mol_type = other DNA
agtgacagttttaaagagaaaaaaatactttaaatgcctaggtgaaaatacagttcacgtagcaagactgagcagacttcactagagaacgtgatttcctgccaccacttggctgacaca

SEQ ID NO: 3948 - DNA, 120 bp, synthetic construct
  misc_feature 1..120: note = Artificially Synthesized Probe
  source 1..120: mol_type = other DNA
aatgcatctgcaattttatttgcattctactgcagataatcgttatcctttttaaattaagtggactgaaagccaagcaaccaaccagctgcaactcagcacctggaagttcagtctctg

SEQ ID NO: 3949 - DNA, 120 bp, synthetic construct
  misc_feature 1..120: note = Artificially Synthesized Probe
  source 1..120: mol_type = other DNA
cgaacccatccaaacaggcataatccgtcctctacagacccttctctgcaacaaaacaggggaatgtagcagccgaacacttgtctttcttctttaaaaaacataaggagtaaataaaat

SEQ ID NO: 3950 - DNA, 120 bp, synthetic construct
  misc_feature 1..120: note = Artificially Synthesized Probe
  source 1..120: mol_type = other DNA
tacagattattctttcttacagcatcagcactgaacggtttaaatatgcatcatatgcatgataacgacataaaaagacagtcttaatgagactgagtgatggaggggcagggagaaccg

SEQ ID NO: 3951 - DNA, 120 bp, synthetic construct
  misc_feature 1..120: note = Artificially Synthesized Probe
  source 1..120: mol_type = other DNA
ccaaggacacggtattacgattccatgcgcctctagacagttccacttattaaggaattaccgtgaaactgcagagagcgataaatgttttttaatgaatgaatctaggctgttcaaaag

SEQ ID NO: 3952 - DNA, 120 bp, synthetic construct
  misc_feature 1..120: note = Artificially Synthesized Probe
  source 1..120: mol_type = other DNA
actagcagtcaagtatttcttgaatatttccttattacctgcttagggcttacttcacttcatcctcatgaaaatttatgacttaagcaccgttttacagccggggaaacagggtcagca

SEQ ID NO: 3953 - DNA, 120 bp, synthetic construct
  misc_feature 1..120: note = Artificially Synthesized Probe
  source 1..120: mol_type = other DNA
caatgcatatccctcgatttcacacacgccacttttgctaaaaagaaaaatagaaataagttaacatgtgccaccgtcagatcgtcccctattgcaaaagagagatcattgtgagtagtg

SEQ ID NO: 3954 - DNA, 120 bp, synthetic construct
  misc_feature 1..120: note = Artificially Synthesized Probe
  source 1..120: mol_type = other DNA
cccaaggtctccctcgaactccactgctttccctaaactactcctgacagaattaagtaatttaagtccaaatctttttaagacgaaacctttggtgaaacagatcgtcattttcaacag

SEQ ID NO: 3955 - DNA, 120 bp, synthetic construct
  misc_feature 1..120: note = Artificially Synthesized Probe
  source 1..120: mol_type = other DNA
ttctggttcgccaagaaacggcgaatacaggaattcctgtattcatatgcccatcactcatgtgacaactcctagaattttctacctccaaaaggtaagaagcttcagcgtaagaaatta

SEQ ID NO: 3956 - DNA, 120 bp, synthetic construct
  misc_feature 1..120: note = Artificially Synthesized Probe
  source 1..120: mol_type = other DNA
acaaacagaaacatccagctaaccagatgtacgggacagtagcccacacacgaaccaacctttgacgttattctaagatactgaatgccaaaagtgcgggaagaaagataatgatctcca

SEQ ID NO: 3957 - DNA, 120 bp, synthetic construct
  misc_feature 1..120: note = Artificially Synthesized Probe
  source 1..120: mol_type = other DNA
aaggctaaagtgtggaggataatagacaggaggctttcacaataaatggccaaaagtaaacaacctaagttccttttgaaagtagtgaagtaaagagcgaacgtatcattccctccccaa

SEQ ID NO: 3958 - DNA, 120 bp, synthetic construct
  misc_feature 1..120: note = Artificially Synthesized Probe
  source 1..120: mol_type = other DNA
aaggaaaacacatcacgagcaccaatgcagagactctgactcaattgggagggtgggtggacacacaggcgttttctttacaactaaagatatgctcatgtgcacccagggatgaagctc

SEQ ID NO: 3959 - DNA, 120 bp, synthetic construct
  misc_feature 1..120: note = Artificially Synthesized Probe
  source 1..120: mol_type = other DNA
gaaataaacaacaagttccttttaaatgttactctgaaagtcggtctgtagaatttctccccatttatgtggtaccctttcaaacacgtcaactagatcgaatctctggtgtctccggac

SEQ ID NO: 3960 - DNA, 120 bp, synthetic construct
  misc_feature 1..120: note = Artificially Synthesized Probe
  source 1..120: mol_type = other DNA
cgggtcgcgttaagagcctgctgttatagctctctccaattccataagactatgattatacaatgcaattactgtagagaatagacagggcctgaaaaaacacttctactaacatgctaa

SEQ ID NO: 3961 - DNA, 120 bp, synthetic construct
  misc_feature 1..120: note = Artificially Synthesized Probe
  source 1..120: mol_type = other DNA
tttcgctaaaccctgccctggtagtgtccgcccgtgatttaatcccccaaatgataaaatcatacacataagaagatcccaaaaaataaggaagagactgaaaaccacaggagcagcagg

SEQ ID NO: 3962 - DNA, 120 bp, synthetic construct
  misc_feature 1..120: note = Artificially Synthesized Probe
  source 1..120: mol_type = other DNA
accatagccaacagattctttcagttaaaaataagaaaagttctctaagaccaataagctgctactttctaaaggcacacttctgaaaggatggcacccaaatggccaacaggtccatga

SEQ ID NO: 3963 - DNA, 120 bp, synthetic construct
  misc_feature 1..120: note = Artificially Synthesized Probe
  source 1..120: mol_type = other DNA
aaaggaactgaaattgatcaggaatccagattatcggcatccctacattcactggagtgttatccacaagggtcaagaagacaaatcaaccacagtgcccaaagacccacgaatggatgc

SEQ ID NO: 3964 - DNA, 120 bp, synthetic construct
  misc_feature 1..120: note = Artificially Synthesized Probe
  source 1..120: mol_type = other DNA
tataacttgtcagttaaaataatatttaaaaagtaaaatcaagtcacggtgtctttagacctgagaggctcggcctcaggggagggtctctgtacttcacctgtgaaatcacttgtggct

SEQ ID NO: 3965 - DNA, 120 bp, synthetic construct
  misc_feature 1..120: note = Artificially Synthesized Probe
  source 1..120: mol_type = other DNA
ctcaggaaaaccacctcccccctttatccaaatcattttcctctacaaaccagcctggactggaggacaccaggctatacactttaacatggataaatacaaattattaaagtgaagaaa

SEQ ID NO: 3966 - DNA, 120 bp, synthetic construct
  misc_feature 1..120: note = Artificially Synthesized Probe
  source 1..120: mol_type = other DNA
tgaaatgcaaccatgtaactggcacagactctgaagagatacccacgtggcagatggttttcttaaatattgagtcaacaaactttaatgctggagtagccacaaagacagctgaagttt

SEQ ID NO: 3967 - DNA, 120 bp, synthetic construct
  misc_feature 1..120: note = Artificially Synthesized Probe
  source 1..120: mol_type = other DNA
ataattacaatggcaagtttagtagcttattttcattatagaataaaacctgacaaatcataggtcaaccttggactggatgtcaaaacacctgaacaaaagcagcatccaccacccttc

SEQ ID NO: 3968 - DNA, 120 bp, synthetic construct
  misc_feature 1..120: note = Artificially Synthesized Probe
  source 1..120: mol_type = other DNA
ttttaataagcatcacacacccggccttgaattcatatagaagacaaacgtgaacagtcgtctatgatactgtcaccagagtacaactgcctttattttctgcatactaccttccatacc

SEQ ID NO: 3969 - DNA, 120 bp, synthetic construct
  misc_feature 1..120: note = Artificially Synthesized Probe
  source 1..120: mol_type = other DNA
gaagaacaattttccttcgatgatagagtgttaatagacaaccctatttctggattcccactaagccctgtgaactctgcttctattttaacacaggttacttgtacatgtggggtagca

SEQ ID NO: 3970 - DNA, 120 bp, synthetic construct
  misc_feature 1..120: note = Artificially Synthesized Probe
  source 1..120: mol_type = other DNA
ttatggacaagtttcgtacattttcatcagcacatgaatcctgtgattttacatgtgtggtagcattagcgttactattccttatggacaagtttcgtatgtgttcatcagcacatgaat

SEQ ID NO: 3971 - DNA, 120 bp, synthetic construct
  misc_feature 1..120: note = Artificially Synthesized Probe
  source 1..120: mol_type = other DNA
gcacatgaatcctgtgattttacacgtgtggtagcattagcattactcttccttatggacaagtttggtatgtgttcatcagcacatgaatcctgtgattttacacgtgtggtagcatta

SEQ ID NO: 3972 - DNA, 120 bp, synthetic construct
  misc_feature 1..120: note = Artificially Synthesized Probe
  source 1..120: mol_type = other DNA
ttacatgtgtggtagcattagcattactcttccttatggacaagtttggtatgtgttcatcagcacatgaatcctgtgattttacatgtgtggtagcattagcattactcttccttatgg

SEQ ID NO: 3973 - DNA, 120 bp, synthetic construct
  misc_feature 1..120: note = Artificially Synthesized Probe
  source 1..120: mol_type = other DNA
aaatgtcctaactggaagtaatttcatcacgaacagttttagacaaacatcctaatcatctgtgtatctaagtaagcaggctgacataaaagcatccagatggtcattgagaggggagca

SEQ ID NO: 3974 - DNA, 120 bp, synthetic construct
  misc_feature 1..120: note = Artificially Synthesized Probe
  source 1..120: mol_type = other DNA
ctgcctcctctcccagctcctgttgcctctgctcaaaggaagttcttctttatcaggggtttaaaattctcactgatttatcactagagttaatgctgaaaatttcatattatagaccac

SEQ ID NO: 3975 - DNA, 120 bp, synthetic construct
  misc_feature 1..120: note = Artificially Synthesized Probe
  source 1..120: mol_type = other DNA
agcctctttacatatttcatcaaaccgtgctcccgtatctctactgacatcttagaggaacacaggagtttattttgtgattattatcatatggaaacttcaagtatctggaggccatac

SEQ ID NO: 3976 - DNA, 120 bp, synthetic construct
  misc_feature 1..120: note = Artificially Synthesized Probe
  source 1..120: mol_type = other DNA
ttactaggcatagtatctgcaaggttcatccatgtgttatgtgtcagaacttcctcccttctaatgggaaatccacatctagtccgtggatttggggttgcttccaccatttggttgtgt

SEQ ID NO: 3977 - DNA, 120 bp, synthetic construct
  misc_feature 1..120: note = Artificially Synthesized Probe
  source 1..120: mol_type = other DNA
gtaaattttacgatcaggaaatatgacacctacaatttacttttaaaagaggccaaacgtgttcaataaaaaatgggaaagaatcccaggccacggtctcctggagctgctgcaatctgt

SEQ ID NO: 3978 - DNA, 120 bp, synthetic construct
  misc_feature 1..120: note = Artificially Synthesized Probe
  source 1..120: mol_type = other DNA
atgagtgaaagtagaaaagcatcagggattctaaagacaaaacttcaggagagagaatgaaaataaaaaagctaaaaccaagtgttggcctgtcttctgatctgtctgtgatgtgggggt

SEQ ID NO: 3979 - DNA, 120 bp, synthetic construct
  misc_feature 1..120: note = Artificially Synthesized Probe
  source 1..120: mol_type = other DNA
caccataggcagtcttcaagacgggcagctttacagtcatctggaattctattaggggattttattttcctggaaaagatcactggctcattagatataattcagggagtattttttccc

SEQ ID NO: 3980 - DNA, 120 bp, synthetic construct
  misc_feature 1..120: note = Artificially Synthesized Probe
  source 1..120: mol_type = other DNA
atgccacgggtagtctaaagtggaaaacagaatgatgttttacaagtttattcagttgtggctttcattagccacctacactttctgttactgatcccaagtttatccgctgggaattct

SEQ ID NO: 3981 - DNA, 120 bp, synthetic construct
  misc_feature 1..120: note = Artificially Synthesized Probe
  source 1..120: mol_type = other DNA
gcgactccaagtacacaattagctccagggctgaatttggccggagatgagggtcacatagaaaagtctttcatgcttttgactcaataaaacctatttctgagagcataattaaaaaaa

SEQ ID NO: 3982 - DNA, 120 bp, synthetic construct
  misc_feature 1..120: note = Artificially Synthesized Probe
  source 1..120: mol_type = other DNA
ctaccgttaaccatgtgcaaaaagcttacagactgtattaattgtactgaagacttaagggaaaggcggtttctctggccttctgaaaaagtcccttggaaaccgattttgatttttctg

SEQ ID NO: 3983 - DNA, 120 bp, synthetic construct
  misc_feature 1..120: note = Artificially Synthesized Probe
  source 1..120: mol_type = other DNA
ctgtacatttattagctgacagaaaagcatgcttttctagaattggggtctatacactagcatcacggatgctggtaaaaaattagttcttgtaatttccaaggcagcatgtgggtagag

SEQ ID NO: 3984 - DNA, 120 bp, synthetic construct
  misc_feature 1..120: note = Artificially Synthesized Probe
  source 1..120: mol_type = other DNA
ttcacacgccagttttgctgccagcgaaggatttccccagtttacttgtttttctacatgtttatactttacttgtatttctatactcttacagagttcttagagagagacctgacctgg

SEQ ID NO: 3985 - DNA, 120 bp, synthetic construct
  misc_feature 1..120: note = Artificially Synthesized Probe
  source 1..120: mol_type = other DNA
gtttgatcaatgaaagagtcaaggttttcaaattttaagataaataaatcaaatgaacaagacagaggaccaagacgctgatgccacaactagatcaaaagcgtcctcctcaggcacacg

SEQ ID NO: 3986 - DNA, 120 bp, synthetic construct
  misc_feature 1..120: note = Artificially Synthesized Probe
  source 1..120: mol_type = other DNA
gagacagcacaacacaccacgcaggatttacctggggaacaaaggcaaaggtacagacttgaaagacgacaaagttactaaaatgacaagaataacaaaaatggccaatttagtaaagac

SEQ ID NO: 3987 - DNA, 120 bp, synthetic construct
  misc_feature 1..120: note = Artificially Synthesized Probe
  source 1..120: mol_type = other DNA
caagtcaccgatatctctgtccaacgtggataaaaagaccctctttcctccaaagtctaaagcaacatatcagcccatctgacagtaattctgttgtacatttaacttcatcttgctctt

SEQ ID NO: 3988 - DNA, 120 bp, synthetic construct
  misc_feature 1..120: note = Artificially Synthesized Probe
  source 1..120: mol_type = other DNA
atgggaacagtaatggccatgaccgtgtagggtagttgggtggattatgtgagttaacacgtatacagttcataggatcttcttcataaaagggggagacatcaagaactattattttat

SEQ ID NO: 3989 - DNA, 120 bp, synthetic construct
  misc_feature 1..120: note = Artificially Synthesized Probe
  source 1..120: mol_type = other DNA
atggacagcgggtagagcagtggaaaaagaaaactagaatgggatttcctatcttatgccaaattggcttgactcttaagatacatgtgagatgtccctacttaattgccggcataatta

SEQ ID NO: 3990 - DNA, 120 bp, synthetic construct
  misc_feature 1..120: note = Artificially Synthesized Probe
  source 1..120: mol_type = other DNA
ttcacttgttcaaaaatatgtgttttccttggtaagattctgcccatttccttaaaattgaataaaatccgaggatacaaatgcttcccccaagtggcagagatggtgtttggcctcccc

SEQ ID NO: 3991 - DNA, 120 bp, synthetic construct
  misc_feature 1..120: note = Artificially Synthesized Probe
  source 1..120: mol_type = other DNA
aataattctcactttactccttttccacagcatgttcaaacgtcatagggcagtgatcctaactttgtgctttttctcatacagagtatctccctgtcatagaacctacacaaagcagtg

SEQ ID NO: 3992 - DNA, 120 bp, synthetic construct
  misc_feature 1..120: note = Artificially Synthesized Probe
  source 1..120: mol_type = other DNA
accttatataaacatgctataagatgtttgacactgtcatctcagacaaatacacactgacccatttcctctacacagcagtttgggaagaaaccaagtgtttgcttgtgtcacccacaa

SEQ ID NO: 3993 - DNA, 120 bp, synthetic construct
  misc_feature 1..120: note = Artificially Synthesized Probe
  source 1..120: mol_type = other DNA
cagctcaggtgagcagctccagccatcgggtgagaggagaagtcacggcaaataatcttaagacacgggtttgttttttaaaagataataattgcaaacaatatacacacttattatcac

SEQ ID NO: 3994 - DNA, 120 bp, synthetic construct
  misc_feature 1..120: note = Artificially Synthesized Probe
  source 1..120: mol_type = other DNA
tggtgactaatatgacacggatgatacagcatgaccagcggtgactagaagtaaataccagagcgacaggaattcaggttaacattcaaaagtgaattaatgtcatacaccatatagaat

SEQ ID NO: 3995 - DNA, 120 bp, synthetic construct
  misc_feature 1..120: note = Artificially Synthesized Probe
  source 1..120: mol_type = other DNA
aatggagatagattcatgattgtgaattggaaaactcagtattatcaagagagcaattcttcccaaactgttccattaattcaaggcactgcctaataaaatcccagaaggctttgtgtg

SEQ ID NO: 3996 - DNA, 120 bp, synthetic construct
  misc_feature 1..120: note = Artificially Synthesized Probe
  source 1..120: mol_type = other DNA
ccagtctccaattcttccttttctcttgtaaggacgttcttgattacagtgggtccacctgcttaaaccaggatagtggtcccatatcaagatctctatattaatcatagctgcaaaatc

SEQ ID NO: 3997 - DNA, 120 bp, synthetic construct
  misc_feature 1..120: note = Artificially Synthesized Probe
  source 1..120: mol_type = other DNA
gtgtagttctgctgataacatattctctcagctttcatgtgtgtgaatgtgtcgtttcatccgtgtttataaaggagattttcaccggatatgagttgacagccctttcttctcctttta

SEQ ID NO: 3998 - DNA, 120 bp, synthetic construct
  misc_feature 1..120: note = Artificially Synthesized Probe
  source 1..120: mol_type = other DNA
cccggaccctggctgcctcacccccggaccctggctgcctcccccccggaccctggctgcctcccccccggaccctggctgcctccccccccggaccctggctgcctccccccggaccct

SEQ ID NO: 3999 - DNA, 120 bp, synthetic construct
  misc_feature 1..120: note = Artificially Synthesized Probe
  source 1..120: mol_type = other DNA
tatatcttcttagatgagccatctgttagtctttgacccattttttacttattcattttttaaagacaggatctcaaaatgttgccgagtctggagcacaattccaaggcgcaatcccac

SEQ ID NO: 4000 - DNA, 120 bp, synthetic construct
  misc_feature 1..120: note = Artificially Synthesized Probe
  source 1..120: mol_type = other DNA
gaagtggctgttctgagtctttcatctctccaaataaacttttgaatcagtgtgttgatattgaaaaaaaaactcgttcggatgttggttgggactgcattggaaggaaaacatcttgac

SEQ ID NO: 4001 - DNA, 120 bp, synthetic construct
  misc_feature 1..120: note = Artificially Synthesized Probe
  source 1..120: mol_type = other DNA
tgaacccaactgggcctggcacttcctgttttgaaaggttatcaactactgattcaatttaacagatacaggcctatacagattgtttcctcctgttcaaattttggcagattctgtctt

SEQ ID NO: 4002 - DNA, 120 bp, synthetic construct
  misc_feature 1..120: note = Artificially Synthesized Probe
  source 1..120: mol_type = other DNA
tgttttatcttcttggagaaaataatcatctctggtaacttcccttgatgtaaagcctgctctgtcaaattaacatcaccacttccattttttaaaattagtgttggctgggcagtggct

SEQ ID NO: 4003 - DNA, 120 bp, synthetic construct
  misc_feature 1..120: note = Artificially Synthesized Probe
  source 1..120: mol_type = other DNA
tagggtgacaggtgtgagcccctgtacacagactctgctcttcctttctttatgcacagctgagttactgacctctactattttctctaaagaactatgaacactttttgcaaggcaggt

SEQ ID NO: 4004 - DNA, 120 bp, synthetic construct
  misc_feature 1..120: note = Artificially Synthesized Probe
  source 1..120: mol_type = other DNA
ctgcatatttgaaaatgattcctattctccgtcccctgtagtaagtatgaggggattcttccctgatatttacttcgagaacctggttgagcttctgatggtacaactcacaaaatcatg

SEQ ID NO: 4005 - DNA, 120 bp, synthetic construct
  misc_feature 1..120: note = Artificially Synthesized Probe
  source 1..120: mol_type = other DNA
gacagagatcatcttgcatgtgtgtccacattttactgcctttttcttgaccacagattctacctccggtttctctgtgtatgcagtgattgtttgcttaatattgcacattgtgggtaa

SEQ ID NO: 4006 - DNA, 120 bp, synthetic construct
  misc_feature 1..120: note = Artificially Synthesized Probe
  source 1..120: mol_type = other DNA
acttaaaacagccatctcattcgttttgtgcagttttacagttgtttatggcagaggtgtgatttgggtccctgttatctcatcatggctagaagcagaagttttggcaaattattcttg

SEQ ID NO: 4007 - DNA, 120 bp, synthetic construct
  misc_feature 1..120: note = Artificially Synthesized Probe
  source 1..120: mol_type = other DNA
acaatgaggttattcatcacacatgacccagtaacatctctcagtggttggattcaatatgagaaataagcaagcaaataaccacactgcttcttccatttcaaactcatcgtttctctt

SEQ ID NO: 4008 - DNA, 120 bp, synthetic construct
  misc_feature 1..120: note = Artificially Synthesized Probe
  source 1..120: mol_type = other DNA
gcgttcactcccttgcccactggcatttgctagcacggcgttcactctcttgcccgctggcactgtgttctttagacgaagatcacgcatgtgtaaatgaaaaacaacaacaacatagga

SEQ ID NO: 4009 - DNA, 120 bp, synthetic construct
  misc_feature 1..120: note = Artificially Synthesized Probe
  source 1..120: mol_type = other DNA
cagaccttatggcctgcaggaactaaaatactatctggcaacttgcaggcaaagtttatgacccgtgatttgggtaactgcctaaattgtccaatttgcttgttctaaaacaatacaaca

SEQ ID NO: 4010 - DNA, 120 bp, synthetic construct
  misc_feature 1..120: note = Artificially Synthesized Probe
  source 1..120: mol_type = other DNA
ctgtccctgcagcacagttcatccaccttctgaaactcaccaacagatgggtgggcgaggaaagaaaatcagtgtttacaattccagtaaagacattaaaattcattcacagacttttaa

SEQ ID NO: 4011 - DNA, 120 bp, synthetic construct
  misc_feature 1..120: note = Artificially Synthesized Probe
  source 1..120: mol_type = other DNA
aatatgtgactgacttgggctcatggccaaaaactgaagggctcatcagtgaggtgacacagtccactcacttcccacaaatcactttttgttttgcatattctccattttaaacttttt

SEQ ID NO: 4012 - DNA, 120 bp, synthetic construct
  misc_feature 1..120: note = Artificially Synthesized Probe
  source 1..120: mol_type = other DNA
catcactcatttacttctgtcaatatgaactcatggagtctggcttggtgggtcataattcataattataatggtttgttttggtgctcaattggttccagatttgacaccggattcccc

SEQ ID NO: 4013 - DNA, 120 bp, synthetic construct
  misc_feature 1..120: note = Artificially Synthesized Probe
  source 1..120: mol_type = other DNA
ctttgataagtggaaatctacctattaccctgatcaaatcttttgcctcaaagttcccacacatcccctcccggtcaatcctggccctcgtgagacagccactgttcattcatgaggcgt

SEQ ID NO: 4014 - DNA, 120 bp, synthetic construct
  misc_feature 1..120: note = Artificially Synthesized Probe
  source 1..120: mol_type = other DNA
agagtctatcttgcactgggcatctgtatacaactgttgtgaagagtctcatggcccatggggcatctgtatacaactgttgtgaagagtctatcttgcactggacatctgtatacatct

SEQ ID NO: 4015 - DNA, 120 bp, synthetic construct
  misc_feature 1..120: note = Artificially Synthesized Probe
  source 1..120: mol_type = other DNA
gcaaaattcacaccatttctggttgcttctagatttcctaaaattttctaaataaggccctgtgtcttcggtaaatcaagtgtctcatgccttccaagtctgtgccttttagttctcctg

SEQ ID NO: 4016 - DNA, 120 bp, synthetic construct
  misc_feature 1..120: note = Artificially Synthesized Probe
  source 1..120: mol_type = other DNA
gggtttgatgtagtaataatttgtaaaaagcttcggcatctatatgtcaagaagagtgaaaagtgtgagatttttgtctcgcatgcaaactaacaagggagccagcaccagcccaacatg

SEQ ID NO: 4017 - DNA, 120 bp, synthetic construct
  misc_feature 1..120: note = Artificially Synthesized Probe
  source 1..120: mol_type = other DNA
tcaataatcaggatcacacacagtggggcagcaggacccactcatccctgtctatactcaggatcacacacagtgggtcagcaggacccactcaccccattgatattcaggatcacacac

SEQ ID NO: 4018 - DNA, 120 bp, synthetic construct
  misc_feature 1..120: note = Artificially Synthesized Probe
  source 1..120: mol_type = other DNA
tcagcggcatcctttaccacttaagggactttcaagctcatcttgtgtaacaaaagtcgacttctccacctccccatacaaaggcaagatgttatttaggcaaacaaaattaacgatcaa

SEQ ID NO: 4019 - DNA, 120 bp, synthetic construct
  misc_feature 1..120: note = Artificially Synthesized Probe
  source 1..120: mol_type = other DNA
ttccacagatttaacatgtttatgtataaattacaatggtcccgtgttgcatttgaatgacttttcttcttgtgatgtggacccgacacaagagaggtcccacgtagacatttggcactt

SEQ ID NO: 4020 - DNA, 120 bp, synthetic construct
  misc_feature 1..120: note = Artificially Synthesized Probe
  source 1..120: mol_type = other DNA
ctgaacagatcattcgattctaagtcaggttaacctaatctctgcagtgcagtcctacaaacagattttcaaaaagttaccaaaccaccacctcaaacctcaacactttgtctacttgga

SEQ ID NO: 4021 - DNA, 120 bp, synthetic construct
  misc_feature 1..120: note = Artificially Synthesized Probe
  source 1..120: mol_type = other DNA
atgtctacattctgctttaaccggaaatcagtggcacagtgacacttcaaaacatccataaacagcaccctgaagattccgtcagactctacatggaacaatgttaaggcaaataatgat

SEQ ID NO: 4022 - DNA, 120 bp, synthetic construct
  misc_feature 1..120: note = Artificially Synthesized Probe
  source 1..120: mol_type = other DNA
cagacatgtgtgcaaacatcacgagagtaacaagatttgctggtcatgctggacatacagtgtcaaagactccagcaaatgcctgaaatacaaatgcttaaaacgataggagaaaataat

SEQ ID NO: 4023 - DNA, 120 bp, synthetic construct
  misc_feature 1..120: note = Artificially Synthesized Probe
  source 1..120: mol_type = other DNA
aggcctttcactctaagaacccagaagcacccatctattaagagaagggcttattcaggatcagcttcatgcagcattgaataaatcactattgctagtgaagagtttgttggtactact

SEQ ID NO: 4024 - DNA, 120 bp, synthetic construct
  misc_feature 1..120: note = Artificially Synthesized Probe
  source 1..120: mol_type = other DNA
tcttttgaagtcataaatcacaatccatttcctagagctcctgccatttgcaccaagctcacagcattacacagtgagcacacacacagcctggggctgctgtccaatggcaaagacaac

SEQ ID NO: 4025 - DNA, 120 bp, synthetic construct
  misc_feature 1..120: note = Artificially Synthesized Probe
  source 1..120: mol_type = other DNA
taaatgagtgactgaatcaaagcactcacagcggagctgcctcctggtgattaaaacactctgcaagtgcaagagcttaagatgctcctcctggttagtgtgacccaagtctggaaagag

SEQ ID NO: 4026 - DNA, 120 bp, synthetic construct
  misc_feature 1..120: note = Artificially Synthesized Probe
  source 1..120: mol_type = other DNA
taccatttccacagcatctcacaaattttgattcatcatttttcacctgaaatacaacagccccctaacctgtttctgccttcagtcaggaacccaatccaatgaaaccaatctatccta

SEQ ID NO: 4027 - DNA, 120 bp, synthetic construct
  misc_feature 1..120: note = Artificially Synthesized Probe
  source 1..120: mol_type = other DNA
gagaaaattgagttgttcagagagaacacaggtcacaggacaggaacctcatcaaaatcagtaaatccagactgactcaggaaagataaaccttctcagtctagaaaattaaacttcggc

SEQ ID NO: 4028 - DNA, 120 bp, synthetic construct
  misc_feature 1..120: note = Artificially Synthesized Probe
  source 1..120: mol_type = other DNA
ggctaatattttgatatttgtggcattagaaagtaaatcaaaactttttaaaaaacaagatgtcacagtcacagaatccactggctctcagaaccctcccccacccccaaacagacagcc

SEQ ID NO: 4029 - DNA, 120 bp, synthetic construct
  misc_feature 1..120: note = Artificially Synthesized Probe
  source 1..120: mol_type = other DNA
tcttgggtggaatgggcacaacacaagtctccaggttttcttttccagagttgttggttggggaaaaaaaggtgataactaaagctagaatctaagctctaactgagagtttatcaagta

SEQ ID NO: 4030 - DNA, 120 bp, synthetic construct
  misc_feature 1..120: note = Artificially Synthesized Probe
  source 1..120: mol_type = other DNA
aaactggatagagtcaagacccgttggtgtgctgtattcaggagacctatctcatgtgcaaagacacacataggctcaaaataaaggatggaggaatatttacaaagcaaaaaaagcatg

SEQ ID NO: 4031 - DNA, 120 bp, synthetic construct
  misc_feature 1..120: note = Artificially Synthesized Probe
  source 1..120: mol_type = other DNA
aaaagatcaacaaaatagatagaccactagccagacaaagaagaaaagagagaagaatcaaatagacacaataagaaatgataaaggggatatcaccactgatcccacagaaatacaaac

SEQ ID NO: 4032 - DNA, 120 bp, synthetic construct
  misc_feature 1..120: note = Artificially Synthesized Probe
  source 1..120: mol_type = other DNA
atcatctcagcccaaaatctccttaagctgataagcaacttcagcaaagtctcaggatacaaaatcaatgtgcaaaaatcacaagcattcttataccccaataatagaccaacagggggc

SEQ ID NO: 4033 - DNA, 120 bp, synthetic construct
  misc_feature 1..120: note = Artificially Synthesized Probe
  source 1..120: mol_type = other DNA
acaaagggctaatatccagcatctacaaagaacttaaacaaatttacaagaaaaaacaaccccatcaagaagtggacaaaggttatgaacagacacttctcaaaagaagacatttatgtg

SEQ ID NO: 4034 - DNA, 120 bp, synthetic construct
  misc_feature 1..120: note = Artificially Synthesized Probe
  source 1..120: mol_type = other DNA
aatgtaatccagcatataaacagagccaaagacaaaaaccacatgattatctcaatagatgcagaaaaagcctttgacaaaattcaacaacccttcatgctaaaaactctcaataaatta

SEQ ID NO: 4035 - DNA, 120 bp, synthetic construct
  misc_feature 1..120: note = Artificially Synthesized Probe
  source 1..120: mol_type = other DNA
ctatctgatctttgacaaacctgagaaaaacaagcaatggggaaaggattccctatttaataaatggtgctgggaaaactggctagccatatgtagaaagctgaaactggatcccttcct

SEQ ID NO: 4036 - DNA, 120 bp, synthetic construct
  misc_feature 1..120: note = Artificially Synthesized Probe
  source 1..120: mol_type = other DNA
aattggacaccatcattctcagtaaactatcgcaaaaacgaaaaaccaaacaccacatattctcactcataggtgggaattgaacaatgagatcacatggacacaggaaggggaatatca

SEQ ID NO: 4037 - DNA, 120 bp, synthetic construct
  misc_feature 1..120: note = Artificially Synthesized Probe
  source 1..120: mol_type = other DNA
attatagtatatctaaatttagagaactcacaactagattcctgtaacagcaagaaacagcaaagaataaggaaacccagtaatgaccccatgcccctcctgctttcctgaagggtggct

SEQ ID NO: 4038 - DNA, 120 bp, synthetic construct
  misc_feature 1..120: note = Artificially Synthesized Probe
  source 1..120: mol_type = other DNA
cataactaggacatcaaggtcaccctgatttcctctcatgttcctccatattaacccaaccttcaggtcctattgctattatcttttgagcatttctcaaatctcactggtactgatttt

SEQ ID NO: 4039 - DNA, 120 bp, synthetic construct
  misc_feature 1..120: note = Artificially Synthesized Probe
  source 1..120: mol_type = other DNA
tggcgaatatgtagacagatgcagagaggttgataaatggatggatgattgacaggtaggtaaataacgaatacacagacatgcagatagacagagtatcatgtggttataatggcgatg

SEQ ID NO: 4040 - DNA, 120 bp, synthetic construct
  misc_feature 1..120: note = Artificially Synthesized Probe
  source 1..120: mol_type = other DNA
tcacttttttcttctgacacagaagacaacagtcacgacttcacctgcttatcatgaaagctccatgtgagaacaatgtgaggatgccagtgaagggcatttgcaaaacaaagggattca

SEQ ID NO: 4041 - DNA, 120 bp, synthetic construct
  misc_feature 1..120: note = Artificially Synthesized Probe
  source 1..120: mol_type = other DNA
agaaaaatttggcacgagattataatctttttaattaatatgcaattctgaatagtagccaacatgggcttgtaaaccacgtgaagagctatttaccggacactggcgtctcccgagagg

SEQ ID NO: 4042 - DNA, 120 bp, synthetic construct
  misc_feature 1..120: note = Artificially Synthesized Probe
  source 1..120: mol_type = other DNA
gtattggtcaaaacattgatgtgaatccacctgtcacatattgattacattcaggcaataacagggtggcaaggaacacaactagacaaaactaagcccccaaaggaaggacatcatcat

SEQ ID NO: 4043 - DNA, 120 bp, synthetic construct
  misc_feature 1..120: note = Artificially Synthesized Probe
  source 1..120: mol_type = other DNA
cttacgccactgtggtcatcaacatcagcgtccgcagtgtgctacaaataccgttctatcttacgcttttcaatgattctggagttaatattttatctattttccactatcttggcttac

SEQ ID NO: 4044 - DNA, 120 bp, synthetic construct
  misc_feature 1..120: note = Artificially Synthesized Probe
  source 1..120: mol_type = other DNA
atcttggctttctccattttgctaaatgatgaaccacaaatttctctaacttctcttgtgctgtggacttatatagtcactgacagcacagttgggagaaacagataaaggcacacttcc

SEQ ID NO: 4045 - DNA, 120 bp, synthetic construct
  misc_feature 1..120: note = Artificially Synthesized Probe
  source 1..120: mol_type = other DNA
acagaagcagcagtagctaacactgcagccctggcctaagcatttgatgcgtcactcattcctcagcacaaaaagcaccaagccaggactattacttctgctgttttcttgacaaggaaa

SEQ ID NO: 4046 - DNA, 120 bp, synthetic construct
  misc_feature 1..120: note = Artificially Synthesized Probe
  source 1..120: mol_type = other DNA
aaaaggtcaaagaaacaggcttagcaaagtcagcaaagaatagacaaatggatggaaacacacacaggaagaatggaggaacgaatggagaaaagaatggatggataggaggtagagaag

SEQ ID NO: 4047 - DNA, 120 bp, synthetic construct
  misc_feature 1..120: note = Artificially Synthesized Probe
  source 1..120: mol_type = other DNA
catctttttctcactcatctcatgtccgggcatgccgggggtgcagatgcacccaaattcccatcttattctcactcatccagtgtccaggcatgctgggggtgtagacacatccaaatt

SEQ ID NO: 4048 - DNA, 120 bp, synthetic construct
  misc_feature 1..120: note = Artificially Synthesized Probe
  source 1..120: mol_type = other DNA
cggggatttttctgtattttcaggtctgtcccagagcagtttctaaatccagtcccattctctccaggtctcaattacatgctcttgttcacatcgtaaaactttctaaaataagtgcaa

SEQ ID NO: 4049 - DNA, 120 bp, synthetic construct
  misc_feature 1..120: note = Artificially Synthesized Probe
  source 1..120: mol_type = other DNA
ctccttggatgagatgccaatctcaccatcaggaccgggccttcacgtttctgcactttgcttacacctcggatttttcacaaaacccacgtgagcagttccaaagtgggtgctaccctc

SEQ ID NO: 4050 - DNA, 120 bp, synthetic construct
  misc_feature 1..120: note = Artificially Synthesized Probe
  source 1..120: mol_type = other DNA
tcttctaaagacgacagaacaaaatggcatttacgtacttaagaaactttctcattccgtatgtaaccaaagtgcaaaattcacaaatgccaactgcagggacctcctccctcacaactg

SEQ ID NO: 4051 - DNA, 120 bp, synthetic construct
  misc_feature 1..120: note = Artificially Synthesized Probe
  source 1..120: mol_type = other DNA
gctgtccggctattgaaggaaaagcaagctgggcttggagaggaataccagatcttcataaatcactcaataccaagaaacatttcacagacaaacacataagaagttgctgtgagaaag

SEQ ID NO: 4052 - DNA, 120 bp, synthetic construct
  misc_feature 1..120: note = Artificially Synthesized Probe
  source 1..120: mol_type = other DNA
ccaaacaacatcctagaaacacttttagaatagtttctggaggaataggaatgtaaatgttaggaaaaaagggtggaagttaatcagaacacaaaccccttacaggcaagtgcgcagcag

SEQ ID NO: 4053 - DNA, 120 bp, synthetic construct
  misc_feature 1..120: note = Artificially Synthesized Probe
  source 1..120: mol_type = other DNA
gtaaccctgaacacgaacctaaaacttccacctgcatatgattttcttcattctggtggaaaatgcactgaactccctttttgcatcatgaaattcctgtattcaaaatactgtccgcca

SEQ ID NO: 4054 - DNA, 120 bp, synthetic construct
  misc_feature 1..120: note = Artificially Synthesized Probe
  source 1..120: mol_type = other DNA
aagcctctgctaagcaaggtccacagaaacatgttcactgttacatcactgtctcaaaaatcaaggcaagaaaaacacgaaatgaaaacaaaactaccaatagcagaatctccacaccgt

SEQ ID NO: 4055 - DNA, 120 bp, synthetic construct
  misc_feature 1..120: note = Artificially Synthesized Probe
  source 1..120: mol_type = other DNA
gtaaccaacccaataccgatctctacttatagagaaaacacctattaggcacacttatagaaaaatcctctgtgccttgtatattcacacagcacgtgtgatcactcaaaggaactgaat

SEQ ID NO: 4056 - DNA, 120 bp, synthetic construct
  misc_feature 1..120: note = Artificially Synthesized Probe
  source 1..120: mol_type = other DNA
cacacagaggcccttcccattcacaagctccagcacacacagaatactcattcgctgttcatttttttggatctgttgtattgttttctaagactgatcaaaccataattccaagaagag

SEQ ID NO: 4057 - DNA, 120 bp, synthetic construct
  misc_feature 1..120: note = Artificially Synthesized Probe
  source 1..120: mol_type = other DNA
tgaaccacagaagcagccacatgtgcacgtgcttgatttaaatcgagcccccagtcaatcagcaaagaaaatttccagacaagactttaataaatcctaggttactatcatctctcaaaa

SEQ ID NO: 4058 - DNA, 120 bp, synthetic construct
  misc_feature 1..120: note = Artificially Synthesized Probe
  source 1..120: mol_type = other DNA
tttacatgagcaaaccttctagcagcacttttacatgccgtcctttattttgaagaaccaatgtttcccgtgcgaatacaatcaggtcataggtgacaggtagataatagatgatgcata

SEQ ID NO: 4059 - DNA, 120 bp, synthetic construct
  misc_feature 1..120: note = Artificially Synthesized Probe
  source 1..120: mol_type = other DNA
ctccatttcacattggttcaggctgaatgatcaattaattcctgcctctcttctctccctctcaccttgcgtccatcagggcatgtggtcatcagcatgcagctacgtaaactaaaggcg

SEQ ID NO: 4060 - DNA, 120 bp, synthetic construct
  misc_feature 1..120: note = Artificially Synthesized Probe
  source 1..120: mol_type = other DNA
tcaggagactatttaatgctggaattaatagtttatataacaaagcaatcgtttccatgttgggaattctacggctgtcaggagccctggtgctgctgctctgagcctattgctttataa

SEQ ID NO: 4061 - DNA, 120 bp, synthetic construct
  misc_feature 1..120: note = Artificially Synthesized Probe
  source 1..120: mol_type = other DNA
aaataaggtgccagggtaaacataaagcctgcactaggattcatacattcacctgagctttttgcttaataaaaaacattatttattgttatttagtgcctagcgccccgcactctgggc

SEQ ID NO: 4062 - DNA, 120 bp, synthetic construct
  misc_feature 1..120: note = Artificially Synthesized Probe
  source 1..120: mol_type = other DNA
gatttaaacatgccagtttcacacaaaaccgctgtcataacttgctaaaaactcttcaggcaagcataatttctccagtgtgtcctgggagttagaaatccctccttcacacaaaaagga

SEQ ID NO: 4063 - DNA, 120 bp, synthetic construct
  misc_feature 1..120: note = Artificially Synthesized Probe
  source 1..120: mol_type = other DNA
tcatcagaaagtgcttttggagaaacaagagaactgctaaggctatcaaagatggaatcactttgacagcagaaagaagtgggctaacctcagtaaacacaaaagcgcatgcagtccaga

SEQ ID NO: 4064 - DNA, 120 bp, synthetic construct
  misc_feature 1..120: note = Artificially Synthesized Probe
  source 1..120: mol_type = other DNA
tgaaactgggtaagagaatggatcttctgtattctcaccacacatacaaattaactacaaggtgaggaatgtgttattaatagcttgaaggggcaggaaaaaaacctgaaatccttcccc

SEQ ID NO: 4065 - DNA, 120 bp, synthetic construct
  misc_feature 1..120: note = Artificially Synthesized Probe
  source 1..120: mol_type = other DNA
tgccctcccatgtacttaaatctctacattactcttaataccccaaacaacgtgagtgctgagtacacagaaccaatgcatgccctcccgtgtacttaaaatctctacattactcttaat

SEQ ID NO: 4066 - DNA, 120 bp, synthetic construct
  misc_feature 1..120: note = Artificially Synthesized Probe
  source 1..120: mol_type = other DNA
agggaataatgaaaaagtctacccatgttcagaacaggttaggccattcttttctttctgaatattttcacttttagtttggctgcatccagggctatagaacccacgaatatggaaggc

SEQ ID NO: 4067 - DNA, 120 bp, synthetic construct
  misc_feature 1..120: note = Artificially Synthesized Probe
  source 1..120: mol_type = other DNA
agcctctgtcatgcgtttcataaacacagtacttgagttttcccaacctcttgctatccagctggcttccccggctgcagtgatgctgctgctgtttggcattggttgtctcttcacaaa

SEQ ID NO: 4068 - DNA, 120 bp, synthetic construct
  misc_feature 1..120: note = Artificially Synthesized Probe
  source 1..120: mol_type = other DNA
accaccagttttcatgcaaggcactgactatgaaaacttcagtcctattattttgttatcctttttcagactttgaaaatgggctgctcaatgagaacagtatggctgaaccccacgatg

SEQ ID NO: 4069 - DNA, 120 bp, synthetic construct
  misc_feature 1..120: note = Artificially Synthesized Probe
  source 1..120: mol_type = other DNA
ggaaagtgactgctccttagtaattaatcaaacaaatactgcagctttcacttggcccttgtttgggaacactgtacgtgcctaggttttacacgagaatttccaaatgccatagaaatt

SEQ ID NO: 4070 - DNA, 120 bp, synthetic construct
  misc_feature 1..120: note = Artificially Synthesized Probe
  source 1..120: mol_type = other DNA
aaaggcttgtagttaatttaagaggcctgaggttttcttttggagagcggagggggcaaatgacctaccagaagttatatgtaataagctcaagttattccagagaagtttgtacacaca

SEQ ID NO: 4071 - DNA, 120 bp, synthetic construct
  misc_feature 1..120: note = Artificially Synthesized Probe
  source 1..120: mol_type = other DNA
catagtttttacaacaccaatataccatgcaaccatctccctgataagcccaatcatttactggtcaatgcacagaatgtgaagatattatgaggcacacacaggaactaaacctacatg

SEQ ID NO: 4072 - DNA, 120 bp, synthetic construct
  misc_feature 1..120: note = Artificially Synthesized Probe
  source 1..120: mol_type = other DNA
ccgacctgcggacttatcatgattccaacataaatcctgccaggactttctgtagatgcagacaagctaaaagttacatgaaagggaaagaaacaggacaataaacgttccaatttaaaa

SEQ ID NO: 4073 - DNA, 120 bp, synthetic construct
  misc_feature 1..120: note = Artificially Synthesized Probe
  source 1..120: mol_type = other DNA
cttaaagtcaactgctttcaacttctgggttatagatacaactggtctaattctgtaacctgagaggatttcatggaaatactctctcttcatctcacgacacacacaggtggtaactgc

SEQ ID NO: 4074 - DNA, 120 bp, synthetic construct
  misc_feature 1..120: note = Artificially Synthesized Probe
  source 1..120: mol_type = other DNA
attccaattgctgatgttttaaggcaacagactaataaccggcacctcatcaacacagagtcactaacttcccagcagtgtctctagtccctctacaaggatatacagatatacacgcag

SEQ ID NO: 4075 - DNA, 120 bp, synthetic construct
  misc_feature 1..120: note = Artificially Synthesized Probe
  source 1..120: mol_type = other DNA
aaggctccattttctcctgcttgcaggacttctgcatgaagctaaggcatccaaatgtgcataagatttatgaagagcagacaagctgcatgacatcttctgagagggaagctgtgccat

SEQ ID NO: 4076 - DNA, 120 bp, synthetic construct
  misc_feature 1..120: note = Artificially Synthesized Probe
  source 1..120: mol_type = other DNA
tgtgtccaatcagagacgtatgaggttacagacctagtcaccagctgcacacaatcagaagctttcaaggttagggacctggtcacccgctgtgtccaaccagagctgtgcgaggttaca

SEQ ID NO: 4077 - DNA, 120 bp, synthetic construct
  misc_feature 1..120: note = Artificially Synthesized Probe
  source 1..120: mol_type = other DNA
gacaatctctgcatcatcctcagaaactgttcctgaccattcacctgaggccaccaagtttaaatgaggggcccaagttttaaaagacaggagaagacttttccacaatctttttctgaa

SEQ ID NO: 4078 - DNA, 120 bp, synthetic construct
  misc_feature 1..120: note = Artificially Synthesized Probe
  source 1..120: mol_type = other DNA
ccaagatatctagtggcatttcctggcaaggacactcacgatgcttgaccatacaactaggggtcgattggttttttagactgactgtaattccctggtggcacgcgtggatactgattc

SEQ ID NO: 4079 - DNA, 120 bp, synthetic construct
  misc_feature 1..120: note = Artificially Synthesized Probe
  source 1..120: mol_type = other DNA
ccccactttacactcattggttccattcacaaatctatgtggggcagttgttagccccagtttagagatgaggaaaatgctgcttggagaaactaaatgataaaaccagacttcaacaca

SEQ ID NO: 4080 - DNA, 120 bp, synthetic construct
  misc_feature 1..120: note = Artificially Synthesized Probe
  source 1..120: mol_type = other DNA
tcaggcggctcagccaatggggcaacagattcaacagagttccatgtcgttaaaggaaaacttctgttaccaggcaaccttaatatcagattcaacgtaaaataaccaacaagattgttt

SEQ ID NO: 4081 - DNA, 120 bp, synthetic construct
  misc_feature 1..120: note = Artificially Synthesized Probe
  source 1..120: mol_type = other DNA
caaaggcatgaacgggcctcctgctctttgtaaatgtcaaccttcctaagcaatgtcgtgttgacaatttttaactgcagtccacctatacttctttgtttctgtcttgtttttatccta

SEQ ID NO: 4082 - DNA, 120 bp, synthetic construct
  misc_feature 1..120: note = Artificially Synthesized Probe
  source 1..120: mol_type = other DNA
ctacaataacttagaagtcaaactttgcaaactgaatttgttggaccatgtaagccagatgatcagtttttaaaattgtttgtcgcgtgtttccctcaaggacggaagtctcccctttac

SEQ ID NO: 4083 - DNA, 120 bp, synthetic construct
  misc_feature 1..120: note = Artificially Synthesized Probe
  source 1..120: mol_type = other DNA
tccaaaaagcagaaaaaacagtgctgaaatgtgtacagtcttggcaatgtacaaattcagatgtaggatgctcagaaaccttgaatttccaatcagagaacaggaacatgagcaagttcc

SEQ ID NO: 4084 - DNA, 120 bp, synthetic construct
  misc_feature 1..120: note = Artificially Synthesized Probe
  source 1..120: mol_type = other DNA
gattgtggcctatatttttaacatatgcatagttatttacctagctgaagtacatccctctcctcctaggctcttccaagctgattttcaaacatagactggcttttggttcatgaaggc

SEQ ID NO: 4085 - DNA, 120 bp, synthetic construct
  misc_feature 1..120: note = Artificially Synthesized Probe
  source 1..120: mol_type = other DNA
cctgattttcacacaatagataaaattctattctcgtctctaaacactatggtaaacacctgccatcaacccacagaaactcctgggacccaataacactgaactagcaagattaacagg

SEQ ID NO: 4086 - DNA, 120 bp, synthetic construct
  misc_feature 1..120: note = Artificially Synthesized Probe
  source 1..120: mol_type = other DNA
cttctccttttcccttctccatttctccactggattcatcaaatcaaaccttgctgtccttggcaaatgtaccatgaatttacttactgcccagaacaaaagcacacttccagttaacat

SEQ ID NO: 4087 - DNA, 120 bp, synthetic construct
  misc_feature 1..120: note = Artificially Synthesized Probe
  source 1..120: mol_type = other DNA
taaacgtcaaatggaagcctaggatcctcttctgtgcagtttcaccacaaagtattttgacttgagccaaatcatgctattcctacacctccacaggaaactcaacgtttcatcaaggaa

SEQ ID NO: 4088 - DNA, 120 bp, synthetic construct
  misc_feature 1..120: note = Artificially Synthesized Probe
  source 1..120: mol_type = other DNA
aggtttaattaaaatccctgtctctcctcaccgccaccacagatcccacctccagcagttactaggattaaaggaaaaggaggatcattttagaccagcccctcgacgtcagtctgaagc

SEQ ID NO: 4089 - DNA, 120 bp, synthetic construct
  misc_feature 1..120: note = Artificially Synthesized Probe
  source 1..120: mol_type = other DNA
tttacttacattctggaaaacatctgaattaatgggtaacactaaaatgaacaggtcatgcaaggaagtttagaaggtcgtgtgaagtctcagcaggcccaaaggtttccgagaaccaag

SEQ ID NO: 4090 - DNA, 120 bp, synthetic construct
  misc_feature 1..120: note = Artificially Synthesized Probe
  source 1..120: mol_type = other DNA
ttacaggtaaatcaatatccatatgtgattttaagcagatcaagcatcagctcttaaaaacaaccagaaatgctgcaggcaaatcccaccaagcagcaaacaaaggaacagcacccaaca

SEQ ID NO: 4091 - DNA, 120 bp, synthetic construct
  misc_feature 1..120: note = Artificially Synthesized Probe
  source 1..120: mol_type = other DNA
ctgtcaacatctgtgtgcagatttccgcatggaagtaaacttcagctcctgagtaaatgtccaggactgtggttgctcctgtggtcggagtgcttagttccatgggaaaccgccttccac

SEQ ID NO: 4092 - DNA, 120 bp, synthetic construct
  misc_feature 1..120: note = Artificially Synthesized Probe
  source 1..120: mol_type = other DNA
tgtgaccaacacgttcatttctacctgacactaaggacgctggagtgaggatgcacggactctgtgtgacacatacactcatttctacctgaggagtgaggatgcagggactctacgtga

SEQ ID NO: 4093 - DNA, 120 bp, synthetic construct
  misc_feature 1..120: note = Artificially Synthesized Probe
  source 1..120: mol_type = other DNA
tcacagggtccctgctcagatgcaaaaagcaaggctaacagcaggaaaattatttaattaccttcatggtcatcaagtaaaatcagtcactcagacctatatgtgactggaagtatacac

SEQ ID NO: 4094 - DNA, 120 bp, synthetic construct
  misc_feature 1..120: note = Artificially Synthesized Probe
  source 1..120: mol_type = other DNA
tcaaaatttctaaagctcctaacgcctcaaaccgagatagaatttgacttcagcaatttccaagtcacaagcaggttgtatgtccacagctattcggaatgtggtttctgatagaagctt

SEQ ID NO: 4095 - DNA, 120 bp, synthetic construct
  misc_feature 1..120: note = Artificially Synthesized Probe
  source 1..120: mol_type = other DNA
tggtttccactctgaacgtccaagtggctgtgggcagggagatgctgcacagctgtttctatgctaaatacttgaaggtgtgaattttattacataaaatttagaaaaatgtgtgtttag

SEQ ID NO: 4096 - DNA, 120 bp, synthetic construct
  misc_feature 1..120: note = Artificially Synthesized Probe
  source 1..120: mol_type = other DNA
ttcttggcatgttgttctgctccacacacctcagcaaatattgctgattagctaaaatcacccagaaatgccttaaccttgacttcagccgctgcttttgtaatttttaatatttgtact

SEQ ID NO: 4097 - DNA, 120 bp, synthetic construct
  misc_feature 1..120: note = Artificially Synthesized Probe
  source 1..120: mol_type = other DNA
ccagaacgcagaccacttgctactcacattcatcttattaacaccaaaaagccatagtggtggatatcccggatgtggacacttagtggctttttgctggagatgcgctttgtgcactta

SEQ ID NO: 4098 - DNA, 120 bp, synthetic construct
  misc_feature 1..120: note = Artificially Synthesized Probe
  source 1..120: mol_type = other DNA
cggtcttcctctataccacacaccagtacagtgagcacttatggactgggtattcacgtaaaatactgcttaactaaaacttctgatttagaaaatgtttaattcctactcacagagctg

SEQ ID NO: 4099 - DNA, 120 bp, synthetic construct
  misc_feature 1..120: note = Artificially Synthesized Probe
  source 1..120: mol_type = other DNA
gaccaagggttttgttccttatttgctatgggcttgattcaaaacagctttctggactcctggggacaaacatctctaactgatgagaattctggctttattaatggaagaatcacctaa

SEQ ID NO: 4100 - DNA, 120 bp, synthetic construct
  misc_feature 1..120: note = Artificially Synthesized Probe
  source 1..120: mol_type = other DNA
ccccgagaccacatttcccaaagtagactgttactctgaaaataaaacctttttccttcctctgtacatctcatggtcatgttgttaacaactattgctacaaatgcaaagaatcgaggt

SEQ ID NO: 4101 - DNA, 120 bp, synthetic construct
  misc_feature 1..120: note = Artificially Synthesized Probe
  source 1..120: mol_type = other DNA
gttttaactagttataactctaactttgttttatagataaacagagaacacagggtaccaaccggctccaaaatacttcgcccagaaccaagtctagaatgcagatggctgctgttccaa

SEQ ID NO: 4102 - DNA, 120 bp, synthetic construct
  misc_feature 1..120: note = Artificially Synthesized Probe
  source 1..120: mol_type = other DNA
ttcttaaactattactgagtttcccacataaaccccacttacatagatcccagcacactctcacagctcgagggttttcctgaatctcaattctgtccattcaaggtcagtatctaagaa

SEQ ID NO: 4103 - DNA, 120 bp, synthetic construct
  misc_feature 1..120: note = Artificially Synthesized Probe
  source 1..120: mol_type = other DNA
cactttagtaaaggctgaaggaattagggtttgacatgctttaaaaaaaaaaaaagaggaacgttctatttatcaatggaccatgaagcccacgcccccttctgcagtgacgatggtcaa

SEQ ID NO: 4104 - DNA, 120 bp, synthetic construct
  misc_feature 1..120: note = Artificially Synthesized Probe
  source 1..120: mol_type = other DNA
actccccacagaacagatccttccccaggaggcagacacttggctgtaatctttggtaatgaggggcatgcctttgtacccattctgtagtgtttcctgttacctattttaccttaagct

SEQ ID NO: 4105 - DNA, 120 bp, synthetic construct
  misc_feature 1..120: note = Artificially Synthesized Probe
  source 1..120: mol_type = other DNA
ttataaacatatacacatacttatatgtatgcaaatgccacattttcaacatttctctcccattgctcccgtaagcttccatcctgaggcacacttcgggtgcaaagagtattttcagat

SEQ ID NO: 4106 - DNA, 120 bp, synthetic construct
  misc_feature 1..120: note = Artificially Synthesized Probe
  source 1..120: mol_type = other DNA
tctctgtgatttcggggtaaatgactcaaacagagcaagtgcactctctccactgaaaggattcttatttaaaactgtttctaaaatacccatcgttaactaataaggatcaccctggcg

SEQ ID NO: 4107 - DNA, 120 bp, synthetic construct
  misc_feature 1..120: note = Artificially Synthesized Probe
  source 1..120: mol_type = other DNA
gagccaccgtgcctggctgtgaatgtattttaaatttttaagctttttgtttctagactctgtatcctctgtggataacaaatgcttcccgaggagttttctttgggacagggtcttgct

SEQ ID NO: 4108 - DNA, 120 bp, synthetic construct
  misc_feature 1..120: note = Artificially Synthesized Probe
  source 1..120: mol_type = other DNA
tccgtgcgttttgtgaatctgctatatgacctcagttgcgagttgtctgttcacatcattctgtgggtttactgaattcctatggcatttctcatcaattaagcaaacctttcatagagt

SEQ ID NO: 4109 - DNA, 120 bp, synthetic construct
  misc_feature 1..120: note = Artificially Synthesized Probe
  source 1..120: mol_type = other DNA
gtgttataaaaatgatgtgcgtgttttaaagtcaacaatgttcaaattctaggtctcccgcagacactagacggtaaccgccaaagcttatgtacttggaaactttcaaggagaccaagt

SEQ ID NO: 4110 - DNA, 120 bp, synthetic construct
  misc_feature 1..120: note = Artificially Synthesized Probe
  source 1..120: mol_type = other DNA
aagactaataccctgtcatctctgaaacacaggtaaagtctttcaagggttttgattatagtaaagtagctggaaagcaaagcatgcattagacacagcagccgtgataggacaaacaca

SEQ ID NO: 4111 - DNA, 120 bp, synthetic construct
  misc_feature 1..120: note = Artificially Synthesized Probe
  source 1..120: mol_type = other DNA
agatgctctatgtcttctcctcctctcctggcagagctttgctgtaggaagaaggccattcctccagtgctgctacttccaacactggggaaaacaagcttcagaaaggaacggtgtcaa

SEQ ID NO: 4112 - DNA, 120 bp, synthetic construct
  misc_feature 1..120: note = Artificially Synthesized Probe
  source 1..120: mol_type = other DNA
agattctagttcttttctaagcccagcactttgcttctgccacatgcagtcatcctcagcaccaggaaaagtcaaacattgagtgatgacgatgacaccaataccaaaagtcagaaacat

SEQ ID NO: 4113 - DNA, 120 bp, synthetic construct
  misc_feature 1..120: note = Artificially Synthesized Probe
  source 1..120: mol_type = other DNA
agtctttttagcatattctcaaagctgcacaacaatcaccactagtatttaattctgggactttttcaccacccgcaaaagaaaccttgaatccattaagagtcagcacctgctgcttcc

SEQ ID NO: 4114 - DNA, 120 bp, synthetic construct
  misc_feature 1..120: note = Artificially Synthesized Probe
  source 1..120: mol_type = other DNA
tttgatactgtcttttccccttcagttgcttgttatgctttagacatctcatctaaggaaccattgcttaattcaacgtaacagtttcacctggattctcccctaagggtgtaatgagct

SEQ ID NO: 4115 - DNA, 120 bp, synthetic construct
  misc_feature 1..120: note = Artificially Synthesized Probe
  source 1..120: mol_type = other DNA
aaaggaaaaaagtaaagcaaccccttacaacctttctccatcaacagattagaaggtacactgaagaatcatggacaatttgttgtcggtttaagccggtggttttcaaacttttgggtc

SEQ ID NO: 4116 - DNA, 120 bp, synthetic construct
  misc_feature 1..120: note = Artificially Synthesized Probe
  source 1..120: mol_type = other DNA
aatttgttcatttttcaggccacacctgcaaatacctatctcttaagtggcagagtttgtaagtcattctttagataaagaaggccattagtggaagaagcggttctgcaggttcatggg

SEQ ID NO: 4117 - DNA, 120 bp, synthetic construct
  misc_feature 1..120: note = Artificially Synthesized Probe
  source 1..120: mol_type = other DNA
actcattgtgtgaagcctttttcagccatcacaactgtcacatgtaaaagcagtctgcaatgcttcatttaggaggtgcttgtgttgcctcattggctgtgatcaggaccaaattctgag

SEQ ID NO: 4118 - DNA, 120 bp, synthetic construct
  misc_feature 1..120: note = Artificially Synthesized Probe
  source 1..120: mol_type = other DNA
tccctacaaatagtagctttaagagtccccaaaatgcaaaattcacgttcaaattcaatcaactgctaagtgcgataaagttactttttcattattgcttccctcatccccaggggcctt

SEQ ID NO: 4119 - DNA, 120 bp, synthetic construct
  misc_feature 1..120: note = Artificially Synthesized Probe
  source 1..120: mol_type = other DNA
cagtgcccggcccatgtagctatttaaatttgtctaaaattaaataaaattagaagtatcagtttctcatttgcacttcaagcattcaattacccacaggtggccactgaccacagaggc

SEQ ID NO: 4120 - DNA, 120 bp, synthetic construct
  misc_feature 1..120: note = Artificially Synthesized Probe
  source 1..120: mol_type = other DNA
aaactcctcttaatattcagaataattgccagagttgcaataaacaagcatcccttgaccaggaagcaacagggaagcaagaagagggatgctccattccctctgggaccccaggcctgg

SEQ ID NO: 4121 - DNA, 120 bp, synthetic construct
  misc_feature 1..120: note = Artificially Synthesized Probe
  source 1..120: mol_type = other DNA
taaaatgttaatagggtctatgcagaggaacagatcggtctatttcaggaacggtgcttgctggctttttagaaacagagtgaagtccctgccaagtaaaaggttgtttatacttttgct

SEQ ID NO: 4122 - DNA, 120 bp, synthetic construct
  misc_feature 1..120: note = Artificially Synthesized Probe
  source 1..120: mol_type = other DNA
gtatttcctattttactgaggatatccacataaatttctattttgcctcccacacagacctgggatccatgtttcaccaagaggctcgtgccaacagaccctccatgccactgttttcct

SEQ ID NO: 4123 - DNA, 120 bp, synthetic construct
  misc_feature 1..120: note = Artificially Synthesized Probe
  source 1..120: mol_type = other DNA
gcttgtaactaacagtggcgaacaggcaggaaatatacatcttaggagaaaaggtacagcttgtaactaagagtggtgaacaagcaagaaatatacatcacaggagaaaaggtatagctt

SEQ ID NO: 4124 - DNA, 120 bp, synthetic construct
  misc_feature 1..120: note = Artificially Synthesized Probe
  source 1..120: mol_type = other DNA
atctctttacccatatgagacccaaaatttagtttatgttttcttcagtattattttttttttttcccaagccattactgaggtctctcctcactgccccatgaggaggttcacgggctc

SEQ ID NO: 4125 - DNA, 120 bp, synthetic construct
  misc_feature 1..120: note = Artificially Synthesized Probe
  source 1..120: mol_type = other DNA
aaactatgaaaagaatctatagaggaaggactagctctgctgtaagcccactacacgcaaggtcacgcaggatgccactctcaagccacacggcgtccagtctccgttccacccccacgg

SEQ ID NO: 4126 - DNA, 120 bp, synthetic construct
  misc_feature 1..120: note = Artificially Synthesized Probe
  source 1..120: mol_type = other DNA
cctaccacattgaaaacaacgttttttcttgatgcatcaagcgaaagacagaaaaccaccctaaacaagtgtgtgccttgagtcacagagaggaacatgctgtgagccccgaccctggaa

SEQ ID NO: 4127 - DNA, 120 bp, synthetic construct
  misc_feature 1..120: note = Artificially Synthesized Probe
  source 1..120: mol_type = other DNA
tcttcagattagggtagtgtcctggtttcacgcttgcctcatatgacattctataaattggaaagataacgcattgtcttaccagccacgctgttccccaaatactaactatgataaaga

SEQ ID NO: 4128 - DNA, 120 bp, synthetic construct
  misc_feature 1..120: note = Artificially Synthesized Probe
  source 1..120: mol_type = other DNA
aagtttaacgggagttgaatatttgcatctgagtcacacaagcacattaaaagtaaaatttctcctttccactagaattatgagcttggggcagcagcactggctgtatctcatatgctc

SEQ ID NO: 4129 - DNA, 120 bp, synthetic construct
  misc_feature 1..120: note = Artificially Synthesized Probe
  source 1..120: mol_type = other DNA
aggggaggttcggagaatgaggccatgtgaacacaaagctaaagtgctcagcggctggaagacaaaagctgcacaacacaagagacaagctaaacacaaccatttaaaaaaaaaaagaaa

SEQ ID NO: 4130 - DNA, 120 bp, synthetic construct
  misc_feature 1..120: note = Artificially Synthesized Probe
  source 1..120: mol_type = other DNA
aaataccttacagagtttgattctctttgctgacatggtacctttcatgtgtatttattttggggcaggttaaaggggactcacaatggattggaggcagcaattgcccactgtacgaga

SEQ ID NO: 4131 - DNA, 120 bp, synthetic construct
  misc_feature 1..120: note = Artificially Synthesized Probe
  source 1..120: mol_type = other DNA
agcaagcggacgttccgaaggatgcattttaaagaaaaatgtgtaagctttactgcatgaaatcagctacatcttttgctactccaaaggctttttgttttgccttctcaaggttctcca

SEQ ID NO: 4132 - DNA, 120 bp, synthetic construct
  misc_feature 1..120: note = Artificially Synthesized Probe
  source 1..120: mol_type = other DNA
catgtgagtgcccctaaaaatacacacaagcctggctgcttaaaaggaatgaatatagctaaatactcttctgtgaacattgacgtgtgcaaccttataaagtctactgccttgcagaat

SEQ ID NO: 4133 - DNA, 120 bp, synthetic construct
  misc_feature 1..120: note = Artificially Synthesized Probe
  source 1..120: mol_type = other DNA
atctgctaagatgtgtcataactaatcaggtaaaaaatatggaacagaaaaagacttaggggagcaaattctcagaccctgtgagaatataaagtgtctgagtccatggtggtcctctca

SEQ ID NO: 4134 - DNA, 120 bp, synthetic construct
  misc_feature 1..120: note = Artificially Synthesized Probe
  source 1..120: mol_type = other DNA
tacaataaatccaagcaaaaccacattagaactcagtgagtttaacatctactggaaacctggtgaagatgaagagtaaacacttttctggtcccctttgctaccagcaatttcccttcc

SEQ ID NO: 4135 - DNA, 120 bp, synthetic construct
  misc_feature 1..120: note = Artificially Synthesized Probe
  source 1..120: mol_type = other DNA
aagagtgtctgaagaaacaattttttgcccctttttaaactgtaatcgtagttaccatttattaaaagcctggccaggaatcttaccaacatactttttcacgtgaccctcgcggggtaa

SEQ ID NO: 4136 - DNA, 120 bp, synthetic construct
  misc_feature 1..120: note = Artificially Synthesized Probe
  source 1..120: mol_type = other DNA
gggaaaaataattctttgtaattggaaagaagctaaacgttaagactcaacttggttgcacaaaacccagatcagcatcatctgagaatctggaattacacgtatccagggcccatctca

SEQ ID NO: 4137 - DNA, 120 bp, synthetic construct
  misc_feature 1..120: note = Artificially Synthesized Probe
  source 1..120: mol_type = other DNA
agttctaccgtggggtgagacgctgttcaacaagtttcatagacccaaatgagagcaaaaagaaacgaatcatccaagatcagtagaaggaaagggatcagaaatttaagcctgtaacaa

SEQ ID NO: 4138 - DNA, 120 bp, synthetic construct
  misc_feature 1..120: note = Artificially Synthesized Probe
  source 1..120: mol_type = other DNA
gaagtgatttttacacttcaaagttttaacaaaagaaaaagaatatgcagagacttccgtggcccacaaggcataacacattgcctaccctgccctttacagaagcttctagctttgctg

SEQ ID NO: 4139 - DNA, 120 bp, synthetic construct
  misc_feature 1..120: note = Artificially Synthesized Probe
  source 1..120: mol_type = other DNA
tgagtctatgacgtgtcaggaagggaaggaagacactatgtagatcatctcatttaaacttcacagtgtcacaaggtggattttgtcgtgcccattttatggatcaggaaacagttttaa

SEQ ID NO: 4140 - DNA, 120 bp, synthetic construct
  misc_feature 1..120: note = Artificially Synthesized Probe
  source 1..120: mol_type = other DNA
ttcatttcagcacaacatttccatttgaagaaacgcagagcatggagctctggtaataattaaaagcgtgtttcattcatcatttgaaattccatgtactgctgcaacagcagcatcccc

SEQ ID NO: 4141 - DNA, 120 bp, synthetic construct
  misc_feature 1..120: note = Artificially Synthesized Probe
  source 1..120: mol_type = other DNA
cattccgaaatatgttcttggtttcatgtttgcgaaatctaagcaacattataataaaaaatcactgaattctgcccgaggctctaggggtgttttcctctctgaaaggagacccttctc

SEQ ID NO: 4142 - DNA, 120 bp, synthetic construct
  misc_feature 1..120: note = Artificially Synthesized Probe
  source 1..120: mol_type = other DNA
atgttttcagcaaatagcatcatccacccacgaatgagaggtaccattttcattctcggagggaaatgctacaaagcacgtacattttagcatgtaagtgaattatttgggagttcctgt

SEQ ID NO: 4143 - DNA, 120 bp, synthetic construct
  misc_feature 1..120: note = Artificially Synthesized Probe
  source 1..120: mol_type = other DNA
ctgaacggtcctccctgtcactttcctcaacgggaacactttattctgtcttctactcaaattaagtatcttgcaagggagttgaagaaaactgcatagcagattttaaaacttcaatgc

SEQ ID NO: 4144 - DNA, 120 bp, synthetic construct
  misc_feature 1..120: note = Artificially Synthesized Probe
  source 1..120: mol_type = other DNA
aatcagtctgctggtcttggcttcaaggaaaatagacagaaggaactaaaggctcactacagctaatatcacaacgttctcaactttaccttcgccaaaaacagcggaaaagcaaaacta

SEQ ID NO: 4145 - DNA, 120 bp, synthetic construct
  misc_feature 1..120: note = Artificially Synthesized Probe
  source 1..120: mol_type = other DNA
aagagtcaatttagggtcattttcagaaacgtgcaacaatgagaaacaatctggtcttacctgcgcctctcctccatggtaacagctgagctcgcactttcaggatttcagtggttttgt

SEQ ID NO: 4146 - DNA, 120 bp, synthetic construct
  misc_feature 1..120: note = Artificially Synthesized Probe
  source 1..120: mol_type = other DNA
caaaaaataaagcgcagatattccataaatgagtaagttccagtatggctgcatcctactgcaattaatcctttgacaaggtaaaactgagccatcctgacatagcactgacacatggta

SEQ ID NO: 4147 - DNA, 120 bp, synthetic construct
  misc_feature 1..120: note = Artificially Synthesized Probe
  source 1..120: mol_type = other DNA
atttctccatggtagaacctggaatttacctttgagacagactgtccttctgttctgaaaaatcagattattcttgcaatcctccatcaagggtgaaattcccaaaggtgtggaaaacta

SEQ ID NO: 4148 - DNA, 120 bp, synthetic construct
  misc_feature 1..120: note = Artificially Synthesized Probe
  source 1..120: mol_type = other DNA
atccatgtagtgtacatatgtaggtacactataacgtgtatgtggtagagcgtacatacatccagacccagtgtacaaacataagtgcacaacatgtgtatgtgcatagagcatacacac

SEQ ID NO: 4149 - DNA, 120 bp, synthetic construct
  misc_feature 1..120: note = Artificially Synthesized Probe
  source 1..120: mol_type = other DNA
agcacagccatagccaatgtacatatacaggtacactataacatgtatgtacatgaatagcatgtacacgcatctctatccagtgtacacaggtatactataacctgtatgtacatgcat

SEQ ID NO: 4150 - DNA, 120 bp, synthetic construct
  misc_feature 1..120: note = Artificially Synthesized Probe
  source 1..120: mol_type = other DNA
caggactgactcacgatgaagcactccttaaaaaattagaagtgtgtcctcatgttttggcgtttgagacaaagcctcttatttaatcgagttctgacaatttgactcacagtattctgg

SEQ ID NO: 4151 - DNA, 120 bp, synthetic construct
  misc_feature 1..120: note = Artificially Synthesized Probe
  source 1..120: mol_type = other DNA
attggatcctcataaggagcacctccgagatccctcacgcacagtttacaatagggttccaacgtctatgagaacacagtttacaataggattccagtgtctatgagaatctaatgctgc

SEQ ID NO: 4152 - DNA, 120 bp, synthetic construct
  misc_feature 1..120: note = Artificially Synthesized Probe
  source 1..120: mol_type = other DNA
atacatggcgatttatggcagttgccacatattttcacatgtattaccttttgggcatcttctaggtttgcaagaatcagtgactacttttatcccccacaacacacagagaaatgcatg

SEQ ID NO: 4153 - DNA, 120 bp, synthetic construct
  misc_feature 1..120: note = Artificially Synthesized Probe
  source 1..120: mol_type = other DNA
tctttaaacaaccaccagccatcatgtcctgttgaaatgttttagctaatcaggaacatctttaccaagcatctgtgtttttaggaaatcagttgacagattccaaatctcggagcccac

SEQ ID NO: 4154 - DNA, 120 bp, synthetic construct
  misc_feature 1..120: note = Artificially Synthesized Probe
  source 1..120: mol_type = other DNA
gcctctctccattccctactgaattcgctcagaagacgggtgttcccaaacacacacagccctgagtattccacatagtattacattcagtaaatcgcatttgaatgcctcaagcgcttt

SEQ ID NO: 4155 - DNA, 120 bp, synthetic construct
  misc_feature 1..120: note = Artificially Synthesized Probe
  source 1..120: mol_type = other DNA
aaacgccgctgcaaggtacaaccaggaagatcatcattcaaaactgaggattgtggcagaacaaagctgtcagattttaatcaccaacaacactagttacatgacccaaagatgattaaa

SEQ ID NO: 4156 - DNA, 120 bp, synthetic construct
  misc_feature 1..120: note = Artificially Synthesized Probe
  source 1..120: mol_type = other DNA
atgaaaatgtttttacctccctttaggtgacatctgcaaggccaggtccagggaacgttctggatctcagatagataatggcttatccactcatggtaagccttggtcttgtttcacaag

SEQ ID NO: 4157 - DNA, 120 bp, synthetic construct
  misc_feature 1..120: note = Artificially Synthesized Probe
  source 1..120: mol_type = other DNA
aggaccaggactgtgtcctgggaacttaaactctggaagctgagtcaaatcagtgctgctcaaatcttgtcatcaactgtcttgttaaattgggagattccatctccgggggtctcaagg

SEQ ID NO: 4158 - DNA, 120 bp, synthetic construct
  misc_feature 1..120: note = Artificially Synthesized Probe
  source 1..120: mol_type = other DNA
cctgtatgcattctggacacaagtcctttgccagctgcatgatttgtagacatcttctccctgtctgcagaaaatgtgtctcttcaattccctaggggtgtcttttatattaaaagttta

SEQ ID NO: 4159 - DNA, 120 bp, synthetic construct
  misc_feature 1..120: note = Artificially Synthesized Probe
  source 1..120: mol_type = other DNA
gataagttacataaatcaccgtatcaagattctgacggttgactagaagagaaatacctttcacagtatagttcaaacaggagaaaggtaggagtggtttccacatcacacagggcctgt

SEQ ID NO: 4160 - DNA, 120 bp, synthetic construct
  misc_feature 1..120: note = Artificially Synthesized Probe
  source 1..120: mol_type = other DNA
catttcccttgtcaagatcaacactgcaaacacacatccaattcatcctgtcactaaaaaatgaaagaagccgccacctccatcacagataacagtcaggtttccattactggttttttt

SEQ ID NO: 4161 - DNA, 120 bp, synthetic construct
  misc_feature 1..120: note = Artificially Synthesized Probe
  source 1..120: mol_type = other DNA
gaaaaccatattcaagtgtcatttcacatttcaagcgaagaaaacagtggtagggcatgagggagacacattcatagccatgtgttctggggtattcaacaagaggtttttttctgttat

SEQ ID NO: 4162 - DNA, 120 bp, synthetic construct
  misc_feature 1..120: note = Artificially Synthesized Probe
  source 1..120: mol_type = other DNA
taacagtttggttctcttggaagaaatacagccataaaactggttttaaaaatatatatatgggagtgggtatgagagagtagcttacaaattatgccagtagtggccgggaacggtggc

SEQ ID NO: 4163 - DNA, 120 bp, synthetic construct
  misc_feature 1..120: note = Artificially Synthesized Probe
  source 1..120: mol_type = other DNA
ggttaagtcagctccatgtaaatagcactcctgccaggccctttcctatctgcacagcttctacaaattcaactctcacacctgacacctaagaatactgcacaaccccacatgaaactc

SEQ ID NO: 4164 - DNA, 120 bp, synthetic construct
  misc_feature 1..120: note = Artificially Synthesized Probe
  source 1..120: mol_type = other DNA
ctcgtgggccatgacagaaaacttcaggttcttattagttcctattttccccatccaggaagcctttggttttaatatacaaacttgccattttgtaggccaaaaacagccaaatattgg

SEQ ID NO: 4165 - DNA, 120 bp, synthetic construct
  misc_feature 1..120: note = Artificially Synthesized Probe
  source 1..120: mol_type = other DNA
ataatctgaggcctgacagccatcgttcttgataaagggatggttaacaaactaactgttctgattagaaagcggaggaaaaagcttatttttaagccgacaaagagtggacactgctat

SEQ ID NO: 4166 - DNA, 120 bp, synthetic construct
  misc_feature 1..120: note = Artificially Synthesized Probe
  source 1..120: mol_type = other DNA
agacacccagaaccacacaatgagctttcaagctcaccaaggcgatgactgagcaatgcgcatagtgacgcgaacatgcagacatgagggccacacgtggcattggttttgtgtatcgac

SEQ ID NO: 4167 - DNA, 120 bp, synthetic construct
  misc_feature 1..120: note = Artificially Synthesized Probe
  source 1..120: mol_type = other DNA
gtaggcctactaacaattacgtaagtcttcagaggctcctgaactacttctgtcccttcatgtttttatacaaaataagcttgaggttaaagagaataacgtcactggccacagctgggg

SEQ ID NO: 4168 - DNA, 120 bp, synthetic construct
  misc_feature 1..120: note = Artificially Synthesized Probe
  source 1..120: mol_type = other DNA
ttttgaaacatcactagcagaatagagccatgtgaatagttacttttctgttaaaagtagaaaagactgcctcaaggaacatccttccaacaacgactttctgcatcgagcctttgaggc

SEQ ID NO: 4169 - DNA, 120 bp, synthetic construct
  misc_feature 1..120: note = Artificially Synthesized Probe
  source 1..120: mol_type = other DNA
cagaggggaaagaggaacctgtatcataactaacatgtatttatgggcacacagagaccctgtagtacaaggcacagaactagaaggaatcgtggaaataagagggaagacatttggtta

SEQ ID NO: 4170 - DNA, 120 bp, synthetic construct
  misc_feature 1..120: note = Artificially Synthesized Probe
  source 1..120: mol_type = other DNA
aatgaatttgccacttcagcctacactctttactcccttgtttggttaagaaaaaccaaaaggcagaatttgttttggccaatcgcctgctgcacccaactgtagaggttttaattatag

SEQ ID NO: 4171 - DNA, 120 bp, synthetic construct
  misc_feature 1..120: note = Artificially Synthesized Probe
  source 1..120: mol_type = other DNA
gaatgtcttaaccatcactgtttacaggatttcaggactcaggcaacgttcagtattgtcacacaccaaggtttttacagtctgaagaaaactcctgcagtcctaaagtgtcagttctca

SEQ ID NO: 4172 - DNA, 120 bp, synthetic construct
  misc_feature 1..120: note = Artificially Synthesized Probe
  source 1..120: mol_type = other DNA
tagctccatagaaattaggcaaagaatccaccctacgtcttataaaaccaaaccagcccaggaattccacatcaccactaatttgcacgggaaaatgctggattatcatatgtaagttct

SEQ ID NO: 4173 - DNA, 120 bp, synthetic construct
  misc_feature 1..120: note = Artificially Synthesized Probe
  source 1..120: mol_type = other DNA
tttcctcctaatgaacacatcagtcacccatgcaacctataaatatttgactattaaatatacaataccataggagacaaagatgaggaaggcagttgctccctgaaagacgagtggacc

SEQ ID NO: 4174 - DNA, 120 bp, synthetic construct
  misc_feature 1..120: note = Artificially Synthesized Probe
  source 1..120: mol_type = other DNA
aagaaaaaagacaaatgtttaatttagggggtttgcctatgacttggataagcatgattttcttctggccaagcagggagaagccagaccatactggagcgaaggaaaagcacaaatttc

SEQ ID NO: 4175 - DNA, 120 bp, synthetic construct
  misc_feature 1..120: note = Artificially Synthesized Probe
  source 1..120: mol_type = other DNA
atattgatctccctcagaactactcaatcacccacatttgcaggtcacttaaccagccaccaggataacataattatgcaataaaaatgccttctcagggctatgatactcaacaaggaa

SEQ ID NO: 4176 - DNA, 120 bp, synthetic construct
  misc_feature 1..120: note = Artificially Synthesized Probe
  source 1..120: mol_type = other DNA
tgatctgaattctcattaggaaagggatctcactgcttaagcactctgctgcctccttgcaaacaacaaaaaatccaaaacccctcttaaagaacgtttctataacctcaaaacaagacc

SEQ ID NO: 4177 - DNA, 120 bp, synthetic construct
  misc_feature 1..120: note = Artificially Synthesized Probe
  source 1..120: mol_type = other DNA
atgaaaccaaaatcggagtccgcaggtgcggtcaagtcatatgacttctccactagaatatgcacaaatgttcatcagcaaatctggtctttgatctacctccctctcataacctaaaaa

SEQ ID NO: 4178 - DNA, 120 bp, synthetic construct
  misc_feature 1..120: note = Artificially Synthesized Probe
  source 1..120: mol_type = other DNA
gacctaatgggggataaacctctcctccaacccattgcttagtcttcttagaggatgaaggattttacataccacgagtcagcatataaaagatcttgtatagaaatatacttgcaagtg

SEQ ID NO: 4179 - DNA, 120 bp, synthetic construct
  misc_feature 1..120: note = Artificially Synthesized Probe
  source 1..120: mol_type = other DNA
taactgataatgctataggttaaccaggtcaaaagcattttttaagaagttaaaaagaacctaactgcatctttggatcttatgtgaggcaatgtccagggtcactgggacccctgcttg

SEQ ID NO: 4180 - DNA, 120 bp, synthetic construct
  misc_feature 1..120: note = Artificially Synthesized Probe
  source 1..120: mol_type = other DNA
gccctggtgggaggtgactgactcacgggggtgctttctaaccccccagtgttggaggtgggccctggtgggaggtgactgactcacgggggtgctttctaacacccagtgttggaggtg

SEQ ID NO: 4181 - DNA, 120 bp, synthetic construct
  misc_feature 1..120: note = Artificially Synthesized Probe
  source 1..120: mol_type = other DNA
cagtgacccatgtaactatggtttgtgctgggccattcaactggtgtccgaatccctgtccaagtaagctctttaatttcaagattttcagacagcttttttttaagggatctattatag

SEQ ID NO: 4182 - DNA, 120 bp, synthetic construct
  misc_feature 1..120: note = Artificially Synthesized Probe
  source 1..120: mol_type = other DNA
ttcataacatgtgaatttttaaaattcagatttctaatttcatcccattagaacttttgaagaacagatgtgcacctgctccaagccagtgagaggacgctcggacagtcccttacaggt

SEQ ID NO: 4183 - DNA, 120 bp, synthetic construct
  misc_feature 1..120: note = Artificially Synthesized Probe
  source 1..120: mol_type = other DNA
gtaattagagcaattgcagaatttgctactgaattacaatggcagattcctgagaatggaagaactgttgcccaggaatggagttcaacagatcctctccacaccctggtaaacatggca

SEQ ID NO: 4184 - DNA, 120 bp, synthetic construct
  misc_feature 1..120: note = Artificially Synthesized Probe
  source 1..120: mol_type = other DNA
atggccactgggcctgaagggctgagtcttgaatgtgatccataaagttcctttcaagtgtgtttagctgtgtaatcaaatctttattctaatgaaatttaaaggagcctctggctacgg

SEQ ID NO: 4185 - DNA, 120 bp, synthetic construct
  misc_feature 1..120: note = Artificially Synthesized Probe
  source 1..120: mol_type = other DNA
ctcttcacccaggtcatccctcagtcacacacacttgagaaacaaaagcaattctgttctcttcactctgggttccaagtactaaattcctcgattttatcaattagattatcaagcagc

SEQ ID NO: 4186 - DNA, 120 bp, synthetic construct
  misc_feature 1..120: note = Artificially Synthesized Probe
  source 1..120: mol_type = other DNA
tggaatagcccagcaaccctgtgtaccttcctcaaagtacccaggccaggcaagcatagagagtctaatggggtgcctaggaatcagcatttaacacaattctgatgaaaatatttgaga

SEQ ID NO: 4187 - DNA, 120 bp, synthetic construct
  misc_feature 1..120: note = Artificially Synthesized Probe
  source 1..120: mol_type = other DNA
ccaggacccagtactgtcccactctgtgattgtgtgtttaaaattccaaaatactctttcagaatgctattggcatttggtctgcacataaaatgctaaaaaccctcaagtgaaacaagt

SEQ ID NO: 4188 - DNA, 120 bp, synthetic construct
  misc_feature 1..120: note = Artificially Synthesized Probe
  source 1..120: mol_type = other DNA
tagaaaaacatcaaaaatacttccaattcttctttccagctgaggctgcaggaagctcatttcagccctcactgtgttctgactgtggcctgcttcccataagaaataaaatcagaattc

SEQ ID NO: 4189 - DNA, 120 bp, synthetic construct
  misc_feature 1..120: note = Artificially Synthesized Probe
  source 1..120: mol_type = other DNA
cagccgatctggctggacggagagcatttccccttgtatagtcttacaaggccattttatttgtgctttattcaatttttatggcttttttctgcctatctattttatgggagtgtttct

SEQ ID NO: 4190 - DNA, 120 bp, synthetic construct
  misc_feature 1..120: note = Artificially Synthesized Probe
  source 1..120: mol_type = other DNA
atagtaactaaatctgtcggctggagtatctaacggcttaaccacggggtcatgtgggaagattattccagttgtttttgtttttcccactgaagatgcatttgaacgttcttgtagttt

SEQ ID NO: 4191 - DNA, 120 bp, synthetic construct
  misc_feature 1..120: note = Artificially Synthesized Probe
  source 1..120: mol_type = other DNA
taatttcaaagtaagtccaataaatacacaaaatcacaggactgagcattgagcattgtttccctttgtgtcctccagcctttaggacacattaaggaaagacatgattccaggattccc

SEQ ID NO: 4192 - DNA, 120 bp, synthetic construct
  misc_feature 1..120: note = Artificially Synthesized Probe
  source 1..120: mol_type = other DNA
gtgatggggatacaaagatgtggaattagagctcgagaagctcaaatgctctcatttaattccctaatgcaattacccagcttcagcctgatggctgtaatgtctaaattcactttttct

SEQ ID NO: 4193 - DNA, 120 bp, synthetic construct
  misc_feature 1..120: note = Artificially Synthesized Probe
  source 1..120: mol_type = other DNA
atacagtcattaaaaattccttctgagttttcatctggaaaactttgcaaatatatttagagacaagaggtcaaagatgaagccaacacagttgggctcgaaccgccaccctgctccttc

SEQ ID NO: 4194 - DNA, 120 bp, synthetic construct
  misc_feature 1..120: note = Artificially Synthesized Probe
  source 1..120: mol_type = other DNA
gtcattttagacgcaggtgcctgatattaacgatgacaatcaaccatgccaccctgaattacagccgtgtcctcagcgggtcactgtttacgctgacaattacaaacagcttgaactcac

SEQ ID NO: 4195 - DNA, 120 bp, synthetic construct
  misc_feature 1..120: note = Artificially Synthesized Probe
  source 1..120: mol_type = other DNA
atttcaccaaatgttgtgtcaaaagagcgttttgcaagctgggacacagagaactgcacctgatgaaatattcaattaatcacttgagtcctccccacatacgaagctatttacaaagtg

SEQ ID NO: 4196 - DNA, 120 bp, synthetic construct
  misc_feature 1..120: note = Artificially Synthesized Probe
  source 1..120: mol_type = other DNA
tcggtgtccaaaatgtttttttcactacaactgtttggaccattcgtgaacgaatcagttaaataccaagaagggccattcccatttattctttggctacagttttccacccaccagcta

SEQ ID NO: 4197 - DNA, 120 bp, synthetic construct
  misc_feature 1..120: note = Artificially Synthesized Probe
  source 1..120: mol_type = other DNA
tctgtgtctgcatctgtaacgactttgctgttttaccggggtactaaaatgcagcatcggaatgtttaaaggtctttaaatatcaacactctgggtccagttttcggcactttaatgcgg

SEQ ID NO: 4198 - DNA, 120 bp, synthetic construct
  misc_feature 1..120: note = Artificially Synthesized Probe
  source 1..120: mol_type = other DNA
tgggactgctctgcacagcttaataggaaagttgggttctatttggtggggttttggtcatgccaatggctggtcagggctgtccgtgaggaactgatttgaggacaagttagagaaggg

SEQ ID NO: 4199 - DNA, 120 bp, synthetic construct
  misc_feature 1..120: note = Artificially Synthesized Probe
  source 1..120: mol_type = other DNA
gataattcgctttctcatccgtgaaagaataaagtcggattaactcatctccacactcacttccaactctaacaacctgtgttaggaaatcaaaggtaaggactctgaccacaaacccaa

SEQ ID NO: 4200 - DNA, 120 bp, synthetic construct
  misc_feature 1..120: note = Artificially Synthesized Probe
  source 1..120: mol_type = other DNA
tccgcccccatctcctctgccccaaccctggaagggggtcagatatcaatgctaacatttgtgctgactcaattaattcaaacgattcacaaaaacaaacttgcttaaagtattaatttc

SEQ ID NO: 4201 - DNA, 120 bp, synthetic construct
  misc_feature 1..120: note = Artificially Synthesized Probe
  source 1..120: mol_type = other DNA
tatgaaagaaaagcgaaattcataaaagagaccatgtgattctataaagcaacacagaatccgttttcagaagaggcaaacgtggaccacaaaacgccagtgttgcctgtgaagagagaa

SEQ ID NO: 4202 - DNA, 120 bp, synthetic construct
  misc_feature 1..120: note = Artificially Synthesized Probe
  source 1..120: mol_type = other DNA
ctgcagctgaactcgaagctgattctggaaggaactgaggaggatgaggacgagatccttctacctcaaccgggatcaattttttaatgatttctttcttttagaaaaatgttaataaga

SEQ ID NO: 4203 - DNA, 120 bp, synthetic construct
  misc_feature 1..120: note = Artificially Synthesized Probe
  source 1..120: mol_type = other DNA
gaaaatgcactcaactcccaaacagagacagaaactgctttttttccttaaaagcttctctcttttattctcaaaaagactctctttggtggcttcactgctgaagggacaagcctgttg

SEQ ID NO: 4204 - DNA, 120 bp, synthetic construct
  misc_feature 1..120: note = Artificially Synthesized Probe
  source 1..120: mol_type = other DNA
aacattctgtcctcaccgatccatacctaaatccttatttctaattggcccccaatttttcagaatttaagaagactgagaggaataaccacgaacaagcaagatttacgcagacgtcag

SEQ ID NO: 4205 - DNA, 120 bp, synthetic construct
  misc_feature 1..120: note = Artificially Synthesized Probe
  source 1..120: mol_type = other DNA
acattcttaatgacaatccacactacatgtgtgtttccagcatcaacctgtgctcatagctacatacaaaataactttatcacaaggaaaactaggtggtgaacccaggaggaggaaatc

SEQ ID NO: 4206 - DNA, 120 bp, synthetic construct
  misc_feature 1..120: note = Artificially Synthesized Probe
  source 1..120: mol_type = other DNA
aaatcataacataacgtctgattccacacggtcccacctgcgtaagatggtgacatttccctaccaggtatctgaagccagaaaatctgacagaaaattcacaacctgcctttgtccacc

SEQ ID NO: 4207 - DNA, 120 bp, synthetic construct
  misc_feature 1..120: note = Artificially Synthesized Probe
  source 1..120: mol_type = other DNA
taacgtcagctgggcaccgagtctgagaacatgttctcaagtaaaaatgaaaacaggactgctgtgaaaagctcatgcttaatcacctctgggctaaattctaaatgcaatgttatttca

SEQ ID NO: 4208 - DNA, 120 bp, synthetic construct
  misc_feature 1..120: note = Artificially Synthesized Probe
  source 1..120: mol_type = other DNA
gacaaacttaatgcagagaaattcctgtttcaggtttgccagcattggagcaatcctggcatttattcacccaggacactagaaggctgaagtctgcagggtgcacatatttaaaatcac

SEQ ID NO: 4209 - DNA, 120 bp, synthetic construct
  misc_feature 1..120: note = Artificially Synthesized Probe
  source 1..120: mol_type = other DNA
atcaaggccctaatatatttagttccttgtcccaggtacacacaaatcagcgacatcactagaacgtgttttggaccacgaaaagaaggaaaatcacagcattatccattgatgctgctt

SEQ ID NO: 4210 - DNA, 120 bp, synthetic construct
  misc_feature 1..120: note = Artificially Synthesized Probe
  source 1..120: mol_type = other DNA
gaaaataggtccaagatcattcacaacaaattattgctaattgcaaaaaaaaaaaaatcctaccctcaccttggaagatctcaaggcaacacctcgttctttgaggtcatagtggggacg

SEQ ID NO: 4211 - DNA, 120 bp, synthetic construct
  misc_feature 1..120: note = Artificially Synthesized Probe
  source 1..120: mol_type = other DNA
tatgatgaaggaaattattttccttcctacaccccttctaaggaaacatttctatttttctgctacacaatttggtaacctgccctttcagatcctggcctctttaagcaggactcgctg

SEQ ID NO: 4212 - DNA, 120 bp, synthetic construct
  misc_feature 1..120: note = Artificially Synthesized Probe
  source 1..120: mol_type = other DNA
aagaaaggaatgtaatatggacatctgtgaactcttcctcatatccactgagtggtcctccagaaagagaaagattaaaaagaaaaagaagatttaagaatcaaacacagggccgggcac

SEQ ID NO: 4213 - DNA, 120 bp, synthetic construct
  misc_feature 1..120: note = Artificially Synthesized Probe
  source 1..120: mol_type = other DNA
caaatgttccacctgagggtggagtgaagttacagaattgggaagaacttcacagacgtatgagggtgtatttaaggaaaaagtgtatggaagaggtgagaaaatagaatatcctaacct

SEQ ID NO: 4214 - DNA, 120 bp, synthetic construct
  misc_feature 1..120: note = Artificially Synthesized Probe
  source 1..120: mol_type = other DNA
atacaatttagcaccagcatctgtgaaacaagaacaaaagtcgcatgggaaagtgagcataaaaatgaaaaaataaccgaattacagtgaagatggatgagatggggaggactgtgagga

SEQ ID NO: 4215 - DNA, 120 bp, synthetic construct
  misc_feature 1..120: note = Artificially Synthesized Probe
  source 1..120: mol_type = other DNA
cccccaaaatgctgcgtcccccgacctctgattttatcttttaaatcagctaagttttctcccctaaaaagaagcatattgtatcattactctttaaatttaggtgagttaacaggcaca

SEQ ID NO: 4216 - DNA, 120 bp, synthetic construct
  misc_feature 1..120: note = Artificially Synthesized Probe
  source 1..120: mol_type = other DNA
agaattatgttctgttccttaggttaaaaacaactgccttcatacctattaaaaacaatgtttcttcctttcctgagtgaaagtgaaatgagccatggtggcaagctgggcgagaacaga

SEQ ID NO: 4217 - DNA, 120 bp, synthetic construct
  misc_feature 1..120: note = Artificially Synthesized Probe
  source 1..120: mol_type = other DNA
cgtcgacattggatggtgggagagaacagagggaaactgaatccacgtccacatttgatggcgggagagaacagagggaaactgagtccacatccacattggacggtgggagagaacaga

SEQ ID NO: 4218 - DNA, 120 bp, synthetic construct
  misc_feature 1..120: note = Artificially Synthesized Probe
  source 1..120: mol_type = other DNA
agggtgggagagaacagagggaaactgagtccacgtccacattggatggtgggagagaacagaggcaaactgagtccacgtccacatttgatggtgggagacaacagagggaaactgagc

SEQ ID NO: 4219 - DNA, 120 bp, synthetic construct
  misc_feature 1..120: note = Artificially Synthesized Probe
  source 1..120: mol_type = other DNA
ttgccaaatgatcctctatgtatcctacataaaagacagggtctttctggcagaaaaccattgaagtttttatttgcagtaagagaagcatgccttattatcaaacaggtgcatggtccc

SEQ ID NO: 4220 - DNA, 120 bp, synthetic construct
  misc_feature 1..120: note = Artificially Synthesized Probe
  source 1..120: mol_type = other DNA
agtttaagttgttttctgtaatttgcaaccagaatcctggctgatccaccatggaacccagatgtcctcagttctgcctcagcccccacttgtgagaggtccgtggcataacacaaactc

SEQ ID NO: 4221 - DNA, 120 bp, synthetic construct
  misc_feature 1..120: note = Artificially Synthesized Probe
  source 1..120: mol_type = other DNA
tgcatcttttataaaacaagaacgcaaggctctgaggccaactttgaacatttatttgagtgaattcacgtcccccaaattttccgtatcccaaaatctggacttttgctaaatggtgcc

SEQ ID NO: 4222 - DNA, 120 bp, synthetic construct
  misc_feature 1..120: note = Artificially Synthesized Probe
  source 1..120: mol_type = other DNA
aagcacagaaccgcacgcagagtgatttttttttttttaaacagaaatggcaccagggcagatgatgattttttgtaccatttcttgactttcttgggcattttccacaccaggacagat

SEQ ID NO: 4223 - DNA, 120 bp, synthetic construct
  misc_feature 1..120: note = Artificially Synthesized Probe
  source 1..120: mol_type = other DNA
gactcgaacactaaattgctctttgacattaattcttaaaccttgagaaaccaaagttctctttgtaacagacttgagaaagacactcagaagagacgcaccaactcttacctgggagag

SEQ ID NO: 4224 - DNA, 120 bp, synthetic construct
  misc_feature 1..120: note = Artificially Synthesized Probe
  source 1..120: mol_type = other DNA
gttatactctgtagtatggagcacaacactgccccatgctgcgcgaggctactattctatactacactactatgatcggtttgttctattctatactattccattctctacgatacaata

SEQ ID NO: 4225 - DNA, 120 bp, synthetic construct
  misc_feature 1..120: note = Artificially Synthesized Probe
  source 1..120: mol_type = other DNA
cactgtcctctctgttctgtgctttgcgactctactactgcacaccatgctatgtaatattaataccatgctgtgtgttctaatctagactacattatgctatgcaatactacgttgtta

SEQ ID NO: 4226 - DNA, 120 bp, synthetic construct
  misc_feature 1..120: note = Artificially Synthesized Probe
  source 1..120: mol_type = other DNA
aaggcagaggtgacttagcacaaagagcatggaactttgctttaataaagcaaatgcttaacatccactgtgaggaactcaaggagaaatggcagtaggctctactaataactactgctt

SEQ ID NO: 4227 - DNA, 120 bp, synthetic construct
  misc_feature 1..120: note = Artificially Synthesized Probe
  source 1..120: mol_type = other DNA
atgctggacctgtccctggacctgcccctggacctgccgctggacctgccactggacctgtccctggacctgcccctggacctgcccctggacctgtccctggacctgccgctggacctg

SEQ ID NO: 4228 - DNA, 120 bp, synthetic construct
  misc_feature 1..120: note = Artificially Synthesized Probe
  source 1..120: mol_type = other DNA
gtatatgtaaatatatattttatagagcatcaggcgtgtttacctaatggctcaaacctttaaaatatctctctccctgagaggacagcggaggatcccatgcactctctccaggaacat

SEQ ID NO: 4229 - DNA, 120 bp, synthetic construct
  misc_feature 1..120: note = Artificially Synthesized Probe
  source 1..120: mol_type = other DNA
aatcatgagataattccttcccttcctgctttctctttcccaggcctttttactaccctttcatcatctcggaaactaaatcatagttgtcaaaatggaaggcaaagaaacagccttagg

SEQ ID NO: 4230 - DNA, 120 bp, synthetic construct
  misc_feature 1..120: note = Artificially Synthesized Probe
  source 1..120: mol_type = other DNA
ccgagagctcctataacctgatttctaggaatctaattttaaacatcctcacagctagcacatcacaaaaatacagagctccaaatgccgtaacacaagtgctaacaacacctagccaaa

SEQ ID NO: 4231 - DNA, 120 bp, synthetic construct
  misc_feature 1..120: note = Artificially Synthesized Probe
  source 1..120: mol_type = other DNA
tccgaagccctcagtggcttcctagtatctgacaggtaaggacttccacattctgaccccaatctaactttctgccctcagataggcacatgcatattttatctatacacaaagagtaca

SEQ ID NO: 4232 - DNA, 120 bp, synthetic construct
  misc_feature 1..120: note = Artificially Synthesized Probe
  source 1..120: mol_type = other DNA
tgggtgagtttctgttgcaattctatgtccagtgtaaataaactgtggaaaactgggagatggtacaagaaagcaaggatgccaactaaatgaatagaaagatctacaagggaaggctga

SEQ ID NO: 4233 - DNA, 120 bp, synthetic construct
  misc_feature 1..120: note = Artificially Synthesized Probe
  source 1..120: mol_type = other DNA
atgacagatccggaagcttgtctactcgaaggtccacatccaggtatgtttcacagtcatcacaactagattttcagaaatttaaaactcctaatgaagaaacacaaacctgcacgtctc

SEQ ID NO: 4234 - DNA, 120 bp, synthetic construct
  misc_feature 1..120: note = Artificially Synthesized Probe
  source 1..120: mol_type = other DNA
acattaaaacctttataacgatgttttaattaccaactaacaagaaaatatctactgaatcgcgactagcagatacccaggtctgttcagcacctgtactctcccctaggtctgctgagg

SEQ ID NO: 4235 - DNA, 120 bp, synthetic construct
  misc_feature 1..120: note = Artificially Synthesized Probe
  source 1..120: mol_type = other DNA
tcttacaggaacactccataaatcttacactgaattcactcatccttccacacaatctgctgataagaggtaaataatcaagtggaaatcactcaaagaagcgctttcctcccccaacag

SEQ ID NO: 4236 - DNA, 120 bp, synthetic construct
  misc_feature 1..120: note = Artificially Synthesized Probe
  source 1..120: mol_type = other DNA
ggcacccacccagtctcctaatcataacagacattcacagcaacaccacgaaaaagaaactactgctctgacctggaaaaatgaaatttaaaacagaaaacacacaggttgtaactaaaa

SEQ ID NO: 4237 - DNA, 120 bp, synthetic construct
  misc_feature 1..120: note = Artificially Synthesized Probe
  source 1..120: mol_type = other DNA
cactcatacaacacaacacatacaacatacatgcaactcacaacatacacatacaacacactcatacagcacatgtacaacacatgcaactcacattcaacacgacatacacgtaccaca

SEQ ID NO: 4238 - DNA, 120 bp, synthetic construct
  misc_feature 1..120: note = Artificially Synthesized Probe
  source 1..120: mol_type = other DNA
attcaagcatgtttatcatctgctccatgaattacaataatatagcataaacccttttttcattttacacccactttggtgtggggtgctccaaaacaggggccaggagcctcagtcatc

SEQ ID NO: 4239 - DNA, 120 bp, synthetic construct
  misc_feature 1..120: note = Artificially Synthesized Probe
  source 1..120: mol_type = other DNA
cgaatgttcatctttattaatgatgagctacccattttctgactgaggaaacggaaagttgtcactgcctaacagcaatactcaaaacagcctgtatgaaaggaaaaggcatatctgtgc

SEQ ID NO: 4240 - DNA, 120 bp, synthetic construct
  misc_feature 1..120: note = Artificially Synthesized Probe
  source 1..120: mol_type = other DNA
tatcattcagggtatatgaagtaaacatgtagagagaaatgaccacacacacctgaaaccaggtctcatttcaaaaccgtttcctaccttggatttgcttaatttacttcatgaggtgcc

SEQ ID NO: 4241 - DNA, 120 bp, synthetic construct
  misc_feature 1..120: note = Artificially Synthesized Probe
  source 1..120: mol_type = other DNA
acgtcatagacacatggacggaggaaacaggccacagacgcatggacggaggaaacaccacagacacacggacgaaagaaacaccaccgacgcagggacggaagaaacaccacagatgca

SEQ ID NO: 4242 - DNA, 120 bp, synthetic construct
  misc_feature 1..120: note = Artificially Synthesized Probe
  source 1..120: mol_type = other DNA
ctgatgaaactaaaccctgcccagcctcctgattctagaaggtgctatacagaaaagctaactcggaggggttgcatttcttttgtcatccatgacacacataaaaaaaaattacatgta

SEQ ID NO: 4243 - DNA, 120 bp, synthetic construct
  misc_feature 1..120: note = Artificially Synthesized Probe
  source 1..120: mol_type = other DNA
gcatgaaaggaaacttttaagatattgagaccatcactggaggattccaggaacccattacagatcattgctgttcctaataacaggaaatgaattctaaaatcccaacagggacggtga

SEQ ID NO: 4244 - DNA, 120 bp, synthetic construct
  misc_feature 1..120: note = Artificially Synthesized Probe
  source 1..120: mol_type = other DNA
agaccaacacaacaatagtaggggcttcaaaaccccactttcagcactggagatcatctagacagaaaataacaacaaaatatcgaatttaaagtacagtatagaccaaatggacctaac

SEQ ID NO: 4245 - DNA, 120 bp, synthetic construct
  misc_feature 1..120: note = Artificially Synthesized Probe
  source 1..120: mol_type = other DNA
gctgaattctacaaatttttatttcaattcttctcaaactattccaaaaatattgaagaggatggaattctgccaagttcattcttcaaggccagcattaccctgataccaaagtaagac

SEQ ID NO: 4246 - DNA, 120 bp, synthetic construct
  misc_feature 1..120: note = Artificially Synthesized Probe
  source 1..120: mol_type = other DNA
gttaaagatctctatgaggaaaataatattctaccctctgagggtagaatagtggattctagagacaggaaagggtggcgggaagggagaaagggagaggttaactaatggatacaaaat

SEQ ID NO: 4247 - DNA, 120 bp, synthetic construct
  misc_feature 1..120: note = Artificially Synthesized Probe
  source 1..120: mol_type = other DNA
gtctctgatttttttatttaaaaaggaaagcttatgagagtaggtaatgaaaataaatattcacacaactcggaacaggggatggtgaaacataaagccccagcctggccaggtgtccag

SEQ ID NO: 4248 - DNA, 120 bp, synthetic construct
  misc_feature 1..120: note = Artificially Synthesized Probe
  source 1..120: mol_type = other DNA
ccatgctccccacacccgtgctccccgcacccatctctgctccccacgcccatgctccccgcacccatcctccccccacccatgctccccgcgcccatgctccccgcacccatgctcccc

SEQ ID NO: 4249 - DNA, 120 bp, synthetic construct
  misc_feature 1..120: note = Artificially Synthesized Probe
  source 1..120: mol_type = other DNA
cagatttcctctgtacgcccttcttgatagtcactgtcacctggaatcgcctggataaatggaggtaaagaaaataaatggaggaccacattggaggacagagtggaagcggctatttac

SEQ ID NO: 4250 - DNA, 120 bp, synthetic construct
  misc_feature 1..120: note = Artificially Synthesized Probe
  source 1..120: mol_type = other DNA
ttacagggatgtgaatttccatgcgatgagaaagggaatggggaaataaaacaaggattcaaaacagattgttctgaattgttttgcctgtgtgcttcctgggagtggtaaagtcaagaa

SEQ ID NO: 4251 - DNA, 120 bp, synthetic construct
  misc_feature 1..120: note = Artificially Synthesized Probe
  source 1..120: mol_type = other DNA
caacagtgagctgatggccttccactctaagttccaactgcatggagtgtgtattccatgaatgcttgttaaatgaatgattcacataataaggtcttctgtgctgacctttgctggtct

SEQ ID NO: 4252 - DNA, 120 bp, synthetic construct
  misc_feature 1..120: note = Artificially Synthesized Probe
  source 1..120: mol_type = other DNA
gtccggcccacagtcttcaatctttgaattaagacacaaaaaccatcttccaagctattagcgaaacaaaaaatgatttaaaaccaggagcccaaaagaaaagacctaccatcagtcaca

SEQ ID NO: 4253 - DNA, 120 bp, synthetic construct
  misc_feature 1..120: note = Artificially Synthesized Probe
  source 1..120: mol_type = other DNA
tgattaaaaaaaatcagttctaaaaaaagagacgacccatttgaaagcagctgggaggaggaagacagtgactcacagaatccaaccgcttgtagcctcggaaccataacaagaatatga

SEQ ID NO: 4254 - DNA, 120 bp, synthetic construct
  misc_feature 1..120: note = Artificially Synthesized Probe
  source 1..120: mol_type = other DNA
tttgttttttcagagtaaactatttcttttcaatgaaaataatgtgtacagagtcctcaggaccttctcttaggctctggaaggtggtcccctggtcagctcttacacaggcgtgtgact

SEQ ID NO: 4255 - DNA, 120 bp, synthetic construct
  misc_feature 1..120: note = Artificially Synthesized Probe
  source 1..120: mol_type = other DNA
caaaataattcagcacctcctaaacaaatgggaaagagctccttctgaagcatgcactgcccaaaaagatcagtgaccagtcaacagagaaacttacttcctaatttgaatcaacagcta

SEQ ID NO: 4256 - DNA, 120 bp, synthetic construct
  misc_feature 1..120: note = Artificially Synthesized Probe
  source 1..120: mol_type = other DNA
cctcaggggaatgctctactctttccttcagtctatgttatgtgcttaaaacggaactttttccatcctcctctgtaggaaatgagcactggaaattccacatatgtttctataatattt

SEQ ID NO: 4257 - DNA, 120 bp, synthetic construct
  misc_feature 1..120: note = Artificially Synthesized Probe
  source 1..120: mol_type = other DNA
tggaaggaaaaatataattaggcttcctgcatgcaaacacacacacccctttctctgcctggtctctcaataagaaactaactcattaagccctttttaaaaaacctgtacagacgcaag

SEQ ID NO: 4258 - DNA, 120 bp, synthetic construct
  misc_feature 1..120: note = Artificially Synthesized Probe
  source 1..120: mol_type = other DNA
taaatgcacatcaaacatttcagatttgggaacttcagtggttttggggaaaagacctggcaaagcccgatctgaaacttatgacagttgagcacatgatctccgccatgaagagcaaat

SEQ ID NO: 4259 - DNA, 120 bp, synthetic construct
  misc_feature 1..120: note = Artificially Synthesized Probe
  source 1..120: mol_type = other DNA
ggtgccgggaccctgggctccgggggtgcgggagcgcacggggccgcggaggtgtgaaattctccgctctgcctgcccggggtggagggggcaaagcctggggggtgccggcgcgccagg

SEQ ID NO: 4260 - DNA, 120 bp, synthetic construct
  misc_feature 1..120: note = Artificially Synthesized Probe
  source 1..120: mol_type = other DNA
cttctatcgattaaagataaagcgatcagcagtgaatttatccttcgtgtggatgaactcggccagcccgggctgtggggggtttgggaactgtaaatattctccaaagcgccgccgctt

SEQ ID NO: 4261 - DNA, 120 bp, synthetic construct
  misc_feature 1..120: note = Artificially Synthesized Probe
  source 1..120: mol_type = other DNA
ttgggtaagcagtggagaggcacagaatggcttcctctgttgatctaccgcgtcaaatctgtatattataatttcaggttaaagggtaagagttgtaagcaaaatgagtactacgtcaaa

SEQ ID NO: 4262 - DNA, 120 bp, synthetic construct
  misc_feature 1..120: note = Artificially Synthesized Probe
  source 1..120: mol_type = other DNA
ttcaatatgttttgttgtttcctgggtacttgtgcgtacaaaaactgagcatagtgatttcacgtgtgctcatgacaaaagactttaatttctagggaagttaagcagatgggctttggc

SEQ ID NO: 4263 - DNA, 120 bp, synthetic construct
  misc_feature 1..120: note = Artificially Synthesized Probe
  source 1..120: mol_type = other DNA
accccgtgactttcagttacataaaccaggagattgtttctttgaactgagttttctgtccctgacaagcaaatgggatgtatgggcttttagtttcttcagacatttccacattaaacc

SEQ ID NO: 4264 - DNA, 120 bp, synthetic construct
  misc_feature 1..120: note = Artificially Synthesized Probe
  source 1..120: mol_type = other DNA
gaaaatagaaatagaaaatcggaagaaacacatgtgataaccatgaggatggatgtaattctctgggcatcacgtttgacactgagcttccagggagtcaagtcaacaaaacccaaaact

SEQ ID NO: 4265 - DNA, 120 bp, synthetic construct
  misc_feature 1..120: note = Artificially Synthesized Probe
  source 1..120: mol_type = other DNA
tcgtgtgtcctgcagacaacagcagtttctcaagtttcacgtgccttcacgtttcctctgagtctttgcatctaaatgcccagacacctgttttagctgaaggaagtgacttgttctggt

SEQ ID NO: 4266 - DNA, 120 bp, synthetic construct
  misc_feature 1..120: note = Artificially Synthesized Probe
  source 1..120: mol_type = other DNA
tctcccgctgcttccgagttgtgggtgctggagacaagcacagcggcaggttctttaccttttttcttggtctttaatatgaaacctttagctctttaaaaataatttccattttgtaac

SEQ ID NO: 4267 - DNA, 120 bp, synthetic construct
  misc_feature 1..120: note = Artificially Synthesized Probe
  source 1..120: mol_type = other DNA
tcataccatattaagtaaagagaacggactataagacagtatgaatactttcatcccatttccctaaagctactgagtttggagcataaagaccagactggaaggataccgactccagaa

SEQ ID NO: 4268 - DNA, 120 bp, synthetic construct
  misc_feature 1..120: note = Artificially Synthesized Probe
  source 1..120: mol_type = other DNA
actgctcttctgagtttgtgtactacccacaacgcgtcatacttctgagtcttacgggacttctttacgttttcattcagtaaaaagactgcaagatatcataaagcagacagggaagga

SEQ ID NO: 4269 - DNA, 120 bp, synthetic construct
  misc_feature 1..120: note = Artificially Synthesized Probe
  source 1..120: mol_type = other DNA
gcgggtctgcggtgggatggggggctctgcggtgggatgggcgggtctgcggtgggatggggagctctgcggtgggatgggcgggtctgcggtgggatgggcgggtctgcggtgggatgg

SEQ ID NO: 4270 - DNA, 120 bp, synthetic construct
  misc_feature 1..120: note = Artificially Synthesized Probe
  source 1..120: mol_type = other DNA
cgttggctgccagatctttgctttctgacaacttttattatatttgttacatctcttgagattcttctcacctacaatctattttgctctctctgtatctggtggtataacgggaggtga

SEQ ID NO: 4271 - DNA, 120 bp, synthetic construct
  misc_feature 1..120: note = Artificially Synthesized Probe
  source 1..120: mol_type = other DNA
aaggcgattgtgcagagtgggctcagggaggacgtcacaggaaaagtaacaaaagaaaccaaaataaaaaggaacagaaatggatcgattgatctaatgaaaacatttcgaatcttttct

SEQ ID NO: 4272 - DNA, 120 bp, synthetic construct
  misc_feature 1..120: note = Artificially Synthesized Probe
  source 1..120: mol_type = other DNA
ttaaaaagaattcaaattggctaaatttagtttctgaaaaatgtccagtccaaaaatagacctgttccgaaatatttgtcactgggccccggctcgttttgtctgagaaggtgagttggc

SEQ ID NO: 4273 - DNA, 120 bp, synthetic construct
  misc_feature 1..120: note = Artificially Synthesized Probe
  source 1..120: mol_type = other DNA
actttatagtaagtccttataggaagttcatctgacacttttttcaggcccattttttttctccttaaagaagtggtcatttgcttctggcttagaagagggtctccctccagggctctg

SEQ ID NO: 4274 - DNA, 120 bp, synthetic construct
  misc_feature 1..120: note = Artificially Synthesized Probe
  source 1..120: mol_type = other DNA
caattattatcatgtgaaaaacggcagaaactgcagtcattgtgtggttaccactttcctacacctcttccttaagggaacagattacagctctgtcttttaacttggtgtatttggggc

SEQ ID NO: 4275 - DNA, 120 bp, synthetic construct
  misc_feature 1..120: note = Artificially Synthesized Probe
  source 1..120: mol_type = other DNA
acacttgcgtgtcctctaagatgatccaagataatgaaatagataaatacttgttattttccttgaggtcttaaaaaatcctgcacagagaaagctgggtatgttgagtgggccgccgtg

SEQ ID NO: 4276 - DNA, 120 bp, synthetic construct
  misc_feature 1..120: note = Artificially Synthesized Probe
  source 1..120: mol_type = other DNA
actgatgagtcattcattcatttgatgtatttaccaataacccccagtgtgtccctcactgggtttggccttgagtgtgcttttgtaaatacagaggacagtgttttctggatttagagt

SEQ ID NO: 4277 - DNA, 120 bp, synthetic construct
  misc_feature 1..120: note = Artificially Synthesized Probe
  source 1..120: mol_type = other DNA
tcgttgtgggaccgcctttgagggccaggttgggttagaaaccatggagctgacattgagaatgttctctgatctgtttttaattagcacagatgcaatcttatatattagagaagattt

SEQ ID NO: 4278 - DNA, 120 bp, synthetic construct
  misc_feature 1..120: note = Artificially Synthesized Probe
  source 1..120: mol_type = other DNA
ccctttctgctttaaacttgctccaaaaaattcttccctcccctgaactcggaccatttcctcacttttgggtcccttttagcagtgagttatccactttacatttatagaatatgtaaa

SEQ ID NO: 4279 - DNA, 120 bp, synthetic construct
  misc_feature 1..120: note = Artificially Synthesized Probe
  source 1..120: mol_type = other DNA
cctgttattttatctgtgaaatggagatgatggtaatttcaccacttaccatatgtggctgttggaaagatcagaatgaaaatgagctcactgaagcctaaaaagcaggagtggccatcc

SEQ ID NO: 4280 - DNA, 120 bp, synthetic construct
  misc_feature 1..120: note = Artificially Synthesized Probe
  source 1..120: mol_type = other DNA
ctaaccactaccctccccaacagccttcccattatcaataacccccacaaccttcccattatcaatacccccaacagccttcccattatcaatacccctgacagccttcccattatcaat

SEQ ID NO: 4281 - DNA, 120 bp, synthetic construct
  misc_feature 1..120: note = Artificially Synthesized Probe
  source 1..120: mol_type = other DNA
attgagagtctgtttagtaatcagagttaattttggtgcttttttgtataagccgaacattgcaaatacatctctgtgtccaccttatgctgacattttccctgcagagctgactgctgc

SEQ ID NO: 4282 - DNA, 120 bp, synthetic construct
  misc_feature 1..120: note = Artificially Synthesized Probe
  source 1..120: mol_type = other DNA
cctcgaatcgggagcagactgcagttctattgcatcacggattttggcttgaaatgtagtataactctctaacgttattcacgtaataatggccgggccttctgtaagattgtagttttt

SEQ ID NO: 4283 - DNA, 120 bp, synthetic construct
  misc_feature 1..120: note = Artificially Synthesized Probe
  source 1..120: mol_type = other DNA
tatcttccaggcagtcaaaggctgtgctatgtaactgtcacagaactcctgtgtgtctctttgtgagcaaagtttctcatgctcacgtctagaaaaacaaaacataatcctagaagtaat

SEQ ID NO: 4284 - DNA, 120 bp, synthetic construct
  misc_feature 1..120: note = Artificially Synthesized Probe
  source 1..120: mol_type = other DNA
gtaggaattaagtcacttgcaatacttcacgagttattcaaagagggattggagaaaaaaaaaaagggaagacgactagtttagggaatctggaatccagaaatctggtgggtttaggag

SEQ ID NO: 4285 - DNA, 120 bp, synthetic construct
  misc_feature 1..120: note = Artificially Synthesized Probe
  source 1..120: mol_type = other DNA
catttttaagagtctagtttgttccaatagggtgtgtatgtcttaagacttcctaacctgtaaccacatttagtttttgtggtttaaatagactggcgaggtactgagtcatgcctctcc

SEQ ID NO: 4286 - DNA, 120 bp, synthetic construct
  misc_feature 1..120: note = Artificially Synthesized Probe
  source 1..120: mol_type = other DNA
tagtgagcaaattttattgaaaagtttgaattggcatttagaacgtatttagtaaaattggagtattgcagaaagggacttgaggaaatggggcagctacagtgggtggggtgcccgtct

SEQ ID NO: 4287 - DNA, 120 bp, synthetic construct
  misc_feature 1..120: note = Artificially Synthesized Probe
  source 1..120: mol_type = other DNA
ttgttggtcaaccctcgtgtgtgttcaagtcacacctatgctggaggccatccttcctctatgtgagctgcagcgttctttgaaattcgtcacataaatctttctaatgtcctccggaat

SEQ ID NO: 4288 - DNA, 120 bp, synthetic construct
  misc_feature 1..120: note = Artificially Synthesized Probe
  source 1..120: mol_type = other DNA
aaagcagcttttgttttaccagagtcaatcaccaaagaactaagctgtcctgtcaacactgccagcgtcagacagtttagcagatgcagtccagatggacactgtgtccatcctgaggct

SEQ ID NO: 4289 - DNA, 120 bp, synthetic construct
  misc_feature 1..120: note = Artificially Synthesized Probe
  source 1..120: mol_type = other DNA
aagtaaccaaagacattaactcagaaaagcaacacttctctgatgtataatttagagggacatggtggagtgaaggaagatgtgcattctctttcagctctctagtgttttccccacttc

SEQ ID NO: 4290 - DNA, 120 bp, synthetic construct
  misc_feature 1..120: note = Artificially Synthesized Probe
  source 1..120: mol_type = other DNA
gcacaagcaggtggtctgtcagactagcaatagtgagtgtgagcagctcggatctctagagaaagaaaatcagctcagaaaccttttgaggttaataaataatgataaacagaagcattt

SEQ ID NO: 4291 - DNA, 120 bp, synthetic construct
  misc_feature 1..120: note = Artificially Synthesized Probe
  source 1..120: mol_type = other DNA
cgtttttataaagaagaaacatacattatccctatttattcagattcatttgcacagcacagtgttgctacaatttgcctggagttgtggagttagtgaggggctgcggaatgctcatct

SEQ ID NO: 4292 - DNA, 120 bp, synthetic construct
  misc_feature 1..120: note = Artificially Synthesized Probe
  source 1..120: mol_type = other DNA
catttctccatttcgtgaagttgtgacaggtcccttggtcctcctgtgctggggtcagaatcaagtagtgattgtaaaattacctaatttatgtcagtgattgctaacatttccataaac

SEQ ID NO: 4293 - DNA, 120 bp, synthetic construct
  misc_feature 1..120: note = Artificially Synthesized Probe
  source 1..120: mol_type = other DNA
taaccataaaaattgaagtggcacatatagaataaacaatggaaagggcagtgtggagcgtgtccttctaaactgattgtgtctggtggggacagaattctaggctcatctgcaatttta

SEQ ID NO: 4294 - DNA, 120 bp, synthetic construct
  misc_feature 1..120: note = Artificially Synthesized Probe
  source 1..120: mol_type = other DNA
gaattaagtgctctgcaaatcacttcttccgctgaacggtgtacatcagagggttttgtgtgtatgtgtaggcagagcttcctaattcctctgggtggtggtgttagagctagagtacat

SEQ ID NO: 4295 - DNA, 120 bp, synthetic construct
  misc_feature 1..120: note = Artificially Synthesized Probe
  source 1..120: mol_type = other DNA
ttgccattctaactggtgtgagatggtgtctcattgtggttttgatttgcatttctctgatggccagtgacgatgagcattttttcatgtgttttttggctgcataaatgtcttcttttg

SEQ ID NO: 4296 - DNA, 120 bp, synthetic construct
  misc_feature 1..120: note = Artificially Synthesized Probe
  source 1..120: mol_type = other DNA
gtggtttgtagttctcctcgaagaggtccttctcgtcccttgtaagttggattcctaggtattttattctctttgaagcaattgtgaatgggagttcactcatgatttggctctgtgttt

SEQ ID NO: 4297 - DNA, 120 bp, synthetic construct
  misc_feature 1..120: note = Artificially Synthesized Probe
  source 1..120: mol_type = other DNA
ctgttattggtctattcagagattcagcttcttcctggtttagtcttgggagagtgtatgtgttgaggaatttatccatttcttctagattttctagtttatttgcatagaggtgtttgt

SEQ ID NO: 4298 - DNA, 120 bp, synthetic construct
  misc_feature 1..120: note = Artificially Synthesized Probe
  source 1..120: mol_type = other DNA
tgctcctgtattgggtgcatatatatttaggatagttagctcttcttgttgaattgatccctttaccattatgtaatggccttctttgtctcttttgatctttgtttgtttcaagtctgc

SEQ ID NO: 4299 - DNA, 120 bp, synthetic construct
  misc_feature 1..120: note = Artificially Synthesized Probe
  source 1..120: mol_type = other DNA
tcttggaggctttgctcatttctttttattcttctctgaacttcccttctcgtttcatttctttcatttcatcttccaccgctgataccctttcttccagttgatcgcatcggctcctga

SEQ ID NO: 4300 - DNA, 120 bp, synthetic construct
  misc_feature 1..120: note = Artificially Synthesized Probe
  source 1..120: mol_type = other DNA
ggatataatcttgtggtgtgccttttttcaagcccgtcagaaaagcgcagtatgcgggtgggagtgacccgattttccaggtgccgtccgtcacccctttctttgactaggaaagggaac

SEQ ID NO: 4301 - DNA, 120 bp, synthetic construct
  misc_feature 1..120: note = Artificially Synthesized Probe
  source 1..120: mol_type = other DNA
tctcaagcagacactaacagggaatatctgtagcagggccacatttctctgtgtcatttgcagagttcattgcatagtcttccagtcttgcctgcattccttttttatattttattttta

SEQ ID NO: 4302 - DNA, 120 bp, synthetic construct
  misc_feature 1..120: note = Artificially Synthesized Probe
  source 1..120: mol_type = other DNA
gcttgtgctagggttttgtgcaagggaactagcatctggcaatgaattacatttctctccatgaggttgtatagtaccttatgattttcaatgcattttgtagctttgtttcagcccagg

SEQ ID NO: 4303 - DNA, 120 bp, synthetic construct
  misc_feature 1..120: note = Artificially Synthesized Probe
  source 1..120: mol_type = other DNA
taatgtttgtgctataattttttgtttcttttgtgaaaaaggagaagttgagtgcatttaggagataggataataccactgctattcaaaactgggagctggggggatggagagaggctg

SEQ ID NO: 4304 - DNA, 120 bp, synthetic construct
  misc_feature 1..120: note = Artificially Synthesized Probe
  source 1..120: mol_type = other DNA
ccgcatgaccgcatgataacataaagctgatgcaattgactaaagttacaacaaagattctgccttttctaggacatcatctcacaatgacagataatgtgaccaacacaaggtctgtaa

SEQ ID NO: 4305 - DNA, 120 bp, synthetic construct
  misc_feature 1..120: note = Artificially Synthesized Probe
  source 1..120: mol_type = other DNA
ttccaaggcttgagggccatcgccagaataacacacttatgttccatccaggtattaatgcaatctaagttttgcatcttacagctattaaaaaagtcattgacactgaacccagctttc

SEQ ID NO: 4306 - DNA, 120 bp, synthetic construct
  misc_feature 1..120: note = Artificially Synthesized Probe
  source 1..120: mol_type = other DNA
aaggtacaataagccgcatctttatagtgttctttttctagtttgtaaacttgacctcaggaggtgtgagaagaaagtttcttattttacagccactaaaaaaagggcacgtcctggctg

SEQ ID NO: 4307 - DNA, 120 bp, synthetic construct
  misc_feature 1..120: note = Artificially Synthesized Probe
  source 1..120: mol_type = other DNA
gaatgaatgaatgagggaacgggagcaccaggcgatatcacgtaccccgtggaggtgtgatgtgtcaccgtcaccgagggctgtgagccttttctgcagagagcttcgtcaggaatgccc

SEQ ID NO: 4308 - DNA, 120 bp, synthetic construct
  misc_feature 1..120: note = Artificially Synthesized Probe
  source 1..120: mol_type = other DNA
gaacttggaatattattctaggtaaactgacgatgctttattcaattttccttcacttagcaaacctccctacccctcattcatttatccaacttgatgaatcttcacccagcctcagct

SEQ ID NO: 4309 - DNA, 120 bp, synthetic construct
  misc_feature 1..120: note = Artificially Synthesized Probe
  source 1..120: mol_type = other DNA
catgctgtttggtgatgaagtgtggtagaagatgggtgaaggatgaagctggtacgtcgctcccaaatcatgaatctgatcctgtattttctcacacagcgtcctgttgttattctgtag

SEQ ID NO: 4310 - DNA, 120 bp, synthetic construct
  misc_feature 1..120: note = Artificially Synthesized Probe
  source 1..120: mol_type = other DNA
tagcaaagaaatacagcagaagtcacttattttcactgggtcgtggtgggttctgttctactttatcgaaaggttaatgcatctttgtgactttttcccatgggcttttgttatgcttcc

SEQ ID NO: 4311 - DNA, 120 bp, synthetic construct
  misc_feature 1..120: note = Artificially Synthesized Probe
  source 1..120: mol_type = other DNA
tgcagagacaggtgaagctgtaagagatgcttggagatgacgtaaccaaaatgaaaagatatttgttgggtctatgtatctcaagtttgtttcccattttctggccgcaagtgtgagaaa

SEQ ID NO: 4312 - DNA, 120 bp, synthetic construct
  misc_feature 1..120: note = Artificially Synthesized Probe
  source 1..120: mol_type = other DNA
aagtaaaaggaataaattaataatcagccctaatcctgccacagatatttgattaccagtggggttccaccatgttttctgagtgaatgaacctcacttcccatttctgggaattgtgtc

SEQ ID NO: 4313 - DNA, 120 bp, synthetic construct
  misc_feature 1..120: note = Artificially Synthesized Probe
  source 1..120: mol_type = other DNA
cagctgtcactgcgttaagcaagtagttggatttgctgagttgctggatgtacctgtacgatgttgatagacactgcatttaccaatgtgaattttatcagcctttcatgttttctactt

SEQ ID NO: 4314 - DNA, 120 bp, synthetic construct
  misc_feature 1..120: note = Artificially Synthesized Probe
  source 1..120: mol_type = other DNA
agaagattattagttgactttgttacgcatcagcagtcatttcccttagctgtattttactatcagccctcctttcttcttgccgctggctcttctcccatgccttccttgttaattttt

SEQ ID NO: 4315 - DNA, 120 bp, synthetic construct
  misc_feature 1..120: note = Artificially Synthesized Probe
  source 1..120: mol_type = other DNA
ttggatgtatttttgatttccaacacctctattattttgttttacagaaccaaggacaacatcttccttgcacttcctgtggccatgctggtttaacctgttacggcttctcagctttgt

SEQ ID NO: 4316 - DNA, 120 bp, synthetic construct
  misc_feature 1..120: note = Artificially Synthesized Probe
  source 1..120: mol_type = other DNA
atttagtttgggagagaaaagttaatattgccagtgacttggcatacggaccacagaacactgtttagatacctgactgcattttctcaagtaaccatctggctccagtgggttttcgtt

SEQ ID NO: 4317 - DNA, 120 bp, synthetic construct
  misc_feature 1..120: note = Artificially Synthesized Probe
  source 1..120: mol_type = other DNA
cctgggagaattcttctgtcacggcccctccgagactccgaactgacttctgcctttcacggtaccctcaggatttccctgcgactgcctggatgctttcctgatgtttgatgctgttct

SEQ ID NO: 4318 - DNA, 120 bp, synthetic construct
  misc_feature 1..120: note = Artificially Synthesized Probe
  source 1..120: mol_type = other DNA
ttattaaggagtaacttttatgcaataaaatgaacaggtattaagtgagttccatgagttttgacaattgaacacgaccctgtagtcaccacccaagaagaagacgtcccgtcatctccg

SEQ ID NO: 4319 - DNA, 120 bp, synthetic construct
  misc_feature 1..120: note = Artificially Synthesized Probe
  source 1..120: mol_type = other DNA
ccagtcttttgtactttaactgctcccgaggcccctgttgcatcttcaccaggctgtttgcatcagtttcttgtctgtcagctgaaagatctgcaaaggggctggttctctgtcctggca

SEQ ID NO: 4320 - DNA, 120 bp, synthetic construct
  misc_feature 1..120: note = Artificially Synthesized Probe
  source 1..120: mol_type = other DNA
gaaagtaaacgcttgttgagagccttcccacttgatattttccttagaatcttggagtgtttttgtgtgtgtgcatgtcctgacctaggatttcaggtcgctggggacagtatgacacat

SEQ ID NO: 4321 - DNA, 120 bp, synthetic construct
  misc_feature 1..120: note = Artificially Synthesized Probe
  source 1..120: mol_type = other DNA
gaattattaaaagggcttaagtctcatgaattaatgctgtaattgcagtgattggattcgcatttctagtgctttaatgaaagccgcagtgatggccagacagaagcagcgtaccgagaa

SEQ ID NO: 4322 - DNA, 120 bp, synthetic construct
  misc_feature 1..120: note = Artificially Synthesized Probe
  source 1..120: mol_type = other DNA
ataattatgatcaatacaactttgttggattaatgaagcagtttaaggaaataagaaaagcatctccgtgaggagatcatctgaggagtgcagcagtggaccttagggccttggattcag

SEQ ID NO: 4323 - DNA, 120 bp, synthetic construct
  misc_feature 1..120: note = Artificially Synthesized Probe
  source 1..120: mol_type = other DNA
ctgtgatgagtggctgtccttagcccactgtgccttcccactctccagcaatgtgactttcagctcattttgatgagaaataacgttcacaataggctgtttctctcctgggggttcaca

SEQ ID NO: 4324 - DNA, 120 bp, synthetic construct
  misc_feature 1..120: note = Artificially Synthesized Probe
  source 1..120: mol_type = other DNA
attttacacatagtctaaataaaggaaaggtgggtggggtcaaaagaggtagagaatgattcccgaaaaggtaggcatttcttgggaccttaaatcctctctagggtttgagtaaggtga

SEQ ID NO: 4325 - DNA, 120 bp, synthetic construct
  misc_feature 1..120: note = Artificially Synthesized Probe
  source 1..120: mol_type = other DNA
aataggaaaaggcctctctgttgtaggtgattaagcactaggatatcccatgcatggccctgtaggattctcattgtggagatctttaaaaaccagagggagaatcatatatttgtttaa

SEQ ID NO: 4326 - DNA, 120 bp, synthetic construct
  misc_feature 1..120: note = Artificially Synthesized Probe
  source 1..120: mol_type = other DNA
gctcctggcctctgcctttttctaaaagctctagacacttacctgactgattcgtaatgggaatgatttgccccctaggcaaactattattgtttgggtagagtttttcttttctcattt

SEQ ID NO: 4327 - DNA, 120 bp, synthetic construct
  misc_feature 1..120: note = Artificially Synthesized Probe
  source 1..120: mol_type = other DNA
ctgggtttcccatctagcccttccgttttgaggaagaaaaagatagaatgatgcattttgccaattccttttacagagagtttttgccaagattgtttggaaaccacatggaaaattggg

SEQ ID NO: 4328 - DNA, 120 bp, synthetic construct
  misc_feature 1..120: note = Artificially Synthesized Probe
  source 1..120: mol_type = other DNA
tcgtgggaacttttcagtgcatttcagagaagtcgtgatggattaaacaccatttgcttcgcgtaaccattgttgagtgacacagcagactctcctactcaattacaatttgaaatatga

SEQ ID NO: 4329 - DNA, 120 bp, synthetic construct
  misc_feature 1..120: note = Artificially Synthesized Probe
  source 1..120: mol_type = other DNA
cataactaaaaggcaatttcttagctacttagctgtctctttttactgctacccattttccctttgaacttaaagctactttcaaaatgacgggggtgctggtgcacaggaataaggaag

SEQ ID NO: 4330 - DNA, 120 bp, synthetic construct
  misc_feature 1..120: note = Artificially Synthesized Probe
  source 1..120: mol_type = other DNA
cttgtgggaggcacccaccctaggtttttaagcagtgtgctaacactttctctttgagagaaatacttgtgaaatacttgtttagccagtaataacccttatatgtgacccttaggtact

SEQ ID NO: 4331 - DNA, 120 bp, synthetic construct
  misc_feature 1..120: note = Artificially Synthesized Probe
  source 1..120: mol_type = other DNA
ctctctctggaacatgtggactttccacagtgaatctcatgctgtttactctccccacttctaatctttgcagctttcctccgtcttttaattcctccaattttactgattcttgcaata

SEQ ID NO: 4332 - DNA, 120 bp, synthetic construct
  misc_feature 1..120: note = Artificially Synthesized Probe
  source 1..120: mol_type = other DNA
tttctgtctgacacacttctagttcagtaatgcagttatgttccttagggacatgtgtttacacggaattgcaaacttgattaggagatcctttgtcaatgttgacatctagaggtggct

SEQ ID NO: 4333 - DNA, 120 bp, synthetic construct
  misc_feature 1..120: note = Artificially Synthesized Probe
  source 1..120: mol_type = other DNA
atcaaaggatataaggggaagaaaataaaccacggcttcgctgagccatgggaccaaactgactctgaggctctgcactttgccttcctgggagccagtaagttgcctttactgttaggc

SEQ ID NO: 4334 - DNA, 120 bp, synthetic construct
  misc_feature 1..120: note = Artificially Synthesized Probe
  source 1..120: mol_type = other DNA
agaatctctggttctcaaatgaggagtggttgatggctgtgtgtcgtgtaagtgacaaaacgtgataatagaacacatgtaatttttcataataccccggtatgctttgctatagctgct

SEQ ID NO: 4335 - DNA, 120 bp, synthetic construct
  misc_feature 1..120: note = Artificially Synthesized Probe
  source 1..120: mol_type = other DNA
atcaaaatcaatagaggcagtgaaaagtagaatagacattataacacctcagttttggtaactgagttaagcgactggccccaggttgtgtagtgcataagatcaaatggacacacttgg

SEQ ID NO: 4336 - DNA, 120 bp, synthetic construct
  misc_feature 1..120: note = Artificially Synthesized Probe
  source 1..120: mol_type = other DNA
aaaagtagatcattagaagctaaagaaggaggtaatagaaaggggggtgtcgcagtgcatgtgtgctgctacaaccaaatgcttgagactggtttctttataaacagcaggagtttattt

SEQ ID NO: 4337 - DNA, 120 bp, synthetic construct
  misc_feature 1..120: note = Artificially Synthesized Probe
  source 1..120: mol_type = other DNA
gcctatcgtttgatattgagggcaaataaagacattttcagacttggcaagttaacagaggccatactgaaaggaggacaagaggatacaaaagaagaatactttggagcatgtgttctc

SEQ ID NO: 4338 - DNA, 120 bp, synthetic construct
  misc_feature 1..120: note = Artificially Synthesized Probe
  source 1..120: mol_type = other DNA
aaattagcctggcgcggtggtgggcgcctgtagtcccagctcctcaggaggctgaggccggagaaaggtgtgaacctgggaggcggggctttcagtgagccaagatcgcgccgctgcact

SEQ ID NO: 4339 - DNA, 120 bp, synthetic construct
  misc_feature 1..120: note = Artificially Synthesized Probe
  source 1..120: mol_type = other DNA
aagcaaacttgccctagggtgtacctggttaaatattcaggtttctcgggcagtgggcagggccatagagctcccaagatattatgacctctgtttcaggtaccagggtgggtagagaaa

SEQ ID NO: 4340 - DNA, 120 bp, synthetic construct
  misc_feature 1..120: note = Artificially Synthesized Probe
  source 1..120: mol_type = other DNA
aacccctcatgactatatcaatagatatcgtaggacctttaagcaacatagcagccatctgtgatagaaattctaagtgaaagagaaatggcaggaaacttccgtgaaacaggtcaagat

SEQ ID NO: 4341 - DNA, 120 bp, synthetic construct
  misc_feature 1..120: note = Artificially Synthesized Probe
  source 1..120: mol_type = other DNA
ggtgactgtggattatatcatttccatgcgaaccctttcctgtttggattggtcatgaaagtgggaataggggagtggattacgtggtaatgaagttaacctataagaacaaattcacaa

SEQ ID NO: 4342 - DNA, 120 bp, synthetic construct
  misc_feature 1..120: note = Artificially Synthesized Probe
  source 1..120: mol_type = other DNA
aagagcagaatgtgaattctagaacggtggagagttgaacagtaagtgcctggaaatgaataggcaatttagactgacagtcacataaaatgtacgttaactgcttacaggaaaccaacg

SEQ ID NO: 4343 - DNA, 120 bp, synthetic construct
  misc_feature 1..120: note = Artificially Synthesized Probe
  source 1..120: mol_type = other DNA
ttattgcttagtctcactttttaatgtacattccatttttttccccataggggaggttatttaccctttttatcacattttccccatctctatccattcctcacctaggctttctcgcca

SEQ ID NO: 4344 - DNA, 120 bp, synthetic construct
  misc_feature 1..120: note = Artificially Synthesized Probe
  source 1..120: mol_type = other DNA
ccagtgggtgaagcaaacagtcacggagacggcatttcacgagatttgtcaaagggaagagaggattatttcttatttcttattccagaggtgctttgcactgatggaaaggtctaaatt

SEQ ID NO: 4345 - DNA, 120 bp, synthetic construct
  misc_feature 1..120: note = Artificially Synthesized Probe
  source 1..120: mol_type = other DNA
cccttatacgatggaaccccacttagctttatcccaaaggggaagttgcaatcacatttgtcacgtcccctaactccgaaaggatcctgggacaacatttcttcttcttttttttcttct

SEQ ID NO: 4346 - DNA, 120 bp, synthetic construct
  misc_feature 1..120: note = Artificially Synthesized Probe
  source 1..120: mol_type = other DNA
acagctgttggatcaggttgtgctgttagattctaccttgggagggtggagctttctgtgggaaactgtacacctttaggatgaacaggcacacagttaggatttgggatcagagagttc

SEQ ID NO: 4347 - DNA, 120 bp, synthetic construct
  misc_feature 1..120: note = Artificially Synthesized Probe
  source 1..120: mol_type = other DNA
cctctttgatgtcctgatttccttccttttggcttggttttattgattttcattgttgtgtttatgttccctgcttcactcatgtctgtcttggtctttattatttccttcctttcattc

SEQ ID NO: 4348 - DNA, 120 bp, synthetic construct
  misc_feature 1..120: note = Artificially Synthesized Probe
  source 1..120: mol_type = other DNA
ggacagcgccacagccaagaatcatccagaccaaaatgctgaaaaaggcttcatttgtattacctaacctataaaacttaggtatctcctggagtgtgaataagaaggagaaggagataa

SEQ ID NO: 4349 - DNA, 120 bp, synthetic construct
  misc_feature 1..120: note = Artificially Synthesized Probe
  source 1..120: mol_type = other DNA
atttattttgcaaaagaaaattctcttttgtccaggtaactgaatagatctatgttgctcagagacaaagactatgtggaaaagaaactgaggacacatttattatcgggggacctgccc

SEQ ID NO: 4350 - DNA, 120 bp, synthetic construct
  misc_feature 1..120: note = Artificially Synthesized Probe
  source 1..120: mol_type = other DNA
tgtaaaaataatcaatatttgcctggctgttggaaaccaagttctagttcagatttgtcagtctcttttctgaccctgatgaagtttgttccacctgtcccatttcatcacccatgaagg

SEQ ID NO: 4351 - DNA, 120 bp, synthetic construct
  misc_feature 1..120: note = Artificially Synthesized Probe
  source 1..120: mol_type = other DNA
ccttgtcaatcaaatattcaaaatgtgttcatagccatgaggttccccattacatgcgcacacctcagtttatgtaccagtctcttgttattgacaacaatgttcaattctccagtgata

SEQ ID NO: 4352 - DNA, 120 bp, synthetic construct
  misc_feature 1..120: note = Artificially Synthesized Probe
  source 1..120: mol_type = other DNA
tctcatgttgccatttgagttattttgtttcatatgtaagaagtaaaatttctgactttggtgccttactttaaaagcctttctttgccaacaaaccctatgtaaacattcagctgtgac

SEQ ID NO: 4353 - DNA, 120 bp, synthetic construct
  misc_feature 1..120: note = Artificially Synthesized Probe
  source 1..120: mol_type = other DNA
tttttttcatatgtttgttgattgcataaatgtcttcttttgagaagtgtctgttcatgtcctttgcccactttttgatggggttgtttgtttttttcttgtaaaatttgtttaagttcc

SEQ ID NO: 4354 - DNA, 120 bp, synthetic construct
  misc_feature 1..120: note = Artificially Synthesized Probe
  source 1..120: mol_type = other DNA
cttttgcactgatttttttgataaacacttatgttaaagctttatttcccttttcagagtgcctgtggaggaagtgagcacaactgtgtttgtgtaagaatgtcagctgcagtaggcagc

SEQ ID NO: 4355 - DNA, 120 bp, synthetic construct
  misc_feature 1..120: note = Artificially Synthesized Probe
  source 1..120: mol_type = other DNA
tcagaacatgacaggttggattatcctctttgccattttcaaagtggtaaaaaagaaaaaaattatttatggagctggtggctcctcagtgggacgagaattcgtgccttttcattggtg

SEQ ID NO: 4356 - DNA, 120 bp, synthetic construct
  misc_feature 1..120: note = Artificially Synthesized Probe
  source 1..120: mol_type = other DNA
ggagggggggctgctttcatatggatggagttaatgctcctcgtctggtactatgcactgaattgaattcaccaaacaactgagtagtgaggaataaaactttatttgaaatattgcctg

SEQ ID NO: 4357 - DNA, 120 bp, synthetic construct
  misc_feature 1..120: note = Artificially Synthesized Probe
  source 1..120: mol_type = other DNA
tttctcacaggtttggtcatttttgggtgtaagacacgttccttccttggaagactttttgtccatgagtgtgaatggatccgcacttaactcagaataaatgccgagatgtaaaggaca

SEQ ID NO: 4358 - DNA, 120 bp, synthetic construct
  misc_feature 1..120: note = Artificially Synthesized Probe
  source 1..120: mol_type = other DNA
agaaggggccgcaccttgtggataaggagtgtgtcattcatctttgtgttccagccacttttcgtggttcctgactcataataaatgtttcattgaatttattaaacaccagttttgacc

SEQ ID NO: 4359 - DNA, 120 bp, synthetic construct
  misc_feature 1..120: note = Artificially Synthesized Probe
  source 1..120: mol_type = other DNA
ctgtagtgtggacgatggtggaaattgaattaaatttatgcagactcctgatgatgtcctaaacatactttacaataatttaagggatgctggcatcgtacttcttgtctttcccctccc

SEQ ID NO: 4360 - DNA, 120 bp, synthetic construct
  misc_feature 1..120: note = Artificially Synthesized Probe
  source 1..120: mol_type = other DNA
gcgaggtgctgcctttagcaaatctgtaagcagaagttcatcacagtgattagatgctcaaaattctcatcagtgaggttacctgttattttgttaaatcaggaaaagccacatatgacc

SEQ ID NO: 4361 - DNA, 120 bp, synthetic construct
  misc_feature 1..120: note = Artificially Synthesized Probe
  source 1..120: mol_type = other DNA
gctcatgattatgacttcttcatgtttattcaccgtttcatcacccacatgggcattccctgcctctgcagctcagccttcagatctgtctccactgagatgccttttaggtctcttttg

SEQ ID NO: 4362 - DNA, 120 bp, synthetic construct
  misc_feature 1..120: note = Artificially Synthesized Probe
  source 1..120: mol_type = other DNA
gctgtgtctagctctcactctctggtgatgtcagaaagtattgactgatgagagcctaggcccattaattcactaggagttggggagtggtaatattttgattttaccttttatttctca

SEQ ID NO: 4363 - DNA, 120 bp, synthetic construct
  misc_feature 1..120: note = Artificially Synthesized Probe
  source 1..120: mol_type = other DNA
ctttctcacatgctcccctgtgtcctgcatttttaatgccataatatattggcattgtcagagcagatccattaaattctgcattctttcccttctggtaatcacttagggttctatgag

SEQ ID NO: 4364 - DNA, 120 bp, synthetic construct
  misc_feature 1..120: note = Artificially Synthesized Probe
  source 1..120: mol_type = other DNA
actttatggatgtacctctggcgggctttcgttgtgtgcaggcaggggtgttattcggcttttttgttttctgtaataatttttattggattgatttgaccaggatgatagctttctgtt

SEQ ID NO: 4365 - DNA, 120 bp, synthetic construct
  misc_feature 1..120: note = Artificially Synthesized Probe
  source 1..120: mol_type = other DNA
tttactttgtggttcacagtgaagagtattcgtcagctctgccattgcagtgaatgagttagaaaggaagtgtgtttgtgagagtgaggaattagtaatttctctattaggaagtgaagc

SEQ ID NO: 4366 - DNA, 120 bp, synthetic construct
  misc_feature 1..120: note = Artificially Synthesized Probe
  source 1..120: mol_type = other DNA
attgtttgaacattttcaggacgtttcagactgttttccaaagttgcagcatgagtttacgtttctgccagtcgtataggagggttctgatttcatcagatcctcaccagcacttgttat

SEQ ID NO: 4367 - DNA, 120 bp, synthetic construct
  misc_feature 1..120: note = Artificially Synthesized Probe
  source 1..120: mol_type = other DNA
attgtccagagacgtatgagtttcttcgtaaacgtttgttatttgtgtttgaaaataatacttatacacacttacggagtacaatgtgatgttttaatacatgtataaattgcataatgg

SEQ ID NO: 4368 - DNA, 120 bp, synthetic construct
  misc_feature 1..120: note = Artificially Synthesized Probe
  source 1..120: mol_type = other DNA
tgttgagcacatccatgtctggcttgctcttgttttgtttagggttattctatccatcttcagacatgatactagcctgtaattcttgcttctcctgtttttcttgttagggtttactac

SEQ ID NO: 4369 - DNA, 120 bp, synthetic construct
  misc_feature 1..120: note = Artificially Synthesized Probe
  source 1..120: mol_type = other DNA
gcttggatgcttgcttgcgtgtttgtttatactttgatttagacttaatgtgaatattaaaggggtaaacacttctgctaagatcttgtttagtggcacctgcaagtgtgggcctgttac

SEQ ID NO: 4370 - DNA, 120 bp, synthetic construct
  misc_feature 1..120: note = Artificially Synthesized Probe
  source 1..120: mol_type = other DNA
ctgttccagtataggatgtgccgtgtctgttccagtatagaatcttgtggtgcatgttccagtataggaatgtgcagtgtctgttctggtataggatcatgtgatgtgtgttccagtata

SEQ ID NO: 4371 - DNA, 120 bp, synthetic construct
  misc_feature 1..120: note = Artificially Synthesized Probe
  source 1..120: mol_type = other DNA
gtttgtattttaatgtttggttttgagacttccctctgtattctgggtctgagtcccctgtcagatgtgacatttgcagatatatctcccccacctttgcgttgtcttttcattttctta

SEQ ID NO: 4372 - DNA, 120 bp, synthetic construct
  misc_feature 1..120: note = Artificially Synthesized Probe
  source 1..120: mol_type = other DNA
aaatgctgcaaagaggccatgtacagagctatgtgatgaacaagtagagacgcagcaaaagatgaaagatgcactgtccagatggagttctctgtatcaaaacaacatgtttttaacata

SEQ ID NO: 4373 - DNA, 120 bp, synthetic construct
  misc_feature 1..120: note = Artificially Synthesized Probe
  source 1..120: mol_type = other DNA
aacaaaggcatgcagcctcctgccagctgtgagaattggctttggtgtaaattttgatttcctcttatgtgtgtgcagagattttgagaagggacacattggaagctaaaaaaaaaacat

SEQ ID NO: 4374 - DNA, 120 bp, synthetic construct
  misc_feature 1..120: note = Artificially Synthesized Probe
  source 1..120: mol_type = other DNA
gctttggggcagtgggctttgtagtgacacattaaatagttacagatactttaggagcaaaagaggaaattcagtgcttagtttataatagctgggtgctagagtatgagtctaacattg

SEQ ID NO: 4375 - DNA, 120 bp, synthetic construct
  misc_feature 1..120: note = Artificially Synthesized Probe
  source 1..120: mol_type = other DNA
ttaatttaataagaattcagtattcatgccctgattgctagggactgaaccagggcattacagaaacaaggcagttttctctttatgttgattctctctgtggtgggctgaaggtttgtc

SEQ ID NO: 4376 - DNA, 120 bp, synthetic construct
  misc_feature 1..120: note = Artificially Synthesized Probe
  source 1..120: mol_type = other DNA
caggcatttatgtgggatcattgactccagctatgttacgcttttcatttcctttctcttttttcagaaccgtgtattcccatgggcactttcagcatgaatgcctctgttttctattaa

SEQ ID NO: 4377 - DNA, 120 bp, synthetic construct
  misc_feature 1..120: note = Artificially Synthesized Probe
  source 1..120: mol_type = other DNA
cccattaatgataaaaactttcagtgagctagggatgggggagaacttcctgaactcaataaagaaaatctaaccaccccccaacagctaagttcttactaaatgatgagaaatttggag

SEQ ID NO: 4378 - DNA, 120 bp, synthetic construct
  misc_feature 1..120: note = Artificially Synthesized Probe
  source 1..120: mol_type = other DNA
agaggatgctcttatcaacagatggtgtggagcaatgggacctccatgtgcaacaaaatgaacccagaaccagaccttacaccctttacaaaattaacacaaaatgcaaaactataaaag

SEQ ID NO: 4379 - DNA, 120 bp, synthetic construct
  misc_feature 1..120: note = Artificially Synthesized Probe
  source 1..120: mol_type = other DNA
acatgaatgtttatagcagcttggaaacaaccaacgtgcctttaaaagatgaatgaataaccaaactggcctatctggacaagaagtgctgagaaggaatgatctaccaggctgtgaaag

SEQ ID NO: 4380 - DNA, 120 bp, synthetic construct
  misc_feature 1..120: note = Artificially Synthesized Probe
  source 1..120: mol_type = other DNA
atgtttcacactaacataagctgttaatggtggggaaactggggtggggaggaggggttatatgtgaactctgtgaactttgtgctcaacttttctgtaagcctataaaaaatagtattt

SEQ ID NO: 4381 - DNA, 120 bp, synthetic construct
  misc_feature 1..120: note = Artificially Synthesized Probe
  source 1..120: mol_type = other DNA
ttccaaattaaagaaataagaaggataaatatttctgatttttggcctttttggtttttgctgtagatgctgtcatggctccaggagctttccgtacttcttgtggtagccttacagacg

SEQ ID NO: 4382 - DNA, 120 bp, synthetic construct
  misc_feature 1..120: note = Artificially Synthesized Probe
  source 1..120: mol_type = other DNA
tttattggcaaaaaatgtaaagatgataaatgtcctttcattcactttttcatttgttccacaaaaacataatcgtgtgcgtgtggcaggcatgcttcttggtgatggagacacggcagg

SEQ ID NO: 4383 - DNA, 120 bp, synthetic construct
  misc_feature 1..120: note = Artificially Synthesized Probe
  source 1..120: mol_type = other DNA
acctcccggtggaaatgtgtttgctggtgggtgttctgctgtttttgccaaggctttattctttgttgatgattcacatgttgttttatccattaggtaatattgtagggctcagtataa

SEQ ID NO: 4384 - DNA, 120 bp, synthetic construct
  misc_feature 1..120: note = Artificially Synthesized Probe
  source 1..120: mol_type = other DNA
cactgccacagaggatatgggttatttgaatatctgagtcagtttgtgtctctctccagaaatacagatatgaatatggcagtgaaatggatttcagggacatgctgtgaaatcttgtac

SEQ ID NO: 4385 - DNA, 120 bp, synthetic construct
  misc_feature 1..120: note = Artificially Synthesized Probe
  source 1..120: mol_type = other DNA
gaaatgagttagcaggtgcagggacttgggtaggggaagaagctcttgtgtgctgctgtgcagaagggtgactacaggtgagaatatcgtacggtatgtcccaaaatagaagaaaagatt

SEQ ID NO: 4386 - DNA, 120 bp, synthetic construct
  misc_feature 1..120: note = Artificially Synthesized Probe
  source 1..120: mol_type = other DNA
cagatataaacttgttgaacatctgaatcttttctagatggagtaaccttgtttccattctcagatttggaaatgatattgttttcaatctcagctatgcggtctcatggccgctgtccc

SEQ ID NO: 4387 - DNA, 120 bp, synthetic construct
  misc_feature 1..120: note = Artificially Synthesized Probe
  source 1..120: mol_type = other DNA
ttcagcctacattcaaaacagggcaaggggagtgcttagttgggtatggtattctaatccagttacttttatgggtctctttttaaattttttatggggaagaaactgtgttcttgggac

SEQ ID NO: 4388 - DNA, 120 bp, synthetic construct
  misc_feature 1..120: note = Artificially Synthesized Probe
  source 1..120: mol_type = other DNA
gggcaaagtgaccacagacttctcagttcagacacggagttcgtaaattaatgttatctttgttgatcggggatctatttgctttatgcaagaaaaatgctgagttttctttgggtcttt

SEQ ID NO: 4389 - DNA, 120 bp, synthetic construct
  misc_feature 1..120: note = Artificially Synthesized Probe
  source 1..120: mol_type = other DNA
attaaccctatggatacagtgagtaaagggtttatgagaggaagaagattgttttttattctgagcacttatttttgtctgtcctgtggggtcacatgttctggaatagctgtggctctt

SEQ ID NO: 4390 - DNA, 120 bp, synthetic construct
  misc_feature 1..120: note = Artificially Synthesized Probe
  source 1..120: mol_type = other DNA
tccacaatgaagtgaatatgtgacaatttaaaaactgaaattgctgtctcagaaaagctttgattaccgtttggtctaactttgatccacagaaaaggctgccgggtttctccacaggcg

SEQ ID NO: 4391 - DNA, 120 bp, synthetic construct
  misc_feature 1..120: note = Artificially Synthesized Probe
  source 1..120: mol_type = other DNA
aaagaggactaatcagggagtacagaatgaggttattggtggtttcttcaggagagcagggccatttagaaactggctgagaaagataccgtgcctaatttacaaaaaaaaaaaaaatga

SEQ ID NO: 4392 - DNA, 120 bp, synthetic construct
  misc_feature 1..120: note = Artificially Synthesized Probe
  source 1..120: mol_type = other DNA
ttcttcagatggccatccagtgtccacacctgaattaattggctgcactatcttctgtccaaactgttagttgagttttggatggaacctttatcacctgctacatttccatttgcactt

SEQ ID NO: 4393 - DNA, 120 bp, synthetic construct
  misc_feature 1..120: note = Artificially Synthesized Probe
  source 1..120: mol_type = other DNA
aactgaccctctgttaaggatgtggcgtctcacagagaaaggtgggcccacctacttgttggcatgtatattaagtaattcttattaatatttctttcaaggtcttcatcccttcatgca

SEQ ID NO: 4394 - DNA, 120 bp, synthetic construct
  misc_feature 1..120: note = Artificially Synthesized Probe
  source 1..120: mol_type = other DNA
gtatatgatatcatgccatcaggaaatagaggtagttttatgatttcttactttaaatctgaatgccttttacttctcttcattaccctggctaggaccaccagcacaattttgaaatga

SEQ ID NO: 4395 - DNA, 120 bp, synthetic construct
  misc_feature 1..120: note = Artificially Synthesized Probe
  source 1..120: mol_type = other DNA
tttgttttgtggcttagttaaggtttgttttgatttggcagaattcagtagagatgtcgtctgggcctgagcttttctttgggaggacagttttttgatttgcagtcttcactctcgaga

SEQ ID NO: 4396 - DNA, 120 bp, synthetic construct
  misc_feature 1..120: note = Artificially Synthesized Probe
  source 1..120: mol_type = other DNA
tctatttgtatcttttaatctttaaagtgtatctccactaggcagggtagagttggatcttttttaaaaattaagtctgacaacatgcttcttttgattatattatttaatccattcaca

SEQ ID NO: 4397 - DNA, 120 bp, synthetic construct
  misc_feature 1..120: note = Artificially Synthesized Probe
  source 1..120: mol_type = other DNA
gcaaacgcaacagcacattgttataattatgactttaccacctgtaattatgttcttagtataacatagctttgcttccactaaccctcttcgtgctgttattgacaaatatgttacaca

SEQ ID NO: 4398 - DNA, 120 bp, synthetic construct
  misc_feature 1..120: note = Artificially Synthesized Probe
  source 1..120: mol_type = other DNA
ttgcaacattcttctaccatctttacctcttcagtcatagtctcctttggttctgggaacatctttatgactcctttgaaatctttttctaataaacctggcctctggtcacttccacag

SEQ ID NO: 4399 - DNA, 120 bp, synthetic construct
  misc_feature 1..120: note = Artificially Synthesized Probe
  source 1..120: mol_type = other DNA
agagagcagacttggttcaaatcccacaggtacttgtctccctgaattttcgtagcttctcttgaaagatatttcttcatttgctgtttgccaatggaccattttcagagactgtagatg

SEQ ID NO: 4400 - DNA, 120 bp, synthetic construct
  misc_feature 1..120: note = Artificially Synthesized Probe
  source 1..120: mol_type = other DNA
attgacaaatgccatctaaaatcttacctaggatcacaaagggagtttgtggatgtgtcagtttgggttggaccagtttattcactgtgatacaagaacaagtccagaggcacatagata

SEQ ID NO: 4401 - DNA, 120 bp, synthetic construct
  misc_feature 1..120: note = Artificially Synthesized Probe
  source 1..120: mol_type = other DNA
ggaattttatatcttaaccatatccctcgagtctgcagcctccttctttactcatttgatctcagcaaccagtgggtgcccttgttttgtgtaagaaatgtagaggtcttcaggaaattc

SEQ ID NO: 4402 - DNA, 120 bp, synthetic construct
  misc_feature 1..120: note = Artificially Synthesized Probe
  source 1..120: mol_type = other DNA
aatgccctgatctccactctgttaatttataactagtcgtatcacttaatatctaattgcacagccaactttctatctccaggacttgcacaacagctcatgcttgataggtgctcagta

SEQ ID NO: 4403 - DNA, 120 bp, synthetic construct
  misc_feature 1..120: note = Artificially Synthesized Probe
  source 1..120: mol_type = other DNA
ttgttcccagaaataaaccgtgaagtgtcacagagaaaatataaattctcccacccaatatccagtctggttgaatttattcattccaggatatctgagtcccctgccatgcaaactcat

SEQ ID NO: 4404 - DNA, 120 bp, synthetic construct
  misc_feature 1..120: note = Artificially Synthesized Probe
  source 1..120: mol_type = other DNA
caggtcagatgatttcctgagcagtgcgtatgtcctgtgatgtcctgtgttgctggaatggagtggattcttctctctcagtgaggaatagctttctgattgtgatctcagtggaagtca

SEQ ID NO: 4405 - DNA, 120 bp, synthetic construct
  misc_feature 1..120: note = Artificially Synthesized Probe
  source 1..120: mol_type = other DNA
aggataatggcttccagcttcatccatgtccctgaaaaggacatgatctctttgctttttatagctgcatagtattccatggtgtatatgtaccacattttctttatccagtctatcatt

SEQ ID NO: 4406 - DNA, 120 bp, synthetic construct
  misc_feature 1..120: note = Artificially Synthesized Probe
  source 1..120: mol_type = other DNA
tgttgaagaccagatggttgtagatgtgtggtgttatttctgaggtctctgttctgctccattggtctatatgtctgttttggtgtcagtatcatgctgttttggttactgtagccttgt

SEQ ID NO: 4407 - DNA, 120 bp, synthetic construct
  misc_feature 1..120: note = Artificially Synthesized Probe
  source 1..120: mol_type = other DNA
gagttagggaggagtccctccttttcaattgtttggaatagtttcagaaggaatggtaccagtgcctgtttgtatttctggtagaattcagctgtgaatccgtctggtcctgggcttttt

SEQ ID NO: 4408 - DNA, 120 bp, synthetic construct
  misc_feature 1..120: note = Artificially Synthesized Probe
  source 1..120: mol_type = other DNA
tccttgagaactttctgtcttgttgatctgtctaacactgacagtggggtgctaaagtttcccactattgttgtgtgggagtctaagtctccttgtaggtctctaagaacttgttttgtg

SEQ ID NO: 4409 - DNA, 120 bp, synthetic construct
  misc_feature 1..120: note = Artificially Synthesized Probe
  source 1..120: mol_type = other DNA
gcctgtcttgctaggttgcagaagttctcctggataatatcctgcagtgtgttttccagcttgtttccattcttcctgtctccttctggtactccaatcaatcgtaggtttaatcttttt

SEQ ID NO: 4410 - DNA, 120 bp, synthetic construct
  misc_feature 1..120: note = Artificially Synthesized Probe
  source 1..120: mol_type = other DNA
tgtgagcaataaagctgtttatttcatctggatgcaggtgggctgagtccgaaaagagagtcattgaagggagataggggtggggccattttataggatttgggtggataaaggaaaatt

SEQ ID NO: 4411 - DNA, 120 bp, synthetic construct
  misc_feature 1..120: note = Artificially Synthesized Probe
  source 1..120: mol_type = other DNA
ataatcatccttgggcgtttagtttctgatacagacattaagaaaagccgtctaggatgagccatgcacgtgcacgcgcatggcagagcgtggtttgctgcaggacttttcagagcgttt

SEQ ID NO: 4412 - DNA, 120 bp, synthetic construct
  misc_feature 1..120: note = Artificially Synthesized Probe
  source 1..120: mol_type = other DNA
aaaggcgacaaggacccgtgtggcgaccaggaccaggcgtgtgcatgtcaggaagggtattttatttcatcttaattttgagaaatgctcaggatttcaatagaaaagcagaagaaaggc

SEQ ID NO: 4413 - DNA, 120 bp, synthetic construct
  misc_feature 1..120: note = Artificially Synthesized Probe
  source 1..120: mol_type = other DNA
tggttctgggagtagaggatgggtggtgtggacaggaagatctaatttaaatgataaataggacccttgagaaagaagaatcccatgacaaagagacaaagagaattctaaaagacactg

SEQ ID NO: 4414 - DNA, 120 bp, synthetic construct
  misc_feature 1..120: note = Artificially Synthesized Probe
  source 1..120: mol_type = other DNA
ggccatgctccagcagtagcagcaacatctcaggtttaggagggaatttagggtttttcctgctgcagcttcttagtcctacagaaatgttagatgaatgcagtttctaagcatccctag

SEQ ID NO: 4415 - DNA, 120 bp, synthetic construct
  misc_feature 1..120: note = Artificially Synthesized Probe
  source 1..120: mol_type = other DNA
tctttctgcagtgagggaagtccgttaggcatgctgtggtttcatgacagcatccagcggccctcctgcctgcaggtctatccaggactctgttaaccgtcgttcttttggaaaatgttt

SEQ ID NO: 4416 - DNA, 120 bp, synthetic construct
  misc_feature 1..120: note = Artificially Synthesized Probe
  source 1..120: mol_type = other DNA
agtcagctgggtgggctggtgggctctggaggctacacagtatagtgactgcagttaataataacacagagctgcatatttcagaacagccagaagaggggatttaaaatgttctcacca

SEQ ID NO: 4417 - DNA, 120 bp, synthetic construct
  misc_feature 1..120: note = Artificially Synthesized Probe
  source 1..120: mol_type = other DNA
gccctttaacgatgaaatgtttggggccattgcagtgggttttgagcagaataatgcagtgtgacttagggttcacgaggtttatgagagccctttcggtggtggtgtgaaggagggtta

SEQ ID NO: 4418 - DNA, 120 bp, synthetic construct
  misc_feature 1..120: note = Artificially Synthesized Probe
  source 1..120: mol_type = other DNA
aaatgaattctgctgttcatttatgggccccccagtctgtggcttttgttttatcagccccagctgactaagacaagtggtgtctcttaatgaattgatgaattctttgtgttttgaaga

SEQ ID NO: 4419 - DNA, 120 bp, synthetic construct
  misc_feature 1..120: note = Artificially Synthesized Probe
  source 1..120: mol_type = other DNA
gaatgaatgaatgaatataaatttttgtaaaaacatgtatcaggtctacgatacccgtacaagtgggcagtaaaccgtacagcaggaaagcgctcagtcagccgctgagggctgttcttg

SEQ ID NO: 4420 - DNA, 120 bp, synthetic construct
  misc_feature 1..120: note = Artificially Synthesized Probe
  source 1..120: mol_type = other DNA
ctgctctttatctcacaaagcacgtggaagctgttgctttgtgctcaccgttcttctggtgcttgtgagtttttgccttggtcactctcccgtgtaaaatggagtttcagctgcagcttt

SEQ ID NO: 4421 - DNA, 120 bp, synthetic construct
  misc_feature 1..120: note = Artificially Synthesized Probe
  source 1..120: mol_type = other DNA
cagaaggcagaagacatggaggatgggtgaccgaagagaaagcagaatatgtctttaagacctttgtgtttggaaataacttcacatgtaaaagttgtaaaaataaaggaggacagaggg

SEQ ID NO: 4422 - DNA, 120 bp, synthetic construct
  misc_feature 1..120: note = Artificially Synthesized Probe
  source 1..120: mol_type = other DNA
gagaatgtcccaggaagtagaacaaaaacacagagaaacagaaaacagaaatgagatgttaaaagaaaatgggctccgtaggtccgacagctgaataatagaagttccaggagaagagaa

SEQ ID NO: 4423 - DNA, 120 bp, synthetic construct
  misc_feature 1..120: note = Artificially Synthesized Probe
  source 1..120: mol_type = other DNA
gatgtgtattctgagggcttgagaaatgccgggtaggggttcagaggagagcagtatgtaagcatgtggagtaaagttgtgcagggagggtttggaccggaagttgaaactgtttgatca

SEQ ID NO: 4424 - DNA, 120 bp, synthetic construct
  misc_feature 1..120: note = Artificially Synthesized Probe
  source 1..120: mol_type = other DNA
gagttatcttgtcgcctccatgctctttaatctcgttaatgtcaggacgtttttatcctttgctttctggaggcagtcacaggttggttggggccaaagattacaaacaaggatgtttta

SEQ ID NO: 4425 - DNA, 120 bp, synthetic construct
  misc_feature 1..120: note = Artificially Synthesized Probe
  source 1..120: mol_type = other DNA
acatccactgcatatgacgaggccactggccacacgtagcctgtgagcatgtggtgtgtggacagtgtgaccgggcacccagatttcaggttttaactgattttcattaattaaaattac

SEQ ID NO: 4426 - DNA, 120 bp, synthetic construct
  misc_feature 1..120: note = Artificially Synthesized Probe
  source 1..120: mol_type = other DNA
aggttgtgtggaattgaacttttaaaagtgcctttgggcaataaggataatttcattctcctctgcggccttctgtaaatccttcagagaggaagaaataaacctattatggtcctgcct

SEQ ID NO: 4427 - DNA, 120 bp, synthetic construct
  misc_feature 1..120: note = Artificially Synthesized Probe
  source 1..120: mol_type = other DNA
acgtgatagagacgtggctgagaccatgaaagggcagcgatggtgatagagtcccatgctctgatttgattgattgagactttattcccgcttcttcaagacatgtctgtggaatggggt

SEQ ID NO: 4428 - DNA, 120 bp, synthetic construct
  misc_feature 1..120: note = Artificially Synthesized Probe
  source 1..120: mol_type = other DNA
ttttcaattgattatatttgggagagaattgttcttttttcaatatagaagaattggcggggagaggggggatggaggagaagggagtggttattccagatcatctcttgtggtttcatc

SEQ ID NO: 4429 - DNA, 120 bp, synthetic construct
  misc_feature 1..120: note = Artificially Synthesized Probe
  source 1..120: mol_type = other DNA
acaggttttgcctggcattctgcagaagcattgctgtatcttaccagacaggaatacaggtaaatacatttcattcttctgatttgggattatatgtttcgtatcagtggcaaaagtgag

SEQ ID NO: 4430 - DNA, 120 bp, synthetic construct
  misc_feature 1..120: note = Artificially Synthesized Probe
  source 1..120: mol_type = other DNA
tattaattacgagcatggatggatgacattactgatagaactcttcttgagaatgaggaactgtccctgttttgttttcttttacccagtcaagtgtgtctcagctacgagtttgagcat

SEQ ID NO: 4431 - DNA, 120 bp, synthetic construct
  misc_feature 1..120: note = Artificially Synthesized Probe
  source 1..120: mol_type = other DNA
tttaggagatcttgtttggaaatgtcttcagacctcaacacagcggaggttcttggtgattacttttgcatttcagtggcatataaaggtccttgtaagggcgactgtaattttcttcta

SEQ ID NO: 4432 - DNA, 120 bp, synthetic construct
  misc_feature 1..120: note = Artificially Synthesized Probe
  source 1..120: mol_type = other DNA
taaataaaaacccaaagcacatttatgcctgtctttatttctaagcattcttcccttttcttgctttggtgacccctgattggcctttcacaggcctttggtttgcaacctacctggagt

SEQ ID NO: 4433 - DNA, 120 bp, synthetic construct
  misc_feature 1..120: note = Artificially Synthesized Probe
  source 1..120: mol_type = other DNA
gcagggaaaactttgggagctgttcagttcctagatgatctggcttccttcccttgattattaatgaccttcacttcagaattgcaatgacatttgggaaaattaagttacacagttgta

SEQ ID NO: 4434 - DNA, 120 bp, synthetic construct
  misc_feature 1..120: note = Artificially Synthesized Probe
  source 1..120: mol_type = other DNA
tcccctcagtagctgcagttgctgtgtgctttctgcagggtggcgagttgtttagttgtgcattggcaaaatgaaatattggattgaaatgtaacctttgtaacagagtgcttcattttt

SEQ ID NO: 4435 - DNA, 120 bp, synthetic construct
  misc_feature 1..120: note = Artificially Synthesized Probe
  source 1..120: mol_type = other DNA
tgctgccacaataagtgggaaatctccacgtgtggattggttacctgttttcaggaggccagggagtggtatttacacatacaagattaaatatgaggtctcatttctttgaaagatcaa

SEQ ID NO: 4436 - DNA, 120 bp, synthetic construct
  misc_feature 1..120: note = Artificially Synthesized Probe
  source 1..120: mol_type = other DNA
taaagaagtttaatagctcaaggctgcatgttctgtggatgcttctgtgctgagagggttcatgactaaacctggtgtgtgatactcctgttttaatgatataccagtgtaaattcctgg

SEQ ID NO: 4437 - DNA, 120 bp, synthetic construct
  misc_feature 1..120: note = Artificially Synthesized Probe
  source 1..120: mol_type = other DNA
ctctcttttcctatccaccccagttttcccacccacgtatttgtaggttaccttaaagtctttccagtgtaagacaagctacatatatacatgaaattgatgacaaaacccaaggttgac

SEQ ID NO: 4438 - DNA, 120 bp, synthetic construct
  misc_feature 1..120: note = Artificially Synthesized Probe
  source 1..120: mol_type = other DNA
agaaaataaatttaaaaaaaagaaactcaatccaggcttctccagtgtcaatgcagaggggcacccaagtcacccacttgttgtgatttcaaggcaaatggctgatttgttgggcagtgg

SEQ ID NO: 4439 - DNA, 120 bp, synthetic construct
  misc_feature 1..120: note = Artificially Synthesized Probe
  source 1..120: mol_type = other DNA
caatgagactgcctcatgactttctgagatatgtaatgattaatttgtagagtgcagagacaaattatttggtaggttgcatgtctagggctgtggatgatgtgagcagctgaagatatt

SEQ ID NO: 4440 - DNA, 120 bp, synthetic construct
  misc_feature 1..120: note = Artificially Synthesized Probe
  source 1..120: mol_type = other DNA
tgtgttgttgtctttgtgaacaagactgtggtgataccttgtggataaaatacgagttgctgtggatttgtttctgggaagacaattgtgttaacccaccctgttattcaacttaagttc

SEQ ID NO: 4441 - DNA, 120 bp, synthetic construct
  misc_feature 1..120: note = Artificially Synthesized Probe
  source 1..120: mol_type = other DNA
cctcactactgaaatctttccctttactaagaaatgcctttaaaatggaaatgtctttgaaacctgggtagcagttttaataactcccttccaccccatgtctataactagcattggggt

SEQ ID NO: 4442 - DNA, 120 bp, synthetic construct
  misc_feature 1..120: note = Artificially Synthesized Probe
  source 1..120: mol_type = other DNA
acaggtttacctaagtgtacatttcactctttgtaacttcgcaacttgatgcagatttaatccttgccttgtcttccttctttaactcaccatctccatctccttctgcgagatttcatc

SEQ ID NO: 4443 - DNA, 120 bp, synthetic construct
  misc_feature 1..120: note = Artificially Synthesized Probe
  source 1..120: mol_type = other DNA
cgagtttttggtgttttcatggaagttggtggaggctgtgtaagggtgtgagccagataatactttaagctggaagtggaagccttctctcttctctaacccattaaccgtatctctatg

SEQ ID NO: 4444 - DNA, 120 bp, synthetic construct
  misc_feature 1..120: note = Artificially Synthesized Probe
  source 1..120: mol_type = other DNA
atttatggccactgttctctcaggtgtgagttggggttaatgtgcaggcatcttaagcactgatgcacaaataatgaaagaaaataaaatgtttcttgaggggaaatgagaccaggagtt

SEQ ID NO: 4445 - DNA, 120 bp, synthetic construct
  misc_feature 1..120: note = Artificially Synthesized Probe
  source 1..120: mol_type = other DNA
ctgtgtggcaggcagaaatggcctgtgagtgatttcagggtcagctcaaacagaaattatcttctgaagagagggatccagcttaatgttcttaagttaaatcaatgatgctgttaacat

SEQ ID NO: 4446 - DNA, 120 bp, synthetic construct
  misc_feature 1..120: note = Artificially Synthesized Probe
  source 1..120: mol_type = other DNA
tggccaatccaggttattcttactaaatccagacgttgtgaaggcctgcttgctattaatatattgataattatgttgataatggtgaaagtgtaggcacgtgtgggtgattgcttgcta

SEQ ID NO: 4447 - DNA, 120 bp, synthetic construct
  misc_feature 1..120: note = Artificially Synthesized Probe
  source 1..120: mol_type = other DNA
gtccattctagcatgaaggcaggaaaaaatgtggtgttccagttcaaaggcaggcaggggcgttgcataataaaatgtattttaattaattaattcagggttttcccgccctactgaatg

SEQ ID NO: 4448 - DNA, 120 bp, synthetic construct
  misc_feature 1..120: note = Artificially Synthesized Probe
  source 1..120: mol_type = other DNA
tggtaaaagacttcggagcaaactaatcgattgtaattacatgaaggtgaagctggtgatgatgtgtcagatggggagtgttcaggaaaactcctacaaaggtaagaacgctgtttatag

SEQ ID NO: 4449 - DNA, 120 bp, synthetic construct
  misc_feature 1..120: note = Artificially Synthesized Probe
  source 1..120: mol_type = other DNA
tatggagcaggaaggagatttggagtatggggttagagttgggaattactgttcttggtcgttcctggagattatagttagaaatttctcaagaagtatataatgagaaaaaaagggcag

SEQ ID NO: 4450 - DNA, 120 bp, synthetic construct
  misc_feature 1..120: note = Artificially Synthesized Probe
  source 1..120: mol_type = other DNA
gtacttgacaccttgcaaaggcatctgtgaagggtgggatgcactcagaagacagcataaggtttttgatttagaggaataaaaaaaaataaagcacaggggaagaacttggtgatactg

SEQ ID NO: 4451 - DNA, 120 bp, synthetic construct
  misc_feature 1..120: note = Artificially Synthesized Probe
  source 1..120: mol_type = other DNA
ggcactatagaaattactttggtctctggctttgttttttcacctcagaaatgtgtatttttttcttcctgccattgcagttctaattttctgtgttgtgtctctgggaggagtgagttg

SEQ ID NO: 4452 - DNA, 120 bp, synthetic construct
  misc_feature 1..120: note = Artificially Synthesized Probe
  source 1..120: mol_type = other DNA
taaatccccagtgaagatgacataatcacagaattgtcttcgtcaaatgatttcccgaggtgggggcagtaaaagggaggatttttttttttgcagctgaatagaaacgcatgtgtaggt

SEQ ID NO: 4453 - DNA, 120 bp, synthetic construct
  misc_feature 1..120: note = Artificially Synthesized Probe
  source 1..120: mol_type = other DNA
aggggatgtttggtccccatggctggaaggaaacggaggaatgtttgcctcatgtacgttttatttgttaatctttcttttatttgaggaatgttctgttatcagtggaaatattccctt

SEQ ID NO: 4454 - DNA, 120 bp, synthetic construct
  misc_feature 1..120: note = Artificially Synthesized Probe
  source 1..120: mol_type = other DNA
ccccctttcccctcgatctttctgtagcttcttagactgttttgggcaaagataaacaatattggaaatatatggttagggttttttcttctttcctgcaagaatatgtgggaaggaagt

SEQ ID NO: 4455 - DNA, 120 bp, synthetic construct
  misc_feature 1..120: note = Artificially Synthesized Probe
  source 1..120: mol_type = other DNA
tggagacacctggccgtgggcacgaggggagggtgagggcagagcctgctgtggagacacctggccgtgggcacgaggggagggtgagggcagagcctgctgtggagacacctggccgtg

SEQ ID NO: 4456 - DNA, 120 bp, synthetic construct
  misc_feature 1..120: note = Artificially Synthesized Probe
  source 1..120: mol_type = other DNA
tcggctataagagcaacagaaggaaagagtgatttgctgtccaaagatagagctttccctcagctctgcctctttaaagtctaaagagcattcagcattcccatagtctcctttctgtct

SEQ ID NO: 4457 - DNA, 120 bp, synthetic construct
  misc_feature 1..120: note = Artificially Synthesized Probe
  source 1..120: mol_type = other DNA
aatgaaatttggagagctgcataagagtggggacatttaacaatgattgtttctaggaaactgggaacagtctaagagtcagagtaggaagttcattaaaatgaccgaggaccctgccca

SEQ ID NO: 4458 - DNA, 120 bp, synthetic construct
  misc_feature 1..120: note = Artificially Synthesized Probe
  source 1..120: mol_type = other DNA
agagcatttagtcaactttttcatgacttttgaataaaagtgctgaccaggagaatgtttccagcagtgtaggagaagattctggtccatcgtttcaccaccgtggaccattttcacaaa

SEQ ID NO: 4459 - DNA, 120 bp, synthetic construct
  misc_feature 1..120: note = Artificially Synthesized Probe
  source 1..120: mol_type = other DNA
acttaggacatcaaacgtgcagtgtgagctgcggatctcacacgagcctgggaaggccacaaagctcaatgacaagttagactcagcatgttttccctttaaattgagacagggtctctc

SEQ ID NO: 4460 - DNA, 120 bp, synthetic construct
  misc_feature 1..120: note = Artificially Synthesized Probe
  source 1..120: mol_type = other DNA
gagagaaaatggcagaaactcccaggcctctgccttaagccccgaggaagagtgtgaggatgagaccaaggtatgaggtgaagggcatctgtgctaaggaggctgagcctttctgttcag

SEQ ID NO: 4461 - DNA, 120 bp, synthetic construct
  misc_feature 1..120: note = Artificially Synthesized Probe
  source 1..120: mol_type = other DNA
ggcgtggggcctgaagacatggcttatggcttgagttttactacgtatttgatgactcttgtgacatttacttaagttctctgagtttccatttcacctttaaaattgggagaacaataa

SEQ ID NO: 4462 - DNA, 120 bp, synthetic construct
  misc_feature 1..120: note = Artificially Synthesized Probe
  source 1..120: mol_type = other DNA
tacaaaaatttaaaatagttttctgcagccacttttgttctgatcattatccaatgagaaaagatcaccacctttctgggaagagttattggtggttgtccacccacctcactgaggtct

SEQ ID NO: 4463 - DNA, 120 bp, synthetic construct
  misc_feature 1..120: note = Artificially Synthesized Probe
  source 1..120: mol_type = other DNA
agcgaaaagccatggtgtcctaagcagctgtgtcccctctatgttattattctttgtgcggctttctttgattgggatgagctctctagcatttaggaaattgcaagcatataatatttt

SEQ ID NO: 4464 - DNA, 120 bp, synthetic construct
  misc_feature 1..120: note = Artificially Synthesized Probe
  source 1..120: mol_type = other DNA
tatcatttctaaactccatagatgacttttacctttcacggcatttggcagctcagctgcatttcatgctgtggaagactcaggagctaacatctcatcttcacctcttcatccttcatt

SEQ ID NO: 4465 - DNA, 120 bp, synthetic construct
  misc_feature 1..120: note = Artificially Synthesized Probe
  source 1..120: mol_type = other DNA
ctgtgacttgttttggcgtagagaccatttggtatctaactatattgtataatttgcccaaatgaggaaggcagtatgactgttgctcagaaaatattttgctgctgatctgttaggtgg

SEQ ID NO: 4466 - DNA, 120 bp, synthetic construct
  misc_feature 1..120: note = Artificially Synthesized Probe
  source 1..120: mol_type = other DNA
tcctagtgatctgtggagtgatagttggtcacttctgggtgtttaacacaatctatgtgttagatgtgactaattcaagagcaaagttctttccaccccaatttctgttctgttcagttt

SEQ ID NO: 4467 - DNA, 120 bp, synthetic construct
  misc_feature 1..120: note = Artificially Synthesized Probe
  source 1..120: mol_type = other DNA
ctttgcctacattaatgttgttttgtctgaaatatgtgtgttgaagttcccatgtttccttgaagacatgggaagttcctggaaagtaacgagactgatcttctcctgtgcccttttaag

SEQ ID NO: 4468 - DNA, 120 bp, synthetic construct
  misc_feature 1..120: note = Artificially Synthesized Probe
  source 1..120: mol_type = other DNA
ggcccgttccttagtttttacttgtcacacagtgtgcatgacagagtgactagataggggttctttctgtttttatttctagattgaaattttgcatggtaacagcagacaggtaatacc

SEQ ID NO: 4469 - DNA, 120 bp, synthetic construct
  misc_feature 1..120: note = Artificially Synthesized Probe
  source 1..120: mol_type = other DNA
gccatggctccccaaccctgtgccagcccgtgtgggccatggccccaccgaacccgtgccaacccgcgtgtgccatgggttccaccgaccccgtgccagcccgcgtgcgccatggcttcc

SEQ ID NO: 4470 - DNA, 120 bp, synthetic construct
  misc_feature 1..120: note = Artificially Synthesized Probe
  source 1..120: mol_type = other DNA
gggtatttagagatacagctgaagggatttgtgggtggaaaggacgtgtggttcctggagtagatgggatcagggatgcatcaagggtccagcctgtgctgtggaaagccaagttgccat

SEQ ID NO: 4471 - DNA, 120 bp, synthetic construct
  misc_feature 1..120: note = Artificially Synthesized Probe
  source 1..120: mol_type = other DNA
gggctgggttttcaatctcatgcccggctgaagttaattttgtgatctcaagatgcagcttcttgataacatggtaccaaaaatcatgaggaaatacagcatggcccattttgctttatt

SEQ ID NO: 4472 - DNA, 120 bp, synthetic construct
  misc_feature 1..120: note = Artificially Synthesized Probe
  source 1..120: mol_type = other DNA
tgagccaccgcgctcggccctagaatatttcttatattaaaagatcgagtgaagccaaggaaaaattcacctgtatctcctgccctgcagtaatcactttgattatttggattcctattt

SEQ ID NO: 4473 - DNA, 120 bp, synthetic construct
  misc_feature 1..120: note = Artificially Synthesized Probe
  source 1..120: mol_type = other DNA
agttttaaaggaggagagtaactaatgaccttagtggctaaaggcggtctcaaatccatgtttatcttacccccttttcccacaactgttaagaaacaatcatttcaaggccctggtaga

SEQ ID NO: 4474 - DNA, 120 bp, synthetic construct
  misc_feature 1..120: note = Artificially Synthesized Probe
  source 1..120: mol_type = other DNA
agttaggccatattgataaacactttgtcattccttatgttgaaatctgttggtctgttttatgctttggaaggttcttttgctcatacatgagattatagcatcatgcactggtcattt

SEQ ID NO: 4475 - DNA, 120 bp, synthetic construct
  misc_feature 1..120: note = Artificially Synthesized Probe
  source 1..120: mol_type = other DNA
ggctgaaaagagctgagatttaataaaactgatcttggttgatgcctcatcaaggatgttctttagtgaaacagactctttttaaactgcaagtgtttgctgtggaaggtgccatgagga

SEQ ID NO: 4476 - DNA, 120 bp, synthetic construct
  misc_feature 1..120: note = Artificially Synthesized Probe
  source 1..120: mol_type = other DNA
atttcaaatggtcatcagttgttccctaactgcctagaagagaacgaggatttttaaaaagacaagcaaatagcattccacagaacggtttcattttcagtacagaactgccagtgcctg

SEQ ID NO: 4477 - DNA, 120 bp, synthetic construct
  misc_feature 1..120: note = Artificially Synthesized Probe
  source 1..120: mol_type = other DNA
aattttaaataggattgcattgttgcaatcttccggcttgggaagaatggacatattcccaatatcttaccttgttgaacaaatgtggtgcccttgccatttgcagctctctgttctcat

SEQ ID NO: 4478 - DNA, 120 bp, synthetic construct
  misc_feature 1..120: note = Artificially Synthesized Probe
  source 1..120: mol_type = other DNA
catttccatgagagaatggatgaaattgagttttaattttgttttcacatttcacacctcccctcctgttcatcagagctatcttactagattgctccaagacacacacatcagggtcta

SEQ ID NO: 4479 - DNA, 120 bp, synthetic construct
  misc_feature 1..120: note = Artificially Synthesized Probe
  source 1..120: mol_type = other DNA
tttattgtgggaaaaatatattaaaaacataggatttccctcacctgccattttaaatgtccaattcagtgacatacaatacgttcctggtgctgtgtgaccctcaccactgtccacctc

SEQ ID NO: 4480 - DNA, 120 bp, synthetic construct
  misc_feature 1..120: note = Artificially Synthesized Probe
  source 1..120: mol_type = other DNA
ttgtgagacttagaatgggagcaggatctacaggaaaagatttgatgatgggacaggagacagttgctcggaaatcttatacatacaaactatgcaatgagaacataaggtggcttgata

SEQ ID NO: 4481 - DNA, 120 bp, synthetic construct
  misc_feature 1..120: note = Artificially Synthesized Probe
  source 1..120: mol_type = other DNA
atgggtgtgagaggtctctgtgagagatgcaaggtctgattggctcaagggcaaatagcttgtccatctgacattcacttttattttaaactaaagaggagagaatatgactatattctc

SEQ ID NO: 4482 - DNA, 120 bp, synthetic construct
  misc_feature 1..120: note = Artificially Synthesized Probe
  source 1..120: mol_type = other DNA
tgattccaaaaagtaattgtgctgccattgatattctttttcatcaattttctaatttggagaagggattctgcacagacccccatgttgacaccaattcagtggtggctctctcatgtt

SEQ ID NO: 4483 - DNA, 120 bp, synthetic construct
  misc_feature 1..120: note = Artificially Synthesized Probe
  source 1..120: mol_type = other DNA
gttttcttctctggtagaaataagggcaggttcttattgaaactgtaaaagtaactaaactgtcatgatgagtactggactcgggaagtcttcatagaccttttgatcaccatgtggagt

SEQ ID NO: 4484 - DNA, 120 bp, synthetic construct
  misc_feature 1..120: note = Artificially Synthesized Probe
  source 1..120: mol_type = other DNA
ccaggaaggagatggccactggtctcataggaccttgcctgcagggagcagaggtggatgtagcttcgccaccccacgaccccatttggaaacagtgtttgaaaatgagtatttcagaag

SEQ ID NO: 4485 - DNA, 120 bp, synthetic construct
  misc_feature 1..120: note = Artificially Synthesized Probe
  source 1..120: mol_type = other DNA
cagcgggatgacatttaaaatttttgtgcaattaatacaagtgtaaagccaagtccaggtggcttgcagcattgcctgaagttcgaaagaactgactctttttttatcctctagagatca

SEQ ID NO: 4486 - DNA, 120 bp, synthetic construct
  misc_feature 1..120: note = Artificially Synthesized Probe
  source 1..120: mol_type = other DNA
tgcctatctccaggttcagctgtttatttgaaacgtaaacagagtccttgggaaatgttgctggtatctgccgtgttccccacgcgggaagccagagagcgtggcaagtgtctgtcccat

SEQ ID NO: 4487 - DNA, 120 bp, synthetic construct
  misc_feature 1..120: note = Artificially Synthesized Probe
  source 1..120: mol_type = other DNA
atcctcgtttcttgcacagtaaacgcagctgtaacatctggaccagtggagccagttgtgggaatccataggaatttgagtttcagcgattgttccaggcagcgttttcccaggaagtgt

SEQ ID NO: 4488 - DNA, 120 bp, synthetic construct
  misc_feature 1..120: note = Artificially Synthesized Probe
  source 1..120: mol_type = other DNA
ttctttttctcacaaattgatcctgagcttattttgtgcttcactgtgccttttgtcacttgacatacatcagataaatctactggccattgatgtgtctcttgcatttgagtggctgcg

SEQ ID NO: 4489 - DNA, 120 bp, synthetic construct
  misc_feature 1..120: note = Artificially Synthesized Probe
  source 1..120: mol_type = other DNA
ttttcttcatgatgactatgatgttgtttttctttacgtcagtatcttcactgtatttagtctgtagcttctctcctgatacacaaatgcactcacacacgtgctcatttgccctcatgc

SEQ ID NO: 4490 - DNA, 120 bp, synthetic construct
  misc_feature 1..120: note = Artificially Synthesized Probe
  source 1..120: mol_type = other DNA
gactccacgtataatgagtcgcagtggatccacgtataatggatccacgtataatgaaaccgatgttttttcctcatccaccttgtaaggaatcaaagttgaactaaaagacattatggt

SEQ ID NO: 4491 - DNA, 120 bp, synthetic construct
  misc_feature 1..120: note = Artificially Synthesized Probe
  source 1..120: mol_type = other DNA
gggagcctggtgggagaatttacacagtgggaatcagcagatattttgcatcagactctgatttattgttttggtgatcgtgtagacttaaagtgatggggaatatgttattagtacaga

SEQ ID NO: 4492 - DNA, 120 bp, synthetic construct
  misc_feature 1..120: note = Artificially Synthesized Probe
  source 1..120: mol_type = other DNA
gtgaagaaaataaattttacctccatgtttaaccgtaaaccttagagtctgcccatcagtagtgtggctctcctgttcagatcaggatcttaaatggtaacttgaaaacctgggagtatg

SEQ ID NO: 4493 - DNA, 120 bp, synthetic construct
  misc_feature 1..120: note = Artificially Synthesized Probe
  source 1..120: mol_type = other DNA
tagggctcctgtataataacatggaactagagctgaaaggggtcattgctagattcaggtcctatttaagaagtcatcttggggaaaccaaaagttgtaacaggagagacaaaaacaagg

SEQ ID NO: 4494 - DNA, 120 bp, synthetic construct
  misc_feature 1..120: note = Artificially Synthesized Probe
  source 1..120: mol_type = other DNA
aatgacaaatgcttttgatggtctaatcattagactgggcataggccaggtaaaaatcagtgagcttaaggaacttccaaactgaaaagcaaaggtagaaaatatttttttttgtatttt

SEQ ID NO: 4495 - DNA, 120 bp, synthetic construct
  misc_feature 1..120: note = Artificially Synthesized Probe
  source 1..120: mol_type = other DNA
caagctgcgcgcgcagaccgggccactcggtcgccagaaaagatttttttaaaaatggaacagaatattgaagaactgtaggagaaatacaaaagaagtaacatatgtggaatggtaata

SEQ ID NO: 4496 - DNA, 120 bp, synthetic construct
  misc_feature 1..120: note = Artificially Synthesized Probe
  source 1..120: mol_type = other DNA
ttgagataccaaaaaggccagattaaaaggaaatgtatttaccattgaatacatatttagaaatggagtaagatccaaaatcaatcatctaaacttcttctttaaaaaactagagaagag

SEQ ID NO: 4497 - DNA, 120 bp, synthetic construct
  misc_feature 1..120: note = Artificially Synthesized Probe
  source 1..120: mol_type = other DNA
tacaaaaaaccctgtagctaaactcatacttcatggtgagaaactggacaatttcccctcatatcagaagcaaaacactcttaccatgttggaagtttgagcaaatgcaatgagacagga

SEQ ID NO: 4498 - DNA, 120 bp, synthetic construct
  misc_feature 1..120: note = Artificially Synthesized Probe
  source 1..120: mol_type = other DNA
ataaaatacatggattggtagccaggatttatgacttgtctgcttatccaaaaatggtactcagccaagataagaggtcagcttcttgcatttcttcacctctctcactttcctcctctt

SEQ ID NO: 4499 - DNA, 120 bp, synthetic construct
  misc_feature 1..120: note = Artificially Synthesized Probe
  source 1..120: mol_type = other DNA
gtccttctttgtgaaatataattagaacattttccctgttatagactgttttttaagagagttcatagaattttagtaatgtggggagggcgtcggggatgcagtgaggggctgggttct

SEQ ID NO: 4500 - DNA, 120 bp, synthetic construct
  misc_feature 1..120: note = Artificially Synthesized Probe
  source 1..120: mol_type = other DNA
actcatagccaaaaatgtatgacatattattgcaaaaataactccgtaatctttctctgctggcaacgagtttagggtttgctggtagatcagcaagattggtgagagaccctgttagga

SEQ ID NO: 4501 - DNA, 120 bp, synthetic construct
  misc_feature 1..120: note = Artificially Synthesized Probe
  source 1..120: mol_type = other DNA
ttgttttcaggcacatgtgccagtcctttctcttgcatgcagttttaaggaaggattaggatattttgagatgtaacagttttgtcacatggcctgcctaagtgaaagaagggaaacatt

SEQ ID NO: 4502 - DNA, 120 bp, synthetic construct
  misc_feature 1..120: note = Artificially Synthesized Probe
  source 1..120: mol_type = other DNA
tattaattatatctataatgttatgtgaccaacattaccatctatttccggaaaattttccttaggccacatagaaactctatccctggtgaagactggcttcctgtcccctgccccaga

SEQ ID NO: 4503 - DNA, 120 bp, synthetic construct
  misc_feature 1..120: note = Artificially Synthesized Probe
  source 1..120: mol_type = other DNA
cagatgttttgtttgaaactatttgctcttgttctatgaatcctctttccacaaagagtttgaactttaacgttgaatgggaatccagtgcatctccgtgcctgcgggtcttccttgttt

SEQ ID NO: 4504 - DNA, 120 bp, synthetic construct
  misc_feature 1..120: note = Artificially Synthesized Probe
  source 1..120: mol_type = other DNA
ctgatcccttcgtgggtttttgcacaaaaagctccttaagaaagatttgccaaatgcgtatatctgctttagtttcctatttctatatagagcctccctttagatagggagctgtttgaa

SEQ ID NO: 4505 - DNA, 120 bp, synthetic construct
  misc_feature 1..120: note = Artificially Synthesized Probe
  source 1..120: mol_type = other DNA
gggcacctgtccctacctcgtagcaggaaactgtttattgggattcccaaaagtaagtattttaaaaatcatatggaaagaatcttgaattgagacttaaacgtcctggattctagccca

SEQ ID NO: 4506 - DNA, 120 bp, synthetic construct
  misc_feature 1..120: note = Artificially Synthesized Probe
  source 1..120: mol_type = other DNA
acaaatgcacctgattcttcactggtcataaaatgagggtgacctgaatttttctttgtctgtgtctgttactattgatcatcataatgggaacgatagctaggctcctaacctcacctc

SEQ ID NO: 4507 - DNA, 120 bp, synthetic construct
  misc_feature 1..120: note = Artificially Synthesized Probe
  source 1..120: mol_type = other DNA
aaaatattgagaatttgtcatgagaaagattatttcaaggtaacgcttatctttggccttttgatcccagtgtttccccagatgtgagagtgagggatgtgtggttcattagcagcaagg

SEQ ID NO: 4508 - DNA, 120 bp, synthetic construct
  misc_feature 1..120: note = Artificially Synthesized Probe
  source 1..120: mol_type = other DNA
aggaggaagtaaaaatcatggagcaaatccctggtgaaatcaggttcgaatttgatttttttctgcttcaccaaactcccgtcttttttcctatacttctttgggcatttcggttcttcc

SEQ ID NO: 4509 - DNA, 120 bp, synthetic construct
  misc_feature 1..120: note = Artificially Synthesized Probe
  source 1..120: mol_type = other DNA
tgtgtgctggcttcttccccagtttcccccaacatatgacagataaaaaggatcctctctttcagctgttaatttccaactcacctaggattctattacatgttttacatatgtggtcag

SEQ ID NO: 4510 - DNA, 120 bp, synthetic construct
  misc_feature 1..120: note = Artificially Synthesized Probe
  source 1..120: mol_type = other DNA
gcactgctgtcccacagtcacctgcatgagagcccctggagtttctcagatgcttctctgtcctctgacaatgcaggtgcctctccacatgctgtggatttttacctcttttcttctcag

SEQ ID NO: 4511 - DNA, 120 bp, synthetic construct
  misc_feature 1..120: note = Artificially Synthesized Probe
  source 1..120: mol_type = other DNA
ccccagggtccctgctaatgactggctatgtggctttggaggaagtctctcatgacaccagctgctcttgtcacttaaaaaattatatgatttttctaagtcttttaaaaataactgaat

SEQ ID NO: 4512 - DNA, 120 bp, synthetic construct
  misc_feature 1..120: note = Artificially Synthesized Probe
  source 1..120: mol_type = other DNA
ctcggagttcctgttcttctctcccaccttgcccagaccccctgcacccccatactcggagttcctgttcttctctcccaccttgcccagaccccctgcacccccatactcggagttcct

SEQ ID NO: 4513 - DNA, 120 bp, synthetic construct
  misc_feature 1..120: note = Artificially Synthesized Probe
  source 1..120: mol_type = other DNA
cttacccggaccccctgcacccccatactcggagttcctgttcttctctccccccttgcccagaccccctgcacccccatactcggagttcctgttcttctctccctccttgcccagacc

SEQ ID NO: 4514 - DNA, 120 bp, synthetic construct
  misc_feature 1..120: note = Artificially Synthesized Probe
  source 1..120: mol_type = other DNA
ctcggagttcctgttcttctctccctccttgcccagaccccctgcacccccatactcggagttcctgttcttctctcccaccttgcccagaccccctgcacccccatactcggagttcct

SEQ ID NO: 4515 - DNA, 120 bp, synthetic construct
  misc_feature 1..120: note = Artificially Synthesized Probe
  source 1..120: mol_type = other DNA
gataatacaccagttagctgtgtcgtttcagctacttagaggcttgactctaatagcagatcccggctggtaattttccctttttggtttgtaattgtggagtagacttagtatagagaa

SEQ ID NO: 4516 - DNA, 120 bp, synthetic construct
  misc_feature 1..120: note = Artificially Synthesized Probe
  source 1..120: mol_type = other DNA
ttcaagttccatatcacagcagacgaagagtcattcagctccagtttacggactgctggggtattttacacttgagtgcattttgctttaatgacctaggaaatagaatgtctaaggaaa

SEQ ID NO: 4517 - DNA, 120 bp, synthetic construct
  misc_feature 1..120: note = Artificially Synthesized Probe
  source 1..120: mol_type = other DNA
actaaaatagtttgaatcttatttatgaaaagtagaagtggttgccataaattaggttccccctgtttggtgatgctggggtgctaacagcatagagacttggggaagtgagacgtgtct

SEQ ID NO: 4518 - DNA, 120 bp, synthetic construct
  misc_feature 1..120: note = Artificially Synthesized Probe
  source 1..120: mol_type = other DNA
tctaaacagtagtagagctggtttcttctgagaaagcccccaagaacttacacatagattttaaagctgccaccttcccacaagtcacactgtgactcaccatttttagaatttcgcttt

SEQ ID NO: 4519 - DNA, 120 bp, synthetic construct
  misc_feature 1..120: note = Artificially Synthesized Probe
  source 1..120: mol_type = other DNA
cacaaacatgcataaacatgtgcatacagtcatacacagaaacatatacacatgcatgtgcacacacccgtgtctgcacagaaacatacacacgtgtatgaacacaaacatgcatacaca

SEQ ID NO: 4520 - DNA, 120 bp, synthetic construct
  misc_feature 1..120: note = Artificially Synthesized Probe
  source 1..120: mol_type = other DNA
atgcctgccctttgctcttataatctgaggaaaacttgggttcttttaaatgtttggctcataccctttctttccttggagcttgaatatactgtttcactgtcctcataacagcagtct

SEQ ID NO: 4521 - DNA, 120 bp, synthetic construct
  misc_feature 1..120: note = Artificially Synthesized Probe
  source 1..120: mol_type = other DNA
actgcacccggctggtggtgtggttttaatactcagttgagttcctttcctgtgcaatttcttttttcatctcttttattatctcattttcaagttcttgccctgttgaattaatgtgct

SEQ ID NO: 4522 - DNA, 120 bp, synthetic construct
  misc_feature 1..120: note = Artificially Synthesized Probe
  source 1..120: mol_type = other DNA
gttattacttttcctcttggttatgaactgtccggtattactgtttgctttgatgtggataaattcttctccaaggtatttttgtagccttgatctttactcaacgtcgactgcaggggc

SEQ ID NO: 4523 - DNA, 120 bp, synthetic construct
  misc_feature 1..120: note = Artificially Synthesized Probe
  source 1..120: mol_type = other DNA
gctttgaggctcaagaaagggcttggtttgaaaagtgatccctgttaaagcgtgtttgagcttaaaaatggtcatatgaaccgggcgaattgactcttttctgaaaggttttaattttcc

SEQ ID NO: 4524 - DNA, 120 bp, synthetic construct
  misc_feature 1..120: note = Artificially Synthesized Probe
  source 1..120: mol_type = other DNA
cccaacgactagaaccaataatcaggttaacactcattaaataagaagtgtctgtgcctcctgggataaaaatcctttataacgatctgggacgcgagctcaagtccctgttcccttgtc

SEQ ID NO: 4525 - DNA, 120 bp, synthetic construct
  misc_feature 1..120: note = Artificially Synthesized Probe
  source 1..120: mol_type = other DNA
gtggctcggccctaagtgggaaccattgagttaatgatgacatgacattctatcaagagatgataccacaagccatacagacatttcttacttgtgtttttgtcatcatgtttcagcttg

SEQ ID NO: 4526 - DNA, 120 bp, synthetic construct
  misc_feature 1..120: note = Artificially Synthesized Probe
  source 1..120: mol_type = other DNA
tatttccaaagaaaagatcgaaagtagtgtcactggtgcatctatgtggagttcctggcccactgattgaggctactgacctcacctacagtttggagccctttctgttttcccaaaata

SEQ ID NO: 4527 - DNA, 120 bp, synthetic construct
  misc_feature 1..120: note = Artificially Synthesized Probe
  source 1..120: mol_type = other DNA
ccaatctggataatctctcttgtacttgtattgagtgtccctgttgaaattcaatgacccaaataataccttcagggaatgtgctccagatgtcccatgactggcagaaccagaacttac

SEQ ID NO: 4528 - DNA, 120 bp, synthetic construct
  misc_feature 1..120: note = Artificially Synthesized Probe
  source 1..120: mol_type = other DNA
tcaggatgtggtcctttatcacgtcagggacaccgtgtgtctgaagtctcgggatgtggtcctttatcacgttggggacaccttgtgtctgaagtctcagaatacggtcctttatcatgt

SEQ ID NO: 4529 - DNA, 120 bp, synthetic construct
  misc_feature 1..120: note = Artificially Synthesized Probe
  source 1..120: mol_type = other DNA
ttaatttgtgcccagtaacataaaaatttataaacttctcagtttttatggcaaggtcattttaaaagggaaaatgtcccatagtaggggagggaatcaacccactccatggcgcccggt

SEQ ID NO: 4530 - DNA, 120 bp, synthetic construct
  misc_feature 1..120: note = Artificially Synthesized Probe
  source 1..120: mol_type = other DNA
taagacttgcatgaaaacttgatataaaatcttaaatgcttagagctgcctttgtcagtggaagccaatgtcctttgcatggttcttactgtgccgtaattaagctggagaacagctgtc

SEQ ID NO: 4531 - DNA, 120 bp, synthetic construct
  misc_feature 1..120: note = Artificially Synthesized Probe
  source 1..120: mol_type = other DNA
ctccacagcctagaccttgctcacataatcctggcgctttgcagaggaaggaggtggtaattttgcagattattatctaaaccagataaaatatcaaatgcccatttatctgttggaaat

SEQ ID NO: 4532 - DNA, 120 bp, synthetic construct
  misc_feature 1..120: note = Artificially Synthesized Probe
  source 1..120: mol_type = other DNA
atgcttgatttttgccctcagaaatgaattcctaagtgtcttgaagactttttgtttttagttaaactttaaaaacacctcagagatctaaaccccagggagcatcacggggctcctctc

SEQ ID NO: 4533 - DNA, 120 bp, synthetic construct
  misc_feature 1..120: note = Artificially Synthesized Probe
  source 1..120: mol_type = other DNA
gatgtctcggctcactctaaattcaggctggttgcctgagtggctcaagtccaggggcatggctttcacagaagatgttttataggccctgcaaacacatgccaggtccttcacatgcat

SEQ ID NO: 4534 - DNA, 120 bp, synthetic construct
  misc_feature 1..120: note = Artificially Synthesized Probe
  source 1..120: mol_type = other DNA
gcacctatgttctttgtggtccattattatgtcttttccctgttccagtttttgatctagttactgaaaggcctgtgctgctaattcctttcatacgtatcaatagtcaagggctatgtg

SEQ ID NO: 4535 - DNA, 120 bp, synthetic construct
  misc_feature 1..120: note = Artificially Synthesized Probe
  source 1..120: mol_type = other DNA
gcctccactgcgtgtgtgaccaggacagacggtgcctccactgtgtgagaccaggacagacgatgcctccactgtgtgtatgaccaggacagacgacgcctccactgtgtgtgtgaccag

SEQ ID NO: 4536 - DNA, 120 bp, synthetic construct
  misc_feature 1..120: note = Artificially Synthesized Probe
  source 1..120: mol_type = other DNA
cactgtgtgtgtgaccaggacagacgacgcctccactgtgtgtgtgaccaggacagacgcctccactgtgtgagaccaggacagacgatgcctccactgtgtgtatgaccaggacagacg

SEQ ID NO: 4537 - DNA, 120 bp, synthetic construct
  misc_feature 1..120: note = Artificially Synthesized Probe
  source 1..120: mol_type = other DNA
tgaccaggacagacgatgcctccactgtgtgtgtgaccaggacagacgatgcctccactgtgtgtgaccaggacagacgatgcctccactgtgtgtgtgaccaggacagacgatgcctcc

SEQ ID NO: 4538 - DNA, 120 bp, synthetic construct
  misc_feature 1..120: note = Artificially Synthesized Probe
  source 1..120: mol_type = other DNA
tgtgaccaggacagacggcgcctccactgtgtgtgtgaccaggacagacgacgcctccactgtgtgtgaccaggacagacgatgcctccactgtgtgtgtgaccaggacagacggcgcct

SEQ ID NO: 4539 - DNA, 120 bp, synthetic construct
  misc_feature 1..120: note = Artificially Synthesized Probe
  source 1..120: mol_type = other DNA
tcctgccactgagtttgcagagaaagtttgattggacacagccacacctatggctttgtagtgcttggggccactttcctagttgtggcagagaacaagtgtaccccacaacctgaacta

SEQ ID NO: 4540 - DNA, 120 bp, synthetic construct
  misc_feature 1..120: note = Artificially Synthesized Probe
  source 1..120: mol_type = other DNA
gattttatcttcttgtctgttaaaaaactgtttggcaccttaatttgcatgaatcgatttccagtcgctcaaatccagtttgtgcaatgacaagctggtgtggctgaaacggcagttgct

SEQ ID NO: 4541 - DNA, 120 bp, synthetic construct
  misc_feature 1..120: note = Artificially Synthesized Probe
  source 1..120: mol_type = other DNA
tgtgtgtgaatgcagggcgtggggagggacaaaagttgtttccccagcagcacgataaaatcactttgtgaactttggttcagtattttatttgtcaaagaagttaagttgcttaacatt

SEQ ID NO: 4542 - DNA, 120 bp, synthetic construct
  misc_feature 1..120: note = Artificially Synthesized Probe
  source 1..120: mol_type = other DNA
accatccctgcctcatcccccattcatacaaatgctcatctaggtcttaagagcaggcaaagcaattaatcaatatcccactgcagtaggacaaagtgttatgcaccttttatagataaa

SEQ ID NO: 4543 - DNA, 120 bp, synthetic construct
  misc_feature 1..120: note = Artificially Synthesized Probe
  source 1..120: mol_type = other DNA
tcttggctgtcttgatctcaggcagtcagagtcctggaaaaactattgatataagaggtcagagaccacagataattcactaagttaataagaactcagctaaagactccatgagacttc

SEQ ID NO: 4544 - DNA, 120 bp, synthetic construct
  misc_feature 1..120: note = Artificially Synthesized Probe
  source 1..120: mol_type = other DNA
ccttgttggtattcagggtattcagagtgttgtctttgcactgaaattggcagctttagaaacactggtggatttaaacaatcttgatctgaatcttagaggctgtcatgtgaatgtcct

SEQ ID NO: 4545 - DNA, 120 bp, synthetic construct
  misc_feature 1..120: note = Artificially Synthesized Probe
  source 1..120: mol_type = other DNA
cctcattctgcagcgagatggggcattcccgtttcaatgtctgtctgtgttgatattttcaaataatgcttggtctttccgtctgcaagtgctcaaactttatatatgtgtgtgtgtgtg

SEQ ID NO: 4546 - DNA, 120 bp, synthetic construct
  misc_feature 1..120: note = Artificially Synthesized Probe
  source 1..120: mol_type = other DNA
tcctttgaagagctttactccctcatgctctgttgtatgactggagacagaactaaaactaaaaggaggcaacagaggaggagtgcggtgggtttgttctctctgctcgtgaagaactca

SEQ ID NO: 4547 - DNA, 120 bp, synthetic construct
  misc_feature 1..120: note = Artificially Synthesized Probe
  source 1..120: mol_type = other DNA
accttccacatttggtcttctctgtacttgcccaccctcccctagagccatgcctggctctgataaagtgctactttataaattttaggttatttgaaagaagcaaaaggaacaaatgac

SEQ ID NO: 4548 - DNA, 120 bp, synthetic construct
  misc_feature 1..120: note = Artificially Synthesized Probe
  source 1..120: mol_type = other DNA
ctccgacctgctcctgctgtgatctaaactgctggctgggctgccagtttttctaattatctttttccttttctttgcaggttgtcttatattgagaacattttcttaatttgtcactgc

SEQ ID NO: 4549 - DNA, 120 bp, synthetic construct
  misc_feature 1..120: note = Artificially Synthesized Probe
  source 1..120: mol_type = other DNA
cccgttattctccaggtcgggtgtcaggcgcccgttattctccaggtggggtgtcaggcgcccgttattctccaggtggggtgtcaggcgcccgttattctccaggtggggtgccaggcg

SEQ ID NO: 4550 - DNA, 120 bp, synthetic construct
  misc_feature 1..120: note = Artificially Synthesized Probe
  source 1..120: mol_type = other DNA
aagatgggtcactgctactgtcaaccatggcggggaatttggagttttaaaggcagtgagaatcccttgggattttttaaagctggaagtcttttgatcagagttgcattttcagaagct

SEQ ID NO: 4551 - DNA, 120 bp, synthetic construct
  misc_feature 1..120: note = Artificially Synthesized Probe
  source 1..120: mol_type = other DNA
cggccctgcacccaggggaggagccatggaataggcttattacctggatgtcattactatttcaacctcaggattagacaaatgttaactttgtaaatcttaaaatacatactttcacac

SEQ ID NO: 4552 - DNA, 120 bp, synthetic construct
  misc_feature 1..120: note = Artificially Synthesized Probe
  source 1..120: mol_type = other DNA
aatatttttcatgtttaagctttagtaagctggactcttagtggattagctaacctgttgcagagtctgtccttagaacaatccggaatgtgggctctaccctttcttttggttgctttg

SEQ ID NO: 4553 - DNA, 120 bp, synthetic construct
  misc_feature 1..120: note = Artificially Synthesized Probe
  source 1..120: mol_type = other DNA
ttatgattcttagaagatctcttcagtgcattaagcagaaatgctgtttatgttagaaatgaattcacctgtggccaccataagtccatgctacgctggtctctcagatctggatctttg

SEQ ID NO: 4554 - DNA, 120 bp, synthetic construct
  misc_feature 1..120: note = Artificially Synthesized Probe
  source 1..120: mol_type = other DNA
cgttgtcaccggagtgccgtggccctaaggaatgacagcattaaggcatggacgttaaagatggacaaaagaattgttcacggtgttgtattttaaaatgactatgtgtatgacaattaa

SEQ ID NO: 4555 - DNA, 120 bp, synthetic construct
  misc_feature 1..120: note = Artificially Synthesized Probe
  source 1..120: mol_type = other DNA
cgagtgggttcacacgctcatcccgaccccgcgtgtcaccgcgagtggattcacacgctcatcccggccccgcgtgtcaccgcgagtgggttcacagcctcatcccgaccccgcgtgtca

SEQ ID NO: 4556 - DNA, 120 bp, synthetic construct
  misc_feature 1..120: note = Artificially Synthesized Probe
  source 1..120: mol_type = other DNA
cctcatcccgaccccgcgtgtcaccgcgagtggattcacacgctcatcccgaccccgcgtgtcaccgcgagtgggttcacagcctcatcccgaccccacatgtcaccgcgagtgggttca

SEQ ID NO: 4557 - DNA, 120 bp, synthetic construct
  misc_feature 1..120: note = Artificially Synthesized Probe
  source 1..120: mol_type = other DNA
gcgtgtcaccgcgagtgggttcacagcctcatcccgaccccacatgtcaccgcgagtgggttcacagcctcatcccgaccccgcgtgtcaccgcgagtgggttcacagcctcatcccgac

SEQ ID NO: 4558 - DNA, 120 bp, synthetic construct
  misc_feature 1..120: note = Artificially Synthesized Probe
  source 1..120: mol_type = other DNA
agaaaagtgtcaataggcagtcatggttcagaatcctgggtgccctcaaaataataaaaggtgatgccctgctcttgattttaccccttgaaacataagctgctttttttaggataccag

SEQ ID NO: 4559 - DNA, 120 bp, synthetic construct
  misc_feature 1..120: note = Artificially Synthesized Probe
  source 1..120: mol_type = other DNA
cactttatcctctaaggggttaattttacgcttttgttctctacaaaatgtagtttttaaaatgctgacacagtgtttagtgagcagtggctctgcccttgctgggttcttgtccttatc

SEQ ID NO: 4560 - DNA, 120 bp, synthetic construct
  misc_feature 1..120: note = Artificially Synthesized Probe
  source 1..120: mol_type = other DNA
ccccacatttgctcatggaaacatccatgtttttttcagtcggaaaatcaagttgtgtgaggaacctcattgagactcagtgtcatattacatcaactatttgtcagtttctcgggtaac

SEQ ID NO: 4561 - DNA, 120 bp, synthetic construct
  misc_feature 1..120: note = Artificially Synthesized Probe
  source 1..120: mol_type = other DNA
ctcggtttccgtggtcagcttggtttctgtggtcagctcggtttctgtagtcggctcggtgtgtgtggttggctcggtatgcatgttcagctcggtttccgtggtcggctcggtgtgcat

SEQ ID NO: 4562 - DNA, 120 bp, synthetic construct
  misc_feature 1..120: note = Artificially Synthesized Probe
  source 1..120: mol_type = other DNA
ctcttttgatctaggctgtaaaccaggattggtgacttacttttagtctgtaaaggtgcagggtgtttccagaaacaacatacataggacataccaaaacctctactttcagctactttg

SEQ ID NO: 4563 - DNA, 120 bp, synthetic construct
  misc_feature 1..120: note = Artificially Synthesized Probe
  source 1..120: mol_type = other DNA
tttcaaagcccaggttttggggtgagggaggatgtggcattttctcctttcctgtatttctgtgcctgtttctcctgtttctgagaaaagtgttctctgagccccttgccgtgggtgagt

SEQ ID NO: 4564 - DNA, 120 bp, synthetic construct
  misc_feature 1..120: note = Artificially Synthesized Probe
  source 1..120: mol_type = other DNA
acttgttatcttgtaaacgtgagccctcaaaggaagccgtaggcctgcagtcgtgttctgcctgagatgtgtgtggaaaatggtggtgagaagagccgtgaagcgtagcccaggaaagca

SEQ ID NO: 4565 - DNA, 120 bp, synthetic construct
  misc_feature 1..120: note = Artificially Synthesized Probe
  source 1..120: mol_type = other DNA
gtcagtcatgtggatttggaccaggtgtgaagggaaggaagtgttctggcctgttaggttgtcaaatagtaataatgcccaggtttctgtgcatggggtaagttaatcacctgtgttttg

SEQ ID NO: 4566 - DNA, 120 bp, synthetic construct
  misc_feature 1..120: note = Artificially Synthesized Probe
  source 1..120: mol_type = other DNA
tccatctttcagaggaatatgcttaccttcagctacagacttaaaaggtccttgtcatttcctcataagcacacatgataagtgagcagagagaacctcctgcctatttctttcttcttt

SEQ ID NO: 4567 - DNA, 120 bp, synthetic construct
  misc_feature 1..120: note = Artificially Synthesized Probe
  source 1..120: mol_type = other DNA
aagaggtaaagcctttgggttttaattagtgagagggggaaagtgagagaatgctaggaatgtgcaattcaattttgtcgaagatttttctattgagtcacggaaagcagcccagcaata

SEQ ID NO: 4568 - DNA, 120 bp, synthetic construct
  misc_feature 1..120: note = Artificially Synthesized Probe
  source 1..120: mol_type = other DNA
aatgaggaatttgtgatttattaaattttctgctgaatttgaatttcaccacaaccccccttttttttttctgcctagccatctggggtcaaggcctcacccattgtcagtgcttggtaa

SEQ ID NO: 4569 - DNA, 120 bp, synthetic construct
  misc_feature 1..120: note = Artificially Synthesized Probe
  source 1..120: mol_type = other DNA
cattatgttggcaaaataatatacttttcccagtgagtctcctcacatcttagtgcactcagactgctgccacagaatagcctggatcgagtgtcttataaacaacagtatttatttccc

SEQ ID NO: 4570 - DNA, 120 bp, synthetic construct
  misc_feature 1..120: note = Artificially Synthesized Probe
  source 1..120: mol_type = other DNA
agtgtgcctataaatatgactaagtgatttcacaactatatttaaaactgcatgaacagactcacgggtagaaaaacagcagtgatttgactgagccacaccagctttcggttttccagg

SEQ ID NO: 4571 - DNA, 120 bp, synthetic construct
  misc_feature 1..120: note = Artificially Synthesized Probe
  source 1..120: mol_type = other DNA
agggcgtatacaaaaagaaaatattcagttattccatattcctccactctgaaataaccactattgacagtgtgctggatttactttcaggacacacacaagcagagacatccttccatg

SEQ ID NO: 4572 - DNA, 120 bp, synthetic construct
  misc_feature 1..120: note = Artificially Synthesized Probe
  source 1..120: mol_type = other DNA
ccaacccagtctcctcatcttgacatttaagtagcttccatttcattacacacgtaacacattttaaagtatcttctccttaaactgcctggctgttttctcaggaactagtttgaaggg

SEQ ID NO: 4573 - DNA, 120 bp, synthetic construct
  misc_feature 1..120: note = Artificially Synthesized Probe
  source 1..120: mol_type = other DNA
ctgctacgggttttttcctttcaatttcaacatgccatggattcatgagagcaaatgagcttaaatgcaccatctataagcctattaatttttgaatttgcacaccagaggagtgccacc

SEQ ID NO: 4574 - DNA, 120 bp, synthetic construct
  misc_feature 1..120: note = Artificially Synthesized Probe
  source 1..120: mol_type = other DNA
tttaacatataagagaggctgggagcatttctgaaaaatggcctatagaaacacagggcaatgacaacctgtaaggaggatagaactggctgcaatccatacctgtaatattcaaactca

SEQ ID NO: 4575 - DNA, 120 bp, synthetic construct
  misc_feature 1..120: note = Artificially Synthesized Probe
  source 1..120: mol_type = other DNA
tttaattgcaaaggacccagtctttctgcctgacatattgggtgctagcagaatgttgccataacaaccaagcaagtaactgtggcaggttagcaagcagccaaaaatcattataatatt

SEQ ID NO: 4576 - DNA, 120 bp, synthetic construct
  misc_feature 1..120: note = Artificially Synthesized Probe
  source 1..120: mol_type = other DNA
tgcactattctcagcaggaattaacattatttggaaggtttgattcatggtttttgcattgtattggtgtcacgctgttgcactggacaagaccttaaaaaaactcttggaggctgagat

SEQ ID NO: 4577 - DNA, 120 bp, synthetic construct
  misc_feature 1..120: note = Artificially Synthesized Probe
  source 1..120: mol_type = other DNA
gagtcaggctcatttgggcttgaatcctgattcttacttcaaggatttgggcacaatatttaatctctatggatctctgcttctcaatcttcagatgtcaggaataataatacctggcca

SEQ ID NO: 4578 - DNA, 120 bp, synthetic construct
  misc_feature 1..120: note = Artificially Synthesized Probe
  source 1..120: mol_type = other DNA
ttcttcagttgtaaaatgggaattccagcacttacatcagaccagctgcaatgagtacatgcaactgtgcccctgaatttctaattgtacctggtaggtaacttagtaaatagcatttcc

SEQ ID NO: 4579 - DNA, 120 bp, synthetic construct
  misc_feature 1..120: note = Artificially Synthesized Probe
  source 1..120: mol_type = other DNA
agggaccaggcaaacaagaaaacctccggtgtaattttctctgaattagatttgtttgcgaacagcttgtggcctttcatctttgagaattgtgactatgttcattgatactaacaccag

SEQ ID NO: 4580 - DNA, 120 bp, synthetic construct
  misc_feature 1..120: note = Artificially Synthesized Probe
  source 1..120: mol_type = other DNA
gacagattggccttatattatatggacaagctacaaagatcaagtgatcttaaaagtgatatttgaggcccaccccagattattggattaggaatcaggaaacaccttgtggtgtgactt

SEQ ID NO: 4581 - DNA, 120 bp, synthetic construct
  misc_feature 1..120: note = Artificially Synthesized Probe
  source 1..120: mol_type = other DNA
atggcttttgttctggtttgctccctcctgtgtccccaccacttcacaaatgcctggtgaatgcttgtgggtagatatgctgtggtcagcctccttggaccaaggcgccctctttgctgt

SEQ ID NO: 4582 - DNA, 120 bp, synthetic construct
  misc_feature 1..120: note = Artificially Synthesized Probe
  source 1..120: mol_type = other DNA
agggatcttagggaagggagacttacttgcattctgagtgtgtctcccagccttcaatgtgttgatatttcgatgttgtgtaataaacacaggcattggtgaaccatggatacttctcta

SEQ ID NO: 4583 - DNA, 120 bp, synthetic construct
  misc_feature 1..120: note = Artificially Synthesized Probe
  source 1..120: mol_type = other DNA
cactgtgacgctccctaggaagttgcccatttatggctactagagcaaatgatatcatcacaataggtggctcctgtctaaatagggatcatttgtgaaatgagattatagacatttatc

SEQ ID NO: 4584 - DNA, 120 bp, synthetic construct
  misc_feature 1..120: note = Artificially Synthesized Probe
  source 1..120: mol_type = other DNA
tgtaattctaaggaggcaagttcagtcttcagctataaccattttcccaataatcaccgagtactggagcaatttgtaacgcaggagctgttccagcttattctccatttgctatagcaa

SEQ ID NO: 4585 - DNA, 120 bp, synthetic construct
  misc_feature 1..120: note = Artificially Synthesized Probe
  source 1..120: mol_type = other DNA
aaaatgttatactctgtacaggactgagcatggccaataggaagatgttattggtttgtgcatatttaggtgggtatcgactatttcattcataattttgttcccagagctcggtgcctc

SEQ ID NO: 4586 - DNA, 120 bp, synthetic construct
  misc_feature 1..120: note = Artificially Synthesized Probe
  source 1..120: mol_type = other DNA
gctgaatgtgacctctccacgtagtcaacacataaaaattaagctctgccaattatatataacattttaagtgagtatttcctctctccttttatcctgctgcatgcggcagagggacaa

SEQ ID NO: 4587 - DNA, 120 bp, synthetic construct
  misc_feature 1..120: note = Artificially Synthesized Probe
  source 1..120: mol_type = other DNA
ttaattatgaaatgtttaaaagatgcccgtgtgcttcctttcttatgggatcatcagagacttttatgctcgtcttccttccaattcgatactctcctgagattcatctgtgctgaacgt

SEQ ID NO: 4588 - DNA, 120 bp, synthetic construct
  misc_feature 1..120: note = Artificially Synthesized Probe
  source 1..120: mol_type = other DNA
cctgctgtctggatggcaaagctgtgcttgtagggcaggtcttcatggtgaaaaagaccctgatgggacgtgggagagctgcggcccagtatagtctcagtcccaatttcttcttaagtc

SEQ ID NO: 4589 - DNA, 120 bp, synthetic construct
  misc_feature 1..120: note = Artificially Synthesized Probe
  source 1..120: mol_type = other DNA
agaacatcatttatttgatgggaaccacagtgcacagccttttcaaatgggcttcgttcactttgtaatgtgcatttacggtgccttcgtgtcttttcctggcttagctgcttatttctt

SEQ ID NO: 4590 - DNA, 120 bp, synthetic construct
  misc_feature 1..120: note = Artificially Synthesized Probe
  source 1..120: mol_type = other DNA
tccttgaaagactcacaggaatgtgcctaatggaaacccagtctgggtaacaagaacaaacattaaaaatccccggctgaagttggcgggtagcactgccctgcactagacacacattta

SEQ ID NO: 4591 - DNA, 120 bp, synthetic construct
  misc_feature 1..120: note = Artificially Synthesized Probe
  source 1..120: mol_type = other DNA
taatatgatattataatgctgtacctacgataaaagttatttgtgctcgccaaatgctgagtgctggcctgagggcttggaattcaacatcatgtttggattccacaacaagatgaggtg

SEQ ID NO: 4592 - DNA, 120 bp, synthetic construct
  misc_feature 1..120: note = Artificially Synthesized Probe
  source 1..120: mol_type = other DNA
gtgtggatttcacaaacagttttagaaatgctcttgcttctgccatttataacatcaacatacaaccccaaaatgtgtggtgaaaacacgtgaaagtcaaatccgtgtccttaggctctg

SEQ ID NO: 4593 - DNA, 120 bp, synthetic construct
  misc_feature 1..120: note = Artificially Synthesized Probe
  source 1..120: mol_type = other DNA
tgaagtgaatatgtgtgtgtgtcaataaaagaaatatacttaatcacccagttatttagtcaaacatttaaaaagtgacatgtccttctgacctggccctgcaagctgcaggaggctccc

SEQ ID NO: 4594 - DNA, 120 bp, synthetic construct
  misc_feature 1..120: note = Artificially Synthesized Probe
  source 1..120: mol_type = other DNA
atttctccctgctggctgagacggaatctgctgttactgtattaatttaattagggagttcctatgtgacacattaggatttttagctgtatccgactaattatcactccccatttgtac

SEQ ID NO: 4595 - DNA, 120 bp, synthetic construct
  misc_feature 1..120: note = Artificially Synthesized Probe
  source 1..120: mol_type = other DNA
ccaaacgctttatcttttcacacgtggatatttttatcttctgctattctgtggcagagtccaggggagtaagttctgatgttttttgtacatttaccttcagactgagactgaactcac

SEQ ID NO: 4596 - DNA, 120 bp, synthetic construct
  misc_feature 1..120: note = Artificially Synthesized Probe
  source 1..120: mol_type = other DNA
ctttccagtgaccaggtcgtcaaggcgtgggtgattttttagaagtcatctggtgtatcgtttaagattatatagacttgatgcaggtccaagaaaattcagtactgcccaacaaaggga

SEQ ID NO: 4597 - DNA, 120 bp, synthetic construct
  misc_feature 1..120: note = Artificially Synthesized Probe
  source 1..120: mol_type = other DNA
aaaaagaaaaaagacccgaaaaatcacaggatggtctgggcctgagttcttaatagttattctatggggtttttccagagagagcaattggaagatgcatttgaggtgtgtctctcaaag

SEQ ID NO: 4598 - DNA, 120 bp, synthetic construct
  misc_feature 1..120: note = Artificially Synthesized Probe
  source 1..120: mol_type = other DNA
tttcacttgtgaatgacgttagaaactttgcggtctgtacgtctccttcccagcagttggcagagttttaggaatgaagcatcgtcttcctcatcgttaaaggccattccccttagtgtg

SEQ ID NO: 4599 - DNA, 120 bp, synthetic construct
  misc_feature 1..120: note = Artificially Synthesized Probe
  source 1..120: mol_type = other DNA
taagaatgttcttaagaagcccttgagctatgtgttttgctccattgtttctgtagagagattagcccacgcagtggttactgaaaaatcttggcatagtttatcaaactccccttttcc

SEQ ID NO: 4600 - DNA, 120 bp, synthetic construct
  misc_feature 1..120: note = Artificially Synthesized Probe
  source 1..120: mol_type = other DNA
atgtcctcaccagcgtttcatgctgtcagggtctagcttgtggtcatctgagcaggtgtgtgatggtgtcttcttgatttattttgcatttctttggtgagaagtggtgtggagtgtctt

SEQ ID NO: 4601 - DNA, 120 bp, synthetic construct
  misc_feature 1..120: note = Artificially Synthesized Probe
  source 1..120: mol_type = other DNA
tcttaggaacatttatggactgtgaacgatgaataggaactctccgaggtgctggagacacagagacaattaaaatatgattcatagattggacgaggttataatccagttgggaggaca

SEQ ID NO: 4602 - DNA, 120 bp, synthetic construct
  misc_feature 1..120: note = Artificially Synthesized Probe
  source 1..120: mol_type = other DNA
gttgtgagtcctgtgcactaatatatttaaatccttaagtgttgaaattatactaggtcagatccactcactcagcgctctgaggagttgtccaggctactttctcatactggacattta

SEQ ID NO: 4603 - DNA, 120 bp, synthetic construct
  misc_feature 1..120: note = Artificially Synthesized Probe
  source 1..120: mol_type = other DNA
gatttattgagtctttcctataggcagggcacccaaagttcacccaggatactaggaactttgagaatttaaaacactctcacatgttctgaacttaatttcacccacagcgacaaagaa

SEQ ID NO: 4604 - DNA, 120 bp, synthetic construct
  misc_feature 1..120: note = Artificially Synthesized Probe
  source 1..120: mol_type = other DNA
gaagggcttatttgaggactgctgggagatcagaggtattcatcacacaggaagagggtgtgcactcttttctttgttaaaaattttatctagattgaaaaacctggtaggaacaaaaca

SEQ ID NO: 4605 - DNA, 120 bp, synthetic construct
  misc_feature 1..120: note = Artificially Synthesized Probe
  source 1..120: mol_type = other DNA
tggggcaattaggtggcatttatgagtcttttgttatggcacacggttccaaagtagatcatttgaaagcattaatttcatgtgcaagcgccagtacacgattcagcaattacaacgagt

SEQ ID NO: 4606 - DNA, 120 bp, synthetic construct
  misc_feature 1..120: note = Artificially Synthesized Probe
  source 1..120: mol_type = other DNA
tttcagttagcgtgatatcctcccattccatgcatgttttcagaaatgacagacattctttccttcttttgaggctgaatattgttccattgtgtgcgtacaccacacttcctttattcg

SEQ ID NO: 4607 - DNA, 120 bp, synthetic construct
  misc_feature 1..120: note = Artificially Synthesized Probe
  source 1..120: mol_type = other DNA
tgcagtttcagttctgatgtgtaaatctttgattattattaaagagactgtgcttttcccgtgtgtattctcagcgcctttattgaagatcaagctgtgcatgtgtgggttcgtttctgg

SEQ ID NO: 4608 - DNA, 120 bp, synthetic construct
  misc_feature 1..120: note = Artificially Synthesized Probe
  source 1..120: mol_type = other DNA
atatatgtgcgcccaacaatggagcacctaaatatataaagtaaatgtgaaaaggatctaaaggtagagataggctatgatgcagcaatcatagggcactttaatataccactttcaata

SEQ ID NO: 4609 - DNA, 120 bp, synthetic construct
  misc_feature 1..120: note = Artificially Synthesized Probe
  source 1..120: mol_type = other DNA
gtagtcttgatgcatctccaaattgtcagagcctccttccaaaatctactggacattctcaccttgatgattggttatcactaacaacccatgtcaaaacagaatccattttactgtctc

SEQ ID NO: 4610 - DNA, 120 bp, synthetic construct
  misc_feature 1..120: note = Artificially Synthesized Probe
  source 1..120: mol_type = other DNA
aaacagctgaattttagtctttctctgtctgtttttcatgcccttgagatgggataaagctgtcaaatctctgacatgtggtgcatcatcagagattgtaggaaatttagctgtggcttc

SEQ ID NO: 4611 - DNA, 120 bp, synthetic construct
  misc_feature 1..120: note = Artificially Synthesized Probe
  source 1..120: mol_type = other DNA
tatttttaaaaggaggggtgttttcctctggaggacattaaaggacattcctacaacatatccatccattctttcgcttttgtatggattccacattgtgatcagacctgattgtttggg

SEQ ID NO: 4612 - DNA, 120 bp, synthetic construct
  misc_feature 1..120: note = Artificially Synthesized Probe
  source 1..120: mol_type = other DNA
ttaaacttagtattccagtggcttggagtacttagctaaactgattactttggaagaacatcttccattctttggaattctaacctcatcagaacgttaacttcagcttgagggacgtgg

SEQ ID NO: 4613 - DNA, 120 bp, synthetic construct
  misc_feature 1..120: note = Artificially Synthesized Probe
  source 1..120: mol_type = other DNA
ctagtaagacgctaactattaaaaacatctacttaataaagttacaaagagaaatggaacatcgtcttcattccaccatccagatggctggtattttgctgtgttgccttcctgcgccca

SEQ ID NO: 4614 - DNA, 120 bp, synthetic construct
  misc_feature 1..120: note = Artificially Synthesized Probe
  source 1..120: mol_type = other DNA
ttcagaggagtcacatgcctctccagggacagagccttcaaggctgcagacattgattggatcttgtaattacagtcacactgtctcgtgctgaggtttcagggttggttctgcagaatc

SEQ ID NO: 4615 - DNA, 120 bp, synthetic construct
  misc_feature 1..120: note = Artificially Synthesized Probe
  source 1..120: mol_type = other DNA
aacaccttcacactgacagacagaaacaccttcacaccgacagccagacagaaacactttcacactaatagccagacagaaacaccttcacaccaacagccagacagaaacaacttcaca

SEQ ID NO: 4616 - DNA, 120 bp, synthetic construct
  misc_feature 1..120: note = Artificially Synthesized Probe
  source 1..120: mol_type = other DNA
tgggtgaagaaaaagaaacaaaaaaccggcttcaagtgcttttctctgttttgtgctgaggcttaaatttctcagtcctttgatggtgcatcacaccttccaacatgtcttgtttctatg

SEQ ID NO: 4617 - DNA, 120 bp, synthetic construct
  misc_feature 1..120: note = Artificially Synthesized Probe
  source 1..120: mol_type = other DNA
tgtcggctttatcaggtcccaggccaaaacagtcccgtgctggagaagaaagctctactgaggctctactcttaaatgtctttttctttttgtaacataaaaaccttctaattctagaat

SEQ ID NO: 4618 - DNA, 120 bp, synthetic construct
  misc_feature 1..120: note = Artificially Synthesized Probe
  source 1..120: mol_type = other DNA
catcatcaagagctttagggaccagtgtgttagcacaaaaggagaagcagcagcactcaacctctgtggcatggagaggaaccccccagcgtgagaactacctccctgtgctccagagtc

SEQ ID NO: 4619 - DNA, 120 bp, synthetic construct
  misc_feature 1..120: note = Artificially Synthesized Probe
  source 1..120: mol_type = other DNA
agtctgcttagaggtttgtatgaaccccagccgcatggccttcgacatttctgcctcttctcttactacgttgactggttttgatctgaagagaaaactgccgtgagttatatttccttg

SEQ ID NO: 4620 - DNA, 120 bp, synthetic construct
  misc_feature 1..120: note = Artificially Synthesized Probe
  source 1..120: mol_type = other DNA
taggtgtgcattccaacagtctgttcgtttggaaaagggtacatttcatggctcactcctctggggctagtgtgtattttagaaaatactgttcttacagcatttcaaagagattctttg

SEQ ID NO: 4621 - DNA, 120 bp, synthetic construct
  misc_feature 1..120: note = Artificially Synthesized Probe
  source 1..120: mol_type = other DNA
gaaaagtgttcggatgtgtttctatgtgaagctttgaagcttcagaggtggagaacgtcttctgccctgagatttctacattaattaagtgggtagcttgtttgaaatcaattggtttac

SEQ ID NO: 4622 - DNA, 120 bp, synthetic construct
  misc_feature 1..120: note = Artificially Synthesized Probe
  source 1..120: mol_type = other DNA
tctgccacgcaggacagagttttgtaagaaggaggggctgctgagaaaccgtgtgttctgtagaaatagactaaccttgaaaatggattcaatttcatacagatgatagcatttaaaaat

SEQ ID NO: 4623 - DNA, 120 bp, synthetic construct
  misc_feature 1..120: note = Artificially Synthesized Probe
  source 1..120: mol_type = other DNA
gggaaggtcctcgtcacccctgagccgaacacgacacgatgatgggaaggtccttgtcaccactgaggcaaacacctaagacagtcaagatggtggattttatattatgtttattttagc

SEQ ID NO: 4624 - DNA, 120 bp, synthetic construct
  misc_feature 1..120: note = Artificially Synthesized Probe
  source 1..120: mol_type = other DNA
atattatatatttataccattaatgtgtagacatggtctcctgaaggctctgcacaagtccatgcaattctgataatatttcaggaaatgttatctccccactgggcctgtcatgtgggc

SEQ ID NO: 4625 - DNA, 120 bp, synthetic construct
  misc_feature 1..120: note = Artificially Synthesized Probe
  source 1..120: mol_type = other DNA
ttgagttggcctttggtgaggatgccagtgatggacctggctgtgggaatcttctaacaacaaaccctttctgggcccctgcatcaggtggcatcacaagaacacaaagcgcttgcttgt

SEQ ID NO: 4626 - DNA, 120 bp, synthetic construct
  misc_feature 1..120: note = Artificially Synthesized Probe
  source 1..120: mol_type = other DNA
agcatcttcagagggacttgaactcttgacttaattgatcctgaacacgatcaataacagaggcccgaatggtttctagcctggccgaggcgtttgctgactctgtctcatttaatcctt

SEQ ID NO: 4627 - DNA, 120 bp, synthetic construct
  misc_feature 1..120: note = Artificially Synthesized Probe
  source 1..120: mol_type = other DNA
ttctaggagggttttctattgaagggagccattctagggttttttttttttttactgaagggagccattctaggagggttttctactgaagggggccattctaggatggttttctactga

SEQ ID NO: 4628 - DNA, 120 bp, synthetic construct
  misc_feature 1..120: note = Artificially Synthesized Probe
  source 1..120: mol_type = other DNA
gtgcttgtcacttacttgtgagtgacacctgtgatgaactgtgttcaaaagcaaattatcaaatgagaatagaaccatttggactctgtagaggataagactctaagggttctaggagca

SEQ ID NO: 4629 - DNA, 120 bp, synthetic construct
  misc_feature 1..120: note = Artificially Synthesized Probe
  source 1..120: mol_type = other DNA
ctgagtttccagaggggcagaaaaccaacttgcgtgttttctttttattgttgcttttttgaaaaaatggtcctaatttcagcttgtttttccaaccatgtgaaaggatggactggacgc

SEQ ID NO: 4630 - DNA, 120 bp, synthetic construct
  misc_feature 1..120: note = Artificially Synthesized Probe
  source 1..120: mol_type = other DNA
tgtaagatgatgctgtgagatgtgagtgagtgcacgtgcctgtgatgtgcgctgggtctgtgaagtgtgcacgtgcctgtgacgtgtgctgggtctgtgaggtgtgaatgtgtctatgag

SEQ ID NO: 4631 - DNA, 120 bp, synthetic construct
  misc_feature 1..120: note = Artificially Synthesized Probe
  source 1..120: mol_type = other DNA
tgcataggtctgtgacgtgctgggtctgtgaggtgtgtacgggtctgtgaggtgtgcatgggtctgtgacatgtgctgggtctgtgaggtgtgcacgggtctgtgaggtgtgcacgtgcc

SEQ ID NO: 4632 - DNA, 120 bp, synthetic construct
  misc_feature 1..120: note = Artificially Synthesized Probe
  source 1..120: mol_type = other DNA
catgtgagagatccagcagtgccatactgtccctgaaattaggggaaaacaatgagaaacccaaacatctgcaagtaactgctttccattttcagggaagatttatagcctttttttttt

SEQ ID NO: 4633 - DNA, 120 bp, synthetic construct
  misc_feature 1..120: note = Artificially Synthesized Probe
  source 1..120: mol_type = other DNA
atggcctccagctccatccatgttcctgcagaggtcatgggtcttattctttttatggctgtatagtattccatggtatagatgtaccacattctctatattcagtctgtcattgctggg

SEQ ID NO: 4634 - DNA, 120 bp, synthetic construct
  misc_feature 1..120: note = Artificially Synthesized Probe
  source 1..120: mol_type = other DNA
ttttgctctacagaggttcttaagtttaattggatcccatttgtcaatttccccttttgttgcagaaattgcatgaatcatgaaatctttgctcattcaggatgatattgcctaggttgt

SEQ ID NO: 4635 - DNA, 120 bp, synthetic construct
  misc_feature 1..120: note = Artificially Synthesized Probe
  source 1..120: mol_type = other DNA
ttctattgcctgattgccctggccagaacttccaatactatgttgaatgggactagtgagagtcggcgtccttgtcttgtgctagttttcaaggggaattcttccagcttttacctatgc

SEQ ID NO: 4636 - DNA, 120 bp, synthetic construct
  misc_feature 1..120: note = Artificially Synthesized Probe
  source 1..120: mol_type = other DNA
tgattttcttcagctctgattttggttatttcttgtcttctgctagctttggagttgatttgttcttgcttctccaattcttttaattgtgatgttaggtagttaatttgagatctttcc

SEQ ID NO: 4637 - DNA, 120 bp, synthetic construct
  misc_feature 1..120: note = Artificially Synthesized Probe
  source 1..120: mol_type = other DNA
ccatagatgctgtagaaatttaaatgatctaaatacagtggtggcatctttagggatccttcttgtaggcagtggtaaaatcaaacaattcagaggacggaggtgtagctgtgaagtgtc

SEQ ID NO: 4638 - DNA, 120 bp, synthetic construct
  misc_feature 1..120: note = Artificially Synthesized Probe
  source 1..120: mol_type = other DNA
aagagaatattcattactgtatctggaacacgaagaactgaataaaaattagttgactctgagtctgaacacagttgatgggaagacagaaaccaaagcaaaacctcttccgcagccaac

SEQ ID NO: 4639 - DNA, 120 bp, synthetic construct
  misc_feature 1..120: note = Artificially Synthesized Probe
  source 1..120: mol_type = other DNA
ttgggctcagagcctccccctttcacagtgggcagcactggttcacagttaggcttttgaaagtttttttttttcctttaagaaaatcagacaaaagtatcagcaattcaaacatggaaa

SEQ ID NO: 4640 - DNA, 120 bp, synthetic construct
  misc_feature 1..120: note = Artificially Synthesized Probe
  source 1..120: mol_type = other DNA
tgacactctgctatgaggaccgaaagaacttggagataaatatacatgtactatgtggtgggaccgtttttgaatctgaactaaattaaatgatggaaaacgaccttgggtgagttcttc

SEQ ID NO: 4641 - DNA, 120 bp, synthetic construct
  misc_feature 1..120: note = Artificially Synthesized Probe
  source 1..120: mol_type = other DNA
aaaaatgagtctgctggcaaaaccctgtgtcaggcagcaacttataacaaaaacaggaaaatccctactacatcttagctaagttggaaattcaaacatctttgcaggtcccatttcacc

SEQ ID NO: 4642 - DNA, 120 bp, synthetic construct
  misc_feature 1..120: note = Artificially Synthesized Probe
  source 1..120: mol_type = other DNA
aaaccctagtcctttggatgccatgatgcctatcctggtatctttagaatccgttaccgcccattctagactttgcagaacccatgaacacccatcctaatttatttagaaactagtcat

SEQ ID NO: 4643 - DNA, 120 bp, synthetic construct
  misc_feature 1..120: note = Artificially Synthesized Probe
  source 1..120: mol_type = other DNA
catcctcattcctttagaattcatgacaacacatccttgtctcttcagaacttataaccttctatccttgttcctttagcatccatgagcatctgtcctattttggccatttgctcagaa

SEQ ID NO: 4644 - DNA, 120 bp, synthetic construct
  misc_feature 1..120: note = Artificially Synthesized Probe
  source 1..120: mol_type = other DNA
aagtttgattcagtcttgaaaataccatttctctcatttctcctgaccagtagctcccctcgtatttgatggtgaagatttgttaggctctaaatggaatcataggagctctgggaagag

SEQ ID NO: 4645 - DNA, 120 bp, synthetic construct
  misc_feature 1..120: note = Artificially Synthesized Probe
  source 1..120: mol_type = other DNA
ttcctaagggaaaaaaagaaatagttctatgcacaacctctttttctctttttttctctatgtacaacctctttttctcctcctccagttcctaggtgtctctccctgcctttctctcac

SEQ ID NO: 4646 - DNA, 120 bp, synthetic construct
  misc_feature 1..120: note = Artificially Synthesized Probe
  source 1..120: mol_type = other DNA
tatcttttgaaatacagataataaccatcagtgtcattgctgtcatctgaaatgccacacacagcccccgtgtggtgttttcatttttcccatcaaatcatctcgttttagtgggtagaa

SEQ ID NO: 4647 - DNA, 120 bp, synthetic construct
  misc_feature 1..120: note = Artificially Synthesized Probe
  source 1..120: mol_type = other DNA
tttgatttatttgtgcatttcagactcgcaaggttttacgttgtcttgtgtataagttactgaaaccagtgtttgggaatttgaaagcaaaacattgcagaggcgggaaggccgctctac

SEQ ID NO: 4648 - DNA, 120 bp, synthetic construct
  misc_feature 1..120: note = Artificially Synthesized Probe
  source 1..120: mol_type = other DNA
ctttgattaagagtctcagggtcatgttagtcagaatgtcttttggaaagaacatttgttgtctctggaaggaaagatgtgcagagactcttgaggggtccaggagaccagacgtgggtc

SEQ ID NO: 4649 - DNA, 120 bp, synthetic construct
  misc_feature 1..120: note = Artificially Synthesized Probe
  source 1..120: mol_type = other DNA
atgtgaagtagaaaggctggaggttgttttgatgtggcctcataagggttaagtggattagtcattcgaggcttggtataaagagtctgaactaagagtctaaagatgcactttcctatt

SEQ ID NO: 4650 - DNA, 120 bp, synthetic construct
  misc_feature 1..120: note = Artificially Synthesized Probe
  source 1..120: mol_type = other DNA
ataacacattctgatgttcccaccatgaccagattggccaacaacacgtttcccagaacctgtccctggtgttaagagatatgagattgatttagctacttggtattttatatacttacg

SEQ ID NO: 4651 - DNA, 120 bp, synthetic construct
  misc_feature 1..120: note = Artificially Synthesized Probe
  source 1..120: mol_type = other DNA
tttcatttttgcttagttttcttgtaactgtggatacagttcgagttggtgctggcatgttccattctcccacgttgtaccttttcacatgttaacctgaatcctacgttttacgatagg

SEQ ID NO: 4652 - DNA, 120 bp, synthetic construct
  misc_feature 1..120: note = Artificially Synthesized Probe
  source 1..120: mol_type = other DNA
caaaaaagtaataaaaagcaactcacagatatgacgattgacattcaaagtaaaacaatatcaacaagataaaccaggagcagaagggacctgtcagcatgaaccgccgtacgcttgaga

SEQ ID NO: 4653 - DNA, 120 bp, synthetic construct
  misc_feature 1..120: note = Artificially Synthesized Probe
  source 1..120: mol_type = other DNA
cggctgctgttccacattaggtgagatgtttgctttggggttctggtaagatatgctgtgttacagacatttcctgtatttctagcttgtgaaggggttttatccagaatatcttttgaa

SEQ ID NO: 4654 - DNA, 120 bp, synthetic construct
  misc_feature 1..120: note = Artificially Synthesized Probe
  source 1..120: mol_type = other DNA
aatacaaaactcactggtagtttttcttggcaacatttacttactgtagcatatatgtgtacaccttgatatagaactgagctggcatgcactcgcccaacacagtaaagccagatgctc

SEQ ID NO: 4655 - DNA, 120 bp, synthetic construct
  misc_feature 1..120: note = Artificially Synthesized Probe
  source 1..120: mol_type = other DNA
ctggaaaacaattaagtccaactttatcagaaatagatttctgaaactgtgactattttgaccaaattataaagctggtttggagttaagaagggcctggacacaaacactttgctcacc

SEQ ID NO: 4656 - DNA, 120 bp, synthetic construct
  misc_feature 1..120: note = Artificially Synthesized Probe
  source 1..120: mol_type = other DNA
aactttgaatatgatttttagtgctaaagagactccgataagatgattctattctttattttctatttcctccattcttgtcactgaaaggtgtccctccccaaggactctaacacctta

SEQ ID NO: 4657 - DNA, 120 bp, synthetic construct
  misc_feature 1..120: note = Artificially Synthesized Probe
  source 1..120: mol_type = other DNA
tttacctcttggccacagagcacagaatcaatgagccagatcctccaaaaatcaaactttattcaagtcaagaagctcattctcttcctgtgcttaagatatttttcccaacctgctcat

SEQ ID NO: 4658 - DNA, 120 bp, synthetic construct
  misc_feature 1..120: note = Artificially Synthesized Probe
  source 1..120: mol_type = other DNA
ggcctggctgctctccagaatgaccatttttaaatgtagtgatcttaaatggtgaagagtaaatgctcagaacaaagacatttgatagcacctgttgagtgctggaggtattctgtttgt

SEQ ID NO: 4659 - DNA, 120 bp, synthetic construct
  misc_feature 1..120: note = Artificially Synthesized Probe
  source 1..120: mol_type = other DNA
ccctgtttgaatgtttctagtattcacagcccgggtcactgtctttctataacgattggtatctgaaataagaacatgggctgcaacttacagccttgctctttctactatataaacttc

SEQ ID NO: 4660 - DNA, 120 bp, synthetic construct
  misc_feature 1..120: note = Artificially Synthesized Probe
  source 1..120: mol_type = other DNA
ctgcaaaaatattttttgaagccaagtttcagtctgcagcggtgccttctcttcctgtttatttactagtcctggcctgtgcggctggtgggaaattcttcttgtttatttacttgtcct

SEQ ID NO: 4661 - DNA, 120 bp, synthetic construct
  misc_feature 1..120: note = Artificially Synthesized Probe
  source 1..120: mol_type = other DNA
ctgccctctccactgtgcaggaacatggcacattttcataacatttcaaattttaaatggtgctttttttctatgtaagcatcataacagtgtggccatcagcccagtaagaagaatcat

SEQ ID NO: 4662 - DNA, 120 bp, synthetic construct
  misc_feature 1..120: note = Artificially Synthesized Probe
  source 1..120: mol_type = other DNA
tctgtctcaaaaatagataaaaatgataagttctctgtcttcttcattgaaggtgtggcaggaatgtggtttggtttccttgggtctgtctttgttgagttcaggactctgctgtgtcct

SEQ ID NO: 4663 - DNA, 120 bp, synthetic construct
  misc_feature 1..120: note = Artificially Synthesized Probe
  source 1..120: mol_type = other DNA
ctcacgggcacgtgaatcagaactcttgaattccacacagctgatggttagaagagagcctatattattaaaaaaagaaaaatgtaatccagaatgttggtgttgtggtcaaataggatc

SEQ ID NO: 4664 - DNA, 120 bp, synthetic construct
  misc_feature 1..120: note = Artificially Synthesized Probe
  source 1..120: mol_type = other DNA
tagtatagaacatcttttgtaaaagtgccataagaagataaaacatggcatttctgacgtgaagagctgaaaagggcaggtctcaattcatgcttgttctgtaagccctggagtcacagg

SEQ ID NO: 4665 - DNA, 120 bp, synthetic construct
  misc_feature 1..120: note = Artificially Synthesized Probe
  source 1..120: mol_type = other DNA
tccattgctagctcagctagcaacataacagaggactagatgcacgtgtgttatttgaatggcataacagataagggaaggcaagataattaggaggaattttggaatacctggagttaa

SEQ ID NO: 4666 - DNA, 120 bp, synthetic construct
  misc_feature 1..120: note = Artificially Synthesized Probe
  source 1..120: mol_type = other DNA
tgtatgaacagacaaaccacaaatggcctgtattcacaatgcaaaggaaggaaaagcaaaagcaaaagttaatattcacctagatgcaacttctctgtattagtaggtggccaagggacc

SEQ ID NO: 4667 - DNA, 120 bp, synthetic construct
  misc_feature 1..120: note = Artificially Synthesized Probe
  source 1..120: mol_type = other DNA
tcaacagacccctctcctccttccacttctctcctcctgttttctagtttgaaactcttaccaataatgctgctgtaaacatcttctgcatatttttggtgaatctatggatgtattctt

SEQ ID NO: 4668 - DNA, 120 bp, synthetic construct
  misc_feature 1..120: note = Artificially Synthesized Probe
  source 1..120: mol_type = other DNA
catgtaattcagtgccattcatcaatattatcctttgtagttagaacttccattaggttctggaagcgttcctgcgtgtatttagacctgtaatatctctggaactgtgtgtgtgcacat

SEQ ID NO: 4669 - DNA, 120 bp, synthetic construct
  misc_feature 1..120: note = Artificially Synthesized Probe
  source 1..120: mol_type = other DNA
tggcctcaagacaagtttgagaagtgtttctttttctctactgtgaagaatttgtatagtttatattatttattctttaaacattggaaatatttctggagaagccatctacttctggtg

SEQ ID NO: 4670 - DNA, 120 bp, synthetic construct
  misc_feature 1..120: note = Artificially Synthesized Probe
  source 1..120: mol_type = other DNA
tacttgagcttttctgggtctttttttaggttcctgcatatggccaattttggcaaatgttttgtgtgtacttaaaaaatgaaattcttttatttctgacttcagtggtctctatgtatc

SEQ ID NO: 4671 - DNA, 120 bp, synthetic construct
  misc_feature 1..120: note = Artificially Synthesized Probe
  source 1..120: mol_type = other DNA
gttctccctttcttgcatccagttgtattgacctagatttatcttttttattccacattttcctctcttgactcgtcactttcactttcagtagttcctgaggatcaccacagtcatctc

SEQ ID NO: 4672 - DNA, 120 bp, synthetic construct
  misc_feature 1..120: note = Artificially Synthesized Probe
  source 1..120: mol_type = other DNA
agggtggtgtccatgccctgttgacaggattggacactgctcaacttggaggttattctaatgctagagaaagaaaaacaaaatggatgaatataacactttcttccatgtaataatgga

SEQ ID NO: 4673 - DNA, 120 bp, synthetic construct
  misc_feature 1..120: note = Artificially Synthesized Probe
  source 1..120: mol_type = other DNA
ctcatcttctccatccccaggatcaggcatttaggttgttctgtttacacgaactactctttgtactgttgcagtcaacttatttttacacaaatctttggctttctttctggttattcc

SEQ ID NO: 4674 - DNA, 120 bp, synthetic construct
  misc_feature 1..120: note = Artificially Synthesized Probe
  source 1..120: mol_type = other DNA
ttttgcctcttagtggctctgtgcaaaaaatgctgccgtgttcttccacaaaacagccatttatcttgcacaccatttgctttggaaactagaacttaagcaaatcagcatctttttgca

SEQ ID NO: 4675 - DNA, 120 bp, synthetic construct
  misc_feature 1..120: note = Artificially Synthesized Probe
  source 1..120: mol_type = other DNA
ggcgtatcagaatgtgagtctaatgagaactaattcatcaaaactaggcttttcctgcattgccagaccattaacattattttaatgtcattagctctgcttagcggcagacatttgcag

SEQ ID NO: 4676 - DNA, 120 bp, synthetic construct
  misc_feature 1..120: note = Artificially Synthesized Probe
  source 1..120: mol_type = other DNA
attttctgctaagtttcttgtttcttttcttctttcatcgcaatcacaagaaaagacagaaatagattaaccatccattaaaaaccccagcagccagttacactgccacggaagaggccg

SEQ ID NO: 4677 - DNA, 120 bp, synthetic construct
  misc_feature 1..120: note = Artificially Synthesized Probe
  source 1..120: mol_type = other DNA
cttttagcaaccttagaaaattcactctcggaatcttggagggaacttttctaaagagtttccatggcaggaggctgttgacgacagcatatgtgatgtgtgatgtgtgatgtgtggtgc

SEQ ID NO: 4678 - DNA, 120 bp, synthetic construct
  misc_feature 1..120: note = Artificially Synthesized Probe
  source 1..120: mol_type = other DNA
tgacgtctcctttttgctttgttcccaggtggcatttttcatccagcttcattcacactgagagaggttggtagaaaggttctgatttccacgcgaagatgaggaggctgactcaggaag

SEQ ID NO: 4679 - DNA, 120 bp, synthetic construct
  misc_feature 1..120: note = Artificially Synthesized Probe
  source 1..120: mol_type = other DNA
tacaaataataataggctcttaataaaaataacacatggcaccatgacaagagaacgtcagccacccacctatgcgtggagcttcgtcatttgaaaagccttttcaacacaaggtcatcc

SEQ ID NO: 4680 - DNA, 120 bp, synthetic construct
  misc_feature 1..120: note = Artificially Synthesized Probe
  source 1..120: mol_type = other DNA
gtatgtgagtggctttctaaagatagtgttttcctatatataaactgctctcttttcatggctttggacgatacctgtgaaatgaatggtttatgtggaagccctgtatggtgccaggtt

SEQ ID NO: 4681 - DNA, 120 bp, synthetic construct
  misc_feature 1..120: note = Artificially Synthesized Probe
  source 1..120: mol_type = other DNA
tacgatttcagtcatacattgaaaaatactagtgaagtattcaaggaacgaatgaaaagttgctctgtgtttattgattgattacctggaacaaggttgaacacagcccccgcaggggtg

SEQ ID NO: 4682 - DNA, 120 bp, synthetic construct
  misc_feature 1..120: note = Artificially Synthesized Probe
  source 1..120: mol_type = other DNA
tccgcctctagtttgactgtttttgttgtttaaatctgagtctagcaatcaggtaagtaactaaagactggccgtcatctgggtttttcacctaaggaattattttaccccatagctgtg

SEQ ID NO: 4683 - DNA, 120 bp, synthetic construct
  misc_feature 1..120: note = Artificially Synthesized Probe
  source 1..120: mol_type = other DNA
atggtaagtggaaaggcgggcttaacgttttacaggcaggtggaagatttcactgagcttctcaacttcctgatcaaaggttctctctggaacagagatcaaaaggctttaaatgctggc

SEQ ID NO: 4684 - DNA, 120 bp, synthetic construct
  misc_feature 1..120: note = Artificially Synthesized Probe
  source 1..120: mol_type = other DNA
tctggatatatttttatttcataatattaattccataatatagtttagtgtgcaaacagccccagggagtgactgggaagattcagccatggaggctgtgtccgttgtctgtactgtgtc

SEQ ID NO: 4685 - DNA, 120 bp, synthetic construct
  misc_feature 1..120: note = Artificially Synthesized Probe
  source 1..120: mol_type = other DNA
ctgcaggaagcaaactctgtggatgccagtgacaattatttattcaccaagattccaaagactcgggagctgtaggatttgggattcattagcgagtgtgagcaaggtgcttttggggca

SEQ ID NO: 4686 - DNA, 120 bp, synthetic construct
  misc_feature 1..120: note = Artificially Synthesized Probe
  source 1..120: mol_type = other DNA
tcgtctcctgtaaaaacacatgcaagatgcaatcgtggaaaatgataaagttgttgagctgtagaaacccaaattatcttcccattagagagtctgggagttggagactgttatgagttc

SEQ ID NO: 4687 - DNA, 120 bp, synthetic construct
  misc_feature 1..120: note = Artificially Synthesized Probe
  source 1..120: mol_type = other DNA
gttctagatactgggatacatcagccagcaagacaggcagtggcccttgcccttgtgaaattgtgcagtcgctgcgtgtgactgttacatgattttcgtcttttttaatttttaatttta

SEQ ID NO: 4688 - DNA, 120 bp, synthetic construct
  misc_feature 1..120: note = Artificially Synthesized Probe
  source 1..120: mol_type = other DNA
aatacggagtctcctgtcaatgccgcataagcatgtcgtctctgtttccaaacttgtctgatttaatcaccccacattgtgaacgtgtatctatcaaaaaacatcacagtttacctctca

SEQ ID NO: 4689 - DNA, 120 bp, synthetic construct
  misc_feature 1..120: note = Artificially Synthesized Probe
  source 1..120: mol_type = other DNA
ggaatattcttggtttatggaaatctggaacttcttaggacattgttgggcatcagcatccattcagttgacaaacatttgttgaacgtctacagtgtctgacactgaggtacaaagtca

SEQ ID NO: 4690 - DNA, 120 bp, synthetic construct
  misc_feature 1..120: note = Artificially Synthesized Probe
  source 1..120: mol_type = other DNA
gtgagcattttttcatgtgttttttggctgcataaatgtcttcttttgagaagtgtctgttcatgtcctttgcccactttttgatggggttgtttgtttttttctcgtaaatttgtttga

SEQ ID NO: 4691 - DNA, 120 bp, synthetic construct
  misc_feature 1..120: note = Artificially Synthesized Probe
  source 1..120: mol_type = other DNA
ttgaagcaattgtgaatgggagttcactcatggtttggctctctgtttgtctgttgttggtgtataagaatgcttgtgatttttgtacattgattttgtatcctgagactttgctgaagt

SEQ ID NO: 4692 - DNA, 120 bp, synthetic construct
  misc_feature 1..120: note = Artificially Synthesized Probe
  source 1..120: mol_type = other DNA
tatccatttcttctagattttctagtttatttgcgtagaggtgtttgtaatattctctgatggtagtttgtatttctgtgggatcggtggtgatatcccctttatcattttttattgcat

SEQ ID NO: 4693 - DNA, 120 bp, synthetic construct
  misc_feature 1..120: note = Artificially Synthesized Probe
  source 1..120: mol_type = other DNA
gtaatggccttctttgtcaactttgatctttgttggtttaaaatctgttttatcagagactaggattgcaacccctgcctttttttgttttccattggcttggtagatcttcctccatcc

SEQ ID NO: 4694 - DNA, 120 bp, synthetic construct
  misc_feature 1..120: note = Artificially Synthesized Probe
  source 1..120: mol_type = other DNA
ttcatcttccatcgctgataccctttcttccagttgatcacatcggctcctggggcttctgcattcttcacatagttcccgagccttggctttcagctccatcagctcctttaagcactt

SEQ ID NO: 4695 - DNA, 120 bp, synthetic construct
  misc_feature 1..120: note = Artificially Synthesized Probe
  source 1..120: mol_type = other DNA
gactgctgtgctagcaatcagcaagacgttatgggcgtaggaccctctgagccaggtgcaggatataatctcctggtgcgccattttttaagcccatcggaaaaagcacagtattcgggt

SEQ ID NO: 4696 - DNA, 120 bp, synthetic construct
  misc_feature 1..120: note = Artificially Synthesized Probe
  source 1..120: mol_type = other DNA
accaccatcattatcactacctccatcattaccatcatctagactatagcagctgagttctgtttatctatgtttacaaaatcctaagtgagtgagggaaagaaggtgagacaggcagga

SEQ ID NO: 4697 - DNA, 120 bp, synthetic construct
  misc_feature 1..120: note = Artificially Synthesized Probe
  source 1..120: mol_type = other DNA
catggcttggttttgtcaaacttttaggggttagatatcagcacctttaagagctcaattcttgacctgctctgtgtgaatgaataactagatctttgtcattcaccctatacctcatcg

SEQ ID NO: 4698 - DNA, 120 bp, synthetic construct
  misc_feature 1..120: note = Artificially Synthesized Probe
  source 1..120: mol_type = other DNA
tcaccagagtttctgtgagctccgttagatctacactttgggtgtttgttctgagtatttacatgagatgtagaacgatgaatgtagtcacgagcattacagccagaaggaactacactt

SEQ ID NO: 4699 - DNA, 120 bp, synthetic construct
  misc_feature 1..120: note = Artificially Synthesized Probe
  source 1..120: mol_type = other DNA
ctggcttgcgattgtgttgcttcatttgtttgtgtctttactcttagatgacttttatttcattacatttcaacctcagagaaaataggcaaagcctgtcttagtccatttgggcagctg

SEQ ID NO: 4700 - DNA, 120 bp, synthetic construct
  misc_feature 1..120: note = Artificially Synthesized Probe
  source 1..120: mol_type = other DNA
aagcttagctcctacttaattttgcccagattctgaagtataaatgcagctcagctctcaaacccaccttgaatggattttgggaagtgcacaaaatgtagaagttttagcaactgctgg

SEQ ID NO: 4701 - DNA, 120 bp, synthetic construct
  misc_feature 1..120: note = Artificially Synthesized Probe
  source 1..120: mol_type = other DNA
gggatgaggcttccacctctctccaagtttccttttactcaagacggtggaattaatttggcactgtgtaattaaattaactctccaagttgcctttgcatgcagttttaaataaagctg

SEQ ID NO: 4702 - DNA, 120 bp, synthetic construct
  misc_feature 1..120: note = Artificially Synthesized Probe
  source 1..120: mol_type = other DNA
gaactcttccacactgcagagcgttccctcctgccaaatcccagttacaccctggccaccagaagcacgcttctgatttctttgattcatttattatcatttttgagaaggggcctcaca

SEQ ID NO: 4703 - DNA, 120 bp, synthetic construct
  misc_feature 1..120: note = Artificially Synthesized Probe
  source 1..120: mol_type = other DNA
cctgaactttaaagttaaataagaaatgaacaaacgatgggaagaatgtaaatttgcaatactgaagcaaaagcagccccgtgctccccaggctgggctagggattgatggatggagacc

SEQ ID NO: 4704 - DNA, 120 bp, synthetic construct
  misc_feature 1..120: note = Artificially Synthesized Probe
  source 1..120: mol_type = other DNA
taatgctcacacgtgtgatgtctgcatgagatgtgggttgctgaattctcgtagccctaacagaattgtgtcactaggaaatgagcgtgcatttaatgctcacacgtgtgatgtctatgt

SEQ ID NO: 4705 - DNA, 120 bp, synthetic construct
  misc_feature 1..120: note = Artificially Synthesized Probe
  source 1..120: mol_type = other DNA
acattactgatctatagaatgcactgctaagagtcattgcaaatgtttacttgtcaggaagggttccaagccctggaaatatccttactgatttgttaatcacagcagcctatgaggtag

SEQ ID NO: 4706 - DNA, 120 bp, synthetic construct
  misc_feature 1..120: note = Artificially Synthesized Probe
  source 1..120: mol_type = other DNA
cttataatctccatgccagttaaggatctccaggttggagggagctcactgtgttgcaaaggtgactcacttgccccaaatcatataacctggtgcagaagaggcagatttcagacccag

SEQ ID NO: 4707 - DNA, 120 bp, synthetic construct
  misc_feature 1..120: note = Artificially Synthesized Probe
  source 1..120: mol_type = other DNA
tttttggatgtggggttgtttgatcaagctcctaggaaccgtcataccatcattccacaaaacatcctaacatccactagtcatttattgactcgctaattccatcatgcaaaatggtaa

SEQ ID NO: 4708 - DNA, 120 bp, synthetic construct
  misc_feature 1..120: note = Artificially Synthesized Probe
  source 1..120: mol_type = other DNA
atactccactccgttgtgagtatctgtgggatatgaccattccctttttgtcatggaggttgggactggggggcctttctgagctgatattctgttgtgaatatctgtgggataatttca

SEQ ID NO: 4709 - DNA, 120 bp, synthetic construct
  misc_feature 1..120: note = Artificially Synthesized Probe
  source 1..120: mol_type = other DNA
atctcacacacccaggacctccgtgacgtttgtctcatggaatctcacgtgcccgggacctctgtgacatttccctcacacgcccaggacctctgtgacgtttccctcacggaatctcac

SEQ ID NO: 4710 - DNA, 120 bp, synthetic construct
  misc_feature 1..120: note = Artificially Synthesized Probe
  source 1..120: mol_type = other DNA
tgaccacctgctgcgtcctcaggatgtgcctttttttaggaaacaatgacttgtcactccaaaaagttaaaaaagcacctccaaatatatatgatgccacatcttctcctcacacaggtt

SEQ ID NO: 4711 - DNA, 120 bp, synthetic construct
  misc_feature 1..120: note = Artificially Synthesized Probe
  source 1..120: mol_type = other DNA
tcacagcatttggttagggaaagaccagcttaaactctaccttttattgtgtagaaacagtattttttgtcattcaagcacgtttagcagttgacgtgtgacatccccatgcctggaaac

SEQ ID NO: 4712 - DNA, 120 bp, synthetic construct
  misc_feature 1..120: note = Artificially Synthesized Probe
  source 1..120: mol_type = other DNA
tcgcaatcagcattgagagccaaaacagctgtttggtgactgtgcgaggttgtgagtgtgtggttggctgggaggcttatcctcatcctcccaaccccgtgtcttacgtagagaagaaga

SEQ ID NO: 4713 - DNA, 120 bp, synthetic construct
  misc_feature 1..120: note = Artificially Synthesized Probe
  source 1..120: mol_type = other DNA
gggtccgttctctgttgcaatgagcagacaaagcttcaaaacattagaaatcaagaaggaacttgagctcattgcaactaactctttaatttccacctctgatcacactttaccctccta

SEQ ID NO: 4714 - DNA, 120 bp, synthetic construct
  misc_feature 1..120: note = Artificially Synthesized Probe
  source 1..120: mol_type = other DNA
acagatggatcacctcacttttttgcggtgagaacaatgaaatccactgtcagtgattttctagaatatgatgtgttgctatgaactgcagtcaccgtgatgagcaatagagctcttaaa

SEQ ID NO: 4715 - DNA, 120 bp, synthetic construct
  misc_feature 1..120: note = Artificially Synthesized Probe
  source 1..120: mol_type = other DNA
ttctcagtaatttaaggtctttgctgagagcttgacgggaaggaagtcgtagtatctgaagcctcaggtgaaatttctccttggcattaccgggaccaaatccacgtactgtgacattca

SEQ ID NO: 4716 - DNA, 120 bp, synthetic construct
  misc_feature 1..120: note = Artificially Synthesized Probe
  source 1..120: mol_type = other DNA
atgagcttcattagacctgaagtttggaaccctctgttccctacagaagtctcttatcgtcctctctggcttgaggccaccactgtgacgtgtgtggccagggttcttcgctcagtctca

SEQ ID NO: 4717 - DNA, 120 bp, synthetic construct
  misc_feature 1..120: note = Artificially Synthesized Probe
  source 1..120: mol_type = other DNA
tcttcttttttgtttatggacgtcttatcaggcattaggggcgtgtgttgtatgtcagaacgtttgtttaattttagttacacagataatcgcatcaccatcgttgctcacccaggagct

SEQ ID NO: 4718 - DNA, 120 bp, synthetic construct
  misc_feature 1..120: note = Artificially Synthesized Probe
  source 1..120: mol_type = other DNA
aatattcgtgctttcctcacgtttcaagcctgagctggaacaagtcgtctgtgattttcatagcatggagtttctcagctgataagcaaaagaataatgacaaaaaagtggctgtcatca

SEQ ID NO: 4719 - DNA, 120 bp, synthetic construct
  misc_feature 1..120: note = Artificially Synthesized Probe
  source 1..120: mol_type = other DNA
caatacctgagccttttctttccggggaacccaaaccaagacaaaggccctggatagaaaatgctgtagaaaaagggctacttcatagcccagggtcaagcactgtttatgttccataaa

SEQ ID NO: 4720 - DNA, 120 bp, synthetic construct
  misc_feature 1..120: note = Artificially Synthesized Probe
  source 1..120: mol_type = other DNA
ggacttttgtaagcttcaagtttgtgaccagaaagcagcccagaaaaacctccctattgttttgaaatgacaacaacagcttcgtcgtggggcgtcacgcatgttgcaccactgctttcc

SEQ ID NO: 4721 - DNA, 120 bp, synthetic construct
  misc_feature 1..120: note = Artificially Synthesized Probe
  source 1..120: mol_type = other DNA
tgatggaaggtgtgtatggaaacacttaaacgatgattattttcagatcagtgaagagggaaaaaaaataactcttagaaacactggaatcatcggctgtgtcactgggtggagagtgtg

SEQ ID NO: 4722 - DNA, 120 bp, synthetic construct
  misc_feature 1..120: note = Artificially Synthesized Probe
  source 1..120: mol_type = other DNA
cctaattcatcttcagagcttgttaaaactgtgctttccgatgtatttcctcaaggacagtcactagcagttgttctgaaatgattcatggtgtttccgttcacactgcgatgcttgttc

SEQ ID NO: 4723 - DNA, 120 bp, synthetic construct
  misc_feature 1..120: note = Artificially Synthesized Probe
  source 1..120: mol_type = other DNA
cagcatccgcagacacacagcggtgcctctgtgtacgtgtgtgcggtgtaggtgcttgtgtgtacacatgtgtgtatgtgtacggtatctatctgtggtgtgtgtgtaagcatgtggtgt

SEQ ID NO: 4724 - DNA, 120 bp, synthetic construct
  misc_feature 1..120: note = Artificially Synthesized Probe
  source 1..120: mol_type = other DNA
agccctcaggactgtgaggatgtgtggtttcagtttgggtttcttataatggggaatcattaccctttctgtaggaagaaggagatgtcagacatacaaaaacatgttttaaggaatgta

SEQ ID NO: 4725 - DNA, 120 bp, synthetic construct
  misc_feature 1..120: note = Artificially Synthesized Probe
  source 1..120: mol_type = other DNA
cgtttgaatgtacttcctacagataagaagagatgtctttatatcaaggaatggatgacggtgcgaagaactgagtttatagaaatccccttattctcgctctatacccaaccacacaca

SEQ ID NO: 4726 - DNA, 120 bp, synthetic construct
  misc_feature 1..120: note = Artificially Synthesized Probe
  source 1..120: mol_type = other DNA
gagaggagaaagcaaggaagagggaagaaaaaatctgaataagaggttcttaggggcagtagagtgcaaagagagagaagcttagatttatgaggctgaactaaattacagatggccttg

SEQ ID NO: 4727 - DNA, 120 bp, synthetic construct
  misc_feature 1..120: note = Artificially Synthesized Probe
  source 1..120: mol_type = other DNA
aaattcatggagtcctaggaggacttcagtccgcctgagtgagaatacatcaaatctggagtagatatttttcccttcaaaaataaagggcagccaagtgcagtggcacctgtctgtgat

SEQ ID NO: 4728 - DNA, 120 bp, synthetic construct
  misc_feature 1..120: note = Artificially Synthesized Probe
  source 1..120: mol_type = other DNA
cctacctctctgccatcgctgctaccattctttgtctgcacctgcaggctaaggctccacgggcccctcttctgtcgctgacacagcaaggttttcctatgtcagccttctcacgatcca

SEQ ID NO: 4729 - DNA, 120 bp, synthetic construct
  misc_feature 1..120: note = Artificially Synthesized Probe
  source 1..120: mol_type = other DNA
gggtcaaacagtagatctacttttagttctttaaggagtctccacactgttttccgtagtggttgtactagtttacattcccaccagcagtgtagaagtgttccctgtttaccacattca

SEQ ID NO: 4730 - DNA, 120 bp, synthetic construct
  misc_feature 1..120: note = Artificially Synthesized Probe
  source 1..120: mol_type = other DNA
tgttcaacatagtactagaagtcctagccagagcaatcagacaagagaaagaaattaagggcatccaaattggtaaaaaggaagtcaaactgttgcagttcactgatgatatgattttat

SEQ ID NO: 4731 - DNA, 120 bp, synthetic construct
  misc_feature 1..120: note = Artificially Synthesized Probe
  source 1..120: mol_type = other DNA
gtcatcagcggtgcttgaccactttcaactggagaaattttatctttttagcaactcaaataatttgccagtttcataatctccaggattcagtgtcagtcatggtgctcagtcatccac

SEQ ID NO: 4732 - DNA, 120 bp, synthetic construct
  misc_feature 1..120: note = Artificially Synthesized Probe
  source 1..120: mol_type = other DNA
atgtgtccagggccagatgaaaccagtgcagtgttttaagaaactggatgcagcctgcagcaggggaacttgagatgtcttgagggctgaccctgttaaagagtttccatgttcattcaa

SEQ ID NO: 4733 - DNA, 120 bp, synthetic construct
  misc_feature 1..120: note = Artificially Synthesized Probe
  source 1..120: mol_type = other DNA
caccagccaacgatcttgtttttccatcagatagatgcacagaaaaacaactttgggtgcagcaaaaaggatttcgctttttaacgtggagctgttggagtttcaattaaatccagaatt

SEQ ID NO: 4734 - DNA, 120 bp, synthetic construct
  misc_feature 1..120: note = Artificially Synthesized Probe
  source 1..120: mol_type = other DNA
aagtgacttatatctgggttttggaggactgttgccagcaaatgacctcaccctgggagtgattaagaaaccttcttatatctttatttttccagtacctttttgccaagacctctctct

SEQ ID NO: 4735 - DNA, 120 bp, synthetic construct
  misc_feature 1..120: note = Artificially Synthesized Probe
  source 1..120: mol_type = other DNA
ccatattgctcacattataatgttaaatattcctgactttatatcacccgtgttttagtgagggatttccacctgtattcctaagattgctgggtaggttttctgcggcatcttcctcag

SEQ ID NO: 4736 - DNA, 120 bp, synthetic construct
  misc_feature 1..120: note = Artificially Synthesized Probe
  source 1..120: mol_type = other DNA
ttagccttgacttccacataacattctttaatgaattaaagccaagccatctgttgctgttgttgtgttttccacatttgtggccataacctgaagttaattggggcagttgcttccctc

SEQ ID NO: 4737 - DNA, 120 bp, synthetic construct
  misc_feature 1..120: note = Artificially Synthesized Probe
  source 1..120: mol_type = other DNA
agaaagtcaaattaaaataatgtgttactaattgtcttcttgacatgtcagcaccttctgagcatgatcatgcgaggctgatagctgaggctggttgagagctgagatctaaagctaatc

SEQ ID NO: 4738 - DNA, 120 bp, synthetic construct
  misc_feature 1..120: note = Artificially Synthesized Probe
  source 1..120: mol_type = other DNA
taaccgccaataagtatttatctagtttttgccttaaactgcactatacgatctcatattacctagccctccctttctctctcataactgttcatacatcatcctctcttcccccaccaa

SEQ ID NO: 4739 - DNA, 120 bp, synthetic construct
  misc_feature 1..120: note = Artificially Synthesized Probe
  source 1..120: mol_type = other DNA
ttttgtaattctcattgtagagacctttcacctccctggttagctgtattcctaggaattttaacctccctggttagctatattccaaggaattttaaattagttcacagtggctgaact

SEQ ID NO: 4740 - DNA, 120 bp, synthetic construct
  misc_feature 1..120: note = Artificially Synthesized Probe
  source 1..120: mol_type = other DNA
tttttgctttggacttttgtggctattcaggctcttttttgttttaatatatattttagaatagttctaattatatggaaaatcatgttggtagtttgataggaatagcattgaatctgt

SEQ ID NO: 4741 - DNA, 120 bp, synthetic construct
  misc_feature 1..120: note = Artificially Synthesized Probe
  source 1..120: mol_type = other DNA
tgtatctctgccaggttttggtatcagaatgatgctgacctcatagaatgagttagggagaagtccctcctccttgattttttggaatagttttgttggttttgtaccagctctttcttt

SEQ ID NO: 4742 - DNA, 120 bp, synthetic construct
  misc_feature 1..120: note = Artificially Synthesized Probe
  source 1..120: mol_type = other DNA
gtatgatttgggtttatttcaatttgttgagaatggctgtatggccaaggatgttatcaatcttggaatatgtgccgtgtggagatgagactatatattctgttgttgttggggagagta

SEQ ID NO: 4743 - DNA, 120 bp, synthetic construct
  misc_feature 1..120: note = Artificially Synthesized Probe
  source 1..120: mol_type = other DNA
taatgcttctaattgcattccgaaattcctgtggtgaattttttatttccagttctgtttggttctgtctgaaaattgttgtcgttcaactgttggaccattttactgttttccttggat

SEQ ID NO: 4744 - DNA, 120 bp, synthetic construct
  misc_feature 1..120: note = Artificially Synthesized Probe
  source 1..120: mol_type = other DNA
gatgcccttgcgagtttgactgtggtataagctgggctcagtcagttcactttatttctggaagatttcaagggataaaggctcagctcagcacccaggggctgcatgctctaaccctgg

SEQ ID NO: 4745 - DNA, 120 bp, synthetic construct
  misc_feature 1..120: note = Artificially Synthesized Probe
  source 1..120: mol_type = other DNA
ttttaaaaatatgacattaagaattgtaagtgccttaaacactagagacatacgcactgatttgtgttcccacagcaagatttctgaaagggaagagcaagacttgtctgccactgtggg

SEQ ID NO: 4746 - DNA, 120 bp, synthetic construct
  misc_feature 1..120: note = Artificially Synthesized Probe
  source 1..120: mol_type = other DNA
aggatgagtaaggcacagttctctcatataagagacataattgacatgcgtatttgtaactaccgtcaagtaggaaaaattttcactgtcatatcccaagcaccaagaacagagcctgct

SEQ ID NO: 4747 - DNA, 120 bp, synthetic construct
  misc_feature 1..120: note = Artificially Synthesized Probe
  source 1..120: mol_type = other DNA
aggtacatactaccaaaaataagaagaaatactggggagctcttggtccaaggacagaacatctcagttagactgaaggactaagttcaagacatctattgtgtattgtggtgaatgcag

SEQ ID NO: 4748 - DNA, 120 bp, synthetic construct
  misc_feature 1..120: note = Artificially Synthesized Probe
  source 1..120: mol_type = other DNA
ccaccaaatagcatagctatgaaaagagagaggagataacaaatgttagtgcagagaaaagggaacccccacacttcagcaggaaagtagatttgtgcaacaattatggaaaacagtatc

SEQ ID NO: 4749 - DNA, 120 bp, synthetic construct
  misc_feature 1..120: note = Artificially Synthesized Probe
  source 1..120: mol_type = other DNA
cagggatggggtagagagaggaaaaggagaaatgtaggtgagagggtacaaaggagcagataagatgaacaagtctggagatctatcatacaacaggagaattatagctaataaaattga

SEQ ID NO: 4750 - DNA, 120 bp, synthetic construct
  misc_feature 1..120: note = Artificially Synthesized Probe
  source 1..120: mol_type = other DNA
cctccatcttaaaataacatatacgaacaacctatagttaacaccatacgtaatggttaaggactgaaaattttgcctcagtgaccgggagcaagacaaagatcttggctgtcactactt

SEQ ID NO: 4751 - DNA, 120 bp, synthetic construct
  misc_feature 1..120: note = Artificially Synthesized Probe
  source 1..120: mol_type = other DNA
tgtcatttctgattgtgcttattgatgaacacagatgcaaacattcttaacaaaatactaataaaaccaacagcacatcaacaagttaattcaccacaatcaagtaggcttcattcttgg

SEQ ID NO: 4752 - DNA, 120 bp, synthetic construct
  misc_feature 1..120: note = Artificially Synthesized Probe
  source 1..120: mol_type = other DNA
agccagaggcatcatgttacctgacttcaaactgtactataaacctacagtaaccaaatagcatggcactggtacaaaaacagacacataaaccaacagaacagaatatacaacccagaa

SEQ ID NO: 4753 - DNA, 120 bp, synthetic construct
  misc_feature 1..120: note = Artificially Synthesized Probe
  source 1..120: mol_type = other DNA
ggggccgctagaggaggaaggaagggcgggaggaagtgttggaaaactactgggtactatactctgtagctgggtgacaagttcagtcatacccccaaatctcagcatcctacaatagac

SEQ ID NO: 4754 - DNA, 120 bp, synthetic construct
  misc_feature 1..120: note = Artificially Synthesized Probe
  source 1..120: mol_type = other DNA
aacgacttatcctttacattggctgatgtttgtatttgttgagtgtggaatccacaagatgctttcatgtaggcatttcatttctccttgcaaaatctctgtaaagtaggcaccctccct

SEQ ID NO: 4755 - DNA, 120 bp, synthetic construct
  misc_feature 1..120: note = Artificially Synthesized Probe
  source 1..120: mol_type = other DNA
agttgactttctgggaaacacgcagggctgtaagtatttaggacatcagggtctcactgggagctgtactccctacttgaaaatataaaatgtacctaaatatagaagtcttggaaagag

SEQ ID NO: 4756 - DNA, 120 bp, synthetic construct
  misc_feature 1..120: note = Artificially Synthesized Probe
  source 1..120: mol_type = other DNA
cttcacatttgaattttgtggaggcacaggctgttctagatggtttcagctctaaaataatcccgtctctggaacagatcgagaacgaggcttaaaattatgtcccacgagcttgacttt

SEQ ID NO: 4757 - DNA, 120 bp, synthetic construct
  misc_feature 1..120: note = Artificially Synthesized Probe
  source 1..120: mol_type = other DNA
tctagttatctcacacgtggcgtcgtgtctagttccctcacacatggcgttgtgtctcgttctctctcacgtggcatcgtgtctagttccctcacacatggcgtcgtgtctagttccctc

SEQ ID NO: 4758 - DNA, 120 bp, synthetic construct
  misc_feature 1..120: note = Artificially Synthesized Probe
  source 1..120: mol_type = other DNA
cacatggtgccgtgtctagttctctctcacacatagcgtcatgtctagttctgtctcacacagtgcatcgtgtctagttctctaacatggcaccgtgtctagttctgtcacatggcgccg

SEQ ID NO: 4759 - DNA, 120 bp, synthetic construct
  misc_feature 1..120: note = Artificially Synthesized Probe
  source 1..120: mol_type = other DNA
tctcacatggcaccgtgtctagttctctcacatggcgccgtgtctagttacgtctcacatggtgccgtgtctagttctctctcacacatagcgtcatgtctagttctctctcacatggca

SEQ ID NO: 4760 - DNA, 120 bp, synthetic construct
  misc_feature 1..120: note = Artificially Synthesized Probe
  source 1..120: mol_type = other DNA
cccatggcgccgtgtctagttacctatcacatggtgccgtgtctagttctctcacatggcgccatgtctagttacctctcacatggtgccgtgtctagttctctctcacacatagcgtca

SEQ ID NO: 4761 - DNA, 120 bp, synthetic construct
  misc_feature 1..120: note = Artificially Synthesized Probe
  source 1..120: mol_type = other DNA
tctcacatggcgccgtgtctagttacctatcacatggtgccgtgtctagttctctcacatggcgccgtgtctagttacctctcacatggtgctgtgtctagttctctctcacacatagcg

SEQ ID NO: 4762 - DNA, 120 bp, synthetic construct
  misc_feature 1..120: note = Artificially Synthesized Probe
  source 1..120: mol_type = other DNA
cttacatggcgccgtgtctagttctctcacatggtgccgtgtctagttctctctcgcacatagcgtcacgtctagttctctctcacacagagcatcgtgtctggttctctcacatggcgc

SEQ ID NO: 4763 - DNA, 120 bp, synthetic construct
  misc_feature 1..120: note = Artificially Synthesized Probe
  source 1..120: mol_type = other DNA
ccagttctctcctgggtggagccagtcagcttctagagacttttcactccacactggtcttaggcatttgtaaaatactccattttaaccagtggaaatgacttgaattaactgtataat

SEQ ID NO: 4764 - DNA, 120 bp, synthetic construct
  misc_feature 1..120: note = Artificially Synthesized Probe
  source 1..120: mol_type = other DNA
ggcacttgttgccgttgaccttgtatgtttgttcttaggattccctgattaacatgccctctcctccttaatggtaagggacccacagtgagtgagtgcataggtgggtggatggatgta

SEQ ID NO: 4765 - DNA, 120 bp, synthetic construct
  misc_feature 1..120: note = Artificially Synthesized Probe
  source 1..120: mol_type = other DNA
attttttcttctcgctcacgatatattacaaaattctttatgttctggtttcctcacattaatttgtttggacccctcttcttccctaaagaggattcatggcacggttcccatgtccca

SEQ ID NO: 4766 - DNA, 120 bp, synthetic construct
  misc_feature 1..120: note = Artificially Synthesized Probe
  source 1..120: mol_type = other DNA
ctgtatgaacatagggatatgagctcctgaggaggaaaggcaaaatattgtgttataatgaggttaaagtgttgtaaaagaggtgccatagaaacataggaaggggcaattagttcccga

SEQ ID NO: 4767 - DNA, 120 bp, synthetic construct
  misc_feature 1..120: note = Artificially Synthesized Probe
  source 1..120: mol_type = other DNA
gaataaagctgttaggaataaatcacttttaaaaaagcaatgaagaacagttttccaggaaaaaaagggcagaggcagacatactttgtgcacagtggcacacatggagaccccgaggta

SEQ ID NO: 4768 - DNA, 120 bp, synthetic construct
  misc_feature 1..120: note = Artificially Synthesized Probe
  source 1..120: mol_type = other DNA
cttaagatactactaggaaatcctaaacttaccacccaagtttagtgaagacaattgcacctgctttcacacgatgaagatggaattagaaggatttgtacttgaaggactcctggaggt

SEQ ID NO: 4769 - DNA, 120 bp, synthetic construct
  misc_feature 1..120: note = Artificially Synthesized Probe
  source 1..120: mol_type = other DNA
tttgagatcagtgtgggagtaatggcccatgttggtggccggcaagacctttgagatcagtgtgggagtgatggcccacatcggtggccgggaagacctttgagatcagtgtgtgagtct

SEQ ID NO: 4770 - DNA, 120 bp, synthetic construct
  misc_feature 1..120: note = Artificially Synthesized Probe
  source 1..120: mol_type = other DNA
ttggctctatgcttctgaagcttgaggacacctttggcataaataagtgaaggtgaaaacttgacattggatgaatttctcagagaggctgtgaaggctgagctcagccacaatgtaaga

SEQ ID NO: 4771 - DNA, 120 bp, synthetic construct
  misc_feature 1..120: note = Artificially Synthesized Probe
  source 1..120: mol_type = other DNA
aattccttatacgactgaatggctgaccacaggcaaatcacttcatttctttgggcttctttttcctgaactgaatgaaagacataaacaagctgattattcacacacagctgtcatgga

SEQ ID NO: 4772 - DNA, 120 bp, synthetic construct
  misc_feature 1..120: note = Artificially Synthesized Probe
  source 1..120: mol_type = other DNA
tgtgcatctgactttcacggttgttcctaccgttcattgctttattaaagccagtcactcctgggtttgccttcacgttgtttcacttcattaaaaaaaatggaatgagacttgagtttg

SEQ ID NO: 4773 - DNA, 120 bp, synthetic construct
  misc_feature 1..120: note = Artificially Synthesized Probe
  source 1..120: mol_type = other DNA
tggctgaagtataagttatttaagcatcactcagttgatgatgagtggagtttttggcctctgtgtcaggtcatgttggaatacagtcatgtgatcgtggagtcaggtcatcatgtcata

SEQ ID NO: 4774 - DNA, 120 bp, synthetic construct
  misc_feature 1..120: note = Artificially Synthesized Probe
  source 1..120: mol_type = other DNA
tgtgttgtctcacagtcatgtcctgggtcatggtgtcccacagttgtgttacatcaattgcttgcatgagtgagtgcctattcacatattcttgacaaagagtcatggtttcgtgctctg

SEQ ID NO: 4775 - DNA, 120 bp, synthetic construct
  misc_feature 1..120: note = Artificially Synthesized Probe
  source 1..120: mol_type = other DNA
tgtgcataaatgtagagtagcctccatagataaaatgctctatgaatttacacaggagatgctgcagtttcctcttttctaggagattaaaataaggcaccttgtgccagaaaacactgg

SEQ ID NO: 4776 - DNA, 120 bp, synthetic construct
  misc_feature 1..120: note = Artificially Synthesized Probe
  source 1..120: mol_type = other DNA
ttttgtttggggaaaatcacgatctatggcctaagacggcttctcgcatctgcattccaaaatagggtttcagagcttcgtgctctcatttaaagcagttttttgtctgtatgactcagt

SEQ ID NO: 4777 - DNA, 120 bp, synthetic construct
  misc_feature 1..120: note = Artificially Synthesized Probe
  source 1..120: mol_type = other DNA
tgtctgtcctctcctgcctgggagctgtgtgtgtgtcctttcctgcctgagcactgtatgtgtgtcctctcttgcctgggtgctgtgtgtgtgtgtcctcatcctgcccgggcgctgtgt

SEQ ID NO: 4778 - DNA, 120 bp, synthetic construct
  misc_feature 1..120: note = Artificially Synthesized Probe
  source 1..120: mol_type = other DNA
tcaccttggaaactgaggggaaactgactgtgggccctctgttcccgagtgagatgccttctccccactttctgcagaatttgtgaaggggtggtgcctgcgtttccaggtcaactaaac

SEQ ID NO: 4779 - DNA, 120 bp, synthetic construct
  misc_feature 1..120: note = Artificially Synthesized Probe
  source 1..120: mol_type = other DNA
caaggtcaccttccgaaggaaccatgagagcctgtgaggctctgcctcagaatcccttgttgcctcctaacttttattttgaacaacacctcaactccctttttaatgttccgctccctc

SEQ ID NO: 4780 - DNA, 120 bp, synthetic construct
  misc_feature 1..120: note = Artificially Synthesized Probe
  source 1..120: mol_type = other DNA
tttttttaattctcaaaagtaaaaatgtcatctgtaaaacatttgccaagggtagcttttgaagtaaaagttgctggcgtgcaaggccagagctggctttgtttatggaagggtccactg

SEQ ID NO: 4781 - DNA, 120 bp, synthetic construct
  misc_feature 1..120: note = Artificially Synthesized Probe
  source 1..120: mol_type = other DNA
atatttttcaatggtctaattagaaagaataaggacaatgtgataaacacctgacccctattagcggggactctgaattaactggagctttgatttcgaggtctgctttcagcagcaaga

SEQ ID NO: 4782 - DNA, 120 bp, synthetic construct
  misc_feature 1..120: note = Artificially Synthesized Probe
  source 1..120: mol_type = other DNA
aaatataaaaccttgtaaatagtggtttaaacacattgcatcttgctcttcgtctacttgtttctaataacaaatgtctgcctctgccaaggacagtggcccatgtggggtgtgttttgt

SEQ ID NO: 4783 - DNA, 120 bp, synthetic construct
  misc_feature 1..120: note = Artificially Synthesized Probe
  source 1..120: mol_type = other DNA
gggtttgtggcgaggtctcagctgtgctttagttttcccaaagcactgtcatatgaatattcatatatttttaaaatcatttaagtaattagtctaagtgagagctggctgggcgcagag

SEQ ID NO: 4784 - DNA, 120 bp, synthetic construct
  misc_feature 1..120: note = Artificially Synthesized Probe
  source 1..120: mol_type = other DNA
cattttagttaacgagggtctggatgccattcacaggaatgcagtttctacagggttctgctttgcagagacctctcctgataataataataaatttactcagaacaatctcagttgtca

SEQ ID NO: 4785 - DNA, 120 bp, synthetic construct
  misc_feature 1..120: note = Artificially Synthesized Probe
  source 1..120: mol_type = other DNA
ggaagacatacagaatcctatattttatcacaactaggaggaacccaggccacctcttctcccttcataactcataatcaagatattgggaaagttttcgtgcagttagtagcattaagt

SEQ ID NO: 4786 - DNA, 120 bp, synthetic construct
  misc_feature 1..120: note = Artificially Synthesized Probe
  source 1..120: mol_type = other DNA
ctacctgtatgttgcagaaggaccacatgatgacattcataggaaagttgttccagaatcagttatgattctgtcagaacctaagggctctggcagaatcaaaatcacaaactatgtaca

SEQ ID NO: 4787 - DNA, 120 bp, synthetic construct
  misc_feature 1..120: note = Artificially Synthesized Probe
  source 1..120: mol_type = other DNA
agaaaggagaagcagcattagtcaaagaagtaaaggccaagattttcctagaagtgaagaaatatactgggcctctttgatctaaagactcctaagactgaagccagacaagtacagaca

SEQ ID NO: 4788 - DNA, 120 bp, synthetic construct
  misc_feature 1..120: note = Artificially Synthesized Probe
  source 1..120: mol_type = other DNA
tcatattatttgcttccttaaatcctgtcagttcctcctctgttggataaattccacattcataatcttgcccctactggtctgtccaatgctgtttaaccacatatgaaatatgcaccc

SEQ ID NO: 4789 - DNA, 120 bp, synthetic construct
  misc_feature 1..120: note = Artificially Synthesized Probe
  source 1..120: mol_type = other DNA
tggtttttcctccatcacacccaccctagtcctctgcatttcatagccctgtagttttgaatcaaatacataaagctggcttcatggatgtctgttcttattacaatataagtgctgcat

SEQ ID NO: 4790 - DNA, 120 bp, synthetic construct
  misc_feature 1..120: note = Artificially Synthesized Probe
  source 1..120: mol_type = other DNA
acatcattcgtgccatttcacaagaagcataaaatgcccccaatttaacatctttccgctgatctgctgagagtcaagtatccttaagagaattcttatcatcttccttagctccaggaa

SEQ ID NO: 4791 - DNA, 120 bp, synthetic construct
  misc_feature 1..120: note = Artificially Synthesized Probe
  source 1..120: mol_type = other DNA
aaccccgtattattgtggctgtgaatccctaattgtgctctcctctctgattggtacatctaacaataatgttacccattacgaaggagtgaaatgtctgcagcacccacctttgtaaaa

SEQ ID NO: 4792 - DNA, 120 bp, synthetic construct
  misc_feature 1..120: note = Artificially Synthesized Probe
  source 1..120: mol_type = other DNA
ctgtcttaacctctttgccattaatttgaagtgggggcttcttaagaacgtaacttctctgaccctgacgttctcccagtaaaatttcctttgccttaaaattgtgtgtctctgtgtgtg

SEQ ID NO: 4793 - DNA, 120 bp, synthetic construct
  misc_feature 1..120: note = Artificially Synthesized Probe
  source 1..120: mol_type = other DNA
caagcccatttatcaggcattatctgagtaccgaggaaacacaggcacgaacgagatagttgtacatccgagaaacatctgaaaattcaatcagtagttgcaataaagagttgtaaatac

SEQ ID NO: 4794 - DNA, 120 bp, synthetic construct
  misc_feature 1..120: note = Artificially Synthesized Probe
  source 1..120: mol_type = other DNA
aacattttaaactttgttttatgatcatgccaaagcaatgcaaatgatttcagctgtggaagggaataatcaagtgtgaagcgctggacatgggagattcgtttgacaactggtgtgcag

SEQ ID NO: 4795 - DNA, 120 bp, synthetic construct
  misc_feature 1..120: note = Artificially Synthesized Probe
  source 1..120: mol_type = other DNA
tggagtttactgcaggcatatttggcctgaatttgaatttaatccaaattctccagcccatgtggtacctctgctcaaaggtgcttctaatgaatcaggatatctgctgcatgttaaatt

SEQ ID NO: 4796 - DNA, 120 bp, synthetic construct
  misc_feature 1..120: note = Artificially Synthesized Probe
  source 1..120: mol_type = other DNA
gacgcacgcatgacacaaccacacttgtgcccccacacagactctcatgtgaacgtgaaaataagccagcacgtataagaaaataaaccataaaataagccaacatgtataagaatataa

SEQ ID NO: 4797 - DNA, 120 bp, synthetic construct
  misc_feature 1..120: note = Artificially Synthesized Probe
  source 1..120: mol_type = other DNA
ctccagtcagacatcagcgtcaatcccagatgcaggtggaactcagaacagcatcattttcatgcaaactgaatttcttttcattcccagatcttcacaaagacaaaaagataatgcaaa

SEQ ID NO: 4798 - DNA, 120 bp, synthetic construct
  misc_feature 1..120: note = Artificially Synthesized Probe
  source 1..120: mol_type = other DNA
ttcccagcacacgtccccagactcctctagaaagtctgcttggatgagtagaacaagacactcttgttcacattttattggccaaatgtcttggttttctttaaatgtagtgcttattta

SEQ ID NO: 4799 - DNA, 120 bp, synthetic construct
  misc_feature 1..120: note = Artificially Synthesized Probe
  source 1..120: mol_type = other DNA
aggagaattagaaaaaaaaatgattatgaaacagatgattcttgagctgtcttggtatccaagtattagcccagcagatgagtatcccagtatcagccaggtaggtcagcatcggagtat

SEQ ID NO: 4800 - DNA, 120 bp, synthetic construct
  misc_feature 1..120: note = Artificially Synthesized Probe
  source 1..120: mol_type = other DNA
attgcagaaaagagatccctgtgtagctggtgccttcttctctaccttacctaatcagtggtgtgaccctcttatctatatgttttaggcataggcaattataactgcctttcatttgat

SEQ ID NO: 4801 - DNA, 120 bp, synthetic construct
  misc_feature 1..120: note = Artificially Synthesized Probe
  source 1..120: mol_type = other DNA
caaggcggaaatacatatcccaattaatataccaagaaggtgctgcggagggaaattgcaattctagatgtattagatttctatggctgcataatagactaccgtaagcttagcagtgga

SEQ ID NO: 4802 - DNA, 120 bp, synthetic construct
  misc_feature 1..120: note = Artificially Synthesized Probe
  source 1..120: mol_type = other DNA
aatagtttgggggtctataaaggaggagggatttcttgtggctcaaagttaaagaacttcatgggagaagtgacacttgatgtgtgtcttgaggagtaaggggaattttgttcaatgaag

SEQ ID NO: 4803 - DNA, 120 bp, synthetic construct
  misc_feature 1..120: note = Artificially Synthesized Probe
  source 1..120: mol_type = other DNA
taaagacatgagcggagacccagggttgaccagttttgagcccgtcctcattctcattggggagctgttattaataaaatccatacacaatcaagagtacagcaccagtgtttttcatga

SEQ ID NO: 4804 - DNA, 120 bp, synthetic construct
  misc_feature 1..120: note = Artificially Synthesized Probe
  source 1..120: mol_type = other DNA
aacccagcaccctgaaccatccggacatggtgtgacctgaacccagcacatgaaccatctggacatggtgtgacctgaacccagcacgtgaaccatccagacgtggtgtgacctgaaccc

SEQ ID NO: 4805 - DNA, 120 bp, synthetic construct
  misc_feature 1..120: note = Artificially Synthesized Probe
  source 1..120: mol_type = other DNA
agctgcagaagacagttcctttcagccttggcactcggctttgcttcgttataatttccagttttctatttgtctttgcttaaaatgcagaaaggaacagcgatgatgctgatagaattt

SEQ ID NO: 4806 - DNA, 120 bp, synthetic construct
  misc_feature 1..120: note = Artificially Synthesized Probe
  source 1..120: mol_type = other DNA
aaaccacgagctgtcaactcaccgctttcagtgttgcctgtttctctcaattctttttattgctcttctgtccatcacaacacatttttcctatcttgttcattcgttgtttattcttta

SEQ ID NO: 4807 - DNA, 120 bp, synthetic construct
  misc_feature 1..120: note = Artificially Synthesized Probe
  source 1..120: mol_type = other DNA
ggaataataatagtccactgcccacgtgaacaagacacacctgtctgtggaaataattctgctgattcatacaataatcactgctttttcagaggggaaaaaaagcttgttataggttgc

SEQ ID NO: 4808 - DNA, 120 bp, synthetic construct
  misc_feature 1..120: note = Artificially Synthesized Probe
  source 1..120: mol_type = other DNA
gtatatagaaatcgaaatgcaaagagaatgaaggaagaaggtgggttcaaagcaagctctaccagttaccatctgtggaagagctttccccgtagactgttttcttgtttgtaaaatgag

SEQ ID NO: 4809 - DNA, 120 bp, synthetic construct
  misc_feature 1..120: note = Artificially Synthesized Probe
  source 1..120: mol_type = other DNA
cagcgtgtgtgtgtgtatgtggttttgttaggaggggaactagttttggttcagcgtgtgtgtgtgtgtgtggttgttaggaggggaactagtttcggttcagcgtgtgtgtgtgtgtgt

SEQ ID NO: 4810 - DNA, 120 bp, synthetic construct
  misc_feature 1..120: note = Artificially Synthesized Probe
  source 1..120: mol_type = other DNA
agtttcggttcagtgtgtgtgtgtacatggttctgttaggttctattacacagtgttcattcctccataggcttcaaatgaattcagttgctcggcttgttttgtagaaaattgtataag

SEQ ID NO: 4811 - DNA, 120 bp, synthetic construct
  misc_feature 1..120: note = Artificially Synthesized Probe
  source 1..120: mol_type = other DNA
tggaggaaatgaaaattattacatgtagaagacacatttaacaagtcctggtttttcagtggagatacagggttgccacctcaattccactgttagttcagagtggttgctacacacatg

SEQ ID NO: 4812 - DNA, 120 bp, synthetic construct
  misc_feature 1..120: note = Artificially Synthesized Probe
  source 1..120: mol_type = other DNA
agaggataaaatcatataaggctctaaaccctttataatgaagggatcaaaggttagtagttataaaagagacaagtcacccgcagagacctttagaaacaagtgctcccatggggagac

SEQ ID NO: 4813 - DNA, 120 bp, synthetic construct
  misc_feature 1..120: note = Artificially Synthesized Probe
  source 1..120: mol_type = other DNA
gattctggggaagcccctgcctactcttagcatatctcctatctttaaaattacgggatcaggctaagggatctccaaatatcttccagtttaaaatctaagattctataagtggatgtc

SEQ ID NO: 4814 - DNA, 120 bp, synthetic construct
  misc_feature 1..120: note = Artificially Synthesized Probe
  source 1..120: mol_type = other DNA
ttattttaaattctccctgaaatatttttgaaagtaggttgagcaaaaagacaacacatattctgttacccaatgtaacggcctccgtcgctcggacgctttgtagactgagaaaggtcg

SEQ ID NO: 4815 - DNA, 120 bp, synthetic construct
  misc_feature 1..120: note = Artificially Synthesized Probe
  source 1..120: mol_type = other DNA
cacaggagattttcccattatcttcctttgggcctggaatttttcgtgaaataacctacgtatttcttcatttccttctgtgctaaaatttatttgtcacagcctcagccattaacctcc

SEQ ID NO: 4816 - DNA, 120 bp, synthetic construct
  misc_feature 1..120: note = Artificially Synthesized Probe
  source 1..120: mol_type = other DNA
agctctttacagcgaggatggtgtggcgtcccacctgtgtcgtggcatcactgggtcaatgtcgaattggaattttaaaattaagagtacataggctttttattatctgttaccaaatgt

SEQ ID NO: 4817 - DNA, 120 bp, synthetic construct
  misc_feature 1..120: note = Artificially Synthesized Probe
  source 1..120: mol_type = other DNA
gctctccacaaaggcaggggaacatgtgtcaaggtaggattatgcctataaatcccaaagggctttgaagtgtttcgtaaaagccaatttggatcctttaaaaacaaatagaagaaaacc

SEQ ID NO: 4818 - DNA, 120 bp, synthetic construct
  misc_feature 1..120: note = Artificially Synthesized Probe
  source 1..120: mol_type = other DNA
gaagcagagccttggtgctcgtgctgatctttgtcgctgcctatcttgcagagtgtgcgttttattaaattctttttgggattctatatgaataaatatttttctggggtagcataaaag

SEQ ID NO: 4819 - DNA, 120 bp, synthetic construct
  misc_feature 1..120: note = Artificially Synthesized Probe
  source 1..120: mol_type = other DNA
gtatccacaaacaaatcttaacacatgtaaacgtacgtcagaaaaacatgtctcccctgctgtttaggatgagaatgttctagagtctagaggttgttggccatctctctaagaaccaga

SEQ ID NO: 4820 - DNA, 120 bp, synthetic construct
  misc_feature 1..120: note = Artificially Synthesized Probe
  source 1..120: mol_type = other DNA
ccaggacaagcatgcatgcatgccagaggggaactagaatgtcaaaagggcaagacaatcccttataaaaactttaaactaaagacttctatttgcaaagatcgtcttgagaggcaatat

SEQ ID NO: 4821 - DNA, 120 bp, synthetic construct
  misc_feature 1..120: note = Artificially Synthesized Probe
  source 1..120: mol_type = other DNA
gttttcagaattcactcgcacctttggctcagtaactagcagattcgttcctgctgggatattcattttaaaagcttgtcttctgatgttggctgcaaattagaagcaataatgctattc

SEQ ID NO: 4822 - DNA, 120 bp, synthetic construct
  misc_feature 1..120: note = Artificially Synthesized Probe
  source 1..120: mol_type = other DNA
aaaaccacggtgtgtgtggcatgttgcagttctgttcattttccatgtatgatttcatccttgtcttattatctaagcaagtatttccagccagtgaggccgcgtagataaaccctacag

SEQ ID NO: 4823 - DNA, 120 bp, synthetic construct
  misc_feature 1..120: note = Artificially Synthesized Probe
  source 1..120: mol_type = other DNA
tcttaatgaagttttttttgaagatgatcagctcaagataggtctgaggttcatgctggacatcaagtgtgtgacacgaacactttcactctttttcttgctgtcacaatcttgatggtc

SEQ ID NO: 4824 - DNA, 120 bp, synthetic construct
  misc_feature 1..120: note = Artificially Synthesized Probe
  source 1..120: mol_type = other DNA
ttttctgtaggttcccgagccctgctccatacccgggactggactcagcattttacgtgagtcctctatttagtcatcagatcgtcctatgagaattgtgatatgaccccagttacgggt

SEQ ID NO: 4825 - DNA, 120 bp, synthetic construct
  misc_feature 1..120: note = Artificially Synthesized Probe
  source 1..120: mol_type = other DNA
ggctgtgcgctgcgctggtcttatccattaggtttaatgcgttatttattttatttttaaaggtgtaactctctcttaacggagaatcagtagaaagtcctccatccatgcctctgaaca

SEQ ID NO: 4826 - DNA, 120 bp, synthetic construct
  misc_feature 1..120: note = Artificially Synthesized Probe
  source 1..120: mol_type = other DNA
ggcaggagagagaatgaaggaagatgatcgacaaaagcaagcagggtaatttatcgaaagctaagtaccccttgctacatgaacattttggggtcctgtacttgtaaatccatattttgt

SEQ ID NO: 4827 - DNA, 120 bp, synthetic construct
  misc_feature 1..120: note = Artificially Synthesized Probe
  source 1..120: mol_type = other DNA
aaattagtccttacagttttcatgagatgtaaactgcttatagtcatccctgggtgtctgtaaggtctttattcatacatttgtgtgtctttctgttctgtctgggtgtggcctgaagga

SEQ ID NO: 4828 - DNA, 120 bp, synthetic construct
  misc_feature 1..120: note = Artificially Synthesized Probe
  source 1..120: mol_type = other DNA
tactatcagaatgaacaatttaaaaaggaagtaaataattgcatttataatcgtgtcaaaaaaacccaaaattcttagaaataagcttaaccaaggaggagagaggctgtacactgaaaa

SEQ ID NO: 4829 - DNA, 120 bp, synthetic construct
  misc_feature 1..120: note = Artificially Synthesized Probe
  source 1..120: mol_type = other DNA
tattagttacagtagccaaagatggaagcagcccacgtgtgcaatagacacgtaaatggatgtataagcaaaatggggcctagacgggtgaaagaagaacatttagccttaaaaagaaat

SEQ ID NO: 4830 - DNA, 120 bp, synthetic construct
  misc_feature 1..120: note = Artificially Synthesized Probe
  source 1..120: mol_type = other DNA
aaaatagtttggaaagtcactaaacagactacaccagccttcaacaatcaaaaacagccaaaccagaagaagggtttccagagtcagccccttctaatatccaagtgtccagttttcaac

SEQ ID NO: 4831 - DNA, 120 bp, synthetic construct
  misc_feature 1..120: note = Artificially Synthesized Probe
  source 1..120: mol_type = other DNA
gcattagctcaaagctatatgaagtgaaaggtcttcagcgatggtgaatacagggacgaccaggaaaaccaacaagattatgtatttggtttgtaactccacctttgttgctacagaaat

SEQ ID NO: 4832 - DNA, 120 bp, synthetic construct
  misc_feature 1..120: note = Artificially Synthesized Probe
  source 1..120: mol_type = other DNA
aatatgtgaagcaaccattgatggaattggagaaagtaaggggtagctctaatcatagctggaggctggaatgaaccactttcaatagtaagcaggacgtctacacagaagattaataaa

SEQ ID NO: 4833 - DNA, 120 bp, synthetic construct
  misc_feature 1..120: note = Artificially Synthesized Probe
  source 1..120: mol_type = other DNA
tccttgaggccagcattaccgtggtagctgagcccgataaaaatggtcatagaagagaaaatcacaaaccatatcccttatcaatgtagatgctaaaattttccacagaataccagcaaa

SEQ ID NO: 4834 - DNA, 120 bp, synthetic construct
  misc_feature 1..120: note = Artificially Synthesized Probe
  source 1..120: mol_type = other DNA
tgggggagagggaacgggagttatttctgaatgattatagaggttctatttggacatgcaatgcatgtgcagcgttgcgaatgtatttaatgacgcataattacacacttaaaatgagtg

SEQ ID NO: 4835 - DNA, 120 bp, synthetic construct
  misc_feature 1..120: note = Artificially Synthesized Probe
  source 1..120: mol_type = other DNA
ggaattttgataaacctttgaagaaaaatcaagaatggacaaacagtagtgaggctgggttcctcataaaggtttttcctgtggaacaccataacacttcctcaggccattcagtaacag

SEQ ID NO: 4836 - DNA, 120 bp, synthetic construct
  misc_feature 1..120: note = Artificially Synthesized Probe
  source 1..120: mol_type = other DNA
attaaattaattacactctagagctgtctgtgctgtaacaaaagcattttgggatttctccatccaaaaaataacacttttaacatgtcaggggagacatggccgagttaccctccagcc

SEQ ID NO: 4837 - DNA, 120 bp, synthetic construct
  misc_feature 1..120: note = Artificially Synthesized Probe
  source 1..120: mol_type = other DNA
agaaagtcaagaaataacttgcgataattcccaacactcaagaaactcggcagcttttaaaaatagagcgtgtgcaagtacagtgtctctccagcagtggtctacactcgagaaactcgg

SEQ ID NO: 4838 - DNA, 120 bp, synthetic construct
  misc_feature 1..120: note = Artificially Synthesized Probe
  source 1..120: mol_type = other DNA
tccaacagtggtctacactcgagacacttggcagcttttaaaaatacagcgtgcgtgagtgcagtgtctatcccatagtggtctacactcgagaaactcggcagctttaaaaatagagcg

SEQ ID NO: 4839 - DNA, 120 bp, synthetic construct
  misc_feature 1..120: note = Artificially Synthesized Probe
  source 1..120: mol_type = other DNA
tctacactcgagacacttggcagcgtttaaaaatagaggctgtgcgagtgcagcgtgtctccaacagtggtctacactcgagacactcggcagcgtttaaaaatacaggctgtgcgagtg

SEQ ID NO: 4840 - DNA, 120 bp, synthetic construct
  misc_feature 1..120: note = Artificially Synthesized Probe
  source 1..120: mol_type = other DNA
tttattttcaaaaccatcttcatattgtatttctcccacagggctccccactgtccatatctagttcacccagattgttagtgaccttcgtttcttcgtatctagtatatgccagttagc

SEQ ID NO: 4841 - DNA, 120 bp, synthetic construct
  misc_feature 1..120: note = Artificially Synthesized Probe
  source 1..120: mol_type = other DNA
ccaacagagtgttcattatgggaatacagcatgagttaaaagtcacaatcactgatttcaaggagcttgtattctcctaggaaggtaggcttgctggacgtccatcagctgtgatgagat

SEQ ID NO: 4842 - DNA, 120 bp, synthetic construct
  misc_feature 1..120: note = Artificially Synthesized Probe
  source 1..120: mol_type = other DNA
ttagtcatggtggcactgtttccggaaatggggaagggtaaggatgaaatgatttgcaggggaaagttatgtgttcttcctgagccccactgagtgtagtaaagatccaagcagacacaa

SEQ ID NO: 4843 - DNA, 120 bp, synthetic construct
  misc_feature 1..120: note = Artificially Synthesized Probe
  source 1..120: mol_type = other DNA
gcctctgccttctaagtcctgagctgactttcctccacagctcacaggaattcagcggataattgcttttacatcaggatactttttttcattttcacctttagtattagaaaggaattg

SEQ ID NO: 4844 - DNA, 120 bp, synthetic construct
  misc_feature 1..120: note = Artificially Synthesized Probe
  source 1..120: mol_type = other DNA
cttaaaatgttcattctttaccacaataaatacaacaaaggcaaatcaggacatgtattaatagagaaatgtccatggaaatgcatgtacccacccggcgtgctggatcctgcttctgtg

SEQ ID NO: 4845 - DNA, 120 bp, synthetic construct
  misc_feature 1..120: note = Artificially Synthesized Probe
  source 1..120: mol_type = other DNA
aagagtttcacatcgtgtttcctttcctaaccacctgttcctggagctgagggcttggctgtactactagctgaaaccagggcatttcatggatcacgtttcctaattatttgtttatta

SEQ ID NO: 4846 - DNA, 120 bp, synthetic construct
  misc_feature 1..120: note = Artificially Synthesized Probe
  source 1..120: mol_type = other DNA
aacactgtaagaaagttagattgatgtttcagctggcctttataaaatgcacatgatttcgtctgcgttactgtctgaaattcttccacagcgttcaagcgacatgtttccacaggcaga

SEQ ID NO: 4847 - DNA, 120 bp, synthetic construct
  misc_feature 1..120: note = Artificially Synthesized Probe
  source 1..120: mol_type = other DNA
gatttggggtgctcggcggatttatctgtaaaaaactttgtacgcatacattgctagctcaggccaaattaaatctagttaacgtttgcttttatttgggatgcaaaagggatctcccct

SEQ ID NO: 4848 - DNA, 120 bp, synthetic construct
  misc_feature 1..120: note = Artificially Synthesized Probe
  source 1..120: mol_type = other DNA
tcttagtcttggtctgggcttgtcaagtgaacaggagctttccatttgggaaattaaaacctttaaagaacatgcttgaaccttagtttcttcttcctgtttttccaactggagagacta

SEQ ID NO: 4849 - DNA, 120 bp, synthetic construct
  misc_feature 1..120: note = Artificially Synthesized Probe
  source 1..120: mol_type = other DNA
gggactgcagtgggtttcatgtaaaaggtcattagtctctgtagagtattttgggctcatgagaatgatgtatgcctgagtcatcattccatctcttcctttgtcttttattggtttagt

SEQ ID NO: 4850 - DNA, 120 bp, synthetic construct
  misc_feature 1..120: note = Artificially Synthesized Probe
  source 1..120: mol_type = other DNA
gatcgtcattattcattctttttaaaaactcgtagtaaagacagaacaacaaccacagcaaaatgaactaagcttcccataataacgggagacggcggaaatgtcgggatgccgcttacg

SEQ ID NO: 4851 - DNA, 120 bp, synthetic construct
  misc_feature 1..120: note = Artificially Synthesized Probe
  source 1..120: mol_type = other DNA
ctatcatttcttcccaagagtttcatttagagagtgtgtgcatgtgtgtgcatgttcaaagagcaagtgagttctatttggggaagttcaattcggtagatgcttactgactactccgtc

SEQ ID NO: 4852 - DNA, 120 bp, synthetic construct
  misc_feature 1..120: note = Artificially Synthesized Probe
  source 1..120: mol_type = other DNA
acgaggactgagttttgggtgggagcaccgcttcacggggactgagttctgggtgggactgagttctgggtgggagcaccgcttcacagggactgagttctgtgtgggagcaccgcttca

SEQ ID NO: 4853 - DNA, 120 bp, synthetic construct
  misc_feature 1..120: note = Artificially Synthesized Probe
  source 1..120: mol_type = other DNA
tttagggacacggatctgggcagtgtttgtaaactctttgcgtttagagtctttgctgttcatccacctcggtgtttaataatataatccgtcttgtgtttttcttggatgcttcttttg

SEQ ID NO: 4854 - DNA, 120 bp, synthetic construct
  misc_feature 1..120: note = Artificially Synthesized Probe
  source 1..120: mol_type = other DNA
atacatctgtgtacacatatctgcacatgtgtgttagtgtgtgtctgcatgtgtgagtatatgcgtgtgtcagtgtatatatgtctgtgtacacatgtgtctgcatgagtatatgcatgt

SEQ ID NO: 4855 - DNA, 120 bp, synthetic construct
  misc_feature 1..120: note = Artificially Synthesized Probe
  source 1..120: mol_type = other DNA
gacttgcatatgtgagactcgtctcaaattcagtttcatatggttctcacctattctcatacccaattttaatggggaactttctttagaggaggtaagacacagggtggtccatctcca

SEQ ID NO: 4856 - DNA, 120 bp, synthetic construct
  misc_feature 1..120: note = Artificially Synthesized Probe
  source 1..120: mol_type = other DNA
aacccaaaaatgacatcaacaaaaccaaccacatcaaatggtggatatgtcaaggagtcggtgaattttctgtaaatatgtgctgtgggaacgtgctgtggatttctcaggcctactttt

SEQ ID NO: 4857 - DNA, 120 bp, synthetic construct
  misc_feature 1..120: note = Artificially Synthesized Probe
  source 1..120: mol_type = other DNA
cgcaggacgcccagggaaccctgagtatgatttatgtgttttgttgctatgtttatttatgtccttccttgttccagagtgggtttattgtggtgcaataaaacaagtttcagataaata

SEQ ID NO: 4858 - DNA, 120 bp, synthetic construct
  misc_feature 1..120: note = Artificially Synthesized Probe
  source 1..120: mol_type = other DNA
tttctcacccctaaataagacagatgcattcagtgacctctcagcttactagtgaaagcagtgggctcctctcaccctcttttaataaactacttaagagctgttgttcatttaatacat

SEQ ID NO: 4859 - DNA, 120 bp, synthetic construct
  misc_feature 1..120: note = Artificially Synthesized Probe
  source 1..120: mol_type = other DNA
aaaagcataagcaacacaaggataaaaacagacaaactttattgacatctttcgtgcttcaaaagacacaatctagaaagtgaaaatacaaccgataaaatggtagaaaatatctgcaaa

SEQ ID NO: 4860 - DNA, 120 bp, synthetic construct
  misc_feature 1..120: note = Artificially Synthesized Probe
  source 1..120: mol_type = other DNA
ggggcaggaaggaaggagtaactgctgattgatacagaatatgttttggggtgatgcaaatcctttgaaattacatagcggtgattcttgcacacctttgtgaatatataaaaccaccaa

SEQ ID NO: 4861 - DNA, 120 bp, synthetic construct
  misc_feature 1..120: note = Artificially Synthesized Probe
  source 1..120: mol_type = other DNA
gacacccccagtgggaacaagcttccgtgtcacgtaagtagtcttcagtatttctcagtgtattatttttttccatgttttctgatgtagaatctgtaacaggagcttcacatgggttat

SEQ ID NO: 4862 - DNA, 120 bp, synthetic construct
  misc_feature 1..120: note = Artificially Synthesized Probe
  source 1..120: mol_type = other DNA
tcgtttgaagaaaagctcaacatcactgaccattaaagaaatgcaaatcaaaaccaccatgagatgccgtctcacagcagtcagaatggcggttattaaaaagtgaaaacataacagatg

SEQ ID NO: 4863 - DNA, 120 bp, synthetic construct
  misc_feature 1..120: note = Artificially Synthesized Probe
  source 1..120: mol_type = other DNA
cttcataaatcactcctctctgaaacacatataggcgtatttaatggaatacccacatcagcagttctgcctacagtatgggctggatgagttagttgaagccatgtctcaaaaaaatca

SEQ ID NO: 4864 - DNA, 120 bp, synthetic construct
  misc_feature 1..120: note = Artificially Synthesized Probe
  source 1..120: mol_type = other DNA
gtatggcaggtcttccgattttaagttacatgtaatacattgtagtgtacatagtgttgacccactctgttgttattgaatggtaccgagcacagttcagctaactttttctgtgaaggg

SEQ ID NO: 4865 - DNA, 120 bp, synthetic construct
  misc_feature 1..120: note = Artificially Synthesized Probe
  source 1..120: mol_type = other DNA
ctggtcaaaaccagaactttcttggaaatattaaccctttactgcatgccaagtaaatgcacgtcctgtttttccttgataaaaacagggaaatggttccgcagtcagcttttggagcag

SEQ ID NO: 4866 - DNA, 120 bp, synthetic construct
  misc_feature 1..120: note = Artificially Synthesized Probe
  source 1..120: mol_type = other DNA
atctgtaaaatcggaatattcacattttctccataaggatgtcacagagattctatggagtaattcctatgatagactaagagtgcatgtacctctgtgttcaggaaaacccggcactgg

SEQ ID NO: 4867 - DNA, 120 bp, synthetic construct
  misc_feature 1..120: note = Artificially Synthesized Probe
  source 1..120: mol_type = other DNA
ttttaatctgataagccatctttattgtcttaagaaaacacattgtgtggatgtaattccttggttgtcatagtccttcatgtgtgttaacacgtctgatcagtgcacagcagccctgag

SEQ ID NO: 4868 - DNA, 120 bp, synthetic construct
  misc_feature 1..120: note = Artificially Synthesized Probe
  source 1..120: mol_type = other DNA
gttctcatacagagctgaattgcactcacggtagctgtgtggaggttgagttcctatacagaactgctttgaactcatggtagatgtgtggaggttgcgttcccatacagagctgcattg

SEQ ID NO: 4869 - DNA, 120 bp, synthetic construct
  misc_feature 1..120: note = Artificially Synthesized Probe
  source 1..120: mol_type = other DNA
gtagctgtgtgaaggttgagttcccatacacagctacattgcactcatggtaactgtgtggaggttgagttcctatacagagctacattgcactcatgttagctgtgtggagattgagtt

SEQ ID NO: 4870 - DNA, 120 bp, synthetic construct
  misc_feature 1..120: note = Artificially Synthesized Probe
  source 1..120: mol_type = other DNA
gttgagttcccatacagagctacattgcactcatgatagctgtttggagattgagttcccacatagagctgcattgcactcgtggtagctatgtggaggttgagttcccattaacatctg

SEQ ID NO: 4871 - DNA, 120 bp, synthetic construct
  misc_feature 1..120: note = Artificially Synthesized Probe
  source 1..120: mol_type = other DNA
aggtaggaagaggaaggatggtgtctttccccattagaccactggtgactttacagagaagtgcaaactcatcagacaccttgaattgctctaacaacttttgttgctatataataaatt

SEQ ID NO: 4872 - DNA, 120 bp, synthetic construct
  misc_feature 1..120: note = Artificially Synthesized Probe
  source 1..120: mol_type = other DNA
gtgcgggtcctgactgtgcgtggaaaggccgcgcgggtcctgactgtgcgtggaaaggccgtgcgggtcctgacagtgcgtggaaaggccgtgcgggtcctgagtgtgcgtggaaaggcc

SEQ ID NO: 4873 - DNA, 120 bp, synthetic construct
  misc_feature 1..120: note = Artificially Synthesized Probe
  source 1..120: mol_type = other DNA
ctgtgtgtggaaaggccgtgcgggtcctgagtgtgtgtggataggctgtgcgggtcctgactgtgtgtggaaaggccgtgtgggtcctgactgtgtgtggaaaggacgtgcgggtcctga

SEQ ID NO: 4874 - DNA, 120 bp, synthetic construct
  misc_feature 1..120: note = Artificially Synthesized Probe
  source 1..120: mol_type = other DNA
tggggtcaccgctgggtctcagctcttatcacttcctaaaaactcttcccaccccagacagacgtcttaagtgccaccatgacattaatattcttagagtgtttattataatatcatttt

SEQ ID NO: 4875 - DNA, 120 bp, synthetic construct
  misc_feature 1..120: note = Artificially Synthesized Probe
  source 1..120: mol_type = other DNA
cccttctgatttttgctttcagtaccatggtcaatgaattatgtaaggtattcactttatgatgaaataggctttgtgccggatgatcttgccccgctgcaggctcatctaagtgttctg

SEQ ID NO: 4876 - DNA, 120 bp, synthetic construct
  misc_feature 1..120: note = Artificially Synthesized Probe
  source 1..120: mol_type = other DNA
aattctggaaatttaccttaaaggatattctctcagcatgaaccgttaaaaacaacctgctcaccagtgggatgtaatttaagaaaaagaaaatacttacggaggccaggcacggtggct

SEQ ID NO: 4877 - DNA, 120 bp, synthetic construct
  misc_feature 1..120: note = Artificially Synthesized Probe
  source 1..120: mol_type = other DNA
cagcacaggcagagagcacctgtgtgttaacaggcagtaacaggggttgtctctgggtggtgagattgtcggagattgtttttgtttttttatctaagcaagtatgagtggttttttgtt

SEQ ID NO: 4878 - DNA, 120 bp, synthetic construct
  misc_feature 1..120: note = Artificially Synthesized Probe
  source 1..120: mol_type = other DNA
aaaacaaatcctcattttctagatgtttaaagctcattaagtttaggatgccaaccagaaaaataaaaccatgtgaaaccacaagcgctttcaggggaaatgcccgtcagaggctgcagt

SEQ ID NO: 4879 - DNA, 120 bp, synthetic construct
  misc_feature 1..120: note = Artificially Synthesized Probe
  source 1..120: mol_type = other DNA
tacagtgactgctattcctattgctggtgagtgagaatattaataccatctgtagtagtgagacagcaaatatttcccgcctcacaggtgccctggtattttagtgcagaaaatattctt

SEQ ID NO: 4880 - DNA, 120 bp, synthetic construct
  misc_feature 1..120: note = Artificially Synthesized Probe
  source 1..120: mol_type = other DNA
ggctgcgaaaggtttggtgagtggaatgaggtgagaatctaagtaatttcactgaagtattatcttaacgtcttcatttccgatcagcagcttttgttgcaaatatgtcaggttcaatcg

SEQ ID NO: 4881 - DNA, 120 bp, synthetic construct
  misc_feature 1..120: note = Artificially Synthesized Probe
  source 1..120: mol_type = other DNA
ggatattggagggagggcattagtattcccttgttgtgatttggaaactaaatgggcttcatggacttctccttagggtttctgtcactctataagccttgctagatgaagatacagtgt

SEQ ID NO: 4882 - DNA, 120 bp, synthetic construct
  misc_feature 1..120: note = Artificially Synthesized Probe
  source 1..120: mol_type = other DNA
catcctgaaggcaactgcagctctcagagaccgagaaacacacaccacaccgcccccaccatggagatcggtggcctcgttcttccggtagcttccaaactcctgtttgatcatgatggt

SEQ ID NO: 4883 - DNA, 120 bp, synthetic construct
  misc_feature 1..120: note = Artificially Synthesized Probe
  source 1..120: mol_type = other DNA
tttttccccttatcttcagaactaaggtaacacacggctctgtaggtagccgtctggtgctgagaattgcataaacatttcttcagcttcttcttgctcgtgattgttttagaaaaatga

SEQ ID NO: 4884 - DNA, 120 bp, synthetic construct
  misc_feature 1..120: note = Artificially Synthesized Probe
  source 1..120: mol_type = other DNA
gaaataacctaaatctattttccgcccatttgctttttaattcaagagccaaagccttagtgtcaagcaacagcgtccatttctgtacttctttgaccccatgcatttgggattaggagg

SEQ ID NO: 4885 - DNA, 120 bp, synthetic construct
  misc_feature 1..120: note = Artificially Synthesized Probe
  source 1..120: mol_type = other DNA
tggcaagtaattcataaaaagaaaataccatgtgggccacacaaaaccatctgcaggtggagctggctgccaggctgcgggcaccagccttcctttctgggaaagaaatggagattcaca

SEQ ID NO: 4886 - DNA, 120 bp, synthetic construct
  misc_feature 1..120: note = Artificially Synthesized Probe
  source 1..120: mol_type = other DNA
tcttcagtggttctgtcagtgacacagatgcattgtgtcaaagtgaaaattgctctgggcaaagctcgactggcaaggaggactccaattaaagcttgcgtgggggagacaggcccgaac

SEQ ID NO: 4887 - DNA, 120 bp, synthetic construct
  misc_feature 1..120: note = Artificially Synthesized Probe
  source 1..120: mol_type = other DNA
cagaatgtggatggcttcgggaagtttgctcgccgagataaaataattcttgccacactaaaagctgctacctggatgtcctctagctattaatggcattgacctgtctccaaaaccaag

SEQ ID NO: 4888 - DNA, 120 bp, synthetic construct
  misc_feature 1..120: note = Artificially Synthesized Probe
  source 1..120: mol_type = other DNA
gcatttgtttattccttcataaagtaaacatttatcacccatttgtactatagccagtgctaaggactggagatacaggtgcatgagacatgtctcctgttgtttaggaattcccaggct

SEQ ID NO: 4889 - DNA, 120 bp, synthetic construct
  misc_feature 1..120: note = Artificially Synthesized Probe
  source 1..120: mol_type = other DNA
ttcttttggattctccttttcatctcaaaccttttaagattctgctgaaaacttgttcctgtctctctgggaaaatccacagaccaactagcacacaaaaattagcacacactaatgggc

SEQ ID NO: 4890 - DNA, 120 bp, synthetic construct
  misc_feature 1..120: note = Artificially Synthesized Probe
  source 1..120: mol_type = other DNA
cacacggggagctgtgggcaaagctctcccctatgctgtgctctgaaaaatgtagaaatacaatgaggtctatcacagtaaatatttatagaatataccatcaagcctgacctccattta

SEQ ID NO: 4891 - DNA, 120 bp, synthetic construct
  misc_feature 1..120: note = Artificially Synthesized Probe
  source 1..120: mol_type = other DNA
aaatccacattggaattccacagttctatgttataaaataatggacagcttttgatcaaagctttcaaggctggtgttcctctgctggggctgtcattacaaaattccacagatagtgtg

SEQ ID NO: 4892 - DNA, 120 bp, synthetic construct
  misc_feature 1..120: note = Artificially Synthesized Probe
  source 1..120: mol_type = other DNA
tctcgtcaccaccttaataccctccaggacttctcactgtttatcttaccattcatgctttcaaaatagtgaggtggaaaatgaacttaaaataggttggggcattccactctcctttat

SEQ ID NO: 4893 - DNA, 120 bp, synthetic construct
  misc_feature 1..120: note = Artificially Synthesized Probe
  source 1..120: mol_type = other DNA
gcaggtttaatatgctgtggtggtttgtggcttctgtaattggaaatctcttctgcagaactctattatcctctcacttcccgtgacttgattggaaaagaaggaatttgaagatctttt

SEQ ID NO: 4894 - DNA, 120 bp, synthetic construct
  misc_feature 1..120: note = Artificially Synthesized Probe
  source 1..120: mol_type = other DNA
atgattcaaagccagttatctcaatgctcttcaataagttggacatggacggcgtgggctagaggaagatcagagagagataaaactgtgatatatttccagtgtttcatcattaaactc

SEQ ID NO: 4895 - DNA, 120 bp, synthetic construct
  misc_feature 1..120: note = Artificially Synthesized Probe
  source 1..120: mol_type = other DNA
acccgaatccgggatcaggtttgtgtttctgtggacacgtctgcccacaaagagggcagtgggcaattgttctcttcaccagagaatggtttttgtcaacgttcagtgagatcatttcac

SEQ ID NO: 4896 - DNA, 120 bp, synthetic construct
  misc_feature 1..120: note = Artificially Synthesized Probe
  source 1..120: mol_type = other DNA
tcattctgaaagcagcaggagttctgaggcttctgttcgctccaatttacttaacaaagggcattcaggtggatttgttcaggctgtgctttatgattctctgaaaattaaaaatccttc

SEQ ID NO: 4897 - DNA, 120 bp, synthetic construct
  misc_feature 1..120: note = Artificially Synthesized Probe
  source 1..120: mol_type = other DNA
cctcctacatttgggttaacgacacctctccacggcctcagaactgagcccccacctcctacatttgggttaacgacacctctccacggcctcagaactgagcccccacctcctacattt

SEQ ID NO: 4898 - DNA, 120 bp, synthetic construct
  misc_feature 1..120: note = Artificially Synthesized Probe
  source 1..120: mol_type = other DNA
aactgagcccccacctcctacatttgggctgtttctcaaataagacaaacatcagccatgaaaggaatcagaatgaggcagtaaactcagaaagagtccttgaagcccagctgtgggtga

SEQ ID NO: 4899 - DNA, 120 bp, synthetic construct
  misc_feature 1..120: note = Artificially Synthesized Probe
  source 1..120: mol_type = other DNA
cagtggatctgagtgcagctccctcctgtctcctcccaataccatataatattgtcagctctggtattcttggtccagcacagcttcttcatgtttttcacctttgtgatgtaagaatcc

SEQ ID NO: 4900 - DNA, 120 bp, synthetic construct
  misc_feature 1..120: note = Artificially Synthesized Probe
  source 1..120: mol_type = other DNA
aggctccatcttcctctgtgctttcatcaccctcatttttggaaagtcacacgttttgctttcattctaatttacattctcactttttcagtctttccttatgcagtttctggcgtttcc

SEQ ID NO: 4901 - DNA, 120 bp, synthetic construct
  misc_feature 1..120: note = Artificially Synthesized Probe
  source 1..120: mol_type = other DNA
atattcagtctcttcttgtaagaaccgtaaccgctgtcatcatttttaaccaggtccctggaagtctttgtcacatagagttgggaaaactcagtccaggccctgaaagagtttactttc

SEQ ID NO: 4902 - DNA, 120 bp, synthetic construct
  misc_feature 1..120: note = Artificially Synthesized Probe
  source 1..120: mol_type = other DNA
gaaattatgaaataaatcgcaggttacttcagaagcatttcagtcaccattgagttgaactaaggagactttggaaaagcacaaattcgtgcataaaactcacccctccagttgccagag

SEQ ID NO: 4903 - DNA, 120 bp, synthetic construct
  misc_feature 1..120: note = Artificially Synthesized Probe
  source 1..120: mol_type = other DNA
atgaaaaaatgggccgttacggttcctgcttacttattaaacatttctgtgggccagtttggcaatttgaactgagcgtaactcttttgtactcaaggagtacgacatgatgatttgatg

SEQ ID NO: 4904 - DNA, 120 bp, synthetic construct
  misc_feature 1..120: note = Artificially Synthesized Probe
  source 1..120: mol_type = other DNA
actcccccagactttactgctgatagcctcctgttaaccagaagcctaagcaataatacagtcactgacacacattgtgtttgttacatgtattacatgctgtattcatacagtaaagta

SEQ ID NO: 4905 - DNA, 120 bp, synthetic construct
  misc_feature 1..120: note = Artificially Synthesized Probe
  source 1..120: mol_type = other DNA
caatcctgaatgagaaatgcattaataatctcagacttttatacagagattctgtcaaatggtacggtatgtgttagccctgccttgtacacacaagaacacggatgtggaggctgatag

SEQ ID NO: 4906 - DNA, 120 bp, synthetic construct
  misc_feature 1..120: note = Artificially Synthesized Probe
  source 1..120: mol_type = other DNA
gttactgtgaccaaaggattcataaaagttaagggatgaagtggccttggatgccattttcagaatttaatttctttcctggaaaaagcaagaattgtgactgcacagtcgctgcactct

SEQ ID NO: 4907 - DNA, 120 bp, synthetic construct
  misc_feature 1..120: note = Artificially Synthesized Probe
  source 1..120: mol_type = other DNA
cctgtgcccgtcccctgagaacttggtgcacagttacccggcctgtgcccggcccctgagaacttggtgcacaattacccggcctgtgcccgtcccctgagaacttggtgcacaattacc

SEQ ID NO: 4908 - DNA, 120 bp, synthetic construct
  misc_feature 1..120: note = Artificially Synthesized Probe
  source 1..120: mol_type = other DNA
gggaaatgatccaggaaaaggaaattctagaaaaatcaccaattctagaaaaatcaccagacccaaagtcggtgagattatagatggcaggtgcatgaactccccagaacaatgaataca

SEQ ID NO: 4909 - DNA, 120 bp, synthetic construct
  misc_feature 1..120: note = Artificially Synthesized Probe
  source 1..120: mol_type = other DNA
aaattagtataaagatgaaatttggaatttaaaataaaagaatggaataagttcacagagagtagaaaccctgaattgggcagtggccacggggctgcagagaaggctgggtttggctac

SEQ ID NO: 4910 - DNA, 120 bp, synthetic construct
  misc_feature 1..120: note = Artificially Synthesized Probe
  source 1..120: mol_type = other DNA
gaggcgctggttcaagtgtcagggctgtgagaggcagatgccgtggatgaggaagcgctggttcaagtgtcagggctgtgagaggcagaggccgtggatgaggaggcgctggttcaggtg

SEQ ID NO: 4911 - DNA, 120 bp, synthetic construct
  misc_feature 1..120: note = Artificially Synthesized Probe
  source 1..120: mol_type = other DNA
aggtttttagcagaaccaatctgcacagttctttgatttttatcccaccaggctcagcagcttggatagaaaaaaagctgatgatgaaatgcttccagacctcagattgtgcagaatgga

SEQ ID NO: 4912 - DNA, 120 bp, synthetic construct
  misc_feature 1..120: note = Artificially Synthesized Probe
  source 1..120: mol_type = other DNA
tctcatctgggcttctccagaaggcgcagaaatgtgtctgtcacctacacaacgctgtggtgtgcttgtatctttacaaactcttatgtatgaccttttaaaactccgtttattaaaata

SEQ ID NO: 4913 - DNA, 120 bp, synthetic construct
  misc_feature 1..120: note = Artificially Synthesized Probe
  source 1..120: mol_type = other DNA
aggagatgggttcataaaaggtttagagggcagagggcctggcgatgtgttttctgttcttgatttcactccagtatttaaggagctcactttggtgcaaataatttatttttcctagtt

SEQ ID NO: 4914 - DNA, 120 bp, synthetic construct
  misc_feature 1..120: note = Artificially Synthesized Probe
  source 1..120: mol_type = other DNA
tgcctcattgccgagtgtgagaatgcaactaagtgaaagcaaatagaccttgtccgaaaaggcccaaaatagactctgcttgttatcatattaactttgcattttaactgtgaccctaca

SEQ ID NO: 4915 - DNA, 120 bp, synthetic construct
  misc_feature 1..120: note = Artificially Synthesized Probe
  source 1..120: mol_type = other DNA
tgcttactgagcgccacctcctcgtcctccagagtcgtgcattgagtgcttactgagcgccacctcctcgtcctccagagtcgtgtattgagtgcttactgagtgccacctcctcgtcct

SEQ ID NO: 4916 - DNA, 120 bp, synthetic construct
  misc_feature 1..120: note = Artificially Synthesized Probe
  source 1..120: mol_type = other DNA
gtcgtgtattgagtgcttactgagcgctccctccttgtcctccagagtcgtgtattgagtgcttactgagcgccacctcctcatcctccagagtcgtgtattgagaacttactgagcgct

SEQ ID NO: 4917 - DNA, 120 bp, synthetic construct
  misc_feature 1..120: note = Artificially Synthesized Probe
  source 1..120: mol_type = other DNA
ttgtcctctggagtcatgtattgagaacttactgagcgctccctcctatgtcctccggagtcctgtattgagtgcttactgagcgccacctccttgtcctccagagtcgtgtattgagtg

SEQ ID NO: 4918 - DNA, 120 bp, synthetic construct
  misc_feature 1..120: note = Artificially Synthesized Probe
  source 1..120: mol_type = other DNA
ctttgccaggtgatggcacagtagtgatgctcatgggctgtgttctttcttcgggataattgcagcttgaaactcctgggcatctgtgattggactttggcaaagtgaatgtatgtgtgt

SEQ ID NO: 4919 - DNA, 120 bp, synthetic construct
  misc_feature 1..120: note = Artificially Synthesized Probe
  source 1..120: mol_type = other DNA
tgtattgatgtttttactgagcgtatctcttcatcctctcttgagttgttattgatgcgcttactgagctctccccctcttgtctccggattctgttttttcactgcttattttgtcttt

SEQ ID NO: 4920 - DNA, 120 bp, synthetic construct
  misc_feature 1..120: note = Artificially Synthesized Probe
  source 1..120: mol_type = other DNA
tactgagcgctccctcctcgtcctcctgagtcgtgtattgagtgcttactgagcgccccctcctcgtcctccagagtcgtgtattgagtgcttactgagcgccacctcctcgtcctccag

SEQ ID NO: 4921 - DNA, 120 bp, synthetic construct
  misc_feature 1..120: note = Artificially Synthesized Probe
  source 1..120: mol_type = other DNA
tgtattgagtgcttactgagcgccacctccttgtcctcctgagtcgtgtattgagtgcttactgagcgctccctcctcgtcctccagagtcgtgtattgagtgcttactgagcgccacct

SEQ ID NO: 4922 - DNA, 120 bp, synthetic construct
  misc_feature 1..120: note = Artificially Synthesized Probe
  source 1..120: mol_type = other DNA
tcctccagggtagtgtattgagtgcttactgagtgccacctcctcgtcctccagagtcgtgtattgagtgcttactgagcgctccctcctcatcctcctgagtcgtgtattgagtgctta

SEQ ID NO: 4923 - DNA, 120 bp, synthetic construct
  misc_feature 1..120: note = Artificially Synthesized Probe
  source 1..120: mol_type = other DNA
cgccacctcctcgtcctccagagtcgtgtattgagtgcttactgagcgctccctccttgtcctcctgagtcgtgtattgagtgcttactgagcgctccctcctcgtcctccagagtcgtg

SEQ ID NO: 4924 - DNA, 120 bp, synthetic construct
  misc_feature 1..120: note = Artificially Synthesized Probe
  source 1..120: mol_type = other DNA
cctgagtcgtgtattgagtgcttactgagcgccacctccttgtcctccagagtcgtgtattgagagcttactgagcgctccctccttgtcctccagagtcgtgtattgagtgcttactga

SEQ ID NO: 4925 - DNA, 120 bp, synthetic construct
  misc_feature 1..120: note = Artificially Synthesized Probe
  source 1..120: mol_type = other DNA
tgaagagagtgtaaaatcgctgatcactccaggtggtgaagggtggatgtgaagtaaggagattaaggcgacttactcgtcgtcctgcgtagtgaagagattgtaaaaagagggctacat

SEQ ID NO: 4926 - DNA, 120 bp, synthetic construct
  misc_feature 1..120: note = Artificially Synthesized Probe
  source 1..120: mol_type = other DNA
ttactgagcgccccctcctcgtcctccagagtcgtgtattgagtgcttactgagcgccacctcctcatcctccagagtcgtgtattgagtgcttactgagcgctccctcctcgtcctcca

SEQ ID NO: 4927 - DNA, 120 bp, synthetic construct
  misc_feature 1..120: note = Artificially Synthesized Probe
  source 1..120: mol_type = other DNA
gtgtattgagtgcttactgagcgccacctcctcgtcctcctgagtcgtgtattgagtgcttactgagcgccacctccttgtcctcctgagtcgtgtattgagtgcttactgagcgctccc

SEQ ID NO: 4928 - DNA, 120 bp, synthetic construct
  misc_feature 1..120: note = Artificially Synthesized Probe
  source 1..120: mol_type = other DNA
gccacctccttgtcctcctgagtcgtgtattgagtgcttactgagcgctccctcctcgtcctccagagtcgtgtattgagtgcttactgagcgccacctcctcgtcctccaaagtcgtgt

SEQ ID NO: 4929 - DNA, 120 bp, synthetic construct
  misc_feature 1..120: note = Artificially Synthesized Probe
  source 1..120: mol_type = other DNA
gtgcttactgagcgccacctccttgtcctccagagtcgtgtattgagtgcttactgagcgccacctcctcatcctccagggtagtgtattgagtgcttactgagcgccacctcctcatcg

SEQ ID NO: 4930 - DNA, 120 bp, synthetic construct
  misc_feature 1..120: note = Artificially Synthesized Probe
  source 1..120: mol_type = other DNA
caactggagtttctaagcctgttttctggagcaggcaacatggattcacgcataactttgaaaatgtatcttggatgtttgaggccttctagcaagtccttgtttcaggctttcacagga

SEQ ID NO: 4931 - DNA, 120 bp, synthetic construct
  misc_feature 1..120: note = Artificially Synthesized Probe
  source 1..120: mol_type = other DNA
cttggcagtcctggtgctgagcacagaattgtctagaccagctgagaaccaaccggaagaaatgggctcagtaaagactgatttcagaaattctccagacacaagttcaagaagagagct

SEQ ID NO: 4932 - DNA, 120 bp, synthetic construct
  misc_feature 1..120: note = Artificially Synthesized Probe
  source 1..120: mol_type = other DNA
ttaaagcaaaagcatcaagtcagctcccttctcagaatgaaatacagtgaaattatggcttaaaactcctgggggagcttgtaagtatgaagaggcagcagcacataagtgtgtttcacg

SEQ ID NO: 4933 - DNA, 120 bp, synthetic construct
  misc_feature 1..120: note = Artificially Synthesized Probe
  source 1..120: mol_type = other DNA
tcaaaacaccaaaaatcttatatggttttgaaggcagggaattataatgttgatacatatgggtttccacataaaagagcataaaagcacgaaggacttgacccctgagccaggcggtcc

SEQ ID NO: 4934 - DNA, 120 bp, synthetic construct
  misc_feature 1..120: note = Artificially Synthesized Probe
  source 1..120: mol_type = other DNA
tcaccctcttccatatgatttgttacattgctaaatgcatgcatgcatctgatctcacgaattcagtgctgaaatatcccactgctgctacttgacctgcagaataaatgtgtggtttct

SEQ ID NO: 4935 - DNA, 120 bp, synthetic construct
  misc_feature 1..120: note = Artificially Synthesized Probe
  source 1..120: mol_type = other DNA
tctctggatggaggaataatatgaaagggaatgaaaatctcagtaatcaatgattggagtcactcttatctttgataaatggtcttgaactcaaagggcaccacccagtctcccagtatg

SEQ ID NO: 4936 - DNA, 120 bp, synthetic construct
  misc_feature 1..120: note = Artificially Synthesized Probe
  source 1..120: mol_type = other DNA
tcagtaaagtcagagttgcaggctgttgagaaagtgaagtgttcagggttggggggagttgtctgttgagagaaactgacttatattcgtaaagatggaatctgagaaagtgctaaagct

SEQ ID NO: 4937 - DNA, 120 bp, synthetic construct
  misc_feature 1..120: note = Artificially Synthesized Probe
  source 1..120: mol_type = other DNA
ccaacctgtgggctgtgtctatctttaatctgtgaacttgactccaggcagccctaaactggttttaggatacaaaactttcacttttaattattttcttatgactttctctagtgcgtc

SEQ ID NO: 4938 - DNA, 120 bp, synthetic construct
  misc_feature 1..120: note = Artificially Synthesized Probe
  source 1..120: mol_type = other DNA
ctctgcctccacggccgccccttctttgaaaacttaccatgaaaacgaacagttttttgtcacctcaacatagaaatatcaacatggaaactctgtttctgtgttgacatttcaatccaa

SEQ ID NO: 4939 - DNA, 120 bp, synthetic construct
  misc_feature 1..120: note = Artificially Synthesized Probe
  source 1..120: mol_type = other DNA
cactgtcactgcttttatcctgatcaggacacggagcctctgattgttgaagcaaaccttgtttttctctgacttcagctctttgtgttctcttactgtgaaggttaatgtggtaacagt

SEQ ID NO: 4940 - DNA, 120 bp, synthetic construct
  misc_feature 1..120: note = Artificially Synthesized Probe
  source 1..120: mol_type = other DNA
attcacacgacactccactccgacgccaaataaaagggaaaaaagtgtttccttctcgacaccaaatgcaagaaaaattccatttttttttctttgctacactcacgccaatacttctgg

SEQ ID NO: 4941 - DNA, 120 bp, synthetic construct
  misc_feature 1..120: note = Artificially Synthesized Probe
  source 1..120: mol_type = other DNA
ctgatagtaattgtacatatctgtggatcttgtgttacatgttgatacgtgtacataatgtataaggtgaggtgtatgaacacatgctccagtatccagcatcgcatcactaatccccag

SEQ ID NO: 4942 - DNA, 120 bp, synthetic construct
  misc_feature 1..120: note = Artificially Synthesized Probe
  source 1..120: mol_type = other DNA
ctgcgattctctcttccactctacgctggtgtcccaggtcatctcagcactttgagttttttctaattccaattcatcctatagcaaatttcctaaactacaactctatgcatgtcacta

SEQ ID NO: 4943 - DNA, 120 bp, synthetic construct
  misc_feature 1..120: note = Artificially Synthesized Probe
  source 1..120: mol_type = other DNA
tcaacatcccattctgaggctctcagaataataacacccacacaagagacatggaattaatatacaggccaacacaatctgaaaatgcatagaatcactttcatgctacgtactcagcct

SEQ ID NO: 4944 - DNA, 120 bp, synthetic construct
  misc_feature 1..120: note = Artificially Synthesized Probe
  source 1..120: mol_type = other DNA
gttttcacaatagggaagaagtgcattccagcaattaattatgtacctgtgaaatttccgtccactgcaagcgaagttacacaactcaagtcttaatgacacgcttgtgtatatgtaggg

SEQ ID NO: 4945 - DNA, 120 bp, synthetic construct
  misc_feature 1..120: note = Artificially Synthesized Probe
  source 1..120: mol_type = other DNA
atataatatagttttgaattcaaccagcagagattgagtttttttaatgtaaacacaggtgtgtagagctcagaactctacttagtcacagctcttatcactccctgaccccaggcctgc

SEQ ID NO: 4946 - DNA, 120 bp, synthetic construct
  misc_feature 1..120: note = Artificially Synthesized Probe
  source 1..120: mol_type = other DNA
cgtatcaagggcccactatgagccaagccccttgttacacatttttctcatttttctttggccagagcatactgatattggcatatggggtggttgtgatttccaaatgaaataataaaa

SEQ ID NO: 4947 - DNA, 120 bp, synthetic construct
  misc_feature 1..120: note = Artificially Synthesized Probe
  source 1..120: mol_type = other DNA
gaaaatatctgtctgtattttaaagaatataaaagacttagccatgcccatggtaaatggggggttcataaaagcatgtgcttgatctgtcagaaggggacctggtgttaacatctagca

SEQ ID NO: 4948 - DNA, 120 bp, synthetic construct
  misc_feature 1..120: note = Artificially Synthesized Probe
  source 1..120: mol_type = other DNA
gcaaattcaaaatgatgagaacagaggcagatgtaagttaagaacagatgtctatgaaaaacgaggagactaaggaatttggagacctaaaattgggaaggaccgactccagactagatc

SEQ ID NO: 4949 - DNA, 120 bp, synthetic construct
  misc_feature 1..120: note = Artificially Synthesized Probe
  source 1..120: mol_type = other DNA
aaatatgatgtggctactccctcataatgtaatgcagttgagttagaaataatataaacaaacatcctcatatacttgaaaataatcaaatgtcaacagaaagcacttgatatggtttgg

SEQ ID NO: 4950 - DNA, 120 bp, synthetic construct
  misc_feature 1..120: note = Artificially Synthesized Probe
  source 1..120: mol_type = other DNA
agagaaagagtgagtgagtatgtgccagggaatacaaaagaggggaaagctacttggctaacatgagaatgatatattcttggtaacaaaacaggccaaggacagaataagaaaagaaaa

SEQ ID NO: 4951 - DNA, 120 bp, synthetic construct
  misc_feature 1..120: note = Artificially Synthesized Probe
  source 1..120: mol_type = other DNA
taaacaaagtacaggagacataagagatacaaaaggctgggttaacgtgctgatggtgtgtaagctgaagatgacttagggacatggaacactgcccttttgtgaaacattcttacaata

SEQ ID NO: 4952 - DNA, 120 bp, synthetic construct
  misc_feature 1..120: note = Artificially Synthesized Probe
  source 1..120: mol_type = other DNA
tttctcaaatacaaggaagtcatgctgatgtttcttcaaggtcggtttgatcaaatcacattaggcaaaggactttaagctggtcttctagcagaagaagcctggaaagactgatgtttg

SEQ ID NO: 4953 - DNA, 120 bp, synthetic construct
  misc_feature 1..120: note = Artificially Synthesized Probe
  source 1..120: mol_type = other DNA
ccagtgtacagagaacagaaacacatgcgattcaaatacaagtcagtgagctgaaatgtctttcatgcctgttacaggccgttagcaaaagttacattttctgtcaatctgacacatcat

SEQ ID NO: 4954 - DNA, 120 bp, synthetic construct
  misc_feature 1..120: note = Artificially Synthesized Probe
  source 1..120: mol_type = other DNA
aacatccacttaactgaaagaagttagaatctggggattagcccaaccaaggaagccacagtcctgtctaaatgtttatttgtcattttcccataaagattcatggggcatattgtcttg

SEQ ID NO: 4955 - DNA, 120 bp, synthetic construct
  misc_feature 1..120: note = Artificially Synthesized Probe
  source 1..120: mol_type = other DNA
gacttggaattttttctgtatccacaaacacacatttggcaaaccactgaacactggttaggtgcctggagttttgctagacactgaagataaatacacagatgaggcaaaactggcttt

SEQ ID NO: 4956 - DNA, 120 bp, synthetic construct
  misc_feature 1..120: note = Artificially Synthesized Probe
  source 1..120: mol_type = other DNA
ctctctctttctgggtgggtttcatcttggtaaatgtggattctcagactggccctgaggaaatctcgttccgttttcctgcagattatctgagtctgcagagatggggtccttgagtga

SEQ ID NO: 4957 - DNA, 120 bp, synthetic construct
  misc_feature 1..120: note = Artificially Synthesized Probe
  source 1..120: mol_type = other DNA
atatttgggtttaagccccagatcttccacattagctgtgtgacttgagcagcttttgtagattttggggtggtagtggaatgagggcaacaaagcctttttgtaagaataaatgtgagt

SEQ ID NO: 4958 - DNA, 120 bp, synthetic construct
  misc_feature 1..120: note = Artificially Synthesized Probe
  source 1..120: mol_type = other DNA
gttaacttattattgaggaatgaaaagtattttttgaaaattgaatgtagcccaagtttgcagtgtgtgtagagtctacagtagcatacagtgatgtctcgggccgcgcattcactcccc

SEQ ID NO: 4959 - DNA, 120 bp, synthetic construct
  misc_feature 1..120: note = Artificially Synthesized Probe
  source 1..120: mol_type = other DNA
ccttagttcacgtggatggatggatcagagtacacagaacgctatctgagtggtgaattaattccttttgtgattcctaattgtgtgaggaaaagttatttcccctccatcagctttttt

SEQ ID NO: 4960 - DNA, 120 bp, synthetic construct
  misc_feature 1..120: note = Artificially Synthesized Probe
  source 1..120: mol_type = other DNA
ggtcttaaatctcatcagattcgctgcttaggaggccattttagtgcgttgctaagggagtttttccaaagaataaaattgctaatttaacttaacagtaacaaggcccaaagagctgtg

SEQ ID NO: 4961 - DNA, 120 bp, synthetic construct
  misc_feature 1..120: note = Artificially Synthesized Probe
  source 1..120: mol_type = other DNA
atgggagaggagagaacgcacatgctgggctgagaaagtggtgactttatcctccctaatgatttatggagccacgtggagcgttaagtgctgagaatttaagagaatgaatgaaaagca

SEQ ID NO: 4962 - DNA, 120 bp, synthetic construct
  misc_feature 1..120: note = Artificially Synthesized Probe
  source 1..120: mol_type = other DNA
aaatggactcacgtgggaaatggagtcaatattttatacattgaattttgcgttacgtttcaaaagtgaatgtaaatatacaggtgtaaaaccagctggatggcacacaggcactccgct

SEQ ID NO: 4963 - DNA, 120 bp, synthetic construct
  misc_feature 1..120: note = Artificially Synthesized Probe
  source 1..120: mol_type = other DNA
gttacttatgtctgtgcttcttaaataatagaaatgtcttcacgcccctacttttgttaattgttcactgtttctgagagcgatcaacctaaggccccatttaaagtagaacttggccgg

SEQ ID NO: 4964 - DNA, 120 bp, synthetic construct
  misc_feature 1..120: note = Artificially Synthesized Probe
  source 1..120: mol_type = other DNA
ttctaaggggaactgtgcacacagacccagagggcaccttactaaactcaggagcaacagagtgagcatgtgtctcctctgacctggctaggagacagatccaggcatagaccctctggg

SEQ ID NO: 4965 - DNA, 120 bp, synthetic construct
  misc_feature 1..120: note = Artificially Synthesized Probe
  source 1..120: mol_type = other DNA
aaaacttagaaaacatagatcaacatgaaaagatattgacatataatcccagcgcccagccttccctccactgcccacagataatcgcaggtaacatttggatgttaatacttccagcct

SEQ ID NO: 4966 - DNA, 120 bp, synthetic construct
  misc_feature 1..120: note = Artificially Synthesized Probe
  source 1..120: mol_type = other DNA
gtggctttcttcatttctggaggtcagtgtctacaatatttccatatttaaggccttccctaaccttgttttgtttgatgtctttcatctgccttcatttgcatggtgggtctttgcatt

SEQ ID NO: 4967 - DNA, 120 bp, synthetic construct
  misc_feature 1..120: note = Artificially Synthesized Probe
  source 1..120: mol_type = other DNA
ataatttgctgagaatggtggtttccagtttcatccatgtccctacaaaggacatgaactcttcattttttatggctgcatagtattccatggtgtatatgtgccacattttcttaatcc

SEQ ID NO: 4968 - DNA, 120 bp, synthetic construct
  misc_feature 1..120: note = Artificially Synthesized Probe
  source 1..120: mol_type = other DNA
cattgcttatttttgtcaggtttgtcaaagatcagatggttgtagatatgtggcattatttctgagggctctgttctgttccattgatctatagctctgttttggtaccagtaccatgct

SEQ ID NO: 4969 - DNA, 120 bp, synthetic construct
  misc_feature 1..120: note = Artificially Synthesized Probe
  source 1..120: mol_type = other DNA
ctttggttctgtttatatgctggattacatttattgatttgcatatgttgaaccatccttgcatcccagggatgaagcccacttgatcatggtggataagctttttgatgtgctgctgga

SEQ ID NO: 4970 - DNA, 120 bp, synthetic construct
  misc_feature 1..120: note = Artificially Synthesized Probe
  source 1..120: mol_type = other DNA
tacttctgagcaactatcttgaagactttgatagttctttgctattgtttttaaatgtacttttttcacttggagacccaacatttttgttctgcattcccgttcccctcactgcgtgca

SEQ ID NO: 4971 - DNA, 120 bp, synthetic construct
  misc_feature 1..120: note = Artificially Synthesized Probe
  source 1..120: mol_type = other DNA
taatgattattaattcctgttctctttcctctcatcttcccctgatggggaaagtcacttatatgatcacgctgaccacacagcacagttctcagcccagctgagcctcctattgccagg

SEQ ID NO: 4972 - DNA, 120 bp, synthetic construct
  misc_feature 1..120: note = Artificially Synthesized Probe
  source 1..120: mol_type = other DNA
tgaaccatggccccagggctacttcctcctgcctaccttttttcctttccaaactttgtcttcccccccatcattcccactctgcaattatgtgacactgtggttctaaatggcctatgt

SEQ ID NO: 4973 - DNA, 120 bp, synthetic construct
  misc_feature 1..120: note = Artificially Synthesized Probe
  source 1..120: mol_type = other DNA
ggccatatttggagcctggttcctccttctacacctgaagaaggaacaggcctgttgcagcgtaactaacatcctacataactacaccactaaaactcagctgactccccagactcagtc

SEQ ID NO: 4974 - DNA, 120 bp, synthetic construct
  misc_feature 1..120: note = Artificially Synthesized Probe
  source 1..120: mol_type = other DNA
ggcttaaattgccaggcaaagggtggaggcaggacacagggaagaggagatggagaattctggagggaaacagaccacttaggaggcaggagatgccgaaacattatcagcaaaggctct

SEQ ID NO: 4975 - DNA, 120 bp, synthetic construct
  misc_feature 1..120: note = Artificially Synthesized Probe
  source 1..120: mol_type = other DNA
ttcacaagtgtctgagaaagaaagacagcccataatgaaatttaccttcttaagtaggttattgttagggtcgacctaattattccatacctaacagagagaacggagtgtatgctggag

SEQ ID NO: 4976 - DNA, 120 bp, synthetic construct
  misc_feature 1..120: note = Artificially Synthesized Probe
  source 1..120: mol_type = other DNA
aaagccaagattcatctccattaagatccctttacatttccgagctccattccaggggctggatatttccaaaaactcaaaggacatttttgacttcactttttctctaagggagttcag

SEQ ID NO: 4977 - DNA, 120 bp, synthetic construct
  misc_feature 1..120: note = Artificially Synthesized Probe
  source 1..120: mol_type = other DNA
catttatatattaattaagcgtcacatccacgccccccatttatatattaattaagcgtcgcatcctccagaggcacttcctgaccctcaccccagctgcatcatgccactgagtgagtg

SEQ ID NO: 4978 - DNA, 120 bp, synthetic construct
  misc_feature 1..120: note = Artificially Synthesized Probe
  source 1..120: mol_type = other DNA
gaccgaaattctgtcgtcttcctgactaatggtgccgtgtatctaaacatcaaagcattttcaaggcaatcacataatgattcaaaattgactttggtgtctcctttgctgcttgcacac

SEQ ID NO: 4979 - DNA, 120 bp, synthetic construct
  misc_feature 1..120: note = Artificially Synthesized Probe
  source 1..120: mol_type = other DNA
gagaaaacaaacgtctccactagatttcttcattgttcctgctcctgctctaaaatgaaactctgagttttcctggaggctgtgtatgccgtaagaaatttactgagaaatgtattccag

SEQ ID NO: 4980 - DNA, 120 bp, synthetic construct
  misc_feature 1..120: note = Artificially Synthesized Probe
  source 1..120: mol_type = other DNA
acttcactgtttttgaccttcacaaatgccatcttcctatggttcaacctgacatatttagacaggcattgttacctggcatcatgaataatggttcagacttcagggagttcatgaaac

SEQ ID NO: 4981 - DNA, 120 bp, synthetic construct
  misc_feature 1..120: note = Artificially Synthesized Probe
  source 1..120: mol_type = other DNA
tacatgcataggccccaggggtcaccctattctgctgagcatgttaatattttaagcgccacgttcagagattgtcacttgtcatgatattcattatccataattaatattgcaactgag

SEQ ID NO: 4982 - DNA, 120 bp, synthetic construct
  misc_feature 1..120: note = Artificially Synthesized Probe
  source 1..120: mol_type = other DNA
atgttgtgaacagatatctgtggagtaaattcaatgtgtcagatgctggctaggactttaatcagctgatttcgtgtcgtcctcaacacaaccccttgaagattaacatgtcgctttact

SEQ ID NO: 4983 - DNA, 120 bp, synthetic construct
  misc_feature 1..120: note = Artificially Synthesized Probe
  source 1..120: mol_type = other DNA
tgtcacgtgggctgggtgcagtcactgatttggtggccaggaggagggagaagggcggcgttcaggttgggagaaggtgctgctgtcacaggactgggtgcagtcgctgattcggtgacc

SEQ ID NO: 4984 - DNA, 120 bp, synthetic construct
  misc_feature 1..120: note = Artificially Synthesized Probe
  source 1..120: mol_type = other DNA
agtcgctgattcagtgaccaggaggagggagaagggtggcattcgggttgggagaagctgctgctgtcacaggactgggtgcagtcgctgatttggtggccaggaggagggagaagggtg

SEQ ID NO: 4985 - DNA, 120 bp, synthetic construct
  misc_feature 1..120: note = Artificially Synthesized Probe
  source 1..120: mol_type = other DNA
tggttttggttattgatgaaatagtgggagcaactgcgttacgtgtgtcataaaatacatatgatgaactgacagagaaagccactcagagagaacccagcatggctatgtagtgtgtcc

SEQ ID NO: 4986 - DNA, 120 bp, synthetic construct
  misc_feature 1..120: note = Artificially Synthesized Probe
  source 1..120: mol_type = other DNA
agaaaaagaccaaagtatcatgggaaaaaaagggaaatcaacagaattcactgaatgtcgcaacagccgccttcctgaagagcttccttccagctgagctcccaggcaagtcactgtccc

SEQ ID NO: 4987 - DNA, 120 bp, synthetic construct
  misc_feature 1..120: note = Artificially Synthesized Probe
  source 1..120: mol_type = other DNA
gagggaaggggacagatgaagagatgagcagagcgaagggaagagatgagcagagggaaggggacagatgaagagatgagcagagggaaggggcgtggggttccattaatttgctagagt

SEQ ID NO: 4988 - DNA, 120 bp, synthetic construct
  misc_feature 1..120: note = Artificially Synthesized Probe
  source 1..120: mol_type = other DNA
gtaaaataaaatattagactctttactaatccacagagtgggctttgcttttttatcatttggacttgaatggcttaactgacaatttggtgccaggcaacctgagccaagcagagcagt

SEQ ID NO: 4989 - DNA, 120 bp, synthetic construct
  misc_feature 1..120: note = Artificially Synthesized Probe
  source 1..120: mol_type = other DNA
agggagggtttcagggagtgttcgtgtcaagtggacagactgccctgcccaccttcccataagcctgcacattttagcccccagcacagaaccacggcaacgtcccatcactaaagggag

SEQ ID NO: 4990 - DNA, 120 bp, synthetic construct
  misc_feature 1..120: note = Artificially Synthesized Probe
  source 1..120: mol_type = other DNA
tgtgctttggggccagtgcattcctcgctttatttactggggctgccgtaaaacgtgactccagcctgggcagtgtaaaccacagaaaggcatcttctcgccattctggatgccagaaga

SEQ ID NO: 4991 - DNA, 120 bp, synthetic construct
  misc_feature 1..120: note = Artificially Synthesized Probe
  source 1..120: mol_type = other DNA
atcaccaatgcatctgcctcaccccaagatgattctcacgtcagaagcacctgctctgcacgtgcctgagaattcttttttgtattaaatttattatttgttgccctaaataaaaccaac

SEQ ID NO: 4992 - DNA, 120 bp, synthetic construct
  misc_feature 1..120: note = Artificially Synthesized Probe
  source 1..120: mol_type = other DNA
ctcccgccacctgctctcttctgaatactttcacagaatcgtttaaatacaacaaaatccatgggccagtcacacgcagaagcacatattggaatcctattctattctctcttaaatatt

SEQ ID NO: 4993 - DNA, 120 bp, synthetic construct
  misc_feature 1..120: note = Artificially Synthesized Probe
  source 1..120: mol_type = other DNA
agggatcctcaaacaaccaccccacacacctccctttatgagcatgggaaatgcctcttcaagaccaagaagggttcatatccatcagcagctggtgacggaccatgctgtgtaggaatt

SEQ ID NO: 4994 - DNA, 120 bp, synthetic construct
  misc_feature 1..120: note = Artificially Synthesized Probe
  source 1..120: mol_type = other DNA
aggcccttctggtaaatcccaaagcgggtgtggcccttgcagttggttttgttatgttggtgattttcattttgttttttagtgagaatgacatggtctggtatacatatttccagaatt

SEQ ID NO: 4995 - DNA, 120 bp, synthetic construct
  misc_feature 1..120: note = Artificially Synthesized Probe
  source 1..120: mol_type = other DNA
gtgttcagttggtccacgttgtaaaacaaccagaaaatggctgcttgcagtttgattctacacatatcacattctcaaaaaggcagaactgaagggaaaaagctgcatctgtggtttcca

SEQ ID NO: 4996 - DNA, 120 bp, synthetic construct
  misc_feature 1..120: note = Artificially Synthesized Probe
  source 1..120: mol_type = other DNA
tgctataaacacgtgtgtgcaagtgtctttttcatacgacttctttccctctgggtagatactcaggagtggggttgctgggtcaaacggtgggtctactcttagttcttcaaggaatct

SEQ ID NO: 4997 - DNA, 120 bp, synthetic construct
  misc_feature 1..120: note = Artificially Synthesized Probe
  source 1..120: mol_type = other DNA
ataaacgttaaaaaagaaaaaaaagccgggggagcaggttttagctgtaactctaacagcatctactgagaaatcatggagcagcctgataccttttcatccccctgaagtgccctaggt

SEQ ID NO: 4998 - DNA, 120 bp, synthetic construct
  misc_feature 1..120: note = Artificially Synthesized Probe
  source 1..120: mol_type = other DNA
gtcttatttacacatacatctacgtgagagagcaatacaatcctaataataatcctgcagcacattctcggctgcatcacaaagtaaatctattcccatcgcgcctgtgacttcctttct

SEQ ID NO: 4999 - DNA, 120 bp, synthetic construct
  misc_feature 1..120: note = Artificially Synthesized Probe
  source 1..120: mol_type = other DNA
catgataaacagcctccttctgcccatctgcacccaggaatgtgcatccaaagtagctcgcttatttacttccctgacatttattttctcatgtttaaacatatggattattatcggttc

SEQ ID NO: 5000 - DNA, 120 bp, synthetic construct
  misc_feature 1..120: note = Artificially Synthesized Probe
  source 1..120: mol_type = other DNA
taaggggtaaatgtgaccttcagaaatcacagcatttcttttccccatttgccgtcttgctcatgggaacttaactgctgctaattaatgaaatgccctctgttttttaaatctgggtgt

SEQ ID NO: 5001 - DNA, 120 bp, synthetic construct
  misc_feature 1..120: note = Artificially Synthesized Probe
  source 1..120: mol_type = other DNA
attcataagcagaggggaaggctgtgcgtttcatttcccctgcttatcgattcttgaaagcaataaatggtagagtttgctctttcatttcggtgagtcattcatttctgtgtcctttat

SEQ ID NO: 5002 - DNA, 120 bp, synthetic construct
  misc_feature 1..120: note = Artificially Synthesized Probe
  source 1..120: mol_type = other DNA
tttttatgtctctttggagtccacatgtgatttaaatggatttgtctccagattgtcttggaagaggaagaggatgggtgatgggggcatctcagtgctgactctgtctttcttcctaat

SEQ ID NO: 5003 - DNA, 120 bp, synthetic construct
  misc_feature 1..120: note = Artificially Synthesized Probe
  source 1..120: mol_type = other DNA
cagagaccagcctggaggtggagatagaaagatttacacttttctttccaatggcaaagccttttccagaaaaatcttaagaggaagggtcaaagtgagatgatactttattggattttc

SEQ ID NO: 5004 - DNA, 120 bp, synthetic construct
  misc_feature 1..120: note = Artificially Synthesized Probe
  source 1..120: mol_type = other DNA
cgaggcttgccttcctcagagttctaatctccaccctctgtctgttgtggtcagttcatgtgtctttacactagaaacatagcctagcatttgctgaaaatcattgcatttctttttaaa

SEQ ID NO: 5005 - DNA, 120 bp, synthetic construct
  misc_feature 1..120: note = Artificially Synthesized Probe
  source 1..120: mol_type = other DNA
atctgtggctgatgagaggccctgaggggtccagggagtccgtactttgtggggaaactcagaaggttttcatgaggaagtgacccagcccaggctttaaaatgcgtccctctagactct

SEQ ID NO: 5006 - DNA, 120 bp, synthetic construct
  misc_feature 1..120: note = Artificially Synthesized Probe
  source 1..120: mol_type = other DNA
gcagtcagacccgtatcactgcctggtccaacagagtcaatggccttgatttccagaattcatcatttctgatttaaaaaagaaaacatccatgattattttaagacacggacatgagtt

SEQ ID NO: 5007 - DNA, 120 bp, synthetic construct
  misc_feature 1..120: note = Artificially Synthesized Probe
  source 1..120: mol_type = other DNA
atatcatttttccacctagagcataggcaggacttatctatgattcaaatgcagaaaatgtttttaagagcgttcatgcagatgcaggattcaaggaaaaccagttgagaggcacaagtg

SEQ ID NO: 5008 - DNA, 120 bp, synthetic construct
  misc_feature 1..120: note = Artificially Synthesized Probe
  source 1..120: mol_type = other DNA
agccttgcagagagccacaacactaacagaactgcatttgtctcctcttgctcttccaactctaaataatatcttagcgtttcatgccaaatgggatgaaattgccagggtttttcatta

SEQ ID NO: 5009 - DNA, 120 bp, synthetic construct
  misc_feature 1..120: note = Artificially Synthesized Probe
  source 1..120: mol_type = other DNA
acccagagtggaataaatgaataatggctaggcctggggatatagatcaaaattcagttctatggctaagtagtactgaaagtgggtattacagagattcagggaagaaaacaaccaacc

SEQ ID NO: 5010 - DNA, 120 bp, synthetic construct
  misc_feature 1..120: note = Artificially Synthesized Probe
  source 1..120: mol_type = other DNA
attgttgaaatgatcgctttgaaaggagtttccatcatcgctgagagtcttcgttgaggagggcagaggtgttgagttcctcagcagtttcaagctgtggcatattcttcaggatttctt

SEQ ID NO: 5011 - DNA, 120 bp, synthetic construct
  misc_feature 1..120: note = Artificially Synthesized Probe
  source 1..120: mol_type = other DNA
cacaaaaaatttaaagagaaaataaaacacggccataattccgctcatcagagcccatcgctgtgagcatcttggttaattgccagcagacattttccaaagcaaactcagatcacaaac

SEQ ID NO: 5012 - DNA, 120 bp, synthetic construct
  misc_feature 1..120: note = Artificially Synthesized Probe
  source 1..120: mol_type = other DNA
gaaaaggcgcctgtggagaaggaacagaagccaatctcaggcatccatcaggtgcagaaaattcagacaatacgtcagctaaagaagttaagagcgtttcaaagtgaatatttttttatg

SEQ ID NO: 5013 - DNA, 120 bp, synthetic construct
  misc_feature 1..120: note = Artificially Synthesized Probe
  source 1..120: mol_type = other DNA
aggagcaatagcctgagatttgaaggccacatttttctaagctttgtaaaatgcccttcactctgtctttaaagtagtgtttcctgggtaagcatggtggacatatctttaaggtgtctt

SEQ ID NO: 5014 - DNA, 120 bp, synthetic construct
  misc_feature 1..120: note = Artificially Synthesized Probe
  source 1..120: mol_type = other DNA
gagcagaaatgaatccctaatttaaacagccttcaaatcctgtcattagggaagcggctcaaatgtaggctcgagcgtgctttctgtaaaagtaaacttttcaagagttagaagaatcta

SEQ ID NO: 5015 - DNA, 120 bp, synthetic construct
  misc_feature 1..120: note = Artificially Synthesized Probe
  source 1..120: mol_type = other DNA
aagtttcccagattctgaacgttggtttaatggtgaaggcttcacattctaatcctcctgtaagcaaaggtgtccatcagctaggaaaacgtcctatcggcaatgaaaagaagtaagtgt

SEQ ID NO: 5016 - DNA, 120 bp, synthetic construct
  misc_feature 1..120: note = Artificially Synthesized Probe
  source 1..120: mol_type = other DNA
tttgaaggcttaactgcttccttttgcttccgcattagcatgatttggagacaacttccccctgagaagacgcaattgtgctttgagtttaaaaacctgtcaatttaaagtgtgcatttc

SEQ ID NO: 5017 - DNA, 120 bp, synthetic construct
  misc_feature 1..120: note = Artificially Synthesized Probe
  source 1..120: mol_type = other DNA
gtgaggtcccgagatatgcctgttggcaaatgtacctttaaatcctcatacgtgccatttttcttcatcaattctccataatgaggcattgccaggaccgacaccaggtggcagctcagc

SEQ ID NO: 5018 - DNA, 120 bp, synthetic construct
  misc_feature 1..120: note = Artificially Synthesized Probe
  source 1..120: mol_type = other DNA
cctgatacatagagaatgtaaaacgcccactggcttccctgaaagtcaggtttcttcttgcaagtaagtctaccctaaggctatatggtccatcggtcactcacctgcccacaatcattt

SEQ ID NO: 5019 - DNA, 120 bp, synthetic construct
  misc_feature 1..120: note = Artificially Synthesized Probe
  source 1..120: mol_type = other DNA
atctaccagaagaaggaggatttccttgtctctttaagcatagataagggcatttctgaggtcgctgagatggtaattagcatttctcccatgctgtcccagatgcggaagatgtaagga

SEQ ID NO: 5020 - DNA, 120 bp, synthetic construct
  misc_feature 1..120: note = Artificially Synthesized Probe
  source 1..120: mol_type = other DNA
agagctcactgtgtctgtgcagccgtgataaagctcagcacatacgttaagcacagtaagagagtaacctgaataactgtaatgaaatcggcatttataacaatctactttaataaaacg

SEQ ID NO: 5021 - DNA, 120 bp, synthetic construct
  misc_feature 1..120: note = Artificially Synthesized Probe
  source 1..120: mol_type = other DNA
caaattcctttctcacacagctggacgctctgttctcacattactcacacatatgacgatggtctccatggaaactgtagttaattagagctgtccatcatatttctacatgaatgagac

SEQ ID NO: 5022 - DNA, 120 bp, synthetic construct
  misc_feature 1..120: note = Artificially Synthesized Probe
  source 1..120: mol_type = other DNA
tatttggggcatatatgccaaaatggtgacaaagatgtgtgtacgcacatgtgtcatcattctgataccccataaataacatgtttacatgcacatgtaacgtggtgccaaattctccct

SEQ ID NO: 5023 - DNA, 120 bp, synthetic construct
  misc_feature 1..120: note = Artificially Synthesized Probe
  source 1..120: mol_type = other DNA
acgtttgaagaaatacaaaggtgtctgtcatgtttgaactgttgagtgtggagggttttgaagatgtgcagggaatgactgcagtctacaccagaaacgcattaaagagtgactttgttt

SEQ ID NO: 5024 - DNA, 120 bp, synthetic construct
  misc_feature 1..120: note = Artificially Synthesized Probe
  source 1..120: mol_type = other DNA
caaaaagtgtttgcttttcaatataagatgatggaaatgggtagagttctaaaggatgaccgtccattatccactgcaactgagtcctagatttgttgctaactgacgttctacacagcc

SEQ ID NO: 5025 - DNA, 120 bp, synthetic construct
  misc_feature 1..120: note = Artificially Synthesized Probe
  source 1..120: mol_type = other DNA
aggctggattgtagggacagaaagcattttttcatcttagccctttgtaagtaagttcaacagcattaaatgcattcatgttgctgtatagccgtcagcacctctgtctctagaactttt

SEQ ID NO: 5026 - DNA, 120 bp, synthetic construct
  misc_feature 1..120: note = Artificially Synthesized Probe
  source 1..120: mol_type = other DNA
aacataccagtgcccaggccccacctgatgtatttgtctgagaaaggacttggccattgtcgtctttaaaagttctttacctgatgcttttttttttaatggaagaaacgcttcttgttt

SEQ ID NO: 5027 - DNA, 120 bp, synthetic construct
  misc_feature 1..120: note = Artificially Synthesized Probe
  source 1..120: mol_type = other DNA
aagtcataaagcaatgaagtgacatttgcttctggtcctatttcaaagcatcaatcttttttttccaactcccctcagtcttcaaaagctccaaggaaagctgagtagcattggctgaag

SEQ ID NO: 5028 - DNA, 120 bp, synthetic construct
  misc_feature 1..120: note = Artificially Synthesized Probe
  source 1..120: mol_type = other DNA
gagccttccacctggcaggcacatagattgtgaacatgtttttatataatagaacatcagctagcatagctttaatcatctccacagcatttaagtgcaccaatgtctcattctaatgtt

SEQ ID NO: 5029 - DNA, 120 bp, synthetic construct
  misc_feature 1..120: note = Artificially Synthesized Probe
  source 1..120: mol_type = other DNA
ccacggggaggcagctgaggcccggggagatttggcgtgcagcgccggtgggccagcactgctgggggacccagcacatcctccgcagctgctggcccaggtgctgagcccttcactgcc

SEQ ID NO: 5030 - DNA, 120 bp, synthetic construct
  misc_feature 1..120: note = Artificially Synthesized Probe
  source 1..120: mol_type = other DNA
aacacatcagatacctttaaagttagacacatctaacatttgtggaacttaggatgccagggcttttcatctgaatttctggggtgcatttacagcttttctcctaaacatcacgcgtcc

SEQ ID NO: 5031 - DNA, 120 bp, synthetic construct
  misc_feature 1..120: note = Artificially Synthesized Probe
  source 1..120: mol_type = other DNA
gtgggtgtgtgtgttaggttctgatgtaaaatatacgtcttattgtggaatataatccaaaaagtttgaaagcccttggcaggagcaataccttgcagccatcagggtggtgcagagaaa

SEQ ID NO: 5032 - DNA, 120 bp, synthetic construct
  misc_feature 1..120: note = Artificially Synthesized Probe
  source 1..120: mol_type = other DNA
actgaaaacacagacttctgtaattttagattctgaagagttttttgtaaggatttgcccctttaactgcctgtaaattacaagcacgctcccgtgcaaatgggcattcgaaaaggagtc

SEQ ID NO: 5033 - DNA, 120 bp, synthetic construct
  misc_feature 1..120: note = Artificially Synthesized Probe
  source 1..120: mol_type = other DNA
caaacagtatttgttctccccagggcatcagttagttcagcttgaaacctttcttataatacaagcatcgtcattttcaccacactgtggaaccgaaaataaatttccctagtgggtgac

SEQ ID NO: 5034 - DNA, 120 bp, synthetic construct
  misc_feature 1..120: note = Artificially Synthesized Probe
  source 1..120: mol_type = other DNA
atgttattacacttaccttgacaacatgatcaaagttgtttatttcacacggtttcataagcagaaatcgccagctagtgatcacggttcagacaaatggtggaaatcgtcggcggcata

SEQ ID NO: 5035 - DNA, 120 bp, synthetic construct
  misc_feature 1..120: note = Artificially Synthesized Probe
  source 1..120: mol_type = other DNA
gaatttctaacctaaaaattgaggtgagaccttgctaagccctcctggtcgtgtatgtaagctcgttgggaactgcagcttttctcagtaaaagcttcctaatcatatgcaattccctaa

SEQ ID NO: 5036 - DNA, 120 bp, synthetic construct
  misc_feature 1..120: note = Artificially Synthesized Probe
  source 1..120: mol_type = other DNA
aacccccaacagcccaggtgttttcaatggcacacatggttcctgctttctgtttcacataacacagaaccccagagcacgttttaagctccacttttaaaacttaatgaaattgtataa

SEQ ID NO: 5037 - DNA, 120 bp, synthetic construct
  misc_feature 1..120: note = Artificially Synthesized Probe
  source 1..120: mol_type = other DNA
cagaaaacgcatgtttggcctgaaatgggatggatgcatccaaccaaagagaaaacaaggaaggaggagacatggaaggcagccttggaaatcacggagagttgttgcattgattctttt

SEQ ID NO: 5038 - DNA, 120 bp, synthetic construct
  misc_feature 1..120: note = Artificially Synthesized Probe
  source 1..120: mol_type = other DNA
gcatgaatgagtgagtgaatgagggagggagggagtgaatgagttcatgaatgagtgagtgaataagggagggagtgaatgagtgagtgagtgactgagtgaatgagtgggtgactgagt

SEQ ID NO: 5039 - DNA, 120 bp, synthetic construct
  misc_feature 1..120: note = Artificially Synthesized Probe
  source 1..120: mol_type = other DNA
tgcttcattctgtcttttgaaaggggtgatgttagaaagtgagttctggcagctgtggggaggaagaagtcaagccctctgtggggtcaggagcttggaaaaaggaccctgaagagttag

SEQ ID NO: 5040 - DNA, 120 bp, synthetic construct
  misc_feature 1..120: note = Artificially Synthesized Probe
  source 1..120: mol_type = other DNA
ccaggacacagcacattagctcttatgggttttgttgtttgtttttgtcttcagattgtcggttctgtggctgtggcaaaccgagtggaggtttaagatggacttttaaatacaaattat

SEQ ID NO: 5041 - DNA, 120 bp, synthetic construct
  misc_feature 1..120: note = Artificially Synthesized Probe
  source 1..120: mol_type = other DNA
acgcctgaaaaccaaaaagcatagaacccttgtctacttggaaatcttaaaaaaaaaatctaaacatgtgctttgtgtgccaaacagtagctccaggttcactgactgcccgaaattcag

SEQ ID NO: 5042 - DNA, 120 bp, synthetic construct
  misc_feature 1..120: note = Artificially Synthesized Probe
  source 1..120: mol_type = other DNA
tctgcttcccaacataccatgggctatacacctgatgaacatgttagtgattatctgacgagatcaatggttcatcagctatcgatggggtgtccacaatggctgaggagaagaacagct

SEQ ID NO: 5043 - DNA, 120 bp, synthetic construct
  misc_feature 1..120: note = Artificially Synthesized Probe
  source 1..120: mol_type = other DNA
tggtactgttggggtctggattctggccgttctattcggggtgtggtggtgtcttgttgttgttttaatttggaatactcgggcgggaggtgatatggggcgtctggtttgcacacttgt

SEQ ID NO: 5044 - DNA, 120 bp, synthetic construct
  misc_feature 1..120: note = Artificially Synthesized Probe
  source 1..120: mol_type = other DNA
atcagcagatcctttacttccttacgtcttggttttctcctcagtgaagcaggacgcacaggtttcctcatgtggccattgcaaggatttaaggggacgcctgtaaagtcaccagcagaa

SEQ ID NO: 5045 - DNA, 120 bp, synthetic construct
  misc_feature 1..120: note = Artificially Synthesized Probe
  source 1..120: mol_type = other DNA
gtatatgttttaaagtaacttaaatgcattaccctttgctcttcacgtcagccacataaactaaggaccaggggcagctggagactcactggtcagaaccagcagcactggggtcacacc

SEQ ID NO: 5046 - DNA, 120 bp, synthetic construct
  misc_feature 1..120: note = Artificially Synthesized Probe
  source 1..120: mol_type = other DNA
atccctccgtgcgtttttgtgtccccatatcatcttctcaaaaaaatagatcctggagctctttccatataatcacataaaaaaccttctcattgcctttccaagggtacaagtgacgtc

SEQ ID NO: 5047 - DNA, 120 bp, synthetic construct
  misc_feature 1..120: note = Artificially Synthesized Probe
  source 1..120: mol_type = other DNA
tttagttggatttttctgaatgaaattgattgctgttagctggtggaattacaggagcattttccatccattttttctgagctgcgcagttattgatggtgaccatcagagtcccagtgt

SEQ ID NO: 5048 - DNA, 120 bp, synthetic construct
  misc_feature 1..120: note = Artificially Synthesized Probe
  source 1..120: mol_type = other DNA
atttagactcattcaacttagactccggagcccaggaccataatcatgggcagtgctgcctctttattttggaagcagatgatgaaacacctgaattacaatcatttgaacaagcaaagc

SEQ ID NO: 5049 - DNA, 120 bp, synthetic construct
  misc_feature 1..120: note = Artificially Synthesized Probe
  source 1..120: mol_type = other DNA
gaaagccataataagttcaaacatgaaattagtgtctcacacagcagctctggtctttgtcagactttaattgggatcagcacagattcattgccatggagagggaagtaaaatgggtaa

SEQ ID NO: 5050 - DNA, 120 bp, synthetic construct
  misc_feature 1..120: note = Artificially Synthesized Probe
  source 1..120: mol_type = other DNA
ttttgtacagttatgacacttcagctaaaagaaaaaagtccttactgaaagaggcttaaaatacagaaagctttgcctctcctggaggaaccatcaataacgtggcttccagccactgca

SEQ ID NO: 5051 - DNA, 120 bp, synthetic construct
  misc_feature 1..120: note = Artificially Synthesized Probe
  source 1..120: mol_type = other DNA
agtggtggccaacaagatggaccgaagacttcagaagcaacaggagagctgagggttggagtgttcatcatatgctgagaaaaattcatgtttatagaaagcaccaaaaatattaattac

SEQ ID NO: 5052 - DNA, 120 bp, synthetic construct
  misc_feature 1..120: note = Artificially Synthesized Probe
  source 1..120: mol_type = other DNA
cccagggatgttccatgctgagaaaaagaattcagcgatatttctcccatttgcttttgaaagaagagaaatatggctctgttctgcccagctcaccggtggtcagagtttaaggttatc

SEQ ID NO: 5053 - DNA, 120 bp, synthetic construct
  misc_feature 1..120: note = Artificially Synthesized Probe
  source 1..120: mol_type = other DNA
tttatttttgaagcaacttaagttcctcccctccccgctaaaaaagcaggcaactggttaagtatggtgcattaattaaatagtaagatattattagagagcgtgtgcgtgtgtgtgtgt

SEQ ID NO: 5054 - DNA, 120 bp, synthetic construct
  misc_feature 1..120: note = Artificially Synthesized Probe
  source 1..120: mol_type = other DNA
ggaacgcactctttgtggaaacctccttcccatgccactgccattccgatccttctctctcttgcttcatatctaaatgctttataaatttacctgactttctcatttgtatttgcaaat

SEQ ID NO: 5055 - DNA, 120 bp, synthetic construct
  misc_feature 1..120: note = Artificially Synthesized Probe
  source 1..120: mol_type = other DNA
gggctctgagatgcattcacctgcacttctgtctactctccttgcatataaattatttccagatgattctttcaaaatcataggcctgatttatagattcccaaatgagatattctcccc

SEQ ID NO: 5056 - DNA, 120 bp, synthetic construct
  misc_feature 1..120: note = Artificially Synthesized Probe
  source 1..120: mol_type = other DNA
ttgtgaagcgaaaagtgtgtgtcacaaggcaaattttctagcacagaaagtaaggtatgaccttttggcttcaggaataatgagattaggtttacaactgatagcagctttcttttgtgc

SEQ ID NO: 5057 - DNA, 120 bp, synthetic construct
  misc_feature 1..120: note = Artificially Synthesized Probe
  source 1..120: mol_type = other DNA
tgcctggcacacacgttgttgtgaactcttgcattgttggtaagatgtgtgatggatttggttttaccaaaaatggcaaatgtggagttatttttaaggcatacttcgtgtgctatttct

SEQ ID NO: 5058 - DNA, 120 bp, synthetic construct
  misc_feature 1..120: note = Artificially Synthesized Probe
  source 1..120: mol_type = other DNA
ttagcagaaccacatgaaatcagcaccatgccgacgaccatgaaaactgcctctcatttcatacccgagaaccaatatcttattcattcctaaaaaaggattatctaacatccatggggt

SEQ ID NO: 5059 - DNA, 120 bp, synthetic construct
  misc_feature 1..120: note = Artificially Synthesized Probe
  source 1..120: mol_type = other DNA
tgtgtggtgagtgtgtgttggggtggaggtgaacaaggcaggaaaatggggaggccatgacagtttttatgtcattaaaatgattacctatccttgagttccaaatgatatctgccaaac

SEQ ID NO: 5060 - DNA, 120 bp, synthetic construct
  misc_feature 1..120: note = Artificially Synthesized Probe
  source 1..120: mol_type = other DNA
cttctttttatcactatctgcatccacccaaatacacttaactaattaaaatctctatagtgtgttcaaaagttatttctcacctgcagtactcccttgagctccaggctgtccgttccc

SEQ ID NO: 5061 - DNA, 120 bp, synthetic construct
  misc_feature 1..120: note = Artificially Synthesized Probe
  source 1..120: mol_type = other DNA
tgtcactcatcttttttcgtttgttttcataactaacagcatgtccaccaacagactctgagagagctcaggcagcacatattctctgggacttaatcgctgctgttggccggatgcctt

SEQ ID NO: 5062 - DNA, 120 bp, synthetic construct
  misc_feature 1..120: note = Artificially Synthesized Probe
  source 1..120: mol_type = other DNA
cactgtctaccacggtaccttgtttgcagcaggtgctttgtaaattttgtttgaatggctgggttgagtcattaatgaaagagagggaaaggaaggcaggaaaacacttttaaaactcat

SEQ ID NO: 5063 - DNA, 120 bp, synthetic construct
  misc_feature 1..120: note = Artificially Synthesized Probe
  source 1..120: mol_type = other DNA
ggccgttggagacacaatatcaaacataaaaactaatgtaagacaaggcagagcataaacctggtagctgctgatatttactgatatcagtaaatatcctgagctgcaccccagaggtat

SEQ ID NO: 5064 - DNA, 120 bp, synthetic construct
  misc_feature 1..120: note = Artificially Synthesized Probe
  source 1..120: mol_type = other DNA
cacaccataaaagtcacgctttaggatgtacaattcggtagcattcagtagatttacaggtatgtgcaaccatcgctctaatcaatttaaaacatcttcaccccaaaaagcaaccctgtg

SEQ ID NO: 5065 - DNA, 120 bp, synthetic construct
  misc_feature 1..120: note = Artificially Synthesized Probe
  source 1..120: mol_type = other DNA
ttgcagattttgtaagatgggggttaaattcattgtttggtgtgtagaaattgggttatcctagcattatttgtaggagagactattctttcccctctgggtgaccttgtctcccttatc

SEQ ID NO: 5066 - DNA, 120 bp, synthetic construct
  misc_feature 1..120: note = Artificially Synthesized Probe
  source 1..120: mol_type = other DNA
ctgcgtctggccctcttttacctccttggttaggcggtcccagggactttattcttttagatgttattttaagtggaattgcttttctaatttcctttttgggtttctcattgctaatgt

SEQ ID NO: 5067 - DNA, 120 bp, synthetic construct
  misc_feature 1..120: note = Artificially Synthesized Probe
  source 1..120: mol_type = other DNA
atacttacaatatgctatttagattgggtaggccggccgccccataagtgcaacagtaagacgtgcatttacattctattctgaatttggggagatggttgtacgttcatgaataaatga

SEQ ID NO: 5068 - DNA, 120 bp, synthetic construct
  misc_feature 1..120: note = Artificially Synthesized Probe
  source 1..120: mol_type = other DNA
aaataatatctaaatattcccccaatatattaaagtgctctcattataatttgactgtttgagaaaggaagacgccgccggccattacagtgtaggtgctcctgtgagacagcgtaggca

SEQ ID NO: 5069 - DNA, 120 bp, synthetic construct
  misc_feature 1..120: note = Artificially Synthesized Probe
  source 1..120: mol_type = other DNA
ctgtcacaaggaaggcagctgtgcccgcagggagcttgctgtcctagatgtggccctgggtgacaggctgagaagaacagggctcccctaaaagttggtggatgggctggggtgcatttg

SEQ ID NO: 5070 - DNA, 120 bp, synthetic construct
  misc_feature 1..120: note = Artificially Synthesized Probe
  source 1..120: mol_type = other DNA
taataccacaaaatccggctgtcaagagacctgttcaatctactagatgctaaatcttggtcattaaccatttgggaacatcagtgtttcctctccactcctcacactttgcgatataaa

SEQ ID NO: 5071 - DNA, 120 bp, synthetic construct
  misc_feature 1..120: note = Artificially Synthesized Probe
  source 1..120: mol_type = other DNA
acgcccaccacgccaagcacagcaagaggagcaagagcaaggagcgcaagccggagggcaagccccggcccggcatgagcagctggtggagctcggacgacaacctggacagcgacagca

SEQ ID NO: 5072 - DNA, 120 bp, synthetic construct
  misc_feature 1..120: note = Artificially Synthesized Probe
  source 1..120: mol_type = other DNA
cacagcctctctaagcaccccccactacaaaaagcctgattatggaaaaggcctctgtgtctctggggtgtggattaaatgaatttaccaaaggcaaaaacaaagaaggtagatccctag

SEQ ID NO: 5073 - DNA, 120 bp, synthetic construct
  misc_feature 1..120: note = Artificially Synthesized Probe
  source 1..120: mol_type = other DNA
aatcatatccaaatgtaaaagttgtgtctgcttgtttagagaagcctggtagaaagaatcggggttcactctgatctgtctcctcattgtcacagacacatagctctcttgtttttgtct

SEQ ID NO: 5074 - DNA, 120 bp, synthetic construct
  misc_feature 1..120: note = Artificially Synthesized Probe
  source 1..120: mol_type = other DNA
tgtcccttcctgtcaattgcattaaactttctggtggaaaactacaggtttctgggtcctcacaaccccagattttatttcgcagccaggaaacagggaaactaaaggaatttgtctgtg

SEQ ID NO: 5075 - DNA, 120 bp, synthetic construct
  misc_feature 1..120: note = Artificially Synthesized Probe
  source 1..120: mol_type = other DNA
tcttgttttcatcttttctgcatcagcagactaagcatctaaggtcaaacttttcatgagcattgtaggaatgcagaacggattcgccgtggcttagctcaggatgccaaaggctctcta

SEQ ID NO: 5076 - DNA, 120 bp, synthetic construct
  misc_feature 1..120: note = Artificially Synthesized Probe
  source 1..120: mol_type = other DNA
taaataaaatggtttgtcatggaatgcacgatgctggccatttgcttctttctgcccgatctggggtggaacctgagtctcatcagagttgggtgtggtggcctgggacagcctgggcca

SEQ ID NO: 5077 - DNA, 120 bp, synthetic construct
  misc_feature 1..120: note = Artificially Synthesized Probe
  source 1..120: mol_type = other DNA
ccttagcgataccagtgctcagcagaatgaaagaactggccagcctggctgtgctccactctaatgcacgtttgcaatttgaaaggagggcttttgttttaagtggctcatggtatagat

SEQ ID NO: 5078 - DNA, 120 bp, synthetic construct
  misc_feature 1..120: note = Artificially Synthesized Probe
  source 1..120: mol_type = other DNA
agtgttccgaaaagcacattggaaatcataactcatgtgaacatggaacactgggtgggtgcatgcgctgttttatccaggtttaccaggggagaatgacatggcctacatgtaactcaa

SEQ ID NO: 5079 - DNA, 120 bp, synthetic construct
  misc_feature 1..120: note = Artificially Synthesized Probe
  source 1..120: mol_type = other DNA
ctgctggtgtcatccaaagagcgtgagctttagaacaagacagacgcgtggaaccttctcacaagctgtgcagccggggggctcacaataggggctttccatggaaataaatggctataa

SEQ ID NO: 5080 - DNA, 120 bp, synthetic construct
  misc_feature 1..120: note = Artificially Synthesized Probe
  source 1..120: mol_type = other DNA
gtgcccagtcgcaggcggcttagatgggggttttgtacactcagctgtagtgtggcccacaggtttggagatggccataggaaagacagttcacaactcacagccccagaagagagtgag

SEQ ID NO: 5081 - DNA, 120 bp, synthetic construct
  misc_feature 1..120: note = Artificially Synthesized Probe
  source 1..120: mol_type = other DNA
ctgaggcaggctggcattttagtattgctcttctgttcttttgatagtctccagacatatgctttggaatggggatttggtacttgaattcatgctttgaaattgactctggttgacatt

SEQ ID NO: 5082 - DNA, 120 bp, synthetic construct
  misc_feature 1..120: note = Artificially Synthesized Probe
  source 1..120: mol_type = other DNA
aatgtcaagtgctttaaaaattgcttttccccctcatgagcatcttttcatcactaaatgcacattctggaatagtattttgggtagctgggtagtatccatcctgtgcttttcgccctc

SEQ ID NO: 5083 - DNA, 120 bp, synthetic construct
  misc_feature 1..120: note = Artificially Synthesized Probe
  source 1..120: mol_type = other DNA
cagtgtgagaagagatgcatacaatacctccaattccctttcagcgcggtctgtattcctctttgaacacgtgcagacctgggcacaaggcaccaggtcataaaggctttagaagaaccc

SEQ ID NO: 5084 - DNA, 120 bp, synthetic construct
  misc_feature 1..120: note = Artificially Synthesized Probe
  source 1..120: mol_type = other DNA
cgcctcgttactgggggactgtgtggtgttgggtgtcggcgcctcgttactgggggactgtgtggtgttggggtgtccgcgcctcgttactgggggactgtgtggtgttggggtgtccgc

SEQ ID NO: 5085 - DNA, 120 bp, synthetic construct
  misc_feature 1..120: note = Artificially Synthesized Probe
  source 1..120: mol_type = other DNA
ttgctgcgggactgtgtggtgttgaggactccttgccacacggggtccatggtaaggggagctcctgctcgtccaggctggaagtccaggatatgtgagtgacagaaatgagcatgcctc

SEQ ID NO: 5086 - DNA, 120 bp, synthetic construct
  misc_feature 1..120: note = Artificially Synthesized Probe
  source 1..120: mol_type = other DNA
tttattttctttctctgtaaacagcatttggggagattctcttctcctacatgaaaaacatgctatgttagttccttgactacagactgtgggtgatgagctagttgctgtggaaagctt

SEQ ID NO: 5087 - DNA, 120 bp, synthetic construct
  misc_feature 1..120: note = Artificially Synthesized Probe
  source 1..120: mol_type = other DNA
caggtggaatgtgatgtggctgggcaagatccttttgcaactctgagtactgagaatttgcatgtatgatagaacttggcttctagatttaaaaccgtcctcttttatttgcttgcaatt

SEQ ID NO: 5088 - DNA, 120 bp, synthetic construct
  misc_feature 1..120: note = Artificially Synthesized Probe
  source 1..120: mol_type = other DNA
taaggaagtgtgcttgggcaacttccttgtcaaattataaagccaacatgagccatcgtatctttctgatcattcagattatcctcaggacaagcacatgtctctgtttgtatgaatgtg

SEQ ID NO: 5089 - DNA, 120 bp, synthetic construct
  misc_feature 1..120: note = Artificially Synthesized Probe
  source 1..120: mol_type = other DNA
aggccagcctcagtcctggggttttggacccccaggtaaacagccattggttaacttcccactttaaatgtttgtgattcattgcataattctatatgtttgaaagcaaaacatgaaaaa

SEQ ID NO: 5090 - DNA, 120 bp, synthetic construct
  misc_feature 1..120: note = Artificially Synthesized Probe
  source 1..120: mol_type = other DNA
ctcaaatctgatcagatgtgaggaaaatgggtgagatgtgctgcctacgttactcctgttctaaacacaaatccactctgcccgtggacccccatgccactgtccactcagcaaacacaa

SEQ ID NO: 5091 - DNA, 120 bp, synthetic construct
  misc_feature 1..120: note = Artificially Synthesized Probe
  source 1..120: mol_type = other DNA
caggatttatcactccattgatgagtccaacaaatgtcaggcattctgccaaactcgatttatacgtgccccaatcattctttttccctaaatctgacgccgtgttgtagataataaagc

SEQ ID NO: 5092 - DNA, 120 bp, synthetic construct
  misc_feature 1..120: note = Artificially Synthesized Probe
  source 1..120: mol_type = other DNA
tccattacgcacagccctttcataatgttcactcctgggggctctttcaatctaggcacatttaaatatcagcatttttaacgtgtagcaggtgaatattcatatcccaaacatgttctc

SEQ ID NO: 5093 - DNA, 120 bp, synthetic construct
  misc_feature 1..120: note = Artificially Synthesized Probe
  source 1..120: mol_type = other DNA
atgagatggagaagagagaggggtgaactggaggggtgtcttctgggatggagaggagagaggtgaactgtgcgggcatctgatgagatggggaggagagagggtgaactgtgggggcat

SEQ ID NO: 5094 - DNA, 120 bp, synthetic construct
  misc_feature 1..120: note = Artificially Synthesized Probe
  source 1..120: mol_type = other DNA
ggagagggggtgaactatgggggcatctgctggaatagagaggagagaggtgaactgtgggggcatctgatgagatggagaggagaaaggagtgaactgtgggggcgtcttctgggatgg

SEQ ID NO: 5095 - DNA, 120 bp, synthetic construct
  misc_feature 1..120: note = Artificially Synthesized Probe
  source 1..120: mol_type = other DNA
gaagagtgtctgagagaaaagtcctttagacccctgactgccatccgtgggtttcacagcttggggagcatattcttgcttaagttatatttagtcatcaataataacagctcgtttatt

SEQ ID NO: 5096 - DNA, 120 bp, synthetic construct
  misc_feature 1..120: note = Artificially Synthesized Probe
  source 1..120: mol_type = other DNA
tgatgagtcctgtgtgtggtcttcccaccagagcctcaataccatcgagcaagcacatttattaaacagttagttgacatttccattttgttatgacccaaatcatgtgttactgcaaat

SEQ ID NO: 5097 - DNA, 120 bp, synthetic construct
  misc_feature 1..120: note = Artificially Synthesized Probe
  source 1..120: mol_type = other DNA
taggttacatgaaataagccaaaatacagaaaaacaaacaccgcaaatccccacctaaatacaggacctaaaacaatggaactcacaggtgcagacagtggaatggaggttacagaagct

SEQ ID NO: 5098 - DNA, 120 bp, synthetic construct
  misc_feature 1..120: note = Artificially Synthesized Probe
  source 1..120: mol_type = other DNA
cattttttcatgtgtctgttggctgcataaatgtcttcttttgagaagtgtctgttcatgtccttcgcccacttgttgatggggttgtttatttttttcttgtaaatttatttgagttct

SEQ ID NO: 5099 - DNA, 120 bp, synthetic construct
  misc_feature 1..120: note = Artificially Synthesized Probe
  source 1..120: mol_type = other DNA
gctacagtaaccgagacaggaggatattcttcatgtttttagatcagtagcacactgaatactgcaagtaaatgagtactgcacatttcagtatcactgagtgaatttctaatgttctca

SEQ ID NO: 5100 - DNA, 120 bp, synthetic construct
  misc_feature 1..120: note = Artificially Synthesized Probe
  source 1..120: mol_type = other DNA
tagttaagaatgcaaatgttatgggaagatcgacttgctaattgtatttaattttaatgtgataggtatgggttcaggttcttaccccggaagttatcgggcacaccaagtccttgggag

SEQ ID NO: 5101 - DNA, 120 bp, synthetic construct
  misc_feature 1..120: note = Artificially Synthesized Probe
  source 1..120: mol_type = other DNA
ccgtctgtgggtcagaccctgcccacgtgcagagcaccacttagaattattatcaactaattgaaatgcaaattccaagtcctactgaatccaatttactgcatttctaaattagcttat

SEQ ID NO: 5102 - DNA, 120 bp, synthetic construct
  misc_feature 1..120: note = Artificially Synthesized Probe
  source 1..120: mol_type = other DNA
ccagcactgataccattcacatccattcccactgttctgtacacgatgaccaagatttcatcaaaatttaggagacaccgtaaaattaaagctcattctcaagacacagggcaatcaata

SEQ ID NO: 5103 - DNA, 120 bp, synthetic construct
  misc_feature 1..120: note = Artificially Synthesized Probe
  source 1..120: mol_type = other DNA
tatacaccacagtaaactaccagaagtgaagtatacagacaaaaccctgcacacatctacacacaccacaaactaccagaagtgaaggatacagacaaaaccccacacatatacacacac

SEQ ID NO: 5104 - DNA, 120 bp, synthetic construct
  misc_feature 1..120: note = Artificially Synthesized Probe
  source 1..120: mol_type = other DNA
aagtcatccttaggaaaaaaaaaaaaaagctagggaaattcattgctagcagaccagtactgcaagaaataggaaatgaagttcgttcttttcttttcccccgccaagatggagtctcgc

SEQ ID NO: 5105 - DNA, 120 bp, synthetic construct
  misc_feature 1..120: note = Artificially Synthesized Probe
  source 1..120: mol_type = other DNA
actgacccattcagcatctgaaccagagctgcaaaagtgaatcttatgaaacaatggatcgtggaggataaaacagaatcctgtgaagccatttctccaaggtgagaaataaactgtatt

SEQ ID NO: 5106 - DNA, 120 bp, synthetic construct
  misc_feature 1..120: note = Artificially Synthesized Probe
  source 1..120: mol_type = other DNA
ctaaacataaagataatcaatttaaaagacgtgtgcaaagctgattcacattcacctgatttcttaagctcctttaggttctattagtcaaaacgggagcagacgccagactcctcgtgc

SEQ ID NO: 5107 - DNA, 120 bp, synthetic construct
  misc_feature 1..120: note = Artificially Synthesized Probe
  source 1..120: mol_type = other DNA
ttctcatattttacttcaacatctagtttttggcctgctacaactgatattgttttcatgaagaccttagttaagagggaggctcctaagactggcgcctggtttgttcattaatactcc

SEQ ID NO: 5108 - DNA, 120 bp, synthetic construct
  misc_feature 1..120: note = Artificially Synthesized Probe
  source 1..120: mol_type = other DNA
gcccatgactttatcctgtccggacactttcgtgtgtgtataaaaatatacacatatgggcgtagtttacaataaacatgaggtcccactgcacgcattactgtacaatttccttttttc

SEQ ID NO: 5109 - DNA, 120 bp, synthetic construct
  misc_feature 1..120: note = Artificially Synthesized Probe
  source 1..120: mol_type = other DNA
aggaaataactttcttaggagatttttatagatttgcttctcaggaaaaataactttgcctatagtggtctgccagcttcagggggatggtcttgaaaaaggaaaatggtgatctggggt

SEQ ID NO: 5110 - DNA, 120 bp, synthetic construct
  misc_feature 1..120: note = Artificially Synthesized Probe
  source 1..120: mol_type = other DNA
atgcaaggctttctgttcatgtctcttaatctaatggctattgaaggtgcgaccttcgagattccagagaatgtactgaatgaagagaacagagcaaaaaagagtccaatctgtaagatc

SEQ ID NO: 5111 - DNA, 120 bp, synthetic construct
  misc_feature 1..120: note = Artificially Synthesized Probe
  source 1..120: mol_type = other DNA
gccatggtaccatatcctagttgacacacacaaactatcacacacagcaatgaaaactaataatgtatgaatgcacagtaatcccaatggtggttatctctgggtttgtggttgaattgt

SEQ ID NO: 5112 - DNA, 120 bp, synthetic construct
  misc_feature 1..120: note = Artificially Synthesized Probe
  source 1..120: mol_type = other DNA
taattatcagacactgtttctgaaacttatttccatctccgtgttggcttttctcttccggaatgtatggtcaaatataggatgtcatttctccagctgggtgaccatggtgattttgct

SEQ ID NO: 5113 - DNA, 120 bp, synthetic construct
  misc_feature 1..120: note = Artificially Synthesized Probe
  source 1..120: mol_type = other DNA
agacctgatgtcttttaaccttcagtctgttttcctattcaaagttctgttcttcccttccctctgcaaagcccaaacattaatttctagggaattacagggaagggaggttagagcatg

SEQ ID NO: 5114 - DNA, 120 bp, synthetic construct
  misc_feature 1..120: note = Artificially Synthesized Probe
  source 1..120: mol_type = other DNA
gttccccactgccagtttagtccagttcacatttaccaagatccttcacaaaatacgcccccatcggctgtttcttattagtctaaggttgattatgttcgattatgttcagtaaaaatc

SEQ ID NO: 5115 - DNA, 120 bp, synthetic construct
  misc_feature 1..120: note = Artificially Synthesized Probe
  source 1..120: mol_type = other DNA
taaaaatcttttggggagtgatttcaacaagataatggagtaggaaggtctgggccctccttcccctcaacaaacacagccgttcaacaatgatttgtggacaaattccctttacaaaaa

SEQ ID NO: 5116 - DNA, 120 bp, synthetic construct
  misc_feature 1..120: note = Artificially Synthesized Probe
  source 1..120: mol_type = other DNA
agaatctctgaatgattggtgggggtcttctcatgtataagacaaggtcatgaagactgagaaaggcaccagtgcggaaagtcaaggaaaatgaaaactcaggcaaagatatttcaaaga

SEQ ID NO: 5117 - DNA, 120 bp, synthetic construct
  misc_feature 1..120: note = Artificially Synthesized Probe
  source 1..120: mol_type = other DNA
aaatatatataaactttttattgacaaataacataaataacatacaaaagagaagaaacaataggttcccacctcaaaaatcctcccaaatactgaagtcaagaaataggtcggccgggc

SEQ ID NO: 5118 - DNA, 120 bp, synthetic construct
  misc_feature 1..120: note = Artificially Synthesized Probe
  source 1..120: mol_type = other DNA
tttttatggctgcatagtattccatggtgtatatgtgccacattttctttatgcagtttatcattgatggtcatttgggttggttccaagtctttgctattgtgaatagtgctgcaataa

SEQ ID NO: 5119 - DNA, 120 bp, synthetic construct
  misc_feature 1..120: note = Artificially Synthesized Probe
  source 1..120: mol_type = other DNA
tgttccattggcctatgtatctgttttgatactagtaccatcctgtttggttactgtggccttgtagtatagtttgaagtcagctggtgttctttgtcagctttgttctttttgcttagg

SEQ ID NO: 5120 - DNA, 120 bp, synthetic construct
  misc_feature 1..120: note = Artificially Synthesized Probe
  source 1..120: mol_type = other DNA
atgaagccgacttgatcgtggtggataaactttttgatgtgctgctgtattcagtttgccagtattttattgaggatttctgcatccatgttcatcagggatataggcctgaagttttct

SEQ ID NO: 5121 - DNA, 120 bp, synthetic construct
  misc_feature 1..120: note = Artificially Synthesized Probe
  source 1..120: mol_type = other DNA
atttgattgcactgtggtcggagagactgttatgatttccatccttttgcatttgctgaggagtgttttactcccaattatgtggtcagttttggaataagtgtgatatggtgctgagaa

SEQ ID NO: 5122 - DNA, 120 bp, synthetic construct
  misc_feature 1..120: note = Artificially Synthesized Probe
  source 1..120: mol_type = other DNA
cctcttctagcttttagcgtgtctgcagagatatccactgttagtctaatgggcttccctttgtgggtaacctgacctttctctctggctgcccttatcattttttccttcatttcaacc

SEQ ID NO: 5123 - DNA, 120 bp, synthetic construct
  misc_feature 1..120: note = Artificially Synthesized Probe
  source 1..120: mol_type = other DNA
tgccgaacagcaaagattgctgcctgttccttcctctggaagcttcgtcccagagggactcctgccagatgccagccggagctctcctgtgtgatgtgtctgttgatccctgctgggaga

SEQ ID NO: 5124 - DNA, 120 bp, synthetic construct
  misc_feature 1..120: note = Artificially Synthesized Probe
  source 1..120: mol_type = other DNA
ttctagtagaaagtgtaagacagtgttgctgtttctaattaatggtgtgctctgatgaatcgatgtcactgaaatggggtctttctttaaaaatgcagacatgctttacagcctggctgc

SEQ ID NO: 5125 - DNA, 120 bp, synthetic construct
  misc_feature 1..120: note = Artificially Synthesized Probe
  source 1..120: mol_type = other DNA
aataaaaagtgaagtgtgtagcaccctaaaggtgtcgagtgccgcgagggaaaattcaacagaatgagggggtctgtaagggtggaaggctggctctcagttctgcagaggctggataga

SEQ ID NO: 5126 - DNA, 120 bp, synthetic construct
  misc_feature 1..120: note = Artificially Synthesized Probe
  source 1..120: mol_type = other DNA
gtaactgcgggagaagggaccttgctataaatgcactggagtttgctgaaaatgtaaatacgaattttatctcctaacaccagggagagatgtttcactagggtgttcattatgatttgc

SEQ ID NO: 5127 - DNA, 120 bp, synthetic construct
  misc_feature 1..120: note = Artificially Synthesized Probe
  source 1..120: mol_type = other DNA
tctagtgagtgcggcctgtcctttgtgcatgagctttagaaacgtgctacattcttgtgggcctaagtgcctctttaggatgaaatcttttcaattagcaatcaaagacttttataccct

SEQ ID NO: 5128 - DNA, 120 bp, synthetic construct
  misc_feature 1..120: note = Artificially Synthesized Probe
  source 1..120: mol_type = other DNA
ccttccttgaggcccaagagaaaagacgaactgaaggtaccagtgggttttttttgaaaatttgcttcaagtctacattctgaacgtacggttcatttcaactttcagatgacataaagc

SEQ ID NO: 5129 - DNA, 120 bp, synthetic construct
  misc_feature 1..120: note = Artificially Synthesized Probe
  source 1..120: mol_type = other DNA
atgtgtatgttcatcagtatggatatactgacacccatatcctggaggacaaatgattggaggatttccataatgctcatcacatctgttctgacgtttaagtcactgtcctttctcaaa

SEQ ID NO: 5130 - DNA, 120 bp, synthetic construct
  misc_feature 1..120: note = Artificially Synthesized Probe
  source 1..120: mol_type = other DNA
acgggcggactgcctcctcaagtgggtccctgacccctgacccccgagcagcctaactgggaggcaccccccagcaggggcacactgacacctcacacggcagggtattccaacagacct

SEQ ID NO: 5131 - DNA, 120 bp, synthetic construct
  misc_feature 1..120: note = Artificially Synthesized Probe
  source 1..120: mol_type = other DNA
cagaaaccctacaagccagaagagagtgggggccaatattcaacattcttgaagaaaagaattttcaacccagaatttcatatccagccaaactaagcttcataagtgaaggagaaataa

SEQ ID NO: 5132 - DNA, 120 bp, synthetic construct
  misc_feature 1..120: note = Artificially Synthesized Probe
  source 1..120: mol_type = other DNA
accacagtgcaatgaaactagaactcaggattaagaatctcactcaaaactgctcaactacatggaaactaaacaacctgctcctgaatgactactgggtacataacgaaatgaaggcag

SEQ ID NO: 5133 - DNA, 120 bp, synthetic construct
  misc_feature 1..120: note = Artificially Synthesized Probe
  source 1..120: mol_type = other DNA
atcaagtgggcttcttccctgggatgcaaggctggttcaatatacgcaaatcaataaatgtaatccagcatataaacagagccaaagacaaaaaccacatgattatctcaatagatgcag

SEQ ID NO: 5134 - DNA, 120 bp, synthetic construct
  misc_feature 1..120: note = Artificially Synthesized Probe
  source 1..120: mol_type = other DNA
atatagatcaatggaacagaacagagccctcagaaataacaccgcatacctacaactatctgatctttgacaaacctgagaaaaacaagcaatggggaaaggattccctatttaataaat

SEQ ID NO: 5135 - DNA, 120 bp, synthetic construct
  misc_feature 1..120: note = Artificially Synthesized Probe
  source 1..120: mol_type = other DNA
ccatggaatactatgcagccataaaaaatgatgagttcatgtcctttgtagggacatggatgaaattggaaatcatcattctcagtaaactattgcaagaacaaaaaaccaaacaccgca

SEQ ID NO: 5136 - DNA, 120 bp, synthetic construct
  misc_feature 1..120: note = Artificially Synthesized Probe
  source 1..120: mol_type = other DNA
aaataagcctcaaaaatgttgaatgccaaaggactaaattgctaccttccattctagctctatcaactattcccggtacaaatatgaacagtaaggccaggctttgcaatgcgtgacctg

SEQ ID NO: 5137 - DNA, 120 bp, synthetic construct
  misc_feature 1..120: note = Artificially Synthesized Probe
  source 1..120: mol_type = other DNA
gtagcaacatgaaacccacctgcaaggaaaaaactgatgtgctcaaaacgaagcctgagaagaccccgatggtagaactcaccagaaagatctttaaacagccattgtaaggtcttatga

SEQ ID NO: 5138 - DNA, 120 bp, synthetic construct
  misc_feature 1..120: note = Artificially Synthesized Probe
  source 1..120: mol_type = other DNA
gttaaactgtggaaaaccagagagagacaagtctgtaaagcaaccaaggaaggggtcaaacagaaaccagaggaataattagaaaattatgactgccttattgtcagaagcaatgggagc

SEQ ID NO: 5139 - DNA, 120 bp, synthetic construct
  misc_feature 1..120: note = Artificially Synthesized Probe
  source 1..120: mol_type = other DNA
gaatgtgcatgtgttttaatggtagaatgagttctcttcctttgtgtgtatacacaataatgggattgctgggtcagatggtagttctgtttttagttctttgaggatttgccactctgc

SEQ ID NO: 5140 - DNA, 120 bp, synthetic construct
  misc_feature 1..120: note = Artificially Synthesized Probe
  source 1..120: mol_type = other DNA
atggaggtcctcgccagacacagaaggcaaacaagaagagaaaaagcacgaaatttaaaaggaaggagctccttccatgtttaggttccaggtttattcttatatcacatgattgtttac

SEQ ID NO: 5141 - DNA, 120 bp, synthetic construct
  misc_feature 1..120: note = Artificially Synthesized Probe
  source 1..120: mol_type = other DNA
gaggtgaaagtgaaaactttattgggatacacttcaatttcactagaatggcctaagttaaaaagaatgacaatacaacatgcccaagaggatacgggtggaggccacagtcaacatctg

SEQ ID NO: 5142 - DNA, 120 bp, synthetic construct
  misc_feature 1..120: note = Artificially Synthesized Probe
  source 1..120: mol_type = other DNA
tgctgttcctgacaagttgttcaaaagttccactcatacttccattttcttaccttaacgtctgcgatctcatttctgcacccatatccactgaaactgtcctttttaaaaatgacccca

SEQ ID NO: 5143 - DNA, 120 bp, synthetic construct
  misc_feature 1..120: note = Artificially Synthesized Probe
  source 1..120: mol_type = other DNA
atttccttttagcattttgcattaagaaatctatgttccagtctttgtccccaacacactgtcaactacacgagtgctacgcttgccatcttgcagaaggcctttcttgcacttccaagc

SEQ ID NO: 5144 - DNA, 120 bp, synthetic construct
  misc_feature 1..120: note = Artificially Synthesized Probe
  source 1..120: mol_type = other DNA
ctgtttcactagcactgtttagcgtgctccattttccattgaatgcagtggaagaaacacttcttatatttgggagcttctcctgtcagatcccatttatagaaatgagaagatgatctc

SEQ ID NO: 5145 - DNA, 120 bp, synthetic construct
  misc_feature 1..120: note = Artificially Synthesized Probe
  source 1..120: mol_type = other DNA
ccccatcttgattggctccccctagtcctagttcttgagttttgatctgtgactgtgaggaacctggccttctgggactctatatgataaaatgctaagccattataatattttttaaaa

SEQ ID NO: 5146 - DNA, 120 bp, synthetic construct
  misc_feature 1..120: note = Artificially Synthesized Probe
  source 1..120: mol_type = other DNA
ttaaaatgcaaaacggtggtgttaatcagaaggaacggctgttgtattggaagaaaattggtaattggtagaaagtgccgattggtagaaatggagggtatgaaaccagcaatctcaagg

SEQ ID NO: 5147 - DNA, 120 bp, synthetic construct
  misc_feature 1..120: note = Artificially Synthesized Probe
  source 1..120: mol_type = other DNA
ccacaccaagggtttactttgaaaagaaagtgtgtgctttaatgcccaactctggagtcagaatcgtccacctaacatctatagacatttttatgtacctgcttgtgcactgatatttaa

SEQ ID NO: 5148 - DNA, 120 bp, synthetic construct
  misc_feature 1..120: note = Artificially Synthesized Probe
  source 1..120: mol_type = other DNA
attcataaatatgaatctcagaatatttgcatatggcaaagttactcatcaagacacagacattcagttggaaatgtgatgctagcctctgggtgtggattggacggtcgttcccatctc

SEQ ID NO: 5149 - DNA, 120 bp, synthetic construct
  misc_feature 1..120: note = Artificially Synthesized Probe
  source 1..120: mol_type = other DNA
ttatatttttgacgtgtataactccatatcatttttgcgttgatttttttctgaggaagcaatgaccaaaagggtggtcatcctggcctctcttgttgataaagcacaggctgtcttcct

SEQ ID NO: 5150 - DNA, 120 bp, synthetic construct
  misc_feature 1..120: note = Artificially Synthesized Probe
  source 1..120: mol_type = other DNA
gcaggaattaagagcttgagccgagctcacattctctctgacttactgtggagcagggattaagagcttgagccaacctcacattctctctgacttactgtggagcaggaattaagagct

SEQ ID NO: 5151 - DNA, 120 bp, synthetic construct
  misc_feature 1..120: note = Artificially Synthesized Probe
  source 1..120: mol_type = other DNA
agagtctattcattttgcaggttttttcctcatcggaaggttgtacccaggactttttccactgaactattgaggcttttcctattgcacaactcaagaaggataccacctcttttatct

SEQ ID NO: 5152 - DNA, 120 bp, synthetic construct
  misc_feature 1..120: note = Artificially Synthesized Probe
  source 1..120: mol_type = other DNA
tattcaaaataatcctggaatgctggtagtaagtgagactgtatcacacccagaaacaaacgtagtaggtgagaagactgtgtcacacccagaaacaaacttccactaattgattgtcca

SEQ ID NO: 5153 - DNA, 120 bp, synthetic construct
  misc_feature 1..120: note = Artificially Synthesized Probe
  source 1..120: mol_type = other DNA
gtgtactagggcctcacacaggttctgaccttctcacgctgtctacgatacatctttgacaggaatgacacaatctaagacttttccataaaattctacataagtgaaaacttacattgg

SEQ ID NO: 5154 - DNA, 120 bp, synthetic construct
  misc_feature 1..120: note = Artificially Synthesized Probe
  source 1..120: mol_type = other DNA
taaaaaaagcctggaatttaggtaaagtagcacatttcatgtggacgaaaacaccagtacagccatttctttctcatctggactcagatatatgctgccgtaatggggataaggagatga

SEQ ID NO: 5155 - DNA, 120 bp, synthetic construct
  misc_feature 1..120: note = Artificially Synthesized Probe
  source 1..120: mol_type = other DNA
agcacacagcaccacagtacaatgtactctcctgacatctagtaacgtttcctaattgcatgtgttacactgtcacattcgcaagggtgttttgtctcttgtagataacctttctttttc

SEQ ID NO: 5156 - DNA, 120 bp, synthetic construct
  misc_feature 1..120: note = Artificially Synthesized Probe
  source 1..120: mol_type = other DNA
taatttatttgcataaatttaaagattatttttcaaagaaagctgtggatcctcggtgtgctttttatgtggtagatatttcttcaatgctggcaccactgagccgggggcttcgggaga

SEQ ID NO: 5157 - DNA, 120 bp, synthetic construct
  misc_feature 1..120: note = Artificially Synthesized Probe
  source 1..120: mol_type = other DNA
gggaaaacaaaattatggaggaaaactatcaacatgtacgggatgtaggtgcctcgataattgtgatagctgaacttcaaatttcatccaaagtttcctgtccgtgagtcaggcggattt

SEQ ID NO: 5158 - DNA, 120 bp, synthetic construct
  misc_feature 1..120: note = Artificially Synthesized Probe
  source 1..120: mol_type = other DNA
ggtgtgagccacgcatataaacgttccttcgtcccaccgtttctctcattatgaaaaacactgcatattgattagtgtcctccccttaaatgaagtggttttgaaaacatctaactcatt

SEQ ID NO: 5159 - DNA, 120 bp, synthetic construct
  misc_feature 1..120: note = Artificially Synthesized Probe
  source 1..120: mol_type = other DNA
gttaaaataaaacacgctatatggggaaaggctttgggaaggacatttagctctttactggaaaaatgagcagctggaggttctgtgagccacaaaatctgaaaaccagaagattcctcc

SEQ ID NO: 5160 - DNA, 120 bp, synthetic construct
  misc_feature 1..120: note = Artificially Synthesized Probe
  source 1..120: mol_type = other DNA
tgctgaaccctaatcccaggacctgagaatgtgactgcgtttcagacagacccttcgaagaggtgaccaggtagaatgaggtcacagggggcccaaatccaatctgtccggtgtccttat

SEQ ID NO: 5161 - DNA, 120 bp, synthetic construct
  misc_feature 1..120: note = Artificially Synthesized Probe
  source 1..120: mol_type = other DNA
tgttgagctgagggtcccatgacttgctaacccaacttcaagaagaggtgtggaggtcgaggctggaggtgcggtccagagccatggagccacccccgaacaggagggtatagaaagaga

SEQ ID NO: 5162 - DNA, 120 bp, synthetic construct
  misc_feature 1..120: note = Artificially Synthesized Probe
  source 1..120: mol_type = other DNA
ggacatttttggaggggcgttattctgtttaccatagtaggttttggtaaatactggtagagtgcatgaatgaatgaggtcttctctgaaaccgagcccagtataaatggtgacatcctt

SEQ ID NO: 5163 - DNA, 120 bp, synthetic construct
  misc_feature 1..120: note = Artificially Synthesized Probe
  source 1..120: mol_type = other DNA
acaaatgtgttcataaagattttccccaagtgtgtagcctgctcttcccttcaaaaccaccgttttcaagtaatttgtgtccttctcttataaaatcctcctgtctgcgtacttagactg

SEQ ID NO: 5164 - DNA, 120 bp, synthetic construct
  misc_feature 1..120: note = Artificially Synthesized Probe
  source 1..120: mol_type = other DNA
gtccccacctgtgtcaccctccaacccgccggtcctcacctgtgtcaccctcgaccccgccggccctcacctgtgtcaccctcgaccccgccggccctcacctgtgtcaccctccaaccc

SEQ ID NO: 5165 - DNA, 120 bp, synthetic construct
  misc_feature 1..120: note = Artificially Synthesized Probe
  source 1..120: mol_type = other DNA
acctgtgtcaccctcgaccccgccggccctcacctgtgtcaccctggaacccgccggccctcacctgtgtcaccctggaacccgccagccctcacctgtgtcaccctcgaccccgccggt

SEQ ID NO: 5166 - DNA, 120 bp, synthetic construct
  misc_feature 1..120: note = Artificially Synthesized Probe
  source 1..120: mol_type = other DNA
ccgcagtttcttccttgagtttctgcctgagtcctagctgtgctttaagccccagctcaggaatcatttcttcaaggaagcggcagagacgcgctcctgatctgatcagcgtctgcacga

SEQ ID NO: 5167 - DNA, 120 bp, synthetic construct
  misc_feature 1..120: note = Artificially Synthesized Probe
  source 1..120: mol_type = other DNA
cagtgttatgagcttattaggagtaggctgggctaagttacgatgtttggtgggttaaatgtattaaacgtgtttcccacttacgatgtttttagtgtatgatgggtttgtggggacata

SEQ ID NO: 5168 - DNA, 120 bp, synthetic construct
  misc_feature 1..120: note = Artificially Synthesized Probe
  source 1..120: mol_type = other DNA
agcctcattgacgacaggagccaattccttatcctctttctctgtatgtattcacctgtgtctctattgtctgtctcttccttaccatctctctctatatgtgttcatctatatctctat

SEQ ID NO: 5169 - DNA, 120 bp, synthetic construct
  misc_feature 1..120: note = Artificially Synthesized Probe
  source 1..120: mol_type = other DNA
tctggaactgaagtctccaagctagagtccatgaccccaggggaaccctagcgtaaggtattcatgaattcagggctgctcacagttagatgggataaaaagtgtgtctttatcctggct

SEQ ID NO: 5170 - DNA, 120 bp, synthetic construct
  misc_feature 1..120: note = Artificially Synthesized Probe
  source 1..120: mol_type = other DNA
ttacagttgataagctctttaattccttttctattgagagtttgtcctaacttagaggactctgacgtttaagttataaactccactgtgctcggctgttagccttggcatcgacttgag

SEQ ID NO: 5171 - DNA, 120 bp, synthetic construct
  misc_feature 1..120: note = Artificially Synthesized Probe
  source 1..120: mol_type = other DNA
accagaatactcaatacccagtgtgtaaattctttttgcttcttcaaagctaccagaacactcaacacccagtgtctagtcattgctatttatattgtcagcagtggtgttggggtaaac

SEQ ID NO: 5172 - DNA, 120 bp, synthetic construct
  misc_feature 1..120: note = Artificially Synthesized Probe
  source 1..120: mol_type = other DNA
ggaatttctggagaaaaagccccacaccttaaatatgcgggcaggttacatttccaagtctttcagtggcaggatatgctcctactctctttctgtaataaaaacgagtatttcttgtat

SEQ ID NO: 5173 - DNA, 120 bp, synthetic construct
  misc_feature 1..120: note = Artificially Synthesized Probe
  source 1..120: mol_type = other DNA
ttgggattacatggggaataatatggggaactgtgctaacagatacgtgtatgcactttctcaaacgtaccatccagcgtccacattctgaagataaacaggtttaccaattctttgcaa

SEQ ID NO: 5174 - DNA, 120 bp, synthetic construct
  misc_feature 1..120: note = Artificially Synthesized Probe
  source 1..120: mol_type = other DNA
tgcaggtgtagaattaagagatatttgtgtttctttcctaaatgattccataaacctggtgctaaggaactattacattagacccttggtgtaggcagcaaaggagattgggctttacgc

SEQ ID NO: 5175 - DNA, 120 bp, synthetic construct
  misc_feature 1..120: note = Artificially Synthesized Probe
  source 1..120: mol_type = other DNA
caaaatgttatgagcagtttctgaaaagcaaagtaaattgcctccttggtctatgtatcatcccatcagcgttcgtatctcaaggctgtgccacagatgactcattgtgcaattatcttg

SEQ ID NO: 5176 - DNA, 120 bp, synthetic construct
  misc_feature 1..120: note = Artificially Synthesized Probe
  source 1..120: mol_type = other DNA
ccttgaaatcttggtagtaaagatttcattctgatacaacttcagtatagatgtcattcacaattaggtgtcccgtgtacgcacatgcacatatggagagacacactgactgtgaagatg

SEQ ID NO: 5177 - DNA, 120 bp, synthetic construct
  misc_feature 1..120: note = Artificially Synthesized Probe
  source 1..120: mol_type = other DNA
ccagaacttgtgggacccacataatttcttgtaacttcaggaaaaccattgtgtgtatgcttgtgggatgtgacttctgtgtcctgtctgatttattcttctgttttgtgactagcatta

SEQ ID NO: 5178 - DNA, 120 bp, synthetic construct
  misc_feature 1..120: note = Artificially Synthesized Probe
  source 1..120: mol_type = other DNA
caaaaaaaaaaaaaagtttgagccatttgttgtggccagtagctaagttattggtcagggcagtctagaaaggagcctttctgacacaactgtggtaaacctaagaatgtaggcattttc

SEQ ID NO: 5179 - DNA, 120 bp, synthetic construct
  misc_feature 1..120: note = Artificially Synthesized Probe
  source 1..120: mol_type = other DNA
acatacatatagaaagtgatagataacacagcctatagctcataaggattagttgtgataaacgcatgctaggcgtgcactcacagaaacagaatgaagacgattattatcacccacacc

SEQ ID NO: 5180 - DNA, 120 bp, synthetic construct
  misc_feature 1..120: note = Artificially Synthesized Probe
  source 1..120: mol_type = other DNA
ccaggtacagctgctccatttacatatgaaagctcctagtctgcatatctatgcctgacttcttaggcagctttcccttaaagaagaaacggtttaggggctacttttttatatatatac

SEQ ID NO: 5181 - DNA, 120 bp, synthetic construct
  misc_feature 1..120: note = Artificially Synthesized Probe
  source 1..120: mol_type = other DNA
cggttttgagtgagtttcttaatcctgagttctaatttgattgcactgtggtcggagagactgtttgttatgatttccatccttttgcatttgctgaggtgtgttttacttttaattatg

SEQ ID NO: 5182 - DNA, 120 bp, synthetic construct
  misc_feature 1..120: note = Artificially Synthesized Probe
  source 1..120: mol_type = other DNA
gacaaaagctatatttaaaatatattttaagtgcctgtccctggtcttcacacacagatcccccttgacctctgtactcacatgtaaaaatgcgtctggtatctgcatacctggaagttt

SEQ ID NO: 5183 - DNA, 120 bp, synthetic construct
  misc_feature 1..120: note = Artificially Synthesized Probe
  source 1..120: mol_type = other DNA
gtaaagacagcagtgactggcagttcacaagtgttcaagctctagctctttccaagaaaacgttgtctaaatagaaatccttttcaaagcctttcaagctggttttcttcctgttcacgt

SEQ ID NO: 5184 - DNA, 120 bp, synthetic construct
  misc_feature 1..120: note = Artificially Synthesized Probe
  source 1..120: mol_type = other DNA
ggtcatgagggatgaactgatgctttggaaatcagtgggtcccacacacctttcctatgaaccaggaaaatatatcatcaagccaataaacaaatattcgaaggcctctttcccaaaata

SEQ ID NO: 5185 - DNA, 120 bp, synthetic construct
  misc_feature 1..120: note = Artificially Synthesized Probe
  source 1..120: mol_type = other DNA
cagagcaccctcagacagagggaaggcagtttctccaagatcacatgatgacatgctttcatgtctgaagcaagaaagattgatttaatagaaccagaaagaagtgtgtgagatttccct

SEQ ID NO: 5186 - DNA, 120 bp, synthetic construct
  misc_feature 1..120: note = Artificially Synthesized Probe
  source 1..120: mol_type = other DNA
atgttttgatttagaggaagagagaacggcagaatggtcatttgctgtttctgccagaaggtaaatagtttgaggaaaactccatgacgcttgtaaagaaaagaagaagtcaggccgtat

SEQ ID NO: 5187 - DNA, 120 bp, synthetic construct
  misc_feature 1..120: note = Artificially Synthesized Probe
  source 1..120: mol_type = other DNA
gattttgaacagtggcgacagacctttgagagtaactatgaaacacataatgagccaaggtggggatgaatttgcatgcatttgctcaaattttctgggcaggtcactaactgattactt

SEQ ID NO: 5188 - DNA, 120 bp, synthetic construct
  misc_feature 1..120: note = Artificially Synthesized Probe
  source 1..120: mol_type = other DNA
gcctttgggatggagaagtcttgggaactttctgagtctcctaaatagtgccttgaatcttgtcagttttcaataattttgcttaaggcattgattgacgttagagggaaaagtcaggaa

SEQ ID NO: 5189 - DNA, 120 bp, synthetic construct
  misc_feature 1..120: note = Artificially Synthesized Probe
  source 1..120: mol_type = other DNA
ttatcagctcttcctgtgcactaaaggaaaataattgactgtaacggacaaccaattcctgttgagggagagtgttagggagttcatcctctctataaaaataagttatagcctgagtcc

SEQ ID NO: 5190 - DNA, 120 bp, synthetic construct
  misc_feature 1..120: note = Artificially Synthesized Probe
  source 1..120: mol_type = other DNA
ggtatttttataatcctgcactgttacaggtatattcatgtgtgctgtctcactgtcccctcatttcacgctatttttttaggctagacgtccaggaacagacttgctccgtcaaccaca

SEQ ID NO: 5191 - DNA, 120 bp, synthetic construct
  misc_feature 1..120: note = Artificially Synthesized Probe
  source 1..120: mol_type = other DNA
tgcctagagagtatggagataacactgttttgatgctttaaaggggagggtttctgttgaagtctgatttttcaaaagcttttcggtattgtggccaaagaattgagtggggaaaccaaa

SEQ ID NO: 5192 - DNA, 120 bp, synthetic construct
  misc_feature 1..120: note = Artificially Synthesized Probe
  source 1..120: mol_type = other DNA
acaggtgccctccaggatatccacccagccacgactgaggcagtgccaacttctaagcacgtgcagtaccgactttatctgaaatgagtgggacataattttggaaactcatacagttaa

SEQ ID NO: 5193 - DNA, 120 bp, synthetic construct
  misc_feature 1..120: note = Artificially Synthesized Probe
  source 1..120: mol_type = other DNA
ttccgggacctttgggcacagttttgtctgagtgcagatagcaggagaatctgtgttctgcgaatgtcattcctacaaatgaacagcgtccacgtcactgaacacatcttctgtggagct

SEQ ID NO: 5194 - DNA, 120 bp, synthetic construct
  misc_feature 1..120: note = Artificially Synthesized Probe
  source 1..120: mol_type = other DNA
cgcttttcttcattccaattggaccatttgtgtattcactttcgtttttatcctttgcggtttgtctctcctgctaagttttccattctcttttgtgtgcatgtgtgtgtttggggaact

SEQ ID NO: 5195 - DNA, 120 bp, synthetic construct
  misc_feature 1..120: note = Artificially Synthesized Probe
  source 1..120: mol_type = other DNA
ctctctatgcccaggatttctgaaattgataaatacttagctcctcctggccaagtatgattttaccatgtccccttcagactttaccatccagcaatggagaacttcattttacttaga

SEQ ID NO: 5196 - DNA, 120 bp, synthetic construct
  misc_feature 1..120: note = Artificially Synthesized Probe
  source 1..120: mol_type = other DNA
ttttcactgctgtgtagtattccgtgtcacaagtaaatcatgacttactgcacattcctatcccactgtatcaccctcattctccccaggtgctactttataaataatgctgcaatgaac

SEQ ID NO: 5197 - DNA, 120 bp, synthetic construct
  misc_feature 1..120: note = Artificially Synthesized Probe
  source 1..120: mol_type = other DNA
cgtaaaataacactgatcatgtttatgtcgagcaaggtaaggtttaataaagtcgtgacccacttaacactagaaacgggaatggtaaattctgacaggaaggccaggatcttcactcaa

SEQ ID NO: 5198 - DNA, 120 bp, synthetic construct
  misc_feature 1..120: note = Artificially Synthesized Probe
  source 1..120: mol_type = other DNA
ttctgtgtctttctgtacgtggatgcagccatcagtataagtcttttaaatcgcttatttgttgtcattagctgtgtttggttcatgctgtactttcttcaccatagggcgtgataagag

SEQ ID NO: 5199 - DNA, 120 bp, synthetic construct
  misc_feature 1..120: note = Artificially Synthesized Probe
  source 1..120: mol_type = other DNA
atatttaaaatagcatgtattgtctatttcataaaaacaaattttgatgagaatattacatggtgagggctcagccaatgtgtgacagggacagtgttgggtggcctccctcatcaggga

SEQ ID NO: 5200 - DNA, 120 bp, synthetic construct
  misc_feature 1..120: note = Artificially Synthesized Probe
  source 1..120: mol_type = other DNA
gttatttaggcctgagacttaggcagatgttaaagtataatgatttgcaaaaccaaatgttcttccacagacaaaacaccagcatatttcacaaacaaaacactacctgcccttgagccg

SEQ ID NO: 5201 - DNA, 120 bp, synthetic construct
  misc_feature 1..120: note = Artificially Synthesized Probe
  source 1..120: mol_type = other DNA
gttaccagctcatgctttacaagaaaatgccttggcattatgccaaagagaagtcgatggtaagtaaaagattaagttagttaactgtgtgatgatgtgctcaaaggtctcactcctggg

SEQ ID NO: 5202 - DNA, 120 bp, synthetic construct
  misc_feature 1..120: note = Artificially Synthesized Probe
  source 1..120: mol_type = other DNA
agatggctgttttaatagggcattcactaatcctagaaatagaagtgcaacaatgaaactacattgactatgacttacagagaataacggccttggagcctcggcagtctgagaaaatca

SEQ ID NO: 5203 - DNA, 120 bp, synthetic construct
  misc_feature 1..120: note = Artificially Synthesized Probe
  source 1..120: mol_type = other DNA
tgagtttatcccattcgggacacattcagaaagttgtagtcttctttggaaggtgtaagacattgagacattagccattactgtgttgataacacagagactacttctcctgtcatcatt

SEQ ID NO: 5204 - DNA, 120 bp, synthetic construct
  misc_feature 1..120: note = Artificially Synthesized Probe
  source 1..120: mol_type = other DNA
aattatttctcaaaccaagaatgaaagtccctacaaagggctttagtgctgaggccctgtcatggtaagtcctggttttctgtcactggaggcattccagaatattctataaattatgcc

SEQ ID NO: 5205 - DNA, 120 bp, synthetic construct
  misc_feature 1..120: note = Artificially Synthesized Probe
  source 1..120: mol_type = other DNA
aagacatggtaaaggacctaactgattacctaacagtgggagaagaccaggtacaggaagtggaaactgttgagtgtcataagagaagtacagataaagtacttaaaaactcagaggtct

SEQ ID NO: 5206 - DNA, 120 bp, synthetic construct
  misc_feature 1..120: note = Artificially Synthesized Probe
  source 1..120: mol_type = other DNA
tgcccagataccttcatctttttgtggacagatgtcaaaacacttgttatgcccctcatctgtgtgttttgtccataaaactagcacaatattcatcaagttcagatatttccctaaatg

SEQ ID NO: 5207 - DNA, 120 bp, synthetic construct
  misc_feature 1..120: note = Artificially Synthesized Probe
  source 1..120: mol_type = other DNA
aaaagaaatccttcccaagctaagactttattgaataattccattgagatgcaactctcatcaagaactcaccaagggagcacatgtacacacaggatctttcaaacggtatcggaaact

SEQ ID NO: 5208 - DNA, 120 bp, synthetic construct
  misc_feature 1..120: note = Artificially Synthesized Probe
  source 1..120: mol_type = other DNA
ccacatgtttattgcagcattattcatgttagccaagatatggaagagacctaggttcccatcagtagaaaaatggataaagaaaatgtggtaagaaagtaatgtgtgtgaataatattc

SEQ ID NO: 5209 - DNA, 120 bp, synthetic construct
  misc_feature 1..120: note = Artificially Synthesized Probe
  source 1..120: mol_type = other DNA
tctgggagccatagcttaggcagaccccactacaaaattagttacaagggaatctcaggggatcacaggggttacaaatactcaaatgatcatttccgactctctgcaaattttataaaa

SEQ ID NO: 5210 - DNA, 120 bp, synthetic construct
  misc_feature 1..120: note = Artificially Synthesized Probe
  source 1..120: mol_type = other DNA
aggccccggtgttaagatgcccgacagacaaccttccatccttcttttcaagacagaaacaatgccaaagtgttatccgagttacttgcttttattaaaagttatgcttttttcatcttt

SEQ ID NO: 5211 - DNA, 120 bp, synthetic construct
  misc_feature 1..120: note = Artificially Synthesized Probe
  source 1..120: mol_type = other DNA
tcaaatcaaggttatctctgcaacgtcattttcaactggctcatagcattttattacatgaacattaagaccctttgtgcccatgaaatgcggttctttttcccgaaagtcgggctaagg

SEQ ID NO: 5212 - DNA, 120 bp, synthetic construct
  misc_feature 1..120: note = Artificially Synthesized Probe
  source 1..120: mol_type = other DNA
gtgcactggtaagaaatgggttccagtcgattcctgtgtggttttgaggatcatggtgagctaggatctaccaaagcagctgtttacaaagtggtgaccatgctgacagcagactcaaga

SEQ ID NO: 5213 - DNA, 120 bp, synthetic construct
  misc_feature 1..120: note = Artificially Synthesized Probe
  source 1..120: mol_type = other DNA
cactaacatgttagagtccataaaaataggaagaactcgatgttgctttcactcacacgtgttcttgtgtcttccagctcatccaaacagcagcactgaaataatctcgatgccaaaata

SEQ ID NO: 5214 - DNA, 120 bp, synthetic construct
  misc_feature 1..120: note = Artificially Synthesized Probe
  source 1..120: mol_type = other DNA
gcagggaggcggatacggccctggtttaaacgcggtaccgaggcagggaggcggatacggccctggtttaaacgcggtaccgaggcagggaggcggatacggccctggtttaaacgcggt

SEQ ID NO: 5215 - DNA, 120 bp, synthetic construct
  misc_feature 1..120: note = Artificially Synthesized Probe
  source 1..120: mol_type = other DNA
aaatagtaaataatagttatgctacttaataagttgttttataatacatacatcgatttcttttcagaccaaacattttcagtcaaatgcaaataggtcttctctaggcctcgcgtagca

SEQ ID NO: 5216 - DNA, 120 bp, synthetic construct
  misc_feature 1..120: note = Artificially Synthesized Probe
  source 1..120: mol_type = other DNA
cttcccacacacagcccaaggtgcatattcagacctgctaaatgttcctttctgctctgccagaaatagctaatatttggcttaaaattgttcatcctaatatttgttatgccttttgag

SEQ ID NO: 5217 - DNA, 120 bp, synthetic construct
  misc_feature 1..120: note = Artificially Synthesized Probe
  source 1..120: mol_type = other DNA
ttcacaaggaaagaggccctgcatgagtttgctgggggaaagggaatggcatggcacaaccattgactttttttttttattataaacaccttatcatctctgaatgttcagtggattcag

SEQ ID NO: 5218 - DNA, 120 bp, synthetic construct
  misc_feature 1..120: note = Artificially Synthesized Probe
  source 1..120: mol_type = other DNA
aaaccataagcaaatccagttgaatgttgacccaccagaacctcctctgactcttttaaatccccactgaatcaagggagccacacctggaaaaatcattcagatttcaatgtagggagc

SEQ ID NO: 5219 - DNA, 120 bp, synthetic construct
  misc_feature 1..120: note = Artificially Synthesized Probe
  source 1..120: mol_type = other DNA
tttatgagctgtgaagcatttagaaactctcccatctgccccattcccagcattttcaacgtggaacaatgaacagctgtgctacgtgtttttaggccgacagcaaatacgtgtgctaaa

SEQ ID NO: 5220 - DNA, 120 bp, synthetic construct
  misc_feature 1..120: note = Artificially Synthesized Probe
  source 1..120: mol_type = other DNA
tttttctagacaaatgttattaattaaaatgataaagaaaatcaagtcagcatcctttggggaagtggtgtttggtatccagcaaggatgcacacctgggtcatgagaacgagagccaga

SEQ ID NO: 5221 - DNA, 120 bp, synthetic construct
  misc_feature 1..120: note = Artificially Synthesized Probe
  source 1..120: mol_type = other DNA
tgaagttagcccaggtgcacacgatggttccgtctagtctccattctttggtcattgagagcaaacgtgagcccatctacccaagctgcgcatagagtatgattctcaaaatggaaacgt

SEQ ID NO: 5222 - DNA, 120 bp, synthetic construct
  misc_feature 1..120: note = Artificially Synthesized Probe
  source 1..120: mol_type = other DNA
ggacagttatgtgctgaaaaaaggaattacttgttaaagtagctgaaggtttcaatgaactgatcccccccattgttttagatggatgccaagaagtcaggtaagagtcattgcttctgg

SEQ ID NO: 5223 - DNA, 120 bp, synthetic construct
  misc_feature 1..120: note = Artificially Synthesized Probe
  source 1..120: mol_type = other DNA
acggtgacttgcgctgcttttcaggaagaaagaaaggtcccgcctccaataccaaagaagcctcccaaggggaagtttcccatcacaagagaaaaatccctggacctgcccgacagacaa

SEQ ID NO: 5224 - DNA, 120 bp, synthetic construct
  misc_feature 1..120: note = Artificially Synthesized Probe
  source 1..120: mol_type = other DNA
gtgttcccaccaggaagtcacgcgcagagaggagagtcttacggagggctgggagcttaaaaggaaaacaatgtccttacttgtaaacagttattgtattttttatttctttctaactta

SEQ ID NO: 5225 - DNA, 120 bp, synthetic construct
  misc_feature 1..120: note = Artificially Synthesized Probe
  source 1..120: mol_type = other DNA
ccccacatcccactgagcatgggaccattgggagcagagctgatattaaagcatgtttagcttcgaagttttacttttttaaagctgagtagttaagaattccctgtaaaaacaaaaccc

SEQ ID NO: 5226 - DNA, 120 bp, synthetic construct
  misc_feature 1..120: note = Artificially Synthesized Probe
  source 1..120: mol_type = other DNA
tgtgttagtcactcgagctagcttatttcagccacttctagcagatcatgccatggagctcacgacgtgtgaccatttcgtcatatttaaaatataacttcaagaaaagagtaaacatcc

SEQ ID NO: 5227 - DNA, 120 bp, synthetic construct
  misc_feature 1..120: note = Artificially Synthesized Probe
  source 1..120: mol_type = other DNA
caggtttattattagaagacacagtggcagagcacacatgtgcacaggttctgattatttctcttggagcatatgtccttgtcttgatttttgccttttcgatgccatattaagcagcca

SEQ ID NO: 5228 - DNA, 120 bp, synthetic construct
  misc_feature 1..120: note = Artificially Synthesized Probe
  source 1..120: mol_type = other DNA
gaatgttctggaaatgaaggagatattgctaggaatctctaggctgttaggcaacctggcttttattcatcctcagccggcaactcatctcaagtttatgtctcagtttttttcctctag

SEQ ID NO: 5229 - DNA, 120 bp, synthetic construct
  misc_feature 1..120: note = Artificially Synthesized Probe
  source 1..120: mol_type = other DNA
tcccccgaccttccatactacagaccaaaatacccaggtgtggcctaaggactatattaaatgcctcctatagaaattcaaggaatgttagaaccaggaaactagctgtttaaagtttta

SEQ ID NO: 5230 - DNA, 120 bp, synthetic construct
  misc_feature 1..120: note = Artificially Synthesized Probe
  source 1..120: mol_type = other DNA
tccccgaaaaagcgggtttggcaaaagcaaatttcccgagtaagcaggcagagatcgcgccagacgctccccagagcagggcgtcatgcacaagaaagctttgcactttgcgaaccaacg

SEQ ID NO: 5231 - DNA, 120 bp, synthetic construct
  misc_feature 1..120: note = Artificially Synthesized Probe
  source 1..120: mol_type = other DNA
gaatcgaggttggggaggttatctagggagatcccggagggaatctggtgaggcctgaacggagggagatctggggctgaataaagggcttctgccctctaaagtcgcaaagacgtaggg

SEQ ID NO: 5232 - DNA, 120 bp, synthetic construct
  misc_feature 1..120: note = Artificially Synthesized Probe
  source 1..120: mol_type = other DNA
ctcaaaatccctccagctccctaatgccctcacgacaaaaggccttgctgggttttgtttcctgctggcctctccagccttctcaggaatgattcagccaaactacctttcaggaacaaa

SEQ ID NO: 5233 - DNA, 120 bp, synthetic construct
  misc_feature 1..120: note = Artificially Synthesized Probe
  source 1..120: mol_type = other DNA
gccccgcagcggttcagaatcaagctggagttcattaatgataaggtatagtatgtgtaatgttgtccagtaataaaagctgactagaaaaccaactgttctcttagacaaagtagcatg

SEQ ID NO: 5234 - DNA, 120 bp, synthetic construct
  misc_feature 1..120: note = Artificially Synthesized Probe
  source 1..120: mol_type = other DNA
gggattacaggtatatgccaccacgcctggctaattttgttttttagtagagatgaggtttctccacgttggtcaggctggtctcgaactcctgacctcaggtgatccacccacctcatc

SEQ ID NO: 5235 - DNA, 120 bp, synthetic construct
  misc_feature 1..120: note = Artificially Synthesized Probe
  source 1..120: mol_type = other DNA
aaattcaatctaacattttgaagtacatagatctgaaaatttaaggtcctccaactctggcctcttaggagtctttgggcccaaaacagtaaggttccaagactgatcctgcaactccat

SEQ ID NO: 5236 - DNA, 120 bp, synthetic construct
  misc_feature 1..120: note = Artificially Synthesized Probe
  source 1..120: mol_type = other DNA
acccaccggccttggactcccaaagtgctgggattacaggcatgagccacagcgcccggccgcggtccagcctatttttttttttttttttttttttttctgagacagagtctcgctctg

SEQ ID NO: 5237 - DNA, 120 bp, synthetic construct
  misc_feature 1..120: note = Artificially Synthesized Probe
  source 1..120: mol_type = other DNA
ccccatcattttttcttgtatcctgttgcttcccttcagggcacctgccacactctccataattctctaattctctagactgcaactggatgagggcagggaccagagctcatctggtcc

SEQ ID NO: 5238 - DNA, 120 bp, synthetic construct
  misc_feature 1..120: note = Artificially Synthesized Probe
  source 1..120: mol_type = other DNA
aaatgcttagcccctccctctgcctggtctaatactccgccacacagatgcacacttaagcctgggtcacaccacctcttttcccctccaaatccagtcccgctcccacactctgtgcct

SEQ ID NO: 5239 - DNA, 120 bp, synthetic construct
  misc_feature 1..120: note = Artificially Synthesized Probe
  source 1..120: mol_type = other DNA
aaaaaacacaaacaaaaaaactttcctgggatgtcactgggcagattcactccccctgagatgttctgggaaagagaacccagaggccacccaacacccagagaataggtcccagacact

SEQ ID NO: 5240 - DNA, 120 bp, synthetic construct
  misc_feature 1..120: note = Artificially Synthesized Probe
  source 1..120: mol_type = other DNA
gttgtatccagtacctctagattcagatgcaggtggttcttgaaccacactttggaaaaccctggatttggggctgggggaaggaacaggacagggagacaaaggtagcatggtcacata

SEQ ID NO: 5241 - DNA, 120 bp, synthetic construct
  misc_feature 1..120: note = Artificially Synthesized Probe
  source 1..120: mol_type = other DNA
gagggaaaggaaccaggcctgggtcagaaagagatggacacaagaggaagcaggggaaggcggagaaacaggaaacaagtgtcacacacagtttgttacacacaggccaaaaaccaaaca

SEQ ID NO: 5242 - DNA, 120 bp, synthetic construct
  misc_feature 1..120: note = Artificially Synthesized Probe
  source 1..120: mol_type = other DNA
gaggctgttggcagcctagcctgctgtgactcctaagccatggctctgagtcacagccaccctagcctctgctgaccttactctgcccctccagagtggtggcataggacagagaaatgt

SEQ ID NO: 5243 - DNA, 120 bp, synthetic construct
  misc_feature 1..120: note = Artificially Synthesized Probe
  source 1..120: mol_type = other DNA
gcgcaagtcacagggcctccaccttccacctataaagctttcccctgtgctgaggaaacctagaaaatttaagaaaagctgatcagttgagataccatcaaaattttaaaattcttatga

SEQ ID NO: 5244 - DNA, 120 bp, synthetic construct
  misc_feature 1..120: note = Artificially Synthesized Probe
  source 1..120: mol_type = other DNA
agttgctgccttgtgctactcttccaatatatcacatccagccctctttcgcttatgattctcattaaaataaagcaaaacatgaaaacatagtatactacactgtgattctgcctcaag

SEQ ID NO: 5245 - DNA, 120 bp, synthetic construct
  misc_feature 1..120: note = Artificially Synthesized Probe
  source 1..120: mol_type = other DNA
atccctacaaaaaaattataaaaattaaggctgggcgcggtggtgcgcacctataatcccagcactttgggaggccaaggcgggcggatcacgaggtcaggagatcgagaccatcctggc

SEQ ID NO: 5246 - DNA, 120 bp, synthetic construct
  misc_feature 1..120: note = Artificially Synthesized Probe
  source 1..120: mol_type = other DNA
ttttatggggaaagcattttaaatcagcttcatttcaactcattaggactttttttatttttcagctctaagtacatttaaaatatgagtagatataagatattacatagagaaatgctt

SEQ ID NO: 5247 - DNA, 120 bp, synthetic construct
  misc_feature 1..120: note = Artificially Synthesized Probe
  source 1..120: mol_type = other DNA
tataccagggctgggtgaacgtttatcttacatcaatgtaaggttgcagaagaaacttaactatttaagaaaataagctattttcaagtacttctattagtattgtagcaggacaagccg

SEQ ID NO: 5248 - DNA, 120 bp, synthetic construct
  misc_feature 1..120: note = Artificially Synthesized Probe
  source 1..120: mol_type = other DNA
ttccatctaaatcagtacacatttcagttcttttgtaagtaatgctgtgaattaaatttttctacaataaagtttcttaggatagaattcacaatcagaatttcaggattcagtcatgac

SEQ ID NO: 5249 - DNA, 120 bp, synthetic construct
  misc_feature 1..120: note = Artificially Synthesized Probe
  source 1..120: mol_type = other DNA
tctccatgctaccacctactatatattgtcatcattactcacatggactactgcagctcctcaccacattcacacaggccctaacaacagccaaagtaattttactagaattatattacc

SEQ ID NO: 5250 - DNA, 120 bp, synthetic construct
  misc_feature 1..120: note = Artificially Synthesized Probe
  source 1..120: mol_type = other DNA
ataagaaaagtacttcaccttcaaattcagacacagaaatgaaatctgaacaactgcctccttgtgtgaaccctggcaatcctgtgttttcatgtatgttggatccaaagacactccaga

SEQ ID NO: 5251 - DNA, 120 bp, synthetic construct
  misc_feature 1..120: note = Artificially Synthesized Probe
  source 1..120: mol_type = other DNA
atccaaaagcttcaaaagcctttcatattttatttacttatctattgagtatacttatcaagacaaaggaacacaggagctgtaaggaaaaaaaaattgatttaaggaagcttctgacca

SEQ ID NO: 5252 - DNA, 120 bp, synthetic construct
  misc_feature 1..120: note = Artificially Synthesized Probe
  source 1..120: mol_type = other DNA
tgtgataatttttgtaatgtaaagtaggcagtatgcacaggcctttcagacagacacagaattgctcaaattgagaccagagagatcaggagaagtgtcctggagaagataaagctaaat

SEQ ID NO: 5253 - DNA, 120 bp, synthetic construct
  misc_feature 1..120: note = Artificially Synthesized Probe
  source 1..120: mol_type = other DNA
ggcaagtgaatttacctttttatatgtagaatctagatactaacctaaaattcctacctatggcagtggtgcactgttcggtcatttttgttgttgctaaattctcaggattggccgggc

SEQ ID NO: 5254 - DNA, 120 bp, synthetic construct
  misc_feature 1..120: note = Artificially Synthesized Probe
  source 1..120: mol_type = other DNA
tgataagtgttacgggaaaaaacataaaatagagttaggaggaaagtgagtacttcagcaaggagttactttaggtaggtggaaagggaaggtttctgataaggagatgtctgaccacac

SEQ ID NO: 5255 - DNA, 120 bp, synthetic construct
  misc_feature 1..120: note = Artificially Synthesized Probe
  source 1..120: mol_type = other DNA
aattatcttgggagatatagcatatgaattgagaactgacctttgattaggcaaatcagaggtcatggatgacttcaaacagaattatttcaacaaggccaggctcgaaggctcacacct

SEQ ID NO: 5256 - DNA, 120 bp, synthetic construct
  misc_feature 1..120: note = Artificially Synthesized Probe
  source 1..120: mol_type = other DNA
tagttattgcaggactgggtttagttataaaagaggggagttcagcccccttttcctttcctttcttcttgcatgctgtcttactatgtgatacattctgccatgttatcatatagcaag

SEQ ID NO: 5257 - DNA, 120 bp, synthetic construct
  misc_feature 1..120: note = Artificially Synthesized Probe
  source 1..120: mol_type = other DNA
ccacatactttgctcttaagagcccagtcatggcaagaatcctgccaagttcctttagccagaatccccaccatcaatatctgatcacccttgatatttgaccagattcctcattcccta

SEQ ID NO: 5258 - DNA, 120 bp, synthetic construct
  misc_feature 1..120: note = Artificially Synthesized Probe
  source 1..120: mol_type = other DNA
actaatattttgacctctgtcagcaaagagctaacgtgtggaaaataaaaatcatcccaaacctggtgtaggacagaacccttttgcttgatgtaattcacaacctctttctgggatgtg

SEQ ID NO: 5259 - DNA, 120 bp, synthetic construct
  misc_feature 1..120: note = Artificially Synthesized Probe
  source 1..120: mol_type = other DNA
gatctgaagttacatcaaccaacccactttttgtattatgctgtttcttgttcctgcttcagctaccctataaataccaattgtttttgtaacccccaaaggggtttactctgcctgctg

SEQ ID NO: 5260 - DNA, 120 bp, synthetic construct
  misc_feature 1..120: note = Artificially Synthesized Probe
  source 1..120: mol_type = other DNA
catgagccaccgcgcctggcctccagcagtatgacttctaaaccgtaatttttttggagatggagtttcactcctgtcacccaggccgtagtgcaatggcccaatctccgctcactgcaa

SEQ ID NO: 5261 - DNA, 120 bp, synthetic construct
  misc_feature 1..120: note = Artificially Synthesized Probe
  source 1..120: mol_type = other DNA
cagtgtctcttctaaatctttatataagatgctgcttgattcatgagtcactgataaaggccaattagacctttaaactaaatttgttaggccaggcgcggggggtcttgcctataatcc

SEQ ID NO: 5262 - DNA, 120 bp, synthetic construct
  misc_feature 1..120: note = Artificially Synthesized Probe
  source 1..120: mol_type = other DNA
gcataatcccagtgatacaacacaaatgatggtgcagtccaataccaataccataatattccaggttaatatcttacactttgctgtcttttctcccccttgtctacttggaggtactag

SEQ ID NO: 5263 - DNA, 120 bp, synthetic construct
  misc_feature 1..120: note = Artificially Synthesized Probe
  source 1..120: mol_type = other DNA
agtcattaagattttagttctgttccttgaattacattccgaatcttctcagcatcaatttgtacaattttgttggatggatcaatcttaagtgccgcttcataatcctgtaggcctgtg

SEQ ID NO: 5264 - DNA, 120 bp, synthetic construct
  misc_feature 1..120: note = Artificially Synthesized Probe
  source 1..120: mol_type = other DNA
gcaccacacccagcatttatcacacgtttctatgaagagttgtctggtaatatagcattttttttttttttgagaaggagtttcgctgttgttgcccaggctggagtgcaatgacatgat

SEQ ID NO: 5265 - DNA, 120 bp, synthetic construct
  misc_feature 1..120: note = Artificially Synthesized Probe
  source 1..120: mol_type = other DNA
gcattagcattgtctgtaacaggtggcatcaataattccagtgccttacaaaatatatataattattacaagaaagttatagtttcttaatttaaacaagcaaaaggctgggcatggtgg

SEQ ID NO: 5266 - DNA, 120 bp, synthetic construct
  misc_feature 1..120: note = Artificially Synthesized Probe
  source 1..120: mol_type = other DNA
atcaggttttccagaagagatatgttgaacaacttaaggaatttttcagttgttcctatatgggattcatacccctccaaggttattattcagcttatcatttcacatctccacagcttt

SEQ ID NO: 5267 - DNA, 120 bp, synthetic construct
  misc_feature 1..120: note = Artificially Synthesized Probe
  source 1..120: mol_type = other DNA
tgaatccatctcttttcacatataccagcctgtcatttgaatggaatggacctcactcccacctccaagggtagacattagtaatttaagccagtagggcatatttgcattatttttgct

SEQ ID NO: 5268 - DNA, 120 bp, synthetic construct
  misc_feature 1..120: note = Artificially Synthesized Probe
  source 1..120: mol_type = other DNA
agaaaccgagcccttcatgatacagttaagctgctggatcaagctttacttgaaatagaaaacacctttagctgtttagttatataagacaataaattcctttcaatataaaaaaattgg

SEQ ID NO: 5269 - DNA, 120 bp, synthetic construct
  misc_feature 1..120: note = Artificially Synthesized Probe
  source 1..120: mol_type = other DNA
gcacctggctctattaccttgttcttatccatgttattgtacttcccacacagtgttttaaatatttgtgtacgtctctctcctcctgatttctgttgttaagtgcctatagtctggcaa

SEQ ID NO: 5270 - DNA, 120 bp, synthetic construct
  misc_feature 1..120: note = Artificially Synthesized Probe
  source 1..120: mol_type = other DNA
gagccacaattcaaggaatgcaaacagcttagaagccggaaatttaagaaaacagcttttctcctagagccttcaaaaggaaggcagttgacacctaattttggcccagtgaaactcatt

SEQ ID NO: 5271 - DNA, 120 bp, synthetic construct
  misc_feature 1..120: note = Artificially Synthesized Probe
  source 1..120: mol_type = other DNA
aatatggatgccctgtctaccttatttgcttatttgcattatctttctccaacaacacacaaacagacaaaatatctagagaatgtgataactactttgtttgttcaaagacagggtctc

SEQ ID NO: 5272 - DNA, 120 bp, synthetic construct
  misc_feature 1..120: note = Artificially Synthesized Probe
  source 1..120: mol_type = other DNA
gattgaaatattatttgctatgcactgagtgtttgtgtcttctccacctctcctccaaattgatatactgaagccataaccatcaatgtgaatcggtatttggtagtggggcctctgaga

SEQ ID NO: 5273 - DNA, 120 bp, synthetic construct
  misc_feature 1..120: note = Artificially Synthesized Probe
  source 1..120: mol_type = other DNA
gccaccgtgcccgtccttaaacttttttttaaacctcaatagctggtggaaatacaatagataaaatttctagccaaatttcttgctttctgggagttcatatgatattattaatttttt

SEQ ID NO: 5274 - DNA, 120 bp, synthetic construct
  misc_feature 1..120: note = Artificially Synthesized Probe
  source 1..120: mol_type = other DNA
gtgtcttccctgccatgtatttattcttcatgcttggttttctagcattttcaagtttgcaggaaaagtttcaatacacatttatttctccagtccgcagtggagcaggtaacacatcct

SEQ ID NO: 5275 - DNA, 120 bp, synthetic construct
  misc_feature 1..120: note = Artificially Synthesized Probe
  source 1..120: mol_type = other DNA
agctttgggtcaagaaaatgggttttaaagtcttgaatcctttcagtaggtgtacgtttatatgaaggcaaacgtttccaggagccgtcttcacatttcttcataaactggtcaaagagc

SEQ ID NO: 5276 - DNA, 120 bp, synthetic construct
  misc_feature 1..120: note = Artificially Synthesized Probe
  source 1..120: mol_type = other DNA
tatccttcacccatgtttcgatggggttgtttttttcttgtaagtttgtttgagttctttgtagattctggatattagcccttcgtcagatgagtagattgcaaaaattttctcccattc

SEQ ID NO: 5277 - DNA, 120 bp, synthetic construct
  misc_feature 1..120: note = Artificially Synthesized Probe
  source 1..120: mol_type = other DNA
ataagaatgcttgtgatttctgcacattgattttgtatcctgagactttgctgaagttgcttatcagcttaaggagattttgggctgagacgatggggttttctaaatatacaatcatgt

SEQ ID NO: 5278 - DNA, 120 bp, synthetic construct
  misc_feature 1..120: note = Artificially Synthesized Probe
  source 1..120: mol_type = other DNA
agaggcgctcctcacttcccagatgcggcagccaggcagaggtgctcctcacctcccagacggggcggccgagcagaggcgctcctcacctcccagacggggcggccgggcagaggcgct

SEQ ID NO: 5279 - DNA, 120 bp, synthetic construct
  misc_feature 1..120: note = Artificially Synthesized Probe
  source 1..120: mol_type = other DNA
tcctcacatcccagacgggccggctgggcagaggtgctccccacttcccagacggggtggcggccaggcagaggcgctcctcacatcccagatgatgggcggccgggcagaggcgctccc

SEQ ID NO: 5280 - DNA, 120 bp, synthetic construct
  misc_feature 1..120: note = Artificially Synthesized Probe
  source 1..120: mol_type = other DNA
ggggagaggggagaggggagaggggagaggggagcccctttatttctttctcctgcctgactgccctggccagaacttccaacactatgctgtgttgaataggagtggtgagagagggca

SEQ ID NO: 5281 - DNA, 120 bp, synthetic construct
  misc_feature 1..120: note = Artificially Synthesized Probe
  source 1..120: mol_type = other DNA
cagagcgagactccatcccacaaaataataataattattattattattataactgtataattatagaaatgttacaaatatagaaaataccttgtttaataatatgaaataattatttat

SEQ ID NO: 5282 - DNA, 120 bp, synthetic construct
  misc_feature 1..120: note = Artificially Synthesized Probe
  source 1..120: mol_type = other DNA
taaaaataaagtattttcatttgtggtaattgtaactagagtaagtatatatacctcctcctcttctgctacttgtgattcacgaagagctgttgggaatactcgaggggtaaagttgat

SEQ ID NO: 5283 - DNA, 120 bp, synthetic construct
  misc_feature 1..120: note = Artificially Synthesized Probe
  source 1..120: mol_type = other DNA
aactctatagcagtatctcctacatactttatctcctatatgctttcttataatagtgtaagaggttttagccatcaaagagaactaatgagaactggcaaggacgggcgcagtggctca

SEQ ID NO: 5284 - DNA, 120 bp, synthetic construct
  misc_feature 1..120: note = Artificially Synthesized Probe
  source 1..120: mol_type = other DNA
tccagaacacagagaaataacattaagaaaccaggagtggggaatttgagagcaaaatgaaaaagaatgggttttctaaagcagtggagaacacactaaaaattttgtgaataatatctt

SEQ ID NO: 5285 - DNA, 120 bp, synthetic construct
  misc_feature 1..120: note = Artificially Synthesized Probe
  source 1..120: mol_type = other DNA
aagattttagatgcaaatagattaatatcaatggctggagactggaaatttaatgctgatataggtacagaggtggggaggtggaaatgaaactagaatcatagaagggtaggacctccc

SEQ ID NO: 5286 - DNA, 120 bp, synthetic construct
  misc_feature 1..120: note = Artificially Synthesized Probe
  source 1..120: mol_type = other DNA
cataaaattagtcatggttgaagaaaatttataaactagaagatagatctgaggatattatacagaaaatagctgaggaagataaagagaatacaagaaagttggccaggtatggtggct

SEQ ID NO: 5287 - DNA, 120 bp, synthetic construct
  misc_feature 1..120: note = Artificially Synthesized Probe
  source 1..120: mol_type = other DNA
caggcatgagccaagaaggtaaattaccagccaagaaggtaatatttgaagacaatagttttgaaattcccagaattgatgaatgacaaagttctctgagtgacagtatgctccaagtta

SEQ ID NO: 5288 - DNA, 120 bp, synthetic construct
  misc_feature 1..120: note = Artificially Synthesized Probe
  source 1..120: mol_type = other DNA
acttttcaatatgccaagcctcactgttaaagttgtaaagacatatgacctggtggaaatagcacaggtttcagatgcagaccagatctgggttcaaatcccacaagtttacttattcat

SEQ ID NO: 5289 - DNA, 120 bp, synthetic construct
  misc_feature 1..120: note = Artificially Synthesized Probe
  source 1..120: mol_type = other DNA
ttgtaataattttgactgagcaggaattttcctaagcagaaattggtggcagagggggcaaatgggaagtacagatgcgagtgcagaagccacagccaatagtgtgggcaggcagggact

SEQ ID NO: 5290 - DNA, 120 bp, synthetic construct
  misc_feature 1..120: note = Artificially Synthesized Probe
  source 1..120: mol_type = other DNA
caggtgctggtatccacggctgggagacctgtggatcacatcacagggctctttgcagacattccccagcaccagcctggggcccaactgggtggctagaaatagaagggcaataacaat

SEQ ID NO: 5291 - DNA, 120 bp, synthetic construct
  misc_feature 1..120: note = Artificially Synthesized Probe
  source 1..120: mol_type = other DNA
ctcagcactttgggaggccaaggcgggtggatcacgaggtcaggagttcgagaccagcctggccaaccaagatggtgaaacaccatctctactaaaaatacaaaaatcagccaggcgtgg

SEQ ID NO: 5292 - DNA, 120 bp, synthetic construct
  misc_feature 1..120: note = Artificially Synthesized Probe
  source 1..120: mol_type = other DNA
cttagctttccaagtagctgggactacaggcacgcgccaccacgcctggctaatttttgtatttttagtagagacagagtttcaccatgttggcctggctggtctcaaactcctgacctc

SEQ ID NO: 5293 - DNA, 120 bp, synthetic construct
  misc_feature 1..120: note = Artificially Synthesized Probe
  source 1..120: mol_type = other DNA
agtgcagtggcgtgatctcgactcaccgcaacctccacctcttgggctcaagtgattcttctgcctcagcctcccaagcagctgggattacaggcccccgccaccacaccagcctaattt

SEQ ID NO: 5294 - DNA, 120 bp, synthetic construct
  misc_feature 1..120: note = Artificially Synthesized Probe
  source 1..120: mol_type = other DNA
aagaaaaaaatacaaaagaaaaattaaacaaaatgctggttctttgaaaagacaaacaaaactgatagaccattagtaagattaacccagaaaagaataagatccaaataagctcgatta

SEQ ID NO: 5295 - DNA, 120 bp, synthetic construct
  misc_feature 1..120: note = Artificially Synthesized Probe
  source 1..120: mol_type = other DNA
ataaatataatacaccacataaacagaagtcaaaacaaaaatcatacaatcatctcaataaatgcagaaaaagcatttgaggccgagtgtggtggctcatgcctgtaatcccagcacttc

SEQ ID NO: 5296 - DNA, 120 bp, synthetic construct
  misc_feature 1..120: note = Artificially Synthesized Probe
  source 1..120: mol_type = other DNA
gatgacacaaacaaatggaaatacatcccatgctcacagatgggtagaatcagtattttgaaaatgaccatactgccaaaagcaatctacaaattcagtgcaattcccatcaaaatatca

SEQ ID NO: 5297 - DNA, 120 bp, synthetic construct
  misc_feature 1..120: note = Artificially Synthesized Probe
  source 1..120: mol_type = other DNA
aaattagccaggcatggtggtacatgcctgtaatcctagctactcgggaggctgaagcaggagaatcgcttgaacctgggaggcagaggttgtggtgagccgagatcgtgccattgcact

SEQ ID NO: 5298 - DNA, 120 bp, synthetic construct
  misc_feature 1..120: note = Artificially Synthesized Probe
  source 1..120: mol_type = other DNA
agatgatctgcccgccttgtcctcccaaagtgttaggattacaggcatgagccactgctcctggcccatgttctcactcataaatgggagctgagctatgaggatgccaaggcataagaa

SEQ ID NO: 5299 - DNA, 120 bp, synthetic construct
  misc_feature 1..120: note = Artificially Synthesized Probe
  source 1..120: mol_type = other DNA
tccactccaagtctttttgggcctgagttaagcacttatttaacaacatctttgtaaatttcaaaagaaagcacacaagcaaagaagacactcttcttttcgaatccttgaacgaatcct

SEQ ID NO: 5300 - DNA, 120 bp, synthetic construct
  misc_feature 1..120: note = Artificially Synthesized Probe
  source 1..120: mol_type = other DNA
tgaatttgaaagcagtatcttgtacaggtgtgtggcaacttttctgcctttcaaacttccctcacatgggcaagaaaaaaaaccttgtgaaacagagtacctagttggtgtacatgattg

SEQ ID NO: 5301 - DNA, 120 bp, synthetic construct
  misc_feature 1..120: note = Artificially Synthesized Probe
  source 1..120: mol_type = other DNA
tttcactctctgccccaacacatgaaaaagggagaatatgtggagagtcagacaccctcacccatcatactccctgcaagaagaatgaattttacatgaagtttttaaaatgcataagac

SEQ ID NO: 5302 - DNA, 120 bp, synthetic construct
  misc_feature 1..120: note = Artificially Synthesized Probe
  source 1..120: mol_type = other DNA
aaccaatcagctataagttgggggtttctacaaccccctcctcaggtttgaccatttgcttcaatggctcacaggaatcagataaatacctcgcttatatttaccccttttttttttttt

SEQ ID NO: 5303 - DNA, 120 bp, synthetic construct
  misc_feature 1..120: note = Artificially Synthesized Probe
  source 1..120: mol_type = other DNA
tccatgccttctccctccaagtgttcagcaacccagaagttctccaaacctcatagttacaggaattttatggaggttttatctagcaggcatgactgggttttttttttttttttagac

SEQ ID NO: 5304 - DNA, 120 bp, synthetic construct
  misc_feature 1..120: note = Artificially Synthesized Probe
  source 1..120: mol_type = other DNA
ggattacaggcgtgagccaccacgcccagccaacaattcttaaagatattttgttatttatttacttacttattttgagatggagtcttgctgtgtcacccaggctggagtgcagtagca

SEQ ID NO: 5305 - DNA, 120 bp, synthetic construct
  misc_feature 1..120: note = Artificially Synthesized Probe
  source 1..120: mol_type = other DNA
agaatgaatgtctggtcaacaaggcattgttctttataagccaatcccacttgtgaattacatgcaaaaattgtaaataaaacattagcaaactcagcccggcatggaggctcacgcctg

SEQ ID NO: 5306 - DNA, 120 bp, synthetic construct
  misc_feature 1..120: note = Artificially Synthesized Probe
  source 1..120: mol_type = other DNA
caaaatgtcagttgatattgggaataaaaataagaaataaaaatttataagctggatagaaggaccaagactatgttatacttcatgacgaaatattagaaatagccgggcgcagtggct

SEQ ID NO: 5307 - DNA, 120 bp, synthetic construct
  misc_feature 1..120: note = Artificially Synthesized Probe
  source 1..120: mol_type = other DNA
actggcaataaataattagaaactacaatggaaacgttaatttcatcagcaatcaccagaaaaacataaatgaataagcttagcaaaatataagcaagtcataaggccaggggcggtggc

SEQ ID NO: 5308 - DNA, 120 bp, synthetic construct
  misc_feature 1..120: note = Artificially Synthesized Probe
  source 1..120: mol_type = other DNA
tgtagctttggtggataaaagtgctaggcttggttgggaataaagaggaaaactttgcagttggtctgaggttgagatcctggttaggataagtgcttaagcagtcagaaatttaatgga

SEQ ID NO: 5309 - DNA, 120 bp, synthetic construct
  misc_feature 1..120: note = Artificially Synthesized Probe
  source 1..120: mol_type = other DNA
aagagaaaggaaaggaaaatgataccagatattaactaattcatacctacaagaaagaatgaagagtatgagaaatggtaaatatgtgggtaagcgtaaaagacaatacaaacagatttt

SEQ ID NO: 5310 - DNA, 120 bp, synthetic construct
  misc_feature 1..120: note = Artificially Synthesized Probe
  source 1..120: mol_type = other DNA
ccaggaacatcatcattactactgaggatccctgagtaactctggacacaacgggtacacaaattcagtttctttttgattcaggggcaagttactctgtacttactgcttatgcaggaa

SEQ ID NO: 5311 - DNA, 120 bp, synthetic construct
  misc_feature 1..120: note = Artificially Synthesized Probe
  source 1..120: mol_type = other DNA
agtcctatcaaatcaacctttctggagttgcatcccctcaaaaacccattaggggcccaatatcgatgcacacagaactaaaattccaggcaccactttgtattaaaagaagccaaaatt

SEQ ID NO: 5312 - DNA, 120 bp, synthetic construct
  misc_feature 1..120: note = Artificially Synthesized Probe
  source 1..120: mol_type = other DNA
ggaatgtctgtcttgtgcagttgagataaggactgagatacgccctggtctcctgcagaaccctcaggcttactagggtgggggaaaaactccaccctcgtaaatttgtggtcagaccag

SEQ ID NO: 5313 - DNA, 120 bp, synthetic construct
  misc_feature 1..120: note = Artificially Synthesized Probe
  source 1..120: mol_type = other DNA
tcatagagaacaatttttgtcttgaaaaacaagcagcctttttcctgtgtgggactagttcctacttacgtttactagccaaatggactggaaccaattgtttgcactgcacacttgttt

SEQ ID NO: 5314 - DNA, 120 bp, synthetic construct
  misc_feature 1..120: note = Artificially Synthesized Probe
  source 1..120: mol_type = other DNA
ttgatttttggaccatttttgtttaatcatgtaaccagatttatttcttctcacctagagaacattaagcttcaaatgatcatgcagcagggcttctagccagttccaggtgacgatgcc

SEQ ID NO: 5315 - DNA, 120 bp, synthetic construct
  misc_feature 1..120: note = Artificially Synthesized Probe
  source 1..120: mol_type = other DNA
acttatacatgctacaatatgtataagccctatatacattttgctaagtgaaagaaagcctcccataaagactgatgggcatcacatccaaagaccacacactgtatgtgaaatgtctag

SEQ ID NO: 5316 - DNA, 120 bp, synthetic construct
  misc_feature 1..120: note = Artificially Synthesized Probe
  source 1..120: mol_type = other DNA
gaaagcataggccaaataatgggagaagagaggaaaagagcaagcaagaataaatgttatacttaccaatatctcaaagatttaggaaaaaagggaatgagtgggtttcagagatatagt

SEQ ID NO: 5317 - DNA, 120 bp, synthetic construct
  misc_feature 1..120: note = Artificially Synthesized Probe
  source 1..120: mol_type = other DNA
aacagaattaccattaccatatgatctgctatatccacttctagatacaagcccaaaacaattgaaagcaagatttcaaagggatatttttatactcgtgtatattagtcagggttcttt

SEQ ID NO: 5318 - DNA, 120 bp, synthetic construct
  misc_feature 1..120: note = Artificially Synthesized Probe
  source 1..120: mol_type = other DNA
aaaaaaaaaaaaaaaggaggcagtagcagccaagattagcgaagaggaaaaaaaagcacattttggaagactctggcatcagtattccaagcttccactaatcacctcatatccctatac

SEQ ID NO: 5319 - DNA, 120 bp, synthetic construct
  misc_feature 1..120: note = Artificially Synthesized Probe
  source 1..120: mol_type = other DNA
ccatcatcaatcttctctcttcattgtattattaacctttccctctttactggcttccttcctcaacatacgtatgctcaaaatttctccatcttaacaaaaactctgcctcctccctgc

SEQ ID NO: 5320 - DNA, 120 bp, synthetic construct
  misc_feature 1..120: note = Artificially Synthesized Probe
  source 1..120: mol_type = other DNA
ggtacattagcaaatatgacacagcaggggctttaaaagcacttctgcaatgaggttttccctctctttctaccaggaacctaattgtgattcattttccaggattcagcacaaacaata

SEQ ID NO: 5321 - DNA, 120 bp, synthetic construct
  misc_feature 1..120: note = Artificially Synthesized Probe
  source 1..120: mol_type = other DNA
ataaggatgaaacaaaacatactcccaactctcaacactactgagggaagagagaaaacagacaatttgtggaacaggatactggcttttgtaggttctgtcctcttaatataacccgta

SEQ ID NO: 5322 - DNA, 120 bp, synthetic construct
  misc_feature 1..120: note = Artificially Synthesized Probe
  source 1..120: mol_type = other DNA
acaatgctagttatgaaaatccaaaaaacagtcatgggtccacaaaaatcttaaataatgcgtattatagattccttagtcactgcaacatgtcaaaatgggaattcgagataagaagtt

SEQ ID NO: 5323 - DNA, 120 bp, synthetic construct
  misc_feature 1..120: note = Artificially Synthesized Probe
  source 1..120: mol_type = other DNA
accattgaaactttatttttactcccctagaaatagaaccctctccctgaaacaactgtccaacttttacacctttgactttcattcagatttcaagaacaaacatgggccgggcacggt

SEQ ID NO: 5324 - DNA, 120 bp, synthetic construct
  misc_feature 1..120: note = Artificially Synthesized Probe
  source 1..120: mol_type = other DNA
ggcaggtaatgagagggagagggtgaggatgaaggtgcaaggacacatttatcctcttccttctctgttaagaaactagggctatttgcttataaacctgatcacaataaatcatcattt

SEQ ID NO: 5325 - DNA, 120 bp, synthetic construct
  misc_feature 1..120: note = Artificially Synthesized Probe
  source 1..120: mol_type = other DNA
gtttatgtctccctaaaactcttatgttaaaatcccaacccttaatgtgatattatttgtaggtgaggccttttgggaggtagtgtccttatacagaaggccccagaaagcagacttgcc

SEQ ID NO: 5326 - DNA, 120 bp, synthetic construct
  misc_feature 1..120: note = Artificially Synthesized Probe
  source 1..120: mol_type = other DNA
tgaagttaggtctgaagcctcttctcatctctcctgctgtttaaaaacaggaaggtagacagctaagtcagcttcagcggcagaaataactggaagaacattaacttcccaaatgaaata

SEQ ID NO: 5327 - DNA, 120 bp, synthetic construct
  misc_feature 1..120: note = Artificially Synthesized Probe
  source 1..120: mol_type = other DNA
tacaagagtcaaaataaatgtatattcaattttaggtaagaagtcaaaacagactgggtgtgttatgacatcctcaggccccaacatagacttactgagtcacagaggaagtaagaggtc

SEQ ID NO: 5328 - DNA, 120 bp, synthetic construct
  misc_feature 1..120: note = Artificially Synthesized Probe
  source 1..120: mol_type = other DNA
acaactaaagaaggaaggaggaaaacagggctaaagcagtagaggacaattactgactatggaagctgatcttggtattagtacaaagcactgacaactagcttaataagactacagaga

SEQ ID NO: 5329 - DNA, 120 bp, synthetic construct
  misc_feature 1..120: note = Artificially Synthesized Probe
  source 1..120: mol_type = other DNA
agggcttacccttaagacatgagcccacatcttctgcttaatgtgctctaactttgactaattcagcctttaggtttatttaaatggctgctgaagcactgtatcacttaaattaggctc

SEQ ID NO: 5330 - DNA, 120 bp, synthetic construct
  misc_feature 1..120: note = Artificially Synthesized Probe
  source 1..120: mol_type = other DNA
ccacatggccgcttcttttttatacaaggtgaagacaatggtgtcattcccaatctttgctttgctgctctcatcgtctatgggagcataaagaaatgcctcaaataaaaatggaggaaa

SEQ ID NO: 5331 - DNA, 120 bp, synthetic construct
  misc_feature 1..120: note = Artificially Synthesized Probe
  source 1..120: mol_type = other DNA
gtgactatccaggcgcccagaccagagagtgatgccgattcttggggttaccttacgatctgagcgaatgttcaaagaagtagacccataccctctgcttgagaaaaaaaaaaaaaaaaa

SEQ ID NO: 5332 - DNA, 120 bp, synthetic construct
  misc_feature 1..120: note = Artificially Synthesized Probe
  source 1..120: mol_type = other DNA
ctgcaaatcctattaactgtaaggccgccaaaagcacctatataggttttgctccaaagtttgaaaactgaagagaaaccaccctatgattcatctgacaaatgctttgctacaaatctg

SEQ ID NO: 5333 - DNA, 120 bp, synthetic construct
  misc_feature 1..120: note = Artificially Synthesized Probe
  source 1..120: mol_type = other DNA
tgctaaacacatacacacctctgcagtgaaattattctcctgactaccatgatcctactaaacttttagactctgaatgaattataccttaaaaacttgtcaagttggccgggcgtggtg

SEQ ID NO: 5334 - DNA, 120 bp, synthetic construct
  misc_feature 1..120: note = Artificially Synthesized Probe
  source 1..120: mol_type = other DNA
acataaaaagcactcattagggaggcaaaaaattaaaaacgaactaaaattaagaagtgttgctcactgggctgggcggggtggctcacgcctgtaatcccagcactttgggaggccgag

SEQ ID NO: 5335 - DNA, 120 bp, synthetic construct
  misc_feature 1..120: note = Artificially Synthesized Probe
  source 1..120: mol_type = other DNA
atctctcttttcttacaaaggccccagtcaagaacttagaagggtagaaggagaagatattttttcttccctacgtgatgactggtaaaaaaaagtagctgttgctcttgaattactggg

SEQ ID NO: 5336 - DNA, 120 bp, synthetic construct
  misc_feature 1..120: note = Artificially Synthesized Probe
  source 1..120: mol_type = other DNA
tgaatagatgcagaaaaggcttttgacaaaattcgatagcctttcatgctaaaaactctcaataaactaggtattgttggaacgtatctcaaaataataagagctatttatgaggaaccc

SEQ ID NO: 5337 - DNA, 120 bp, synthetic construct
  misc_feature 1..120: note = Artificially Synthesized Probe
  source 1..120: mol_type = other DNA
atttaataaatgtgctgggaaaactgtctagccatatgtagaaagctgaaactggatcccttccttacaccttatacaaaaattaactcaagatggattaaagacttaaatgtaagacct

SEQ ID NO: 5338 - DNA, 120 bp, synthetic construct
  misc_feature 1..120: note = Artificially Synthesized Probe
  source 1..120: mol_type = other DNA
gaaagggggtgtctgttatcttatgggtgacacaaagaccttgtttttgcctatgcttagataatgctatgaagtggccttgtctcattttattgtgatctcagagtacttttgtctcag

SEQ ID NO: 5339 - DNA, 120 bp, synthetic construct
  misc_feature 1..120: note = Artificially Synthesized Probe
  source 1..120: mol_type = other DNA
ggtgggtgggaatagcaaaatttcccccatctgagaattactgccctagaaaaagtcttggtcctatacactaggaaacatttataggtgttcatagcaacttcatagaaaaaaacctga

SEQ ID NO: 5340 - DNA, 120 bp, synthetic construct
  misc_feature 1..120: note = Artificially Synthesized Probe
  source 1..120: mol_type = other DNA
actagaaaggagagtggttaactcttatgtgaagttcatacaagtgggagcctttttggtaaccaacagaactgattaccacatagtcacactgtatgaattaaaacgaaggcccgggat

SEQ ID NO: 5341 - DNA, 120 bp, synthetic construct
  misc_feature 1..120: note = Artificially Synthesized Probe
  source 1..120: mol_type = other DNA
ctagaggatgtcaccatccctgggcagcacccccgcagaggaaaggacaggactctgggcaaaagttggccaaaccctcgcagagtcagcgagcattcccagggaattctatcacaaagg

SEQ ID NO: 5342 - DNA, 120 bp, synthetic construct
  misc_feature 1..120: note = Artificially Synthesized Probe
  source 1..120: mol_type = other DNA
gtgggagatgctggaaccggggaggtgagagggagtaagtttccagaactcactctcaggcaggaggagatcatgactcagctgagccagaaagcgctcgttccacacgaatgcacgtat

SEQ ID NO: 5343 - DNA, 120 bp, synthetic construct
  misc_feature 1..120: note = Artificially Synthesized Probe
  source 1..120: mol_type = other DNA
atgactgtgtgtgcatgcatgagcacacaggtgtgtggatgagcgtgaccgtgggaatgactgtgtgtgtgtgcatacatgagcacacaggcgtatggatgagcgtgcaagtgagtcatg

SEQ ID NO: 5344 - DNA, 120 bp, synthetic construct
  misc_feature 1..120: note = Artificially Synthesized Probe
  source 1..120: mol_type = other DNA
ccctttacagaaacaaagtctcctgttctaaaagcacagactttgtgattttcagctcatggcgtttgctccccttctgaatagctggatttgcattccagccactccacgagattccag

SEQ ID NO: 5345 - DNA, 120 bp, synthetic construct
  misc_feature 1..120: note = Artificially Synthesized Probe
  source 1..120: mol_type = other DNA
cagaaaagcccctccctcacgtgggcaggggtcagagggcggcccacgcagccctgcacgcacctccaggaagcgagatgcgacgtccaggtcttccttgttcagcaccagattgtccac

SEQ ID NO: 5346 - DNA, 120 bp, synthetic construct
  misc_feature 1..120: note = Artificially Synthesized Probe
  source 1..120: mol_type = other DNA
tgaattctgcctttattttttcttgctcaaattcctttctaaggagcgtaggggaatcacgccttacaaaccacaaaagcttgtggaatgggtgtttttgacctggtatattgtgactct

SEQ ID NO: 5347 - DNA, 120 bp, synthetic construct
  misc_feature 1..120: note = Artificially Synthesized Probe
  source 1..120: mol_type = other DNA
agaataaacctatttaaaaactttggcagaatttggtttttctgtctgtcctcacattgcccttagagaaccagtcctgggaggcccaacatgcagactacctagggaagtaactgtcat

SEQ ID NO: 5348 - DNA, 120 bp, synthetic construct
  misc_feature 1..120: note = Artificially Synthesized Probe
  source 1..120: mol_type = other DNA
acaaaaaacaaaaaagccccccaaaacttaagatagtcaagtatcagaaccccgtctcctgatagcaccagtcaacaatggactccacttccctggaccccctcaaatcacataacagcc

SEQ ID NO: 5349 - DNA, 120 bp, synthetic construct
  misc_feature 1..120: note = Artificially Synthesized Probe
  source 1..120: mol_type = other DNA
aagggcccagagggtgagcgtggattgtgcccctacagggactcgaaaaggctgacggacgatcagaggaccctcctaccattaaggagccaactgtatatttttgttgttgttgttttg

SEQ ID NO: 5350 - DNA, 120 bp, synthetic construct
  misc_feature 1..120: note = Artificially Synthesized Probe
  source 1..120: mol_type = other DNA
aaaaaaaaaaggatgtcaaggactgtattacagcaccaggcatttctgggatgcgatgtcacctctggctaggaaatccacagagcagtggagtccactccactctgcagctggtgtgag

SEQ ID NO: 5351 - DNA, 120 bp, synthetic construct
  misc_feature 1..120: note = Artificially Synthesized Probe
  source 1..120: mol_type = other DNA
cagagtgctaggctctgttcctataaaataccttcccatctgaccctttccttcgaattggagcaggctgaagcttgctaggcagggagagatgacttcgttcaaccttaacaaatgtga

SEQ ID NO: 5352 - DNA, 120 bp, synthetic construct
  misc_feature 1..120: note = Artificially Synthesized Probe
  source 1..120: mol_type = other DNA
atcatcatgtgactgtcttctccgtctccatttcccaaatctcttacagtgacactagtcgctgcattgagggcccaccctaaatctggaatgatctcatctcgtgatccttaactaaat

SEQ ID NO: 5353 - DNA, 120 bp, synthetic construct
  misc_feature 1..120: note = Artificially Synthesized Probe
  source 1..120: mol_type = other DNA
cacacactcgaagcagtagcatctaaggccagacagaaaaccacagcagcggacatgacagcccacctctcctgaggatggcagaggtgggcctgattgagccttgttttggagggaaaa

SEQ ID NO: 5354 - DNA, 120 bp, synthetic construct
  misc_feature 1..120: note = Artificially Synthesized Probe
  source 1..120: mol_type = other DNA
ggagacttccgcagcagatgcagatgtctaaaggaaacattcaaagcacactgtgttttcccagtgctgtcaaatacagcagacgattaggaataaatttagccaaacaaatatgagact

SEQ ID NO: 5355 - DNA, 120 bp, synthetic construct
  misc_feature 1..120: note = Artificially Synthesized Probe
  source 1..120: mol_type = other DNA
acactcaccttctatatttcgctggttagccttgacttcatatgcaataagatctggaaaggaagataagaagtagcccctttcttcttcctctgatctcttaatttaaattcggccagg

SEQ ID NO: 5356 - DNA, 120 bp, synthetic construct
  misc_feature 1..120: note = Artificially Synthesized Probe
  source 1..120: mol_type = other DNA
atggtcttggccagccgcacccttgaaggcagcatggtcagggagtaggaaagagactcacagggctgctgccacggctccgggtacagccagctggtgggttcaaggttccagtggtcc

SEQ ID NO: 5357 - DNA, 120 bp, synthetic construct
  misc_feature 1..120: note = Artificially Synthesized Probe
  source 1..120: mol_type = other DNA
gaaccctctttccagcagggcagactgaggcccgaggggctgcctggtggccctgtaggcggaggggacgcaggccctgagccccccagcagagcagcaaggggccccccagaagcaaag

SEQ ID NO: 5358 - DNA, 120 bp, synthetic construct
  misc_feature 1..120: note = Artificially Synthesized Probe
  source 1..120: mol_type = other DNA
cctgagtggagtgacaggagtttgcaatgggtcccccaggtgggacaatctgtgagtctgtaggtgaacatggtggctcccgagcgtctgctgggttatcccgtatcctgcgcagttgag

SEQ ID NO: 5359 - DNA, 120 bp, synthetic construct
  misc_feature 1..120: note = Artificially Synthesized Probe
  source 1..120: mol_type = other DNA
accttttccactggcacctttctcctccttgcgtttttctcaatcgtgagcacgtctttctgttatgacaaggtttagcgaatgaaagggaaacccttttatcaaagggctgctcagcca

SEQ ID NO: 5360 - DNA, 120 bp, synthetic construct
  misc_feature 1..120: note = Artificially Synthesized Probe
  source 1..120: mol_type = other DNA
ttatcctctccccatagaaacatcaagaacagggcgaccttccctcagcccccgcgtcaggacagggaatcagagagctggggttcagctctcagctccacatgtgggagcagtgacctg

SEQ ID NO: 5361 - DNA, 120 bp, synthetic construct
  misc_feature 1..120: note = Artificially Synthesized Probe
  source 1..120: mol_type = other DNA
aggatgtacatgtgcacctgtacacaccgtgggagcgtgtgcacgtgtgagcaagtgtgagcatttgggtgagtgtgtaagagtgaatgtgtgagtgtgggcttgtgtggctgtcttagc

SEQ ID NO: 5362 - DNA, 120 bp, synthetic construct
  misc_feature 1..120: note = Artificially Synthesized Probe
  source 1..120: mol_type = other DNA
gtgtgtatatgcctgtgtgtgtgcatgtatgagtgtgtgtgcctgtgtgcatgcctgtgtgtgcatgtatgtctgtgtatgtgtgtgtatgtgtgcgtgcctgtatgtctgcctgtgtat

SEQ ID NO: 5363 - DNA, 120 bp, synthetic construct
  misc_feature 1..120: note = Artificially Synthesized Probe
  source 1..120: mol_type = other DNA
cagctctgacctctcggcttctgttcatgtttgaaaatgaaatcggtggtttgggtggtcgtcagtttcctgtggccgacagaagaaagcaccacagctgggccttcaaacaatgagaat

SEQ ID NO: 5364 - DNA, 120 bp, synthetic construct
  misc_feature 1..120: note = Artificially Synthesized Probe
  source 1..120: mol_type = other DNA
atggtaaaggagactttaagctcaatcaagccaaaagggtgacgtcgggctctttacaggcaagctcctgaccccagtcctgactgtattattgggaatgtaacttgttgaacaaaggag

SEQ ID NO: 5365 - DNA, 120 bp, synthetic construct
  misc_feature 1..120: note = Artificially Synthesized Probe
  source 1..120: mol_type = other DNA
aggcggagttctgtaggtgcgggaatgagggggcttctttctcaaattgggaatgcctagcttttttctagctgtaaacgtttcagacgctgcggacagatcctccaatgggaagtgaac

SEQ ID NO: 5366 - DNA, 120 bp, synthetic construct
  misc_feature 1..120: note = Artificially Synthesized Probe
  source 1..120: mol_type = other DNA
caaaaatgagtgtctgcgtcaaattcatttgggattttggttctcacgtggctttgcagggcctgtgtgaagagtgagcacctgcttttcagagcttcagatgacacgtcattctgcaat

SEQ ID NO: 5367 - DNA, 120 bp, synthetic construct
  misc_feature 1..120: note = Artificially Synthesized Probe
  source 1..120: mol_type = other DNA
gctgggctatggtgtctttagagctccctagcctgaccgttagttacaactggagcctttaacccaagctggtggcctttggagggacgtggcttcccaaagccctgccctttgcttcct

SEQ ID NO: 5368 - DNA, 120 bp, synthetic construct
  misc_feature 1..120: note = Artificially Synthesized Probe
  source 1..120: mol_type = other DNA
gcaagcataatcctgcatctcctaagaaaccaaaatcagtgccaaaaccccataatgagcaaaacagtagaatgtccactgagttgagtcctggtcctaccctggcacccacccaataat

SEQ ID NO: 5369 - DNA, 120 bp, synthetic construct
  misc_feature 1..120: note = Artificially Synthesized Probe
  source 1..120: mol_type = other DNA
cctggtgtgctgacctgggaagacaggggaggtggggacagcattcaggaccactgtcctctctgaggctttcaggggcaggggcctgggcagagccagtgcacaggaccatgggggtgc

SEQ ID NO: 5370 - DNA, 120 bp, synthetic construct
  misc_feature 1..120: note = Artificially Synthesized Probe
  source 1..120: mol_type = other DNA
ctgctcttcctcactggagggagagagttcagggatgcgaggaggggcctgaggccacagagcctcagagccgctcatatccagatttcatggaaaggaaaaaacaaagaacaaacgcat

SEQ ID NO: 5371 - DNA, 120 bp, synthetic construct
  misc_feature 1..120: note = Artificially Synthesized Probe
  source 1..120: mol_type = other DNA
ggcaaggacacgggccacactggccgcctgggacctcatcctgcaaaggccagctggggcacgggcgcaagcccatctgggtgccacgttctgccaccttctgcgctgggcgctgggagc

SEQ ID NO: 5372 - DNA, 120 bp, synthetic construct
  misc_feature 1..120: note = Artificially Synthesized Probe
  source 1..120: mol_type = other DNA
cttattttgtctgggccataatggaatggggacactggatgtttttcctctgaggccgtggaggttcacatccctgccgaggtgtgggtggccccttttccgctggtaaacaatcccaca

SEQ ID NO: 5373 - DNA, 120 bp, synthetic construct
  misc_feature 1..120: note = Artificially Synthesized Probe
  source 1..120: mol_type = other DNA
cctggtatgtgaacacattttgtgggccaccatttggccgacaactggggccactgggacggagaaatatccagaatctgaatcccaataagtctgtgggtgtcgtcacattcagtctgg

SEQ ID NO: 5374 - DNA, 120 bp, synthetic construct
  misc_feature 1..120: note = Artificially Synthesized Probe
  source 1..120: mol_type = other DNA
tgctctctccagctgggtccagtccaaggaccatatctgcctctttgcccagcctctgggggccgcccggagcatttgaaactcattttgacttttaaaaatgattaagaatgtggccag

SEQ ID NO: 5375 - DNA, 120 bp, synthetic construct
  misc_feature 1..120: note = Artificially Synthesized Probe
  source 1..120: mol_type = other DNA
gacagggctgggttgtagagagctggctaattggaccagtgtttgtttgcaccattgtctcggagcagcagggagccattgaaggtgcttgagcatggggagtgttttatatgctaatgt

SEQ ID NO: 5376 - DNA, 120 bp, synthetic construct
  misc_feature 1..120: note = Artificially Synthesized Probe
  source 1..120: mol_type = other DNA
atacagccctttgggacacccgtttgtgctcaaagatgtctgacgtgcccttttcacccccctccaccgcttaccctctaacagctgagctaactcctatttaccctgccacacctagcg

SEQ ID NO: 5377 - DNA, 120 bp, synthetic construct
  misc_feature 1..120: note = Artificially Synthesized Probe
  source 1..120: mol_type = other DNA
ggccaagaaaagcatcatgaaaggtgtcgttatgtggcctgagtctggaaaggtctggggtgttctaggtggccaggggtgtggagggtgggggtggcagcctcctgagtggagatgtag

SEQ ID NO: 5378 - DNA, 120 bp, synthetic construct
  misc_feature 1..120: note = Artificially Synthesized Probe
  source 1..120: mol_type = other DNA
tggtggacaggtggcgtgccttctctgggcctcagtgtcctttttgctaaagtaggaatggcgctgtcccatgacccggtttggggacactacgtggaaggaagcatccacagcacaagg

SEQ ID NO: 5379 - DNA, 120 bp, synthetic construct
  misc_feature 1..120: note = Artificially Synthesized Probe
  source 1..120: mol_type = other DNA
gcagcactcaccccagcgcccaagtttgaagggtgcggcggggtccctggggagtccagaggctctggggacccagcttcacagagccaggtggggtgtcggctctgggcacccggattc

SEQ ID NO: 5380 - DNA, 120 bp, synthetic construct
  misc_feature 1..120: note = Artificially Synthesized Probe
  source 1..120: mol_type = other DNA
tggccagggatgttgctggaccccagaggggctctggtgcctgggcacggtggggctccccaggtcggggcgggtgctgggccaggtgcctccatgggctctctcaaatgctcctcttgc

SEQ ID NO: 5381 - DNA, 120 bp, synthetic construct
  misc_feature 1..120: note = Artificially Synthesized Probe
  source 1..120: mol_type = other DNA
gggcctcaggccacccggaggtgggttgagctgggacactatgctgggcagcaccccaccagagaagccgtgggcccagcccccgcaggctggacttactggagggtctgggctgatggg

SEQ ID NO: 5382 - DNA, 120 bp, synthetic construct
  misc_feature 1..120: note = Artificially Synthesized Probe
  source 1..120: mol_type = other DNA
ggcacctgtgtgggctgaaggcatcagcagaggacagtgtcctatcagggacagggcctcttcagcctagatgtgaacctggacagggacaccattgctttctctgtttgtttctccgga

SEQ ID NO: 5383 - DNA, 120 bp, synthetic construct
  misc_feature 1..120: note = Artificially Synthesized Probe
  source 1..120: mol_type = other DNA
tgagaaatgggcaccgtgaatgaggggcaggcagcccctcttgcagcgaggccggccctggggatgggggaggggctggtcattttttggaacagaaaattgaaaaactcggtggtgagg

SEQ ID NO: 5384 - DNA, 120 bp, synthetic construct
  misc_feature 1..120: note = Artificially Synthesized Probe
  source 1..120: mol_type = other DNA
attcattccttccttcttcctcctactcattaattccttcctccccccattcctttcttcaccccctcattcattcctttcttcacccccattcattccttttctccctgctcattcatt

SEQ ID NO: 5385 - DNA, 120 bp, synthetic construct
  misc_feature 1..120: note = Artificially Synthesized Probe
  source 1..120: mol_type = other DNA
ttcttcccctgctcattcatttctttcttctctccctactcaatttctctctcactcattcattctttccttgtccctccgcttattccttccttctgtctgttcattcatttcttcctt

SEQ ID NO: 5386 - DNA, 120 bp, synthetic construct
  misc_feature 1..120: note = Artificially Synthesized Probe
  source 1..120: mol_type = other DNA
ggtttgcaataagcttttgccttcctgggggtgactcacagctgctttccatttgggagccctggaaggcagagcaggcagcttagagacgcagcagagatgaaagtggctttcccaaga

SEQ ID NO: 5387 - DNA, 120 bp, synthetic construct
  misc_feature 1..120: note = Artificially Synthesized Probe
  source 1..120: mol_type = other DNA
cgggccacagatgaactgggctcactgctcagcctgccagcagcgggggcccccgagcccagcctgtgcacctgcctgcccgggacagtcgagtaccaggtgcccacctccctgcgggcc

SEQ ID NO: 5388 - DNA, 120 bp, synthetic construct
  misc_feature 1..120: note = Artificially Synthesized Probe
  source 1..120: mol_type = other DNA
gcctgccctgaccacagcccagcagctccctgtgaacacctctttgtcccttcactgtcagctgtttctaaacccagacactgtttgtaatagactggaaataaaatgttctttccttac

SEQ ID NO: 5389 - DNA, 120 bp, synthetic construct
  misc_feature 1..120: note = Artificially Synthesized Probe
  source 1..120: mol_type = other DNA
ctctgagcctcagtttcctcttgcaaacgggatgacagaccccgcctcactgggctgcactgagggtctgatgaggtcactcttcaggcgctcaatagctgcccgtcaccattacccctg

SEQ ID NO: 5390 - DNA, 120 bp, synthetic construct
  misc_feature 1..120: note = Artificially Synthesized Probe
  source 1..120: mol_type = other DNA
ctctcaggagcctgtgtatgtgatgagctcagggggtgtcggcctgttgtcaaaggttctcaaagtctagaccagctcagtttgctcagggggcctcgtgtgagggtcccagccctgtga

SEQ ID NO: 5391 - DNA, 120 bp, synthetic construct
  misc_feature 1..120: note = Artificially Synthesized Probe
  source 1..120: mol_type = other DNA
ggaatgtgggcaatgtggtgaaagtggttgttggctgacagtggatgttgggtggcagtgggtgttgggtgacagttgacagtggttgctgggtggcagtgggcagtgggggtgagtccc

SEQ ID NO: 5392 - DNA, 120 bp, synthetic construct
  misc_feature 1..120: note = Artificially Synthesized Probe
  source 1..120: mol_type = other DNA
gcggggtctgggaggagagtgcagaagggccagccgattcccggttgctgcttcactgaaagagtatccgaggtactggaagcgatgctcacagaagccgaagcaaaatccaagtcccaa

SEQ ID NO: 5393 - DNA, 120 bp, synthetic construct
  misc_feature 1..120: note = Artificially Synthesized Probe
  source 1..120: mol_type = other DNA
ttggggcagaattgtgttggttgctttagttcatggaatcaggtgagcgaaccctcgtcgacctgggctccatctcgctctgtcccagctgctgcctgcagaatcagcgagtcaggtctc

SEQ ID NO: 5394 - DNA, 120 bp, synthetic construct
  misc_feature 1..120: note = Artificially Synthesized Probe
  source 1..120: mol_type = other DNA
ggggcgcagggacagaagagtgggccttggggggcccatgggggggtcggcaattcctgcaggggaggcggcacagtggaggggacagcgcttccttctgctctgtgggtacttggacca

SEQ ID NO: 5395 - DNA, 120 bp, synthetic construct
  misc_feature 1..120: note = Artificially Synthesized Probe
  source 1..120: mol_type = other DNA
tggtctggtccccagggagctcccagtcgcaggagcaggcatggccggtctccgggccatggtgcaaacaggaagttttcagggcccacggccaggcctcctgcctcacaggtgtccggg

SEQ ID NO: 5396 - DNA, 120 bp, synthetic construct
  misc_feature 1..120: note = Artificially Synthesized Probe
  source 1..120: mol_type = other DNA
ggaggtgagaaaactgaagacctggaagatttttttttccttcaaaaacccgtttccatccagtcttcagccagtccagtctactttaatcctcaccaggacaatggattaagtttctct

SEQ ID NO: 5397 - DNA, 120 bp, synthetic construct
  misc_feature 1..120: note = Artificially Synthesized Probe
  source 1..120: mol_type = other DNA
aggacgagagagttgccatcttgttctgttgaaattgtttgtgtgccttcgtgtgtttattttaacccattaggtcatggtctgagaagaatcctctgacggtcccttattttaagttgc

SEQ ID NO: 5398 - DNA, 120 bp, synthetic construct
  misc_feature 1..120: note = Artificially Synthesized Probe
  source 1..120: mol_type = other DNA
catggcatgaaagagccaaatcttcatattacacctttattagaaaccttatggtctttgccctccccctaacccctctctgcgttttacttcagaaaataaagaatgaaaggattgcta

SEQ ID NO: 5399 - DNA, 120 bp, synthetic construct
  misc_feature 1..120: note = Artificially Synthesized Probe
  source 1..120: mol_type = other DNA
caccgggagttctacaagaatggtgacaatagcctcccggctggtccttgccatgccacattgcttagttgaaagtatgttcttataaaatctttaaaaaatgttttattcctcacatat

SEQ ID NO: 5400 - DNA, 120 bp, synthetic construct
  misc_feature 1..120: note = Artificially Synthesized Probe
  source 1..120: mol_type = other DNA
attgctgtttggttgatattctgcttgtttaacagaggtatatactcttgcaataggttctgaggttaatgggaaatgtcatcagaagggtgttgcttcgtgctgaattcccctactctg

SEQ ID NO: 5401 - DNA, 120 bp, synthetic construct
  misc_feature 1..120: note = Artificially Synthesized Probe
  source 1..120: mol_type = other DNA
aaatcttctattattgaagtctgtggggacagcatttctaggagtgtggccttcagtaatgcaatatttttcctctgtctgagggtacttggtatcagattggtcacttggtaacaaaat

SEQ ID NO: 5402 - DNA, 120 bp, synthetic construct
  misc_feature 1..120: note = Artificially Synthesized Probe
  source 1..120: mol_type = other DNA
ctccttcaagtcctaatacatcaggtaacaggagagagaattccctgcatagagtattttccactttcagctacaaatggaaacttaggctcagtttagattgtaaacagctgatgcatc

SEQ ID NO: 5403 - DNA, 120 bp, synthetic construct
  misc_feature 1..120: note = Artificially Synthesized Probe
  source 1..120: mol_type = other DNA
tccactgcttcaaaatgcagtctgtgcactcatatgtttaatagtgcttctgttgtgcagccaagatgcagaaccagtggatcagaggcaaattttttgaataaatattgccatcaaagc

SEQ ID NO: 5404 - DNA, 120 bp, synthetic construct
  misc_feature 1..120: note = Artificially Synthesized Probe
  source 1..120: mol_type = other DNA
agcctcattactgtctcctcaacattgctcttaggacatgctttagaagtcaccttccatgccagaacaaatattttgttggcatcatgatttcttctgcattgacttatgtggcatctc

SEQ ID NO: 5405 - DNA, 120 bp, synthetic construct
  misc_feature 1..120: note = Artificially Synthesized Probe
  source 1..120: mol_type = other DNA
acctccactgacagaaactcaactacaaacttgagcaaactggactaacagtctcatacgtttcattacattaatctaaaaaatggtacttctagggtatgttctgacttcattatacat

SEQ ID NO: 5406 - DNA, 120 bp, synthetic construct
  misc_feature 1..120: note = Artificially Synthesized Probe
  source 1..120: mol_type = other DNA
tatgtcttctgctctatcctcataggatttctagcctctgctggaacacatccaaggactggaaacttgtgccattgttgacaagttctgtttgttaaaatggtatttcttaagttcgga

SEQ ID NO: 5407 - DNA, 120 bp, synthetic construct
  misc_feature 1..120: note = Artificially Synthesized Probe
  source 1..120: mol_type = other DNA
aataagcagtgttaattggcaaacaggggctatgagaaacacacaagtgatgaaaaccagccttatttctactggaatctcaggtcttacctgacttaccaccatctaagtttgcatagt

SEQ ID NO: 5408 - DNA, 120 bp, synthetic construct
  misc_feature 1..120: note = Artificially Synthesized Probe
  source 1..120: mol_type = other DNA
tctcgctcatccaccttttgccatttgtttgattttttcctgcaatgtgttttcttctcgtcaacttggccggaatggtggtaaatgctgtttttatatgtggacttacttgaaaaactg

SEQ ID NO: 5409 - DNA, 120 bp, synthetic construct
  misc_feature 1..120: note = Artificially Synthesized Probe
  source 1..120: mol_type = other DNA
atagcagcacccaaaagctgaaagtgccatgtcttattttttattttcagccttatccgtagcacgctttatggtagcaaagaggtctacaagctgtggccccaaaataatttaactttc

SEQ ID NO: 5410 - DNA, 120 bp, synthetic construct
  misc_feature 1..120: note = Artificially Synthesized Probe
  source 1..120: mol_type = other DNA
caacacagaagaaggtaaggagaaagtggtattagattgataggtcaactaatgataatgaagaaactttctcttgctgacggtgatgtcagcttctaccaggactaacttcagtgagca

SEQ ID NO: 5411 - DNA, 120 bp, synthetic construct
  misc_feature 1..120: note = Artificially Synthesized Probe
  source 1..120: mol_type = other DNA
cattttaaaaagatggttccagatctttgggaacaagatccccgggtcataaagctaacaaaagccctccctatctagtcttcacaaggatgcacttccaagagatgaaaaagtgcttat

SEQ ID NO: 5412 - DNA, 120 bp, synthetic construct
  misc_feature 1..120: note = Artificially Synthesized Probe
  source 1..120: mol_type = other DNA
ttagttttcaaatgaggctcaaagaagttcaatgagaaaactgcccagggtcacctaggtagtaggtagaaaattagtatcccacttagatgtgtgtcactgtgtcatctgaagagaaga

SEQ ID NO: 5413 - DNA, 120 bp, synthetic construct
  misc_feature 1..120: note = Artificially Synthesized Probe
  source 1..120: mol_type = other DNA
ggcagaaagggtatagtggtaacagtgagcactttgaatctcacttaccctaatcatttcttgaatgattgaaggagtaatgggaccctccttattccttactcctaaattctcactatt

SEQ ID NO: 5414 - DNA, 120 bp, synthetic construct
  misc_feature 1..120: note = Artificially Synthesized Probe
  source 1..120: mol_type = other DNA
agcattgtggtctaggtttggatgtttctacaaggtgtttcgaagcgaatgactcagtgaaagatacaatgggtgagaaagatggttctctcacattgtcaatccaaggcagaataaaaa

SEQ ID NO: 5415 - DNA, 120 bp, synthetic construct
  misc_feature 1..120: note = Artificially Synthesized Probe
  source 1..120: mol_type = other DNA
cattgctcccaaccccagtttttaactttttgttgtcgagcaatttcactaaggataatagcctccatttctacccctcctggaaaagacaagttttcattctttcatatggccgagtag

SEQ ID NO: 5416 - DNA, 120 bp, synthetic construct
  misc_feature 1..120: note = Artificially Synthesized Probe
  source 1..120: mol_type = other DNA
cacagctggattgttcagttttggatgccaaatataaagagggacagacaaactggcattcatccagaagagaggaatcaggatcacgagagattagaagttgtattggtaaagggaatt

SEQ ID NO: 5417 - DNA, 120 bp, synthetic construct
  misc_feature 1..120: note = Artificially Synthesized Probe
  source 1..120: mol_type = other DNA
ggtaatgcatgctgtgaagggctaagaaatgtgttcatcccacagaggatgaaacaacagacttggtcaaaaaagtatagttatggtccttttaaatggaaaaattcagaccacagctgg

SEQ ID NO: 5418 - DNA, 120 bp, synthetic construct
  misc_feature 1..120: note = Artificially Synthesized Probe
  source 1..120: mol_type = other DNA
actcaatactataatgccactatttttaactcctcctcatttcctcttaaaaatctcccatctgactttggttcttaccactgcatggaagaattacctgtccacatcgcaaacgacctc

SEQ ID NO: 5419 - DNA, 120 bp, synthetic construct
  misc_feature 1..120: note = Artificially Synthesized Probe
  source 1..120: mol_type = other DNA
ttctgccttttcctagatggcctcattcatctacatagctttaagcagaatctgtgttctgaagacttctaaatttgcatgtcagcctctgagctttaggcttttacaccaaatttcccc

SEQ ID NO: 5420 - DNA, 120 bp, synthetic construct
  misc_feature 1..120: note = Artificially Synthesized Probe
  source 1..120: mol_type = other DNA
gtagatgctctcccaaatttagatggaatgaattaatgtgggggaggagttgttcagaatgtgatttaatacataaaaaacttttggctccccactcccttcctctctcagtttgcaatg

SEQ ID NO: 5421 - DNA, 120 bp, synthetic construct
  misc_feature 1..120: note = Artificially Synthesized Probe
  source 1..120: mol_type = other DNA
tgcagcatttcctacagagctatttgtaagaggaaagcaatggaggtagagaagtgggttgttgagaataatagggtgaacttgaaagaggaaaagatgaggattaaaataggggcaatc

SEQ ID NO: 5422 - DNA, 120 bp, synthetic construct
  misc_feature 1..120: note = Artificially Synthesized Probe
  source 1..120: mol_type = other DNA
gacttggttctagagctgtagtttggaccagcactaagtctgtcttaccttttttcccctgataaatattcagtatttgaggaaatcatcacatctccctttagcattcttttggcaagg

SEQ ID NO: 5423 - DNA, 120 bp, synthetic construct
  misc_feature 1..120: note = Artificially Synthesized Probe
  source 1..120: mol_type = other DNA
ctccataccttccctggagctgtatgtttataagaattttctcttcagtaggagcccttttaaattgcagaagtgctttcttctgaccacagccctatctttgagggaatagctttattg

SEQ ID NO: 5424 - DNA, 120 bp, synthetic construct
  misc_feature 1..120: note = Artificially Synthesized Probe
  source 1..120: mol_type = other DNA
ttaagaatagtttgcttctttctaacaccgaagtgaaattggtagaaacagagagaatcaggatcagaattaaagagacgagatagctctggaggcctttgaggacagtcactcccatgt

SEQ ID NO: 5425 - DNA, 120 bp, synthetic construct
  misc_feature 1..120: note = Artificially Synthesized Probe
  source 1..120: mol_type = other DNA
cacccggccttcttttttatttttacatatccttaaggactaggaaacatttgggtcacactggtgcttacattcaaacctataaacaggaattaatgtatttctttgccatttatttta

SEQ ID NO: 5426 - DNA, 120 bp, synthetic construct
  misc_feature 1..120: note = Artificially Synthesized Probe
  source 1..120: mol_type = other DNA
gaagttgctgccacatttctctctcttacagacgctaagattccctttcagtaattgaaagtggtctgaaggctctggaaagacagaaatgaaggaccttctttaaaaacaaacgtttac

SEQ ID NO: 5427 - DNA, 120 bp, synthetic construct
  misc_feature 1..120: note = Artificially Synthesized Probe
  source 1..120: mol_type = other DNA
gagtcataaatgatggcgtcttattggtctctacaacatgaccctaggacactttgactgctgtgaaactggcacttaaaatagagtgaaatataattgaaaattgcacattgaagattt

SEQ ID NO: 5428 - DNA, 120 bp, synthetic construct
  misc_feature 1..120: note = Artificially Synthesized Probe
  source 1..120: mol_type = other DNA
aagcagaaatggtaatttacagaggataagaaaaagtacacgttaatccaagaaatacaaactcaggtggatgaactgcagaggccaggagtcagggggaaataagaattagccccaata

SEQ ID NO: 5429 - DNA, 120 bp, synthetic construct
  misc_feature 1..120: note = Artificially Synthesized Probe
  source 1..120: mol_type = other DNA
gagagaaccgacaagcaactggcttgctatccaaagtgctaaagaatcttttgcgatgctgtgtggcaacaatgttgcaatcattaatagaactgatctaaaaggaagaaagagagaaag

SEQ ID NO: 5430 - DNA, 120 bp, synthetic construct
  misc_feature 1..120: note = Artificially Synthesized Probe
  source 1..120: mol_type = other DNA
tgtaaagagggaacacattgttcacagcctaaatatacctgactgttttcatctccagcaagctctgcacacagtgagtaatagcagagtgagaattaaagtgtgctactttatcagtag

SEQ ID NO: 5431 - DNA, 120 bp, synthetic construct
  misc_feature 1..120: note = Artificially Synthesized Probe
  source 1..120: mol_type = other DNA
tcaataatctcttagatttgatgaaatgtggtaaaagaacatttaccatggcaaaaataccaccttgcatcaggagagaaagggttctatcctgaatagcccacgctgggtttaaggaga

SEQ ID NO: 5432 - DNA, 120 bp, synthetic construct
  misc_feature 1..120: note = Artificially Synthesized Probe
  source 1..120: mol_type = other DNA
tattttctatcctgcatgctaagtatttgaagtggaacttgcagacaaccatgtggagtgatggattaaatttcccctttcttaggaagttcagaagtccaaggaggcagtgttcatgaa

SEQ ID NO: 5433 - DNA, 120 bp, synthetic construct
  misc_feature 1..120: note = Artificially Synthesized Probe
  source 1..120: mol_type = other DNA
ggagatcttattcaatcttttaactctccccttttctagagctttccttctgctttctggatcacagcactgggaatgtggatctgcttttagatcagtgctttgagaagtaggagaaca

SEQ ID NO: 5434 - DNA, 120 bp, synthetic construct
  misc_feature 1..120: note = Artificially Synthesized Probe
  source 1..120: mol_type = other DNA
tccctaatctttctgagcctctgtttctacaaactctaaagtgcccactcaccaggggtaactgttgatttttactttggctccacaatgtgagtgtctggtatatttccagttacatcg

SEQ ID NO: 5435 - DNA, 120 bp, synthetic construct
  misc_feature 1..120: note = Artificially Synthesized Probe
  source 1..120: mol_type = other DNA
atgggtgtgttttatttagatggtacaggtgtcagaaggtaagaggtgtgatggaagttgataggtgactgttacttgaaggaagggggaatgaagtctaaaaggttagctacacatttt

SEQ ID NO: 5436 - DNA, 120 bp, synthetic construct
  misc_feature 1..120: note = Artificially Synthesized Probe
  source 1..120: mol_type = other DNA
gtgtgtgtcataaatgaaaccatggcttctacttcagtgatatccattgtaacatctactgggaaggttggatgcccagaagatatggccaactaaattactcagtgtatgaacaagaag

SEQ ID NO: 5437 - DNA, 120 bp, synthetic construct
  misc_feature 1..120: note = Artificially Synthesized Probe
  source 1..120: mol_type = other DNA
ttgattttgtgctgtatttttttcctaggcctttaacttatatatttcaaaacctaattagaagggtatagttgagagacaggatagccaagtggacaagagtccatgccgagggagcaa

SEQ ID NO: 5438 - DNA, 120 bp, synthetic construct
  misc_feature 1..120: note = Artificially Synthesized Probe
  source 1..120: mol_type = other DNA
aataaatgagtttaagagcaggctagaagttgggctatcttcttaggagtcatcagcaactagatgatgtttacagccttaagatggatgagctgagaaagggagtgaatacagatagag

SEQ ID NO: 5439 - DNA, 120 bp, synthetic construct
  misc_feature 1..120: note = Artificially Synthesized Probe
  source 1..120: mol_type = other DNA
aatctctgagagagtagactttgtgttcttaccgaaagactttttaaaggcataaaacatgagtggttcacctgctggctctcactaaatcctctcatgcaattggctcaaaaatcatgg

SEQ ID NO: 5440 - DNA, 120 bp, synthetic construct
  misc_feature 1..120: note = Artificially Synthesized Probe
  source 1..120: mol_type = other DNA
ttaaagtatttcatgggaaaaaaactatttaaattcattattctgtcagattccgtggagggcctccgaggctgccagaaacagccctttctttgagcacttatttctgtgataccctga

SEQ ID NO: 5441 - DNA, 120 bp, synthetic construct
  misc_feature 1..120: note = Artificially Synthesized Probe
  source 1..120: mol_type = other DNA
acaaagggggaaatgtcttctgattgatagagcttccttttcttttttgaacaaatgctaagaagtagcaacagccaaaggacaagagctgtattgtcttctctcatgtgtggcaagaac

SEQ ID NO: 5442 - DNA, 120 bp, synthetic construct
  misc_feature 1..120: note = Artificially Synthesized Probe
  source 1..120: mol_type = other DNA
gtacaagaatattctgtgtctttatcaacagcacgaacacttctgccatcttaaataagttaatttctctggatgcttcactatctggcgttgcaccagctgctgtgtggctctttaata

SEQ ID NO: 5443 - DNA, 120 bp, synthetic construct
  misc_feature 1..120: note = Artificially Synthesized Probe
  source 1..120: mol_type = other DNA
ctgctctttcccaacttattatagttctagagtgtctatttctgtaaaatatagggatatgcccaagatattcatctgaaggatcactgcacctgtgtgtgtacacactcacgtacatac

SEQ ID NO: 5444 - DNA, 120 bp, synthetic construct
  misc_feature 1..120: note = Artificially Synthesized Probe
  source 1..120: mol_type = other DNA
tctcgattatgatccaggcttagtggatggcagcacagtgcatggtacataaagaaatggcatcatgcttggtacatgtcattttgtttatcctttacagcagccctgggaggtgtgcga

SEQ ID NO: 5445 - DNA, 120 bp, synthetic construct
  misc_feature 1..120: note = Artificially Synthesized Probe
  source 1..120: mol_type = other DNA
aagttttgtctcctaagaagcttataaactggtgggtggagacaaggcattaatatctggatgggacaagcagggcagtgatgcagaaaaaaacacctctcagtatatgaaatgttctcc

SEQ ID NO: 5446 - DNA, 120 bp, synthetic construct
  misc_feature 1..120: note = Artificially Synthesized Probe
  source 1..120: mol_type = other DNA
ggctgtcgcaaaacactaagtttattacataaaagcctcaattccctcctaactatcaccaaaacagatgagttgtggtgtccagctcatcatcattgaagaaagaacacctcctttctt

SEQ ID NO: 5447 - DNA, 120 bp, synthetic construct
  misc_feature 1..120: note = Artificially Synthesized Probe
  source 1..120: mol_type = other DNA
tgtaggtgactagatgctagaaagagcctaatggatgagttgagaaagaaaacagccgagtcaagattgctaatgcgttcattacatgcatgtgagtgctttgctgtagaaagttatcga

SEQ ID NO: 5448 - DNA, 120 bp, synthetic construct
  misc_feature 1..120: note = Artificially Synthesized Probe
  source 1..120: mol_type = other DNA
aaagtcagacgttaaaccaacaattactgaaattagtcttaaattatagttgtgacagagacacaaaggtgagtgtggggcactgtgaggagtctgaaaaaaaaggacctcactcaggct

SEQ ID NO: 5449 - DNA, 120 bp, synthetic construct
  misc_feature 1..120: note = Artificially Synthesized Probe
  source 1..120: mol_type = other DNA
atattgtctcaacaatagactaagaattacttgtgagtggttttgcactgaaatagtctctatgaggttgtactaggtgggccctaattttatagctaggggaactaaggtcccagagag

SEQ ID NO: 5450 - DNA, 120 bp, synthetic construct
  misc_feature 1..120: note = Artificially Synthesized Probe
  source 1..120: mol_type = other DNA
ctgcagctctgagtctttttcagaaacgggaattcaaaggataaggttttaaatcattgaccatagagctgaaggtgtatcaggtacacagcaaggtaagaaatgcagtcccaatctttt

SEQ ID NO: 5451 - DNA, 120 bp, synthetic construct
  misc_feature 1..120: note = Artificially Synthesized Probe
  source 1..120: mol_type = other DNA
ctctccttgcgacttacaagaatttgcatttaaactgcacacttcacctgttggttgatacccaaaaccttcttaagagggaagaaagcttcttcatgacatcctcaatgacacgtaagt

SEQ ID NO: 5452 - DNA, 120 bp, synthetic construct
  misc_feature 1..120: note = Artificially Synthesized Probe
  source 1..120: mol_type = other DNA
atgtattatatgtccgagagagtgacttgtcttggaaatttcagacatcagatcaattcggtacttgagtcctataccagggccactaaaggacttccagtccaaattccatcaaatcat

SEQ ID NO: 5453 - DNA, 120 bp, synthetic construct
  misc_feature 1..120: note = Artificially Synthesized Probe
  source 1..120: mol_type = other DNA
cgtttgtgcatgtgtgttcaccgccactagagtgagttcttttttggcagtttgtttgaacatatactcacccgaggcgtgtgcttggacctgtagatggacaaaagaggaaggcagcag

SEQ ID NO: 5454 - DNA, 120 bp, synthetic construct
  misc_feature 1..120: note = Artificially Synthesized Probe
  source 1..120: mol_type = other DNA
tggaatgaagaggatgggtatgttttgagaggaaatggatgacttgtgagactagaaatttgggaagttagaaggatagaggaaatggtctctagagagcacctcgtataagaataagag

SEQ ID NO: 5455 - DNA, 120 bp, synthetic construct
  misc_feature 1..120: note = Artificially Synthesized Probe
  source 1..120: mol_type = other DNA
gtttggataagtgggaagtaattgatatggatgggcacaccaggtggggaggactttctggaaatagtgatacattgatggtaaatacgatttggctgtgccaaaaagatggagaatttt

SEQ ID NO: 5456 - DNA, 120 bp, synthetic construct
  misc_feature 1..120: note = Artificially Synthesized Probe
  source 1..120: mol_type = other DNA
ataataataataagagaaaattacacagatttacttaataagtcccatgtgatatggaagccttcctaaggcagtggagacctgaagagacagtgaagacctgaagggacagtggggacc

SEQ ID NO: 5457 - DNA, 120 bp, synthetic construct
  misc_feature 1..120: note = Artificially Synthesized Probe
  source 1..120: mol_type = other DNA
tgtacgggtgagagagagagcacagattaaactttggaaatgatagtcaatggtacatgatgatgcatggagacttttgccataaattctagacatattacaggaaaaccagcaagccca

SEQ ID NO: 5458 - DNA, 120 bp, synthetic construct
  misc_feature 1..120: note = Artificially Synthesized Probe
  source 1..120: mol_type = other DNA
gaaaaggtgggtagggtagacgttcaaagggaatcatgaacttgttttgtgtctcttcaaaaaaactgagcaagctgattctcacacacctaaacacgaaagcattttgttactaagctc

SEQ ID NO: 5459 - DNA, 120 bp, synthetic construct
  misc_feature 1..120: note = Artificially Synthesized Probe
  source 1..120: mol_type = other DNA
gaggcatttaagaattaaaattaaacactgaggcttctgggttgaataggagtttgtcaggtagacatggtaggaagggagtccaggcagagatggcggcatgtagaaaaataacaaggc

SEQ ID NO: 5460 - DNA, 120 bp, synthetic construct
  misc_feature 1..120: note = Artificially Synthesized Probe
  source 1..120: mol_type = other DNA
attttatttctggatactatcctaaaccttcccacaccaaacacaagaagttttcccttgctttcttcccccactccttgccttggaacatgataatcaagaaaaactgaccaggtgcag

SEQ ID NO: 5461 - DNA, 120 bp, synthetic construct
  misc_feature 1..120: note = Artificially Synthesized Probe
  source 1..120: mol_type = other DNA
ttaaagaaagtgttttattatttttttcctggaggggattccaagaagaagggtaatcgcattttccaaattcagactgtgatgagcacagtttattacggagcatccatccccacatgg

SEQ ID NO: 5462 - DNA, 120 bp, synthetic construct
  misc_feature 1..120: note = Artificially Synthesized Probe
  source 1..120: mol_type = other DNA
catttctgtaaattttttctaagtaaaagatgtttccttcttttcccaccaaccctcaaaattccgtgtgctgtctgtggaattcatgcacagattgctgtggttcggggaaagatcatg

SEQ ID NO: 5463 - DNA, 120 bp, synthetic construct
  misc_feature 1..120: note = Artificially Synthesized Probe
  source 1..120: mol_type = other DNA
taatttttggagacggtttaccagattggcacctcatgaaaatggaatcaaactgtgatgggtaattttatgcatccacttgggtaggccttggtgccttgatgtgtgttcaaacattat

SEQ ID NO: 5464 - DNA, 120 bp, synthetic construct
  misc_feature 1..120: note = Artificially Synthesized Probe
  source 1..120: mol_type = other DNA
ttctgggaggtaggaaaacaaggggtagattaatgtaaacctagagggaaagtcctagtaggtttttagggaccactgttctttattgtgtcctagtgaatatttgtctagatggcttca

SEQ ID NO: 5465 - DNA, 120 bp, synthetic construct
  misc_feature 1..120: note = Artificially Synthesized Probe
  source 1..120: mol_type = other DNA
tgcaacattttcagtggtcttgtgtctgtaattatctttcactgtttctagaagcaacttcattgtgcaacaccattgctgtctggaagggtcattatctggaatcggttagttctaacc

SEQ ID NO: 5466 - DNA, 120 bp, synthetic construct
  misc_feature 1..120: note = Artificially Synthesized Probe
  source 1..120: mol_type = other DNA
tagtttatggaagtaccagccaacactgaaacttcctggcctccaatccagtggggttattcatcctactctccactctctctgttttctgatgtttggaaataaaaaaaatcagaacta

SEQ ID NO: 5467 - DNA, 120 bp, synthetic construct
  misc_feature 1..120: note = Artificially Synthesized Probe
  source 1..120: mol_type = other DNA
aaacaaacaaaaaaacaagcagatagaccacaaaatagacaatggcttgaacacaataactgcttctgttttcctgtgtaagaggttagtgaggcaggcgcagggctgggggagtgcact

SEQ ID NO: 5468 - DNA, 120 bp, synthetic construct
  misc_feature 1..120: note = Artificially Synthesized Probe
  source 1..120: mol_type = other DNA
tcccctaattgcattcttaggagaaggatatgacttcttgagatgataaaggagacattacctgcagacatttcaggtggaaagccaaattgtgaactttttcttgtgcagcttctccat

SEQ ID NO: 5469 - DNA, 120 bp, synthetic construct
  misc_feature 1..120: note = Artificially Synthesized Probe
  source 1..120: mol_type = other DNA
aaagctgtaggaatgtgctcttcaccttcctgcaaaagattagggatggttgatatgtgagggaaggtgaaagctggaaagagtgagtgataccgaactttattttttcataggaaatac

SEQ ID NO: 5470 - DNA, 120 bp, synthetic construct
  misc_feature 1..120: note = Artificially Synthesized Probe
  source 1..120: mol_type = other DNA
caggtggaacctgtggcaggaatccacaagctgtgagttcaagcctcatgccagctgcctaagctcctatgagaagttggtagatggttcatgtcctttttcctcatttttttattttat

SEQ ID NO: 5471 - DNA, 120 bp, synthetic construct
  misc_feature 1..120: note = Artificially Synthesized Probe
  source 1..120: mol_type = other DNA
tctcgtcttttgtgcttctcttcctctgcctgaactttcaatattgacgtttctggttaacaatctaagatcatatggtcactgtgtgatttatgttgtctactccttggtgtcacaacc

SEQ ID NO: 5472 - DNA, 120 bp, synthetic construct
  misc_feature 1..120: note = Artificially Synthesized Probe
  source 1..120: mol_type = other DNA
taccatatggaaaagtagaaaatgagagtaaaagggaagctaatgtgagggtaggagggaaggtgaggcagaagaggtgaaaagaaagaacagagtaaagtccaagggtaggggagttga

SEQ ID NO: 5473 - DNA, 120 bp, synthetic construct
  misc_feature 1..120: note = Artificially Synthesized Probe
  source 1..120: mol_type = other DNA
tttcaggtcttcaaacaaaagttcacctgctccagagttgttgaaatgtaatgcattttctggaaaacgtgtgtctcattcatctcttgttggcgtttctgaaaataccacaggttctgg

SEQ ID NO: 5474 - DNA, 120 bp, synthetic construct
  misc_feature 1..120: note = Artificially Synthesized Probe
  source 1..120: mol_type = other DNA
tgagcatgaagccaaggtccctgcagtgatatcctacacagacaagggtgtaaatagcttagtttcatcaggctgttgaaaatgacaccattctccatgcaccaattctttttattttat

SEQ ID NO: 5475 - DNA, 120 bp, synthetic construct
  misc_feature 1..120: note = Artificially Synthesized Probe
  source 1..120: mol_type = other DNA
gttgttggagaatctttcacattgtgagctgattagattgaaaaacacacatatatggggctgtgacctgaactatatctgacgaagtcagcaattgctttgtgtgtttgtgcacgtgtt

SEQ ID NO: 5476 - DNA, 120 bp, synthetic construct
  misc_feature 1..120: note = Artificially Synthesized Probe
  source 1..120: mol_type = other DNA
tgtgatacactgttggtggtgcttcatggaatttgtcctgtgtgcatgcgagatagttttaattctctttcacaaactattaatgagctcacgtctagggttgctagagtttaggaacag

SEQ ID NO: 5477 - DNA, 120 bp, synthetic construct
  misc_feature 1..120: note = Artificially Synthesized Probe
  source 1..120: mol_type = other DNA
tttatcacctcagaagagaaacttcaaacctattagcagttattccccgtctaccctgtcccctagctcctgaaaaccactattgttttagtttctatgaatttcctaccaccactccat

SEQ ID NO: 5478 - DNA, 120 bp, synthetic construct
  misc_feature 1..120: note = Artificially Synthesized Probe
  source 1..120: mol_type = other DNA
tgacagaaagttacctaagtcaggataccttggtgactggactttcccctgagattgttttccttcattgcacagtaagttcatattctactgctctccctctctttcttaaatttttct

SEQ ID NO: 5479 - DNA, 120 bp, synthetic construct
  misc_feature 1..120: note = Artificially Synthesized Probe
  source 1..120: mol_type = other DNA
ggtatgtggatgtccagtttgttcatgttatgttgaaatggtgattgtctccatggagttgcttttacttgcacttttattgaaaatgaatttgctactgatggatgggtctgtttctgg

SEQ ID NO: 5480 - DNA, 120 bp, synthetic construct
  misc_feature 1..120: note = Artificially Synthesized Probe
  source 1..120: mol_type = other DNA
gctaggactgccagtaaaatgatgactagaagtgtgagagattaaatctctgcctgggttctagatctaaggggaaaagtgttcagtattcatccattcagtatgttacttgtcagtttc

SEQ ID NO: 5481 - DNA, 120 bp, synthetic construct
  misc_feature 1..120: note = Artificially Synthesized Probe
  source 1..120: mol_type = other DNA
ttatgtgaggtcactgagctggctctgagatgcctaccaatattgaagtatttacagactgaagcaatttaggcagcatgctctagtacttccagtatcttcagacaagctgcaattctt

SEQ ID NO: 5482 - DNA, 120 bp, synthetic construct
  misc_feature 1..120: note = Artificially Synthesized Probe
  source 1..120: mol_type = other DNA
atgagacactcagagctgatggaagtctagaaaggttaagccgttgtccgacctgaatcaagcaattcttttcaaacattcagtaaaatgcggccaagtaggcataatctaaaatggact

SEQ ID NO: 5483 - DNA, 120 bp, synthetic construct
  misc_feature 1..120: note = Artificially Synthesized Probe
  source 1..120: mol_type = other DNA
gttagatgatctctttcagctttcagagcctgcagtccctttcctgattccgaatcataaatgtatgggaatgtgtcaatgtgcaagagaaagaggggaacagaaaaagtcaaatacaaa

SEQ ID NO: 5484 - DNA, 120 bp, synthetic construct
  misc_feature 1..120: note = Artificially Synthesized Probe
  source 1..120: mol_type = other DNA
ggaaagtggggatcattttacccagtggccttgcaagtttcacagcaagtctccttgttatgggtctacagggaattaaggcaacttgaactaagagagaaaactatggtatattttcta

SEQ ID NO: 5485 - DNA, 120 bp, synthetic construct
  misc_feature 1..120: note = Artificially Synthesized Probe
  source 1..120: mol_type = other DNA
ctggtttaaagtaaagcttcctgtggtgtttcagtcttattatccctccagggatccagaagtcatcatgaagatatttcgctaaaactgcactcgtacgtttaaacactgataatggaa

SEQ ID NO: 5486 - DNA, 120 bp, synthetic construct
  misc_feature 1..120: note = Artificially Synthesized Probe
  source 1..120: mol_type = other DNA
atgtgcatgtgtctctaggtcaccagctccttatgagaagtacccgagctgtttatctttctttctccaggccccagcctcattctttctttttgtcctgattttactttttttattata

SEQ ID NO: 5487 - DNA, 120 bp, synthetic construct
  misc_feature 1..120: note = Artificially Synthesized Probe
  source 1..120: mol_type = other DNA
attagccctttgtcagatggatagattgcaaaaattttctccctgttcactctgatggtagttgttttttgttttgctttgttttgtttttgctgtgcagaagctctttaattagatccc

SEQ ID NO: 5488 - DNA, 120 bp, synthetic construct
  misc_feature 1..120: note = Artificially Synthesized Probe
  source 1..120: mol_type = other DNA
ggctgaggcaatgggattttctaaatatacagtcatgtcatctgcaaacagataatttgacttcctctcttcctaattgaatatgctttatttctttctcttgcctgattgccctggcaa

SEQ ID NO: 5489 - DNA, 120 bp, synthetic construct
  misc_feature 1..120: note = Artificially Synthesized Probe
  source 1..120: mol_type = other DNA
tttattagtctggttagtggtctatctattttgttaatcttttaaaaaaaaccagctcctggattcattgatttttgaagggttttttgtgtgtctatctccttcagttctgctctgatc

SEQ ID NO: 5490 - DNA, 120 bp, synthetic construct
  misc_feature 1..120: note = Artificially Synthesized Probe
  source 1..120: mol_type = other DNA
tgtgaagtgggtctcctgaatacagcataccagtgggtcttgactctttatccaatttgccagtttgtatcttttaattggggcatttagtgcatttacatttaaggttaatactgttat

SEQ ID NO: 5491 - DNA, 120 bp, synthetic construct
  misc_feature 1..120: note = Artificially Synthesized Probe
  source 1..120: mol_type = other DNA
ctataactttttatcaaagttcttagcttccttgcattgggttagaacatgctcctttagctcagaggattttgttattatccaccttctgaagcctactgtcaatttgtcaaactcatt

SEQ ID NO: 5492 - DNA, 120 bp, synthetic construct
  misc_feature 1..120: note = Artificially Synthesized Probe
  source 1..120: mol_type = other DNA
ggcagccagaactttaagccagtagatcttagcttattgggctccatggagatgggctccgctgagcaagaccacttggctccctggcctcagcctcctttccaggtgagtgaacagttc

SEQ ID NO: 5493 - DNA, 120 bp, synthetic construct
  misc_feature 1..120: note = Artificially Synthesized Probe
  source 1..120: mol_type = other DNA
gagacttaacaaactttttttcttcccttgcaaattctggtatcctaagaagcagtctgaatgatttgtgcatgaaactgccttggagcaggtgcaacttcagggggaattctcttattt

SEQ ID NO: 5494 - DNA, 120 bp, synthetic construct
  misc_feature 1..120: note = Artificially Synthesized Probe
  source 1..120: mol_type = other DNA
ccagcctcccattcttccaggtcagagagaaatgatctacttttttatcttggtgtggtggatgggactaaggaaagaaagagttggggtttgtcatattatttctttactttgtactca

SEQ ID NO: 5495 - DNA, 120 bp, synthetic construct
  misc_feature 1..120: note = Artificially Synthesized Probe
  source 1..120: mol_type = other DNA
tctggaaaaaaatgcccttaagaaaagactaggcaaatagaaataatataatctccttgcctcagtccaaacttgaaggactcattagaggatgcatgcaagtagggaccagaggaccat

SEQ ID NO: 5496 - DNA, 120 bp, synthetic construct
  misc_feature 1..120: note = Artificially Synthesized Probe
  source 1..120: mol_type = other DNA
cctcaccagggaaggagttagtgggagattctcaatctggtctgcagatgagtgccttctaggtaattcacacatataatttacagaagtgggaagaaatgaattcaaaccatttttttt

SEQ ID NO: 5497 - DNA, 120 bp, synthetic construct
  misc_feature 1..120: note = Artificially Synthesized Probe
  source 1..120: mol_type = other DNA
tgcaaagggcaaagagatggacagtgttaccattattcatttggaattagaattgtggaggcttgcacatttgtttgtcttccaagttctggcctcacccacccttttttgagggagaga

SEQ ID NO: 5498 - DNA, 120 bp, synthetic construct
  misc_feature 1..120: note = Artificially Synthesized Probe
  source 1..120: mol_type = other DNA
gtgtgaaaatgggagaaagtgtgagcgtgtcacagtgtgtgtcactgagtgggcgagtgagaaagtgggtgaatgtgtgcgtgactgtgcaagtgtgtgagtgtggggagtaagatttgt

SEQ ID NO: 5499 - DNA, 120 bp, synthetic construct
  misc_feature 1..120: note = Artificially Synthesized Probe
  source 1..120: mol_type = other DNA
taaatgctcagaaagacaactctttcttactgtttttgctttgcccagggaattgcaatcagtttcaatacacagttaataaaatgagaggcattcagcgtggatgtgggtgtcaaggga

SEQ ID NO: 5500 - DNA, 120 bp, synthetic construct
  misc_feature 1..120: note = Artificially Synthesized Probe
  source 1..120: mol_type = other DNA
aaatgaagtgttaagcatgttttaaaaacggagcattgattttctacagcagggatatttagagtcttctttcccctggttacactcatgtgcatttgcttaaatccagtggcctctggc

SEQ ID NO: 5501 - DNA, 120 bp, synthetic construct
  misc_feature 1..120: note = Artificially Synthesized Probe
  source 1..120: mol_type = other DNA
acatatagtaaagtgaccacattttgacaattctttctccagtgtaagtgtggtgtcctataactaatgcccttttcttcctatagccatcacttgcatcctccatgattggaacagtcc

SEQ ID NO: 5502 - DNA, 120 bp, synthetic construct
  misc_feature 1..120: note = Artificially Synthesized Probe
  source 1..120: mol_type = other DNA
acttcatcctcatgcatgtgtagataacaggtcaaccaaggctagaaatcataatgggtgtgagttctggttccagagttatatcacctcaatgatcttattcatttcattcctctaccc

SEQ ID NO: 5503 - DNA, 120 bp, synthetic construct
  misc_feature 1..120: note = Artificially Synthesized Probe
  source 1..120: mol_type = other DNA
ccaatattaaattggttgttagttcttttctatatgtctgtgataacctttgtgccctggttagcagggtctagaaagagccatccatctcaacaacagtggatttagacttgcaggaaa

SEQ ID NO: 5504 - DNA, 120 bp, synthetic construct
  misc_feature 1..120: note = Artificially Synthesized Probe
  source 1..120: mol_type = other DNA
tattggcatacagtaattaagtgtaattgagaaaaggtaattctgagagggaataaaagcaccagatgggagatacggcattcactcttacctaagtcctacctaccttcaagacctgga

SEQ ID NO: 5505 - DNA, 120 bp, synthetic construct
  misc_feature 1..120: note = Artificially Synthesized Probe
  source 1..120: mol_type = other DNA
ctctggccatcctagcagatagacatggcacttccatgtctgtccaattcccccaaaacatgacctaaggctcatctggaataagcaatcttcttctgtgtaaatattttataactatag

SEQ ID NO: 5506 - DNA, 120 bp, synthetic construct
  misc_feature 1..120: note = Artificially Synthesized Probe
  source 1..120: mol_type = other DNA
ttgagcttccttctgggtgaagctcagaagagctcaaacttttctgagccaaggtcaagctgggaaccttgttacgctattttatttttaaatattcacttcccattatgtctgagtctt

SEQ ID NO: 5507 - DNA, 120 bp, synthetic construct
  misc_feature 1..120: note = Artificially Synthesized Probe
  source 1..120: mol_type = other DNA
ataaatccttgctcttctcagcaaccacttacattgttttataaagttgatccacatcctatctttaggttgtagaaaaggatgctgggggagctgtcatcccagacccttaaatgtagt

SEQ ID NO: 5508 - DNA, 120 bp, synthetic construct
  misc_feature 1..120: note = Artificially Synthesized Probe
  source 1..120: mol_type = other DNA
catcacatcttcaaggctttgtttgaccttatgggcactgagtaactttttccttttctgaatgcatttggcgtttactgttgaaatctatggcttctttagtgagtacttgccgagtgc

SEQ ID NO: 5509 - DNA, 120 bp, synthetic construct
  misc_feature 1..120: note = Artificially Synthesized Probe
  source 1..120: mol_type = other DNA
accagccaggctgagtacagaggttccagtctctacatcagaagagccgagtttcctgacctagagaagttattttggctttcaagttttcatctttaataagaagggtttggaataaaa

SEQ ID NO: 5510 - DNA, 120 bp, synthetic construct
  misc_feature 1..120: note = Artificially Synthesized Probe
  source 1..120: mol_type = other DNA
tacttatgtatgtaaaccctgttaccatcctgtggagaggataggacttggtgatgtccaactattgagctctttcttcaaagtcttaaaggaagttcagtacataaaaccatggcagcg

SEQ ID NO: 5511 - DNA, 120 bp, synthetic construct
  misc_feature 1..120: note = Artificially Synthesized Probe
  source 1..120: mol_type = other DNA
aaggataaaagctttctcaaccacaagaattcctgcagaatttggctatgtctcattcattattgtacggggtcagtcgctggcccaatatctaggctatagtaggtatctctaaactat

SEQ ID NO: 5512 - DNA, 120 bp, synthetic construct
  misc_feature 1..120: note = Artificially Synthesized Probe
  source 1..120: mol_type = other DNA
agctttaagagagaaatcagtattatatcagtttagccaggctcacaatcaatagtcatttgataaaagctgagcgtgtgtgacactctcctaacacagagtcctgtgattctttgggga

SEQ ID NO: 5513 - DNA, 120 bp, synthetic construct
  misc_feature 1..120: note = Artificially Synthesized Probe
  source 1..120: mol_type = other DNA
tgtaaagtctttggaaactctcgatgaaggaaagggattcagtttccaaggtgtgggctagaatgcagaaaataaaaatgtgtaagtgaaggttttctgtggctttggtaatggctgtgt

SEQ ID NO: 5514 - DNA, 120 bp, synthetic construct
  misc_feature 1..120: note = Artificially Synthesized Probe
  source 1..120: mol_type = other DNA
aatggatttcctgggaaggaagtatgtgaagtcattaacattaattaatagcttatcgaaaaattaggctttcaggctggaagaaagtaggcaggcctgaagaagggagctcaggaagga

SEQ ID NO: 5515 - DNA, 120 bp, synthetic construct
  misc_feature 1..120: note = Artificially Synthesized Probe
  source 1..120: mol_type = other DNA
gcagaaatagatttcactctgggttctgttatccatggttctttgtagattctttctgaatgtccacaggtgtgctcaactgctaaattcagctgcctttgaaatcacaaaaagggctca

SEQ ID NO: 5516 - DNA, 120 bp, synthetic construct
  misc_feature 1..120: note = Artificially Synthesized Probe
  source 1..120: mol_type = other DNA
ctgctctgcttggtcattcaggaaaactcaggtacctacattttaaaaaaaattctcagatgagctgccaggcaaaatcacctctaattgcttctcttgttttagttctcccaacaacct

SEQ ID NO: 5517 - DNA, 120 bp, synthetic construct
  misc_feature 1..120: note = Artificially Synthesized Probe
  source 1..120: mol_type = other DNA
atcttttctcattaccacatagaaacacatttctatgtagaagtagaagacatttctacttacctatcctgagaaccttctctctgaaaagctcacagcagagtccatctctcccgcttg

SEQ ID NO: 5518 - DNA, 120 bp, synthetic construct
  misc_feature 1..120: note = Artificially Synthesized Probe
  source 1..120: mol_type = other DNA
tccactataagttgatgaggacctttttttttggaagctgatggcctggcaagagttagtcttaataggttgtgtttcttctcactttagctggctctccctaatgataatgtctgttca

SEQ ID NO: 5519 - DNA, 120 bp, synthetic construct
  misc_feature 1..120: note = Artificially Synthesized Probe
  source 1..120: mol_type = other DNA
aagaatacaaatcagcttaacttctccaaggtctggcaaagctttatacacctttcagaaacagaacacagcaaatctgcctcagcaaacatgtgcatacgactttcatctgagctatca

SEQ ID NO: 5520 - DNA, 120 bp, synthetic construct
  misc_feature 1..120: note = Artificially Synthesized Probe
  source 1..120: mol_type = other DNA
ctctgagtgaaccctgtctttgggccgttccattgcacaataggcagttgaaatctatgcttttctcaatagggagtacaaaaaattcatcattttaaagtgggctgtcagatctaagaa

SEQ ID NO: 5521 - DNA, 120 bp, synthetic construct
  misc_feature 1..120: note = Artificially Synthesized Probe
  source 1..120: mol_type = other DNA
caactgaggctcagaaacattaagcaactgtcctggggtcacaaagaagacactattagagccaggtttagtccacatattcaatttctttgtttatttccttcactttgcatgagaatt

SEQ ID NO: 5522 - DNA, 120 bp, synthetic construct
  misc_feature 1..120: note = Artificially Synthesized Probe
  source 1..120: mol_type = other DNA
tttatgtggacaaacctttagaggctggcctctctgtagaaggattgcacagggaaataattttgagcctactttcttgtctttatcttctatgttctcttctcagcttcctgtcttgat

SEQ ID NO: 5523 - DNA, 120 bp, synthetic construct
  misc_feature 1..120: note = Artificially Synthesized Probe
  source 1..120: mol_type = other DNA
cacccccatttatagaaactttcaaatttatactagcataaggccaaccttatctgtgaccatgaataagctatttcactacctcgttgttctggtcaaaataatgcatggggctgggct

SEQ ID NO: 5524 - DNA, 120 bp, synthetic construct
  misc_feature 1..120: note = Artificially Synthesized Probe
  source 1..120: mol_type = other DNA
tatggcctttatctaattttacttttcagccacgtttgatgtagctgacttccatctcgaaacactctcttctgattttccctttgattgcactatccactcctttttccatgtcctcga

SEQ ID NO: 5525 - DNA, 120 bp, synthetic construct
  misc_feature 1..120: note = Artificially Synthesized Probe
  source 1..120: mol_type = other DNA
aaatctctctccccccgccacacaatctctttgtcttgttttatcttcttctcaacacgtatcactatcaagacattgaacaaggaaatactgacggattttcatttcagtttccccctt

SEQ ID NO: 5526 - DNA, 120 bp, synthetic construct
  misc_feature 1..120: note = Artificially Synthesized Probe
  source 1..120: mol_type = other DNA
tatctagaggaggctgggcatggtggctcacacttataatcccagcactttgggaggctgaggattgtttgaggtcaggagtttgagaccagcctggacaacatagtacgggcctgtctc

SEQ ID NO: 5527 - DNA, 120 bp, synthetic construct
  misc_feature 1..120: note = Artificially Synthesized Probe
  source 1..120: mol_type = other DNA
ttgttagtatttcatccactctgcaactagtctcccagtcattcctttatttttcccctgtatgagttgaagacgactctttgtggagtctaggaacaggcaagtgtccctatatatgga

SEQ ID NO: 5528 - DNA, 120 bp, synthetic construct
  misc_feature 1..120: note = Artificially Synthesized Probe
  source 1..120: mol_type = other DNA
ttcaacaccaggctccatatttaatgcacacagtgtaactagcttcaatagctgatcattctttctccagagatgtcttattacgaagcaaggagcacatacaaagcagttgtattgctt

SEQ ID NO: 5529 - DNA, 120 bp, synthetic construct
  misc_feature 1..120: note = Artificially Synthesized Probe
  source 1..120: mol_type = other DNA
cttagctgtcattcccatgccattcatgtcatgttttaagcagttcagcaagcattcttgccgtgctgacttgtctctagcatgatgttcaagctctgaaaattgcaagtgaatttaaat

SEQ ID NO: 5530 - DNA, 120 bp, synthetic construct
  misc_feature 1..120: note = Artificially Synthesized Probe
  source 1..120: mol_type = other DNA
tttttacagcagcacctccagaagtcacgtaagagacctggcacttccagaatcctttccagcctacaaccattttcacataaaaatgggaaaaatggaggcagaggaaaccatatatcc

SEQ ID NO: 5531 - DNA, 120 bp, synthetic construct
  misc_feature 1..120: note = Artificially Synthesized Probe
  source 1..120: mol_type = other DNA
ggaagaaactggagaatgtgaaagatgtgaagcatcatgggaaagtagaggccgggaaaaacatcctagtgataaaggtagaagaaaagagttttaggcaatgcctaatatgtgattgaa

SEQ ID NO: 5532 - DNA, 120 bp, synthetic construct
  misc_feature 1..120: note = Artificially Synthesized Probe
  source 1..120: mol_type = other DNA
cacacacacacttcttaagtctgcattccccaaataataataaggggcatgttgctctataacaatcagcatcacgaaagcctacaggactttgccattcggtttaatggaattggtata

SEQ ID NO: 5533 - DNA, 120 bp, synthetic construct
  misc_feature 1..120: note = Artificially Synthesized Probe
  source 1..120: mol_type = other DNA
gttatgtcaatgctcactggaacacttcttttcaaatgtaggaaaaccaagctaactagatctagaaaaacaagcagaggtttcaagggatgcctttgaaaggtggtgtggtatcaggga

SEQ ID NO: 5534 - DNA, 120 bp, synthetic construct
  misc_feature 1..120: note = Artificially Synthesized Probe
  source 1..120: mol_type = other DNA
agaggaaggatctgaagggtgatagagagaatgctgcctttggttaaaatttcaccagtgtagactgtgtttatgtagcttagtcagaatctcccttcatcctgtagtgctatgtttttg

SEQ ID NO: 5535 - DNA, 120 bp, synthetic construct
  misc_feature 1..120: note = Artificially Synthesized Probe
  source 1..120: mol_type = other DNA
atatatcagaacagtacatctaattcagaaaagtaagcttttctgagtcctgtgaatcctagtgaatcatcaagctttagagtagtctcagggaacctggcgcagatgcagagattagac

SEQ ID NO: 5536 - DNA, 120 bp, synthetic construct
  misc_feature 1..120: note = Artificially Synthesized Probe
  source 1..120: mol_type = other DNA
tgttaacttacttgattcttcagagtttgcttattatagccatcactttctaatagtacatagtttgaaaagcacttggccgtcttctgcattctgggaacatgtggcttcctgacccac

SEQ ID NO: 5537 - DNA, 120 bp, synthetic construct
  misc_feature 1..120: note = Artificially Synthesized Probe
  source 1..120: mol_type = other DNA
actcatcctctctgatagaatttaattttaaacacaattcccccgaatacaccctaatgtgcttgtttcatttctggagactgtatgcatcactttccttgtctggccaaggccacaaca

SEQ ID NO: 5538 - DNA, 120 bp, synthetic construct
  misc_feature 1..120: note = Artificially Synthesized Probe
  source 1..120: mol_type = other DNA
ttgttttctcccatgttccatgtttccgatttaaatgagagacatgaccatttctatctggctctatgtccatgtcttccttgagacagtgcagtggtggattagaaattgtcttatgtc

SEQ ID NO: 5539 - DNA, 120 bp, synthetic construct
  misc_feature 1..120: note = Artificially Synthesized Probe
  source 1..120: mol_type = other DNA
gcaattttggcccctggctatttctctgcccctgacctatgtttttctgaaatgttatagacatcttccaaactgatttcacctaaatatcagaaatcgctcatcatggttcctttgtcc

SEQ ID NO: 5540 - DNA, 120 bp, synthetic construct
  misc_feature 1..120: note = Artificially Synthesized Probe
  source 1..120: mol_type = other DNA
aagtctcactaaaaaactgctgcccttcagcatgtctgtaggcaaaatacacagtagttttggcattacctgtgactaaaaaaaatcacagatattcccatatcacagtggcaattgcag

SEQ ID NO: 5541 - DNA, 120 bp, synthetic construct
  misc_feature 1..120: note = Artificially Synthesized Probe
  source 1..120: mol_type = other DNA
tatccttgtataccgttgggagcactgattttattttatttaaagcatgccttcttgtccaagacaattccccagtaaaatgttactagtttatctaagcccagacagccatttccctga

SEQ ID NO: 5542 - DNA, 120 bp, synthetic construct
  misc_feature 1..120: note = Artificially Synthesized Probe
  source 1..120: mol_type = other DNA
accttgtatctagagtcccttcgtctctgtctttgatgcagtgatatttctcattgtgagtgattccataagctagaccagcagttgcccatattccatggttgattagttttctagaaa

SEQ ID NO: 5543 - DNA, 120 bp, synthetic construct
  misc_feature 1..120: note = Artificially Synthesized Probe
  source 1..120: mol_type = other DNA
gctagtatgaatcttgacttagaagatgaaagaagctcaaatgttcagttgttccaatcctttgaatttatagctgagggaatggaagtccatcaggagggcatgaagcctgttcaagtt

SEQ ID NO: 5544 - DNA, 120 bp, synthetic construct
  misc_feature 1..120: note = Artificially Synthesized Probe
  source 1..120: mol_type = other DNA
acacaaacatgatgtgatgtctcccttatgctactgatttactttatttcagtcccgcctcacttcagaatgcaattttttccttgcaggaattacttgtaatggcagtggtagaaccag

SEQ ID NO: 5545 - DNA, 120 bp, synthetic construct
  misc_feature 1..120: note = Artificially Synthesized Probe
  source 1..120: mol_type = other DNA
accttgtctggcctctactttctccagttagaaagtggaagaaactgagcttcaaatgtcttgcttacagctattttggggctctgagttgagatttttgttgtaccatttgtgaagcca

SEQ ID NO: 5546 - DNA, 120 bp, synthetic construct
  misc_feature 1..120: note = Artificially Synthesized Probe
  source 1..120: mol_type = other DNA
catggcagccttatccacagtctccagcctgcagtcacatgtatttttcaggggttcactgttagccctttgagcaaatatttatagagttgtttttaaaaaattactgatgctgtaatt

SEQ ID NO: 5547 - DNA, 120 bp, synthetic construct
  misc_feature 1..120: note = Artificially Synthesized Probe
  source 1..120: mol_type = other DNA
cagctcctagcagactccagaatcatgttaatatcttccatccgatcacctctctgaagactgtttgtagataagtgtgtcttaagtgaactttattcgaatgaactcctaccctgtaga

SEQ ID NO: 5548 - DNA, 120 bp, synthetic construct
  misc_feature 1..120: note = Artificially Synthesized Probe
  source 1..120: mol_type = other DNA
ctcagagtctgtcagccatcacagcatagcctctttcttttttctggatttcttttttattccatgataggtggaataaggcaatctgggcccagtaatgcttgttttttaactcagtgt

SEQ ID NO: 5549 - DNA, 120 bp, synthetic construct
  misc_feature 1..120: note = Artificially Synthesized Probe
  source 1..120: mol_type = other DNA
tggatcaaaataaggaaaaacacacgaggtctaaatcatcaaaataagttgcaagataaggcagcacgcttcatgaggctgtttctcttgctttctgttctcaacaccagttctgtgtaa

SEQ ID NO: 5550 - DNA, 120 bp, synthetic construct
  misc_feature 1..120: note = Artificially Synthesized Probe
  source 1..120: mol_type = other DNA
tttaaaggttaggtacataaaagaagttttgaggtttcccctctgtaacaactgattggccctctcgggaactctgtgcttaaataaagctgataggattggcctctcttagcatgctta

SEQ ID NO: 5551 - DNA, 120 bp, synthetic construct
  misc_feature 1..120: note = Artificially Synthesized Probe
  source 1..120: mol_type = other DNA
agcattaattggatgaaaaatgtcaagcttttctcagtgttcggtgcagtacaaacgtaggattatttctaagtggaggagcaatagaagatagcactgtagaactcttccgtcatgcca

SEQ ID NO: 5552 - DNA, 120 bp, synthetic construct
  misc_feature 1..120: note = Artificially Synthesized Probe
  source 1..120: mol_type = other DNA
tctcattttgagttggacttgaagttgtggatgatatcagagccctgagagagagaaatttaaaaaggaatcctgaaaggcagatgtaaatatcgccttacactgcttcttcttttaccc

SEQ ID NO: 5553 - DNA, 120 bp, synthetic construct
  misc_feature 1..120: note = Artificially Synthesized Probe
  source 1..120: mol_type = other DNA
ctcctaatgcaatttgttttcattaatgagaacccacatgtatgcatgaatcagggttttgcactgatacctcctgtgtggggtatttctttttccaggttaggtttcattctccatatt

SEQ ID NO: 5554 - DNA, 120 bp, synthetic construct
  misc_feature 1..120: note = Artificially Synthesized Probe
  source 1..120: mol_type = other DNA
aatccttgtccaatcctttaaatgtataagctgttatctgagacctgagcaaacatttgagaaatcttccaggtcaccttggtgccgtgaagaaaattgctctagtacattgctctagtg

SEQ ID NO: 5555 - DNA, 120 bp, synthetic construct
  misc_feature 1..120: note = Artificially Synthesized Probe
  source 1..120: mol_type = other DNA
tattccatttagaactcaaagatgagtgttcaggagctggatatttataggttggaaatgcaatcacatgctccgctatattatgctcttgaaagaagatgctgctactcagactgtccc

SEQ ID NO: 5556 - DNA, 120 bp, synthetic construct
  misc_feature 1..120: note = Artificially Synthesized Probe
  source 1..120: mol_type = other DNA
ttaacttaattcacctgaccctaagaagtgtgtggtttgaaaagggcaaggcgctctaggggcactttggagcagaagtcatatctcgtttaatctaatacagtttgatctatgaactaa

SEQ ID NO: 5557 - DNA, 120 bp, synthetic construct
  misc_feature 1..120: note = Artificially Synthesized Probe
  source 1..120: mol_type = other DNA
aaggtcttactacccagcccctagtggagagttctcttgcaaaaaacaaaaacggaaacaagaaaccaaacatgctttgagagatagagagtgagaaacagattttcagagtggagaata

SEQ ID NO: 5558 - DNA, 120 bp, synthetic construct
  misc_feature 1..120: note = Artificially Synthesized Probe
  source 1..120: mol_type = other DNA
gccatagcttgccagtctttaaaattgtatcacttcacttattctaacatactaaccactttatttttttatatgtgggaccacagtgtcctcacaccctcgactgcaatgtgtgtatcc

SEQ ID NO: 5559 - DNA, 120 bp, synthetic construct
  misc_feature 1..120: note = Artificially Synthesized Probe
  source 1..120: mol_type = other DNA
catatttcatagatagcgtatgtatattacataagtgggaccctaactgcatctatatttagtgaaatgtcaggatcgcgatgctgcggtgaatagcatgagctttctttcatgtccatg

SEQ ID NO: 5560 - DNA, 120 bp, synthetic construct
  misc_feature 1..120: note = Artificially Synthesized Probe
  source 1..120: mol_type = other DNA
agtggcagccgaggctgttattttgaaaccctaagtggaaacaggcatggaaacccggaaggagcagggagccttaggcagtcctgggagatgaagccaacgccctacctccatgtggaa

SEQ ID NO: 5561 - DNA, 120 bp, synthetic construct
  misc_feature 1..120: note = Artificially Synthesized Probe
  source 1..120: mol_type = other DNA
ggcatttccctcgctttatgtttttggttttttttcttccttcaatctctttgattaggccgtacgtggctgtggcaaggagttggggaaaaaaattataaaaacaggaaagagagaaag

SEQ ID NO: 5562 - DNA, 120 bp, synthetic construct
  misc_feature 1..120: note = Artificially Synthesized Probe
  source 1..120: mol_type = other DNA
gaattcgccttacgttccctgggtgcgcggatgtctgtttttaacagcatgctgctatggttcctaaggagagaattcgatcggcctgtgcttacgagttggtttattttttatttattt

SEQ ID NO: 5563 - DNA, 120 bp, synthetic construct
  misc_feature 1..120: note = Artificially Synthesized Probe
  source 1..120: mol_type = other DNA
agtgaggttttgctgttgttattggtagtttttgttttatgaatgaaggatgtggaaactttaatggagatcacaaaactttgtgggagatgtggtttgcacacacacaggtacacaccc

SEQ ID NO: 5564 - DNA, 120 bp, synthetic construct
  misc_feature 1..120: note = Artificially Synthesized Probe
  source 1..120: mol_type = other DNA
ctacccaaatttaaagctgaggatatgcaatgaattaggaacacattgcattttattacgtgtcttgcaactgctgacaacctcaagacaaaccgaggctttccttttccacatctgcaa

SEQ ID NO: 5565 - DNA, 120 bp, synthetic construct
  misc_feature 1..120: note = Artificially Synthesized Probe
  source 1..120: mol_type = other DNA
gggctttggaggccttctgtaccattagagcagtagtttttttaaggttatacagtgtgttcctgtatccttcattttcagtgacacgtggcttcttagcaatacaaatgtgatgacaac

SEQ ID NO: 5566 - DNA, 120 bp, synthetic construct
  misc_feature 1..120: note = Artificially Synthesized Probe
  source 1..120: mol_type = other DNA
ttgcaatgttgccctctcttgatcccagtggcccctacaaagtgggagccatgaggccaggtactgagaagtgcccagtgaatacatgctgctgctgttactaataatattactgtttct

SEQ ID NO: 5567 - DNA, 120 bp, synthetic construct
  misc_feature 1..120: note = Artificially Synthesized Probe
  source 1..120: mol_type = other DNA
tccccccctggctctgaggacccccatcgcaggagggggaggcaaccccgcgagggtggggactgagagctatcctctcttccgcacctggctgttggtacccccatcgtaggggggggg

SEQ ID NO: 5568 - DNA, 120 bp, synthetic construct
  misc_feature 1..120: note = Artificially Synthesized Probe
  source 1..120: mol_type = other DNA
acccacctggaggactgtgggtattaggtgtccaagtagaaagatcaaatcttccgacggcaggtaccttacatgggatttacgatccgacgggtccgaacgcagctcgggaacagaaag

SEQ ID NO: 5569 - DNA, 120 bp, synthetic construct
  misc_feature 1..120: note = Artificially Synthesized Probe
  source 1..120: mol_type = other DNA
gccagcccctggttcccccactggctcttaggacccccatcgcagaggggggaggcaccccccgcgaggcggggactgcgagccagaccctcttccccctctggcttaggacctccatcg

SEQ ID NO: 5570 - DNA, 120 bp, synthetic construct
  misc_feature 1..120: note = Artificially Synthesized Probe
  source 1..120: mol_type = other DNA
gagaaaagatggcagctggacttttaacccaaactgtggggccctggctgaggccggtagcctacatctctaaacaactagacagggttgctaaaggatggcccccctattagagggcct

SEQ ID NO: 5571 - DNA, 120 bp, synthetic construct
  misc_feature 1..120: note = Artificially Synthesized Probe
  source 1..120: mol_type = other DNA
tatcccctcttccgcccctggcttttggtacccccatcgcaggggggggaggcaccctccgctaggcagggactgagagccaacccctggttcccccactggctcttaggacccccatcg

SEQ ID NO: 5572 - DNA, 120 bp, synthetic construct
  misc_feature 1..120: note = Artificially Synthesized Probe
  source 1..120: mol_type = other DNA
gggtgtggcaccccccacgagggtggggactgagagctatcccctcttccgcccctggctgttggtacccccatcgcaagggggggaggcacctcccgcgaggcagggactgagagccat

SEQ ID NO: 5573 - DNA, 120 bp, synthetic construct
  misc_feature 1..120: note = Artificially Synthesized Probe
  source 1..120: mol_type = other DNA
tcatggccattgaacttgtcttggtcagttttctttcagctctcagtgatagacacattccacaatgacctacagagaaaaaaaaggctcaaattgtatagcaaaccactacctctacta

SEQ ID NO: 5574 - DNA, 120 bp, synthetic construct
  misc_feature 1..120: note = Artificially Synthesized Probe
  source 1..120: mol_type = other DNA
tcatctacctgtctcaactccctaaatgggtgactgttcctgcatctgaatttccatagcattatcatgacacaccatcctcaccattgtcactatcttacctgtaatcatagctgcttg

SEQ ID NO: 5575 - DNA, 120 bp, synthetic construct
  misc_feature 1..120: note = Artificially Synthesized Probe
  source 1..120: mol_type = other DNA
tgctagagtttggcagagacaagagtaggagcgaagaaagtgagagtctcatgtaaaagggcaaggtcaccttcctgaacagggaagataaatcatagtggatattgtacaataaagatt

SEQ ID NO: 5576 - DNA, 120 bp, synthetic construct
  misc_feature 1..120: note = Artificially Synthesized Probe
  source 1..120: mol_type = other DNA
tcacaagtactagggcttcaatacatggtactgcataaataaagcagtccttgccttcaagtcaaacacatcaccttatcttattgttatctgagaaaatgcaaaggagcccatgggagc

SEQ ID NO: 5577 - DNA, 120 bp, synthetic construct
  misc_feature 1..120: note = Artificially Synthesized Probe
  source 1..120: mol_type = other DNA
tattttgaggttattattctattgttgattcttggagtaataagaattgagagattacccagaagcaatgggcagtgtaataagaggagagggctggagaacaagctgggtgactcccat

SEQ ID NO: 5578 - DNA, 120 bp, synthetic construct
  misc_feature 1..120: note = Artificially Synthesized Probe
  source 1..120: mol_type = other DNA
gaggaagataattggactgtaaaatagtgaagggcacggctgggtcaagagagagtcccctaaaaccaaattccagatgatttccatattctgaatggaaagcctgcataatcattattt

SEQ ID NO: 5579 - DNA, 120 bp, synthetic construct
  misc_feature 1..120: note = Artificially Synthesized Probe
  source 1..120: mol_type = other DNA
agagcttcttaggcagtcagaccacctggctctgaatcctggctcggtcacaaattaattatatggaagaaaaccttaagcctcggtttgattttctcctttaaaaagtgagacaaataa

SEQ ID NO: 5580 - DNA, 120 bp, synthetic construct
  misc_feature 1..120: note = Artificially Synthesized Probe
  source 1..120: mol_type = other DNA
ttagaatgtcacatctttatccttcagacatagtagctcagtctgcatcagactaagatggggaaaaacttgattcctggaaatttccaaacatacggaaaagtggagggaattaggcga

SEQ ID NO: 5581 - DNA, 120 bp, synthetic construct
  misc_feature 1..120: note = Artificially Synthesized Probe
  source 1..120: mol_type = other DNA
gagaaaggctcttctttgaagaatcaattgcttatccatggtgttagtttatatgtttgtatcatgataaacatcctatccagaggtgtgaccttccagaccttgctaacagcatgctgc

SEQ ID NO: 5582 - DNA, 120 bp, synthetic construct
  misc_feature 1..120: note = Artificially Synthesized Probe
  source 1..120: mol_type = other DNA
gtgcccaccagcccagaagactcaaggacgagtacttttctatacttacctttacacaagatagggtctcagtactcatcgcgattaatacatgaatgaacttcagcaaaataattgcaa

SEQ ID NO: 5583 - DNA, 120 bp, synthetic construct
  misc_feature 1..120: note = Artificially Synthesized Probe
  source 1..120: mol_type = other DNA
gtcttagtaattctgatgactataccccacatggatgcagagacagaataagtaaatcagtggaccaaacagaaacaattggtcatatttacacagttcttgttaccagctgggctgttt

SEQ ID NO: 5584 - DNA, 120 bp, synthetic construct
  misc_feature 1..120: note = Artificially Synthesized Probe
  source 1..120: mol_type = other DNA
acttgcacgcacgcctatagcagtacaactcacaattgcaaaaatatggaaccagcctaaatgttcatcaaccaaggagtagagaaagaaaatgtggtatatatacaccatggaatacta

SEQ ID NO: 5585 - DNA, 120 bp, synthetic construct
  misc_feature 1..120: note = Artificially Synthesized Probe
  source 1..120: mol_type = other DNA
agttttattttgaaaatgaaaagaaaatggggacacactccatttgaaatacaggatgcgtaccaaggtggatcacagattgagaggagaaaatgtgtgagattctccactgatagccag

SEQ ID NO: 5586 - DNA, 120 bp, synthetic construct
  misc_feature 1..120: note = Artificially Synthesized Probe
  source 1..120: mol_type = other DNA
tcccataaaaactttcagtatcattatgtactgaagtactccttatttatagttctgtggatttattccaacgagtctgttgaaaactgggatgtggggcacctacacttctcaccgtgc

SEQ ID NO: 5587 - DNA, 120 bp, synthetic construct
  misc_feature 1..120: note = Artificially Synthesized Probe
  source 1..120: mol_type = other DNA
aaggcattgctagactcacatatatctttcaccttgaagatgaagcaagattccaaaatgtcagaaaatcttgaaagtgtcttagatacgagcaatatggggagagagccagcaactgag

SEQ ID NO: 5588 - DNA, 120 bp, synthetic construct
  misc_feature 1..120: note = Artificially Synthesized Probe
  source 1..120: mol_type = other DNA
ctcacaaagttttattgggcacctgttacctgttcagcagagatttgtaaaaaaagacacatcaggtggcctttgcttgcaagaaatcagcctttggaacctgtggagaaaagttaagta

SEQ ID NO: 5589 - DNA, 120 bp, synthetic construct
  misc_feature 1..120: note = Artificially Synthesized Probe
  source 1..120: mol_type = other DNA
aaccccagtcctgggaatacctccaagaattctactttatttacttctcttatgtaagaatgtttaactcaccatggatcctgcccttagaccaaagcgaccttgatgttattgcacaaa

SEQ ID NO: 5590 - DNA, 120 bp, synthetic construct
  misc_feature 1..120: note = Artificially Synthesized Probe
  source 1..120: mol_type = other DNA
cagggtggattcactgtgccatggaaaaccacataacatcatcctattagcgtacttttgagagtagatgtgctattaatgatgctaaaacaacagacatacactaccagaatgctccta

SEQ ID NO: 5591 - DNA, 120 bp, synthetic construct
  misc_feature 1..120: note = Artificially Synthesized Probe
  source 1..120: mol_type = other DNA
gttgttttgttattctccatacatcctaatttatagaggagaaaacgaaatccagggaaagctggaaaattgatccagggtcaaacactgaacttatggagaggatggagaggaaagcgt

SEQ ID NO: 5592 - DNA, 120 bp, synthetic construct
  misc_feature 1..120: note = Artificially Synthesized Probe
  source 1..120: mol_type = other DNA
cttccttttattttttaataccctaagccacagctcaaaatgctgagcaccacttctcttcagcatgactgaggtctaggtatagatgggtatggggacagctctagggacttagcttca

SEQ ID NO: 5593 - DNA, 120 bp, synthetic construct
  misc_feature 1..120: note = Artificially Synthesized Probe
  source 1..120: mol_type = other DNA
tatctgcaagtgatattttctaaggagactgcgtgtgtcccccaaactccattttcatcatgtcacatttttctcaaaagcatttctataattctagcatgagaagggaagccttggtct

SEQ ID NO: 5594 - DNA, 120 bp, synthetic construct
  misc_feature 1..120: note = Artificially Synthesized Probe
  source 1..120: mol_type = other DNA
atatctacctcatctgaactgaaaactctcttgcctcttgtactcaattggcctttaccgttcactgtcttctgacatctcttaaatagtgatgagtcattaatgcatctcgccaactag

SEQ ID NO: 5595 - DNA, 120 bp, synthetic construct
  misc_feature 1..120: note = Artificially Synthesized Probe
  source 1..120: mol_type = other DNA
atgattatttctcccaaagatcttggaatccaatggatctgagtcaggtcaagatgaatgaatacaaatatgagaagggcatagctcatcagaaattcagagaccctgggtgagcagggt

SEQ ID NO: 5596 - DNA, 120 bp, synthetic construct
  misc_feature 1..120: note = Artificially Synthesized Probe
  source 1..120: mol_type = other DNA
cttcattataagagtagcaggaaggcactgaagagtttaaattggcaagtaatgggagctgaactgtgcttttcaaagactactctgtctgctctctacagctgaagaaggactgaatat

SEQ ID NO: 5597 - DNA, 120 bp, synthetic construct
  misc_feature 1..120: note = Artificially Synthesized Probe
  source 1..120: mol_type = other DNA
ctagttacttccttcatctaaaccctgtttggaagccctgaagttcctgcctggggaagtcaagtaaaaatgggaggtatgggacttgatagcagcagatgtgcaaaggtcttacaggtt

SEQ ID NO: 5598 - DNA, 120 bp, synthetic construct
  misc_feature 1..120: note = Artificially Synthesized Probe
  source 1..120: mol_type = other DNA
tttctgcctcagatggaggtagtgaggtgtcagcaaagaatgtggattttagaactaggtagatttaacccaagtcctggttctatcattttctaacttaatggctttgctcaactcacc

SEQ ID NO: 5599 - DNA, 120 bp, synthetic construct
  misc_feature 1..120: note = Artificially Synthesized Probe
  source 1..120: mol_type = other DNA
gatgctgttggtccacaaacaaaggttcaggttctgtgtagcttaggatccggttgctaattggcttgaaacatttaaatcctcttgcatttagttgaatatgtggatatgcctattgag

SEQ ID NO: 5600 - DNA, 120 bp, synthetic construct
  misc_feature 1..120: note = Artificially Synthesized Probe
  source 1..120: mol_type = other DNA
tgagcagacttatagcttctcatagctgggcatatttctatttcctgggttatctgaatgcatttcttgtaaccctggcagaagaaaagtttctatcagccctccttgtaggaagaaaat

SEQ ID NO: 5601 - DNA, 120 bp, synthetic construct
  misc_feature 1..120: note = Artificially Synthesized Probe
  source 1..120: mol_type = other DNA
cacttactttattattttctctctttctgtatttaccaataaaaagagcattttcttacagaggcacaggaccgtgaccagaatcaggacattcacagttggcacagtatcggcgtctaa

SEQ ID NO: 5602 - DNA, 120 bp, synthetic construct
  misc_feature 1..120: note = Artificially Synthesized Probe
  source 1..120: mol_type = other DNA
acaccaaatacaccacatgccacacaacttacataccacatcatacacatcatacacacgacacacagcacataacacaccacatgccatacatcctacatacatcatacacaccataca

SEQ ID NO: 5603 - DNA, 120 bp, synthetic construct
  misc_feature 1..120: note = Artificially Synthesized Probe
  source 1..120: mol_type = other DNA
tctatataaaatacaggtatacaaaatatgtatattgaatcctagctagacagacggtatccccgggagaactcctccttgaggaatgggccatttgcttcataatagatgcgagatcat

SEQ ID NO: 5604 - DNA, 120 bp, synthetic construct
  misc_feature 1..120: note = Artificially Synthesized Probe
  source 1..120: mol_type = other DNA
ttttttggatctctctgcttggagatatctctgcctgtgtaggatcaaagcagagggaacctctgtgttttcaaataatgtttttcccctaaagcagcaccagtcctaattgagtaatag

SEQ ID NO: 5605 - DNA, 120 bp, synthetic construct
  misc_feature 1..120: note = Artificially Synthesized Probe
  source 1..120: mol_type = other DNA
gtggaaagcgagtgggatctgggttatgtcctcactgtgcctttttatgcacacaaagatttatctacccatgctatcaacttagtgtgtattatagtgaaatgccgtaaataatctcat

SEQ ID NO: 5606 - DNA, 120 bp, synthetic construct
  misc_feature 1..120: note = Artificially Synthesized Probe
  source 1..120: mol_type = other DNA
tccagcatagctggacagggcttcacactggacatgctcagtaaacttgagaacgtaaaacagatgatcgaattcctctgtactccagatgattttgctaaacagaattattacatattt

SEQ ID NO: 5607 - DNA, 120 bp, synthetic construct
  misc_feature 1..120: note = Artificially Synthesized Probe
  source 1..120: mol_type = other DNA
caaaatttcaggagatttaattaataaagtgagactcaggtctaggcaggtaattagaggggcctccaagaaggaaacaaagactttgtctaacacactatggtctggagacagatctcc

SEQ ID NO: 5608 - DNA, 120 bp, synthetic construct
  misc_feature 1..120: note = Artificially Synthesized Probe
  source 1..120: mol_type = other DNA
ccaggcaccagacactctcttaagcacttggatacagcagtgagcaacaaaaaaccttgccttccttggctttgaattccaatgcatagggaacaaaagcaaatgaatcagtaaaaatta

SEQ ID NO: 5609 - DNA, 120 bp, synthetic construct
  misc_feature 1..120: note = Artificially Synthesized Probe
  source 1..120: mol_type = other DNA
acatacactgaaaaaaaaatcccagttattctctgagtccttacatagaattgaagaccacctgcctgtttgtctttgcctgtttccttttcttctgttcttaactcctctccagctcct

SEQ ID NO: 5610 - DNA, 120 bp, synthetic construct
  misc_feature 1..120: note = Artificially Synthesized Probe
  source 1..120: mol_type = other DNA
tacaattccacacaatggaaagagaagagtgaacaaggcaggacatttagaagggaaagtggaggagcaaagtgaggaaatcttatcagaaaaggggtgatcagcaatgtttaatgttgt

SEQ ID NO: 5611 - DNA, 120 bp, synthetic construct
  misc_feature 1..120: note = Artificially Synthesized Probe
  source 1..120: mol_type = other DNA
gacttgccccttcaatggccacttcattcttccatgtgcgtttttccttgttctcaagttgtctcctcagcttgagtgtgaaaaacatttcatgctttttagtatcatccttaggataag

SEQ ID NO: 5612 - DNA, 120 bp, synthetic construct
  misc_feature 1..120: note = Artificially Synthesized Probe
  source 1..120: mol_type = other DNA
aatcctgcagtgaatttagatgttggtggacctctaagcaagggcctcattgagtataggaggggaaattataaatgtcaaattataagtgtgcaaattatacaagtgcacccctgcttg

SEQ ID NO: 5613 - DNA, 120 bp, synthetic construct
  misc_feature 1..120: note = Artificially Synthesized Probe
  source 1..120: mol_type = other DNA
ttgcttcctggacaacttagtcatattttatgaagatcctttgtcagtggctagaaaattggacatgtatgatatatggctggggaggactaatgggctcttccttcaacactctgtcaa

SEQ ID NO: 5614 - DNA, 120 bp, synthetic construct
  misc_feature 1..120: note = Artificially Synthesized Probe
  source 1..120: mol_type = other DNA
aaacaaaaccaaaaaaacataagatcgaatttgactcgaccgtttgtccctctgacacgtaatctaagatgtcagaagtatttgtgtcaaagaaggcaagtgggagagaccgggcctgag

SEQ ID NO: 5615 - DNA, 120 bp, synthetic construct
  misc_feature 1..120: note = Artificially Synthesized Probe
  source 1..120: mol_type = other DNA
tttcttactcagagataaaagttcattcagaaaacatcttgagttcccccaggctccgttacttccttctttgctcccatagcattacctggtgaaaagtgcttctgttgcaaaacttat

SEQ ID NO: 5616 - DNA, 120 bp, synthetic construct
  misc_feature 1..120: note = Artificially Synthesized Probe
  source 1..120: mol_type = other DNA
aatgaaataagccaggcacagaaagacaaataccacattatgtcacttgtgtagaatcttaaaaagtcaaaattacagaggcagagactagctcagggatggttgggggtgggttgggga

SEQ ID NO: 5617 - DNA, 120 bp, synthetic construct
  misc_feature 1..120: note = Artificially Synthesized Probe
  source 1..120: mol_type = other DNA
cagaaatctttagtaaaccaattgatgtaggcaaatgtcatgaatggatacacagtcatctcagggaatttacatggtgttaaagtatcactccagggatcatctgctggttgcaagggg

SEQ ID NO: 5618 - DNA, 120 bp, synthetic construct
  misc_feature 1..120: note = Artificially Synthesized Probe
  source 1..120: mol_type = other DNA
ggggtttgttgaacagactcttcttaattatacaggaaaacgtctagagcttgtggtctctcttctttagcgttgcttactgagattttttaaaaagatgcatcctgaatgatttcgagg

SEQ ID NO: 5619 - DNA, 120 bp, synthetic construct
  misc_feature 1..120: note = Artificially Synthesized Probe
  source 1..120: mol_type = other DNA
cttgtactaggtaggaaacatggtgcttaccctttactaaggagttgtgttacatgaaacagaaaacactatgactgaatcaaaaagaagcatcactctgcttgggtagtcagggaagaa

SEQ ID NO: 5620 - DNA, 120 bp, synthetic construct
  misc_feature 1..120: note = Artificially Synthesized Probe
  source 1..120: mol_type = other DNA
gtctgtctcataagaatgttttgagaaacaaatgagaaaacccaagtcaagctcttctagaagtgcatggcagatagtaaacagtcaatcaacattatcagtcctatcaccggtgtgggt

SEQ ID NO: 5621 - DNA, 120 bp, synthetic construct
  misc_feature 1..120: note = Artificially Synthesized Probe
  source 1..120: mol_type = other DNA
gtggacagtggatatcatatcacctgttatggtgaaaccatcaccaatacttactttacaattcccatcacacaccccagtgactttctgtgaaagagagatcagatatctactgtattt

SEQ ID NO: 5622 - DNA, 120 bp, synthetic construct
  misc_feature 1..120: note = Artificially Synthesized Probe
  source 1..120: mol_type = other DNA
agtggctataccattttgcattccccccaacaatgtacaaggattctgatttctacacatccttgtcaacatttgttttcctacatatatatatatatatatacacacacacacacacac

SEQ ID NO: 5623 - DNA, 120 bp, synthetic construct
  misc_feature 1..120: note = Artificially Synthesized Probe
  source 1..120: mol_type = other DNA
gaagctgcttaagctttctgactcttggttttgttatctgcaaaaggggaatagcagtgtctataccacagggataatatgaaggctaaatgagatcctgtaaagcaatctttccaagtc

SEQ ID NO: 5624 - DNA, 120 bp, synthetic construct
  misc_feature 1..120: note = Artificially Synthesized Probe
  source 1..120: mol_type = other DNA
attatagggtcctacttatagccattatgaacctcaaagccaaacaagatgaattttgtcaaaggactcctcctggctttagttgaacagaatcatcagactaggaagccattagtgacc

SEQ ID NO: 5625 - DNA, 120 bp, synthetic construct
  misc_feature 1..120: note = Artificially Synthesized Probe
  source 1..120: mol_type = other DNA
actgggttcaaactctttatttttcattgatctttagaaatcagggtccctcttttgaatacaccccttgctcaaggaaaggaaccatttatgttctggccttgattactgcacaatggc

SEQ ID NO: 5626 - DNA, 120 bp, synthetic construct
  misc_feature 1..120: note = Artificially Synthesized Probe
  source 1..120: mol_type = other DNA
tttaatcagagattcttttaaagaccaagttactgcagtcctgtcttgttcttctcctattttatactgatgtgctcagtaccttggtgtctttgtctgtcttttagggggaagggaacc

SEQ ID NO: 5627 - DNA, 120 bp, synthetic construct
  misc_feature 1..120: note = Artificially Synthesized Probe
  source 1..120: mol_type = other DNA
gcaggaacatgacaacatattagcttttaggtagacacccgtaggtcttaggatgtggtggaaaattgggtgtcattttttccagataatcactggcatttttataaaacatgaagccct

SEQ ID NO: 5628 - DNA, 120 bp, synthetic construct
  misc_feature 1..120: note = Artificially Synthesized Probe
  source 1..120: mol_type = other DNA
agatgcaaactcagaaatattaggaaatgtagctgtgatggattgggctataatcaacttgtgatgtgggagtttctcagaatctctttccctatatacatatggttccgagctagagct

SEQ ID NO: 5629 - DNA, 120 bp, synthetic construct
  misc_feature 1..120: note = Artificially Synthesized Probe
  source 1..120: mol_type = other DNA
gcgatgctgtaccccactcgacagacctttacttccatagcacctcacatcattcctgtaaaaggttgttactctataatattccaaatattgagagtttcactctcaagtttgaactct

SEQ ID NO: 5630 - DNA, 120 bp, synthetic construct
  misc_feature 1..120: note = Artificially Synthesized Probe
  source 1..120: mol_type = other DNA
cgtaaggcagagtgtaggttgtggattcgagatctttcttccttcttaatataaatgtttacggctataattttccttccaattactgtttttattgcattccctaagttctggtatgtt

SEQ ID NO: 5631 - DNA, 120 bp, synthetic construct
  misc_feature 1..120: note = Artificially Synthesized Probe
  source 1..120: mol_type = other DNA
ggcagtggtgacgtggaaatgtaaagaatttcgtgtactgaggatccagttaaaaatcacactggaaagagaaccacatatagtcaaggaaagaagaagtggcctacaaacctgtgatat

SEQ ID NO: 5632 - DNA, 120 bp, synthetic construct
  misc_feature 1..120: note = Artificially Synthesized Probe
  source 1..120: mol_type = other DNA
ttgccttcaacgatcctcaaagacttttgtgtttgaccaatatcaattaattacatcagtaaataactgcctgagccttgtacttctgtcctcccaagatccagaatgacttctgctttc

SEQ ID NO: 5633 - DNA, 120 bp, synthetic construct
  misc_feature 1..120: note = Artificially Synthesized Probe
  source 1..120: mol_type = other DNA
aggcagatgggaacgtggacagggagttagtgttttctcctaaatgccatggaagacattgatgtattttcaacagtgcagatagaaagcagtaaatggtttcaaaaatatcccaaacaa

SEQ ID NO: 5634 - DNA, 120 bp, synthetic construct
  misc_feature 1..120: note = Artificially Synthesized Probe
  source 1..120: mol_type = other DNA
ggaacacagcaggatgcaaactaagacgtgaaaactcattcttcgaagtcctttcagagtcctacctgcttctgtttatataccgcctacatttctgaaaattctagtgtaaaacaaaca

SEQ ID NO: 5635 - DNA, 120 bp, synthetic construct
  misc_feature 1..120: note = Artificially Synthesized Probe
  source 1..120: mol_type = other DNA
ataattttttatccaaatggggtcatgagagagggaagagtggtgctattaacattcacattgagacagatgaaaacattcacgtccagacagggaaacctggatgtgctgtcatcttat

SEQ ID NO: 5636 - DNA, 120 bp, synthetic construct
  misc_feature 1..120: note = Artificially Synthesized Probe
  source 1..120: mol_type = other DNA
tacattgcatttgttttaggtacagataagaggcattttaggtatagattaaaatctgtggtgaggaaatgtagtcaagaaaagggctttacttgcactggagaagacttcccctcatgc

SEQ ID NO: 5637 - DNA, 120 bp, synthetic construct
  misc_feature 1..120: note = Artificially Synthesized Probe
  source 1..120: mol_type = other DNA
atccctgaaatacgaattgcatgaattttatgctggaacaagctgcagagtgatcagtcacatttgcagccctgtggactatggctattggaccgtacaattaaaattaagtttgacatt

SEQ ID NO: 5638 - DNA, 120 bp, synthetic construct
  misc_feature 1..120: note = Artificially Synthesized Probe
  source 1..120: mol_type = other DNA
agaggcttatctagctagcctgagtcagttttgtgcctcggtgtgaaagctatttctagtaccattttgcttatagccaggaatagttcatatcaaaactgtggaccagagttcattttt

SEQ ID NO: 5639 - DNA, 120 bp, synthetic construct
  misc_feature 1..120: note = Artificially Synthesized Probe
  source 1..120: mol_type = other DNA
ctgaaacttgccagctgtaagatctggagtgtttcttttaaactgtaggccggtttcctcatctgtaggattatgtcacactatctaccctgatttcataaggtaatgctatgtgagaat

SEQ ID NO: 5640 - DNA, 120 bp, synthetic construct
  misc_feature 1..120: note = Artificially Synthesized Probe
  source 1..120: mol_type = other DNA
tctggattcaatgcaatttgcttacttatcctaagatttagaagctattttaagctgaaattctccacggctcccagaaggggtgtgatatgcagttttagcccaaacttaccttgccat

SEQ ID NO: 5641 - DNA, 120 bp, synthetic construct
  misc_feature 1..120: note = Artificially Synthesized Probe
  source 1..120: mol_type = other DNA
cgctaaatatatacaaatcaagagaggtttttgatgtcttaaaaggaaacgagtaactgactagagttattgcctaagacccaatatgcaattcagcttaacccacagggcacctgccat

SEQ ID NO: 5642 - DNA, 120 bp, synthetic construct
  misc_feature 1..120: note = Artificially Synthesized Probe
  source 1..120: mol_type = other DNA
tgaggaagtgctttgaaagtggacacaggatgacattagttaggcatgaggcataatactgctgggagaatacaggaaagtcattctccttcgacttcctcacattatagtttttgtaca

SEQ ID NO: 5643 - DNA, 120 bp, synthetic construct
  misc_feature 1..120: note = Artificially Synthesized Probe
  source 1..120: mol_type = other DNA
ctttgctgtttgtctactttttcccattttgtgctgagactcatctttccagcacaaacaccagggtgaggaattggaattttagtgctggaagtctccagaactatgatctagtgctca

SEQ ID NO: 5644 - DNA, 120 bp, synthetic construct
  misc_feature 1..120: note = Artificially Synthesized Probe
  source 1..120: mol_type = other DNA
tgtgaatttatacttctatgagcccatagatcctatgtgtatacttcctgtgagcccacatttcctccgatggtatacttcctgtgagcacacacttcttatctatgcacttcctataag

SEQ ID NO: 5645 - DNA, 120 bp, synthetic construct
  misc_feature 1..120: note = Artificially Synthesized Probe
  source 1..120: mol_type = other DNA
caaatgttccctaactgaaaggatgtattacagttgggcttcctctccctaggagacataattaaatttaaaagtgggcttgggttgtttgtagtatgcagttttttacaggggaaccac

SEQ ID NO: 5646 - DNA, 120 bp, synthetic construct
  misc_feature 1..120: note = Artificially Synthesized Probe
  source 1..120: mol_type = other DNA
agtcaaaatccatctgtttctccactgcctgtacatgcctttctctttacaatacagttagaccatttgagtcaccttctctagagagataacacaaaagcagaatcacagacatgtgca

SEQ ID NO: 5647 - DNA, 120 bp, synthetic construct
  misc_feature 1..120: note = Artificially Synthesized Probe
  source 1..120: mol_type = other DNA
ggaaatagcaaattagagaatgcttgattatggcattgaagatgctttctgggatgaagacattatttggaaaatctccagatgctcaaagcttgaggaatgctgggatcaggcaggtaa

SEQ ID NO: 5648 - DNA, 120 bp, synthetic construct
  misc_feature 1..120: note = Artificially Synthesized Probe
  source 1..120: mol_type = other DNA
ggaacagaaccaatagaaggtagatatagacagatacagatatataagaggggatttatcagaggagttgtctcatatgcttatggaggctgagtcgcatgcaggccatctgcaagctat

SEQ ID NO: 5649 - DNA, 120 bp, synthetic construct
  misc_feature 1..120: note = Artificially Synthesized Probe
  source 1..120: mol_type = other DNA
ctgacggattaccacaagtaaacatgtaaacatgggtaacacttcactatagtatagttcatgccacttgcctgatagaaaaccatggagcttctcttaggaatccattttggttttggg

SEQ ID NO: 5650 - DNA, 120 bp, synthetic construct
  misc_feature 1..120: note = Artificially Synthesized Probe
  source 1..120: mol_type = other DNA
agtcagcttgttgccttctggcgaattaaaatttcattaaacttttcagttaagaaaatacagcttgttgcaaaaacaccatatgcaccttacgactcttttccccacccctcctcagtg

SEQ ID NO: 5651 - DNA, 120 bp, synthetic construct
  misc_feature 1..120: note = Artificially Synthesized Probe
  source 1..120: mol_type = other DNA
ataaacacagttccatgtttactgtttataatacgtccccccaaatatgtgcagaagtggaatgtgaagacaataaacaacttttttgttaggttgggggcaggggattctgaaagctac

SEQ ID NO: 5652 - DNA, 120 bp, synthetic construct
  misc_feature 1..120: note = Artificially Synthesized Probe
  source 1..120: mol_type = other DNA
tgttttgcggattgccagataagtcttttctgaccgttcccaatcctgaaagttctaacatggagactgcttggtctttgaaggaggtgaattgcagtaaacaaatcatgaattatcatc

SEQ ID NO: 5653 - DNA, 120 bp, synthetic construct
  misc_feature 1..120: note = Artificially Synthesized Probe
  source 1..120: mol_type = other DNA
gggagagtcattcaatgttcagaatagaaagatttagaagaatggcaaagttgagcatcatacctttatgaagtgaattgtgtccttctcaaaatccttgttttagccctcacctccagt

SEQ ID NO: 5654 - DNA, 120 bp, synthetic construct
  misc_feature 1..120: note = Artificially Synthesized Probe
  source 1..120: mol_type = other DNA
aagctgagcctggacttctgacccactggaactggaagataatgcatttgcattgtcttacactggtaggtttataggattttgtcacattgaaatggagagtgaatgtgtcagtgttta

SEQ ID NO: 5655 - DNA, 120 bp, synthetic construct
  misc_feature 1..120: note = Artificially Synthesized Probe
  source 1..120: mol_type = other DNA
ttggttttttgtgaagccatcccccatttcctggaaccaaaatagatcccacagcacttcctgtgtaccctgatacctaacaaaatgttttaaagattgctttagctggagattcttaca

SEQ ID NO: 5656 - DNA, 120 bp, synthetic construct
  misc_feature 1..120: note = Artificially Synthesized Probe
  source 1..120: mol_type = other DNA
ttcactagctcacttccttcctgcccagttctcattctctcgtccagtcttttctttgtcttcctgtggatgaatacatgcataaacataagaataaaggcaaaagtctcaatggaatct

SEQ ID NO: 5657 - DNA, 120 bp, synthetic construct
  misc_feature 1..120: note = Artificially Synthesized Probe
  source 1..120: mol_type = other DNA
ctcctggcatggccacgtctgtcacgcgtgatgctcacagcctgctcactactagaaggctttaattttctgaagcagtgatatttaatttatttgaaatttcaaatgtcattaaaggag

SEQ ID NO: 5658 - DNA, 120 bp, synthetic construct
  misc_feature 1..120: note = Artificially Synthesized Probe
  source 1..120: mol_type = other DNA
gctccccaccgagagcattttaggccctgtgcatagcaggattataaaaaagtcatatttaagacttgatcatgcttctggcatttggaaggaaatggatggatgaagaagaaacagaaa

SEQ ID NO: 5659 - DNA, 120 bp, synthetic construct
  misc_feature 1..120: note = Artificially Synthesized Probe
  source 1..120: mol_type = other DNA
aagaatgtgccatttggacatttcaccttcaatttggaacttaaaaatttagtccataaacaggaaataaacagaacttttgagagctccctctctcatttggcaaggccccccacttgc

SEQ ID NO: 5660 - DNA, 120 bp, synthetic construct
  misc_feature 1..120: note = Artificially Synthesized Probe
  source 1..120: mol_type = other DNA
actgatctgattttgtcactgcattcctgtgcttgtaagcctgtgaccagcaatactgtcacttcttagaaaacattttggtctcgacacggttcacacaggcaatgccccgccatcatt

SEQ ID NO: 5661 - DNA, 120 bp, synthetic construct
  misc_feature 1..120: note = Artificially Synthesized Probe
  source 1..120: mol_type = other DNA
tacagagcaggcctcaatccataaccttggtattcttgtgttgagttttatgcccgctgcaatgctagactgagatgcctcttgtatggaaaatatttcttaggagtttagcaaatttat

SEQ ID NO: 5662 - DNA, 120 bp, synthetic construct
  misc_feature 1..120: note = Artificially Synthesized Probe
  source 1..120: mol_type = other DNA
tttgaacgagtctgccttctgggtcaagtgaacttttactctgggattatagaaagcaaagtaagtgatctcaactccctgccgcttatacaagaggggagttgttacttttactttatt

SEQ ID NO: 5663 - DNA, 120 bp, synthetic construct
  misc_feature 1..120: note = Artificially Synthesized Probe
  source 1..120: mol_type = other DNA
ttttgaactgagaaccagggccattcctctgactgtaaagctttgtagaatatattcaattctgcatgttactgatgggtgctaaccttttgtgtgtgtttgtgtgatgttcgggcttaa

SEQ ID NO: 5664 - DNA, 120 bp, synthetic construct
  misc_feature 1..120: note = Artificially Synthesized Probe
  source 1..120: mol_type = other DNA
tctgatggtctagtagccttgtgccaggagaacagttcctatgtagaaactggtcagcattttcttctgaaaacgtaatcatcattgcagtgagtataaacttccatttatatgccagga

SEQ ID NO: 5665 - DNA, 120 bp, synthetic construct
  misc_feature 1..120: note = Artificially Synthesized Probe
  source 1..120: mol_type = other DNA
gggaaacattaatataccctctcccaaaatacaaatctcttttagactgttgccagcagtctcaggaatgatcaatactagtggttgagactagagggaccattaagtaagtggagttga

SEQ ID NO: 5666 - DNA, 120 bp, synthetic construct
  misc_feature 1..120: note = Artificially Synthesized Probe
  source 1..120: mol_type = other DNA
acatgtttttgtatctcacatatgtgacacatccttatctaaaatttcagagccaagagaaaagaaggaatcagatagtgataacccagtgaggtatctgctgcacagtctgcctctcca

SEQ ID NO: 5667 - DNA, 120 bp, synthetic construct
  misc_feature 1..120: note = Artificially Synthesized Probe
  source 1..120: mol_type = other DNA
tacgttctctttttgtatacaaagactgttaatttagagacctagagctttcagatcttggaggggttcttctatctcaataactacccaacccccatgttcttttctcagagttcatgg

SEQ ID NO: 5668 - DNA, 120 bp, synthetic construct
  misc_feature 1..120: note = Artificially Synthesized Probe
  source 1..120: mol_type = other DNA
agtgttctcccacccatggtctgtctttgattacaggtgttgaaatgttaggtctgatctgctgttctctcttctcactcctcttcctgtggatttttaccttttttttcatttagtgtt

SEQ ID NO: 5669 - DNA, 120 bp, synthetic construct
  misc_feature 1..120: note = Artificially Synthesized Probe
  source 1..120: mol_type = other DNA
cagtgttttattgtgctgcaaagtcacctgtttccacaagtgcttccccaatgcaggctttctaaagtcatcatggaaagtaaattattttcccctaacaaactatgctaaaatgggcag

SEQ ID NO: 5670 - DNA, 120 bp, synthetic construct
  misc_feature 1..120: note = Artificially Synthesized Probe
  source 1..120: mol_type = other DNA
cagtcaggaggctcccacaagtgcagctgtccagcactgcaccacacctttctcttttctccaaaagaaatagttttatataatagatatatccaaaaatgtagaggtcataaaaacaac

SEQ ID NO: 5671 - DNA, 120 bp, synthetic construct
  misc_feature 1..120: note = Artificially Synthesized Probe
  source 1..120: mol_type = other DNA
cagtctgcttgtggaccaggagtgtcttgggaatgggaaccaaactaatccaaagatgaagttcaactctttggttcttatgaagtgaataacccacaatgccatagacattcatttttc

SEQ ID NO: 5672 - DNA, 120 bp, synthetic construct
  misc_feature 1..120: note = Artificially Synthesized Probe
  source 1..120: mol_type = other DNA
gactctgtgtgttgctagtgttgagtcgagctggacacctggaatctgtgcgttgctcatgtttggggtttgtacttcagttattttacttgctcatggctttttgttgtaattgttttt

SEQ ID NO: 5673 - DNA, 120 bp, synthetic construct
  misc_feature 1..120: note = Artificially Synthesized Probe
  source 1..120: mol_type = other DNA
ccctccttcctccaggaattaagacattgaacattctgtctcatttccatgatttttcaaacagtgccaaaagagccagcaaatgactgtgcgattatctccaccaacctatttaaaaca

SEQ ID NO: 5674 - DNA, 120 bp, synthetic construct
  misc_feature 1..120: note = Artificially Synthesized Probe
  source 1..120: mol_type = other DNA
tggttttttgttcttgcgatagtttactgagaatgatgatttccaatttcatccatgtccctacaaaggacatgaactcatcattttttatgaccgcatagtattccatggtgtatatgt

SEQ ID NO: 5675 - DNA, 120 bp, synthetic construct
  misc_feature 1..120: note = Artificially Synthesized Probe
  source 1..120: mol_type = other DNA
tggacccttcttccttcttttaattacagcgttattaaactcctccaggttgacactttctttcattctctattttagatttgtcaatcagaggtgctccatgaagcagctccttagtgc

SEQ ID NO: 5676 - DNA, 120 bp, synthetic construct
  misc_feature 1..120: note = Artificially Synthesized Probe
  source 1..120: mol_type = other DNA
agtggtattttctaggaagccactcagattagtgccaaccttctgcagaaatacagagctataggtgctgggtgagttgtgagcaaagccatgttcagaatatgttaagtttctattttt

SEQ ID NO: 5677 - DNA, 120 bp, synthetic construct
  misc_feature 1..120: note = Artificially Synthesized Probe
  source 1..120: mol_type = other DNA
tgaagaccatgacaccttagaagcccagacagacgagagggaaaacagcctagaagaccttgccttattatttctactctagaaagatgcacgggatcaataaagtaaatgagctgtttc

SEQ ID NO: 5678 - DNA, 120 bp, synthetic construct
  misc_feature 1..120: note = Artificially Synthesized Probe
  source 1..120: mol_type = other DNA
ttaagttgcagcaccgatacataccagctatgggactttagagagggcattttctctgtgtcttgatttccttcattttaaactgaggacaatcatatctaactcctgtgataattgggt

SEQ ID NO: 5679 - DNA, 120 bp, synthetic construct
  misc_feature 1..120: note = Artificially Synthesized Probe
  source 1..120: mol_type = other DNA
tggcctagtctaatatcccttatccttcctaactttcctaagtttccagtcctaacttccctctccacctgcaccttggacatgatgattgacactgtgacttgcttctcaaaatcagct

SEQ ID NO: 5680 - DNA, 120 bp, synthetic construct
  misc_feature 1..120: note = Artificially Synthesized Probe
  source 1..120: mol_type = other DNA
gtcagcttgttttgacctaaagcaaaaaccattattctctgagtttgtaggtaagcttccacccaaaatattgttgtgagaccttggatttggtgatcttgggctagctgcctaacttct

SEQ ID NO: 5681 - DNA, 120 bp, synthetic construct
  misc_feature 1..120: note = Artificially Synthesized Probe
  source 1..120: mol_type = other DNA
tgtgccaggggctgtggagtattctagaaatgaaacaaggttcctgctctgagtttttatgttgacgagaaggaaagggtgaataaacaaatacattaacaagaaaatatcaaggagcga

SEQ ID NO: 5682 - DNA, 120 bp, synthetic construct
  misc_feature 1..120: note = Artificially Synthesized Probe
  source 1..120: mol_type = other DNA
ctgactgtgccagcgtgggacgaatgagactcatcacaatttgttttagggatggagatttagaagaatgggtggagaacattctaaatggaatctatggacagggtttttattcttagt

SEQ ID NO: 5683 - DNA, 120 bp, synthetic construct
  misc_feature 1..120: note = Artificially Synthesized Probe
  source 1..120: mol_type = other DNA
cagttcagtagtgtgaagtagatccacacagctggaaaccagatctccagtgcacggcacatttttatgctggaaatacctctgttagaaataaatccttggaattgatacatacacaaa

SEQ ID NO: 5684 - DNA, 120 bp, synthetic construct
  misc_feature 1..120: note = Artificially Synthesized Probe
  source 1..120: mol_type = other DNA
atgtcttatgcttgaattattctttatacttaatactgcccatcacataaaagacgttgtcacgaacccagtgttgttggcagaattttggctcctatgatctctgtcacctggtgtcac

SEQ ID NO: 5685 - DNA, 120 bp, synthetic construct
  misc_feature 1..120: note = Artificially Synthesized Probe
  source 1..120: mol_type = other DNA
tggaaatcggttgcattctcaggaaaataattcagaagtgcagtatcctgtggaccactgcatatttcctgaatcagtatctttgtggatatgggaaggggatgtatgtatatgtttggt

SEQ ID NO: 5686 - DNA, 120 bp, synthetic construct
  misc_feature 1..120: note = Artificially Synthesized Probe
  source 1..120: mol_type = other DNA
gatatacacaagaaatataggcaggtgctggctacggatgcatagaaatggatggcttcaatacaaggtttttggttgatgtggaacaatattaccgcatagataaagaagccccttcaa

SEQ ID NO: 5687 - DNA, 120 bp, synthetic construct
  misc_feature 1..120: note = Artificially Synthesized Probe
  source 1..120: mol_type = other DNA
tttgctcaggaagcaaagaagtcactgttgaacaaactctgaaataaccaaggcctccaggccccacacctcttttaaagtgctttcatgctgaccatctttttttttttttccttctat

SEQ ID NO: 5688 - DNA, 120 bp, synthetic construct
  misc_feature 1..120: note = Artificially Synthesized Probe
  source 1..120: mol_type = other DNA
aagaaaattaggaaatgtgatatttcttgcacacctgaatttgtaggctacatgcagaacaaaggacaaaatgagagtccaagaaggaagtgcagtgctttaagggttgagtgaatggag

SEQ ID NO: 5689 - DNA, 120 bp, synthetic construct
  misc_feature 1..120: note = Artificially Synthesized Probe
  source 1..120: mol_type = other DNA
accgacaattcttggtttaccaacaacctcttttaaaaattgagactctcataagaggatttcggtttaaaaatgttgaaaggtctttttgtatagaaacagaatgaagtacaggatata

SEQ ID NO: 5690 - DNA, 120 bp, synthetic construct
  misc_feature 1..120: note = Artificially Synthesized Probe
  source 1..120: mol_type = other DNA
ttccagtaaagctttaagctcctgagattatgaccatttctttattttggttttccactcgtagaaactgtctttcagataagagaggaacactactgtccagagagtggtgacaaggca

SEQ ID NO: 5691 - DNA, 120 bp, synthetic construct
  misc_feature 1..120: note = Artificially Synthesized Probe
  source 1..120: mol_type = other DNA
aaatttattttggaataattatggattgctaagggggacagaaattaaggccataactctacaaattgtaaccaccaggattgcctaggtaacagctccaagatctccagggctccaaga

SEQ ID NO: 5692 - DNA, 120 bp, synthetic construct
  misc_feature 1..120: note = Artificially Synthesized Probe
  source 1..120: mol_type = other DNA
tcttgcctctgagccaccttttcagtgcatgactttcactgccctaaaataacctatagcaagaaaatcccaaaagaacagtgttcattcactgcttctaagtgacaatcagaacttctt

SEQ ID NO: 5693 - DNA, 120 bp, synthetic construct
  misc_feature 1..120: note = Artificially Synthesized Probe
  source 1..120: mol_type = other DNA
atggttagtgtctgtgtttctcagagcaggatatgctctttaatctaggatgcaaagcccatatgaggtaagaaaaagaatgtagaaccatttggaaaacacccatttttcccctgggag

SEQ ID NO: 5694 - DNA, 120 bp, synthetic construct
  misc_feature 1..120: note = Artificially Synthesized Probe
  source 1..120: mol_type = other DNA
gagaagatcagcaccaagctagcctaatggcagacagcttctgggatttcaatttttgcctggattcacagaatagtaaaacctcttgggaattcattgcttttttttcagttgtcagaa

SEQ ID NO: 5695 - DNA, 120 bp, synthetic construct
  misc_feature 1..120: note = Artificially Synthesized Probe
  source 1..120: mol_type = other DNA
tttctagatgttagaggactctgacaatgtcttgttgaaatcatacttgggtctggctctggactctaaaaagctcttccttaatgacatcagttgtgatggatcagagtcacttgtaga

SEQ ID NO: 5696 - DNA, 120 bp, synthetic construct
  misc_feature 1..120: note = Artificially Synthesized Probe
  source 1..120: mol_type = other DNA
attggtagcaagtgggaataagagcacagttgtttaaacaaacccaagaccattctacttgctgtggctggaaagtgaagagtattggaatcactgttttaagtggctttgctgtttaga

SEQ ID NO: 5697 - DNA, 120 bp, synthetic construct
  misc_feature 1..120: note = Artificially Synthesized Probe
  source 1..120: mol_type = other DNA
aatttacaatctagtaggggtgagggacaaattacaatctagtgggggtgagagacaaatagtaactgtgtaatgtgggggtctctaagtctgatattgcttagctatgcagttttctag

SEQ ID NO: 5698 - DNA, 120 bp, synthetic construct
  misc_feature 1..120: note = Artificially Synthesized Probe
  source 1..120: mol_type = other DNA
atttgaatttgtatctttccacaacctagctatgtttgcttaggcaaatttcaacctgcctgaatcagatttcctccaatttaagatgaagctggtaatacccctacgtagtgtttgggg

SEQ ID NO: 5699 - DNA, 120 bp, synthetic construct
  misc_feature 1..120: note = Artificially Synthesized Probe
  source 1..120: mol_type = other DNA
ttgatatggagggataaagaattgaaggcaagagaggcctcctctttccagaatttgcaaaatcaatataacttgggctttcactgatatactaggtgcatgactaacattggctagagc

SEQ ID NO: 5700 - DNA, 120 bp, synthetic construct
  misc_feature 1..120: note = Artificially Synthesized Probe
  source 1..120: mol_type = other DNA
ttgcctgagccaagtcactgactggcagggcttgtgtatgtgaaatacaaacatacttgtaagatttataaacgattacatggtcacgggcatcttaatggaaagaagactgctaatcat

SEQ ID NO: 5701 - DNA, 120 bp, synthetic construct
  misc_feature 1..120: note = Artificially Synthesized Probe
  source 1..120: mol_type = other DNA
tttctacttgataaagccacctacaaataacttctcccatcctccaaatcccacaaatgtgatccctactacaattagctaacacctagtcactagttaatctggtagaccttccagttc

SEQ ID NO: 5702 - DNA, 120 bp, synthetic construct
  misc_feature 1..120: note = Artificially Synthesized Probe
  source 1..120: mol_type = other DNA
attacctgtgcgtgcagacctgtacaagacatcttggaagtgataggaaaaaacagcattctcgtgtgtagtagatagattcctattttcacacccttctctagatatctgtcagatgat

SEQ ID NO: 5703 - DNA, 120 bp, synthetic construct
  misc_feature 1..120: note = Artificially Synthesized Probe
  source 1..120: mol_type = other DNA
cacttcctatggtaagggcagcttatgggtgtttgcaggtgcaaggcaaagagacacaaaaatctagatgtcagaaagaaaatataaccagggggtgaaatagaagggaattatcataaa

SEQ ID NO: 5704 - DNA, 120 bp, synthetic construct
  misc_feature 1..120: note = Artificially Synthesized Probe
  source 1..120: mol_type = other DNA
aataccatttctcgaaaagacgatccttcctccttgaaatatggcagtaacaaattatagcacatgtgatataaatgacttgcaaagccacacttccaacctgcattaggaatggacggt

SEQ ID NO: 5705 - DNA, 120 bp, synthetic construct
  misc_feature 1..120: note = Artificially Synthesized Probe
  source 1..120: mol_type = other DNA
atgagtaaatgaattcagtgaatttctgtgttattcatactcatcctactttcatggagtttttatgaaaaggatgatgaccttcagccatggggagcattgcactgcctccttccaagg

SEQ ID NO: 5706 - DNA, 120 bp, synthetic construct
  misc_feature 1..120: note = Artificially Synthesized Probe
  source 1..120: mol_type = other DNA
tcaagcagaagatatgtaaagctctaaatacagagagtgatgatttattcagagaaataagagaatccatggggaataccagactctagcttccttgtggacaagaagcattcctgtgcc

SEQ ID NO: 5707 - DNA, 120 bp, synthetic construct
  misc_feature 1..120: note = Artificially Synthesized Probe
  source 1..120: mol_type = other DNA
gggttgccttgaggcttagtcacccttcgcccattctgtcttactactacagagggtgagagactggacaaaggggccctcagtgtaattttcacttcacatattttattattatttttt

SEQ ID NO: 5708 - DNA, 120 bp, synthetic construct
  misc_feature 1..120: note = Artificially Synthesized Probe
  source 1..120: mol_type = other DNA
ctcctaaaatgcacgttaatattgatgctgtttcatccgggttcttttcctttctacattgcctcacctggtttccactattccctagtaactaggtaggagtcatttttttagatgaat

SEQ ID NO: 5709 - DNA, 120 bp, synthetic construct
  misc_feature 1..120: note = Artificially Synthesized Probe
  source 1..120: mol_type = other DNA
accaattcaaaatcaaacacggaacacatacatcggtcatcagtcacataccatagattcttatttaatcagtccagggtgtagcttggctttggaaggctttttctttcctggctcctt

SEQ ID NO: 5710 - DNA, 120 bp, synthetic construct
  misc_feature 1..120: note = Artificially Synthesized Probe
  source 1..120: mol_type = other DNA
cttagaattggtttcctttaaaaaaaaaaattgtgggcttctcttccccatcaaaatgacatccctttgagattaatgcaggaagcagagggcacggtggaacttgtctcgctgaatatt

SEQ ID NO: 5711 - DNA, 120 bp, synthetic construct
  misc_feature 1..120: note = Artificially Synthesized Probe
  source 1..120: mol_type = other DNA
ctgggtctctcctcatagggtttacagtcagttaacagcaatgcacacaaaaggatgtattgaaatagatccattggaggagtaaaaatacggtgacaataaggggacagagaagaaaac

SEQ ID NO: 5712 - DNA, 120 bp, synthetic construct
  misc_feature 1..120: note = Artificially Synthesized Probe
  source 1..120: mol_type = other DNA
aatcataacaatacattttggagagtattaaatacggaaatgagctaaagttagctcatgcccggcatataatgtttgcagctagcatttagagtgcatggggctgctgatgtgttgatg

SEQ ID NO: 5713 - DNA, 120 bp, synthetic construct
  misc_feature 1..120: note = Artificially Synthesized Probe
  source 1..120: mol_type = other DNA
ccactcaagatccctgcttatttccagcttatagcatagaatgagaagccattcacccttgtgtagagtgatgctgggaagaattaattattcaatgacttaagggtgcttctgatatca

SEQ ID NO: 5714 - DNA, 120 bp, synthetic construct
  misc_feature 1..120: note = Artificially Synthesized Probe
  source 1..120: mol_type = other DNA
tggcatatttctctggggatcatgtatatacactgatatggtttcaatcttggaggaatcctgattctgaaatcctagagtccaaatctgatgatttcagggctgaacagttcccttctt

SEQ ID NO: 5715 - DNA, 120 bp, synthetic construct
  misc_feature 1..120: note = Artificially Synthesized Probe
  source 1..120: mol_type = other DNA
agagttccatttgtaaacatttttgaatgaaggtctctaaagaagcagccaaagggcaggatgtcccacaacacaaaataagacatcctccttatgctgtctctgaccaaagtcctcatg

SEQ ID NO: 5716 - DNA, 120 bp, synthetic construct
  misc_feature 1..120: note = Artificially Synthesized Probe
  source 1..120: mol_type = other DNA
caaaagtggggcctttgcgtatccagattcgaagaatttgatgagggcattatcaagatgaaaatgtggaatattgttgttggcaaagccacattaacacacccacatagcacacatata

SEQ ID NO: 5717 - DNA, 120 bp, synthetic construct
  misc_feature 1..120: note = Artificially Synthesized Probe
  source 1..120: mol_type = other DNA
aactttcactactggaatgcctcatagcatttacagagatccagaaatggaggctgcaaaaattatgactaggtaagagttggctagagacaaggaagcatttccttggccaaaaataga

SEQ ID NO: 5718 - DNA, 120 bp, synthetic construct
  misc_feature 1..120: note = Artificially Synthesized Probe
  source 1..120: mol_type = other DNA
cgtgaaaaaaacgtgtgtcatttcagcctattcagtgcattctgcagcacctgctagaatatttatcctccttctctttccacttaagtcctacatttacataaaggctactggagggtt

SEQ ID NO: 5719 - DNA, 120 bp, synthetic construct
  misc_feature 1..120: note = Artificially Synthesized Probe
  source 1..120: mol_type = other DNA
ttgcttgaactctggggccaggctgcagaattgagtgccagcttttcttcttactaactggataacttctggcaaaatttaaaatagcagtaattgcagtatctacctgataatggtgtt

SEQ ID NO: 5720 - DNA, 120 bp, synthetic construct
  misc_feature 1..120: note = Artificially Synthesized Probe
  source 1..120: mol_type = other DNA
agggaagtgttaccagttgatgttgtttatgtaatgctaggatcagccaaagagtgaacatcctgctctttcaaaatgaattgttggtttgtaagggtgtttgctgaccttttcaccagt

SEQ ID NO: 5721 - DNA, 120 bp, synthetic construct
  misc_feature 1..120: note = Artificially Synthesized Probe
  source 1..120: mol_type = other DNA
acagccacattccagaacatgctgattttctcatttcaggacagtttccccaggcgctttcaacttcttataccttaaaagaaataccaaatgcattactcatgtctgtgcagtattccc

SEQ ID NO: 5722 - DNA, 120 bp, synthetic construct
  misc_feature 1..120: note = Artificially Synthesized Probe
  source 1..120: mol_type = other DNA
caccgtggtcagggtcagggctgacacagggccaggggaagagagtttgcaagtagcaattcaatacttttatttcagaatgtgtagcaagtatttgacatatatgtataaacaaaaatc

SEQ ID NO: 5723 - DNA, 120 bp, synthetic construct
  misc_feature 1..120: note = Artificially Synthesized Probe
  source 1..120: mol_type = other DNA
caccaaagcattaagccaggatctattttacatcagattgtttgaaatagtgatgtaagaaatgtgctcttgatgtggagcctccagaaaaggacttgatgtgctcatgggttctcatga

SEQ ID NO: 5724 - DNA, 120 bp, synthetic construct
  misc_feature 1..120: note = Artificially Synthesized Probe
  source 1..120: mol_type = other DNA
aggttatatcaagtggatttatagaactgagaaacagttgagaggctctgtggtgtgcggatggttttggaggttaaacaaaacaaagaatactaataccagagttccttccttgaagcc

SEQ ID NO: 5725 - DNA, 120 bp, synthetic construct
  misc_feature 1..120: note = Artificially Synthesized Probe
  source 1..120: mol_type = other DNA
acttttgaggaattttctgaatagtaggctgaattcttcaaccagccaaccaaacaacagcatgaatctatcttatactagatacgtactgcttcttctaaaaggctgcagagagggcag

SEQ ID NO: 5726 - DNA, 120 bp, synthetic construct
  misc_feature 1..120: note = Artificially Synthesized Probe
  source 1..120: mol_type = other DNA
tgcgggttacttcatctgaaagaaactttgagctctgaagctatgtctagcacatgttaagtaagagtggtccttggaaatttcaagcgttggtttgcatggaagcacaaatcatttgac

SEQ ID NO: 5727 - DNA, 120 bp, synthetic construct
  misc_feature 1..120: note = Artificially Synthesized Probe
  source 1..120: mol_type = other DNA
tacaacaagtcctgtcaccctgaactgcccaggcttacagagtaccttcaaagatgtgaaggggcagcttatctttcaaggtaaccaaaatatcatcttgatattaaatcagattacttg

SEQ ID NO: 5728 - DNA, 120 bp, synthetic construct
  misc_feature 1..120: note = Artificially Synthesized Probe
  source 1..120: mol_type = other DNA
tagatatttcagaaaggttttcagcagtcactgtttctttgcccaacaatacacatcatcatggttctctactccctgaacctgattcagctgtgatagtggataaccattttcacacac

SEQ ID NO: 5729 - DNA, 120 bp, synthetic construct
  misc_feature 1..120: note = Artificially Synthesized Probe
  source 1..120: mol_type = other DNA
ttgccttggagctcacagcctttcacctgtgctttatattcttgtacatttcaagaactagagttccaaaatccggtttgctagacttgtgctatggtttaaatgtatgttctccctcaa

SEQ ID NO: 5730 - DNA, 120 bp, synthetic construct
  misc_feature 1..120: note = Artificially Synthesized Probe
  source 1..120: mol_type = other DNA
tttcatggtagtcttgaattagtgataaacagagtttgaccatatgtgtggataacatgtacaggtcttgattgaaactcaagtttgaagagcgtttgctgggtgccaggcataaaaacg

SEQ ID NO: 5731 - DNA, 120 bp, synthetic construct
  misc_feature 1..120: note = Artificially Synthesized Probe
  source 1..120: mol_type = other DNA
ttaattttctctagatgagtgaggaaaaaaaaaatgaagactccttactctgcttgattcagttaccatggggatagaacatcttttcgggagaacctctgtgacatggcacatgagccc

SEQ ID NO: 5732 - DNA, 120 bp, synthetic construct
  misc_feature 1..120: note = Artificially Synthesized Probe
  source 1..120: mol_type = other DNA
gtgctaggcaccagggatttgatgatgggcaaatatagaactaatgatacccagtcagagagagagataagaatcaagtgtaactacataagcaaatgtaaaaatgtaatggggacacac

SEQ ID NO: 5733 - DNA, 120 bp, synthetic construct
  misc_feature 1..120: note = Artificially Synthesized Probe
  source 1..120: mol_type = other DNA
aaaagagaggtatcaaggatgactgctaagttctgtgctctggataaaaatgaaactcaactttgaggaaactgtgtactctaaatgtttctgcattggtctcccaggccattccaatca

SEQ ID NO: 5734 - DNA, 120 bp, synthetic construct
  misc_feature 1..120: note = Artificially Synthesized Probe
  source 1..120: mol_type = other DNA
tacctctcttgaccttgccttctttcacaatggatactccaattacgtgttatccaggttcgttttggcttttacgattgtttaattctactttttcaatcccacttcctttacccagta

SEQ ID NO: 5735 - DNA, 120 bp, synthetic construct
  misc_feature 1..120: note = Artificially Synthesized Probe
  source 1..120: mol_type = other DNA
ggcatcatgtctgcaaggtgctctttcagaaattccagtaagatccaaaagcatcttgccaatgaaactagaaaccatttgataggttcgatctggacaatttttgtcttatgccagatg

SEQ ID NO: 5736 - DNA, 120 bp, synthetic construct
  misc_feature 1..120: note = Artificially Synthesized Probe
  source 1..120: mol_type = other DNA
aagttccttatctccttgaatctctcttttacacctagtgaatgggatgacagtttccttcaaccagtttcaaggatccagtcagataatagatggtaaagtgagccctgtgctattggt

SEQ ID NO: 5737 - DNA, 120 bp, synthetic construct
  misc_feature 1..120: note = Artificially Synthesized Probe
  source 1..120: mol_type = other DNA
ggagtgacttttgtccctatgaatgatgccaaattgatagtttaaaaattgatgggtttaacccaacaatgaagagactgcaactaatcagtccattctttccttctgcaagggtccttg

SEQ ID NO: 5738 - DNA, 120 bp, synthetic construct
  misc_feature 1..120: note = Artificially Synthesized Probe
  source 1..120: mol_type = other DNA
ccacttttgctctgactggaccacttccacctcttggtagccattgctaaggttgtactttgtgttcaggatggtactggtaaagacatatttcctctcctattgcaattctttgaggaa

SEQ ID NO: 5739 - DNA, 120 bp, synthetic construct
  misc_feature 1..120: note = Artificially Synthesized Probe
  source 1..120: mol_type = other DNA
gatggtatgcacgaagcacatggaaaattctgtggaaagacaagaggaataagctatggcccccactcttaataggaagtaggtaaagatttgctctgcaaggaatgataatcaacaaac

SEQ ID NO: 5740 - DNA, 120 bp, synthetic construct
  misc_feature 1..120: note = Artificially Synthesized Probe
  source 1..120: mol_type = other DNA
gcatattgagctgtttcattattttctactctgctttaaacttgaatcagtatagaaccctcccacattcttgacagggtcctctttactcaagatcttgggatcacaggtttgatctgg

SEQ ID NO: 5741 - DNA, 120 bp, synthetic construct
  misc_feature 1..120: note = Artificially Synthesized Probe
  source 1..120: mol_type = other DNA
aagtagataagtaccatcagaacaagaaactctgtctggattggaatggtgttaagggcatcttgatatgttattcctgcttaagtgactcttaccttccatgaggttggttgtgaatcc

SEQ ID NO: 5742 - DNA, 120 bp, synthetic construct
  misc_feature 1..120: note = Artificially Synthesized Probe
  source 1..120: mol_type = other DNA
agaaagggaagcacttctgccaaggttaacagtaggatgtctttataaattcgatgtagctgtgagggaagggacttctgcaagctttcgtgcatttgctcattcaataataatctgttc

SEQ ID NO: 5743 - DNA, 120 bp, synthetic construct
  misc_feature 1..120: note = Artificially Synthesized Probe
  source 1..120: mol_type = other DNA
aaaaggtgacaacttgaaaatgagtctcttcctcattcaggtagctttggtgctttgcccactggttgtataagagaatcctgggaaacagcctatgagtagtatttgatatcttgggat

SEQ ID NO: 5744 - DNA, 120 bp, synthetic construct
  misc_feature 1..120: note = Artificially Synthesized Probe
  source 1..120: mol_type = other DNA
tttctattgtcaaataacgacacagtgttttacaacccctttccacataggttagtatcaccagtgtgcttggatgaattgcagtttgcccagtttgctgttccaaaagctagagaattc

SEQ ID NO: 5745 - DNA, 120 bp, synthetic construct
  misc_feature 1..120: note = Artificially Synthesized Probe
  source 1..120: mol_type = other DNA
ttagcccctgatgaaagattctcttcattcttttgaatgatcagtgtaattgtacttctagggaagatatagccgtttatttctcactaaaccatgacctgtgcatgggtgaggcagccc

SEQ ID NO: 5746 - DNA, 120 bp, synthetic construct
  misc_feature 1..120: note = Artificially Synthesized Probe
  source 1..120: mol_type = other DNA
agtccttaaacctgccttggatgtggctggttctgacatcttgaataatcccttagtatcttgtttacaggtgatgacacaaacaagttatctggaaataaaatgaagggggaatgaacc

SEQ ID NO: 5747 - DNA, 120 bp, synthetic construct
  misc_feature 1..120: note = Artificially Synthesized Probe
  source 1..120: mol_type = other DNA
gtctaacggatccttttcctcaccaaagagatgtgttatttggtatttttaataacaccatctgccagtgagaggaaagctccgaattgcaatattgatcttgtcactttggggaacagt

SEQ ID NO: 5748 - DNA, 120 bp, synthetic construct
  misc_feature 1..120: note = Artificially Synthesized Probe
  source 1..120: mol_type = other DNA
ttctgtccaccatttgtactccctctgatttcccgtatggaattgaggtcttgcattttcaagaaaaatggcaaaacaactccaaaaacatgtctttctagtgtcgtagctcttagtagc

SEQ ID NO: 5749 - DNA, 120 bp, synthetic construct
  misc_feature 1..120: note = Artificially Synthesized Probe
  source 1..120: mol_type = other DNA
gttattttcatctctgtatttagctaagtttatgtccaatggggtaattctaaccatattttaagatactgccagcgtagattgtctctgttaccaccggatgcctctggagaatgctgc

SEQ ID NO: 5750 - DNA, 120 bp, synthetic construct
  misc_feature 1..120: note = Artificially Synthesized Probe
  source 1..120: mol_type = other DNA
tgttttccattaaaatgtactaaataggagagtaccttcctgtgtttccctgttttatccaaattctcagtgtttttaaagatcccattctggcaggtcatggtgactcacacctggcgt

SEQ ID NO: 5751 - DNA, 120 bp, synthetic construct
  misc_feature 1..120: note = Artificially Synthesized Probe
  source 1..120: mol_type = other DNA
agcaggtctgttgacttcactcaggcttatggaatattgcatacatccaccgtactccataaataactaatagtgtgaagcagagatcagatcaactgacagactttgtagaatgtaatc

SEQ ID NO: 5752 - DNA, 120 bp, synthetic construct
  misc_feature 1..120: note = Artificially Synthesized Probe
  source 1..120: mol_type = other DNA
accttagcccataactagaataagttcatgtccatgaaaggaaagacatgaagcctggtatgaccaaaaagatcagttggtaatttccctgctgccaaaacaaaactcagagcacttcta

SEQ ID NO: 5753 - DNA, 120 bp, synthetic construct
  misc_feature 1..120: note = Artificially Synthesized Probe
  source 1..120: mol_type = other DNA
ttcaagaaaccccactggtataaaaacaaagagaaccactcctatgccccaagataaccaaattactgaaaatctaacccaaagagaaaactgtcaaagcagttagagagaaaagacacg

SEQ ID NO: 5754 - DNA, 120 bp, synthetic construct
  misc_feature 1..120: note = Artificially Synthesized Probe
  source 1..120: mol_type = other DNA
ggcctacaagggactcactttaaatacagagacacagataggttgaaaaggaaagaatagtaaaagataaaccataaaacagtaagcataaaaaagctatggctggccaggcatggtggc

SEQ ID NO: 5755 - DNA, 120 bp, synthetic construct
  misc_feature 1..120: note = Artificially Synthesized Probe
  source 1..120: mol_type = other DNA
ctcctaactcatgggtcaaagaaagtacaggggtaagttaatacatattttaagctaaactgtaataaaagaacaatatgtcaaggctttctggatacagctaaagtagtgcttgttgag

SEQ ID NO: 5756 - DNA, 120 bp, synthetic construct
  misc_feature 1..120: note = Artificially Synthesized Probe
  source 1..120: mol_type = other DNA
ggtgcctaaaattattactcaccaggaaatgccagctaaaaccatactgagggaacattttaaaacccactggaatggttataatcaaaaaggttgacagcaccaaatattggcagggat

SEQ ID NO: 5757 - DNA, 120 bp, synthetic construct
  misc_feature 1..120: note = Artificially Synthesized Probe
  source 1..120: mol_type = other DNA
ctttaacctaggaattttgatggggcacaaactttcagaccattaaagtgaacaagaaagaaggctgcgcttctaatacatgtcacagcagggatgagtcttagacgtgaatttcacacc

SEQ ID NO: 5758 - DNA, 120 bp, synthetic construct
  misc_feature 1..120: note = Artificially Synthesized Probe
  source 1..120: mol_type = other DNA
tgttcatcaggaaactaatgggagtaaagggtaaatagcttagtcaaaaatgcagctctctctttcaacatattagcaggaggccattttctggttttgtgcgtcaagcacaaagacaag

SEQ ID NO: 5759 - DNA, 120 bp, synthetic construct
  misc_feature 1..120: note = Artificially Synthesized Probe
  source 1..120: mol_type = other DNA
acaaaggcacggttggcttcattttctgtctgtgaattcaagtaggagacaaatggatttccttactttttctgatcctgtgtaggaactgtagaaaaatgggtgtttctccctagttag

SEQ ID NO: 5760 - DNA, 120 bp, synthetic construct
  misc_feature 1..120: note = Artificially Synthesized Probe
  source 1..120: mol_type = other DNA
agacttatagcagcctgggagaaagttatcaaagaaaggtgtactgtatctgcccaaattaacattaggatgtttcacgggagctacttatttcagaggaagagctacagatggtttgga

SEQ ID NO: 5761 - DNA, 120 bp, synthetic construct
  misc_feature 1..120: note = Artificially Synthesized Probe
  source 1..120: mol_type = other DNA
tagtgtggttcaaataagaacaagagcaccttgtgaaataacatatgtagaagccaaggcttgcaatgtacagtctagcagtggcctttcatggtagagagactcattcttgcataaaaa

SEQ ID NO: 5762 - DNA, 120 bp, synthetic construct
  misc_feature 1..120: note = Artificially Synthesized Probe
  source 1..120: mol_type = other DNA
gaaaaaaggcaacagtctcatattcttctctagattagttgactgtgaaaagaaaagagggcaacaagtcagcttcccttagagaggttgttggtgagtgggacatgtgttaatgagaca

SEQ ID NO: 5763 - DNA, 120 bp, synthetic construct
  misc_feature 1..120: note = Artificially Synthesized Probe
  source 1..120: mol_type = other DNA
atccctgttctatatagatgaagaaatgggggtttaacaaattgcccaagatgatagagctttgcccaatctatccatgtaccatcaaggccatagctttgcccttattttgcttgaagt

SEQ ID NO: 5764 - DNA, 120 bp, synthetic construct
  misc_feature 1..120: note = Artificially Synthesized Probe
  source 1..120: mol_type = other DNA
gcctctgtgtcaagaaagaagaactgaaggtcacattctggaaacagaaatccactttcctaggggcagtgtgaaatgttaaaaggttttatgttatgccagagaggatagttagacaat

SEQ ID NO: 5765 - DNA, 120 bp, synthetic construct
  misc_feature 1..120: note = Artificially Synthesized Probe
  source 1..120: mol_type = other DNA
ttttaaaaaagtccagtagtggccgtaatttatcttgattagtggaaaggtttcataaactacagtgtgcaaaatattgatccatttagtaagtacaccatgcaggggcccctgcagaag

SEQ ID NO: 5766 - DNA, 120 bp, synthetic construct
  misc_feature 1..120: note = Artificially Synthesized Probe
  source 1..120: mol_type = other DNA
ggaattgccaccatagttccttctcagcctcactttagagaggtcaagtgcatctagaaaatgccaggctttagagtgacagcatgaaatacccccttgggttcttttttctttttcttt

SEQ ID NO: 5767 - DNA, 120 bp, synthetic construct
  misc_feature 1..120: note = Artificially Synthesized Probe
  source 1..120: mol_type = other DNA
gaggagaggatgaattgctgccaggtgctgccccacttttcatacctatccaagtgactcttccagattctaagtacattcagattgtgttttagtgaaatgcagtaaaacaaacagatg

SEQ ID NO: 5768 - DNA, 120 bp, synthetic construct
  misc_feature 1..120: note = Artificially Synthesized Probe
  source 1..120: mol_type = other DNA
ttctacagactcaattcctgggctgcaagcagtttttctgcattcacttagtgcttctcccagaccaaatcacacatatgcgaacaggaaattaacctgatgctcaaattgttctctaat

SEQ ID NO: 5769 - DNA, 120 bp, synthetic construct
  misc_feature 1..120: note = Artificially Synthesized Probe
  source 1..120: mol_type = other DNA
ggagtccatgggtaggagttggggctttatcctcagttccgtggaaagctgccaggtcatgttgagcaggagtgtgttgtgatcggattcactttttaaaaaattattttatttccatag

SEQ ID NO: 5770 - DNA, 120 bp, synthetic construct
  misc_feature 1..120: note = Artificially Synthesized Probe
  source 1..120: mol_type = other DNA
ggattacaggcatgagctgccacgcccagccaattcttttagttttttaaggaatctccacactgttttccatagtggttgcactagtttacattttcaccagcagtgtagaagtattcc

SEQ ID NO: 5771 - DNA, 120 bp, synthetic construct
  misc_feature 1..120: note = Artificially Synthesized Probe
  source 1..120: mol_type = other DNA
tcctgcaagaatgattcacattttttaaaagataattttgcttatacttggagaagctctaggggaaaaaactggaaacacaaagaggaggtatgggagagttgatggtggcttggacct

SEQ ID NO: 5772 - DNA, 120 bp, synthetic construct
  misc_feature 1..120: note = Artificially Synthesized Probe
  source 1..120: mol_type = other DNA
ttacaggagaaaacagattggaagaacaaaggggaaagactcaacagaaactgtaatgtgacatagcttagtctcctgaaaggagcaaagaaaatcagctcaggagtaaatcaggatctc

SEQ ID NO: 5773 - DNA, 120 bp, synthetic construct
  misc_feature 1..120: note = Artificially Synthesized Probe
  source 1..120: mol_type = other DNA
aggacagagaagcacactccgagttctttgtagtagagttatttggtgtcacataacgattaagaacaatggctccagtcacaaaggcttgagtttaatccttgctcaacttttaattgg

SEQ ID NO: 5774 - DNA, 120 bp, synthetic construct
  misc_feature 1..120: note = Artificially Synthesized Probe
  source 1..120: mol_type = other DNA
ttcttagatcattgggcaaaaagaaggcctctcaggacatgtttctgctgtagcttgtgccactcaagtccttgggatgctttgtaataagaaatgaaagttagctgaatgtattttaca

SEQ ID NO: 5775 - DNA, 120 bp, synthetic construct
  misc_feature 1..120: note = Artificially Synthesized Probe
  source 1..120: mol_type = other DNA
ctgggaactcctccagtgctacactgtgtacactggttgaataaatgaatgaacatataaaagaacaaatgaaaccatatcaggggtgtcctcaatttggggagatgcttgaaatcaatc

SEQ ID NO: 5776 - DNA, 120 bp, synthetic construct
  misc_feature 1..120: note = Artificially Synthesized Probe
  source 1..120: mol_type = other DNA
attgcaacaaattgaaagcaaaagcagatgttggaatctggctgttttctattgttttccttcttctattaaagtcaaggttactaagatttgtagaaatctaaaacaatgccactctgc

SEQ ID NO: 5777 - DNA, 120 bp, synthetic construct
  misc_feature 1..120: note = Artificially Synthesized Probe
  source 1..120: mol_type = other DNA
cccagcacttgctgtttctatgaggaataaaagtgattgtctcaccatcaacactgtctacaacactgttagggagacaaagcttatctacatcaacatgatggattagctacttttctt

SEQ ID NO: 5778 - DNA, 120 bp, synthetic construct
  misc_feature 1..120: note = Artificially Synthesized Probe
  source 1..120: mol_type = other DNA
agtgattattttcctattattttgatggtcagctcttaagagttcttgcaatagttgaataaagtgaagcctgtgatagcctagtgcgatgtcaggtacgtagtcagtggtcactcagcc

SEQ ID NO: 5779 - DNA, 120 bp, synthetic construct
  misc_feature 1..120: note = Artificially Synthesized Probe
  source 1..120: mol_type = other DNA
atgacggacccagcagccatgtgagggtatatttaaactaagaccttcatttcatgcttctcatgattctaattctcattttcccatcgagttaaagggggaggattgagtttaacatgt

SEQ ID NO: 5780 - DNA, 120 bp, synthetic construct
  misc_feature 1..120: note = Artificially Synthesized Probe
  source 1..120: mol_type = other DNA
tctatgtaaactgactattgtccatttattttgtctctactgagtttaaagattcagtgataccccatttatgtgtcgatccaatcagacaggtaccagaggtgtctctctctggggtag

SEQ ID NO: 5781 - DNA, 120 bp, synthetic construct
  misc_feature 1..120: note = Artificially Synthesized Probe
  source 1..120: mol_type = other DNA
agcacagtgccttgaactgaactgagcttctacctaagcatctgtatcttctgctaaaagagacctgcctgctccatccatttttaacaggactctttcctaatatttgcttttaattaa

SEQ ID NO: 5782 - DNA, 120 bp, synthetic construct
  misc_feature 1..120: note = Artificially Synthesized Probe
  source 1..120: mol_type = other DNA
ggggatatttaaactaattttctagtgtagaagaatttaatggatgtgtggacaccatgaatacagctgctgctcagtgcctgtacttgcttttgtccccaggaattgatttgagtgcaa

SEQ ID NO: 5783 - DNA, 120 bp, synthetic construct
  misc_feature 1..120: note = Artificially Synthesized Probe
  source 1..120: mol_type = other DNA
gaattctgtagtcctgtctctgttccttcttttatccaaggcttctcattgcaaaatggaaaccgtattgtcaggttctaagttctgagcagcattttgattgggattctatagttcctc

SEQ ID NO: 5784 - DNA, 120 bp, synthetic construct
  misc_feature 1..120: note = Artificially Synthesized Probe
  source 1..120: mol_type = other DNA
tggacaccaggtctcggggcctctcctttaaggatatctcttttttccaaacagagtttaaagatgtccttgttccaaattgagaagacaaaaagcaaactatgttgcaggttttccaaa

SEQ ID NO: 5785 - DNA, 120 bp, synthetic construct
  misc_feature 1..120: note = Artificially Synthesized Probe
  source 1..120: mol_type = other DNA
gtgaggccagcactccaggctacgctgtgcatgagaatgaggacaattttgctaaaacaatacaatgcttctttactgagggtgggtctattttgttttaagcttatggatattatctta

SEQ ID NO: 5786 - DNA, 120 bp, synthetic construct
  misc_feature 1..120: note = Artificially Synthesized Probe
  source 1..120: mol_type = other DNA
cccagctaggaacatgtgtgtcaggcaactcacttttttttccactgtgtacatgactgcaaaagacctggaaagcaccatgagtattgatttgcaagttacacataaattttaggagta

SEQ ID NO: 5787 - DNA, 120 bp, synthetic construct
  misc_feature 1..120: note = Artificially Synthesized Probe
  source 1..120: mol_type = other DNA
acaccatggccagcgaccaacttgctaagtcaaaaaaatctaactcagaaccctttgactgaggaacagttttcacactccagaaaattctaaatgactttcatttgctgttggttcaca

SEQ ID NO: 5788 - DNA, 120 bp, synthetic construct
  misc_feature 1..120: note = Artificially Synthesized Probe
  source 1..120: mol_type = other DNA
tatatgtgtgtgtggcatgcatgtgaggcacgtgggggtttgtgtgtgtatgaagaacaaatcatttggaaacaagtatggtgaatccatctaggtagtttggtgtagggttaaaaaatg

SEQ ID NO: 5789 - DNA, 120 bp, synthetic construct
  misc_feature 1..120: note = Artificially Synthesized Probe
  source 1..120: mol_type = other DNA
ttgagtattggactaaaatgcaaacgtcacttgtaaatctattcctttgggcttcatgaagatttgaggtaggtgctcaggaagtgaatctccccaagaaactcctctcttagaatacac

SEQ ID NO: 5790 - DNA, 120 bp, synthetic construct
  misc_feature 1..120: note = Artificially Synthesized Probe
  source 1..120: mol_type = other DNA
ggctgtgactgtgtcttccttgaattgtcttcagaatcattgataagtcccacgcctctgtttcctatctccattgtcacagctgatttatgaacacaaacagtattgcaaaacttaaca

SEQ ID NO: 5791 - DNA, 120 bp, synthetic construct
  misc_feature 1..120: note = Artificially Synthesized Probe
  source 1..120: mol_type = other DNA
ggcatgttctaaccatctataattttattcttttttcccctccctattccattctctctgtggccccatagagaagactccaatctgtggttttcattgatggtggcagctttagccagg

SEQ ID NO: 5792 - DNA, 120 bp, synthetic construct
  misc_feature 1..120: note = Artificially Synthesized Probe
  source 1..120: mol_type = other DNA
gtcattatcatcatcatcatcaagaatttgatgagtacctgtaaaggctaagcaatatccgaggctcatggggtacacagcaataaactaggcagggctctgttctttgagaaacttact

SEQ ID NO: 5793 - DNA, 120 bp, synthetic construct
  misc_feature 1..120: note = Artificially Synthesized Probe
  source 1..120: mol_type = other DNA
gatgcctgtgtaggtgagtctttgctgatttatagactcaatggactaattgttgctggatgctaccagaactatgaaacaatctgcaggacgaaaaagcagatgagtcatgcaaatttt

SEQ ID NO: 5794 - DNA, 120 bp, synthetic construct
  misc_feature 1..120: note = Artificially Synthesized Probe
  source 1..120: mol_type = other DNA
tagattagaggttaccagaggccagagggaggagaaatagacatgtattgcttaatgactacaaaattgctgtttggtgtgaggaaaagttttgaatatagatgttggcaatggttgcac

SEQ ID NO: 5795 - DNA, 120 bp, synthetic construct
  misc_feature 1..120: note = Artificially Synthesized Probe
  source 1..120: mol_type = other DNA
cagtctactaaatatttcatagtttgtgtgttgttcattagaaaagaagagattccattttcccaaactgtggaactgagcagcgcactgagattttaaggagtgggatgtgggtaccct

SEQ ID NO: 5796 - DNA, 120 bp, synthetic construct
  misc_feature 1..120: note = Artificially Synthesized Probe
  source 1..120: mol_type = other DNA
tagaaggggaaacgtgcttagttaatgccagggttcacatgtgaccatgtttaaaatgaccacagagggaaggagaacaaaaaagcaaactttgctgacactcaaatgttttctgtttct

SEQ ID NO: 5797 - DNA, 120 bp, synthetic construct
  misc_feature 1..120: note = Artificially Synthesized Probe
  source 1..120: mol_type = other DNA
aatgtgtccggagagttttggaagatttgaccatcactgcaatagtctttcttctacagaaaataagtccggtaaaaatggggcaaaagttactcccacccagaggaatgagacatatgt

SEQ ID NO: 5798 - DNA, 120 bp, synthetic construct
  misc_feature 1..120: note = Artificially Synthesized Probe
  source 1..120: mol_type = other DNA
atgttagtggagaggtagatttcaaatagaatcgcctaggttgaaaataaaaagcagtcatcaactatgatggaaaaatatttccgagacttgataagtcatccggaccctggctgctca

SEQ ID NO: 5799 - DNA, 120 bp, synthetic construct
  misc_feature 1..120: note = Artificially Synthesized Probe
  source 1..120: mol_type = other DNA
acacactgcagtgccaaggaaaagtacaaatgaaaggtaaaaacaagggacaaatgttgctcatgttgccagtaccttgttttgagtctggaagagaattatttatgttgctgcagccaa

SEQ ID NO: 5800 - DNA, 120 bp, synthetic construct
  misc_feature 1..120: note = Artificially Synthesized Probe
  source 1..120: mol_type = other DNA
aaattaaacaagagacaaaacaaaagtagggaccaatctggaatccagtaaccatctctcatttcaggagaagtggaaactctcaggaagttgaaaatactgggcttcagaacctgacct

SEQ ID NO: 5801 - DNA, 120 bp, synthetic construct
  misc_feature 1..120: note = Artificially Synthesized Probe
  source 1..120: mol_type = other DNA
actctctgtcaagttgatccattgacagattctcaaaaccaggtcaatatagagatatggcactcttacgtcttgtgtcagctgtatctgttatcaatagttttatgaatggcaccaccg

SEQ ID NO: 5802 - DNA, 120 bp, synthetic construct
  misc_feature 1..120: note = Artificially Synthesized Probe
  source 1..120: mol_type = other DNA
ataagtcataggtaatacttaggcctgtctgatgaatgacggaatctagcttccgctggtatttcatctttgacttctaacatgtaagaagccttcactttagtggtcatctctcctcct

SEQ ID NO: 5803 - DNA, 120 bp, synthetic construct
  misc_feature 1..120: note = Artificially Synthesized Probe
  source 1..120: mol_type = other DNA
gatgtccattgctttacatagtttctatctcattaactttggtgcacatagccagtaagcgaaaggacccgggatttgcaaacaagaaattattctgacttcaacgctcattcctttcac

SEQ ID NO: 5804 - DNA, 120 bp, synthetic construct
  misc_feature 1..120: note = Artificially Synthesized Probe
  source 1..120: mol_type = other DNA
acgtgagaagcaaaacaacctgaatgaaatccagccactttggagtgaaacatgagcattttaaaacatgattttcaaactgtcgcagggttagtattgcatctggtctcctctcatgat

SEQ ID NO: 5805 - DNA, 120 bp, synthetic construct
  misc_feature 1..120: note = Artificially Synthesized Probe
  source 1..120: mol_type = other DNA
gcctccacactatccccatagtccatcttcttgtaattcttaagataggaccaaaagacatttatttacaagtttccctcttctattagacggtgagacagtgagagaagatttcctgac

SEQ ID NO: 5806 - DNA, 120 bp, synthetic construct
  misc_feature 1..120: note = Artificially Synthesized Probe
  source 1..120: mol_type = other DNA
tttattgaattgtggtactgagtgaaatgacctacctttacttgacctgcaacagagttgctgtagaccaggggtgggcaaattctttctgcaagaaccaggtaataagtattttacact

SEQ ID NO: 5807 - DNA, 120 bp, synthetic construct
  misc_feature 1..120: note = Artificially Synthesized Probe
  source 1..120: mol_type = other DNA
aagagaagggacatggaagggcaggcagacattaaactacccagaagcgatgtgtgcctgtgctcttattgcacctccacattcttatttttcttactaataaagaatttaaaatgaagg

SEQ ID NO: 5808 - DNA, 120 bp, synthetic construct
  misc_feature 1..120: note = Artificially Synthesized Probe
  source 1..120: mol_type = other DNA
ttctttgagacattcttactgaacaagaaataattccccagggttagattactggacacaggagaaatgtgttctgcaagctgaggagaattgaatttggcttcagggacttcctcctcc

SEQ ID NO: 5809 - DNA, 120 bp, synthetic construct
  misc_feature 1..120: note = Artificially Synthesized Probe
  source 1..120: mol_type = other DNA
attggctttcccaagtgaaaacgcctctcttcagttgcacctgcacaggactgattgcgcctcaaatccatttgtcaggctggttgcaggtatctgagaaattgctaatagaattgggca

SEQ ID NO: 5810 - DNA, 120 bp, synthetic construct
  misc_feature 1..120: note = Artificially Synthesized Probe
  source 1..120: mol_type = other DNA
cacacacaggcgatgttatatggtggtttagggtctagactgccaaggttcaagttctgctgtgacttacttgctctgagtgaccttgggtttcatattaaattttctgaatatcaattt

SEQ ID NO: 5811 - DNA, 120 bp, synthetic construct
  misc_feature 1..120: note = Artificially Synthesized Probe
  source 1..120: mol_type = other DNA
attcatgctgtcaccaatggcaggatatctcgctcttttgtttttaaaaacagccaaagtcaagtatgtaaaaaggtgggcagctgagaacctggtaccagaatgttccaaggaaaggta

SEQ ID NO: 5812 - DNA, 120 bp, synthetic construct
  misc_feature 1..120: note = Artificially Synthesized Probe
  source 1..120: mol_type = other DNA
tatcacccctgggtcaagcccatggtctcagtgggttagcaatgaatccttcctaagatgcgaacagatgggagctcaacatttgacccatccctggggttttagtttttttgtttgttt

SEQ ID NO: 5813 - DNA, 120 bp, synthetic construct
  misc_feature 1..120: note = Artificially Synthesized Probe
  source 1..120: mol_type = other DNA
attggaaaggggctgaacaaggggaaatcttcaacaccttttaaatggaagcatgtctagttggcctcttttctgtaaggaactatactgggcatcacagagatgcaaagactagagtga

SEQ ID NO: 5814 - DNA, 120 bp, synthetic construct
  misc_feature 1..120: note = Artificially Synthesized Probe
  source 1..120: mol_type = other DNA
ctgctgcttgcatttaaagagcaaactcgtcttgtctacccaccctccctcccccatcctccccaaaatagccttgtgatttcggaagtatggactaaaatcacactcctccttacctta

SEQ ID NO: 5815 - DNA, 120 bp, synthetic construct
  misc_feature 1..120: note = Artificially Synthesized Probe
  source 1..120: mol_type = other DNA
aagatcttgagggttcttgtcttttaatcattgctcagttcacctcaggcagatcattaaaatagatcctgggagacaccaatagattcacaaagcagtttgctcaagcgtggtaaatca

SEQ ID NO: 5816 - DNA, 120 bp, synthetic construct
  misc_feature 1..120: note = Artificially Synthesized Probe
  source 1..120: mol_type = other DNA
caaggattgggagtcagaagcccaatctgtgttatgtaaaagaaatcccttgtttcctgtacaaatttgctcttattttgcctgatacctgagcatgccaggagagtgggaatagttaat

SEQ ID NO: 5817 - DNA, 120 bp, synthetic construct
  misc_feature 1..120: note = Artificially Synthesized Probe
  source 1..120: mol_type = other DNA
tgtttggttactgcaatagactacccattacttcttagcaagtgaacagaggaaagtgagtttctttaccagccttggtatttggaaaccaggcatatgggtggtgggtggaaataattt

SEQ ID NO: 5818 - DNA, 120 bp, synthetic construct
  misc_feature 1..120: note = Artificially Synthesized Probe
  source 1..120: mol_type = other DNA
aacctcctttcacatggaaatagcctacattccactggctaacttggatctttggttatatgttcagtcacatttttaacttccttagacctgaaaatcagctgttctcatcacaccttg

SEQ ID NO: 5819 - DNA, 120 bp, synthetic construct
  misc_feature 1..120: note = Artificially Synthesized Probe
  source 1..120: mol_type = other DNA
ggacattggatgtagcagccatgctcacgtacagtaaattccatctgtgcatggtctaaattatctaagactctgtagataaaaagaaaacttgaaggaactgctgaagaatagggacac

SEQ ID NO: 5820 - DNA, 120 bp, synthetic construct
  misc_feature 1..120: note = Artificially Synthesized Probe
  source 1..120: mol_type = other DNA
tgtttcagacactgtttggaaaaacaaaataaagtggttttatttgaagatgtaggcttggttaccccatagccttaaatcatggaagtaggtaaccatgtcaatttgcatggggagccg

SEQ ID NO: 5821 - DNA, 120 bp, synthetic construct
  misc_feature 1..120: note = Artificially Synthesized Probe
  source 1..120: mol_type = other DNA
ttcacattagagctggtcttgtatcaggcaagtaccaaattacagatcctgttgctgctttctgctttcaaatcctgaaggatttgatagtaatagtgttgaaatgtgcagcgattcctt

SEQ ID NO: 5822 - DNA, 120 bp, synthetic construct
  misc_feature 1..120: note = Artificially Synthesized Probe
  source 1..120: mol_type = other DNA
atagtctgcctaatatcccatccacttattagacagatattggatccaaggaagatttttattttgataaacagtaatgggagagccaaggtagggggaaaggagagctggatgggaaca

SEQ ID NO: 5823 - DNA, 120 bp, synthetic construct
  misc_feature 1..120: note = Artificially Synthesized Probe
  source 1..120: mol_type = other DNA
gggatattggacagttctggactgattctgtatctatgaaatggggatgattcctgtcacgctgttgctgtaaaaaacaaaatatagaaacacggaatgctgttcttggcatggagattt

SEQ ID NO: 5824 - DNA, 120 bp, synthetic construct
  misc_feature 1..120: note = Artificially Synthesized Probe
  source 1..120: mol_type = other DNA
atgctttggaagtatgcagtagttaattttcaatctcatcttacagctgaataacctcaaaggtagtagttatacaacaggtgtgggaatatgtgagtgtgagggagaggaatcccagga

SEQ ID NO: 5825 - DNA, 120 bp, synthetic construct
  misc_feature 1..120: note = Artificially Synthesized Probe
  source 1..120: mol_type = other DNA
aacaaagtaatcaaattttcagagccctgtagagaaatcaaatctccctctgaattgctaactcaccttgctttccctattgtttaaagtgtcatagccactcttcctttcccaacactc

SEQ ID NO: 5826 - DNA, 120 bp, synthetic construct
  misc_feature 1..120: note = Artificially Synthesized Probe
  source 1..120: mol_type = other DNA
agactttgctaaatagacacagatttacttccaatgaagtgggtttgctgcactgaataaagtagtttacttttccttcactgcagctgtgcttgaaattggacagaaagccaggtgtgg

SEQ ID NO: 5827 - DNA, 120 bp, synthetic construct
  misc_feature 1..120: note = Artificially Synthesized Probe
  source 1..120: mol_type = other DNA
cattatcctgtaaagaggtataatcgatttagagataatgagagtgacctagggaaaaagttattaagccacaaatcaattacaccctatcaaccacaccctcacttgctctccccacct

SEQ ID NO: 5828 - DNA, 120 bp, synthetic construct
  misc_feature 1..120: note = Artificially Synthesized Probe
  source 1..120: mol_type = other DNA
ctggacaccatggaatgcctgtgtgcagcctctctgcgcttgtcctcatgaacttctccaacagtcttactgatttttttacaacaaaaattatacctaatgattatctatttcatgtac

SEQ ID NO: 5829 - DNA, 120 bp, synthetic construct
  misc_feature 1..120: note = Artificially Synthesized Probe
  source 1..120: mol_type = other DNA
tggccgctccattccgtacttggttttcacaaaaactgtctcctaccttctaatgtcctcaattctacaggaaaatgagaatcatctccagacagtagaaactgtatccataatccatat

SEQ ID NO: 5830 - DNA, 120 bp, synthetic construct
  misc_feature 1..120: note = Artificially Synthesized Probe
  source 1..120: mol_type = other DNA
catatttaacagcttctttgtgctctaggcattgattattctctgcattgatagaatttacacttgcagctttcaccaaagaaaatgttccacagtttaggcagcatggcaaaaatccat

SEQ ID NO: 5831 - DNA, 120 bp, synthetic construct
  misc_feature 1..120: note = Artificially Synthesized Probe
  source 1..120: mol_type = other DNA
gaagcagtatgagcccacattctgagttgtaaaaccccacaattaggaaatagacttaaagtgctcccatcacattaggatgcaatgtgcatttttgtttgtagaagcttgttctccatt

SEQ ID NO: 5832 - DNA, 120 bp, synthetic construct
  misc_feature 1..120: note = Artificially Synthesized Probe
  source 1..120: mol_type = other DNA
cgagatggtattactccagtcagaccttctgttttatagtgtgttccagaagctggcctggttgcagaagagagtgagctcattagccctgttcaaaaaaaaaaataaatggaataataa

SEQ ID NO: 5833 - DNA, 120 bp, synthetic construct
  misc_feature 1..120: note = Artificially Synthesized Probe
  source 1..120: mol_type = other DNA
gagtcccatgaaacatttcttcaatcaggacagaaccatgagcagaggacatagtgggtggggttcgtggaaaaatagaatatatatctaattttctgtttgatgatggtctacggattg

SEQ ID NO: 5834 - DNA, 120 bp, synthetic construct
  misc_feature 1..120: note = Artificially Synthesized Probe
  source 1..120: mol_type = other DNA
aaccccttaatgacaaaaaatacttgctttccagagtattcatggcaggccttgataatcttgagcctcaagtgcccacaattccttctgggactgactttaaacctttatttcaaatac

SEQ ID NO: 5835 - DNA, 120 bp, synthetic construct
  misc_feature 1..120: note = Artificially Synthesized Probe
  source 1..120: mol_type = other DNA
actcttcaaagacttatgatgaaataactgtaggcaataaaacatactgaaatatgtccaaatgaccagcacagcaaaatatgcatgaccctgtgcctaaggtctgtggcatacaagcct

SEQ ID NO: 5836 - DNA, 120 bp, synthetic construct
  misc_feature 1..120: note = Artificially Synthesized Probe
  source 1..120: mol_type = other DNA
tagaagaatcattagttattagaattattagggtaaaaagccgtgttaagtgctttgtaggtaggaggaccgtatatcccaatttgcttaggccagtcctggtttatggcaattgccctg

SEQ ID NO: 5837 - DNA, 120 bp, synthetic construct
  misc_feature 1..120: note = Artificially Synthesized Probe
  source 1..120: mol_type = other DNA
tagaatggaatagaaatatgcattactatgagtaattccagacaccttaatgcttttagcgggagtgcatttggagtttgtttcctgagacccctctggtggaggtggttgttattcatg

SEQ ID NO: 5838 - DNA, 120 bp, synthetic construct
  misc_feature 1..120: note = Artificially Synthesized Probe
  source 1..120: mol_type = other DNA
acttaaatattccctatgaaagctccggtgtacacatttattttattcatgatttcaacaaagctttactgtgcaccacatacagtccagcatggtcccatagagctttcagcaatggtg

SEQ ID NO: 5839 - DNA, 120 bp, synthetic construct
  misc_feature 1..120: note = Artificially Synthesized Probe
  source 1..120: mol_type = other DNA
aaacatgtggctggtgactgagagatgcaattcttaactgtagttagttctaattaattgaaattgagatcaccacagatggcagaggctttcatgtcagtttcagactctggtattggg

SEQ ID NO: 5840 - DNA, 120 bp, synthetic construct
  misc_feature 1..120: note = Artificially Synthesized Probe
  source 1..120: mol_type = other DNA
tattttagaccccaaagatacatgggtactctagggatactgtgtaaagactgggtagtatttggaactggcagccagagagacgacattggcaattcattcatctatcattacctcaat

SEQ ID NO: 5841 - DNA, 120 bp, synthetic construct
  misc_feature 1..120: note = Artificially Synthesized Probe
  source 1..120: mol_type = other DNA
ctgtggaatgtgggtttatttgggaagaagctaatcctattaggagtttcatattctcaccaatttgggtgatggggtctgtgaccaaagatcatagaaagtaagaaatacaggactcaa

SEQ ID NO: 5842 - DNA, 120 bp, synthetic construct
  misc_feature 1..120: note = Artificially Synthesized Probe
  source 1..120: mol_type = other DNA
aagacagctctatgcctccacgtcgtgatagcaaatgttcccttttggctgttttaatagttctgcttcaagcgtatttgtttttccttatttcctagcatctttgagaaagatctgttc

SEQ ID NO: 5843 - DNA, 120 bp, synthetic construct
  misc_feature 1..120: note = Artificially Synthesized Probe
  source 1..120: mol_type = other DNA
ctgctctgccaggaatgtgcccttcatattatatcttctagaatgaatgtttggaagggaaagcagtaagatgcaaaagcaagaaggacagatgatgttcatactcacagtaatagctgt

SEQ ID NO: 5844 - DNA, 120 bp, synthetic construct
  misc_feature 1..120: note = Artificially Synthesized Probe
  source 1..120: mol_type = other DNA
cacatgaagatgaaggtggtggaaaggagcagctgatgtcacgcactgtctacttaacattgccacgttaatgttaatgccggttatagaaagcaatgggtaattgccatatttttgtta

SEQ ID NO: 5845 - DNA, 120 bp, synthetic construct
  misc_feature 1..120: note = Artificially Synthesized Probe
  source 1..120: mol_type = other DNA
accaccagaaatggtccatgttttactactgtattgatgtttttccacaaatacctgtagaaatccatattagaacacagggcgtcagtcactttcctgagcctgcattccaggacatct

SEQ ID NO: 5846 - DNA, 120 bp, synthetic construct
  misc_feature 1..120: note = Artificially Synthesized Probe
  source 1..120: mol_type = other DNA
aacatcagtgcctcaaatctcctttccaaacatcccaggtatagaaagttacatcactcttgcaatttggttcatcaattgtcctcactgcaaagttgaacctaaactaactcctgttgg

SEQ ID NO: 5847 - DNA, 120 bp, synthetic construct
  misc_feature 1..120: note = Artificially Synthesized Probe
  source 1..120: mol_type = other DNA
ggattcacattttttttttccagaaggtgagattcttcttcaccaagatgtcacagtttgggcaaagttcaaagttgcttaaatttcttcgaagggctccatgagcagttgtactccagc

SEQ ID NO: 5848 - DNA, 120 bp, synthetic construct
  misc_feature 1..120: note = Artificially Synthesized Probe
  source 1..120: mol_type = other DNA
agattatttgtttcctcttaaaataagtgcttgatggttgggttgtgtggggccggtccttggtggtcactgcatgtaatcaacattcatagactgtaggaaaatgtggtttaatgaaac

SEQ ID NO: 5849 - DNA, 120 bp, synthetic construct
  misc_feature 1..120: note = Artificially Synthesized Probe
  source 1..120: mol_type = other DNA
atcacgaatgttatttgtattctgtgaacatattgcaatgtacaagcagctgaacaatgaaataaatccaaaatccccaaacacttcccagtcagctcagcctcacaggtgtccattggg

SEQ ID NO: 5850 - DNA, 120 bp, synthetic construct
  misc_feature 1..120: note = Artificially Synthesized Probe
  source 1..120: mol_type = other DNA
gcaatccaaatgctaacaaaattactctgtccccatttggcatttagaaaacatcaaaaacatgctgatgatgccaaatagggtttttaagaatggggcgaaaggtgaaggtgtcaagtg

SEQ ID NO: 5851 - DNA, 120 bp, synthetic construct
  misc_feature 1..120: note = Artificially Synthesized Probe
  source 1..120: mol_type = other DNA
aataattggttaattatgaagactgatgaagaaaagacattacagctgagatggttgggagggagagaatgtctaggctgtgaagcaaaaggaactaatgattagccagcagggtctgac

SEQ ID NO: 5852 - DNA, 120 bp, synthetic construct
  misc_feature 1..120: note = Artificially Synthesized Probe
  source 1..120: mol_type = other DNA
accaaggtacagcaagattgttcagctttgctgaaaatgacttgaccgtagatttgcttctggggcaaatggattgtaaattgctaaaatgacactggtttgaatggcctgaaaagagga

SEQ ID NO: 5853 - DNA, 120 bp, synthetic construct
  misc_feature 1..120: note = Artificially Synthesized Probe
  source 1..120: mol_type = other DNA
cttgggaaaattccacacccacaattgtctgttcccaagcacaccctcacgtctgtgttctaacacccgcttcttacctactttctctcaataacaataaggtaagaagtaaattttcta

SEQ ID NO: 5854 - DNA, 120 bp, synthetic construct
  misc_feature 1..120: note = Artificially Synthesized Probe
  source 1..120: mol_type = other DNA
gtggggattaaatatgagaatatgtttaaatgcttaatagctggcacttaaacataagtggaaaaagtgatcatgtgaccgctcggcaaatatcgctggtaccgttagttggtttgggct

SEQ ID NO: 5855 - DNA, 120 bp, synthetic construct
  misc_feature 1..120: note = Artificially Synthesized Probe
  source 1..120: mol_type = other DNA
tccaatccttgagaaaatgggccgcaattaaaaagacaagcacttcctgtttaccagcccctctgaattttccaatggtgaaattatttgcgagtatatctcactctttctcagaggttg

SEQ ID NO: 5856 - DNA, 120 bp, synthetic construct
  misc_feature 1..120: note = Artificially Synthesized Probe
  source 1..120: mol_type = other DNA
agcatttaccattatccttccagtcttgactaaggttgggtgcacattcacagagactaccaactctcgattcagggtttgaaaagtctgaatggttgtgtattaaatggaaaagatcag

SEQ ID NO: 5857 - DNA, 120 bp, synthetic construct
  misc_feature 1..120: note = Artificially Synthesized Probe
  source 1..120: mol_type = other DNA
ctcctgatgctgcaaagttctcccactagatgcaatttaaacaggagacatatgtaacacacctcaggtggtgtaatgaaatcatcctcttttctgagcttctgaaagtcaaatatactt

SEQ ID NO: 5858 - DNA, 120 bp, synthetic construct
  misc_feature 1..120: note = Artificially Synthesized Probe
  source 1..120: mol_type = other DNA
ccatttggctgaatgacccttaaggtgacacaaagtaaagggactatgacaaggttaacaaatgtgcaacacaagttgcctgttctctgttgtttcgatgaagcattcagctcaatataa

SEQ ID NO: 5859 - DNA, 120 bp, synthetic construct
  misc_feature 1..120: note = Artificially Synthesized Probe
  source 1..120: mol_type = other DNA
ctagagttacattccataaataaaatgttttgatgatgatgccaacttgggcatggccttgtctcttaacttaggaggaggacaggcagacctggggggtgatgattaagtaaaatatca

SEQ ID NO: 5860 - DNA, 120 bp, synthetic construct
  misc_feature 1..120: note = Artificially Synthesized Probe
  source 1..120: mol_type = other DNA
acgtgacttctaagcagcaagcagctatcagaaagtgggccaaaggacaagctggttaatgcgtcactgtgcttctacttaaagcttatgcttttgttaaaaatttagcaatttggtttt

SEQ ID NO: 5861 - DNA, 120 bp, synthetic construct
  misc_feature 1..120: note = Artificially Synthesized Probe
  source 1..120: mol_type = other DNA
tgctggcctcttctccctgctgcagagctgcttccataggcggacctggtcagagctcaagtggaggggaagcaaaccttttggagtgtcttgggttacctccttaaacattaaagacaa

SEQ ID NO: 5862 - DNA, 120 bp, synthetic construct
  misc_feature 1..120: note = Artificially Synthesized Probe
  source 1..120: mol_type = other DNA
attttaacaggtcccctgggtgacctgtaaccacattccactttgtgaagttctgtttaaagaagcaggcctgggatttgcttactattcagtgaaactttcaataaagcttcttttctc

SEQ ID NO: 5863 - DNA, 120 bp, synthetic construct
  misc_feature 1..120: note = Artificially Synthesized Probe
  source 1..120: mol_type = other DNA
cttctcagctatcttccctatccaaccactagacacactggtgtttctagtcgtctcaacttgctctctttctatgagttccacaattctcagtctagtaataatagccaacatttcttg

SEQ ID NO: 5864 - DNA, 120 bp, synthetic construct
  misc_feature 1..120: note = Artificially Synthesized Probe
  source 1..120: mol_type = other DNA
gcatttctgtaaagtgttttgttttaggaatgtagcaccatttattccttctgctgttggtggatgttcatattgcttccagacttgatcattatgcacaatgctgcgggcactcttgta

SEQ ID NO: 5865 - DNA, 120 bp, synthetic construct
  misc_feature 1..120: note = Artificially Synthesized Probe
  source 1..120: mol_type = other DNA
ccaaataaatacttaagtacttgtggatttgttgattaatgatttatttaaataacttttgtcctagctgggttaccttaaaagttctaacttggtctggcacagtggcccttgcctgta

SEQ ID NO: 5866 - DNA, 120 bp, synthetic construct
  misc_feature 1..120: note = Artificially Synthesized Probe
  source 1..120: mol_type = other DNA
atgaagtaaggtcaattgcatgcaattttattctagccaaattgctgttaattgcatcaacggctttggtaaggtcaataaatgttgcctttttacatcctctcctgaaaatggcagaaa

SEQ ID NO: 5867 - DNA, 120 bp, synthetic construct
  misc_feature 1..120: note = Artificially Synthesized Probe
  source 1..120: mol_type = other DNA
aatcagtctagagcagatcatctgttctcctttaacctgtcttacaacaaacagtaaatgtttgtatgtcagctcaaccatagttatactgtgaggtataccagttggctcacctgctca

SEQ ID NO: 5868 - DNA, 120 bp, synthetic construct
  misc_feature 1..120: note = Artificially Synthesized Probe
  source 1..120: mol_type = other DNA
tattcttcttttaaaactgaatgagcagaaatactgttagtagccagctgaattcaggaaatgtgatgcatgtgctggtgcacatacccaagaagactgaagacagcatagaaggacaga

SEQ ID NO: 5869 - DNA, 120 bp, synthetic construct
  misc_feature 1..120: note = Artificially Synthesized Probe
  source 1..120: mol_type = other DNA
atattaactttatttattcttaaaatatcatcttggtgcccaggatgacactgcctgaggagctatcaaagagccaatccctgtgggatttgtgagaaaattcagccatctctagacctc

SEQ ID NO: 5870 - DNA, 120 bp, synthetic construct
  misc_feature 1..120: note = Artificially Synthesized Probe
  source 1..120: mol_type = other DNA
gaatgcaagttgtcactgcaagattgatttctagtgacaataacaagcagaagctgactaacagcacactgcccaccatctgctcaagatacccaataaagtgtatttgttcctcatttt

SEQ ID NO: 5871 - DNA, 120 bp, synthetic construct
  misc_feature 1..120: note = Artificially Synthesized Probe
  source 1..120: mol_type = other DNA
aacattgttgaggagtatctaaagggtgaattcagggaggttgtgctacagccttaaaaacacataaagtaactcagcgtcatcctttcttgttcacactggaagaactgaagtcaatag

SEQ ID NO: 5872 - DNA, 120 bp, synthetic construct
  misc_feature 1..120: note = Artificially Synthesized Probe
  source 1..120: mol_type = other DNA
ggaaatgtagttgttataagaaatgctcaatgttccagaagtgctatgagttactagaacaggaattttcaatggcagttttattccagtttgtccccagtgcttcaagagagggttggg

SEQ ID NO: 5873 - DNA, 120 bp, synthetic construct
  misc_feature 1..120: note = Artificially Synthesized Probe
  source 1..120: mol_type = other DNA
ttgggacgggagtggtctcttgtgcttccgtgccctggtcttacctcaaagttactttcttaccttgaagacccaccattaaatataaactaatcagcctatataaacacaaatataacc

SEQ ID NO: 5874 - DNA, 120 bp, synthetic construct
  misc_feature 1..120: note = Artificially Synthesized Probe
  source 1..120: mol_type = other DNA
gccacatggaattaaagggcttgcccaaagcagatacttctctggattttgccaagctaggcagtcacacttcccccaaaaagaaaagtagaaattagacaaaaataaactttatagcac

SEQ ID NO: 5875 - DNA, 120 bp, synthetic construct
  misc_feature 1..120: note = Artificially Synthesized Probe
  source 1..120: mol_type = other DNA
actagctggtaaaacgagtggcaaatgtactaggatttattaaaaagcggggaaaaagattccctgcatctacaaccaaatacccctcccatctcttccctgaagagaaatgattctgta

SEQ ID NO: 5876 - DNA, 120 bp, synthetic construct
  misc_feature 1..120: note = Artificially Synthesized Probe
  source 1..120: mol_type = other DNA
catgcaatatgattggcagatgaatttacagggaggagtttgagcacgcatggaaaacgttctgattttgttgtctttgagatgctcttcgatgtcacagaaggaaatgtatgattagtg

SEQ ID NO: 5877 - DNA, 120 bp, synthetic construct
  misc_feature 1..120: note = Artificially Synthesized Probe
  source 1..120: mol_type = other DNA
aattctgaaagctattggataatggcgttgtttagaataataaccttatagcgtaaaccacaaacatgaagtcagccgactactgcgatgtatgccaagcacaggaatctggagaagtac

SEQ ID NO: 5878 - DNA, 120 bp, synthetic construct
  misc_feature 1..120: note = Artificially Synthesized Probe
  source 1..120: mol_type = other DNA
atataaaattaaatgagcattgacggcaagctgcatttttttcctaaacaggaaaagggttgagcctcgcaggtggttctcttctgatatgtggcctctgagagaatacctggccagcca

SEQ ID NO: 5879 - DNA, 120 bp, synthetic construct
  misc_feature 1..120: note = Artificially Synthesized Probe
  source 1..120: mol_type = other DNA
catgtcccctgcctttcaaagaatccaccttctggcctgacttttctagctaaattttacaaaccataattcctagctttcctattttctcagaaaaatgtccaccaggtgtttattcag

SEQ ID NO: 5880 - DNA, 120 bp, synthetic construct
  misc_feature 1..120: note = Artificially Synthesized Probe
  source 1..120: mol_type = other DNA
tatacttaatgtaataagtaaacacactacacgagaagtcattctgtaggaaagtgagtgcggatttctaattacttaggcacagctagtttcctagcctgacaggtgtggaaacacctt

SEQ ID NO: 5881 - DNA, 120 bp, synthetic construct
  misc_feature 1..120: note = Artificially Synthesized Probe
  source 1..120: mol_type = other DNA
aaatgcctcttttccaaacaccaagcaaaggaaccaaaaccaaatctacacaaacatgacctttccctgtaactctcctgattgctttcatcctgtgctttgaaacagggaaaatgcgta

SEQ ID NO: 5882 - DNA, 120 bp, synthetic construct
  misc_feature 1..120: note = Artificially Synthesized Probe
  source 1..120: mol_type = other DNA
ggcatctccttcctgctgtcttgccctgcaccatccgcttcctctctcgttttctttcttcctcacattctttcatttaaaaaaaattccaagtatgagcaaaaaataattttaatggga

SEQ ID NO: 5883 - DNA, 120 bp, synthetic construct
  misc_feature 1..120: note = Artificially Synthesized Probe
  source 1..120: mol_type = other DNA
atttcctacccttttaaggtggtgagtgctaagttttaaactgattgccttataagccaaaatgttagaaaccagcctattttcacacaggaggctgtgcttccagaaatctgcctaacc

SEQ ID NO: 5884 - DNA, 120 bp, synthetic construct
  misc_feature 1..120: note = Artificially Synthesized Probe
  source 1..120: mol_type = other DNA
taattctttcaacaaatatctctaagtactcattatgtgacagacactttgaaggcgctgtattgaagcataggaacttggtcctgagcaaatgagggacttaatgagagcacatgggct

SEQ ID NO: 5885 - DNA, 120 bp, synthetic construct
  misc_feature 1..120: note = Artificially Synthesized Probe
  source 1..120: mol_type = other DNA
acatgtgaccagctgtaattgtgctggaaggactgaagccactgatggttgctccgtactttggttctacttaaaaaatacttttagcaggacataattcattatacaaggcagcattag

SEQ ID NO: 5886 - DNA, 120 bp, synthetic construct
  misc_feature 1..120: note = Artificially Synthesized Probe
  source 1..120: mol_type = other DNA
aaaaaacctaacagttgttgactactgcgtgcttaagaagagttctgagccattttcttgcatgaactcataatgcccacaacaactctctaaggcaggtattcttatccacatgttgca

SEQ ID NO: 5887 - DNA, 120 bp, synthetic construct
  misc_feature 1..120: note = Artificially Synthesized Probe
  source 1..120: mol_type = other DNA
gactgtctcttctggacataatagaagtgtgtcctgtgtccataattgtaaataaacttactggcatatagaaacagtgcctggtgagctctttttgaggatagatgctaggtcttctct

SEQ ID NO: 5888 - DNA, 120 bp, synthetic construct
  misc_feature 1..120: note = Artificially Synthesized Probe
  source 1..120: mol_type = other DNA
gagaccccaagaacagagctgcctagagttctattgcagaactccagggttgcagcaattaattttacatctaaaatgttgctgtaagaatttaccccacaaaaattgatcaatgggatc

SEQ ID NO: 5889 - DNA, 120 bp, synthetic construct
  misc_feature 1..120: note = Artificially Synthesized Probe
  source 1..120: mol_type = other DNA
gacattttgaaaaaattggggaatttgaattggggctgaacacctgtgttgaatgtattaggtgtggtaaaagaggggtaagagtagggttgtgttagaataaaagaaggtccacattgg

SEQ ID NO: 5890 - DNA, 120 bp, synthetic construct
  misc_feature 1..120: note = Artificially Synthesized Probe
  source 1..120: mol_type = other DNA
ctgactcgccttagggggtgccttttactccgttgtgtacaaagcattttgaaggaagagaaggaactaacagttagtgttgtcagtattctcagaattttggcaatatcccataataag

SEQ ID NO: 5891 - DNA, 120 bp, synthetic construct
  misc_feature 1..120: note = Artificially Synthesized Probe
  source 1..120: mol_type = other DNA
gtatttcaagcttcccccttttgaaatgaggattgctgacggatggtgtgcaaactttagaacttgttgtcaagatgtcagttgaatcttaattaaccattgaggcagcctgggagatac

SEQ ID NO: 5892 - DNA, 120 bp, synthetic construct
  misc_feature 1..120: note = Artificially Synthesized Probe
  source 1..120: mol_type = other DNA
gagaattattagctcatcagattcagtatatcaaaatgaacctgctgacaaggtggaacataattcacagactacagctgttattaatgtgtgactatttctggcaaggcccagggtgca

SEQ ID NO: 5893 - DNA, 120 bp, synthetic construct
  misc_feature 1..120: note = Artificially Synthesized Probe
  source 1..120: mol_type = other DNA
aaaaaaaaagtgttaatgaattctttaaaataatacccatctcttcgattcatgaaaggattctttaaactcctctgcaagagcctgagtctgcccagcatcacggtgatggcctccatg

SEQ ID NO: 5894 - DNA, 120 bp, synthetic construct
  misc_feature 1..120: note = Artificially Synthesized Probe
  source 1..120: mol_type = other DNA
agtctcgctctgtcgcccaggtgacatttctcacaatagcaaaagtttgaaatatgagtgttcatcagtagtggaatgattaaattagggtacatatagacagtgggatactctgaaact

SEQ ID NO: 5895 - DNA, 120 bp, synthetic construct
  misc_feature 1..120: note = Artificially Synthesized Probe
  source 1..120: mol_type = other DNA
ctttccatttctgtggccctcaggtgtggacatcgctgccttattttccctaaagtgacaaacaggatcacatcacatatttaaactctgaaatcggtattatgaggtttaatctgtatc

SEQ ID NO: 5896 - DNA, 120 bp, synthetic construct
  misc_feature 1..120: note = Artificially Synthesized Probe
  source 1..120: mol_type = other DNA
aaagagtgtggaaagaagagaaaatgaagctatatagacttcaagtaacagcatcattgctctagaactaggtcattcttggtctctgagctccggacaaattctgaagtgacctacatc

SEQ ID NO: 5897 - DNA, 120 bp, synthetic construct
  misc_feature 1..120: note = Artificially Synthesized Probe
  source 1..120: mol_type = other DNA
tttttctgtttcttgtttcacaatctgacatctcatgtgtctggaaggtcagctccatgaggtcaggaattgcctacttttttttttcaactgttgtacactcagcacctagaagagtac

SEQ ID NO: 5898 - DNA, 120 bp, synthetic construct
  misc_feature 1..120: note = Artificially Synthesized Probe
  source 1..120: mol_type = other DNA
ctcaccttatgtatctgatttatgtagaaacgtcgataaattagttaggagggcattcttgctgatatcagcaatcccagagcacctgggaggaaagcagagtgaagattttgaaagtca

SEQ ID NO: 5899 - DNA, 120 bp, synthetic construct
  misc_feature 1..120: note = Artificially Synthesized Probe
  source 1..120: mol_type = other DNA
gagtgtggaaaggagctggtatttttcctgtttattcattaattgaacaattgattggtcatctactgcatgccagttagcttattaggggctcagatgcaagtgggggaaggtaataat

SEQ ID NO: 5900 - DNA, 120 bp, synthetic construct
  misc_feature 1..120: note = Artificially Synthesized Probe
  source 1..120: mol_type = other DNA
agtcagaaaataccaagagcagccgccgcatcttagaatttgctgtgttttactcagtccttttggggtgtcagcattttgttttctgtgtgttggcagttgatcggtaatttccaccga

SEQ ID NO: 5901 - DNA, 120 bp, synthetic construct
  misc_feature 1..120: note = Artificially Synthesized Probe
  source 1..120: mol_type = other DNA
agagaacagcaaccagcagtgacctctcctaatgacagtggtcatactagtatgaccatattaccagaagaaagaagagaggttgttttttaaagcactggagattccatgtcagaaaat

SEQ ID NO: 5902 - DNA, 120 bp, synthetic construct
  misc_feature 1..120: note = Artificially Synthesized Probe
  source 1..120: mol_type = other DNA
gggagacatcagctgtgggtcaagagctacttaaaagagaattcaggagatcaaagtattgtcttccaccattcatcagaagaaaatacatctagatttaaaccctggaattagactggc

SEQ ID NO: 5903 - DNA, 120 bp, synthetic construct
  misc_feature 1..120: note = Artificially Synthesized Probe
  source 1..120: mol_type = other DNA
tatctctgcaactcttttcattttgtgtagctgaaactctgtacttactaaacaatctcttcattcctccctcccccaatcgctagcaaccaccatccaatgttctgtctccatgatttt

SEQ ID NO: 5904 - DNA, 120 bp, synthetic construct
  misc_feature 1..120: note = Artificially Synthesized Probe
  source 1..120: mol_type = other DNA
atatgcaagtttcttggctctctacttaatgcattgggattgcgatagagatggtgttgagtctgtatatcactttgtgtggtgccttacttcatttgggctgctatgacgtaataccat

SEQ ID NO: 5905 - DNA, 120 bp, synthetic construct
  misc_feature 1..120: note = Artificially Synthesized Probe
  source 1..120: mol_type = other DNA
catgacactgtgcaaaacaattcatgttcattatgtagttactactcaaaatacctcctaggtaggtactgctattctttccattctacagatgagaaaccagggctgagagatgttcag

SEQ ID NO: 5906 - DNA, 120 bp, synthetic construct
  misc_feature 1..120: note = Artificially Synthesized Probe
  source 1..120: mol_type = other DNA
aggtcaaaatgaaggcacttctgatgttttttttcatgagcattaagcagtgcgcaccaactgaactctagtataaagtggcttaccagaattataaaaagactgcacatgttcaatttt

SEQ ID NO: 5907 - DNA, 120 bp, synthetic construct
  misc_feature 1..120: note = Artificially Synthesized Probe
  source 1..120: mol_type = other DNA
gtgttaatgacactatattgagacagtatattgagcatctgtgaggcacaggcagtcaccagatgttgtgcatatgtagcttgttagttttgccaatacctctgtgaggtactcattttt

SEQ ID NO: 5908 - DNA, 120 bp, synthetic construct
  misc_feature 1..120: note = Artificially Synthesized Probe
  source 1..120: mol_type = other DNA
aagctgttggagcagggctcttaattgataagcagctgtgttaataattcacaatgaatagcatatttaaaacgtcaacccagtgttgattcttatggcagtatctgaggcgagagagac

SEQ ID NO: 5909 - DNA, 120 bp, synthetic construct
  misc_feature 1..120: note = Artificially Synthesized Probe
  source 1..120: mol_type = other DNA
gaataatagatacaatttactgaaatatgtatatatgaaaatatccttcaagggaagagagtttgccaaggtcaaacaggccgagaagtctaggtgtgttgggggaaggctgagaggtgc

SEQ ID NO: 5910 - DNA, 120 bp, synthetic construct
  misc_feature 1..120: note = Artificially Synthesized Probe
  source 1..120: mol_type = other DNA
gacaactttggaaaatagcacccagaatcccgtggcttaactttgttcagtacaaccccaaattattgatttatgattttttgaccctgagaaaagatgcagatgcagagaaaagatgta

SEQ ID NO: 5911 - DNA, 120 bp, synthetic construct
  misc_feature 1..120: note = Artificially Synthesized Probe
  source 1..120: mol_type = other DNA
gaaatgcaaatcaaaaccacaatgagatgccatctcacaccagttagaatggcaatcattaaaaagtcaggaaacaacaggtgctggagaggatgtggagaaataggaacacttttacac

SEQ ID NO: 5912 - DNA, 120 bp, synthetic construct
  misc_feature 1..120: note = Artificially Synthesized Probe
  source 1..120: mol_type = other DNA
gctaattatcagagttatttatatgactgtgtcaggtacctgcctgaaaatgctcaacactgtccatcagtaagtaagagcaccagagaatgactgtctcttttctttgtggttctaacg

SEQ ID NO: 5913 - DNA, 120 bp, synthetic construct
  misc_feature 1..120: note = Artificially Synthesized Probe
  source 1..120: mol_type = other DNA
tttattgtccttcacaaacacaccccagagattagctcattataggttttattcaacaaagtaattattgcagagaggaagctgagcttttagtgatggacttggaagtgatgggtgacc

SEQ ID NO: 5914 - DNA, 120 bp, synthetic construct
  misc_feature 1..120: note = Artificially Synthesized Probe
  source 1..120: mol_type = other DNA
gaaactatgacttggagagtttattagctcaagcaacaatcatacacccattaaattacatagcgcttcctccagatcttcaggtccagatccagtgaaaaggaaatgatactaggtgga

SEQ ID NO: 5915 - DNA, 120 bp, synthetic construct
  misc_feature 1..120: note = Artificially Synthesized Probe
  source 1..120: mol_type = other DNA
gctaaaggcaaaccgggaggcatgctgtaaagtctatgcaaaatctggatgctcatggagaagattcttgtcaaatgtcatgtattattagtataggtagtctcacccttctaaaaaagg

SEQ ID NO: 5916 - DNA, 120 bp, synthetic construct
  misc_feature 1..120: note = Artificially Synthesized Probe
  source 1..120: mol_type = other DNA
agcttttccatcagtacacaaatcagtcattattcttgcctctcatcttagtgacagtacttcattgccccagcctacttgtcaaatccattgtcctgttaattttctccacacactcca

SEQ ID NO: 5917 - DNA, 120 bp, synthetic construct
  misc_feature 1..120: note = Artificially Synthesized Probe
  source 1..120: mol_type = other DNA
ttggagaggattctccatcaggactgccaggtttctagcattggctttgcaacttactagctttatctaagcaaccttgtgcaagatatttaactttgggaacagtaatgatacctaact

SEQ ID NO: 5918 - DNA, 120 bp, synthetic construct
  misc_feature 1..120: note = Artificially Synthesized Probe
  source 1..120: mol_type = other DNA
tcagtcttcccctgttttttttttttctgaccttgaatcatttatttatatcaacatttttatggattgaattgtattccccccaactcaaatttatatgttaaggccgggcctggtggc

SEQ ID NO: 5919 - DNA, 120 bp, synthetic construct
  misc_feature 1..120: note = Artificially Synthesized Probe
  source 1..120: mol_type = other DNA
tcctaacatcgtgtcttagggatgacagttcaagagaaaatgtgctaaagctgtgacttgaagggtttatttagatatgtgcatttcctgacaggcgagattagtggattctggaaaaag

SEQ ID NO: 5920 - DNA, 120 bp, synthetic construct
  misc_feature 1..120: note = Artificially Synthesized Probe
  source 1..120: mol_type = other DNA
attaagacacatgtatctacaagtaggtttgggccaagaatgttccctgccccaactccgtgaaaaatttccattacatcagatacttctaggattgtatattcccttggaagatcacaa

SEQ ID NO: 5921 - DNA, 120 bp, synthetic construct
  misc_feature 1..120: note = Artificially Synthesized Probe
  source 1..120: mol_type = other DNA
aataatacttattgcaagagcatcctgaagtagtctcgggctaggtaattcatctagttcatcctcttcgtttcaggaaagtggatttcctagcctattcaagcagctatcacaaaatac

SEQ ID NO: 5922 - DNA, 120 bp, synthetic construct
  misc_feature 1..120: note = Artificially Synthesized Probe
  source 1..120: mol_type = other DNA
agattcaaggcagctgcccaccccagtcatccaattccttgggctatcttaaattcttttccagtctcttctacttagtttaaataaatcaagtcacactttttctccagggactcattt

SEQ ID NO: 5923 - DNA, 120 bp, synthetic construct
  misc_feature 1..120: note = Artificially Synthesized Probe
  source 1..120: mol_type = other DNA
tgagagaataatgttctgatatctccacttgacatcttagactctattgtgttataacttcccacaacttgccaaagggccattctaaacttttgctcttcaatcggccatcattacggg

SEQ ID NO: 5924 - DNA, 120 bp, synthetic construct
  misc_feature 1..120: note = Artificially Synthesized Probe
  source 1..120: mol_type = other DNA
aaaccctttagcacatactatctagaccaagcaggtggtacatgttatattcacatgtagaagactcatccctggttgagtgacactctagataaatcactcaaggttccagctcttaaa

SEQ ID NO: 5925 - DNA, 120 bp, synthetic construct
  misc_feature 1..120: note = Artificially Synthesized Probe
  source 1..120: mol_type = other DNA
ttgaactcttttagaagaataaatctattgatagtagcgttgggcagtactctgtcatctagaatgccccattttctggccaggctggagaagtgcattttcagtactggaaagctgagt

SEQ ID NO: 5926 - DNA, 120 bp, synthetic construct
  misc_feature 1..120: note = Artificially Synthesized Probe
  source 1..120: mol_type = other DNA
caaaaagtctattacaacccatgtcaagctgtgatattattcaaatcactggagtctgatttcaatgatcgttttctatgcacagcttcaggatactcagcctatcacccaggaggtgaa

SEQ ID NO: 5927 - DNA, 120 bp, synthetic construct
  misc_feature 1..120: note = Artificially Synthesized Probe
  source 1..120: mol_type = other DNA
actttgataaacaattaccacctgctcatagcctataatccaaccatactgggaaatgtatcctttagtagataggacctgcatttgcaggagtctttgtctcctaattttccttcagcc

SEQ ID NO: 5928 - DNA, 120 bp, synthetic construct
  misc_feature 1..120: note = Artificially Synthesized Probe
  source 1..120: mol_type = other DNA
cagggctatggcgtcaggcacttgacctgtgttttaggcaattgtgagttaatggaaatgatattagcaatcataggcaatgactaatatttaccaagcatttagggaattggatcagtg

SEQ ID NO: 5929 - DNA, 120 bp, synthetic construct
  misc_feature 1..120: note = Artificially Synthesized Probe
  source 1..120: mol_type = other DNA
tgcccatctgcagcaccattcacggcagccgaggtgtggaaacaatgtaaacgtccattgaaatgtggaaacaatgtaaatgcctttgacggatggttgggtaaagaaaatgtgttatgt

SEQ ID NO: 5930 - DNA, 120 bp, synthetic construct
  misc_feature 1..120: note = Artificially Synthesized Probe
  source 1..120: mol_type = other DNA
gtctcccaattactaagtgtgtgactttgggcacccacgtcacgtctgacactcagttctacatctgtaagtgaatataacaatgcctaattttcagcatcattacaagaagtatagatc

SEQ ID NO: 5931 - DNA, 120 bp, synthetic construct
  misc_feature 1..120: note = Artificially Synthesized Probe
  source 1..120: mol_type = other DNA
atttgaaacagttgagaagatgtaatgaagtaacaacttagtaaagaatggacagggtcaggaaagcaggaaaacgtggtgaaacattctgggattagaatcgcaagaagttgctaccac

SEQ ID NO: 5932 - DNA, 120 bp, synthetic construct
  misc_feature 1..120: note = Artificially Synthesized Probe
  source 1..120: mol_type = other DNA
tgatggttctcggcttgttgaaagttcacatcctaagagtgtgtgttgttgttagtgtgattacagaaaatctgcgccctctttctaacctgtgtcaaagataaacaaggcatgacacaa

SEQ ID NO: 5933 - DNA, 120 bp, synthetic construct
  misc_feature 1..120: note = Artificially Synthesized Probe
  source 1..120: mol_type = other DNA
cctagaaaccttgcaatgtcagctacgcactgtttatctcaactcacatacgcagatatttgttgcagattagggtgttgtctgtaaagaaagaaaagtgttcaaagaaaacctgctagg

SEQ ID NO: 5934 - DNA, 120 bp, synthetic construct
  misc_feature 1..120: note = Artificially Synthesized Probe
  source 1..120: mol_type = other DNA
ataattaaatgtagatgagtcccagtgtaaagtgtcagacggataacttattctttccaaaagaagaacagactcactcagcagcagcttttctgctctctctggaaaggaggtattgag

SEQ ID NO: 5935 - DNA, 120 bp, synthetic construct
  misc_feature 1..120: note = Artificially Synthesized Probe
  source 1..120: mol_type = other DNA
attcaactttcttcctgctatagagactatagattgcttgatttatgatgcgagatttgattcttcatgtcatcttgccaacacagccgctgcagttgtcttgttactccagctctttac

SEQ ID NO: 5936 - DNA, 120 bp, synthetic construct
  misc_feature 1..120: note = Artificially Synthesized Probe
  source 1..120: mol_type = other DNA
tcttaccccgcccccaggattaccaattcctttaacaatgccctttatttgtgcatcagtgctagtaggtttttcttttaatcagaaataattttggtgagcgtgtctatgcacacagaa

SEQ ID NO: 5937 - DNA, 120 bp, synthetic construct
  misc_feature 1..120: note = Artificially Synthesized Probe
  source 1..120: mol_type = other DNA
tcaggttaattcctaaagagttaatttgcactgccttgcccaaaatcaaaccagcagaacattttattaagcaaggcttttgtgtgagtggtatggaagcactgaatcagttgctgtttc

SEQ ID NO: 5938 - DNA, 120 bp, synthetic construct
  misc_feature 1..120: note = Artificially Synthesized Probe
  source 1..120: mol_type = other DNA
tctgttaaaaaaaaaaaaagcataatttgtcttatccttgttttgatcaaatgaatgagttctgggaaatccatccagctggtcagtggaatccacgtgcgagcacagcaaggcctaacg

SEQ ID NO: 5939 - DNA, 120 bp, synthetic construct
  misc_feature 1..120: note = Artificially Synthesized Probe
  source 1..120: mol_type = other DNA
acggggttagtttaatgatgcaagtcaactggggagccttgctgctatagagataccctttgtatgtttactttaacttcttgcatcagtcaattcaggctgttgtagcagaataccaca

SEQ ID NO: 5940 - DNA, 120 bp, synthetic construct
  misc_feature 1..120: note = Artificially Synthesized Probe
  source 1..120: mol_type = other DNA
attcgaatgtttctttcgttaagttaagtcttccattcaggaaaccaatattgcaagttcaacgtgtgaaaatgtcactaggctccacggtgctagagaggtggatcctgatgatgtcct

SEQ ID NO: 5941 - DNA, 120 bp, synthetic construct
  misc_feature 1..120: note = Artificially Synthesized Probe
  source 1..120: mol_type = other DNA
ctccacttcccttggaagaaaaaatgggggtaacggtaaggaggtgctctgagtaaagcagtttccgggtccaaaataattcaaagaaatgaagagcaaaaatcacagtacaagtagttt

SEQ ID NO: 5942 - DNA, 120 bp, synthetic construct
  misc_feature 1..120: note = Artificially Synthesized Probe
  source 1..120: mol_type = other DNA
atttggaaaattgccatcacaaactcttgagccttccattcttaaaccagttgcaaggggctttaccaaactgacttatccaggttacagatataacaagttcctgtaggtaatggctct

SEQ ID NO: 5943 - DNA, 120 bp, synthetic construct
  misc_feature 1..120: note = Artificially Synthesized Probe
  source 1..120: mol_type = other DNA
ccttcgcgtttccttacaggtccaactttccaacaaaatcatcactgtttgctttcctttaggcctacacgttcttttcctctgttacacaatgtctgaagtaaaacaaagatttctgtc

SEQ ID NO: 5944 - DNA, 120 bp, synthetic construct
  misc_feature 1..120: note = Artificially Synthesized Probe
  source 1..120: mol_type = other DNA
cttctgatcagcaaaataacccatcacagaaatgactgaattaatgactctctagacagttgagtctcttccacgtttttgatcagggcctgctcatactcagacatttcttgtttgttg

SEQ ID NO: 5945 - DNA, 120 bp, synthetic construct
  misc_feature 1..120: note = Artificially Synthesized Probe
  source 1..120: mol_type = other DNA
cacagtgggagaaggaaccaatcctgacctttctctaggcacttttctgatgtcagtagatgaactgaataattaatatctgacttcttctggaacttatttgaggtggcttacagaatc

SEQ ID NO: 5946 - DNA, 120 bp, synthetic construct
  misc_feature 1..120: note = Artificially Synthesized Probe
  source 1..120: mol_type = other DNA
gtcacttaaaattatatttgtgaggttcattcatgctgtgcatgtagtcagaggttgtgatttgcatggctatatggcattctgttacatggaatacaccactctggtagacagaccaat

SEQ ID NO: 5947 - DNA, 120 bp, synthetic construct
  misc_feature 1..120: note = Artificially Synthesized Probe
  source 1..120: mol_type = other DNA
aggcgctggatgaagcatcaatgcttgctgtacattcggcttttgtttttgagtttcagaaacccactcaaattagtttaagtaaaatggaaaatgaaatatctcctaaaggctgggcac

SEQ ID NO: 5948 - DNA, 120 bp, synthetic construct
  misc_feature 1..120: note = Artificially Synthesized Probe
  source 1..120: mol_type = other DNA
gtggcaagccctttttaaaaagtgagctccaattactttagtctctgccattcaattgctggtggttcttgcctttgaggctagtttgttagttacttaatatttattgagtgcctgcag

SEQ ID NO: 5949 - DNA, 120 bp, synthetic construct
  misc_feature 1..120: note = Artificially Synthesized Probe
  source 1..120: mol_type = other DNA
gtttgtgtctggatgtaccggaaacattggctcctctgcttccactaagatgatgatgatgatgtataattaattgccagtcctcgaaagttgggcaggttaaccaaaattaacttctaa

SEQ ID NO: 5950 - DNA, 120 bp, synthetic construct
  misc_feature 1..120: note = Artificially Synthesized Probe
  source 1..120: mol_type = other DNA
gaacattcacagtggttattggctgcttgaggtatgcatcactttactgtggagtcacaattatggatccaataacctggatcactctgctttgaggacccaaaacaaattaaatttctg

SEQ ID NO: 5951 - DNA, 120 bp, synthetic construct
  misc_feature 1..120: note = Artificially Synthesized Probe
  source 1..120: mol_type = other DNA
attacatcttgcagaatccattgctgcttatggcctcattcacgcaactgggcttgcattaaccctttgctttctgcatccatcaatgattgcctttctgttacttctaaaggcatttat

SEQ ID NO: 5952 - DNA, 120 bp, synthetic construct
  misc_feature 1..120: note = Artificially Synthesized Probe
  source 1..120: mol_type = other DNA
catgcaaaagggatacataaatatatcccgacacctaggtctgtatgaccttctcagaataacactgttggctaatatctttctattgtatgcccagaattcagctacttcccagcatac

SEQ ID NO: 5953 - DNA, 120 bp, synthetic construct
  misc_feature 1..120: note = Artificially Synthesized Probe
  source 1..120: mol_type = other DNA
gcagaatcaatcctactcgaattttcaacagttcaactcctgcaagttaggaggaagtctgaatgtggggagccaaattagatgttcaaagaagcacatattagcttgcattctaacttg

SEQ ID NO: 5954 - DNA, 120 bp, synthetic construct
  misc_feature 1..120: note = Artificially Synthesized Probe
  source 1..120: mol_type = other DNA
ttttggcttggttactaagttgcagttatgtgcactataagagtgtattctccagactatacatggacagaagtggtccctttgcagtgtgaccatctgtccttatttgttcctgtataa

SEQ ID NO: 5955 - DNA, 120 bp, synthetic construct
  misc_feature 1..120: note = Artificially Synthesized Probe
  source 1..120: mol_type = other DNA
agtctggtttattgggaggaggagcattaggtttgcacaaaagctgcaaacataataatatcagattctttcttgaggtaacatttggccatagtacaggaaaatgacagccgaaggctt

SEQ ID NO: 5956 - DNA, 120 bp, synthetic construct
  misc_feature 1..120: note = Artificially Synthesized Probe
  source 1..120: mol_type = other DNA
ggtagtacgtaaagtgggcttaatggagtaatggtaggaatttagtagccagagagtggtaggattagggagagaagaaagcctttgcctataaaataataatatagagctggacatggt

SEQ ID NO: 5957 - DNA, 120 bp, synthetic construct
  misc_feature 1..120: note = Artificially Synthesized Probe
  source 1..120: mol_type = other DNA
ttcctgacaaaagactcaacaagctaggaacaggaagaaacatcttcaacttgacaagtatctgtgaaaaacccaatagctagcatcatactgaagagcagaagactgaaatcagtccgc

SEQ ID NO: 5958 - DNA, 120 bp, synthetic construct
  misc_feature 1..120: note = Artificially Synthesized Probe
  source 1..120: mol_type = other DNA
ccaaatggtggtggtacaactagatattcacctgcaaaagagtgcagttggacccccaactcgtaccatatacaaagatgaactcaatgtggaccaaagacccaaaatataagagctaaa

SEQ ID NO: 5959 - DNA, 120 bp, synthetic construct
  misc_feature 1..120: note = Artificially Synthesized Probe
  source 1..120: mol_type = other DNA
atttcagaataggcagatccctagagataggaaatagatttgtggctgctgtaaggtagaggtagggagaaaatgaaatgattgctaataggtatgaaatttctttgaagggggatgaag

SEQ ID NO: 5960 - DNA, 120 bp, synthetic construct
  misc_feature 1..120: note = Artificially Synthesized Probe
  source 1..120: mol_type = other DNA
tggggactttaaccactacatatttctaacgaatatagaggaagtcaagttttcctcagggtctgtggagcatgtgtttctgcctctacttttctttgagcagaattgtgctttgtgtaa

SEQ ID NO: 5961 - DNA, 120 bp, synthetic construct
  misc_feature 1..120: note = Artificially Synthesized Probe
  source 1..120: mol_type = other DNA
taagtgccagacagaatgtggaaagagaagatgccagtacttcccatgaagcttagagtccacgtaaagacaatgcatgtgcaaggagaattccacagtagtgttatcattaagtaaaaa

SEQ ID NO: 5962 - DNA, 120 bp, synthetic construct
  misc_feature 1..120: note = Artificially Synthesized Probe
  source 1..120: mol_type = other DNA
acgttacattttttattttcaatattaaatatgtatctgtctacaataggccatgcacagcgtatgccttttgttagcagctacagttcccgcattctgatggaaacaccgtgaccttct

SEQ ID NO: 5963 - DNA, 120 bp, synthetic construct
  misc_feature 1..120: note = Artificially Synthesized Probe
  source 1..120: mol_type = other DNA
cattttctctctgttagggctcctatattaaattcattccacaaattcaatcttgttatattccatctactaacactgaccatggcccaacccatttcatcatgggaagcacaggtggct

SEQ ID NO: 5964 - DNA, 120 bp, synthetic construct
  misc_feature 1..120: note = Artificially Synthesized Probe
  source 1..120: mol_type = other DNA
ttgtcagccaaaatatttttgtctgtgagtaacagaacagccaactaaaactgttccaattgcaggtgtccgtattgtttcacaagacaagtttagacatagccagtccaaggcagattc

SEQ ID NO: 5965 - DNA, 120 bp, synthetic construct
  misc_feature 1..120: note = Artificially Synthesized Probe
  source 1..120: mol_type = other DNA
tcaaattaattttggtggccttaaggaccatatttttacaagcagctggctcctatattagttgctagtttagtgaagactctggcagtccagaaccaaaggcagcaattcaggagttta

SEQ ID NO: 5966 - DNA, 120 bp, synthetic construct
  misc_feature 1..120: note = Artificially Synthesized Probe
  source 1..120: mol_type = other DNA
tggccaaaagggggccttttgtggctacattaagcatctgaaatggaggattacccttagttatccaatggaacctcaatgtgatcacatgtgttcttataagaaggaaataagaatgct

SEQ ID NO: 5967 - DNA, 120 bp, synthetic construct
  misc_feature 1..120: note = Artificially Synthesized Probe
  source 1..120: mol_type = other DNA
gtataataaaaaaaaaaaaaaagaaggaaatagagggagatttgacacagacgaaggaggaaatggcaaagtgaccacagaggtggagatgggagggatgtggccacaagcccaggaata

SEQ ID NO: 5968 - DNA, 120 bp, synthetic construct
  misc_feature 1..120: note = Artificially Synthesized Probe
  source 1..120: mol_type = other DNA
gctgggctcctagctcagctctctaggggacaaccctgagtttcaaaaggtggttctttaccatcttcaccacaaagaaaggaaatgaaattctttcaaattgagatgtattttgatgtt

SEQ ID NO: 5969 - DNA, 120 bp, synthetic construct
  misc_feature 1..120: note = Artificially Synthesized Probe
  source 1..120: mol_type = other DNA
gcctggccttattcatgtactttttaatatcatgctgatatgtcaatgtccacagactaccgactacgaaggtcaaaatttagctgctttacattttctcccacttccgtctcttcactc

SEQ ID NO: 5970 - DNA, 120 bp, synthetic construct
  misc_feature 1..120: note = Artificially Synthesized Probe
  source 1..120: mol_type = other DNA
tgtacccattaaccatccccctctgcccacccccaccatccaccactacccttcccaacctctgataaccatttttctactccctagctccatgaattgtttaatttttggctcccacaa

SEQ ID NO: 5971 - DNA, 120 bp, synthetic construct
  misc_feature 1..120: note = Artificially Synthesized Probe
  source 1..120: mol_type = other DNA
caatttttttttaagtagtttcattgtttgaggtcttacatgtagtcctttaatccattttgatttgatttttgtatatggtgagagggaagggtctagttttattctcctgcatatgga

SEQ ID NO: 5972 - DNA, 120 bp, synthetic construct
  misc_feature 1..120: note = Artificially Synthesized Probe
  source 1..120: mol_type = other DNA
ttgctgaatttttttatcagttctaattttttttagtgaaatccttaggtttttccaaatataagatcatattatctgcaaacaaggataatatgggcaggtcgagaaatatcatccaag

SEQ ID NO: 5973 - DNA, 120 bp, synthetic construct
  misc_feature 1..120: note = Artificially Synthesized Probe
  source 1..120: mol_type = other DNA
gggatatgcagttcccgaatggctagggctggtctcagtgctccgtccgtgggaattgactgagttctgcctagcgttgctttactctgtgacaaagcaacactgagtttcaatgcaaag

SEQ ID NO: 5974 - DNA, 120 bp, synthetic construct
  misc_feature 1..120: note = Artificially Synthesized Probe
  source 1..120: mol_type = other DNA
tttctacttgaaataaactgtccttgttacagacaaaatgaatgcctgcacaaaatatgccaaaataatatatgtatagtagttccccttatctacagagtatccattccaagaacccca

SEQ ID NO: 5975 - DNA, 120 bp, synthetic construct
  misc_feature 1..120: note = Artificially Synthesized Probe
  source 1..120: mol_type = other DNA
aaatgcccatcaatgttagactggataaaaaaatgtggcacatatataccatggaatactatgcagtcataaaaaaaatgagttcatgtcctttgcagggacatggatgaagctgtaaac

SEQ ID NO: 5976 - DNA, 120 bp, synthetic construct
  misc_feature 1..120: note = Artificially Synthesized Probe
  source 1..120: mol_type = other DNA
agtatcaactcaaagtctgtgatctcatcagttcagaactcccaaattttaacactgaaatcatctgaatgagttttgagtaggcctcagggcatactccacccaaagcacaattcatct

SEQ ID NO: 5977 - DNA, 120 bp, synthetic construct
  misc_feature 1..120: note = Artificially Synthesized Probe
  source 1..120: mol_type = other DNA
ttaagctcttcaaagggccttttgtgtgactgaatacttaccttttgatctttcaaggtattagcaaaggtttttcagccatgctctcaggatggcagtatctttctcgacagtgaatct

SEQ ID NO: 5978 - DNA, 120 bp, synthetic construct
  misc_feature 1..120: note = Artificially Synthesized Probe
  source 1..120: mol_type = other DNA
agctcctggtagcagaaaagaaagcatgatcaactttgagaaagtaaaacacacacacacacattgtaaagaggtactgactgtacattttcttgtagctcctctagcatcactcaggta

SEQ ID NO: 5979 - DNA, 120 bp, synthetic construct
  misc_feature 1..120: note = Artificially Synthesized Probe
  source 1..120: mol_type = other DNA
tcgctgacggaacaggctgcagtggtttatttttaagcaaaagtgatctcattggaatttgtgaattaatggtaccgacgttggaaaatggacagcttctttgatttccacctgtttttg

SEQ ID NO: 5980 - DNA, 120 bp, synthetic construct
  misc_feature 1..120: note = Artificially Synthesized Probe
  source 1..120: mol_type = other DNA
cacctttatgttgccttccagtttaagaaggaagattgagcacagaaatgttccttgttttgatggcaaaagcatgtggaagtgacagcaaaataaataacgaaaaacacagctgcagcc

SEQ ID NO: 5981 - DNA, 120 bp, synthetic construct
  misc_feature 1..120: note = Artificially Synthesized Probe
  source 1..120: mol_type = other DNA
taaaatattgacaagtaggagattgaactgaagaaatcatccaaatactcccaaagtcaaaaaggaaaaacttaagaaaaagcccgaggtgtggggattgacctagaagctccagcacag

SEQ ID NO: 5982 - DNA, 120 bp, synthetic construct
  misc_feature 1..120: note = Artificially Synthesized Probe
  source 1..120: mol_type = other DNA
cagcagtgagtttcttaaggagacagagctaattaaggacagagtcatgtcctggcttgaatggagcaattttgatagcatatatcataatgcctccaccacatactttccctatataga

SEQ ID NO: 5983 - DNA, 120 bp, synthetic construct
  misc_feature 1..120: note = Artificially Synthesized Probe
  source 1..120: mol_type = other DNA
ttaagagggcagggaagtaaataagcatcctaggtagataatgtccatcagatgtggtcaagtcaatatacagaggagtttcttattagtatcacagaagtgaaggtggtggaatggact

SEQ ID NO: 5984 - DNA, 120 bp, synthetic construct
  misc_feature 1..120: note = Artificially Synthesized Probe
  source 1..120: mol_type = other DNA
tagtaatttgcctctcggatttccccctttggccacagaaggggatctacagagcttttgctgtagtcatcatcagattatcattctatgaaaatgtgtatctggtaaaatcaggctttt

SEQ ID NO: 5985 - DNA, 120 bp, synthetic construct
  misc_feature 1..120: note = Artificially Synthesized Probe
  source 1..120: mol_type = other DNA
gacttccaattcagtgctcttcccaccatcctcttttgctgagtgatcgagtgtcgttgtatgtttttctgtcaaactgcttctaaaatgcttttcatgcttcacaaactctcagaaatc

SEQ ID NO: 5986 - DNA, 120 bp, synthetic construct
  misc_feature 1..120: note = Artificially Synthesized Probe
  source 1..120: mol_type = other DNA
aattataaaggctcagttaatcattgcagagttacttcattcactttaagctattacgtctttagggagcaggtttgtccatggaactgtttctcagtggtatacatgggagtcacacca

SEQ ID NO: 5987 - DNA, 120 bp, synthetic construct
  misc_feature 1..120: note = Artificially Synthesized Probe
  source 1..120: mol_type = other DNA
ggaacctaataattccactcacacatgaccctcagcttccccttacctttttttttttatcttattcctcttcctaaacattctctctcttcccgctccctaaagaggcaatagcttaaa

SEQ ID NO: 5988 - DNA, 120 bp, synthetic construct
  misc_feature 1..120: note = Artificially Synthesized Probe
  source 1..120: mol_type = other DNA
attttttaaatctaccttgtctgaaaatgattggtacaacagcctcacattctctaacatcctgaagaccttgtagacttccttacttgtttgttgcaactactggggcaagccaaatga

SEQ ID NO: 5989 - DNA, 120 bp, synthetic construct
  misc_feature 1..120: note = Artificially Synthesized Probe
  source 1..120: mol_type = other DNA
acttacctgaggaatcattacagcaggcccctcctttctcccctaaatttttgttctgtattggctgattcctatcatgaacgaaatgtggtcttccttctcttaccttaacacaaacac

SEQ ID NO: 5990 - DNA, 120 bp, synthetic construct
  misc_feature 1..120: note = Artificially Synthesized Probe
  source 1..120: mol_type = other DNA
ctgatgtcagttgatggaaaaatttgtagaacaagctaaggaccttcaagtcatcttttattctactttttctctaacatcccacatccgatccatcaagaaatcctgccagctctgcct

SEQ ID NO: 5991 - DNA, 120 bp, synthetic construct
  misc_feature 1..120: note = Artificially Synthesized Probe
  source 1..120: mol_type = other DNA
cagcaaagtccccagtttgtggccgtccacgaagacttcttgggcattttctcatttgatacttaaacagcctagttttaaagataaggaaacttacaagcatgtgatttcacatagaat

SEQ ID NO: 5992 - DNA, 120 bp, synthetic construct
  misc_feature 1..120: note = Artificially Synthesized Probe
  source 1..120: mol_type = other DNA
tagtatttcacgatattaatgtgccttaatttgcgccatcttctgatattgaaagtttaggctgtgacaggaaaggaagtggcaggtgtaaaaagccatggtgagtgacaaatcagcagg

SEQ ID NO: 5993 - DNA, 120 bp, synthetic construct
  misc_feature 1..120: note = Artificially Synthesized Probe
  source 1..120: mol_type = other DNA
acttttaacatcactaaccacactaatttatatggcaaataccctcttattgacactgttgcagactatagtaggggaaaggttaattccagaagcagggtgaaagacgcttacatgcag

SEQ ID NO: 5994 - DNA, 120 bp, synthetic construct
  misc_feature 1..120: note = Artificially Synthesized Probe
  source 1..120: mol_type = other DNA
agcttatggggttaggtagaggggggaattcaagtttaaaatggtttgggtatttccactgctttttggaggccacatttttcaatcaaaaccattaagccttagaattgcagagagtaa

SEQ ID NO: 5995 - DNA, 120 bp, synthetic construct
  misc_feature 1..120: note = Artificially Synthesized Probe
  source 1..120: mol_type = other DNA
cctttactttagaaataagaaaactatgagtcaaagacactaaatcactttttcaaagttaccaagatggctttagagaatccagggtgttcctgcctcagtgtaccttgcctccccggt

SEQ ID NO: 5996 - DNA, 120 bp, synthetic construct
  misc_feature 1..120: note = Artificially Synthesized Probe
  source 1..120: mol_type = other DNA
ggccaacttgcttcctgcagagatacatgttcagactctactaattacttttccttggcaaacgttgcatccctgggaaatttaaatacaacttccatctttgttgactccagtttagac

SEQ ID NO: 5997 - DNA, 120 bp, synthetic construct
  misc_feature 1..120: note = Artificially Synthesized Probe
  source 1..120: mol_type = other DNA
tctgtctggctcttgacagcaaacatcttgggggtcacaggtatgttgtagtaattatcatagttccctcataggtcacagtatctggggtgggataaagtctcaataaatattaactga

SEQ ID NO: 5998 - DNA, 120 bp, synthetic construct
  misc_feature 1..120: note = Artificially Synthesized Probe
  source 1..120: mol_type = other DNA
gcatcttctctgttttccaaaatacactaacacaaacatgcttcataacagacatttacaaaaagtgacaggatgacaaaggagaactgtgggtaccacagaagatgaagcaacaccgat

SEQ ID NO: 5999 - DNA, 120 bp, synthetic construct
  misc_feature 1..120: note = Artificially Synthesized Probe
  source 1..120: mol_type = other DNA
gaaccgacatgtgcattcattttcttaacttctcccagatcacattcttacacaggacaacccaaagaagggaaagatggaataaacctcggaagttcaaagtagcagaatgtttcttat

SEQ ID NO: 6000 - DNA, 120 bp, synthetic construct
  misc_feature 1..120: note = Artificially Synthesized Probe
  source 1..120: mol_type = other DNA
attttaattatttgatattacttgtaagttgccgaaggaaggagactcctgtatgactatactgtaggtgtctatttgcgacacaccagtgaacacgcacgtgcgatatacaaaggacaa

SEQ ID NO: 6001 - DNA, 120 bp, synthetic construct
  misc_feature 1..120: note = Artificially Synthesized Probe
  source 1..120: mol_type = other DNA
ccaagctcagtagctcaaggatcccataatgttaccaaaaaagactaagatctccatggttctagctgcatccaacaatgtaaacaggtaaagtagcatccttggagcatcttttattca

SEQ ID NO: 6002 - DNA, 120 bp, synthetic construct
  misc_feature 1..120: note = Artificially Synthesized Probe
  source 1..120: mol_type = other DNA
gcagtaaaatctcactgaagggttgaggcttgttttaaacgagtccagaactaagatgtaacccaaatagaaaaacagtcagtaaaaatccacgaagctcccgcatccctcttcttaaac

SEQ ID NO: 6003 - DNA, 120 bp, synthetic construct
  misc_feature 1..120: note = Artificially Synthesized Probe
  source 1..120: mol_type = other DNA
atcctttcaaacatggagttgccagacttctcctaggaattgtagcaggtaagataagccaagaagtaagaggaccatctgatagttcttatcttacttagatggaaagtggaaagctca

SEQ ID NO: 6004 - DNA, 120 bp, synthetic construct
  misc_feature 1..120: note = Artificially Synthesized Probe
  source 1..120: mol_type = other DNA
acatttgaaccaaagtaacatttgcacataactaggacattgccatgtagaggcgtctggtatgaggagggagcagggaatttctctaaatattgcaggtaaaaaggtttaggaaaagag

SEQ ID NO: 6005 - DNA, 120 bp, synthetic construct
  misc_feature 1..120: note = Artificially Synthesized Probe
  source 1..120: mol_type = other DNA
tggtaatgaccattaaacaaacacctgccagaaagaacttctcctccactgggattcaacaatagggaatacctcatccagtctacctattcgtaatagacaatttagtaggcaaaatct

SEQ ID NO: 6006 - DNA, 120 bp, synthetic construct
  misc_feature 1..120: note = Artificially Synthesized Probe
  source 1..120: mol_type = other DNA
atataaaaaatttactcccatctttaaggaggttacattctggctcatccattcactcatgcagcattgtgttgaggacctactatgtgacagggactatttcagccactgggataaaaa

SEQ ID NO: 6007 - DNA, 120 bp, synthetic construct
  misc_feature 1..120: note = Artificially Synthesized Probe
  source 1..120: mol_type = other DNA
agcctgggaaggaataaaacaaagggtcgtcaatatttatcttctaggatcaggcatgctttttttctttcatctcacttatctccttacagcatccctgacaactggacttacctgttt

SEQ ID NO: 6008 - DNA, 120 bp, synthetic construct
  misc_feature 1..120: note = Artificially Synthesized Probe
  source 1..120: mol_type = other DNA
ttactattctatatccctgctctgccatcagtaacatatggcttttatctttagattcacaaaagaaaagtaggcaggtgagtttgttggcagtcacagctctacagaagccttgtggta

SEQ ID NO: 6009 - DNA, 120 bp, synthetic construct
  misc_feature 1..120: note = Artificially Synthesized Probe
  source 1..120: mol_type = other DNA
catgagtcactgggaggactcataagagtcagcatttagacacaattacagctgtgagttattatcgtgaaaggatacagaacaaaattatcaaaaggaaaaggcacatggggtgacatc

SEQ ID NO: 6010 - DNA, 120 bp, synthetic construct
  misc_feature 1..120: note = Artificially Synthesized Probe
  source 1..120: mol_type = other DNA
gttgaatggcttttcccaaaatgctgatagtgctatggacaatgaaatccaggctgaggtggtctcagacagagatgagaaactagttgggaactgcagcaaagatgacttttgttatgt

SEQ ID NO: 6011 - DNA, 120 bp, synthetic construct
  misc_feature 1..120: note = Artificially Synthesized Probe
  source 1..120: mol_type = other DNA
gctgtcccctgcagagccacaggagtggagctgcccaaaaccataagaacccacctcttgcatcaacatgaccgaaatgtgagacatggagtcaaaaaagatcattttggagctttaaga

SEQ ID NO: 6012 - DNA, 120 bp, synthetic construct
  misc_feature 1..120: note = Artificially Synthesized Probe
  source 1..120: mol_type = other DNA
gtgaaaatgtttcacatgcctgtgactcagttctgatgatggctgtgatgctcatcatcaaaaaacttgaacttgtcttttaaggtctctatctggtcaacagcagaataacggctacca

SEQ ID NO: 6013 - DNA, 120 bp, synthetic construct
  misc_feature 1..120: note = Artificially Synthesized Probe
  source 1..120: mol_type = other DNA
cttaatagtgtttagagcattttatgaaacagtgccctctagtggctaaggatacacttttaaattgcaataacaggtgctatttttagctagctggagaattgatggcgaggctggcat

SEQ ID NO: 6014 - DNA, 120 bp, synthetic construct
  misc_feature 1..120: note = Artificially Synthesized Probe
  source 1..120: mol_type = other DNA
tccattttgtaattgcagaatcagaactaggagactgtctcttgactacctggaatgtatgatttacacttgtgttctggacagcagcatctggaaagtctaaatactgtagtctcttca

SEQ ID NO: 6015 - DNA, 120 bp, synthetic construct
  misc_feature 1..120: note = Artificially Synthesized Probe
  source 1..120: mol_type = other DNA
tgcatagccctcacttggagtggaaggcaatgctctttcttcttgagagcagggtatctgtagaaattacctggaattcttccatatggaagatttgtctactctcccccatttatttat

SEQ ID NO: 6016 - DNA, 120 bp, synthetic construct
  misc_feature 1..120: note = Artificially Synthesized Probe
  source 1..120: mol_type = other DNA
agaaagttttccgagagcctggaaatttcacatcatacttttctagccctgggtcactgtgagtttgccaaagcctccagcagatagataaattggtttccaagtgaacaaagtatatta

SEQ ID NO: 6017 - DNA, 120 bp, synthetic construct
  misc_feature 1..120: note = Artificially Synthesized Probe
  source 1..120: mol_type = other DNA
cccaactctgctatgtattatttgctttgtaagcaaagaacagttaaactgtctcaactatatatagcgtctatttccctctgttccttccctatccagggcttggctctatgaaaagca

SEQ ID NO: 6018 - DNA, 120 bp, synthetic construct
  misc_feature 1..120: note = Artificially Synthesized Probe
  source 1..120: mol_type = other DNA
agaattcaggcacacagtccccaactaacctcagaggaatttggaaaatgtagtctggttgaaggctaagaaagaaaaggcactaattagactttccaagcttatcagctttagagaaga

SEQ ID NO: 6019 - DNA, 120 bp, synthetic construct
  misc_feature 1..120: note = Artificially Synthesized Probe
  source 1..120: mol_type = other DNA
ttgcttagaatgggggtgaggggcatgggggcaaagaaagtgatagatcaaagttaagggattcctttttgagattctgagaatattctaaaattaattatgatggtgggtgcacatgtc

SEQ ID NO: 6020 - DNA, 120 bp, synthetic construct
  misc_feature 1..120: note = Artificially Synthesized Probe
  source 1..120: mol_type = other DNA
gagagagagagagcaaggaaaagatagaccctggcgtggaggaggtatgcaggataaccatgcagtaaatattcttgcatgttctccagtaaggaatgtatttttcaaaattgaaaagga

SEQ ID NO: 6021 - DNA, 120 bp, synthetic construct
  misc_feature 1..120: note = Artificially Synthesized Probe
  source 1..120: mol_type = other DNA
tacgagtgaagcacagttttctagatgtgtgctggactaacatttgccataaactatcacataatcagttccttgattctttatggacctgaagcctacttacataaaattggtctagta

SEQ ID NO: 6022 - DNA, 120 bp, synthetic construct
  misc_feature 1..120: note = Artificially Synthesized Probe
  source 1..120: mol_type = other DNA
agactagacgatggctttcttacctgcaggaacaggaaaaaccatcttcaattttgtggtctgggagggactgtgcctaagcaatgagaataaaaatacaatctattctattgaaaaggt

SEQ ID NO: 6023 - DNA, 120 bp, synthetic construct
  misc_feature 1..120: note = Artificially Synthesized Probe
  source 1..120: mol_type = other DNA
aaattagccacaactaatttctttcatgctgatttttatttctaaagctgtgatttccaaagccataaactttgggtctgaatgaaattaagaagggttagagggctgggcacggtggct

SEQ ID NO: 6024 - DNA, 120 bp, synthetic construct
  misc_feature 1..120: note = Artificially Synthesized Probe
  source 1..120: mol_type = other DNA
aatatacacttgtctctcttcaatggaaatagagttatttctgtgtgagagtctgttactacattctgtggaagtggctggagagtttacctggcttacaaagtctgttttgaatggcct

SEQ ID NO: 6025 - DNA, 120 bp, synthetic construct
  misc_feature 1..120: note = Artificially Synthesized Probe
  source 1..120: mol_type = other DNA
gtgtgggagtgtctgtgcctaaacagtgagaacgaaaatacaatctattcattgaaaaggtcttcagagctcagtaaattttgccaaattcgatccatggtatacattacacctactacc

SEQ ID NO: 6026 - DNA, 120 bp, synthetic construct
  misc_feature 1..120: note = Artificially Synthesized Probe
  source 1..120: mol_type = other DNA
cggaccaaggcaccagaatagcacacagcagctgaatgccatctcgaattttctgatttcactcccaggcttccagtcttttctgttatctttttttattttgaaatcctcattatgtgt

SEQ ID NO: 6027 - DNA, 120 bp, synthetic construct
  misc_feature 1..120: note = Artificially Synthesized Probe
  source 1..120: mol_type = other DNA
tgagctgaacattcccatcagctaacaggacagaactcattactgactgaagattgctacgatgcctttgactgagatgtgtaccattaaaatgaatgctccttcactcgtaaaaacaat

SEQ ID NO: 6028 - DNA, 120 bp, synthetic construct
  misc_feature 1..120: note = Artificially Synthesized Probe
  source 1..120: mol_type = other DNA
gtaagcatgggaatttcctaggactccaggttagggaactacatcagacacgggttctcatttcaccaggaaacaaatgcgaggacattcttacttccacttactacaatatattaatga

SEQ ID NO: 6029 - DNA, 120 bp, synthetic construct
  misc_feature 1..120: note = Artificially Synthesized Probe
  source 1..120: mol_type = other DNA
aggtgaatgtgtggtcaaaaggtgtagttggttttcccctttcagagatctgagtgccgctgggggaggtggcatctcatatttataaaacatgttatttattttcttactttcaaaatg

SEQ ID NO: 6030 - DNA, 120 bp, synthetic construct
  misc_feature 1..120: note = Artificially Synthesized Probe
  source 1..120: mol_type = other DNA
gcatgtaccggacaatgcctcgtattctactgaagaaatagccagtgatcttctggcggcccatttcaaagtcttaaatttttttgacaccttcagtaatacttgttattgatttgctct

SEQ ID NO: 6031 - DNA, 120 bp, synthetic construct
  misc_feature 1..120: note = Artificially Synthesized Probe
  source 1..120: mol_type = other DNA
tgtcattactgacgttgtaaaaatagatattgtggtatcattttaccgtagtttgaagtccacagaatgtaataaccctcctctcagtctatccacacacgcttacccatttcagcccca

SEQ ID NO: 6032 - DNA, 120 bp, synthetic construct
  misc_feature 1..120: note = Artificially Synthesized Probe
  source 1..120: mol_type = other DNA
tcttttgaaagaaacctttgtacctctttggagcccacattgccttcctctgacaatttttgtgaggtaaaccagaaagcagaaaacccagacacgagaaaaaaaaattggaactctgtc

SEQ ID NO: 6033 - DNA, 120 bp, synthetic construct
  misc_feature 1..120: note = Artificially Synthesized Probe
  source 1..120: mol_type = other DNA
tatcccattaacttttctccaaatgaggttagcatccatcattgatccttacctgcaccaagttttacgacaggggctacaaagcggtgatgttctgaattaatcacctcttctacactt

SEQ ID NO: 6034 - DNA, 120 bp, synthetic construct
  misc_feature 1..120: note = Artificially Synthesized Probe
  source 1..120: mol_type = other DNA
ttagatttataatatactttgtgtgcctcagacctggaaacatccattttttcaaggatccctggctcattttggggagaatggtactcagagacaaaaatctgggtgtctaggataatc

SEQ ID NO: 6035 - DNA, 120 bp, synthetic construct
  misc_feature 1..120: note = Artificially Synthesized Probe
  source 1..120: mol_type = other DNA
agaagaggctttggcatttccatggcattcaaactcctactttttaatccattgattctgatgacgattactgaggctcctgctacaatataagcctgcattcttttttaaggtcttgtg

SEQ ID NO: 6036 - DNA, 120 bp, synthetic construct
  misc_feature 1..120: note = Artificially Synthesized Probe
  source 1..120: mol_type = other DNA
agctcctgactttgcagcgaaaaatttcagaattggagcttgtggcccagtgattattggagaaacatggtgaaaacacaatcactaatagcctgcaactgaaatatcagattaattcta

SEQ ID NO: 6037 - DNA, 120 bp, synthetic construct
  misc_feature 1..120: note = Artificially Synthesized Probe
  source 1..120: mol_type = other DNA
aactagcaattggtggtgctgtaagctttccttttggaaattttctcctaggaatctgacattgtatgtttcttagaactcccattgagcatggcttttcaactttatctccctatccat

SEQ ID NO: 6038 - DNA, 120 bp, synthetic construct
  misc_feature 1..120: note = Artificially Synthesized Probe
  source 1..120: mol_type = other DNA
aggcattcaaatgggaagaggggccaaggccagaatcggaaggaccttaaatgtcaggctaagaaacttgactaaaatagtttctgccaaagggataaaaaggagttttaaaagagagat

SEQ ID NO: 6039 - DNA, 120 bp, synthetic construct
  misc_feature 1..120: note = Artificially Synthesized Probe
  source 1..120: mol_type = other DNA
aagaaggaaattattcaaaatgaacagggagaaaatttgtttttagtgcgtcagaggcctgtgaagagatatccatctgcccaatttatgtgtaattaaaattctaggagagaaaatgga

SEQ ID NO: 6040 - DNA, 120 bp, synthetic construct
  misc_feature 1..120: note = Artificially Synthesized Probe
  source 1..120: mol_type = other DNA
ttgaaggaaaaaagagaccaaaagaataaaagcacataacagtcagcttcaaaagccaaaggcagcacgtaaatcttaaaggcaccaaaagaaaaataatacgctctgggaaataattca

SEQ ID NO: 6041 - DNA, 120 bp, synthetic construct
  misc_feature 1..120: note = Artificially Synthesized Probe
  source 1..120: mol_type = other DNA
atgttgatgtaatacacataacaagtataattgcgtggaagtggacacggacctgaaagcttaacaggtttctatagttaataagaagtggtacattattaactgcttctggactttgaa

SEQ ID NO: 6042 - DNA, 120 bp, synthetic construct
  misc_feature 1..120: note = Artificially Synthesized Probe
  source 1..120: mol_type = other DNA
acacttctcccctaaagcaggtcatgcaagaatcctctgactttcttctgaagaaggttacaagactttcattctagaagtgtcattcttgtactcagaagaaaggaatttccttatttc

SEQ ID NO: 6043 - DNA, 120 bp, synthetic construct
  misc_feature 1..120: note = Artificially Synthesized Probe
  source 1..120: mol_type = other DNA
gaaacctcataagataattgcaatagctgcacaaaaggcattttataataatcagcgttttatgataaaatctttcaacatcctaagaatagaagggaacttcctcacttattaaggtca

SEQ ID NO: 6044 - DNA, 120 bp, synthetic construct
  misc_feature 1..120: note = Artificially Synthesized Probe
  source 1..120: mol_type = other DNA
aaaaaaaatgctgaagtaattcagtgggaaaaagacaatcttttcaacaacgtactggaataacaaacgagttatgtatctgaaaagaaaggaacgttgctgcttgttacatatactgtc

SEQ ID NO: 6045 - DNA, 120 bp, synthetic construct
  misc_feature 1..120: note = Artificially Synthesized Probe
  source 1..120: mol_type = other DNA
tgtgattctatttgtaagaaattctaggagaggcaaaactacataatgacaaaacagagcacttgttacctgggtctattgatggaatagatgatccacagtaaaggggcatagaggtct

SEQ ID NO: 6046 - DNA, 120 bp, synthetic construct
  misc_feature 1..120: note = Artificially Synthesized Probe
  source 1..120: mol_type = other DNA
aatttccagatagcaagatgtactacaaaggtacataatttcacagtgtagtatcaatgcaggaatgagtcaactcatcaggggacacataaaaaaagtcccatgtgacccaatgactgc

SEQ ID NO: 6047 - DNA, 120 bp, synthetic construct
  misc_feature 1..120: note = Artificially Synthesized Probe
  source 1..120: mol_type = other DNA
ccggaatgataaaattcaggaggaaaaaaaagtaatcatacgttctaattctgaaatggtctcattggtttccgtagaaacaagcaggttttatgtacctcaaatgtagtacggcataat

SEQ ID NO: 6048 - DNA, 120 bp, synthetic construct
  misc_feature 1..120: note = Artificially Synthesized Probe
  source 1..120: mol_type = other DNA
ttaatccagtctgcataatgtttttcagtcatcaactattatagtgtgaaatgcctttaccatcaaactggctcaaggttactgccttcactcagaaagatagtgttttccttctcccca

SEQ ID NO: 6049 - DNA, 120 bp, synthetic construct
  misc_feature 1..120: note = Artificially Synthesized Probe
  source 1..120: mol_type = other DNA
actaattttctaaggggatgcttgaaatcttggttgttcatctacaagaggccagactcagcatctatgagatgtatagattcaaaggtattcatggcagcgaagagctaattcctccaa

SEQ ID NO: 6050 - DNA, 120 bp, synthetic construct
  misc_feature 1..120: note = Artificially Synthesized Probe
  source 1..120: mol_type = other DNA
ctcgtctccgcatgcataggaagtattaacttaggcactgtgactgtacttaccctaattatattaagtggatgcttatgcctcaaagtaaatactgagtcaatatgaatgccactgctt

SEQ ID NO: 6051 - DNA, 120 bp, synthetic construct
  misc_feature 1..120: note = Artificially Synthesized Probe
  source 1..120: mol_type = other DNA
aggatggcttcatctttaccctaccccatccccagatccacagaaatgctgtgctgccttcttttccctcctaaagaacatgtaacttgctatttaaatactttcatttcttttcttttg

SEQ ID NO: 6052 - DNA, 120 bp, synthetic construct
  misc_feature 1..120: note = Artificially Synthesized Probe
  source 1..120: mol_type = other DNA
atttaaaattatcatgcctcaattgctctatctccaaattaaagctgatttcttctgccagcccagaacctgggtactctgtgagatccagcaatggaatatgtgtatgctctgtgtgtt

SEQ ID NO: 6053 - DNA, 120 bp, synthetic construct
  misc_feature 1..120: note = Artificially Synthesized Probe
  source 1..120: mol_type = other DNA
ttgactaaatttactaattcagtcatcctttattgtgcttttaaatggtagaaatcatgaaatatttcacaataccacaaacactttagattgttgagttcagaccaggtgcggtggttc

SEQ ID NO: 6054 - DNA, 120 bp, synthetic construct
  misc_feature 1..120: note = Artificially Synthesized Probe
  source 1..120: mol_type = other DNA
cagagtgaggcagaggcatccagagctggtaattacagcaagaggcactcgcagaactctaaacatcaataaaaaatcaaacctaagctcacttttatttgaattacatgtttgatgtca

SEQ ID NO: 6055 - DNA, 120 bp, synthetic construct
  misc_feature 1..120: note = Artificially Synthesized Probe
  source 1..120: mol_type = other DNA
actgatagtgctatggatgtaacgcaccagttcagaatgagtcactgtattgacctgtgtcactcatactgtataggccctttttattgacaatgctatcagtgacaagaagcattaaga

SEQ ID NO: 6056 - DNA, 120 bp, synthetic construct
  misc_feature 1..120: note = Artificially Synthesized Probe
  source 1..120: mol_type = other DNA
ggatacttgacccctgcatcagtaattctcactttattctatgtcatttaatttctgttaagtgctttatgcgctagtcctctcagccctgaaacagggtaaatttggaaggaaacagaa

SEQ ID NO: 6057 - DNA, 120 bp, synthetic construct
  misc_feature 1..120: note = Artificially Synthesized Probe
  source 1..120: mol_type = other DNA
agcacaaactgtcttggtattatctgtattcatttctgtctgtaaaattccctggatcctctttgtccccctatgtcattatttcatttttctcctgtgtctcagagggtctctctctct

SEQ ID NO: 6058 - DNA, 120 bp, synthetic construct
  misc_feature 1..120: note = Artificially Synthesized Probe
  source 1..120: mol_type = other DNA
tatattttgcaacggaggtattaatccaatgtgcaatgagaacaaggtgagaaagaaagaggattgctgggaactctagatagaggcttgcagaaggaacatttcagcagtccttgaaca

SEQ ID NO: 6059 - DNA, 120 bp, synthetic construct
  misc_feature 1..120: note = Artificially Synthesized Probe
  source 1..120: mol_type = other DNA
gggtattatttccctcttttgattaaaaaaacaacaacaactaaccatggaagcattgatgatcagtctctgcttacgttagaagggtagacatccttctttccttccttggctctgcga

SEQ ID NO: 6060 - DNA, 120 bp, synthetic construct
  misc_feature 1..120: note = Artificially Synthesized Probe
  source 1..120: mol_type = other DNA
cattttacctgaaaactgaccaaattgcataacaaagacaaaatctccaagtagtcttgaaatagtaacaaatctatcttttgtttgctgatcttgtttgattagcaaatgcaggtgggg

SEQ ID NO: 6061 - DNA, 120 bp, synthetic construct
  misc_feature 1..120: note = Artificially Synthesized Probe
  source 1..120: mol_type = other DNA
aggaatgaggagcagttggaggtgaaagggacaaagtctctgaagtctttttcacggcagagatagttgcgaatatccttttgtttacctcttgaatggaggcaattttttctttcaaaa

SEQ ID NO: 6062 - DNA, 120 bp, synthetic construct
  misc_feature 1..120: note = Artificially Synthesized Probe
  source 1..120: mol_type = other DNA
ttttcaatgtcagtaagtcatacaaataatcagccacatcaacaatttgaggaactcaaggtaagatactttactcagggacaagatgtcaccatgcatcacaagaccttcccccaggtg

SEQ ID NO: 6063 - DNA, 120 bp, synthetic construct
  misc_feature 1..120: note = Artificially Synthesized Probe
  source 1..120: mol_type = other DNA
aaaaaaaaaaaaaaagtgctgacacagctgagtcctggggaacgatctgtttcaaggttagagagaaccgagctgtaaaccatctggacgctttttcgatgtggctatttaatcatcttt

SEQ ID NO: 6064 - DNA, 120 bp, synthetic construct
  misc_feature 1..120: note = Artificially Synthesized Probe
  source 1..120: mol_type = other DNA
cttaaatatgctaaaggttgtttaccaagaaccaaccatcagtgaaaaccattctaaatgacaaacaataaaaccatttcaattatagccaggtatcaggcaagaatactcaccatcacc

SEQ ID NO: 6065 - DNA, 120 bp, synthetic construct
  misc_feature 1..120: note = Artificially Synthesized Probe
  source 1..120: mol_type = other DNA
cctttgtgtagccatgaagcatttcaaaatgcatagtaatgtatactcttttacctgcagtgaaaacacacaagaacgacgttatattcaactcaatgacaataatagctaacgctttga

SEQ ID NO: 6066 - DNA, 120 bp, synthetic construct
  misc_feature 1..120: note = Artificially Synthesized Probe
  source 1..120: mol_type = other DNA
caaggcctgctttgtttgggaaattgatacatagagcaaacgttcaggaatgtgttagatgtttttttgcattcactattggcacttggtgagaaggtagacctgcagctcaaaatttgt

SEQ ID NO: 6067 - DNA, 120 bp, synthetic construct
  misc_feature 1..120: note = Artificially Synthesized Probe
  source 1..120: mol_type = other DNA
aaattcaagacctgcagtcttgccaagttaagaagacagaagtcagagttcaagaaaagaagatggctacagtttatgagatggagtacccaaaaggaggaaactagagaatactcacaa

SEQ ID NO: 6068 - DNA, 120 bp, synthetic construct
  misc_feature 1..120: note = Artificially Synthesized Probe
  source 1..120: mol_type = other DNA
atatgcaaaggagcagggaaatgtgactcctaatgaggagaaatatcagttgatagaaacagaactcctgataacaaagataagggaattagcagaaaaacacatgaaaactgctaagat

SEQ ID NO: 6069 - DNA, 120 bp, synthetic construct
  misc_feature 1..120: note = Artificially Synthesized Probe
  source 1..120: mol_type = other DNA
cttaagggaagttctttggagtaagaaaaattacaccagatgaaaagttacatctacatgacagaaggaggtgtgccaggaatgataaatgttgtcaacatatggccaggttttgggtgg

SEQ ID NO: 6070 - DNA, 120 bp, synthetic construct
  misc_feature 1..120: note = Artificially Synthesized Probe
  source 1..120: mol_type = other DNA
cccaacaatcctctctgagtaattgatagactatgtaaaaacatttaataaggatacggaagtcttgaaaacactattaaccaagtcaaccgaattgacatgtgtgcatcacatcactca

SEQ ID NO: 6071 - DNA, 120 bp, synthetic construct
  misc_feature 1..120: note = Artificially Synthesized Probe
  source 1..120: mol_type = other DNA
aaagacacaaagtattacagttcaccagttaagaaataagtaacctgaatacctggatattggtgtaataaattgaattcgtagtttaaaagccccacatattaaaactcaaggcccaaa

SEQ ID NO: 6072 - DNA, 120 bp, synthetic construct
  misc_feature 1..120: note = Artificially Synthesized Probe
  source 1..120: mol_type = other DNA
ggaggcaaggcagttaatatctagatatattagctattgaaggacatggaaggcctcacttagaaggtgacttgagataaaagccaaagaaatgaaaggttgagagcatttcaggcagaa

SEQ ID NO: 6073 - DNA, 120 bp, synthetic construct
  misc_feature 1..120: note = Artificially Synthesized Probe
  source 1..120: mol_type = other DNA
tggtttttagaaccatgagactggataacaccacctaggaagtgaggagatccaaatatcaatccttgagcactccaacattcagagctcaagaaaacaaggagaagcacaaaatagcat

SEQ ID NO: 6074 - DNA, 120 bp, synthetic construct
  misc_feature 1..120: note = Artificially Synthesized Probe
  source 1..120: mol_type = other DNA
gttgtccaatgttggcattcccaactgcagcagaacaaagcactattctgctttctcatttcaactttcatgctgtgaacaactgtccttttctgttgttctatttggtgctccattttt

SEQ ID NO: 6075 - DNA, 120 bp, synthetic construct
  misc_feature 1..120: note = Artificially Synthesized Probe
  source 1..120: mol_type = other DNA
gagcaatgtgcttgcagtgcagagggcaggggcaattaaaagaaaacagcacagttgatggtatcatttatgtcggatgatgtttgtactatgaagaaatttgaaggaaaaagtcacagt

SEQ ID NO: 6076 - DNA, 120 bp, synthetic construct
  misc_feature 1..120: note = Artificially Synthesized Probe
  source 1..120: mol_type = other DNA
tcttttgcatatcatactgccacctaggagagaggaaaggtataaatatctgcttggcaggggaaaaaagtcacatactttagaggctctttcatagacttttcttaggaggatggtaag

SEQ ID NO: 6077 - DNA, 120 bp, synthetic construct
  misc_feature 1..120: note = Artificially Synthesized Probe
  source 1..120: mol_type = other DNA
tttcattttttccatccaaattctttgaaacaatggggcatctttgtctctttgattgggatcagttggtgaacttgacattctaaaaggcttgggactctgcattacctagacacagcc

SEQ ID NO: 6078 - DNA, 120 bp, synthetic construct
  misc_feature 1..120: note = Artificially Synthesized Probe
  source 1..120: mol_type = other DNA
ttgaaataaccctttctcactgggcagcatctgtcggtgtttggagtaagactcttcagtttgtcttctcaactgaaggaaaacctaggaagtttgaagtgtatttacagaactataaaa

SEQ ID NO: 6079 - DNA, 120 bp, synthetic construct
  misc_feature 1..120: note = Artificially Synthesized Probe
  source 1..120: mol_type = other DNA
aattataatctcttcaatctctgcttctctttgttgcctgcccaaagatactggacttggaagtcaaataatcataggttcaagggctcattccgatgctcaccagctatgtttgcttga

SEQ ID NO: 6080 - DNA, 120 bp, synthetic construct
  misc_feature 1..120: note = Artificially Synthesized Probe
  source 1..120: mol_type = other DNA
gaaacagcaaacccaattttccactttttcaagcctcagacacctataggttataagtagtgcatctggaatgttgaaaataataaacagtattgtgtttgtatttatgtggcaccagca

SEQ ID NO: 6081 - DNA, 120 bp, synthetic construct
  misc_feature 1..120: note = Artificially Synthesized Probe
  source 1..120: mol_type = other DNA
aaatgccatccttagagatgggttctgctcagtcctgagagaagatggtttgctgctgagcttttcatggcaggaattggaagcagttttcatatttgataaatttctactattttcctg

SEQ ID NO: 6082 - DNA, 120 bp, synthetic construct
  misc_feature 1..120: note = Artificially Synthesized Probe
  source 1..120: mol_type = other DNA
tattgttataatatggttctgatgtttactgccatcccttcttcattacaagaagggatgaaatcttcgtccaggagtggctaagggaattgtgtttcttgattctcgtgctcttggact

SEQ ID NO: 6083 - DNA, 120 bp, synthetic construct
  misc_feature 1..120: note = Artificially Synthesized Probe
  source 1..120: mol_type = other DNA
gtgaatctgaccagcagcctcagaggaaagagattgtttctgttgtggaaggccactggctgctgttggtttccatctgtttttgaaattatagatttttagggtgttttgttgtattgt

SEQ ID NO: 6084 - DNA, 120 bp, synthetic construct
  misc_feature 1..120: note = Artificially Synthesized Probe
  source 1..120: mol_type = other DNA
tgtgtgtggtgtgtgtgtttgtgtgttgtgtgtgtgtggtgtgtgtatatgtgtggtgtgcgtgtgtgtatgtgtttggtgtatgtgtgttgtgtgtgtgtgatgtgtgtttttgtgtgg

SEQ ID NO: 6085 - DNA, 120 bp, synthetic construct
  misc_feature 1..120: note = Artificially Synthesized Probe
  source 1..120: mol_type = other DNA
attggaggattttacttacctgcagcattccagcggatctacaggttttgaggtttcaggatcgattctttcgtgtatagcttttgcagagcatgtgaaatatttatttgtctcatgcag

SEQ ID NO: 6086 - DNA, 120 bp, synthetic construct
  misc_feature 1..120: note = Artificially Synthesized Probe
  source 1..120: mol_type = other DNA
tagctttgtttctaggcctagtgaaagaatcactgagttcctttcaatgcattattttattattccccccaaattttgagatacggtcacttgttgagagtgatggtggaggagtgggcc

SEQ ID NO: 6087 - DNA, 120 bp, synthetic construct
  misc_feature 1..120: note = Artificially Synthesized Probe
  source 1..120: mol_type = other DNA
actggttcttcaattccgacgtagctggccattatcgtagctcattagtggcaattactttcagagactcaaaagcaattaatatagacccagttactcaggccttctgaacaacaatta

SEQ ID NO: 6088 - DNA, 120 bp, synthetic construct
  misc_feature 1..120: note = Artificially Synthesized Probe
  source 1..120: mol_type = other DNA
ggaacatgcagggttattcttccaatggcactgcaatctgctgtataattcagaaatcataaactggaaaaatagccattcttttaagtagaaggagcgtaacagtggctaggcatcact

SEQ ID NO: 6089 - DNA, 120 bp, synthetic construct
  misc_feature 1..120: note = Artificially Synthesized Probe
  source 1..120: mol_type = other DNA
tttaagttacaaaatattacaatgatcagttttaacctcaccccctgccctgaatgaactaattgtttttcttagagccaggtaagggcctgccattggcaagcttgcaccttgagttag

SEQ ID NO: 6090 - DNA, 120 bp, synthetic construct
  misc_feature 1..120: note = Artificially Synthesized Probe
  source 1..120: mol_type = other DNA
ctgaaagtgctcaggtatcaaaagaaggcagaagaaagagcagcaaaaaggagagaaaagtcaacataaaaatttaacacgggtcccttctgctgacagaagccttcccagtgcctattg

SEQ ID NO: 6091 - DNA, 120 bp, synthetic construct
  misc_feature 1..120: note = Artificially Synthesized Probe
  source 1..120: mol_type = other DNA
tgagagcttattagatccaacttgagttgacaacaaagaacttctggagcctttcaggcccttttgaaacaggcagatcttctctgcagtcatgtctaatgcagcaaagaaaacaacagt

SEQ ID NO: 6092 - DNA, 120 bp, synthetic construct
  misc_feature 1..120: note = Artificially Synthesized Probe
  source 1..120: mol_type = other DNA
ggttgctcagatctctcccaccgcaaaataaagcaaagacaaaaaagttctctctctctcaacccatacccatgtcctcctctggttcttcccttcacagtcaaatgactaaagaaagaa

SEQ ID NO: 6093 - DNA, 120 bp, synthetic construct
  misc_feature 1..120: note = Artificially Synthesized Probe
  source 1..120: mol_type = other DNA
tgtgtgcaactgatctcatccgtttaatcccacgttggccccacgtcctgcctgcaacatcagcactttaggaaaaacaccattgtcccctccttaccaggaccctggctagagaccttc

SEQ ID NO: 6094 - DNA, 120 bp, synthetic construct
  misc_feature 1..120: note = Artificially Synthesized Probe
  source 1..120: mol_type = other DNA
actcagctcagaaagcatgcacaaagcctgcctctagtggacgatcctgtgctattcatcggcctctcattttaaatgtcttcctgatttcaatttaaaagcgtatctttatataacata

SEQ ID NO: 6095 - DNA, 120 bp, synthetic construct
  misc_feature 1..120: note = Artificially Synthesized Probe
  source 1..120: mol_type = other DNA
agtacagatgcacccatccttttctttcttcccgaatctttttgatccttggtggttgaatttgtggatacagatctcacaatactcagggccgactgtaattctgaaggagggggcttt

SEQ ID NO: 6096 - DNA, 120 bp, synthetic construct
  misc_feature 1..120: note = Artificially Synthesized Probe
  source 1..120: mol_type = other DNA
cccctcatgagcaggaactgctccttacttctctttgcacctggaaggtcataaatgatcagcaaatattcgttggataaatgaaagaacaaatgaattccatagaaacaagcaagggaa

SEQ ID NO: 6097 - DNA, 120 bp, synthetic construct
  misc_feature 1..120: note = Artificially Synthesized Probe
  source 1..120: mol_type = other DNA
acagatgaagaaagtgaagtccaggaagttgacattgcctcattcaaaatcatgtgactcattagcagtaagtcaagcctgtagcccagcttgtcaccagggctgttttcttcattacat

SEQ ID NO: 6098 - DNA, 120 bp, synthetic construct
  misc_feature 1..120: note = Artificially Synthesized Probe
  source 1..120: mol_type = other DNA
tgacagtttagactattctttcaaggccattgatcagtgaaaaaacagaatctggatgctaaaaactgtgcccatgtgaattaatttacccccatctttccctgagccatcacctgagta

SEQ ID NO: 6099 - DNA, 120 bp, synthetic construct
  misc_feature 1..120: note = Artificially Synthesized Probe
  source 1..120: mol_type = other DNA
atgcctctggactcctttctgtctccggacttcgtaacagcatggtcacccttcattcacctcattagatatctgaagtaatgacggaagtaatcgattgagtaaattagtgaatgaata

SEQ ID NO: 6100 - DNA, 120 bp, synthetic construct
  misc_feature 1..120: note = Artificially Synthesized Probe
  source 1..120: mol_type = other DNA
cgatactattttttactcaaaccaaaaaatatattctgcgagtaagtgatccactgtatctcagcccataatgatggcctcgacaaggaatgagatggccacagtcagtgtcacccactg

SEQ ID NO: 6101 - DNA, 120 bp, synthetic construct
  misc_feature 1..120: note = Artificially Synthesized Probe
  source 1..120: mol_type = other DNA
tcatgatcccaggaggacttactgtcattatttctcagtggcttttctttgggtagagagtgagataattaaagtctggaaggagacaggaacagggggcgtgcagttcctcagatccat

SEQ ID NO: 6102 - DNA, 120 bp, synthetic construct
  misc_feature 1..120: note = Artificially Synthesized Probe
  source 1..120: mol_type = other DNA
attgtgtaatatcatcacagcagggtaggatgccctgtgagggcacctaacaggtgttcatcacattcatcagcattgccctaccaacgaccgtatttacatcaggcataaatgcagttt

SEQ ID NO: 6103 - DNA, 120 bp, synthetic construct
  misc_feature 1..120: note = Artificially Synthesized Probe
  source 1..120: mol_type = other DNA
ctgttcagtcagagacccaagtcatactcacaaatgatcaagctagtgaactggatggcattttcacagctagatcttgtactgcaattatagattgtcaccataaagcttttgagagca

SEQ ID NO: 6104 - DNA, 120 bp, synthetic construct
  misc_feature 1..120: note = Artificially Synthesized Probe
  source 1..120: mol_type = other DNA
caggccaggggccagggtgtgtgtataagggcatttgtattctgatggcctttgtgggttttttaaaccccaattgtatcattgattttttttttggcattgacgttaagattttcattc

SEQ ID NO: 6105 - DNA, 120 bp, synthetic construct
  misc_feature 1..120: note = Artificially Synthesized Probe
  source 1..120: mol_type = other DNA
ttaaaaactctctattaggaggcatttcacataccattgtcgaggaggtgggaaataacaattccattcatttgccaagtagaaaagcccttgccttcttggttcattcagcagagggaa

SEQ ID NO: 6106 - DNA, 120 bp, synthetic construct
  misc_feature 1..120: note = Artificially Synthesized Probe
  source 1..120: mol_type = other DNA
atgagcccttaaatgccagtctgaatcttagcttgacaaatgaggcgaatctgaacacctttgggataataatagcgccttgctctatttgagataaaatccatttcttctgacttctga

SEQ ID NO: 6107 - DNA, 120 bp, synthetic construct
  misc_feature 1..120: note = Artificially Synthesized Probe
  source 1..120: mol_type = other DNA
atcacccctgcaaaggctccacctcccaataaagtccctttctaagtcctgaggataacgactccaacatgtcttttctaggagacacaattcaacacatagaaaacagttaagaaaaaa

SEQ ID NO: 6108 - DNA, 120 bp, synthetic construct
  misc_feature 1..120: note = Artificially Synthesized Probe
  source 1..120: mol_type = other DNA
gtcattgtttgttttataaagtgttatttatagtatgttcatccttagggacttttccttgaaaccaccacctttaatgctgatgattggtgttcccatggaccttgggttaagggggcc

SEQ ID NO: 6109 - DNA, 120 bp, synthetic construct
  misc_feature 1..120: note = Artificially Synthesized Probe
  source 1..120: mol_type = other DNA
taaggtctatccttttcttcataaaactttctcatggatggctccagtcccaaataaagctatcctcctgctcctggcttactccaatttcccagctcttttgggaaatgtaaactttat

SEQ ID NO: 6110 - DNA, 120 bp, synthetic construct
  misc_feature 1..120: note = Artificially Synthesized Probe
  source 1..120: mol_type = other DNA
tatagatgatgaaaccaaggctaaaggaaatatgatgaaatgtccagggtcactcggctgggaatttgggaagccaagttggaaactcagatctactaattttcaaagcttgcacttatt

SEQ ID NO: 6111 - DNA, 120 bp, synthetic construct
  misc_feature 1..120: note = Artificially Synthesized Probe
  source 1..120: mol_type = other DNA
ttggaaaacatccatgagcatttgttaggtattgtccaaggctgtttttgtacttccaaagtagttgcaatacagaccgtatggcttgaaaaaccaaaagcatttattatatgtcccttt

SEQ ID NO: 6112 - DNA, 120 bp, synthetic construct
  misc_feature 1..120: note = Artificially Synthesized Probe
  source 1..120: mol_type = other DNA
ctacataaagaatttcaggtggacattatttttctttcagtacttaactatatcattccttgtcttctggctagcttagtttctgaggggaactctattaccattctcatctttttttcc

SEQ ID NO: 6113 - DNA, 120 bp, synthetic construct
  misc_feature 1..120: note = Artificially Synthesized Probe
  source 1..120: mol_type = other DNA
ggttagaatgtaatgattgataggtgcacgtgggatttcttagtgtctgataaagttctgtttcttgatttgcatggttgttagaccaggtgggttcactgcaaaacttcatggaactgt

SEQ ID NO: 6114 - DNA, 120 bp, synthetic construct
  misc_feature 1..120: note = Artificially Synthesized Probe
  source 1..120: mol_type = other DNA
atggacatttgtaaacaatgacggttttgtttctccccgtccttgcctatctcttttgtttgtttgttttgtgtcttcctacactggctactcttttccatccaatgttagcccagaaac

SEQ ID NO: 6115 - DNA, 120 bp, synthetic construct
  misc_feature 1..120: note = Artificially Synthesized Probe
  source 1..120: mol_type = other DNA
ataaccattgaaagaggacccttcaattggccactggcttattagttatattgttgcaatattctctatccttactagatgttagtctctatgacctatcagtttttgagagcaatgtat

SEQ ID NO: 6116 - DNA, 120 bp, synthetic construct
  misc_feature 1..120: note = Artificially Synthesized Probe
  source 1..120: mol_type = other DNA
cacacacatacttatagactgtacatggcagcattcacagtccagaaaaatgtacataaatgtaaagatacagcattcaaccacaactgcgtaagattaactgtggtgcatactgtactg

SEQ ID NO: 6117 - DNA, 120 bp, synthetic construct
  misc_feature 1..120: note = Artificially Synthesized Probe
  source 1..120: mol_type = other DNA
tgttattagtaaagctattagtagttaagttttggaggagccaaaatcatacatgtatttttaactacacgggaagttggcatctctaatctttgtgttgttcaagggtcaactgtactg

SEQ ID NO: 6118 - DNA, 120 bp, synthetic construct
  misc_feature 1..120: note = Artificially Synthesized Probe
  source 1..120: mol_type = other DNA
tattcaataattgattgctaatcgttgacaactacccctcccttctgaatttggtcacctttaggagtcatctccgtgaatatctgtgactgataaactgcttcagttcaggtagatgga

SEQ ID NO: 6119 - DNA, 120 bp, synthetic construct
  misc_feature 1..120: note = Artificially Synthesized Probe
  source 1..120: mol_type = other DNA
cttgtctgtaggaagatatgtgtgcacctggcctctttgctgttcttacgacttgcccttcccaagttatttctactttacctctgtggttcgtttgatagaatttccagttaatgtatt

SEQ ID NO: 6120 - DNA, 120 bp, synthetic construct
  misc_feature 1..120: note = Artificially Synthesized Probe
  source 1..120: mol_type = other DNA
atttactgtgctagagtgtatctggtaacttgcctgtgatgaatttgtgtccattattacattatagatggtttcatgcagccatctctgcaaagggcctaattatagctgtgatggcca

SEQ ID NO: 6121 - DNA, 120 bp, synthetic construct
  misc_feature 1..120: note = Artificially Synthesized Probe
  source 1..120: mol_type = other DNA
aaatttaatctccactgcaatagtgctgggaggtacagcccaatgaaaggtgtttaggccatggattgatactgattacaaaaacagcttgagtctgtgagcttgctgtcttgcccttct

SEQ ID NO: 6122 - DNA, 120 bp, synthetic construct
  misc_feature 1..120: note = Artificially Synthesized Probe
  source 1..120: mol_type = other DNA
atttctctgggattcttgtctatgaattcaactgctgggttgcgtggtgattggaagtttagtttattaaagaaacagtcactgtttcccagaaagactatgccattttccattcccacc

SEQ ID NO: 6123 - DNA, 120 bp, synthetic construct
  misc_feature 1..120: note = Artificially Synthesized Probe
  source 1..120: mol_type = other DNA
tcctgattaaattgagcttctaactgataataaaatctattattcccaaaattgggccacccattccccaaacgtcctaccttcattctagaatgtcaaacacaagccacagctgagcag

SEQ ID NO: 6124 - DNA, 120 bp, synthetic construct
  misc_feature 1..120: note = Artificially Synthesized Probe
  source 1..120: mol_type = other DNA
aattgcaaaagaggccaagtatgtcaaatgttgttgtcttccaattcccatttcaatgtgcaaactaatcattcacttccctcatgggaccgctgtgagtttaactgggcaaatacatgt

SEQ ID NO: 6125 - DNA, 120 bp, synthetic construct
  misc_feature 1..120: note = Artificially Synthesized Probe
  source 1..120: mol_type = other DNA
catcaccactatctatacacaaaactttttcatcacccgcaacagatcccaatgccttttcaacattaaatactgacttccccttcccactgttaccattcacaatgttgtgtaaccatc

SEQ ID NO: 6126 - DNA, 120 bp, synthetic construct
  misc_feature 1..120: note = Artificially Synthesized Probe
  source 1..120: mol_type = other DNA
agcattcgcctccagggaaccacagtgacgggaaacatgctggaatgttaaacgttccatctcatttgtaggaagcagatgcctacatcttcaaattttgtcttcttaaaaatattattt

SEQ ID NO: 6127 - DNA, 120 bp, synthetic construct
  misc_feature 1..120: note = Artificially Synthesized Probe
  source 1..120: mol_type = other DNA
aagaaaatagcaaatcattctcagttggaagactaaagagaaatgctagagtccaggccaatggaaaacaagttaaagacagaaggtttagtagcactggaaaacccaggaggacaaaga

SEQ ID NO: 6128 - DNA, 120 bp, synthetic construct
  misc_feature 1..120: note = Artificially Synthesized Probe
  source 1..120: mol_type = other DNA
tttatctcattttaacttcacttactcatgtaatctcagcactattatcatctgcatgtcacagaggagggagctgagatgcagagtatgtttgtgacttgcccagagttacacactgat

SEQ ID NO: 6129 - DNA, 120 bp, synthetic construct
  misc_feature 1..120: note = Artificially Synthesized Probe
  source 1..120: mol_type = other DNA
tgtatatgtgtagatatacaaccacattatacgttatacttagaagtgcgggttgcatacgccactgcacattagaatcactatacagaatccagcaaatcagattctctgatggtgggg

SEQ ID NO: 6130 - DNA, 120 bp, synthetic construct
  misc_feature 1..120: note = Artificially Synthesized Probe
  source 1..120: mol_type = other DNA
agtacttttccaaattgttttggtggactcctccccatccacagcggcagacaactcacattaaatatgaagctttcaccacatacaatcagaggcctatcaaaatagcttcaaacttca

SEQ ID NO: 6131 - DNA, 120 bp, synthetic construct
  misc_feature 1..120: note = Artificially Synthesized Probe
  source 1..120: mol_type = other DNA
tagaatgtctgggaaaagaggcttgtcgtaccatgtgatgtaaagtactaactgtgcaaacgtgcggcactcaacaattttaggagctttgtgattccttcttaatgatgtgcttaatat

SEQ ID NO: 6132 - DNA, 120 bp, synthetic construct
  misc_feature 1..120: note = Artificially Synthesized Probe
  source 1..120: mol_type = other DNA
tagattccagaaccttctctggtcactttcatccaatctaattgtctgtcttacccaagaagggatttgttacaagggacttggtggattaagctaaagcaatcttaaatgcagaatgcc

SEQ ID NO: 6133 - DNA, 120 bp, synthetic construct
  misc_feature 1..120: note = Artificially Synthesized Probe
  source 1..120: mol_type = other DNA
cacacacgcacatgcacacacagagtcattcaggaaaaacaacaacagaaaacaatttagcacatttttggtgctctgaaaatataaattgggattttatctaccaatattaccatttat

SEQ ID NO: 6134 - DNA, 120 bp, synthetic construct
  misc_feature 1..120: note = Artificially Synthesized Probe
  source 1..120: mol_type = other DNA
tttatgttgtgtggattaatggccagtggataaatatacagcaataccaaggggcaggtcaacagcttaaagattaggagaaaacaatgagtcagaaactgagcaggtaatcatcagagc

SEQ ID NO: 6135 - DNA, 120 bp, synthetic construct
  misc_feature 1..120: note = Artificially Synthesized Probe
  source 1..120: mol_type = other DNA
tgttttggatttggagccagtatatgcaggagagaaaaagaagacagtaaatcgagcaagaaaaaggaaaatgttgtattctggagcagaattacgaatgagtcagcagcaaggtctgac

SEQ ID NO: 6136 - DNA, 120 bp, synthetic construct
  misc_feature 1..120: note = Artificially Synthesized Probe
  source 1..120: mol_type = other DNA
aactgtatgtcttctatattttaacccttgtataaatggttgcagtaaattgcctagagcagtgaaggaaagatgtgcagccaagggaaagatcaagaaccttcggtttacatggagcta

SEQ ID NO: 6137 - DNA, 120 bp, synthetic construct
  misc_feature 1..120: note = Artificially Synthesized Probe
  source 1..120: mol_type = other DNA
acttaaataacttttatcacagccaaatgtgacatgctaaggcctgaatgcatttattcatggttcaggcagctgtagccaacaacaagaagcagttaaagttatgtacccactgagagc

SEQ ID NO: 6138 - DNA, 120 bp, synthetic construct
  misc_feature 1..120: note = Artificially Synthesized Probe
  source 1..120: mol_type = other DNA
ctgctacatcgtgcaggaccatgacagtggatggaattaattactaaaaccagccaagaccaagattaaggaagataccatgtaaatgtggcaattcgcgaagtatttctgaaaaatgag

SEQ ID NO: 6139 - DNA, 120 bp, synthetic construct
  misc_feature 1..120: note = Artificially Synthesized Probe
  source 1..120: mol_type = other DNA
ttaatgggattccggtttgccaagagccccagagagtagaaaagtaagagtttcgtggactctacacaatgctggtaactagatcatgcaattctcagaatttagaaaagagtgtttttt

SEQ ID NO: 6140 - DNA, 120 bp, synthetic construct
  misc_feature 1..120: note = Artificially Synthesized Probe
  source 1..120: mol_type = other DNA
atccatgtggaaaggtccagcccaagctaaaaatataagtttagaactcagaagatacatgaagcataaagacgtaaattcagtaggaagctgtgtcagaaagcagaaatgatggggacc

SEQ ID NO: 6141 - DNA, 120 bp, synthetic construct
  misc_feature 1..120: note = Artificially Synthesized Probe
  source 1..120: mol_type = other DNA
ttagaagaagtaataggggagaatgagtggttagaaatgtaaggcacagtggagaagttgttaaagttcaacaagaagcaggagggtatgagcttagtcttgcaaaggaagatggcagtt

SEQ ID NO: 6142 - DNA, 120 bp, synthetic construct
  misc_feature 1..120: note = Artificially Synthesized Probe
  source 1..120: mol_type = other DNA
gagaaagaaaagaccttagaaatctaaagtatgggtccatcggagagaaggaggggagagggtagaaatttcctgactagagggaaattttagagagataagaagcagaccaaatatgaa

SEQ ID NO: 6143 - DNA, 120 bp, synthetic construct
  misc_feature 1..120: note = Artificially Synthesized Probe
  source 1..120: mol_type = other DNA
atgatattttattgcttcatcttggagcaaggagaaaattgtttctcttcttcccacttccccattttttaagagtagtgctcgagtcacacttgcacttccacgctgaagccttctatt

SEQ ID NO: 6144 - DNA, 120 bp, synthetic construct
  misc_feature 1..120: note = Artificially Synthesized Probe
  source 1..120: mol_type = other DNA
ttgctctccccgtttcttatgagcaccacttaaaagatatccacagagctgaattgcaggggtgtgtagtggtatattcaaagatgaatgtaaagatgtaactctaggtgtttgttttgg

SEQ ID NO: 6145 - DNA, 120 bp, synthetic construct
  misc_feature 1..120: note = Artificially Synthesized Probe
  source 1..120: mol_type = other DNA
agtttcttacctgaccaaaggtaacttctgccccctagggatgctatgaaaacaaagtgagatcaatcatatgaaaaggcggttttggagggagagttcagaaactctatataatatacc

SEQ ID NO: 6146 - DNA, 120 bp, synthetic construct
  misc_feature 1..120: note = Artificially Synthesized Probe
  source 1..120: mol_type = other DNA
atgcatttccctgttcaaagtactctaccttggatatgtctgcctttgcctccacgtccctcacctattatctttagaaaggtggttttaaatgttggtcactgaacatttagccacata

SEQ ID NO: 6147 - DNA, 120 bp, synthetic construct
  misc_feature 1..120: note = Artificially Synthesized Probe
  source 1..120: mol_type = other DNA
catcgtaacagcctttgtctcaatgcctaccttttttcctttttgtctgttgcagatatatcaacactcgtatactggatattacgtcctgagcaaaattcctcatgggtaagagtgttc

SEQ ID NO: 6148 - DNA, 120 bp, synthetic construct
  misc_feature 1..120: note = Artificially Synthesized Probe
  source 1..120: mol_type = other DNA
gaaaccacatgttgagtcagacacagatgaaaaatggttgcagaactaggaaagtctgtcgaggagaattttttgttgttttatcttcattatttcttcgtctcctcttccctcctcctt

SEQ ID NO: 6149 - DNA, 120 bp, synthetic construct
  misc_feature 1..120: note = Artificially Synthesized Probe
  source 1..120: mol_type = other DNA
aataatgcccctggtttattggttagctttcatatacctttatccctgttcaacaacctgcaagaaaagcatccttatttccattttaagtgagagctccaagaggtcatcaccttcccc

SEQ ID NO: 6150 - DNA, 120 bp, synthetic construct
  misc_feature 1..120: note = Artificially Synthesized Probe
  source 1..120: mol_type = other DNA
cactaattctcatctttcctttcctcgctcctccctctaaattaaagccagaggccgtgcaatcttcaggatggttttgtcatttatagcttgatttttttttcttagcttcagtctttg

SEQ ID NO: 6151 - DNA, 120 bp, synthetic construct
  misc_feature 1..120: note = Artificially Synthesized Probe
  source 1..120: mol_type = other DNA
ggtcctatcactttattatgtaatgttggcaattaggggtctggcaaactcagaactgtaatagaatagaaactgctgggtgttcaaaggcatttttttacgtgactggccatgttctgt

SEQ ID NO: 6152 - DNA, 120 bp, synthetic construct
  misc_feature 1..120: note = Artificially Synthesized Probe
  source 1..120: mol_type = other DNA
acaattctctttaataatttttctaagctgaggcttgtttcatgacactcaggtaattataatgtctttgtaattttaatttccctcttaaaagaagtatctatggcctcaactgtctac

SEQ ID NO: 6153 - DNA, 120 bp, synthetic construct
  misc_feature 1..120: note = Artificially Synthesized Probe
  source 1..120: mol_type = other DNA
tttttaacactacccaccaaagaaggaggggagggttgaaggtgtcaccatcataaacagtctcaagaaggaagtttgacttgaagtgagcctgatagctgagtttttgtttgtttgttt

SEQ ID NO: 6154 - DNA, 120 bp, synthetic construct
  misc_feature 1..120: note = Artificially Synthesized Probe
  source 1..120: mol_type = other DNA
agagcaagctaccttcacagctgccggaagttacagaactaggattgtgtgtgtaaactggggaagcaccagtgtgaagcaaaaatgcagaagaaatcttaaaatggctttttttttttt

SEQ ID NO: 6155 - DNA, 120 bp, synthetic construct
  misc_feature 1..120: note = Artificially Synthesized Probe
  source 1..120: mol_type = other DNA
actccatccatatattagttgcctaatgcatggggtttatggtgaagtttctgtgaaacactgtatgatgaggtgatgtctttaagggcctgctttggttcatagaaaatactgagggtt

SEQ ID NO: 6156 - DNA, 120 bp, synthetic construct
  misc_feature 1..120: note = Artificially Synthesized Probe
  source 1..120: mol_type = other DNA
gtcatcggccacctgcaaagggagtcattgcagctactcttttcagtggaatcatttagttccctcagggactttcttagaaagtctaaaagattttcaaacaaacaagtctctttgaaa

SEQ ID NO: 6157 - DNA, 120 bp, synthetic construct
  misc_feature 1..120: note = Artificially Synthesized Probe
  source 1..120: mol_type = other DNA
tgcatctaagatggaaggtgttctgtttatttatttatgttttaattttggctgttgatcactttcttgtgctggtgaatcagcacgcgtgttgaaccagccattaatctcctgggagag

SEQ ID NO: 6158 - DNA, 120 bp, synthetic construct
  misc_feature 1..120: note = Artificially Synthesized Probe
  source 1..120: mol_type = other DNA
aggagagggagcaggtcagtctgtctggatagtggtgggaagagcatacaccaacaccaactgtacgtatgtgatttcaagtttattgtggtacaatttacttctaataaaaatcacgct

SEQ ID NO: 6159 - DNA, 120 bp, synthetic construct
  misc_feature 1..120: note = Artificially Synthesized Probe
  source 1..120: mol_type = other DNA
tgcttgctccatgaagtcctcactccttgaccagattttggagagaggaaggtttttcaataactgcccctcttggtagtcctcctaaggaagagcaaaagaaataaaacagattcaaaa

SEQ ID NO: 6160 - DNA, 120 bp, synthetic construct
  misc_feature 1..120: note = Artificially Synthesized Probe
  source 1..120: mol_type = other DNA
tggatggatgaaggccgtcctacctagtagagggaggttggaaggatgagaactgtctacaattaaccttttcattagcacagaaaatttagacaaccaaggtcccaatttctaatgtaa

SEQ ID NO: 6161 - DNA, 120 bp, synthetic construct
  misc_feature 1..120: note = Artificially Synthesized Probe
  source 1..120: mol_type = other DNA
ttcaggcctttttctaatcataagcccccaaattagataagatcaacatgaaaggtctcaggtatcccttaagaatttaaaggaaggacagaaaaggttgagctctgtagtgcgtggaag

SEQ ID NO: 6162 - DNA, 120 bp, synthetic construct
  misc_feature 1..120: note = Artificially Synthesized Probe
  source 1..120: mol_type = other DNA
tagattctcagtcttctgcatgtttttcacacctcttatgtttactgaaactacatcttgagctgagtgtttgagcaatttgttctcaaggccaatatgggcaaactccctgagtcggag

SEQ ID NO: 6163 - DNA, 120 bp, synthetic construct
  misc_feature 1..120: note = Artificially Synthesized Probe
  source 1..120: mol_type = other DNA
tttctgcttccccgtcatgtcttcatttcacagagtttgttgagcactgatcttgatattaggtttacagtgacagagaagacacaagctccctttaattacaaagattccatttccgtg

SEQ ID NO: 6164 - DNA, 120 bp, synthetic construct
  misc_feature 1..120: note = Artificially Synthesized Probe
  source 1..120: mol_type = other DNA
taaggaaaggaacttctgatacaccatagagtgtctgggaaaattttaaaattactaatggaatatgtgctcaaatattggcccctgaggaagcatttatgcccatgaggattcctgccc

SEQ ID NO: 6165 - DNA, 120 bp, synthetic construct
  misc_feature 1..120: note = Artificially Synthesized Probe
  source 1..120: mol_type = other DNA
gctttaaaataaaggaataaataagaagaaagaaagaaaagtgaaggagggccactacatagccccaaagtaaatcactgtacaccttcctgcattctctttctctctgcctgtcttcct

SEQ ID NO: 6166 - DNA, 120 bp, synthetic construct
  misc_feature 1..120: note = Artificially Synthesized Probe
  source 1..120: mol_type = other DNA
gaagatcttcagagaagcaatttcagctttaaaaatggatggaagccatattgcagtgggttagggacaggagagaaggtcagaaagtggccctcagatttggaccactcactggattgg

SEQ ID NO: 6167 - DNA, 120 bp, synthetic construct
  misc_feature 1..120: note = Artificially Synthesized Probe
  source 1..120: mol_type = other DNA
tgtatgatcctgcaatggcaggtgcaagacggatggatttgtcacaactcacagaacacacaggcaaagggtgaaccctaatgtcagctgtgggacttagttaataatgtttcaatattg

SEQ ID NO: 6168 - DNA, 120 bp, synthetic construct
  misc_feature 1..120: note = Artificially Synthesized Probe
  source 1..120: mol_type = other DNA
caccaagtggctcatccaaaagggaattcccacagtggagaagaagttggaaaagtcactctcaaatcctcttttaacttgaaaggaaaagaatctgataccctgcaagaaatcaaattc

SEQ ID NO: 6169 - DNA, 120 bp, synthetic construct
  misc_feature 1..120: note = Artificially Synthesized Probe
  source 1..120: mol_type = other DNA
actcacttctggcatcttggagtcacttgtttaacttatagagactgagaaagattgagaggttgagagagtcactagctagcaaaaagaaaacaattacctctttggactatggtagag

SEQ ID NO: 6170 - DNA, 120 bp, synthetic construct
  misc_feature 1..120: note = Artificially Synthesized Probe
  source 1..120: mol_type = other DNA
cctatagtcatggtgaatcaccatggcgtattggcgctagtattcatatagtcatggtgaatcaccatggcgtattggccgtagtgttcatatagtcatggtgaatcaccatggcgtatt

SEQ ID NO: 6171 - DNA, 120 bp, synthetic construct
  misc_feature 1..120: note = Artificially Synthesized Probe
  source 1..120: mol_type = other DNA
tggccctagtgttcacgcagtcatggtgaatcaccatggcgtgttggccctagtgttcacgcagtcatggtgaatcaccatggcatattggccatagtgttcatatagtcatggtgaatc

SEQ ID NO: 6172 - DNA, 120 bp, synthetic construct
  misc_feature 1..120: note = Artificially Synthesized Probe
  source 1..120: mol_type = other DNA
accatggcgtattggccatagtgttcatgtagtcaagatgaatcaccatggtgtattggcgctagtattcatataatcatgatgaatcaccatagcgtattggccatagtgttcatatag

SEQ ID NO: 6173 - DNA, 120 bp, synthetic construct
  misc_feature 1..120: note = Artificially Synthesized Probe
  source 1..120: mol_type = other DNA
gtcatggtgaatcaccatggcgtatcggccatagtgttcatatagtcatggtgaatcaccatggcgtattgggcgtagtattcatatagtcatggtgaatcaccatggcgtattggccgt

SEQ ID NO: 6174 - DNA, 120 bp, synthetic construct
  misc_feature 1..120: note = Artificially Synthesized Probe
  source 1..120: mol_type = other DNA
agaataggaaattaacatgggtgccatattgttaactcatctacaggcctcatttgaattctaccaatttttctaccaattttctacctgtgtcccaggaccccatgctgcctttagatg

SEQ ID NO: 6175 - DNA, 120 bp, synthetic construct
  misc_feature 1..120: note = Artificially Synthesized Probe
  source 1..120: mol_type = other DNA
atctccaatatatttacatatttgtcccattctagcatgcacacagtctcaaaattgatcctccaaacccctgggagaaacaaatttactcacggaactacagagaatcttccttctctc

SEQ ID NO: 6176 - DNA, 120 bp, synthetic construct
  misc_feature 1..120: note = Artificially Synthesized Probe
  source 1..120: mol_type = other DNA
tttgtgcattgtttgaggtgaattctctaggagtctagaagtggaagtgttgggctgaaagttaagtgtgtactttattaggtattgtcagatgtctctctgaaatgattgcaccagctt

SEQ ID NO: 6177 - DNA, 120 bp, synthetic construct
  misc_feature 1..120: note = Artificially Synthesized Probe
  source 1..120: mol_type = other DNA
catctaaaactacctggggcattctagactctctagcctcccccatctgtctttactctaaatgtagtccttgtttttcctggtagttttattcagccgttgcttttgtattttctattg

SEQ ID NO: 6178 - DNA, 120 bp, synthetic construct
  misc_feature 1..120: note = Artificially Synthesized Probe
  source 1..120: mol_type = other DNA
ccaacacaaaacctgatgccaccaggtttgtaaggtcataatgacctgcgttatacctagaaaaaattatcttctaggagaaccaaagatggagatacaaattgtggaggtagatcactg

SEQ ID NO: 6179 - DNA, 120 bp, synthetic construct
  misc_feature 1..120: note = Artificially Synthesized Probe
  source 1..120: mol_type = other DNA
ctgtagctgtgtctatggactccagatgaatcatgagctcaaagagatcaacttcattaaaagaactgcagatgagaatgatccgaatgattttgtcatctaaagatgctctgggaactc

SEQ ID NO: 6180 - DNA, 120 bp, synthetic construct
  misc_feature 1..120: note = Artificially Synthesized Probe
  source 1..120: mol_type = other DNA
agaaagtccctcaggtttgaaggtcagatgacatggttgctgttttcaagtcaccattttcttctgcctctttaagctgattacctaagcctgcatttgtaaagctcctttttcctaaaa

SEQ ID NO: 6181 - DNA, 120 bp, synthetic construct
  misc_feature 1..120: note = Artificially Synthesized Probe
  source 1..120: mol_type = other DNA
ggaggggataagtgattatagaagttatcttgtttaacctcttacagaataagtagcaacaaaacaaagtaaatgacaacttctcagagaaggcttcctgacacctcccccaacacacac

SEQ ID NO: 6182 - DNA, 120 bp, synthetic construct
  misc_feature 1..120: note = Artificially Synthesized Probe
  source 1..120: mol_type = other DNA
tggaacttttgagtttttaaatccatttgacctttaagagcgttatgatacatgcatgtactgagcttaagacgcaatatagctcattgttgagtgagtaccctatgtgctggagcaggg

SEQ ID NO: 6183 - DNA, 120 bp, synthetic construct
  misc_feature 1..120: note = Artificially Synthesized Probe
  source 1..120: mol_type = other DNA
tcgggaaacataaacgttcaaaacatatgctgtttcaacgtatttctctgtaccacttctttcctcattgtgtcctcttcagatgaatctgcctgaactgagatttcctccatgtttctt

SEQ ID NO: 6184 - DNA, 120 bp, synthetic construct
  misc_feature 1..120: note = Artificially Synthesized Probe
  source 1..120: mol_type = other DNA
tctctctttggttggcttgctaccatgatagtgataaatgaagagctttgaatgggaaatttaatgagtccattgggaagtcttcaacgcagagagcgtcaaaatgtgacagatgaagag

SEQ ID NO: 6185 - DNA, 120 bp, synthetic construct
  misc_feature 1..120: note = Artificially Synthesized Probe
  source 1..120: mol_type = other DNA
agctttcctctcctgtccacagcaggggctgtcacactatgtatttgatattcttctcatttttcaccaagatccttagatcctcaagtcttaacaaagtgatgcccctgaaaacaaagc

SEQ ID NO: 6186 - DNA, 120 bp, synthetic construct
  misc_feature 1..120: note = Artificially Synthesized Probe
  source 1..120: mol_type = other DNA
acagagcctacaaaatatgtggaggatagatatggttattgtttcttgggacagacagttaatatactcttctaacttttaacttcagcggggctgcttaaattctcctcagccttggtt

SEQ ID NO: 6187 - DNA, 120 bp, synthetic construct
  misc_feature 1..120: note = Artificially Synthesized Probe
  source 1..120: mol_type = other DNA
aattgtaaaaatccatgccttcaaaatgtcagtaattcaacctaagatatggaggaagagcttgcgcttgaaactccaaaacgctttgttagagggacgaaagggcagtttgatagcaga

SEQ ID NO: 6188 - DNA, 120 bp, synthetic construct
  misc_feature 1..120: note = Artificially Synthesized Probe
  source 1..120: mol_type = other DNA
ttttgtttgttttgctcttaaagggtcattagtaacaaaagctttggagtcaaaagggccagattcagatcgtggttgcagcacttactagttgcgtgaccttgactgagagacttaatc

SEQ ID NO: 6189 - DNA, 120 bp, synthetic construct
  misc_feature 1..120: note = Artificially Synthesized Probe
  source 1..120: mol_type = other DNA
aaagcctctaatcagcttgggttaatttggtattcattgtaaaaacattcatcatgggcactgaggtctgtgacagtagccaagaaattaatatcccacggatggaaatggccttctgta

SEQ ID NO: 6190 - DNA, 120 bp, synthetic construct
  misc_feature 1..120: note = Artificially Synthesized Probe
  source 1..120: mol_type = other DNA
tattgttaaaaatgggatttaggaactctactcaataaacatgtgctcaagtagtgttgagggtaaagaagaggcgctttttgcagagaatccaaacatgaataagccgcccatcaccct

SEQ ID NO: 6191 - DNA, 120 bp, synthetic construct
  misc_feature 1..120: note = Artificially Synthesized Probe
  source 1..120: mol_type = other DNA
gaattctcccgtttgggtggagggaacacctcttcatcataattcctaaatgtttcaccattggaaaatatcaaagtaaaggttccatctcctggtctttgtagaataactgcgaccttt

SEQ ID NO: 6192 - DNA, 120 bp, synthetic construct
  misc_feature 1..120: note = Artificially Synthesized Probe
  source 1..120: mol_type = other DNA
tttatttcacttctctgatgtgtggggaacacagtgccttactcgtgctagagcagtgatagacgtgagcacagataatcaatgagtcaatttcaatgacagaccactttggtttttttt

SEQ ID NO: 6193 - DNA, 120 bp, synthetic construct
  misc_feature 1..120: note = Artificially Synthesized Probe
  source 1..120: mol_type = other DNA
tcactgagtgatctaaaatgcaaatataatcatgtccattttcccatgtaaaatccttccactgttttccactgcctttaggatagaacccaaaccccttcacatgctttgtgaagccca

SEQ ID NO: 6194 - DNA, 120 bp, synthetic construct
  misc_feature 1..120: note = Artificially Synthesized Probe
  source 1..120: mol_type = other DNA
taattaagctagttttctccatggccatacaaagtcgtgtttctaaaattagctgggtgatctgactgtttagtggaacttgagtctttagaaggtcctcagataccactgctgtctact

SEQ ID NO: 6195 - DNA, 120 bp, synthetic construct
  misc_feature 1..120: note = Artificially Synthesized Probe
  source 1..120: mol_type = other DNA
attgttgcttcaaaaaggcagctgtacttccttagatcaacatgcatggcttggccacgttgtagtttactttgctcctggtcaattcaacttaattcaactcaaagttaagatcaggat

SEQ ID NO: 6196 - DNA, 120 bp, synthetic construct
  misc_feature 1..120: note = Artificially Synthesized Probe
  source 1..120: mol_type = other DNA
tgcagagccctttcagagctggatcaaacaaatgaagcttgtatgtctccttttccagggggtgacctaagtatttgatgttagttttctacgcttcattattttttttatttcggatgc

SEQ ID NO: 6197 - DNA, 120 bp, synthetic construct
  misc_feature 1..120: note = Artificially Synthesized Probe
  source 1..120: mol_type = other DNA
aattgtccctaccccaaggacatagtctcgtagattatcttgtaacatttttttactttcatctttgacaattatgtctttagtccccctgaactggatttttgggaagggtgtgacgca

SEQ ID NO: 6198 - DNA, 120 bp, synthetic construct
  misc_feature 1..120: note = Artificially Synthesized Probe
  source 1..120: mol_type = other DNA
agataattacaccctctccaaataatgacacatttatttcttcctttttcatcctcaactctgccttatttcctgatcttactccactctccagaaccacccacactatgttgagcagaa

SEQ ID NO: 6199 - DNA, 120 bp, synthetic construct
  misc_feature 1..120: note = Artificially Synthesized Probe
  source 1..120: mol_type = other DNA
aattatatcaatttgcagtgctgatgttttactgaaagtctctggcagctggaatatgatgacaatgctgactgctccatgaattttcctttcttctcctgcattaccacgtgacttgtc

SEQ ID NO: 6200 - DNA, 120 bp, synthetic construct
  misc_feature 1..120: note = Artificially Synthesized Probe
  source 1..120: mol_type = other DNA
ttattctcatgttagcctgatttgcaatagggaaaatgttgaggacacaaaaaaccctggctttatttgccctgatcacttcatcctcatggtggtaaaaatgccccatccatgcaacaa

SEQ ID NO: 6201 - DNA, 120 bp, synthetic construct
  misc_feature 1..120: note = Artificially Synthesized Probe
  source 1..120: mol_type = other DNA
ggcaaaaagacctcccagggatgctgtgaaggttaaaggcaataacttataggcagcattccttatgtggtaaatgttagttccctccctgatgttggaggagaaatctattattatctt

SEQ ID NO: 6202 - DNA, 120 bp, synthetic construct
  misc_feature 1..120: note = Artificially Synthesized Probe
  source 1..120: mol_type = other DNA
tgagatgctgatgtagctacagattctacatagagacccactcacctcattaattcaaggttcagggcactgaaagcgcatctacccatcatccttttctctttttcatacttttatttg

SEQ ID NO: 6203 - DNA, 120 bp, synthetic construct
  misc_feature 1..120: note = Artificially Synthesized Probe
  source 1..120: mol_type = other DNA
acattttcattttgctcacattttggagagcactgattttccagaagtgctaattaccaagctcacagcagaaggttggctgcattttaaactatttcctcagatgctccctgctgaact

SEQ ID NO: 6204 - DNA, 120 bp, synthetic construct
  misc_feature 1..120: note = Artificially Synthesized Probe
  source 1..120: mol_type = other DNA
tctcaaaaaaaaaaccagaaggcataggaatctggtatgtatgtactaatcttcaacattgacggtccccagcctttcaatccttgatgtaagtgatgaagatgagcttctgatctctca

SEQ ID NO: 6205 - DNA, 120 bp, synthetic construct
  misc_feature 1..120: note = Artificially Synthesized Probe
  source 1..120: mol_type = other DNA
ttgtatgaaatgattgctatagttcagagaggtgaagtaatcctctaaatcacatagtgatttggtgttttgtgagtttggagaaggagaggtgaaggtggttctggaaggcttcctcca

SEQ ID NO: 6206 - DNA, 120 bp, synthetic construct
  misc_feature 1..120: note = Artificially Synthesized Probe
  source 1..120: mol_type = other DNA
catgtgcaaatgtcccctcatttggatgataggttataggaccctcctaagtttggtgacttctgaggtctcaggctaagacatttctttgaccccactacagatgaagtacattgttta

SEQ ID NO: 6207 - DNA, 120 bp, synthetic construct
  misc_feature 1..120: note = Artificially Synthesized Probe
  source 1..120: mol_type = other DNA
tgtacactcagtgtacagtaaacatttgtctacaggtctttcccgtaacttgtgatatcccacacagcttaggatggtggcatatttattattttatcaccaattcccagtacaggtgct

SEQ ID NO: 6208 - DNA, 120 bp, synthetic construct
  misc_feature 1..120: note = Artificially Synthesized Probe
  source 1..120: mol_type = other DNA
tcttgtgattttattcttgctccatttatcttttaatgtcttggtgtgtaaataaccaaaaagctccctgaaggggaaagacagcggaaatcggaaatcacctctgagtccttcacggtc

SEQ ID NO: 6209 - DNA, 120 bp, synthetic construct
  misc_feature 1..120: note = Artificially Synthesized Probe
  source 1..120: mol_type = other DNA
aagggtgtcctcttgggccagtgggctccttcagcaccctaggtaacatagccctgaaatgaaaatcataatccataataatgcctatttcatagaattataatggggattaagtaaatt

SEQ ID NO: 6210 - DNA, 120 bp, synthetic construct
  misc_feature 1..120: note = Artificially Synthesized Probe
  source 1..120: mol_type = other DNA
tgttccaaaatcagcttcagttctttaagtaaattctcaatgagatcgtttttgcatgagcatcaaaaactgttgacctagcgaagaaaatgtgcatctacttccccaggatagggcggt

SEQ ID NO: 6211 - DNA, 120 bp, synthetic construct
  misc_feature 1..120: note = Artificially Synthesized Probe
  source 1..120: mol_type = other DNA
cagaaaaaaattcaaacccacaaagttattccttggaaaatgtagaggtgagatctcctccagaaacaagcatgctgatagttgaatgtggcacatgagatgtcactcactatccatctg

SEQ ID NO: 6212 - DNA, 120 bp, synthetic construct
  misc_feature 1..120: note = Artificially Synthesized Probe
  source 1..120: mol_type = other DNA
cctagggcccttaagagtgatgttaagtctactccgcctatgctctgtaaatgcaataacaaggcctggattatagcacaactgtttataccattgtgtaatgaatattttaatcccact

SEQ ID NO: 6213 - DNA, 120 bp, synthetic construct
  misc_feature 1..120: note = Artificially Synthesized Probe
  source 1..120: mol_type = other DNA
gaggtcaggaatcgacaccatcctggctaacaccgtgaaaccccgtctctactaaaaaatacaaaaaattagcagggcgtggtggtgggagcctgtagtcccacctactcagggggctga

SEQ ID NO: 6214 - DNA, 120 bp, synthetic construct
  misc_feature 1..120: note = Artificially Synthesized Probe
  source 1..120: mol_type = other DNA
tgagattacaagcacacgccattgatgtgtatgtgtttaagcatggatgaaccagacaaggagctcctccagggcaaagaccatcattattcagaaacctggtacaaggaaaagctcagg

SEQ ID NO: 6215 - DNA, 120 bp, synthetic construct
  misc_feature 1..120: note = Artificially Synthesized Probe
  source 1..120: mol_type = other DNA
cattaatccagtgaatatgatcttctatttgttggtagaatagagcaactgtagctgagctagtgattacagcaacatctgatcaatgctttcaactcagacaaagtggccagtttcctg

SEQ ID NO: 6216 - DNA, 120 bp, synthetic construct
  misc_feature 1..120: note = Artificially Synthesized Probe
  source 1..120: mol_type = other DNA
ttagaagggtgccatctcttcagtcagctaggaacttctggagctcctctgttacactaaatagcttcaagtggacactgaacacgtactatcaaatgcttaaaagcacaattttatttt

SEQ ID NO: 6217 - DNA, 120 bp, synthetic construct
  misc_feature 1..120: note = Artificially Synthesized Probe
  source 1..120: mol_type = other DNA
tctatccatccgttacaagccagtataacaaaaggttgtgtatttgcccagctgagcagtgaaaagggaaaaggccaaaatatagggaatgtgagggcaaaatagagtcagtatttagta

SEQ ID NO: 6218 - DNA, 120 bp, synthetic construct
  misc_feature 1..120: note = Artificially Synthesized Probe
  source 1..120: mol_type = other DNA
gtccttcatacacatatttatagctcagtgatcatgattcatgctttccacttgtcggaatttatcccagggaaatatcagagacacaggtgaaaatttttgtgccaagatgcacacaat

SEQ ID NO: 6219 - DNA, 120 bp, synthetic construct
  misc_feature 1..120: note = Artificially Synthesized Probe
  source 1..120: mol_type = other DNA
aaacccaacactcctttacccagccccatctttgttgttggtatatctctctcgcttcttcttattactttgtagtaattttacttcagaaaagactcagaattcccaccatcatccagt

SEQ ID NO: 6220 - DNA, 120 bp, synthetic construct
  misc_feature 1..120: note = Artificially Synthesized Probe
  source 1..120: mol_type = other DNA
tgcgtatgatcattgctaaaccaatggggatagccagttccatggccagccaacctgttctgtgcttcgccctataaattatgttctatattacatacaacaggatctttcacttttatt

SEQ ID NO: 6221 - DNA, 120 bp, synthetic construct
  misc_feature 1..120: note = Artificially Synthesized Probe
  source 1..120: mol_type = other DNA
taaacagtgttgaataacctgctcacagctggacagctagtagtttcagactggaattcagggttccatttcaagtccaaggttctttcttttttatcatctcacccttagtagtattgc

SEQ ID NO: 6222 - DNA, 120 bp, synthetic construct
  misc_feature 1..120: note = Artificially Synthesized Probe
  source 1..120: mol_type = other DNA
aaacaccccatgattcaattatctctacctggtccgtctgaagacacatgggagttataggaactacagttcaggatgagatatgggtggggacacagccaaaccatatcattctgcctc

SEQ ID NO: 6223 - DNA, 120 bp, synthetic construct
  misc_feature 1..120: note = Artificially Synthesized Probe
  source 1..120: mol_type = other DNA
aggaaaactatttttccctcctaggtctccagacctgtgatgggaggggctgccatgaaggtctctgacatgccctggggacattttccctattgtcttggtgattaacattgggttcct

SEQ ID NO: 6224 - DNA, 120 bp, synthetic construct
  misc_feature 1..120: note = Artificially Synthesized Probe
  source 1..120: mol_type = other DNA
aaaatgaaactaatgaaaatgtcatgtattttgtaaatacccagagggggcttgcccaaggtagactgagtgggcttacttgggaaataacaaagagatgagtctggcagaaagaaattg

SEQ ID NO: 6225 - DNA, 120 bp, synthetic construct
  misc_feature 1..120: note = Artificially Synthesized Probe
  source 1..120: mol_type = other DNA
ctgtacgctttgctcaagaagtactttgttttgagggactttatgttgtataaaatatggttttgcctgtcatccataggtgatgaacctgccatctctgtctcctgtctctctttaaac

SEQ ID NO: 6226 - DNA, 120 bp, synthetic construct
  misc_feature 1..120: note = Artificially Synthesized Probe
  source 1..120: mol_type = other DNA
tgggacagcaggtgcatgcctgatcaaatgtggtatctttaatgatcaacaaatgtcaggtaaacagatgcatgggttagttggttccagacatagaatttactcaaaaagagagcattt

SEQ ID NO: 6227 - DNA, 120 bp, synthetic construct
  misc_feature 1..120: note = Artificially Synthesized Probe
  source 1..120: mol_type = other DNA
tggaagtgcacgtatctcagcttactgatttcatttgctttggatgtctacccagtatacaaccatatgattgctggatcatatagtagctctatttttcattttttaaggaacctccat

SEQ ID NO: 6228 - DNA, 120 bp, synthetic construct
  misc_feature 1..120: note = Artificially Synthesized Probe
  source 1..120: mol_type = other DNA
ttgaataaaacttctaaatgaaaattttaaaagttcagccctttgctctgagtttttgtctctattctactcccacaccccccccaactttagtcactgtggaacccacagtgaggtcct

SEQ ID NO: 6229 - DNA, 120 bp, synthetic construct
  misc_feature 1..120: note = Artificially Synthesized Probe
  source 1..120: mol_type = other DNA
cataaaatttgaaatctagtcagtggagaagaccagatgatcccacaggagaaatctggggtgtcaagtatggatacacagtgggaatgattcatgtgactcactctgctgaggaatttg

SEQ ID NO: 6230 - DNA, 120 bp, synthetic construct
  misc_feature 1..120: note = Artificially Synthesized Probe
  source 1..120: mol_type = other DNA
agcagatgttatcattctcctgggccttatgtacatctcagtatgtttgggagacctgagcatttaccttgtaaaagttttctggaagaaggaaccaaggtttgatggcagagagtacat

SEQ ID NO: 6231 - DNA, 120 bp, synthetic construct
  misc_feature 1..120: note = Artificially Synthesized Probe
  source 1..120: mol_type = other DNA
taaaagcattaatccttaacattctagctcacatgacacctcctctgaagcctgttctaaccccttcagagagaatggattttttataagggagacagtaacagcaacagatgtgactga

SEQ ID NO: 6232 - DNA, 120 bp, synthetic construct
  misc_feature 1..120: note = Artificially Synthesized Probe
  source 1..120: mol_type = other DNA
aagttatttcagatttttaaaaaatacatgagaaaaatcgtgtttcagtaaagacaaatctggtgtgcaacgtatgagataaatcaggggcggcagcaggaggcagggagttgagtgagg

SEQ ID NO: 6233 - DNA, 120 bp, synthetic construct
  misc_feature 1..120: note = Artificially Synthesized Probe
  source 1..120: mol_type = other DNA
ccatttcctgtattatgcaaaataccttccctccatagtctcttaaatgacactgcaatatttttcctagaatttcctaaaagaaaacagctggtttgatccccactcttggtccgcatg

SEQ ID NO: 6234 - DNA, 120 bp, synthetic construct
  misc_feature 1..120: note = Artificially Synthesized Probe
  source 1..120: mol_type = other DNA
tttatcagaacagtaaatttttttcaatagctttctgagaaagaccttgcctgccctttgcctgagttaggcagctctgttttgtgtttccagaactccacaatcttcctatcagaccac

SEQ ID NO: 6235 - DNA, 120 bp, synthetic construct
  misc_feature 1..120: note = Artificially Synthesized Probe
  source 1..120: mol_type = other DNA
atttcaaaatacaatcatgccttcccaacaatctcccaaagtcttaactcattccagcattaacccaaaagtccaagtccaaagtcttatctgaggcaaggcaagttttttctgcctata

SEQ ID NO: 6236 - DNA, 120 bp, synthetic construct
  misc_feature 1..120: note = Artificially Synthesized Probe
  source 1..120: mol_type = other DNA
aatttctgtagcaggcttgaattcctccctagaaagtgagtttttctcttctaccacatagtcggactgcaaattttccaaacttttatgctcagcttccctttttaaatataaattcca

SEQ ID NO: 6237 - DNA, 120 bp, synthetic construct
  misc_feature 1..120: note = Artificially Synthesized Probe
  source 1..120: mol_type = other DNA
ttttttctctttccaaattagatatttatttttgaaaacaatatctactactgtgcacatgtcgggaaacaggccatccgtgtggtctccactggcaaggaaggtgtgatttacaatggc

SEQ ID NO: 6238 - DNA, 120 bp, synthetic construct
  misc_feature 1..120: note = Artificially Synthesized Probe
  source 1..120: mol_type = other DNA
cctcctcacttgtacatggctgtcttcttatgtcctcacctggcagagtagagagagctctggtctttttatctctttataagggcacaaatctttttatctttttatctctttataagg

SEQ ID NO: 6239 - DNA, 120 bp, synthetic construct
  misc_feature 1..120: note = Artificially Synthesized Probe
  source 1..120: mol_type = other DNA
tttggcaaatgtatatactatatagccccagtcaagacatagaccatttccatcagtctagaatattcctacaagtccctttccaagggctttctccctaaatctgtcttccagagactg

SEQ ID NO: 6240 - DNA, 120 bp, synthetic construct
  misc_feature 1..120: note = Artificially Synthesized Probe
  source 1..120: mol_type = other DNA
tccctaagagaaagggcccctagaattttggctgcaagagcctaggcattctctgggactaatctccctcaaaaatccataaccaggagatttaaaatatcttttttagtatcttcttaa

SEQ ID NO: 6241 - DNA, 120 bp, synthetic construct
  misc_feature 1..120: note = Artificially Synthesized Probe
  source 1..120: mol_type = other DNA
tcatcactggctgtgaactcagtgtatctgtcttgctgattctctaaagagagtcctgtggctcatggtggccacaaactgattttgataagcaaaatgcatatcttcattttattcttc

SEQ ID NO: 6242 - DNA, 120 bp, synthetic construct
  misc_feature 1..120: note = Artificially Synthesized Probe
  source 1..120: mol_type = other DNA
tcatatctggtttggcatggatgaaattccagggctggattttccttaactagtcaagaacataaaagtacttgaaaaatgtgatcagatcaggagacccagtttggcacggaagcattt

SEQ ID NO: 6243 - DNA, 120 bp, synthetic construct
  misc_feature 1..120: note = Artificially Synthesized Probe
  source 1..120: mol_type = other DNA
gtaggagtagtagtgcagtgtagtagatcacagtggattttcacactttcatggaagaaaacacattattaaaatgaaagccctcctggggatcgtggaatggttttcagggtctgtttt

SEQ ID NO: 6244 - DNA, 120 bp, synthetic construct
  misc_feature 1..120: note = Artificially Synthesized Probe
  source 1..120: mol_type = other DNA
tgtgattagcttgacaaagctcctttgtggaagagcagggcagagtctttgtagtgatgatgcctgtgtttaaacaaaagcttcaccacgtaaaagctgtatgaacttggatgaatattt

SEQ ID NO: 6245 - DNA, 120 bp, synthetic construct
  misc_feature 1..120: note = Artificially Synthesized Probe
  source 1..120: mol_type = other DNA
atggcctaagagttccattccttctgtgcttctctgaacctgtgagagatttctgggtttctagatttctgcaaggatcaacaggaaaacagtgttctaaggcaggaaataagaatgtca

SEQ ID NO: 6246 - DNA, 120 bp, synthetic construct
  misc_feature 1..120: note = Artificially Synthesized Probe
  source 1..120: mol_type = other DNA
ccaatcccaatttgtccagtcatcacattcacagacgaggctactgacatcatgtctgaattcttccagctcttgtcgtctgtatcaagatcatttgtaatgacaaccaattatttcaaa

SEQ ID NO: 6247 - DNA, 120 bp, synthetic construct
  misc_feature 1..120: note = Artificially Synthesized Probe
  source 1..120: mol_type = other DNA
tctggatgataaaacttcaggcacctttctcaaagaattattgcaaagttaaacaagagcgcttctgtggaagcgcaggcatattacagtggaaccataagaaattgccaacaggttcat

SEQ ID NO: 6248 - DNA, 120 bp, synthetic construct
  misc_feature 1..120: note = Artificially Synthesized Probe
  source 1..120: mol_type = other DNA
cggatagagctttggaaagaggaaatattagaaatttggttgagaattttctatgaagttcagtgctaagagcagagaccacaacttaggctttgcagccagcattcccttccataaact

SEQ ID NO: 6249 - DNA, 120 bp, synthetic construct
  misc_feature 1..120: note = Artificially Synthesized Probe
  source 1..120: mol_type = other DNA
tcatttcacacttaaatgataatcgcaaggagagccatcagaaccattagtcatcatctcttcaatgcgaaggttcgtaattgtcacatgcaccttgcaataaggcaccttgcaataagc

SEQ ID NO: 6250 - DNA, 120 bp, synthetic construct
  misc_feature 1..120: note = Artificially Synthesized Probe
  source 1..120: mol_type = other DNA
taagcacacagcgttgatggtatgaagtctgtgtccatgccagataacttcacaaggaaatagttaacaattctcggttttacttagtaaacatacgggagcaatgctcctcagttgcaa

SEQ ID NO: 6251 - DNA, 120 bp, synthetic construct
  misc_feature 1..120: note = Artificially Synthesized Probe
  source 1..120: mol_type = other DNA
ggattattttatttaaaaggccagctgtgtggacaccatgcctataaagtattgggatttttaatgaatgttaaccaaggaagagcccagctaggatacttcctgtaggtgtcactttgt

SEQ ID NO: 6252 - DNA, 120 bp, synthetic construct
  misc_feature 1..120: note = Artificially Synthesized Probe
  source 1..120: mol_type = other DNA
tcggatttgagattctgtaagaagtgacctaatgtgagcatttcctgatatggaggagacgcaaaatagctcagggaaaaagttgatcattagaaaaatctgtggttgtcccactgtctc

SEQ ID NO: 6253 - DNA, 120 bp, synthetic construct
  misc_feature 1..120: note = Artificially Synthesized Probe
  source 1..120: mol_type = other DNA
attttccaaagcacataatgcttagtcatttggggtgttaggaaagagagaaagtcggagcggagtgtgtggtgaagtgagagaaagaaagaaggctgaattttcgttaagctgctcaaa

SEQ ID NO: 6254 - DNA, 120 bp, synthetic construct
  misc_feature 1..120: note = Artificially Synthesized Probe
  source 1..120: mol_type = other DNA
tgcaagcaggaataaataagattttctgtatttagaatgaggccacgtatttcggagcacagatctatcaggcatgttatttatgtcttttgcaatttcccgggacccagatttctcagg

SEQ ID NO: 6255 - DNA, 120 bp, synthetic construct
  misc_feature 1..120: note = Artificially Synthesized Probe
  source 1..120: mol_type = other DNA
gccagagtatctagcattcagtaaatatttattaactagatagaaaaaaaatgtaccaggcttagtaacacccggccttcccatctcattagaggctagaatgctcaatggacacagggt

SEQ ID NO: 6256 - DNA, 120 bp, synthetic construct
  misc_feature 1..120: note = Artificially Synthesized Probe
  source 1..120: mol_type = other DNA
tgtgactgctgcttttcactataaaaagaagctgagatttcctgccaactatttcacaaaaacaaacagaagattcattgagagaaccaaggaagcatctgatcctacaacacacgacca

SEQ ID NO: 6257 - DNA, 120 bp, synthetic construct
  misc_feature 1..120: note = Artificially Synthesized Probe
  source 1..120: mol_type = other DNA
gaaaacacccatatgttagaaaaaaaaaatagaacactttttctgcctctgaataagtgcctaagatcctctaccacttcttgctatgaccacccacccagagtaaggaagacagctgct

SEQ ID NO: 6258 - DNA, 120 bp, synthetic construct
  misc_feature 1..120: note = Artificially Synthesized Probe
  source 1..120: mol_type = other DNA
tcctggtgagctagagccagagcgaagtggaacccagagcactgtttgccaacacccgcggcactagacaacgccaagagaatggcttagtaataatgagataataacttaatgaaaaac

SEQ ID NO: 6259 - DNA, 120 bp, synthetic construct
  misc_feature 1..120: note = Artificially Synthesized Probe
  source 1..120: mol_type = other DNA
gaggctttactgtgagagtgtgaggaagcataggacgggaaagagagggatggggcattactgagagaggatgagagagcataggatgggaaagagagggatggaggctttactgagcga

SEQ ID NO: 6260 - DNA, 120 bp, synthetic construct
  misc_feature 1..120: note = Artificially Synthesized Probe
  source 1..120: mol_type = other DNA
aaactatctgggtcagaatcccggatccaccctttatcactataaaatgttgggcaagtactcacagtgcctctgctctctcatgtataaaatgtgaggaaccatagcaccaaaatcatg

SEQ ID NO: 6261 - DNA, 120 bp, synthetic construct
  misc_feature 1..120: note = Artificially Synthesized Probe
  source 1..120: mol_type = other DNA
gagttcaaggtgagtctcagagtacaatgagaagacagagtttattgaaagttgctcagttacagagcagggcgtccttggaaagcaaagggaggaatgcgccatctttgtttttctcat

SEQ ID NO: 6262 - DNA, 120 bp, synthetic construct
  misc_feature 1..120: note = Artificially Synthesized Probe
  source 1..120: mol_type = other DNA
ctagtttcaagatagagttggttttaaaaagatgttgccctggctctcctgggctcttgcttccctgacagcaggagtctcttctgcattttgtatactgcagctatctagaatctgcac

SEQ ID NO: 6263 - DNA, 120 bp, synthetic construct
  misc_feature 1..120: note = Artificially Synthesized Probe
  source 1..120: mol_type = other DNA
tggggtcaggacacacctgcacaagttgaaaggccggctcttgttctttgaacaatagaaccaggaataattaatcatcggatatagttgggcagagaaactgcttataatttacaatta

SEQ ID NO: 6264 - DNA, 120 bp, synthetic construct
  misc_feature 1..120: note = Artificially Synthesized Probe
  source 1..120: mol_type = other DNA
aatccatattacctaaaacactcaaccagtcactgtatagatgagtaataacaaagtcagtctcagtataattgtgaacattccttttgaaattgaacatgtgaagacacatgcacacgt

SEQ ID NO: 6265 - DNA, 120 bp, synthetic construct
  misc_feature 1..120: note = Artificially Synthesized Probe
  source 1..120: mol_type = other DNA
aataagaaaacttacttccaaaaataaaaataaaagccacacacacattttccctgtaaatcttgataggaagaaggaaaaggtcaggatgttgccgagcccttgggttggaagaggtcg

SEQ ID NO: 6266 - DNA, 120 bp, synthetic construct
  misc_feature 1..120: note = Artificially Synthesized Probe
  source 1..120: mol_type = other DNA
aatcaatgttttatgacacctgcagactacaggcaatagtagacgattttacggataatagttaatagagctctcacatcgacaacccaatgagggcagcctgcttctatccctgtttac

SEQ ID NO: 6267 - DNA, 120 bp, synthetic construct
  misc_feature 1..120: note = Artificially Synthesized Probe
  source 1..120: mol_type = other DNA
ctcacttggagacaatgcagaaccaagatgggatcaatagtcattgatttctcttggtcttgaatgatttttacacaagtcattttgcaataagagggccttcgtacggtgcctgtctgc

SEQ ID NO: 6268 - DNA, 120 bp, synthetic construct
  misc_feature 1..120: note = Artificially Synthesized Probe
  source 1..120: mol_type = other DNA
tttgttttgttttgtttgtaagaagggatgcttatattcacagagtttgaaaaacaagtgacctaagccaacccctcattttacagtagaagaaaggcagcccagagaggtgggaccaga

SEQ ID NO: 6269 - DNA, 120 bp, synthetic construct
  misc_feature 1..120: note = Artificially Synthesized Probe
  source 1..120: mol_type = other DNA
ccagatagcgtgtctccaatccatggggttgcagaaggggctcgctgcctgtgcactagatgccaatacggtgacaccaggattttcagaaaagaaaagctttatattaaaagtctattc

SEQ ID NO: 6270 - DNA, 120 bp, synthetic construct
  misc_feature 1..120: note = Artificially Synthesized Probe
  source 1..120: mol_type = other DNA
ctttaactctttgaggcattgtttcattattaggatgcttgcttatttcttgtctcttgagcaactgagtgggtggatgacccagtcgattaacaaatgagtgagaaacgagaacatcct

SEQ ID NO: 6271 - DNA, 120 bp, synthetic construct
  misc_feature 1..120: note = Artificially Synthesized Probe
  source 1..120: mol_type = other DNA
gctctgtgtcagccaggacaccaaatgtggcctctccatctgaccagggcttgctcaccacatagaaggtggtgttcagagtgagtgacccaagcaagagagagccaggggaaagccata

SEQ ID NO: 6272 - DNA, 120 bp, synthetic construct
  misc_feature 1..120: note = Artificially Synthesized Probe
  source 1..120: mol_type = other DNA
ctgtgatcctcctgcttcaagcaagggctccgccatctctcctgcagataaaaactcaggaacattttatgttctgcttttggagggagtttataactttacattctgtcttaaagaaaa

SEQ ID NO: 6273 - DNA, 120 bp, synthetic construct
  misc_feature 1..120: note = Artificially Synthesized Probe
  source 1..120: mol_type = other DNA
aagaaagaaaagaaaaatggcttgctgccgagggaagagagagagatgaaataaatatgtctcctcaccctcttcctacccctgagctaggcacagttcgcttgtccatatgatgagata

SEQ ID NO: 6274 - DNA, 120 bp, synthetic construct
  misc_feature 1..120: note = Artificially Synthesized Probe
  source 1..120: mol_type = other DNA
ccgagttgcaagttgcagttctccttctgtttactgtattacaaacttccaagctttgtctctactttactataccctagggaattgtgtgtactgagtactcagtctttgttcaataag

SEQ ID NO: 6275 - DNA, 120 bp, synthetic construct
  misc_feature 1..120: note = Artificially Synthesized Probe
  source 1..120: mol_type = other DNA
ggatgtatctttcttttctgatgctaaaatagccccccagcaggacagggaaggtgaagaaaagatgtattctctagttttcccaagttaattatacttgctcagaaagccaagtgattc

SEQ ID NO: 6276 - DNA, 120 bp, synthetic construct
  misc_feature 1..120: note = Artificially Synthesized Probe
  source 1..120: mol_type = other DNA
aaccgttacatttggtaacctgtagtgatggttttgttctacctcccagttctctgaagagtgaattgagcttcatggaaacactctggcatttgctgataagatcgatggaaatagagt

SEQ ID NO: 6277 - DNA, 120 bp, synthetic construct
  misc_feature 1..120: note = Artificially Synthesized Probe
  source 1..120: mol_type = other DNA
acccacaaattgcattgcaaatggtgcctattttttccagcagaccatctgctggagtcaattactcaccattccaagcgagcagcctgggcagatctggtgactctgcataaagtcact

SEQ ID NO: 6278 - DNA, 120 bp, synthetic construct
  misc_feature 1..120: note = Artificially Synthesized Probe
  source 1..120: mol_type = other DNA
tctagaatagatatcacaccctacaaaactcatctgtcgttaaaacactaaccaggacactgatgggctaggaaggaataatgggtgtttctggttgaagcccaaaagaatcagtctttc

SEQ ID NO: 6279 - DNA, 120 bp, synthetic construct
  misc_feature 1..120: note = Artificially Synthesized Probe
  source 1..120: mol_type = other DNA
tcatcagacatgtgtatgagcaaagcagttaacacaagaaagactaatcatgtctcattacattgcattacattcccgcctctgttgagctgagtcattggcaggtttacttcttttagg

SEQ ID NO: 6280 - DNA, 120 bp, synthetic construct
  misc_feature 1..120: note = Artificially Synthesized Probe
  source 1..120: mol_type = other DNA
gccaagacagtcatgttctgacccaatgagccagtagaacagcaagtgtccagtggctgggagggaatattggggggaacagggatatccaaatctcactttattaccaaatcaaagcat

SEQ ID NO: 6281 - DNA, 120 bp, synthetic construct
  misc_feature 1..120: note = Artificially Synthesized Probe
  source 1..120: mol_type = other DNA
gatgttaacatggcatggatttgccttcgacagaattatttcactcctttttcagctaaccttgattggtcttagtctgtagcatgtggaagggtccagcattttagttggaagcataat

SEQ ID NO: 6282 - DNA, 120 bp, synthetic construct
  misc_feature 1..120: note = Artificially Synthesized Probe
  source 1..120: mol_type = other DNA
cctacacgttattggcttaaatggacccacccatgatctggagatgatgccgcctgatgatccacggatgaggtttgcttccttctattatgttaccaaaaaaaaaaaaaaactaagatg

SEQ ID NO: 6283 - DNA, 120 bp, synthetic construct
  misc_feature 1..120: note = Artificially Synthesized Probe
  source 1..120: mol_type = other DNA
tttaggggtgccaggacccacccaagtatagattctgaaatttcatgaatggcactatttaaactaagaataactcattctgaggctcagcaaagacccaacccatattttgctatacct

SEQ ID NO: 6284 - DNA, 120 bp, synthetic construct
  misc_feature 1..120: note = Artificially Synthesized Probe
  source 1..120: mol_type = other DNA
tgcttctctatcacacatctttgagagtttttaaaagtccacacagatatatcagaaatcccaggctcaatgtagagcagatgtttagtatttgccagccatttgcctgagcactgggaa

SEQ ID NO: 6285 - DNA, 120 bp, synthetic construct
  misc_feature 1..120: note = Artificially Synthesized Probe
  source 1..120: mol_type = other DNA
caggactctaggttcaaaaagccaaccacccaaccagcatttctactgggagtggtcaccatataatttttaaatggtcaaattgtgattctcagacaaaatcaatcaacatgtgtccaa

SEQ ID NO: 6286 - DNA, 120 bp, synthetic construct
  misc_feature 1..120: note = Artificially Synthesized Probe
  source 1..120: mol_type = other DNA
ttgcatgggattcttgaagcttgagatatcttcagttgtgctggtacctttctaagaaccaaaacttacttgctatttagccatggatgacatcttgtcctctcaagcacaagatgctaa

SEQ ID NO: 6287 - DNA, 120 bp, synthetic construct
  misc_feature 1..120: note = Artificially Synthesized Probe
  source 1..120: mol_type = other DNA
caggaaagaataaacactgtctatcctgtgggtggaaaaaaataaatgcaaatcgctgtgctgtggtttctatgctttcacacagaaacccagctgcactgataaaacaaatgcgcttgt

SEQ ID NO: 6288 - DNA, 120 bp, synthetic construct
  misc_feature 1..120: note = Artificially Synthesized Probe
  source 1..120: mol_type = other DNA
gaaactcagccttctctctttccaatttatacaaaacatggtatgtgcacgagttttgggaaagctgagggtcatcagggccatgaaaacagcacagaacaatagagttctcatacctaa

SEQ ID NO: 6289 - DNA, 120 bp, synthetic construct
  misc_feature 1..120: note = Artificially Synthesized Probe
  source 1..120: mol_type = other DNA
cattttacaaattatagctatgcccaacccccagttccaccccatccctgagtctgccatcttacctaaacatagtcctaacctctcttttgtctgggaagatatattattttatctgaa

SEQ ID NO: 6290 - DNA, 120 bp, synthetic construct
  misc_feature 1..120: note = Artificially Synthesized Probe
  source 1..120: mol_type = other DNA
gtgacatccgcagtttcttcccgtggaccacaagtagcaaattcagtacatggatttcatggcatctgcaggaaaatgagacttggcaaaatttacctagcatcatgtttttaaatgtgt

SEQ ID NO: 6291 - DNA, 120 bp, synthetic construct
  misc_feature 1..120: note = Artificially Synthesized Probe
  source 1..120: mol_type = other DNA
cttggtatttagggtcgtttcagtttgctcagcggtgccctctattaaagcacatcatcttttaaaatgtcctctctcataacatttttgtacccctgctcaatccatgggataaacatt

SEQ ID NO: 6292 - DNA, 120 bp, synthetic construct
  misc_feature 1..120: note = Artificially Synthesized Probe
  source 1..120: mol_type = other DNA
gcactttacctgcctaccaatacatttacccattcaaagaatatttagtaagggcagatttggaaatggagatctatagttaaatagcgcttggagttattctcatgtggtcgcccactg

SEQ ID NO: 6293 - DNA, 120 bp, synthetic construct
  misc_feature 1..120: note = Artificially Synthesized Probe
  source 1..120: mol_type = other DNA
tatctcttcaagcctccaagaggagctttcttggagacagctcttctctgccctattttcatcattttctataggggcaaagacacctggggaactgcacaaggaaaggagagttttcgg

SEQ ID NO: 6294 - DNA, 120 bp, synthetic construct
  misc_feature 1..120: note = Artificially Synthesized Probe
  source 1..120: mol_type = other DNA
ttttttctaaaaggacaggaaaaaaatgtacactcagtgagctgatgtagattctagttacagggcagtctggtttttgcttggtgagaaagccagctcaagtattggtcactgttgaga

SEQ ID NO: 6295 - DNA, 120 bp, synthetic construct
  misc_feature 1..120: note = Artificially Synthesized Probe
  source 1..120: mol_type = other DNA
ctacaagtccctttcctgtccctaccacacagcaacttctgcatctttgtttttacttttacatcattgaggttgatggcatttacactctgtcctgtaatcataactaaaccttcctta

SEQ ID NO: 6296 - DNA, 120 bp, synthetic construct
  misc_feature 1..120: note = Artificially Synthesized Probe
  source 1..120: mol_type = other DNA
tgtgtgtgttttcttttcacttatcaccgtttcatccatatactttcaatcgttcctcctgtttgaactgcatttctgagtctcatacgatgctttacctggagctctgagtccccatga

SEQ ID NO: 6297 - DNA, 120 bp, synthetic construct
  misc_feature 1..120: note = Artificially Synthesized Probe
  source 1..120: mol_type = other DNA
ctttccctactgatttggaatgacatctttattaaatgtaaaattatcatacaaaccagtgtgcattaaaggtgcctgtccactactgatggttgcctcagtcagatgtcaggtggttcc

SEQ ID NO: 6298 - DNA, 120 bp, synthetic construct
  misc_feature 1..120: note = Artificially Synthesized Probe
  source 1..120: mol_type = other DNA
tttagatgtttcattattttccctggaatgtgggaaatcccttttagtcttcacattcgggtcttttttcctacacagaagtttcgtcctctttgtctttggttatcgtgtctgtagcca

SEQ ID NO: 6299 - DNA, 120 bp, synthetic construct
  misc_feature 1..120: note = Artificially Synthesized Probe
  source 1..120: mol_type = other DNA
acactcgatgtggtgtatggtgtgctgtttgtgagcaagtaaatgttttattttcccttccagcagcaaaagtgtgactacaaaccttatagagcaaaagaatgtccctttgtccaaagc

SEQ ID NO: 6300 - DNA, 120 bp, synthetic construct
  misc_feature 1..120: note = Artificially Synthesized Probe
  source 1..120: mol_type = other DNA
aacatctctaagggtgccaccaggctttaaaaattcatattacacaaatgaagaaactgagggttgaagcaccgtatagaattaattgtagaaccaaggctttctcaggcctctgaggtg

SEQ ID NO: 6301 - DNA, 120 bp, synthetic construct
  misc_feature 1..120: note = Artificially Synthesized Probe
  source 1..120: mol_type = other DNA
tccatccagtggcactcagcctagtgacatttccagcacgatttgttctggaggcatcaagagaaagtttgcatccatctcattttcatttataacatttcacttccaaattaagaaata

SEQ ID NO: 6302 - DNA, 120 bp, synthetic construct
  misc_feature 1..120: note = Artificially Synthesized Probe
  source 1..120: mol_type = other DNA
gacatatatttttttcttatgattgtaaataatgaccaaatcccatcattataaatgcctgtccctgcctttgggccatgaaacagcaaagcaggacctttgtagaatgttgctggcagg

SEQ ID NO: 6303 - DNA, 120 bp, synthetic construct
  misc_feature 1..120: note = Artificially Synthesized Probe
  source 1..120: mol_type = other DNA
ttttctcaacactttcttcttcctcttaaatgtaaaattgtatttttttaatctggtttttggagggctctgggtgactggatgaattcccagaagccccggtacccctcgggctaagta

SEQ ID NO: 6304 - DNA, 120 bp, synthetic construct
  misc_feature 1..120: note = Artificially Synthesized Probe
  source 1..120: mol_type = other DNA
tagacatcaaataatatcgattaatacattcaggcaggcctttcagaaactcctttttgatcttaagtttctgtctcctggctgaggggggccaaggcttgcaggcatatttacttgaga

SEQ ID NO: 6305 - DNA, 120 bp, synthetic construct
  misc_feature 1..120: note = Artificially Synthesized Probe
  source 1..120: mol_type = other DNA
ctggagttttgtttttcttttgtttgcacctttccatagaccactgtgagacccacttttcctctatgctttagcccctttgaaagggtttctggtccaccaggagtgttactcagtatt

SEQ ID NO: 6306 - DNA, 120 bp, synthetic construct
  misc_feature 1..120: note = Artificially Synthesized Probe
  source 1..120: mol_type = other DNA
acttcagtctcatgaattatggtagagacacaggtatgcttcttcatcgatatggtggatcctatttatggaaaataactgaagctggacaaaactatcgccatggctctccaagaacat

SEQ ID NO: 6307 - DNA, 120 bp, synthetic construct
  misc_feature 1..120: note = Artificially Synthesized Probe
  source 1..120: mol_type = other DNA
ttttacctcaacgattttttaaaaaattaataagctagagcatgagctcttaaagatggtacatcctagacagggagatgagatgttcacgttacatccattgtgcaggctacgagggtg

SEQ ID NO: 6308 - DNA, 120 bp, synthetic construct
  misc_feature 1..120: note = Artificially Synthesized Probe
  source 1..120: mol_type = other DNA
atgtctctgaagaccctacaggttgtgagtctgcacctgtgaagattgcagctccatggtctgcaggaagatttaatttcaaacagtttcttatgacattgtttttttcgtaaaggaatt

SEQ ID NO: 6309 - DNA, 120 bp, synthetic construct
  misc_feature 1..120: note = Artificially Synthesized Probe
  source 1..120: mol_type = other DNA
ctggaaggggggttggacaaaattattatatctgaaccatgggaaaaaaacactggcaaaaatgctacaaataactcacaaagaagctctcatgagtcaaaagggctccttcttcacaga

SEQ ID NO: 6310 - DNA, 120 bp, synthetic construct
  misc_feature 1..120: note = Artificially Synthesized Probe
  source 1..120: mol_type = other DNA
ctgctgtcccctcccacctgtgttttagaacccgtggcatttgtccttgtgtttattttctttttttcttgccttcttgatgggctattcagtgtgagatcaattgtattcaataagaag

SEQ ID NO: 6311 - DNA, 120 bp, synthetic construct
  misc_feature 1..120: note = Artificially Synthesized Probe
  source 1..120: mol_type = other DNA
ttttatcctggttcaacctcttcagaataaatgatgttttagttgtggtttcatccgtggcctttgtccacagaatgaagaacctgtgttctccaaggatggccgaaagtttttcttcat

SEQ ID NO: 6312 - DNA, 120 bp, synthetic construct
  misc_feature 1..120: note = Artificially Synthesized Probe
  source 1..120: mol_type = other DNA
gaggttcaggtgcaattttttctcagtgcacttcatgacacgattgatagaatgtctgcaagctgttgcctttgctttttcctgcggtcttcattctaccatccaaattcttttgtttat

SEQ ID NO: 6313 - DNA, 120 bp, synthetic construct
  misc_feature 1..120: note = Artificially Synthesized Probe
  source 1..120: mol_type = other DNA
tttattcttctctctttttccctccacctcccggcatttgtctctttcctccctcactggtcccccttcagtaatggctccattaattagatttacaaatgaaaaaggcctataaagcat

SEQ ID NO: 6314 - DNA, 120 bp, synthetic construct
  misc_feature 1..120: note = Artificially Synthesized Probe
  source 1..120: mol_type = other DNA
ggaggtcttaggtgaaaatgagtcaacaactatttattgggccaggctatatgtctgaacttgtcttaaatgtgctcagctccttgcccttcagaaggtgagtgatcttgtaaaagattt

SEQ ID NO: 6315 - DNA, 120 bp, synthetic construct
  misc_feature 1..120: note = Artificially Synthesized Probe
  source 1..120: mol_type = other DNA
aaatattctatagctataaagtagaaggctaatatttatgatgaggccctaaaggcaatttcccttctcaacagcccaactgtgcgactttggacaagtttccaaatctcaaagagggca

SEQ ID NO: 6316 - DNA, 120 bp, synthetic construct
  misc_feature 1..120: note = Artificially Synthesized Probe
  source 1..120: mol_type = other DNA
tcagataagaacttcttccaggtagatccggtatcttaggatctttccattttagggagcacattttaggccttcttgacttgaaatgacacttgaccacagtggtcccaggtaacatct

SEQ ID NO: 6317 - DNA, 120 bp, synthetic construct
  misc_feature 1..120: note = Artificially Synthesized Probe
  source 1..120: mol_type = other DNA
ctctcagtttgtctcccattgtccacaaaaaataatagtcccatgagctaggaagggcaaatatcctacacagtgatgagccaaagccatcaatccatcaataaagataggaaaacaatt

SEQ ID NO: 6318 - DNA, 120 bp, synthetic construct
  misc_feature 1..120: note = Artificially Synthesized Probe
  source 1..120: mol_type = other DNA
ttttgaggagctacataatcagaatccacaatcctgtctcagaagcaggaggcagcttcagcacacaggaggtcatgatcaaacacagaagtgaaaaattgaagtagatttcaagaagag

SEQ ID NO: 6319 - DNA, 120 bp, synthetic construct
  misc_feature 1..120: note = Artificially Synthesized Probe
  source 1..120: mol_type = other DNA
acattctgaggctgtgtttcaagatgaaaggtaacacatacgcagcttgtctcaaagttgtatcttgagacagggagcagacagaagaggagaggagaaagaaaaaaagtttaaatcgtg

SEQ ID NO: 6320 - DNA, 120 bp, synthetic construct
  misc_feature 1..120: note = Artificially Synthesized Probe
  source 1..120: mol_type = other DNA
gtttatgtatttgcaaggcttgtgttgtggtctgcaaatagttattgtgaagagatgactccatagttgatacctgggaggaaaacagaagcaaagaacaagtacagcaacacaaggtca

SEQ ID NO: 6321 - DNA, 120 bp, synthetic construct
  misc_feature 1..120: note = Artificially Synthesized Probe
  source 1..120: mol_type = other DNA
aatgagtaggtaggatttggaatgggaaaaagcagtccaagtggaaggtacaccctgagaaaaagcacaagaaatgttgtaagattatgcaatggaatcttttgcagcatgtgaatcagg

SEQ ID NO: 6322 - DNA, 120 bp, synthetic construct
  misc_feature 1..120: note = Artificially Synthesized Probe
  source 1..120: mol_type = other DNA
gtgggggggacataaacactcagtccattgtaatcatagctgattgtagctcatcagttgtttgcaaacagtatttctatttcgttagtcctttggcatactgatcttctcctaatgttc

SEQ ID NO: 6323 - DNA, 120 bp, synthetic construct
  misc_feature 1..120: note = Artificially Synthesized Probe
  source 1..120: mol_type = other DNA
gggatcagctgtaagccaaactcagtggaacattgtggaaactcacctatctatgtaatacagagagtttctgtccacctctctattgtctggaagtgaagccagctatattctaaatat

SEQ ID NO: 6324 - DNA, 120 bp, synthetic construct
  misc_feature 1..120: note = Artificially Synthesized Probe
  source 1..120: mol_type = other DNA
ggtctcaccttctagtcctggataaacccaattccatctttaaagaaaaaaagcactcacctcctggactcatcttctaggacagctaacaaattaccgcaatctggatggtttaaacca

SEQ ID NO: 6325 - DNA, 120 bp, synthetic construct
  misc_feature 1..120: note = Artificially Synthesized Probe
  source 1..120: mol_type = other DNA
ctactgaaacattttttgtatgtttaaaaatagctaaataaacttccttctcctgaagccgaggatggaattattgcagtcacttgctgctctgagtgggaacgggacagtctgtgttca

SEQ ID NO: 6326 - DNA, 120 bp, synthetic construct
  misc_feature 1..120: note = Artificially Synthesized Probe
  source 1..120: mol_type = other DNA
tggggcaccactgtacctgtcctgtgaggctgttttgaagattaacctagatagtgcatgtagagtacttaccatggcatctgatacatagtgagtgtttaataataagtgttaactatc

SEQ ID NO: 6327 - DNA, 120 bp, synthetic construct
  misc_feature 1..120: note = Artificially Synthesized Probe
  source 1..120: mol_type = other DNA
taaatgtcacaagtaactgatgtcatgaatgtcctgagtgattaatgacatgagcatcatgagtgattgatgccatggatgtcatgagtgattgaagggtgatgtcatgaatgtcctcag

SEQ ID NO: 6328 - DNA, 120 bp, synthetic construct
  misc_feature 1..120: note = Artificially Synthesized Probe
  source 1..120: mol_type = other DNA
cagctgccctttttaattttgaatttatccaagtgaatgtttagaaccggtttgaagctccttggagcattgctggtgtgtttgtaagaacatctgttcagtctctcaaacatttggagc

SEQ ID NO: 6329 - DNA, 120 bp, synthetic construct
  misc_feature 1..120: note = Artificially Synthesized Probe
  source 1..120: mol_type = other DNA
tcctgtgagatttcccactagccagttcaccttgcttctgcctgaatatgaccagatggtatttcctaaagaatatctctcttcaaaatggcttccagagcacatacatttctctttttt

SEQ ID NO: 6330 - DNA, 120 bp, synthetic construct
  misc_feature 1..120: note = Artificially Synthesized Probe
  source 1..120: mol_type = other DNA
caacaccagaaagtgccctagaaaatacaaccaaaaggcttcccagaggacccaagaactggacaaagatgaacattcaaacacttttgagagctatgaaaaatagatccaacgaatgta

SEQ ID NO: 6331 - DNA, 120 bp, synthetic construct
  misc_feature 1..120: note = Artificially Synthesized Probe
  source 1..120: mol_type = other DNA
caaggctgcatacaatctggccacatcctacttatccagcctcgtaatgacactactcctctatcagagctttcaaacacttttagaggcacaatcagttttcaaatgaaatgttaagtg

SEQ ID NO: 6332 - DNA, 120 bp, synthetic construct
  misc_feature 1..120: note = Artificially Synthesized Probe
  source 1..120: mol_type = other DNA
ggcgtgtagttcagtgagtataggaactttgtttgacccaccactttgatcctgacatctagtgcaagagctgtggcatagtgtcctccataaattagcatttttaaatggatgaataaa

SEQ ID NO: 6333 - DNA, 120 bp, synthetic construct
  misc_feature 1..120: note = Artificially Synthesized Probe
  source 1..120: mol_type = other DNA
atttcaacttaacataaagaaaaagtcactaaagtcctaaccatcattgtatggatctcatcgtgtgtaatatatggacatacggtgaaggtggacatgccaaactctcgtcccaggagt

SEQ ID NO: 6334 - DNA, 120 bp, synthetic construct
  misc_feature 1..120: note = Artificially Synthesized Probe
  source 1..120: mol_type = other DNA
agaatcagtcccaaacttaattattgatgctaatgaggaggaaaaagatgagagaaaatcagctgcttccctggctgtgcatttctgcttcagcaattccttgttgtttaagagaaaggt

SEQ ID NO: 6335 - DNA, 120 bp, synthetic construct
  misc_feature 1..120: note = Artificially Synthesized Probe
  source 1..120: mol_type = other DNA
gtaagacagcgttcatagtaatacatttctcccacttcagcacgcataaattgtcttccaagaaaagggatatttgtcacttattctaccagctgtcagtcagtcttcccttgatgttct

SEQ ID NO: 6336 - DNA, 120 bp, synthetic construct
  misc_feature 1..120: note = Artificially Synthesized Probe
  source 1..120: mol_type = other DNA
caaatcaaacatggaacaacaaccttctcctcggcactgttgtccaacagcaacgacaaagcctaaatagggcagagaagggagagattcgaaaaatgaattagaaaaatctccttacaa

SEQ ID NO: 6337 - DNA, 120 bp, synthetic construct
  misc_feature 1..120: note = Artificially Synthesized Probe
  source 1..120: mol_type = other DNA
caaggagaggtagcagcgatggtgatgaaaatgtcttagactcaggagctagatcaagtaagaacagtaaagaagatgaaaacccagtttctccctgttggggatggaagtcacacatat

SEQ ID NO: 6338 - DNA, 120 bp, synthetic construct
  misc_feature 1..120: note = Artificially Synthesized Probe
  source 1..120: mol_type = other DNA
tgctcttccctgtcaccaagcgtgcagccaccggcaaatgacaaagtcttgttctcaaaaacttaaaaagttttctaaagaaatagctgctaaagaaaatgagaagccagatagaaaagg

SEQ ID NO: 6339 - DNA, 120 bp, synthetic construct
  misc_feature 1..120: note = Artificially Synthesized Probe
  source 1..120: mol_type = other DNA
aagaaaaacagaccaagatattagcaggaaagggactgaatttccaagcaaattgggagtcagtgcaagagtaatatcggctcaatggccaacaacaattagatggttttcagcagatgg

SEQ ID NO: 6340 - DNA, 120 bp, synthetic construct
  misc_feature 1..120: note = Artificially Synthesized Probe
  source 1..120: mol_type = other DNA
tagataattgtgaataatattccactgtctagccctagaacaatttgactgtccagtggaaaaaccttaccagcaaggtggtttcttgaagaaaaggaagtttgccacacagaaagctcc

SEQ ID NO: 6341 - DNA, 120 bp, synthetic construct
  misc_feature 1..120: note = Artificially Synthesized Probe
  source 1..120: mol_type = other DNA
tttcccattcagtatgagtgggagcattttattagccataatcaagttttccttttcatgacaagaaagcttacagagacctgggaaccactcatataccacggggtttctttgcaattc

SEQ ID NO: 6342 - DNA, 120 bp, synthetic construct
  misc_feature 1..120: note = Artificially Synthesized Probe
  source 1..120: mol_type = other DNA
tttgttggaaccaacgataagtatgcatttgcatgaagaggcatcgtgctagacctggggagtgacagacacacatgaagtctctacccaacaaccgatcatggggtcataccattggga

SEQ ID NO: 6343 - DNA, 120 bp, synthetic construct
  misc_feature 1..120: note = Artificially Synthesized Probe
  source 1..120: mol_type = other DNA
tttgcaccaatttcctgtcatatggggagaattcacctcttgtttccgatgcctggcaacataaattcacatagccaccagttaatagcagctgatgagtttccattctgtgcaaaaaat

SEQ ID NO: 6344 - DNA, 120 bp, synthetic construct
  misc_feature 1..120: note = Artificially Synthesized Probe
  source 1..120: mol_type = other DNA
cccatttatttcgctctaataatggccaagaactgcaaagagcatctatgtcacttaccttttagaaacgacactattgttcacatttcacatgtgagaagagggagactcggagactag

SEQ ID NO: 6345 - DNA, 120 bp, synthetic construct
  misc_feature 1..120: note = Artificially Synthesized Probe
  source 1..120: mol_type = other DNA
gcagttcagaggctgagagcccagagtgtacaaaatgcccattctttgcttccaagacacacttttcctattttcattttctgaaatcagaatgcctcttaggcaatctctgtaaaatct

SEQ ID NO: 6346 - DNA, 120 bp, synthetic construct
  misc_feature 1..120: note = Artificially Synthesized Probe
  source 1..120: mol_type = other DNA
ctgttctgtcgcactttcacaacacggttattaaagcaggagagaagtaattaaaattgtcacttgtgcggctgttcgaattatatttccacttcctctccacagagcattcattatgtg

SEQ ID NO: 6347 - DNA, 120 bp, synthetic construct
  misc_feature 1..120: note = Artificially Synthesized Probe
  source 1..120: mol_type = other DNA
ttggtcttgtatagtgtggccctttatcttctgaaagaatgagactttgtgttccgctttcaacttaaacctgacaaaatctctgtatttctttcacttccacagctggtatggagggaa

SEQ ID NO: 6348 - DNA, 120 bp, synthetic construct
  misc_feature 1..120: note = Artificially Synthesized Probe
  source 1..120: mol_type = other DNA
agattaaagaaatgtggggccaaaaaggttaagtaataagaaaagtctgcttgcaggaaataaaaacaaattgcaccaagagccaccgtggaatagcacagaacgtgtacgtggcttatg

SEQ ID NO: 6349 - DNA, 120 bp, synthetic construct
  misc_feature 1..120: note = Artificially Synthesized Probe
  source 1..120: mol_type = other DNA
catatgaagaaactacagagcagctgattcaagtaacttgcccaagtctactgagctagctagtggtgcagccaacactgaacactcaggtttacttttactttgtgataaagacataga

SEQ ID NO: 6350 - DNA, 120 bp, synthetic construct
  misc_feature 1..120: note = Artificially Synthesized Probe
  source 1..120: mol_type = other DNA
cgttgtctcgggaagctgagcatttattcccatgatgagcatgtgctcggaagtttttagatttcctcttgtaaaactgtttttacgttccagactcatacggaatatacaactttttac

SEQ ID NO: 6351 - DNA, 120 bp, synthetic construct
  misc_feature 1..120: note = Artificially Synthesized Probe
  source 1..120: mol_type = other DNA
ctgagaaccttctcttttcttcttttttttatgattgggaaggtttcccttattcaaaatgcctatcatgagccctgagtgtcactagtaatttctagagcaagaggttccctgtgacta

SEQ ID NO: 6352 - DNA, 120 bp, synthetic construct
  misc_feature 1..120: note = Artificially Synthesized Probe
  source 1..120: mol_type = other DNA
tgtcacatttctccctccagttgagcaggtgaaaactaatgctctaaaatgcctggggctgcaaaccagagacacagaaataaatattttctgttcacaagtctgttgtgtaattcaaag

SEQ ID NO: 6353 - DNA, 120 bp, synthetic construct
  misc_feature 1..120: note = Artificially Synthesized Probe
  source 1..120: mol_type = other DNA
acctaaacataaagataccagagatattggctgggaaaaaaacagaaaagcaatcccgtgttctcagcctcttttctttcttctttcctttccctcagacttagaccagaacctctttgt

SEQ ID NO: 6354 - DNA, 120 bp, synthetic construct
  misc_feature 1..120: note = Artificially Synthesized Probe
  source 1..120: mol_type = other DNA
agggtctgatctcagggcagagactcagttagactgcctgggattaggaatcaacagatacaaaattatacagaggagctgtttttcaacttttgtttagtggcctccttaaatgtaatt

SEQ ID NO: 6355 - DNA, 120 bp, synthetic construct
  misc_feature 1..120: note = Artificially Synthesized Probe
  source 1..120: mol_type = other DNA
tagaaagcacacgggagaaatacctgcagcaacgtggtaagaaacaattagcttctaaataacataaaaaacagcaatgccattaaagtggacgaaggatgagagagggcagtttgtagt

SEQ ID NO: 6356 - DNA, 120 bp, synthetic construct
  misc_feature 1..120: note = Artificially Synthesized Probe
  source 1..120: mol_type = other DNA
ttgaaacagcaactgcagtgctaccaactagcttaacgacagatgcagtcttacccgtgtgcaaagatatatgtaagaggtttttcagcaacactgttttaagatagcagaaaatgaaag

SEQ ID NO: 6357 - DNA, 120 bp, synthetic construct
  misc_feature 1..120: note = Artificially Synthesized Probe
  source 1..120: mol_type = other DNA
caacattaacttcaaaatgatggtcacttctgggacgagagaggactgggattagggaaggaatgcaaatgacatcgtagctatttgttatgtcttgtttttttttgtactcaacactac

SEQ ID NO: 6358 - DNA, 120 bp, synthetic construct
  misc_feature 1..120: note = Artificially Synthesized Probe
  source 1..120: mol_type = other DNA
atatatgatttgccagtattttcaacacaattcatgaaatgtcttttcactctattaattgctttctttgctatgcagaaatttaggatgatgcaatcccgttcacctagctttgctttt

SEQ ID NO: 6359 - DNA, 120 bp, synthetic construct
  misc_feature 1..120: note = Artificially Synthesized Probe
  source 1..120: mol_type = other DNA
tctttatggttctctttacagaagatcatgtcatcagcaaacagaaaaattaacttcttcctttactatttggatgacttttatctcattttcttgcctaattgctcttgctaagactcc

SEQ ID NO: 6360 - DNA, 120 bp, synthetic construct
  misc_feature 1..120: note = Artificially Synthesized Probe
  source 1..120: mol_type = other DNA
ctggctaaatttttgccaatgttgtttagcctttcaaaaaacaaactttagaaaaactaacttaaaatagagcaatacggtgtgtaatgttaagattttgtaaagcttgcagatatacat

SEQ ID NO: 6361 - DNA, 120 bp, synthetic construct
  misc_feature 1..120: note = Artificially Synthesized Probe
  source 1..120: mol_type = other DNA
tagtttgactcaataatttaaactggcatttaaatctcttttggtaagtgctgcctctttgggtataaatatgtggactttcagatcgctgttccctcactgggtagggggtgccatatt

SEQ ID NO: 6362 - DNA, 120 bp, synthetic construct
  misc_feature 1..120: note = Artificially Synthesized Probe
  source 1..120: mol_type = other DNA
tcaatgcagaaaacaacagcagtgaatctgacacattcttgactgtctcggagcttacatcctagtgcagtagatgaggagaaggacagcaagcaagtatgctgatcattacatattata

SEQ ID NO: 6363 - DNA, 120 bp, synthetic construct
  misc_feature 1..120: note = Artificially Synthesized Probe
  source 1..120: mol_type = other DNA
cgtttttgttttcttcctggctattctctacccaacacaggtcctggtgttcctatggtgacggtgcacaacacaacagataagaaaagtaagtgctcttttttttccttaaatcttcct

SEQ ID NO: 6364 - DNA, 120 bp, synthetic construct
  misc_feature 1..120: note = Artificially Synthesized Probe
  source 1..120: mol_type = other DNA
tccatgctgcacaggatatcagagaaaaacttattctgccatttgtaaaatggtagggaaggctttttcaggactgttgtgaaaggggagggagattcaggctcaactttgaatacagca

SEQ ID NO: 6365 - DNA, 120 bp, synthetic construct
  misc_feature 1..120: note = Artificially Synthesized Probe
  source 1..120: mol_type = other DNA
tactccggcatgacagtgaatgtttgaaacacctgtgctagacctctttaggtggaattttccctgaaaaaatgccgatgttgcatagagcctcaactgtgacatcttttttttccttaa

SEQ ID NO: 6366 - DNA, 120 bp, synthetic construct
  misc_feature 1..120: note = Artificially Synthesized Probe
  source 1..120: mol_type = other DNA
ccagcaagtgcaacatgctaatatgctcaaagatccaggaaattttgttaactctgctgggaaacaaaacaaccacttcttttcctctgtaggactggctactacattaaccaatcaatc

SEQ ID NO: 6367 - DNA, 120 bp, synthetic construct
  misc_feature 1..120: note = Artificially Synthesized Probe
  source 1..120: mol_type = other DNA
agtgtgtttaccttttgatatgtctgatgtcctcttgcagcacttcacagcccatctccaacccagctgtgtcttccccaaacaaaatgcactgagttttcattttgtctgtcaaactgg

SEQ ID NO: 6368 - DNA, 120 bp, synthetic construct
  misc_feature 1..120: note = Artificially Synthesized Probe
  source 1..120: mol_type = other DNA
ctttggctagccatccattattctcttttgaatgtaatcgtagcagcagttctgggctctccacacagcaccaggccccttccttgtaccaaccctatgaggttcaacaattcatctgag

SEQ ID NO: 6369 - DNA, 120 bp, synthetic construct
  misc_feature 1..120: note = Artificially Synthesized Probe
  source 1..120: mol_type = other DNA
ccactgaccccaaaaccaccctgggaatatttgacttttttcctctttagaaaatcttatctacaaacagagcctgcggggtgttcacagatgtgactctgaattatttaaaagctgttt

SEQ ID NO: 6370 - DNA, 120 bp, synthetic construct
  misc_feature 1..120: note = Artificially Synthesized Probe
  source 1..120: mol_type = other DNA
ggccgtccagcaaatgcacaaacccatttcagacctggagataaaagccagctctttcctgcagatcatatggggcagaaccaaaaagactaaaaatgtaaaaagatgatgaaggaaagt

SEQ ID NO: 6371 - DNA, 120 bp, synthetic construct
  misc_feature 1..120: note = Artificially Synthesized Probe
  source 1..120: mol_type = other DNA
gttcttcttagctttacatccttccttttcctcctcgagctgatatttacattccatttgtccgcccgtcaccccagaattctgtcctaacgtcatttaatcttggaaatattttaaagg

SEQ ID NO: 6372 - DNA, 120 bp, synthetic construct
  misc_feature 1..120: note = Artificially Synthesized Probe
  source 1..120: mol_type = other DNA
ctgccctcaagttgcttaaaatctggctggaggaaaaaagatatggcaaaaagaataatagttgcccaaactgtgtcagactgactctaacaactcaacattcggagttcagagaaaaga

SEQ ID NO: 6373 - DNA, 120 bp, synthetic construct
  misc_feature 1..120: note = Artificially Synthesized Probe
  source 1..120: mol_type = other DNA
ccctgtctcaaaaaacaaaaatggagctcagagaaaagagatttccagttaaggtgagtaagtttaaacagtagtcatgcgggctctgggcctgaatctggtcttcgaatatgactaatg

SEQ ID NO: 6374 - DNA, 120 bp, synthetic construct
  misc_feature 1..120: note = Artificially Synthesized Probe
  source 1..120: mol_type = other DNA
tcaaaagaaaagtccttcagggaatatgccaatcttttcttatttctctgctgagctcctgccctctttgaatgcaattatgggaacaaataaaatggcttaactcaagtcccctgtggg

SEQ ID NO: 6375 - DNA, 120 bp, synthetic construct
  misc_feature 1..120: note = Artificially Synthesized Probe
  source 1..120: mol_type = other DNA
ttctaaacaccagaaacttttccatcaatttctaaacaccagaaacttttccatcaatttaatgcagtttgctttgggtcctcgggtctgagctgtgtgggaaacactggttgatagtct

SEQ ID NO: 6376 - DNA, 120 bp, synthetic construct
  misc_feature 1..120: note = Artificially Synthesized Probe
  source 1..120: mol_type = other DNA
acgtttctcgcatgctacgtggtgttcggaacctttcccagtggtggtctaacgtcagatttgttaaaactctacctgtttgaaaactagtgtcactatttctccccttattttttatca

SEQ ID NO: 6377 - DNA, 120 bp, synthetic construct
  misc_feature 1..120: note = Artificially Synthesized Probe
  source 1..120: mol_type = other DNA
accgaagttaaggtctctccagagaccagcttatcttctgttttgggagagagatcagaatccattttatttctgggaacatttaataaagatgataccctagtttctacccacctttcc

SEQ ID NO: 6378 - DNA, 120 bp, synthetic construct
  misc_feature 1..120: note = Artificially Synthesized Probe
  source 1..120: mol_type = other DNA
gctccagacttccccacctctatgcatagcagccttttggtggtaagttggtgtcgaataactgagacttcaaaccttgaagctgtctttgagtcattcatgcagacaccacttacccat

SEQ ID NO: 6379 - DNA, 120 bp, synthetic construct
  misc_feature 1..120: note = Artificially Synthesized Probe
  source 1..120: mol_type = other DNA
caacacactcacatgtccaaaggctgtctctcttaaaataccctgaaggtgaccacgccagggaagggggcatgaacgaaatgagtagggaatggtctaggagaaaaagaataattttgt

SEQ ID NO: 6380 - DNA, 120 bp, synthetic construct
  misc_feature 1..120: note = Artificially Synthesized Probe
  source 1..120: mol_type = other DNA
ccaagatcgcaccactgcactccagccttggcaatagagtgagactttgtctcaaaaaacaaaaaacaaacaaacaaacaaaaaatggaggctgtgacaagctgctttggccaagaaatg

SEQ ID NO: 6381 - DNA, 120 bp, synthetic construct
  misc_feature 1..120: note = Artificially Synthesized Probe
  source 1..120: mol_type = other DNA
cccagccagccacccaagcctgcagtgtatctgtgtagtaattgtattgaaaagccgctaattccaatttaattgctgtgcctttggtaatctgggttgtagttaacatcaacaaataaa

SEQ ID NO: 6382 - DNA, 120 bp, synthetic construct
  misc_feature 1..120: note = Artificially Synthesized Probe
  source 1..120: mol_type = other DNA
tgtctttccctggtgctcgttctggggctccgtgacacccatgataaaggaatattgaactcttaagaaaagataagcaggagaaatgacattgttgcaaactgaaaacataacatcgtt

SEQ ID NO: 6383 - DNA, 120 bp, synthetic construct
  misc_feature 1..120: note = Artificially Synthesized Probe
  source 1..120: mol_type = other DNA
cctaaatagcaaaaaggttccattatagaaacgccccagggcacagattccaatagctgattccgttttgcaattaacccactttccttaatatctggactgctttcacactttcccagc

SEQ ID NO: 6384 - DNA, 120 bp, synthetic construct
  misc_feature 1..120: note = Artificially Synthesized Probe
  source 1..120: mol_type = other DNA
ctttttgtttgtttctcactgtgacatcaaatgtgatagcaaggagatctggagtccctgagcccctgcttcagattaaaaaaatccaaaagaaaacaaaggcacactcgacatagagca

SEQ ID NO: 6385 - DNA, 120 bp, synthetic construct
  misc_feature 1..120: note = Artificially Synthesized Probe
  source 1..120: mol_type = other DNA
ggtacagcctgggacatctagaacccaggaaagagaaaccttcttgccgtgtagggaaggtccccgcagggagaaggtgggaggatttgtattgtttccctcaccaaatagatgcttttt

SEQ ID NO: 6386 - DNA, 120 bp, synthetic construct
  misc_feature 1..120: note = Artificially Synthesized Probe
  source 1..120: mol_type = other DNA
ctatcactgactcagcaagagcaaccgacatcacagaaacaaaaggaggcttagcaccaaggggcagatgctccaaatgacttattgaatcttattgttgcactggaaataaaaagacat

SEQ ID NO: 6387 - DNA, 120 bp, synthetic construct
  misc_feature 1..120: note = Artificially Synthesized Probe
  source 1..120: mol_type = other DNA
cacacacacacacacacctctcaaataaggaactatattggctacaaaagacacagggatgtcaggtctcaaggttgatgaatccagacaccaacaatgtcaccaacgacccaggctctc

SEQ ID NO: 6388 - DNA, 120 bp, synthetic construct
  misc_feature 1..120: note = Artificially Synthesized Probe
  source 1..120: mol_type = other DNA
gtcatgtgctaaggagcagcagaaatgcctcatttttatttactcatttgttcacgtagctagtggaggaagccaaaatagttatccccaaaatattgagacctgctaagtgaaagatac

SEQ ID NO: 6389 - DNA, 120 bp, synthetic construct
  misc_feature 1..120: note = Artificially Synthesized Probe
  source 1..120: mol_type = other DNA
ccatctcaaaaagaaaaccgtaaataaataaaagactggagctgctctctcctttgcctggtcactatgctgagagttatggctctttgttaaaatactgtgtaaacagggcccctacac

SEQ ID NO: 6390 - DNA, 120 bp, synthetic construct
  misc_feature 1..120: note = Artificially Synthesized Probe
  source 1..120: mol_type = other DNA
taatggctcgcagtcgagaagcttctatacctggaagtgctacagagttattgcaagggtgctttgaggttttaacgtgaacatgctgacttggcactaaataaataaaagcaataaata

SEQ ID NO: 6391 - DNA, 120 bp, synthetic construct
  misc_feature 1..120: note = Artificially Synthesized Probe
  source 1..120: mol_type = other DNA
cttttctcccatccatctgctgtagctcttggcatggtagccaggaaagaagcaaagcaggaatctatttctggataactcgatgtggagtaacaacgttaattaccatgtctacttaga

SEQ ID NO: 6392 - DNA, 120 bp, synthetic construct
  misc_feature 1..120: note = Artificially Synthesized Probe
  source 1..120: mol_type = other DNA
tgtctctcatttaaaccagagcaggccgcgtggccctgcaggaaaatgagatttaaagaaaacgaagaatgacaagtaaggacgtgtggagttcactgacaataaatattatttgtcaga

SEQ ID NO: 6393 - DNA, 120 bp, synthetic construct
  misc_feature 1..120: note = Artificially Synthesized Probe
  source 1..120: mol_type = other DNA
cacaattacatacaccgactcacgcacacatgctcacacaattacatacacctgctcacccatacacacatgctcacatgattacacatgctcccacatacatacatgctcacacacatt

SEQ ID NO: 6394 - DNA, 120 bp, synthetic construct
  misc_feature 1..120: note = Artificially Synthesized Probe
  source 1..120: mol_type = other DNA
atgctcacatatgcacacactctcacatgtataggcacacacaggattacacatgctcacacatgtgcttatacacatacacccatgcacatgttcacacgtttatacacacatatcaca

SEQ ID NO: 6395 - DNA, 120 bp, synthetic construct
  misc_feature 1..120: note = Artificially Synthesized Probe
  source 1..120: mol_type = other DNA
taatgctgagttggaagggagtttgcttttcatctcttgttactgccccgtgaacaactttccaagtgacacattttgtaaaaggagagaacctgcatggaactggctgctctggggctg

SEQ ID NO: 6396 - DNA, 120 bp, synthetic construct
  misc_feature 1..120: note = Artificially Synthesized Probe
  source 1..120: mol_type = other DNA
tcctgcattctcctccttatggtcacccaaccctttttctctgaacctgagctctgtgacctgaacccatttcttagaatatacagagaggtcttttctgtggctccgagaacttgaatt

SEQ ID NO: 6397 - DNA, 120 bp, synthetic construct
  misc_feature 1..120: note = Artificially Synthesized Probe
  source 1..120: mol_type = other DNA
ctaagtgttgaaggaggaggttatcctacttatttaggaatcagattaactgggttttgcttaattaaggttctgcgatgctgatgaaaattgcaacaccggcactcacacacattaagg

SEQ ID NO: 6398 - DNA, 120 bp, synthetic construct
  misc_feature 1..120: note = Artificially Synthesized Probe
  source 1..120: mol_type = other DNA
aggctacctggagttggaggaaactcttcctttttcccttcttctcttccaccccctcctcttccaaaaagggagttaatgtgggggaaagctgggtgtggtatattagtccgttttcat

SEQ ID NO: 6399 - DNA, 120 bp, synthetic construct
  misc_feature 1..120: note = Artificially Synthesized Probe
  source 1..120: mol_type = other DNA
cagaaaaaattcatttccagcacacagcagaactcattacacaactaattaggggaaaggctaattacagcttacaggtacagtacgcatgttactctgttttgaacctggagcaagaca

SEQ ID NO: 6400 - DNA, 120 bp, synthetic construct
  misc_feature 1..120: note = Artificially Synthesized Probe
  source 1..120: mol_type = other DNA
agacgggggcctgaggcaggaggagaaagcttcctgcccatatcctcttgtactacttgatgttttaatgacatatcatagcctaatgacagcattaataaatacttcaaaataaagatg

SEQ ID NO: 6401 - DNA, 120 bp, synthetic construct
  misc_feature 1..120: note = Artificially Synthesized Probe
  source 1..120: mol_type = other DNA
agaataattagccatcatcctattggcatctgggaccgaatgagcccacattccaggcctcattctaagcacggcacggctataagattgtttaattctcacaaagtgtcatgagctgga

SEQ ID NO: 6402 - DNA, 120 bp, synthetic construct
  misc_feature 1..120: note = Artificially Synthesized Probe
  source 1..120: mol_type = other DNA
agcgtatacctgggagagtaatttctccgtgccttccttgcagatttacccggacgaaagccattactttaccagctccagcctcaaacagcatctgtaccggtccatcatcaacttctt

SEQ ID NO: 6403 - DNA, 120 bp, synthetic construct
  misc_feature 1..120: note = Artificially Synthesized Probe
  source 1..120: mol_type = other DNA
tagggcttggctgtaggtgtgcactgtctatttacatccgtccttacaaccatccttgtcctccttggtaccgtatcaagctctttcccatgacatttggtttaaaaaaaaaaaaaaaaa

SEQ ID NO: 6404 - DNA, 120 bp, synthetic construct
  misc_feature 1..120: note = Artificially Synthesized Probe
  source 1..120: mol_type = other DNA
atgagggcttaaaaatatattatttaagaagatagtggccagaaataaagaccatgaccaacaagctttggggccatcaagatgaaaagacctttcctttattcaagatctaggatctga

SEQ ID NO: 6405 - DNA, 120 bp, synthetic construct
  misc_feature 1..120: note = Artificially Synthesized Probe
  source 1..120: mol_type = other DNA
gcattttaaggatgtcatttcagagcttgcattcttctgccttaagtggttcaaagagtttgaggaggtaccctctggtactagagaaaatctgaagcaattcacctagttggatgaaaa

SEQ ID NO: 6406 - DNA, 120 bp, synthetic construct
  misc_feature 1..120: note = Artificially Synthesized Probe
  source 1..120: mol_type = other DNA
cctattttatgtgtaaagtttgccaggtatgggcaaatgtgtatagatgtgtaagaactaccacaatcgtaatacagaaaatttccatcacccccacaagttccctgtgcccttttgcaa

SEQ ID NO: 6407 - DNA, 120 bp, synthetic construct
  misc_feature 1..120: note = Artificially Synthesized Probe
  source 1..120: mol_type = other DNA
taccatattacttctgcaccactggtgtatgagagttctaaatcctccatagtgtcagcaacacttggcagtttttttttcaattatagctattttattaagtatttagttacgtctcac

SEQ ID NO: 6408 - DNA, 120 bp, synthetic construct
  misc_feature 1..120: note = Artificially Synthesized Probe
  source 1..120: mol_type = other DNA
caaatactttttcctgaatgtacgagactatgatgcgcgatgatgcggtctttctttttcagtttgttactatggtgacttcacttgattggttttcaaatagtgagacaactttgcatt

SEQ ID NO: 6409 - DNA, 120 bp, synthetic construct
  misc_feature 1..120: note = Artificially Synthesized Probe
  source 1..120: mol_type = other DNA
cctttcttctttttctattatgggcattcaacataaaaacaaatctccctactgctgtatctgcatcccacaaatagcgggatggtgttctcatcttcccttaggtcaacatacgttgaa

SEQ ID NO: 6410 - DNA, 120 bp, synthetic construct
  misc_feature 1..120: note = Artificially Synthesized Probe
  source 1..120: mol_type = other DNA
gcaacatatatttattctctttcaaagtttggagctcgtaagtctaaaatcacagtattggcaggactccaatccttcaggaggctctagaagaaaatccacttccttgctttttccagc

SEQ ID NO: 6411 - DNA, 120 bp, synthetic construct
  misc_feature 1..120: note = Artificially Synthesized Probe
  source 1..120: mol_type = other DNA
agacagtgtcctccaccatggtaacattttgaacatttgtataatatcacagccagataattcacattgacagaatggtgaaagagagcatttccatcaccacagagatcccttgtatag

SEQ ID NO: 6412 - DNA, 120 bp, synthetic construct
  misc_feature 1..120: note = Artificially Synthesized Probe
  source 1..120: mol_type = other DNA
agaagaaaaacgtatagtgattaatatctgcatatttaccatttccagcacatttgagtatttcttgtatatctgagttaccatctggcatcatttctcagcagctgatagaacttcttg

SEQ ID NO: 6413 - DNA, 120 bp, synthetic construct
  misc_feature 1..120: note = Artificially Synthesized Probe
  source 1..120: mol_type = other DNA
gttttctttgggcttcactcagttggatttgttgagcttagcggatctctaagttagtagcttttatcaaacttgagaaatttttggccaacatttcttcaatattttttcggtaatgtt

SEQ ID NO: 6414 - DNA, 120 bp, synthetic construct
  misc_feature 1..120: note = Artificially Synthesized Probe
  source 1..120: mol_type = other DNA
tatactgctcattactgtataagatagtctaaagttgtactgggtagcagagagcagcttaggatatacaattttcttctcataattcacagttttcagagaatatattctgacagagac

SEQ ID NO: 6415 - DNA, 120 bp, synthetic construct
  misc_feature 1..120: note = Artificially Synthesized Probe
  source 1..120: mol_type = other DNA
tttactggaatacatacacacatcataaatatgtgacacagttgtcactttgggaaaaactggcttttgcatttttcagtttttcagaggtctgcttgctccagaggcaacaggtacgta

SEQ ID NO: 6416 - DNA, 120 bp, synthetic construct
  misc_feature 1..120: note = Artificially Synthesized Probe
  source 1..120: mol_type = other DNA
gacttttgtggctggtgaactgtggtcctgcggatgtgccataaaaaaggaaagcattgttttcttcccgcagatcatctttaagttctcagagttaccatttgacttgacaccatttat

SEQ ID NO: 6417 - DNA, 120 bp, synthetic construct
  misc_feature 1..120: note = Artificially Synthesized Probe
  source 1..120: mol_type = other DNA
ataaaatcagtaacaaagataagacattattcagatctactataaaaaactacattggagaggaggtggagcatgatgaccaagtagaagcctccactgttcatcctcccctcaggaaca

SEQ ID NO: 6418 - DNA, 120 bp, synthetic construct
  misc_feature 1..120: note = Artificially Synthesized Probe
  source 1..120: mol_type = other DNA
cttatcagataaagttaacaaataaattgaaataattaaaaagaagcagaaattctggagctgaaaaatgcaactgacatactgaagaatgtatcagtcttttaatagcagaattgatca

SEQ ID NO: 6419 - DNA, 120 bp, synthetic construct
  misc_feature 1..120: note = Artificially Synthesized Probe
  source 1..120: mol_type = other DNA
ttcttttggcttatttgtttatgcaatcagtgttgtcatcagtttaaaatattgcaaataataagatattatttgcaagcctcatggtaacctcaagtttaaaaacataaaatggatgta

SEQ ID NO: 6420 - DNA, 120 bp, synthetic construct
  misc_feature 1..120: note = Artificially Synthesized Probe
  source 1..120: mol_type = other DNA
gaatatgctcctgaatgactggtaggttaataaagaaatcaagaaggaaattgaaaatgttcttgaaacaaacgataatgaaaacacaacacatcaaaacctatgggatacagcaaaagc

SEQ ID NO: 6421 - DNA, 120 bp, synthetic construct
  misc_feature 1..120: note = Artificially Synthesized Probe
  source 1..120: mol_type = other DNA
tcatctccatagatgcgggaaaatcatttggtaaaattcaacataccttcatgataaaaaccttcaaataaactgggtatagaaggaacattaatcaacataaagaagctatatacagca

SEQ ID NO: 6422 - DNA, 120 bp, synthetic construct
  misc_feature 1..120: note = Artificially Synthesized Probe
  source 1..120: mol_type = other DNA
gggaaagggcaatctcttcaataaatggtgttgggaaaactgaatatccatatgcagaagaatgaatctacacccctatctcttgccatatacaaaactcaaatccaaatggattaaagc

SEQ ID NO: 6423 - DNA, 120 bp, synthetic construct
  misc_feature 1..120: note = Artificially Synthesized Probe
  source 1..120: mol_type = other DNA
gaactggaggtcattacattaattgaaataagccaggtacagaaagacaaactttgcaggttcttacttgtgggagctaaaaattaaaagagttgaactcatggagatcaagaatagaat

SEQ ID NO: 6424 - DNA, 120 bp, synthetic construct
  misc_feature 1..120: note = Artificially Synthesized Probe
  source 1..120: mol_type = other DNA
ttgtcatctatggcagacggagaggaagaaataccctcccactccactttctgtctctttggctgtgaagtaaatgagcattaacaaggaaaaatcagatattttcctatcactgtatgg

SEQ ID NO: 6425 - DNA, 120 bp, synthetic construct
  misc_feature 1..120: note = Artificially Synthesized Probe
  source 1..120: mol_type = other DNA
aaaatagaatatccaagattttctcttctgccaatgacctgttttacagaattagaggagacagcactgattgcagtgacagaagcggtgctggttaactccccaccatcaaaagtatct

SEQ ID NO: 6426 - DNA, 120 bp, synthetic construct
  misc_feature 1..120: note = Artificially Synthesized Probe
  source 1..120: mol_type = other DNA
ttatagattcttcgagccaaacaggatcatattagagcaatttctctgcatctactctggtattggatgagtatttcagggtacttttggtgaaccaggaaactcttttttttttttttt

SEQ ID NO: 6427 - DNA, 120 bp, synthetic construct
  misc_feature 1..120: note = Artificially Synthesized Probe
  source 1..120: mol_type = other DNA
tacaagaatgaatcccttacctgtcgagagcatatcaaggaagccataacacacatgtgcggtgtcaaaaacatctttagcctcataattaaaatggcaagggcagtaaacactaacaac

SEQ ID NO: 6428 - DNA, 120 bp, synthetic construct
  misc_feature 1..120: note = Artificially Synthesized Probe
  source 1..120: mol_type = other DNA
cacactgatcttttcctttttatgccacaaaataattttacaccatataaaatgttgtcttatttgtctcctttgtaaaattaccatactgaagggcaggaacatgactttagtatcttg

SEQ ID NO: 6429 - DNA, 120 bp, synthetic construct
  misc_feature 1..120: note = Artificially Synthesized Probe
  source 1..120: mol_type = other DNA
gttgtccctttacaaaatatttatagtacacctactgtattctaggcactgtgcaatgaaatgaataccacagtctctgcttatcctccaatcctcactttccacagtttcagttacctg

SEQ ID NO: 6430 - DNA, 120 bp, synthetic construct
  misc_feature 1..120: note = Artificially Synthesized Probe
  source 1..120: mol_type = other DNA
gggcaactgctgtgcagcatgaacagtatggatacaatacttatcttcatggagtttatattagagtaagacaagaggtaggagactgcctattttattgttctcttgaaaagactgggt

SEQ ID NO: 6431 - DNA, 120 bp, synthetic construct
  misc_feature 1..120: note = Artificially Synthesized Probe
  source 1..120: mol_type = other DNA
tcacccctccaaaccttatgaatttccagagagaaaaactgtataggaattttcatctgtaatgctcaatgctagaacacaaagaagcaatgtcaacaaaatgttgaatgaaacccataa

SEQ ID NO: 6432 - DNA, 120 bp, synthetic construct
  misc_feature 1..120: note = Artificially Synthesized Probe
  source 1..120: mol_type = other DNA
aaagcacgatgaatagaaaacataaaatcagatggcagagagaagtacaaacacagcagttatcacagttaatatgaaaatgggttaaattcaccaattagaaaacgggtattagaggaa

SEQ ID NO: 6433 - DNA, 120 bp, synthetic construct
  misc_feature 1..120: note = Artificially Synthesized Probe
  source 1..120: mol_type = other DNA
tgagccaccgaacccggcctaaaactagttagacattttaagacattcttctaagtgattttggattaaatgatcaaaactcaaatcacagactacacagaaatcaacattaatggtaat

SEQ ID NO: 6434 - DNA, 120 bp, synthetic construct
  misc_feature 1..120: note = Artificially Synthesized Probe
  source 1..120: mol_type = other DNA
actaacagtaaatgaaacagtgagacactaaaggcattcttcactttagagtcagaaacaaaataagggcaagcccatcatcactgcaattcaaaattgttctggaagttctagcacgac

SEQ ID NO: 6435 - DNA, 120 bp, synthetic construct
  misc_feature 1..120: note = Artificially Synthesized Probe
  source 1..120: mol_type = other DNA
agagaccataaatgaactataagttgacatcttggaagaaactatgtaatgcacataagagacaaaatgttacgtctatggaaaaagcaaaaacataacacatagccgggcacagtggct

SEQ ID NO: 6436 - DNA, 120 bp, synthetic construct
  misc_feature 1..120: note = Artificially Synthesized Probe
  source 1..120: mol_type = other DNA
atgccaagacacatttccctgtgctccatctgtctggaacaatatagaatggttctattatcccctttattttggaaacaatttcaacagatgcacctaagagcttaattagctcttctg

SEQ ID NO: 6437 - DNA, 120 bp, synthetic construct
  misc_feature 1..120: note = Artificially Synthesized Probe
  source 1..120: mol_type = other DNA
aagggaaggcaagagaagacaagagaagacaagagaaaagagaaaagaaaagagaagagaagaggaaagacaagacaagacagagagagagagagaaggaaggaaggcaggaaagaagga

SEQ ID NO: 6438 - DNA, 120 bp, synthetic construct
  misc_feature 1..120: note = Artificially Synthesized Probe
  source 1..120: mol_type = other DNA
aaatgctcatcatcactggccatcagagaaatgcaaatcaaaaccacaatgagataccatctcacaccagttagaatggcgatcattaaaaagtcaggaaacaacaggtgccggagagga

SEQ ID NO: 6439 - DNA, 120 bp, synthetic construct
  misc_feature 1..120: note = Artificially Synthesized Probe
  source 1..120: mol_type = other DNA
aatgctctgattcattaatataaacactctgccaaggaaagaagtattttttaatgtttaagggagtcctcaggaacaggacggtcatactatagatgccttccttttctccttccgaga

SEQ ID NO: 6440 - DNA, 120 bp, synthetic construct
  misc_feature 1..120: note = Artificially Synthesized Probe
  source 1..120: mol_type = other DNA
cctttatcctgactcttcccacgtggtctgcagggaactggatcaagggtgaaacaacagagatgtcgagggagatacctttctcactcttaaattactcacatctctgtgtaaacaaag

SEQ ID NO: 6441 - DNA, 120 bp, synthetic construct
  misc_feature 1..120: note = Artificially Synthesized Probe
  source 1..120: mol_type = other DNA
gtgtgtctaccgatccctgggtcctacgttgtaactttctgtactacacagctccattattttcattagtgaaactagagctaacaagaaagaacgctaaccaaagttaatgactaaaac

SEQ ID NO: 6442 - DNA, 120 bp, synthetic construct
  misc_feature 1..120: note = Artificially Synthesized Probe
  source 1..120: mol_type = other DNA
gattacacaaggaataatcaatccagtagcaactttgttatgtcctatgaagaaaattgagctacaaatagaggaaagagccctggattgagagttctagaatccattagaatccacgtc

SEQ ID NO: 6443 - DNA, 120 bp, synthetic construct
  misc_feature 1..120: note = Artificially Synthesized Probe
  source 1..120: mol_type = other DNA
gtcataagctttctgtgcactgtcattttcacaaagcctcgcagactgattacaatatttggtacttcttgatattttatagacatatattcaaaccattgaatatgagacctgatcctc

SEQ ID NO: 6444 - DNA, 120 bp, synthetic construct
  misc_feature 1..120: note = Artificially Synthesized Probe
  source 1..120: mol_type = other DNA
cactataatttcaggtattcctcgtaactgtcacataaaggaagtcactcaggactaccaaggaagtgtgtttgcatttttttttttttaatttgtagggcaggcatggtggttcacacc

SEQ ID NO: 6445 - DNA, 120 bp, synthetic construct
  misc_feature 1..120: note = Artificially Synthesized Probe
  source 1..120: mol_type = other DNA
accagttagttaagcagggacttaggccttgaaaagggctactctttaaaacattaacaaacagaaatactacatgagagataaatgctctgcatgtatgtcctagaaaatgaaaagatc

SEQ ID NO: 6446 - DNA, 120 bp, synthetic construct
  misc_feature 1..120: note = Artificially Synthesized Probe
  source 1..120: mol_type = other DNA
agctccccgtacagagacagaggaaggggggatttgaacaaagaaaaaaacccgtgtgcatcggaaaagtggctgcttatacatatcctaaatctaaaggaagttttttttttttttttg

SEQ ID NO: 6447 - DNA, 120 bp, synthetic construct
  misc_feature 1..120: note = Artificially Synthesized Probe
  source 1..120: mol_type = other DNA
aaaagagctctgggagattggtaaatgggagtacagagcagggcctaagagtgagtaggaacaaaagcactgatgttagaaaggcattatttctggaaaggaaggaggataaaaagggga

SEQ ID NO: 6448 - DNA, 120 bp, synthetic construct
  misc_feature 1..120: note = Artificially Synthesized Probe
  source 1..120: mol_type = other DNA
aagcaaaaaaagtacacgaaaggaaatacacatgggaagaatagtctattatatctacccctctgtgtatctattttgctgttttatatttcttccctacattctaggattccttcttgc

SEQ ID NO: 6449 - DNA, 120 bp, synthetic construct
  misc_feature 1..120: note = Artificially Synthesized Probe
  source 1..120: mol_type = other DNA
ttcctaaaggaaacatccactggatatgtaattcatcttgacaaatgttctgccccaaccttctggcttccttactttcacatgacaagtctgctacaattcaactcaattttgccctgt

SEQ ID NO: 6450 - DNA, 120 bp, synthetic construct
  misc_feature 1..120: note = Artificially Synthesized Probe
  source 1..120: mol_type = other DNA
ctatttcagcagacagtcactttgtttttaggtttatcacgcaagtcctggcctacttctgtttgctatagttacaatgacagtttagttttcagagcctttgcagtgctagtgctattc

SEQ ID NO: 6451 - DNA, 120 bp, synthetic construct
  misc_feature 1..120: note = Artificially Synthesized Probe
  source 1..120: mol_type = other DNA
actgatatttgtgtataacatctggtttttctcatatagatagactatcccagcatcatttagtgacatgtgacctttaagacaatcttgctgaaattgctttgaatctgaacatcaact

SEQ ID NO: 6452 - DNA, 120 bp, synthetic construct
  misc_feature 1..120: note = Artificially Synthesized Probe
  source 1..120: mol_type = other DNA
gctcaattcaacaattacttcatcaccaaaaactggagtctcccattaaacagtgaacttgcttctattgacattaaactctaaagtgaatcacttatatctaaaaataccttgttcagg

SEQ ID NO: 6453 - DNA, 120 bp, synthetic construct
  misc_feature 1..120: note = Artificially Synthesized Probe
  source 1..120: mol_type = other DNA
cgtgagccagtgtgtgtggcccaaggtttattttttaatagaagaacatcacagaccagagaaaaagaatattgtctgtctcctgtaagagaatttaggagttgcactacctgcctaata

SEQ ID NO: 6454 - DNA, 120 bp, synthetic construct
  misc_feature 1..120: note = Artificially Synthesized Probe
  source 1..120: mol_type = other DNA
attatttcctcacttaaataccctgaccattttctgcaggctaattcctctacaaagataaatggtatgtgagcagatgagagcaaccatgcaagtctgtatgtcagttatccagcaacg

SEQ ID NO: 6455 - DNA, 120 bp, synthetic construct
  misc_feature 1..120: note = Artificially Synthesized Probe
  source 1..120: mol_type = other DNA
ggtcaaccagaaaactaatgagatttcttacctacagcgaataggcagtaacagggtgaaaagaaaggtagagtgaatgtgctggaaggaatagtgggaagtattttctgagtataatta

SEQ ID NO: 6456 - DNA, 120 bp, synthetic construct
  misc_feature 1..120: note = Artificially Synthesized Probe
  source 1..120: mol_type = other DNA
agtgcagccaaagggcacatcaggtagtctacacagaagagtttgcttcagagagcagcaatattagccataaactaaccagtactttcattccagctaacaaatcttaaaagcaagacc

SEQ ID NO: 6457 - DNA, 120 bp, synthetic construct
  misc_feature 1..120: note = Artificially Synthesized Probe
  source 1..120: mol_type = other DNA
atctctagctaggaatagctagagaagtaacatattatttacagacgaaagcgtagggatgtcaacagatttcataagaaaaaaatgcaaacaacaagacaagtcaagcagcatctttta

SEQ ID NO: 6458 - DNA, 120 bp, synthetic construct
  misc_feature 1..120: note = Artificially Synthesized Probe
  source 1..120: mol_type = other DNA
gaaaggtctcaagtcaatgaccttgctttatacctttaaaaaaaaaaaaaaggactaggaaaaaaggagagcaaaacccaaagtaagcaaaagaaatgaggtaataaagaatgagtagaa

SEQ ID NO: 6459 - DNA, 120 bp, synthetic construct
  misc_feature 1..120: note = Artificially Synthesized Probe
  source 1..120: mol_type = other DNA
aaagtgatacgtttataacgtatcaaaacttgtataacttttaatagcaacccttttggacagaagtaaaacaagttctcaaagcaaaaaataaaagagacagctgggcgtggtggctga

SEQ ID NO: 6460 - DNA, 120 bp, synthetic construct
  misc_feature 1..120: note = Artificially Synthesized Probe
  source 1..120: mol_type = other DNA
cccactaataaggcctagaaacaatgacctactcagtatcaatgagcatccttgggtcccagactgcggtcttaaaacaccatttccccagtaaaggcaacgagggtgccttgcaggaat

SEQ ID NO: 6461 - DNA, 120 bp, synthetic construct
  misc_feature 1..120: note = Artificially Synthesized Probe
  source 1..120: mol_type = other DNA
ggagtgctttgggacaggtcacatggaggcttctacactcatttagagagttataattttgatataatggtagtttaagaatgtttgccacataatacataacacagtcagccctccaca

SEQ ID NO: 6462 - DNA, 120 bp, synthetic construct
  misc_feature 1..120: note = Artificially Synthesized Probe
  source 1..120: mol_type = other DNA
atttccaaaaatcaaatccactcttgaaaggcaagacatactaaagaatgtgccatagtctgtgaaggaaactcagaggagttccaaaaatgttctgggcaatggcagtgtcactgcaat

SEQ ID NO: 6463 - DNA, 120 bp, synthetic construct
  misc_feature 1..120: note = Artificially Synthesized Probe
  source 1..120: mol_type = other DNA
gactcttggccaaatgataacagaatttcaagtcactgctagattctaagtattaaaattcaagaccataaactctatctggcagaatttaactttttctccatctgctacttggaacaa

SEQ ID NO: 6464 - DNA, 120 bp, synthetic construct
  misc_feature 1..120: note = Artificially Synthesized Probe
  source 1..120: mol_type = other DNA
tagtgaaccagaaatcaagcagccctcagaaagactgaaacccatctacggatcatctcaatctgattgcataaaggtggttcaagatttatcagtgctttttactcgcctctccaattt

SEQ ID NO: 6465 - DNA, 120 bp, synthetic construct
  misc_feature 1..120: note = Artificially Synthesized Probe
  source 1..120: mol_type = other DNA
cgtgagccatcacacccggccccaaagagcttcttagtttcatcagtatcactggattaataaatttgcttgcaatgaaatgatgctcattaaaaatctattctactctgttggcatgtg

SEQ ID NO: 6466 - DNA, 120 bp, synthetic construct
  misc_feature 1..120: note = Artificially Synthesized Probe
  source 1..120: mol_type = other DNA
tatctcaaacaccaaaaataacatttgtgaataaaaataatacaaaaagtctttcacatgccgagccttaaaatctgtcaaactaaccaatacagtaaaagaatgtggaattatattatt

SEQ ID NO: 6467 - DNA, 120 bp, synthetic construct
  misc_feature 1..120: note = Artificially Synthesized Probe
  source 1..120: mol_type = other DNA
ctcaacatgcttctcctgtatgtgtagcaacaacttttatatgccacaacttttgtgcttcaaaaaactttgaagagaaatataagtgctgacaaagtaataagttaaaaactatgggaa

SEQ ID NO: 6468 - DNA, 120 bp, synthetic construct
  misc_feature 1..120: note = Artificially Synthesized Probe
  source 1..120: mol_type = other DNA
aacaaatgacttttatataaggcagaatctcccagggactagtaggtgaagaatggggtcctctgggagtttggaggagatagtgatcattatttcattcagtgagagttctcattagta

SEQ ID NO: 6469 - DNA, 120 bp, synthetic construct
  misc_feature 1..120: note = Artificially Synthesized Probe
  source 1..120: mol_type = other DNA
acctgagaatcaaagttaaaatacacatctgaagtacaaggaaaggataggaaaaactttcacggagaggtggtgtccacatcacacgggtggcctgaaatcaacaaaatgcccacttta

SEQ ID NO: 6470 - DNA, 120 bp, synthetic construct
  misc_feature 1..120: note = Artificially Synthesized Probe
  source 1..120: mol_type = other DNA
gatcctggcatcccaggctttgggatatatgcatgccaagacaaatagctaaacaaatgtcacctaggtcatttgcaagcaccaagagagtttctacataacaagtaggaatgaatataa

SEQ ID NO: 6471 - DNA, 120 bp, synthetic construct
  misc_feature 1..120: note = Artificially Synthesized Probe
  source 1..120: mol_type = other DNA
accctatgtaacctgtgacataacatattaaatgtattgctcccaagagctagtagtcagaatctctctctttttcaatgccatatcctcagcatctagcagagcatggacatggtatgt

SEQ ID NO: 6472 - DNA, 120 bp, synthetic construct
  misc_feature 1..120: note = Artificially Synthesized Probe
  source 1..120: mol_type = other DNA
tcttctatttcttaaaaattgctttctagaaaacaaacctctccatggttgaaaaagaagcacagtactgtaataagacctcccagttgagtcccactgtaaaaaaaaaacaaaaaaaac

SEQ ID NO: 6473 - DNA, 120 bp, synthetic construct
  misc_feature 1..120: note = Artificially Synthesized Probe
  source 1..120: mol_type = other DNA
gaacttcaaagaggaagaaattgaaagaaagaatgtgtgagtagcaaggaccaattgtcaatggaggaactggggaaatgtggataaatcaaagtaagatgagttggtgaggggtggagc

SEQ ID NO: 6474 - DNA, 120 bp, synthetic construct
  misc_feature 1..120: note = Artificially Synthesized Probe
  source 1..120: mol_type = other DNA
gactagtggttctcccagcacgcagctggagatctaacaacagacaggctgcctgctcaagtgggtccctgacctccgagtagcataactgggaggcaccccccagtaggggcagactga

SEQ ID NO: 6475 - DNA, 120 bp, synthetic construct
  misc_feature 1..120: note = Artificially Synthesized Probe
  source 1..120: mol_type = other DNA
aaatacagagaacgccacaaagatactcctcgagaagagcaactccaagacacataattgtcaggttcaccaaaatggaaatgcaggaaaaactgttaagggcagccagagagaaaggtc

SEQ ID NO: 6476 - DNA, 120 bp, synthetic construct
  misc_feature 1..120: note = Artificially Synthesized Probe
  source 1..120: mol_type = other DNA
caccaggcgcacctaatagacatctacagaactctccatcccaaatcaacagaatatacattcttctcagcaccacaccgcacttattccaaaattaaccacatagttggaagtaaagca

SEQ ID NO: 6477 - DNA, 120 bp, synthetic construct
  misc_feature 1..120: note = Artificially Synthesized Probe
  source 1..120: mol_type = other DNA
aagagggaatcctccctaactcattttaggaggccagcatcatcctgataccaaagtctggcagagacacaacaaaaaaagagaattttagaccaatatccctgaagaacattaatgcaa

SEQ ID NO: 6478 - DNA, 120 bp, synthetic construct
  misc_feature 1..120: note = Artificially Synthesized Probe
  source 1..120: mol_type = other DNA
ctttcttcacagaattggaaaaaactacttaaaagttcatatggaaccaaaaaagagcccgcatcgccaagacaatcctaagcaaaaagaacaaagctggagacatcacactacctgact

SEQ ID NO: 6479 - DNA, 120 bp, synthetic construct
  misc_feature 1..120: note = Artificially Synthesized Probe
  source 1..120: mol_type = other DNA
gatctagaagtagaaataccgtttgacccagccatcccattactgggtatatacccaaaggattataaatcatgctgctgtaaagacacatgcacacgtatgtttattgtggcactattc

SEQ ID NO: 6480 - DNA, 120 bp, synthetic construct
  misc_feature 1..120: note = Artificially Synthesized Probe
  source 1..120: mol_type = other DNA
gagcctcactcactgctagcacagcagtctgagatccaactgcaaggcggcagtgaggctggtggaggggcgtccaccattactgaggcttgagtaggtaaacaaagcagccaggaagct

SEQ ID NO: 6481 - DNA, 120 bp, synthetic construct
  misc_feature 1..120: note = Artificially Synthesized Probe
  source 1..120: mol_type = other DNA
cagtagccgatttgatcaagtggaagaaagggtatcagtgatggacgatcaaatgaatgaaatgaagcgagaggagaagtttagagtaaaaagaaataaacaaagcctccaagaaatatg

SEQ ID NO: 6482 - DNA, 120 bp, synthetic construct
  misc_feature 1..120: note = Artificially Synthesized Probe
  source 1..120: mol_type = other DNA
cagactttaaaccaacaaagataaaaagagacaaagaaggccattacataatggtaaagggatcaattcaacaagaagagctaactatcctaaatatatatgcacccaatacaggagcag

SEQ ID NO: 6483 - DNA, 120 bp, synthetic construct
  misc_feature 1..120: note = Artificially Synthesized Probe
  source 1..120: mol_type = other DNA
atatacaccctccaagactaaaccaggaagaagttgaatccctgaatagaccaataacaggctctgaaattgaggcaataactaatagcctaccaaccaaaaaaagtccaggaccagaca

SEQ ID NO: 6484 - DNA, 120 bp, synthetic construct
  misc_feature 1..120: note = Artificially Synthesized Probe
  source 1..120: mol_type = other DNA
atacctaggaatccaactcacaagggatgcgaaggacctcttcaaggagaaccacaaaccactgctcaacgaaatcaaagaggacacaaacaaatggaaaagcataccatgctcctggat

SEQ ID NO: 6485 - DNA, 120 bp, synthetic construct
  misc_feature 1..120: note = Artificially Synthesized Probe
  source 1..120: mol_type = other DNA
agaactgcaaatcaaaaccacaatgagataccatctcacaccagttagaatggcaatcattaaaaagtcaggaaacaacaggtgccggagaggatgtggagaaataggaacacttttaca

SEQ ID NO: 6486 - DNA, 120 bp, synthetic construct
  misc_feature 1..120: note = Artificially Synthesized Probe
  source 1..120: mol_type = other DNA
cccaaatttctatttcttttgttcctcaaatgccagtttccaatatcctcacagttttgatgacacctctacagtcactattggttgactctgtatatccttcttaaagactagatagag

SEQ ID NO: 6487 - DNA, 120 bp, synthetic construct
  misc_feature 1..120: note = Artificially Synthesized Probe
  source 1..120: mol_type = other DNA
catagatctattgtaaaaggaacgtccatgtagtcgccatataattaactgaaatagagaaattattatactgagtctccacttgccagcctccaagataagaatcagctactgacctga

SEQ ID NO: 6488 - DNA, 120 bp, synthetic construct
  misc_feature 1..120: note = Artificially Synthesized Probe
  source 1..120: mol_type = other DNA
ttccagcactatttattaaaatgcctgtccttactcaccaatctgcgatacccactcttccatatatcaaatgcctttaaatgtacatttctgcttctgggctctactctattgcagtta

SEQ ID NO: 6489 - DNA, 120 bp, synthetic construct
  misc_feature 1..120: note = Artificially Synthesized Probe
  source 1..120: mol_type = other DNA
attaagtgtgggggcaaaacacacgaccgttgaaattaatttcaacttatcacctgagactggtctcgctgctgcttcatcgtggtactcttatcaagatagacatgctagcagatgtaa

SEQ ID NO: 6490 - DNA, 120 bp, synthetic construct
  misc_feature 1..120: note = Artificially Synthesized Probe
  source 1..120: mol_type = other DNA
attatctcagtgctttgcaatcaagagctcatgaatttgctgaaagcatttgctttccagattgctgctgtgtttaattatttacccttataagagtttgtgtgtgtgtgtgcttgcaga

SEQ ID NO: 6491 - DNA, 120 bp, synthetic construct
  misc_feature 1..120: note = Artificially Synthesized Probe
  source 1..120: mol_type = other DNA
ccttaggctctgtcatatccccccttcatttctccatctgcatattctccataaggaaattcttccacatccacagctccaatgatctatatacagatgactccaactctacatttaatc

SEQ ID NO: 6492 - DNA, 120 bp, synthetic construct
  misc_feature 1..120: note = Artificially Synthesized Probe
  source 1..120: mol_type = other DNA
taaagaaaaaactacagtgttagtgttatgaaaacagatacaagtggctctgaatgagagtctcaagggacggcaccatacttgaattgtaaaagtgctgaaatgcaaacatcttaaatg

SEQ ID NO: 6493 - DNA, 120 bp, synthetic construct
  misc_feature 1..120: note = Artificially Synthesized Probe
  source 1..120: mol_type = other DNA
tgcaatagagtagagcccagaagcagaaatgtacatttagaaatgtaccataacttatatggttatgagttccgtgggctctctttgtgcctcattttctgagatttggagttaaagagg

SEQ ID NO: 6494 - DNA, 120 bp, synthetic construct
  misc_feature 1..120: note = Artificially Synthesized Probe
  source 1..120: mol_type = other DNA
gatgatcctgaaagcaacaagatggtgccttcccccttttccccttcctttgcttgagtgataccagaggtatctagttaaaatagcaggtttaaataaaatccggtctcataacataat

SEQ ID NO: 6495 - DNA, 120 bp, synthetic construct
  misc_feature 1..120: note = Artificially Synthesized Probe
  source 1..120: mol_type = other DNA
agactattacaaacaactctatggacacaaactggaaaacctagaagaaatggctaaattcctggaaatatataacctccaaagatttaaccaagaagaaatgaaaaccctgaatagacc

SEQ ID NO: 6496 - DNA, 120 bp, synthetic construct
  misc_feature 1..120: note = Artificially Synthesized Probe
  source 1..120: mol_type = other DNA
acaatgtccaagctgggagccaaatcaagaatgcaatctcattcacaatagccacaaaaaaagtaataaaaaaacttataaaagaatacctaggaatacagctaattagagcggagaaaa

SEQ ID NO: 6497 - DNA, 120 bp, synthetic construct
  misc_feature 1..120: note = Artificially Synthesized Probe
  source 1..120: mol_type = other DNA
aatatccagaatccataaggaacaaatcgaaagtaaaaaaaaacccaaataaaaaatgggtactccgtgccactcccagtcacagcctcccgtgccttgctcagctccaacatggcaaaa

SEQ ID NO: 6498 - DNA, 120 bp, synthetic construct
  misc_feature 1..120: note = Artificially Synthesized Probe
  source 1..120: mol_type = other DNA
gacatggaatcaacctaaatgccatcaatagtggaacggataaagaaaatgtggtggtacatataccccatgaatattatgcagccattataaagaacaagataatgtcctttgcagcaa

SEQ ID NO: 6499 - DNA, 120 bp, synthetic construct
  misc_feature 1..120: note = Artificially Synthesized Probe
  source 1..120: mol_type = other DNA
caaaacagccctagggacctgtggaactttaacaaaggatcctacattcatgtcattggagtcttggaaggagacaggaaagaggcagggctgaaaaagaattcaaggaaataattactg

SEQ ID NO: 6500 - DNA, 120 bp, synthetic construct
  misc_feature 1..120: note = Artificially Synthesized Probe
  source 1..120: mol_type = other DNA
gccaaacatagagctacaaaatatgtgaagaaaaacagatagatgtcaacggagaaatgaacaaatacataattttactaggagacttcagaatccctctgtcaaaaaactagaattagt

SEQ ID NO: 6501 - DNA, 120 bp, synthetic construct
  misc_feature 1..120: note = Artificially Synthesized Probe
  source 1..120: mol_type = other DNA
tgggataactggagagagaagatatgaaacaggcatcaaggggttagcaaaagtaaggctcaaggaccatatcaggatctgtggcctatttttgtaccagtaatgtgaaaaggatattgt

SEQ ID NO: 6502 - DNA, 120 bp, synthetic construct
  misc_feature 1..120: note = Artificially Synthesized Probe
  source 1..120: mol_type = other DNA
actcattgattatttcttctgctgtgctgtctgctgatgagctcatgtaaggcattttttacttcttttttttatatctagcatttccctttgattcttatagtgtccaactctgctaaa

SEQ ID NO: 6503 - DNA, 120 bp, synthetic construct
  misc_feature 1..120: note = Artificially Synthesized Probe
  source 1..120: mol_type = other DNA
ctcagtcttagacaggtactgtgaatttgggatttgggggctgcacccttcataagtgttccttcctcaaggaatatgactgttttttaacatttaggttttttttttcctgcctgttct

SEQ ID NO: 6504 - DNA, 120 bp, synthetic construct
  misc_feature 1..120: note = Artificially Synthesized Probe
  source 1..120: mol_type = other DNA
ttttccatagaaaccccaataaaagcgatggcctaggctttaccctcaatactgcttccacctgaccaaactatctctctcctgtggctctgtgtgatgtgacttgtcctcttctccaag

SEQ ID NO: 6505 - DNA, 120 bp, synthetic construct
  misc_feature 1..120: note = Artificially Synthesized Probe
  source 1..120: mol_type = other DNA
agatgtcaattcttcccagatacatgtacaaatccaacatattcccaaccaaaatcacagcaggtttttttttttgagaaattaataagctgaccctaacattagatagaaatgcaattt

SEQ ID NO: 6506 - DNA, 120 bp, synthetic construct
  misc_feature 1..120: note = Artificially Synthesized Probe
  source 1..120: mol_type = other DNA
cagtatgagatcatttatgtggacttaaagcatataataaaacaatctctgaaaacagagattggatggatacacacatcaaattttaataaaggtataagttggactagaagcagaaca

SEQ ID NO: 6507 - DNA, 120 bp, synthetic construct
  misc_feature 1..120: note = Artificially Synthesized Probe
  source 1..120: mol_type = other DNA
tcctaatcacttctcgctattttgcattcttggtttttaaagaacacgtattttcaggtgatcactgtaatattctttcaaattttctataggctttcaaactaaagagatggagggatg

SEQ ID NO: 6508 - DNA, 120 bp, synthetic construct
  misc_feature 1..120: note = Artificially Synthesized Probe
  source 1..120: mol_type = other DNA
gctgttgagttaaaattcatggattaacaacagcatattgtgtctagtttccccaactagaagaaattccccaacacaatttcttgctttcactcctaaaatctaaaagcaaaaaagggc

SEQ ID NO: 6509 - DNA, 120 bp, synthetic construct
  misc_feature 1..120: note = Artificially Synthesized Probe
  source 1..120: mol_type = other DNA
tacctcatagtctcgctattcttaaaccacaaattaattcattagaagaagaaacctaaccatttcagtgcgaaaagtcatctcccgttccaaagatgagaggtgagagaaatgacgatc

SEQ ID NO: 6510 - DNA, 120 bp, synthetic construct
  misc_feature 1..120: note = Artificially Synthesized Probe
  source 1..120: mol_type = other DNA
caaaaaaaaacaaaacctcaattgtatatctaaaattcttgtggcttttttcacccttccttccatcccaggcctccaaatcagaacagaggcaggttagtgtttgttttttaagtttca

SEQ ID NO: 6511 - DNA, 120 bp, synthetic construct
  misc_feature 1..120: note = Artificially Synthesized Probe
  source 1..120: mol_type = other DNA
acaggcttgcacactgaaagactcagagccatttaactctgtacacccactgcagaatctttatcttcttttttacctgatttccaattggcaggtgttactaaaactttatcaccaaag

SEQ ID NO: 6512 - DNA, 120 bp, synthetic construct
  misc_feature 1..120: note = Artificially Synthesized Probe
  source 1..120: mol_type = other DNA
gtatggagcttttacaggagctgcaaacgcagcctgtgcccgtttggttggggaactgcttgttttcaattcctctggagagagaagagtgggtaatagaacaagttaaaacaccacaaa

SEQ ID NO: 6513 - DNA, 120 bp, synthetic construct
  misc_feature 1..120: note = Artificially Synthesized Probe
  source 1..120: mol_type = other DNA
cagcctcatacttcactgaaacaaagaccattagacaccaacactcccaacttcttttatttccactttaacatttctccatatagtaatcctcacttttctactccctgccatctcaga

SEQ ID NO: 6514 - DNA, 120 bp, synthetic construct
  misc_feature 1..120: note = Artificially Synthesized Probe
  source 1..120: mol_type = other DNA
ccttagactggctgcggccggaagattgcagccgctttgagcttactccttgttttctcataatcaaggagtatggtggagctgggtcaatttcaggcacagcccagccgagtcaggcga

SEQ ID NO: 6515 - DNA, 120 bp, synthetic construct
  misc_feature 1..120: note = Artificially Synthesized Probe
  source 1..120: mol_type = other DNA
ttctccttccccgtctgtcttggcgtctgttatccaggagatgcccgtccttctatccagggaccccggaaacaggcgactttgtcaagcccagtcccctccgtagctggatttcacctc

SEQ ID NO: 6516 - DNA, 120 bp, synthetic construct
  misc_feature 1..120: note = Artificially Synthesized Probe
  source 1..120: mol_type = other DNA
gtcactccacgtggagtcctacgctgggcactgggcacggtcttcatatttttaattataatttatcttcaagacaattatgatgtggatactatcatcacccttgtcttacagatgaag

SEQ ID NO: 6517 - DNA, 120 bp, synthetic construct
  misc_feature 1..120: note = Artificially Synthesized Probe
  source 1..120: mol_type = other DNA
cctaactcaaaacaaagggagatctgcgtggggaaggggtgtttccctgcccggtcctctggcctctggctcacagccgggcccccttctccgtattcagccctggaactacccataaga

SEQ ID NO: 6518 - DNA, 120 bp, synthetic construct
  misc_feature 1..120: note = Artificially Synthesized Probe
  source 1..120: mol_type = other DNA
ccccagactccaccgcagacccgcaggaggcggcgtgccaagatcaccggccgggagcgcaaggccatgagggtcctgccggtggtggtcggtgggttcctgtcctgaggggcggggagg

SEQ ID NO: 6519 - DNA, 120 bp, synthetic construct
  misc_feature 1..120: note = Artificially Synthesized Probe
  source 1..120: mol_type = other DNA
aaatgaaataatctgatggagcttcacaaattctgaagtctttgtttcatgctgagatcacctgggccatttttattgtagtcttcgaagtcattcacctgccttggaaacggtgataac

SEQ ID NO: 6520 - DNA, 120 bp, synthetic construct
  misc_feature 1..120: note = Artificially Synthesized Probe
  source 1..120: mol_type = other DNA
gaaaacgtttttttctgtgctttgcattggaatacaataatcaccaagacactctcctgggcctcaggagcttacaggaaatcagggcaacacataagtaactaggcaattttaaacagt

SEQ ID NO: 6521 - DNA, 120 bp, synthetic construct
  misc_feature 1..120: note = Artificially Synthesized Probe
  source 1..120: mol_type = other DNA
tgcccccataaccacaccaggtatgttctggaccatcgtatgtcttctcgtgttagatacatgcttcttgtccaggaaaagggcaaatgcttacacatcaaaataatatagtactatgat

SEQ ID NO: 6522 - DNA, 120 bp, synthetic construct
  misc_feature 1..120: note = Artificially Synthesized Probe
  source 1..120: mol_type = other DNA
ttgtagagaaacaccagaggtctatcccctcgtctttctacaagactctttccttctacagttgagataagtgggctgatctaacacgtccataaaattggtaataccacagtgaaaaat

SEQ ID NO: 6523 - DNA, 120 bp, synthetic construct
  misc_feature 1..120: note = Artificially Synthesized Probe
  source 1..120: mol_type = other DNA
tacatgggaaagaagaaaacatcacagcaaatggcatccagggacaagtaagcatcattgacaatgctggagccacaaacagaagcaacactaatggaaatactgataagaatacccaaa

SEQ ID NO: 6524 - DNA, 120 bp, synthetic construct
  misc_feature 1..120: note = Artificially Synthesized Probe
  source 1..120: mol_type = other DNA
cccagttattcttcctcagatcaatgcaattttgcagcaaatattcactagttaatcattctttcctccatccttccatagggaatagaaatcaagggtcccagcagtggcaacagaaat

SEQ ID NO: 6525 - DNA, 120 bp, synthetic construct
  misc_feature 1..120: note = Artificially Synthesized Probe
  source 1..120: mol_type = other DNA
tgacagtgatagcacatcagacactaataatagtgacagtaatggcaatggtaacaatgggaatgatgacaatgacaaatcagacagtggcaaaggtaaatcagatagcagtgacagtga

SEQ ID NO: 6526 - DNA, 120 bp, synthetic construct
  misc_feature 1..120: note = Artificially Synthesized Probe
  source 1..120: mol_type = other DNA
acagcagtgatagcagtgaaagcagtaatagtagtgacaacagcaatagcagtgacagcagcaacagcagtgacagcagtgatagcagtgacagcagtaatagtagtgacagcagcaata

SEQ ID NO: 6527 - DNA, 120 bp, synthetic construct
  misc_feature 1..120: note = Artificially Synthesized Probe
  source 1..120: mol_type = other DNA
tctggtaacggtaacaacaatggaagtgacagtgacagtgacagtgaaggcagtgacagtaaccactcaaccagtgatgattagaacaaaagaaaaacccgtaagattccttttgtgaaa

SEQ ID NO: 6528 - DNA, 120 bp, synthetic construct
  misc_feature 1..120: note = Artificially Synthesized Probe
  source 1..120: mol_type = other DNA
gattcagatctggtttcagaatcgaagggccaggcacccgggacagggtggcagggcgcccgcgcaggcaggcggcctgtgcagcgcggcccccggcgggggtcaccctgctccctcgtg

SEQ ID NO: 6529 - DNA, 120 bp, synthetic construct
  misc_feature 1..120: note = Artificially Synthesized Probe
  source 1..120: mol_type = other DNA
ctggctacggaggggcgtgtctccgccccgccccctccaccgggctgaccggcctgggattcctgccttctaggtctaggcccggtgagagactccactccgcggagaactgcctttctt

SEQ ID NO: 6530 - DNA, 120 bp, synthetic construct
  misc_feature 1..120: note = Artificially Synthesized Probe
  source 1..120: mol_type = other DNA
acaatatcccctgtagaaaaagcctgaaattgatttacagaacttcggtgatcagtgcagatgtgtttcagaactccatagtagactgaacctagagaatggttacatcacttaggtgat

SEQ ID NO: 6531 - DNA, 120 bp, synthetic construct
  misc_feature 1..120: note = Artificially Synthesized Probe
  source 1..120: mol_type = other DNA
agacagagcctaggcaagacttccatcacctgggtgatcagtgcagagatatgtcacaaatccccctctaggcagagtatagagaagagtcccatcacctgggtgatcagtgcagagata

SEQ ID NO: 6532 - DNA, 120 bp, synthetic construct
  misc_feature 1..120: note = Artificially Synthesized Probe
  source 1..120: mol_type = other DNA
atatgtcacaatgtctccagtaggcagagcctagacaagagttacatcacctgggtgatcagggcagagatatgtcacaatgccccctgtaagcagatcccagacaagagttgcatcacc

SEQ ID NO: 6533 - DNA, 120 bp, synthetic construct
  misc_feature 1..120: note = Artificially Synthesized Probe
  source 1..120: mol_type = other DNA
tcacctgggtgatcagtgcagatctatgtcacaatgcccccataggcagatccaagacaagagtccgtctcctgggtgatcagtgcagaaatacgtcacaatgcccccttaggcagagcc

SEQ ID NO: 6534 - DNA, 120 bp, synthetic construct
  misc_feature 1..120: note = Artificially Synthesized Probe
  source 1..120: mol_type = other DNA
tacacaagtattacatcacttaggtgatcagtgcagagatatgtcacaataccccctgtaagcagagcctagacaagagttacatcacctgggtgatcagtgcagagatatgtgacaagg

SEQ ID NO: 6535 - DNA, 120 bp, synthetic construct
  misc_feature 1..120: note = Artificially Synthesized Probe
  source 1..120: mol_type = other DNA
aggaaaaaacagaaaatccaaagcatattgaaagaaagccttgcaagagaggaggctcaagagctttatgtcatagcaggacaccaagaaagttctaagaaggccatatcagaatgccct

SEQ ID NO: 6536 - DNA, 120 bp, synthetic construct
  misc_feature 1..120: note = Artificially Synthesized Probe
  source 1..120: mol_type = other DNA
tgatcagtgcagaaatatgtcacaatgcccccataggcagatccaacacaagagttacatcacctgggtgatcagtgcagagatatgtaacaatgcccccagtaggcagagcctagagga

SEQ ID NO: 6537 - DNA, 120 bp, synthetic construct
  misc_feature 1..120: note = Artificially Synthesized Probe
  source 1..120: mol_type = other DNA
aataataaattattatttatacctaactgtaacccataaccctaaccctaacgggaacctaacccagccctaacccctaaccctatttgtttccctaaccagtaaccctaaccctaactc

SEQ ID NO: 6538 - DNA, 120 bp, synthetic construct
  misc_feature 1..120: note = Artificially Synthesized Probe
  source 1..120: mol_type = other DNA
ggctgcagaagcagcttctcctctatgttcttcactgcctcatactgttgttgaccttgaaaccttcttttggtctagttttatcaacagagctagtatttacatgaggttctactacat

SEQ ID NO: 6539 - DNA, 120 bp, synthetic construct
  misc_feature 1..120: note = Artificially Synthesized Probe
  source 1..120: mol_type = other DNA
aatattttaaattttccaagccatatggtctctctctcaatgactcagctcttccattataccatgaaagtagccagagacgttatataacacatgtacgtggctgtgtcccattacaac

SEQ ID NO: 6540 - DNA, 120 bp, synthetic construct
  misc_feature 1..120: note = Artificially Synthesized Probe
  source 1..120: mol_type = other DNA
tttgtcgcttcaaacaccgcaagtgttcttttaaaagaattatatcaacctttcaagtgaaatgcaacatgtctgaaacgtggtatctggagaggtgagatggacaaaggagcccttgtt

SEQ ID NO: 6541 - DNA, 120 bp, synthetic construct
  misc_feature 1..120: note = Artificially Synthesized Probe
  source 1..120: mol_type = other DNA
gagacgcggcccgccagaaggccggcgaaagcggaccgccgtcaccggatcccagaccgccctgctcctccgagcctttgagaaggatcgctttccaggcatcgccgcccgggaggagct

SEQ ID NO: 6542 - DNA, 120 bp, synthetic construct
  misc_feature 1..120: note = Artificially Synthesized Probe
  source 1..120: mol_type = other DNA
gcgccacccacgtcccaggggagtccgtggtggggctggggccggggtccccaggtcgccggggcggcgtgggaaccccaagccggggcagctccacctccccagcccgcgcccccggac

SEQ ID NO: 6543 - DNA, 120 bp, synthetic construct
  misc_feature 1..120: note = Artificially Synthesized Probe
  source 1..120: mol_type = other DNA
agaggatgatttacttgcttctaaaactgacaggctgcacttgtcctctccaagcagaggtgtgaagcaggggcagctggttctcactggtctttgaagttggcctttctcttttccaca

SEQ ID NO: 6544 - DNA, 120 bp, synthetic construct
  misc_feature 1..120: note = Artificially Synthesized Probe
  source 1..120: mol_type = other DNA
gaccgagcaagactctgcctcaaagggaagaaaattaaaattatgatggtaattagaggaattactttaagttactggcagaaatcttataaaatattgctctaaagcttcagcttatct

SEQ ID NO: 6545 - DNA, 120 bp, synthetic construct
  misc_feature 1..120: note = Artificially Synthesized Probe
  source 1..120: mol_type = other DNA
gtttcttctccaacttacttccttctgttaatgtcatttcaaaagctgaaaaacaaagtcccagagttatgaacggagatattacatgcagaacttttcctgcacggtgacaggaagccc

SEQ ID NO: 6546 - DNA, 120 bp, synthetic construct
  misc_feature 1..120: note = Artificially Synthesized Probe
  source 1..120: mol_type = other DNA
atcgctactacaattttagaattgctggcaattttttctgcacactggatggcttcttccaccagtgtctcaacaggacaaatcttgctgacaagacctgaaacacaagaaagtcagtga

SEQ ID NO: 6547 - DNA, 120 bp, synthetic construct
  misc_feature 1..120: note = Artificially Synthesized Probe
  source 1..120: mol_type = other DNA
ctggtcatggctggcactgtgatgagtgaacccaagaagacatcacagctgtgcagccagcaaattccaaggggcttaagataggccctgagactaggtccaggggtcagaggccaggca

SEQ ID NO: 6548 - DNA, 120 bp, synthetic construct
  misc_feature 1..120: note = Artificially Synthesized Probe
  source 1..120: mol_type = other DNA
accctgacattagatcaaggtgatgactctgtagggccctccccagcctctgtggtcaacatattagaagcttataggcctccctgaccccaggcactggtcccttatagtagcagctgt

SEQ ID NO: 6549 - DNA, 120 bp, synthetic construct
  misc_feature 1..120: note = Artificially Synthesized Probe
  source 1..120: mol_type = other DNA
ctgtaaaacattcggcatcaggagagtcttaccaggggaacccagtcagaaatcactctgcttgcttattcaaattttccatttaaaagaaacagtgttgggggtatgacaaagactaac

SEQ ID NO: 6550 - DNA, 120 bp, synthetic construct
  misc_feature 1..120: note = Artificially Synthesized Probe
  source 1..120: mol_type = other DNA
atgaaatgatcacattgccttccctataggccaagatcagtctcagcacttcaaatagtcccaggacacagagctttcaaggggagcaaaagaagctagtttatagatgtagccaaagcc

SEQ ID NO: 6551 - DNA, 120 bp, synthetic construct
  misc_feature 1..120: note = Artificially Synthesized Probe
  source 1..120: mol_type = other DNA
tcagttggatcaaccccacggtgttattcttccctcttttttctgcgatgatgtactcaaagttagcacctggagcaagaaggcaaaaaggggtatctattcacacaggtatcaaactgg

SEQ ID NO: 6552 - DNA, 120 bp, synthetic construct
  misc_feature 1..120: note = Artificially Synthesized Probe
  source 1..120: mol_type = other DNA
tgagaaggtgaacctgaaaagacaaaggtagcctgtgtgttggatgcttgcctccgttagtggcagagcagggatcatagtccctgtgctatgggtttcttttttttggagaccgagtct

SEQ ID NO: 6553 - DNA, 120 bp, synthetic construct
  misc_feature 1..120: note = Artificially Synthesized Probe
  source 1..120: mol_type = other DNA
actaggcgaggggggtgttgcaggcctgagccaggcaggggctgcgggtcggggtcaggtggtaggtgcggggtcaggcaggagagtgcggagtcaggccctggggatgcgggatcggac

SEQ ID NO: 6554 - DNA, 120 bp, synthetic construct
  misc_feature 1..120: note = Artificially Synthesized Probe
  source 1..120: mol_type = other DNA
ggcctggggggcggggggcggcgtgtgggcggggccggaggacttgaccccccccaaccccagggctctggccgggcgggggcgcaaccgcgtcgggaatgtcctcggaacacgcttagc

SEQ ID NO: 6555 - DNA, 120 bp, synthetic construct
  misc_feature 1..120: note = Artificially Synthesized Probe
  source 1..120: mol_type = other DNA
acttacacggccaaccccagctggaactaaggcgggggggtgacaaaactggacctcaattcctgtgtttcagttgtatctcaataaagccacttttaaaaatcatatgaagaggccagg

SEQ ID NO: 6556 - DNA, 120 bp, synthetic construct
  misc_feature 1..120: note = Artificially Synthesized Probe
  source 1..120: mol_type = other DNA
cacgttcttcacattgaagccgacgttgtcgccgggcagagcttcgctcagagcctcgtggtgcatctccactgacttcacctcagtggtgatgttcactggcgcaaaggtcaccaccat

SEQ ID NO: 6557 - DNA, 120 bp, synthetic construct
  misc_feature 1..120: note = Artificially Synthesized Probe
  source 1..120: mol_type = other DNA
agtgcacacagagatgcctgcaacatctttggctgcagcccactggctgggggtctcctatcagtgcccttctctagggtctcagatttgtttatggtttctcttcttggtgggatggat

SEQ ID NO: 6558 - DNA, 120 bp, synthetic construct
  misc_feature 1..120: note = Artificially Synthesized Probe
  source 1..120: mol_type = other DNA
tgtatgggtgggtaggtgggtggatagatggatggatggatggatggataaatggatggatggaaggatggatggataggtaggtgggtggatggatggatggatggatgtacagaagga

SEQ ID NO: 6559 - DNA, 120 bp, synthetic construct
  misc_feature 1..120: note = Artificially Synthesized Probe
  source 1..120: mol_type = other DNA
gggagaaaatcaatccgttaagagacattggtggcctccccaccctcaggcctccccagggtgcttccaggagtactgctgttcaggctaaacttgcctcgtgccctttgagatgaggaa

SEQ ID NO: 6560 - DNA, 120 bp, synthetic construct
  misc_feature 1..120: note = Artificially Synthesized Probe
  source 1..120: mol_type = other DNA
ccacatgataccccatgaggaaaacgccatcacaggtaaacaacaccgagcctcgtgagatggaggcggagctgggggagtccctcccagttctgtccccagacctcagctccaggctca

SEQ ID NO: 6561 - DNA, 120 bp, synthetic construct
  misc_feature 1..120: note = Artificially Synthesized Probe
  source 1..120: mol_type = other DNA
tagccgatcttcttgatgtaggcgctgacttccttgacgatctcgtcgtagcgcttctcgctgtaggccggctctgtggagtccattttgttcacgcccacgatgagctgcttcacaccc

SEQ ID NO: 6562 - DNA, 120 bp, synthetic construct
  misc_feature 1..120: note = Artificially Synthesized Probe
  source 1..120: mol_type = other DNA
cacctgggatgtacccgtgatcatgttcttgatgaagtcgcggtggccgggggcatcgatgatggtgatgtagtacttggtggtctcgaacttccagagggagatgtcgatggtgatgcc

SEQ ID NO: 6563 - DNA, 120 bp, synthetic construct
  misc_feature 1..120: note = Artificially Synthesized Probe
  source 1..120: mol_type = other DNA
agagtcctgggtgggggatggggatcagagagcagaccccgtctcatgaccgctccccaccaccgtctcagccaccaaagagaaatcgcttcaaaaggtcagctaggaggtcacctcatc

SEQ ID NO: 6564 - DNA, 120 bp, synthetic construct
  misc_feature 1..120: note = Artificially Synthesized Probe
  source 1..120: mol_type = other DNA
ttctcgaacttctcaatggtccttttgtcaatacctccgcatttgtagatgaggtggcccgtggtggtggactttccggagtccacgtggccgatgaccacgatgttgatgtgggtcttc

SEQ ID NO: 6565 - DNA, 120 bp, synthetic construct
  misc_feature 1..120: note = Artificially Synthesized Probe
  source 1..120: mol_type = other DNA
cgggtgggggtggggaggccagggcccccagatctcaccacctccctcagcgtcctctggcccagcgccccgaagcccgacccccatcagcccccggcccgcagggtccccgcggcccca

SEQ ID NO: 6566 - DNA, 120 bp, synthetic construct
  misc_feature 1..120: note = Artificially Synthesized Probe
  source 1..120: mol_type = other DNA
tttatttccaaaccagcagctttaaagggctctcgatgtaaaaagttcacattcttttgttaatggtctcggccttccccgtgctcattctcaaggatagtttgtttccttgcttaggaa

SEQ ID NO: 6567 - DNA, 120 bp, synthetic construct
  misc_feature 1..120: note = Artificially Synthesized Probe
  source 1..120: mol_type = other DNA
aagcgaaattagaaaatttcaagtcacttctaggcttgtaggggagaagacgtgtagtgatgaattctatcatttatgaagtacccactggatcccacacactgtgcaagacctttagat

SEQ ID NO: 6568 - DNA, 120 bp, synthetic construct
  misc_feature 1..120: note = Artificially Synthesized Probe
  source 1..120: mol_type = other DNA
ctggacagtaggtaggcatgtgatcactgttgtcactaaacctgggaaatgattcctgggtcagggttcattaattgccaaatgattaaagtaataaagctgacactggaaacttatcta

SEQ ID NO: 6569 - DNA, 120 bp, synthetic construct
  misc_feature 1..120: note = Artificially Synthesized Probe
  source 1..120: mol_type = other DNA
gcccccggccgatcatcttctgtctttctagagaagaagcagcccacttgcatctcttgagcatttacttcatgtttctaaatatatgtttgtattgtcatgtctttattcaccaacttt

SEQ ID NO: 6570 - DNA, 120 bp, synthetic construct
  misc_feature 1..120: note = Artificially Synthesized Probe
  source 1..120: mol_type = other DNA
ctgcccgtgcgcttagtaagtttggctggtaggttggaaagtcattttgaagtcatagctccaatatctttcagttttcattgttgctcttgagaagtctggtttggtcttttttctttt

SEQ ID NO: 6571 - DNA, 120 bp, synthetic construct
  misc_feature 1..120: note = Artificially Synthesized Probe
  source 1..120: mol_type = other DNA
ttcaggcaattctcctgcctcagcctcccgagtagctgtgattacaggtgggcaccaccacgcctggctaatttttgtaattttagtagagacagggtttcgccatatcggccaggcagg

SEQ ID NO: 6572 - DNA, 120 bp, synthetic construct
  misc_feature 1..120: note = Artificially Synthesized Probe
  source 1..120: mol_type = other DNA
tcccttgccgaacctttaggatcgttgcatccgtgattttcctaatatttatcatgcgtttagtgctagccttttgttatgtattatgcaggtgcctaagtagctgtgaaatctgaagat

SEQ ID NO: 6573 - DNA, 120 bp, synthetic construct
  misc_feature 1..120: note = Artificially Synthesized Probe
  source 1..120: mol_type = other DNA
tttgtgttttccctgcattcgttcctctttgctgtcttatctcttagtctttcttctatgatgtaacctttcctttagtgtctcattgtctttggccattttgccgtgttgcgaataaag

SEQ ID NO: 6574 - DNA, 120 bp, synthetic construct
  misc_feature 1..120: note = Artificially Synthesized Probe
  source 1..120: mol_type = other DNA
ttacaggtgcgcaccaccactccgggataatttttttgtatatttagtagaaacggggtttcaccatgttggtcaggctggtctcaaacccctgatctcaggtgatttgcccacctcagc

SEQ ID NO: 6575 - DNA, 120 bp, synthetic construct
  misc_feature 1..120: note = Artificially Synthesized Probe
  source 1..120: mol_type = other DNA
tctgtgggataggttagctctcctctacctctctgtcttcctatttgtgttctatttagggatttcacatgtcttggggtttatgtgtctctttcctgcttttcttgtctttgattgatt

SEQ ID NO: 6576 - DNA, 120 bp, synthetic construct
  misc_feature 1..120: note = Artificially Synthesized Probe
  source 1..120: mol_type = other DNA
agtttttttgttgttgttgttaaatggagtctcgctctgttgcccaggctggagtgcagtggcgtgatctcggctcactgcaagctccgcctcctgggttctcgccattcttctgcctca

SEQ ID NO: 6577 - DNA, 120 bp, synthetic construct
  misc_feature 1..120: note = Artificially Synthesized Probe
  source 1..120: mol_type = other DNA
tccttgaggaagatgagttagtctaggtcttttttttcctttaacagcttcttgtccaacacatagtctaggtcttaaaggatgtgagacatgaattggcatgagaaggtggacaaagtg

SEQ ID NO: 6578 - DNA, 120 bp, synthetic construct
  misc_feature 1..120: note = Artificially Synthesized Probe
  source 1..120: mol_type = other DNA
tacctccctagccactagttcttctcttggcaggtcaccagtatttaattactgtgcatatttcatgatgtttatgaatatacagtcatgtggcacttaaggacattttggtccgtggca

SEQ ID NO: 6579 - DNA, 120 bp, synthetic construct
  misc_feature 1..120: note = Artificially Synthesized Probe
  source 1..120: mol_type = other DNA
aaggcacttgaaaggtgcaggtgggagtaagtcaacctttcagccccagttccccttgaaaatgcagaggcgaatgcatgaagacgtagtctgagttgtgctcttttttttgtttttgtt

SEQ ID NO: 6580 - DNA, 120 bp, synthetic construct
  misc_feature 1..120: note = Artificially Synthesized Probe
  source 1..120: mol_type = other DNA
ttactggagctgttcatctgttaagtgcttactgtgacacagttttctgtttcatctttgaaaatgtcttcacaccgatagctgttgccatattccagtatcagtccaggagcagatgat

SEQ ID NO: 6581 - DNA, 120 bp, synthetic construct
  misc_feature 1..120: note = Artificially Synthesized Probe
  source 1..120: mol_type = other DNA
gaagcacagatgtttttaatttttgatgaaatccaccttcttgttttccagttggtttctttgcttttgttgtcgtgtctgattgcccaatccaaaccagggagtttatgtttccttgga

SEQ ID NO: 6582 - DNA, 120 bp, synthetic construct
  misc_feature 1..120: note = Artificially Synthesized Probe
  source 1..120: mol_type = other DNA
agctaattttttttttttaatgtatttttggtagagacggagtttcaccatgttggacaggctggtcttgaacttctgacctcgtgattcgccctccttggcctcccaaagtgttgggat

SEQ ID NO: 6583 - DNA, 120 bp, synthetic construct
  misc_feature 1..120: note = Artificially Synthesized Probe
  source 1..120: mol_type = other DNA
aatgtttgtctctatctgttgacatgattatgtagtttttttcctttattgatatggtgtcttacatagattttcatatgctcaaccagccctgcgtttctgccctaaatccatttgggt

SEQ ID NO: 6584 - DNA, 120 bp, synthetic construct
  misc_feature 1..120: note = Artificially Synthesized Probe
  source 1..120: mol_type = other DNA
agatgggattttgccatgttggccaggctcgtcttgaactcctgacctcaggtgatccgcctgccttggcctcccaaaatgctgggattacaggtgtgagccactgcacctggcctaaaa

SEQ ID NO: 6585 - DNA, 120 bp, synthetic construct
  misc_feature 1..120: note = Artificially Synthesized Probe
  source 1..120: mol_type = other DNA
tcattgcagattagttaagatgaaatcatagttgagtagggtaggcctctaatccagtatgacttacgtgtcctcataaaaaaaaaaggatgccttgtgaacacagacatgcacagaagg

SEQ ID NO: 6586 - DNA, 120 bp, synthetic construct
  misc_feature 1..120: note = Artificially Synthesized Probe
  source 1..120: mol_type = other DNA
tttcagttctgttggtttttgcctcgtgttttgagactatgttatcttgcgtgtgtttatagttgttacatctgcctgggtgttttgacacttctctcattatgaaatgtccctctttgt

SEQ ID NO: 6587 - DNA, 120 bp, synthetic construct
  misc_feature 1..120: note = Artificially Synthesized Probe
  source 1..120: mol_type = other DNA
ttttttaatcaagagcaagtagatacatgttttctctgagcccaatatgcagagaaggaaaaaatgctagaattctctgcattataggggcctggcgccctttagcttccaacagtgcaa

SEQ ID NO: 6588 - DNA, 120 bp, synthetic construct
  misc_feature 1..120: note = Artificially Synthesized Probe
  source 1..120: mol_type = other DNA
cctactggctttattctgcatttgacttgaagagtttcctttccagatttccatttgatttccgtggactttgaagatggatcatgactctcattcagatgaaattctttgagagagctt

SEQ ID NO: 6589 - DNA, 120 bp, synthetic construct
  misc_feature 1..120: note = Artificially Synthesized Probe
  source 1..120: mol_type = other DNA
gcgcccggccccaaattttttaatctattcccccagtctctacttttcatgtgggacaggtaatgcgtttcatctaatgtaattactgaaaggtagggtttatacttgtcgattttgtat

SEQ ID NO: 6590 - DNA, 120 bp, synthetic construct
  misc_feature 1..120: note = Artificially Synthesized Probe
  source 1..120: mol_type = other DNA
ctgtctagtgtcctttcatttatcctgaaggactcttaggtctttcagtgatgaactctctacttttgtttatcttggaatgttttatttttcctttatgaaggtagttttgtgtataaa

SEQ ID NO: 6591 - DNA, 120 bp, synthetic construct
  misc_feature 1..120: note = Artificially Synthesized Probe
  source 1..120: mol_type = other DNA
gccacgggcaatacgtaaacaagtgggggtggttgtgtgctggtaaaactggaagtgtttggaaactggaatttgagtttcatatcactcttgaaacagtcacatacttttttttttttt

SEQ ID NO: 6592 - DNA, 120 bp, synthetic construct
  misc_feature 1..120: note = Artificially Synthesized Probe
  source 1..120: mol_type = other DNA
ttaactgacttctcagtgtagacaggaaccatttatccattcatgtgttccttaatttgttgatttttgtaacaagtacttactgccttcgtgtgccagcttctgcactgggagccacat

SEQ ID NO: 6593 - DNA, 120 bp, synthetic construct
  misc_feature 1..120: note = Artificially Synthesized Probe
  source 1..120: mol_type = other DNA
tttactttttaaatgtagatgctagaaatttaaaatgatgtctgtggcatttcctgtctttctgtgggacagtggtacctggcctgaggaacatttcaagtttgtgctgcgggcaagaat

SEQ ID NO: 6594 - DNA, 120 bp, synthetic construct
  misc_feature 1..120: note = Artificially Synthesized Probe
  source 1..120: mol_type = other DNA
ttggttagttctcagccttcgtcttactggttctttcaccagcatttgttatcataattcaagcaaaaaaaacctgggattagttgtctccgtttggcttctagaacactgcactcttct

SEQ ID NO: 6595 - DNA, 120 bp, synthetic construct
  misc_feature 1..120: note = Artificially Synthesized Probe
  source 1..120: mol_type = other DNA
tatacctggaaaacccaaaagagtcaatgttaaaacacagacagtgaaattcagtaaaggaactggatataaaattgatacattaagtcagtagccagctgggttgtggtggttcacgcc

SEQ ID NO: 6596 - DNA, 120 bp, synthetic construct
  misc_feature 1..120: note = Artificially Synthesized Probe
  source 1..120: mol_type = other DNA
ttcatcactggggaaactgggcatcagtgggttgagtagtgtcttcccaaattcacattcccctgtgacttcagaaatagtgttctcccaaattcagatccacccgtgacttcagaaata

SEQ ID NO: 6597 - DNA, 120 bp, synthetic construct
  misc_feature 1..120: note = Artificially Synthesized Probe
  source 1..120: mol_type = other DNA
aggctattctcaaactcctgggctcaagcgatctgctcaccttggcctcccaaagtgctgggattacagatgtgtaattacaggtgtaccttgcccagctgttgttcatttttaaaatta

SEQ ID NO: 6598 - DNA, 120 bp, synthetic construct
  misc_feature 1..120: note = Artificially Synthesized Probe
  source 1..120: mol_type = other DNA
gtgtcctattttagaaacacttttgaaattcaagattatgaagatttgtgcctgttttcttctatgagttttacagttttagctcttttaattagatctttgatctattttgaattatag

SEQ ID NO: 6599 - DNA, 120 bp, synthetic construct
  misc_feature 1..120: note = Artificially Synthesized Probe
  source 1..120: mol_type = other DNA
cccaagccaggctgaagtcatcctcctgccttggcctcccaaagtgctgggattacaggcgtgagccacaatgcccggccagtgtgtcttagttttattttttttgagacggagtctcac

SEQ ID NO: 6600 - DNA, 120 bp, synthetic construct
  misc_feature 1..120: note = Artificially Synthesized Probe
  source 1..120: mol_type = other DNA
gcttaacgttgaatttcccagaaggtatcctcgtagttaagtgatgcatggttgcataaagcacctaagacagtgcttggcacacgggaagactaagggcttgattttctctttcttttt

SEQ ID NO: 6601 - DNA, 120 bp, synthetic construct
  misc_feature 1..120: note = Artificially Synthesized Probe
  source 1..120: mol_type = other DNA
tgaactttcagttctcttccattgatcagatgttgttccttaggccagtatcacagtgtcttgatgactttacctttgttgtaagttttgaaatggagaggtttgagtcctccaagtttg

SEQ ID NO: 6602 - DNA, 120 bp, synthetic construct
  misc_feature 1..120: note = Artificially Synthesized Probe
  source 1..120: mol_type = other DNA
aaaaaagacctccttactgcccagcagaccagaactattgttacccatgaaaggacccaggaatcttacctatggagttttccttaatgaggaagataaaatacgttgcatatattaggt

SEQ ID NO: 6603 - DNA, 120 bp, synthetic construct
  misc_feature 1..120: note = Artificially Synthesized Probe
  source 1..120: mol_type = other DNA
tgtatagctatgaagagacactggaaggaaatgggagattttgggttagagtgatgacacttagatttcgaagtttcctgttaactattgtcttcctaatcaacacaggctcctggccct

SEQ ID NO: 6604 - DNA, 120 bp, synthetic construct
  misc_feature 1..120: note = Artificially Synthesized Probe
  source 1..120: mol_type = other DNA
gaagaggggtgattgtctcataggcttctcctagagggaccactgggagattctgagcagaggagtggcggaatgtgacttctgttttaacagtgtctttctcgtggcagtgttgagagt

SEQ ID NO: 6605 - DNA, 120 bp, synthetic construct
  misc_feature 1..120: note = Artificially Synthesized Probe
  source 1..120: mol_type = other DNA
cagcgcccagaatggtctttttcagacttcagaattgctttccctggttcttgtatctaaggtagcttctcctgtgtttctgtccctttaccttggtttatttatcatcatctgcaatta

SEQ ID NO: 6606 - DNA, 120 bp, synthetic construct
  misc_feature 1..120: note = Artificially Synthesized Probe
  source 1..120: mol_type = other DNA
agtggaactgctgaaccatcgtagacatcctgcaagcccacatcctctttccttgagtttgagtcaattgaatgtgtgtaaaacggcatgtcattatcatcttatttggtttttcttatt

SEQ ID NO: 6607 - DNA, 120 bp, synthetic construct
  misc_feature 1..120: note = Artificially Synthesized Probe
  source 1..120: mol_type = other DNA
cctgtctcaaaaaaattttttcctcatctttcttcatgtgtataatcatttttcctagctttaggtattgagcaagccctcctttcttcgtcagcctgtcataccgtatcccacagttca

SEQ ID NO: 6608 - DNA, 120 bp, synthetic construct
  misc_feature 1..120: note = Artificially Synthesized Probe
  source 1..120: mol_type = other DNA
gcagttttatttcttcctttctaatcccaggcctcagattccttgtctaattgtgctggttaggacacgatatgatgtcgaaaagaaacaatgctagtggatgtttttattcttggtttt

SEQ ID NO: 6609 - DNA, 120 bp, synthetic construct
  misc_feature 1..120: note = Artificially Synthesized Probe
  source 1..120: mol_type = other DNA
ctgcgcctggccaagaaatctattaatggggtgagttacccaacaatatctgctgatagtatatatatattttttacacattgttgaattcaaattgctgatatttttgtttagatattt

SEQ ID NO: 6610 - DNA, 120 bp, synthetic construct
  misc_feature 1..120: note = Artificially Synthesized Probe
  source 1..120: mol_type = other DNA
tcatttgtaccttctttagatggatttgctgttagcctgttaatttggggactttctttgaagctacagcctatggttcttgttctgatagttggcttgagcaggaagaggcagtaatga

SEQ ID NO: 6611 - DNA, 120 bp, synthetic construct
  misc_feature 1..120: note = Artificially Synthesized Probe
  source 1..120: mol_type = other DNA
ggtgcatgccactgagcctggtggtgtgtgtttttaaaatttgataactattgccaagttgcccccagagagattttattaaatgagaattgcctgtttagccatacttttttttttttt

SEQ ID NO: 6612 - DNA, 120 bp, synthetic construct
  misc_feature 1..120: note = Artificially Synthesized Probe
  source 1..120: mol_type = other DNA
aggacttcaaatatttattgttttgtattaagagctacaaacaacttggtcttgattggagagctggcataggtgtataagggcctctccctgtaagaaatttggagctggggtgggcat

SEQ ID NO: 6613 - DNA, 120 bp, synthetic construct
  misc_feature 1..120: note = Artificially Synthesized Probe
  source 1..120: mol_type = other DNA
acatttgctggtagcaggaggaactctgacctttttcagttatgctgatgataaaccaggactttttcccttgtttgaacatttataaagagcgtgcttgaacttttttgctgactagca

SEQ ID NO: 6614 - DNA, 120 bp, synthetic construct
  misc_feature 1..120: note = Artificially Synthesized Probe
  source 1..120: mol_type = other DNA
atgcaaatgtgctgatgcaggaatgtttttgaacacctgtgatgtaaattttaacggtggttaatgttagcagctccacctgggttagctcaacccttagagattatttgttctcatctc

SEQ ID NO: 6615 - DNA, 120 bp, synthetic construct
  misc_feature 1..120: note = Artificially Synthesized Probe
  source 1..120: mol_type = other DNA
accacccacccatccatttatttacccacctactcatccattcacctgtccacatccatctattcaccaaccatcacatattaatgacttactatataccagaactactagtactgaaac

SEQ ID NO: 6616 - DNA, 120 bp, synthetic construct
  misc_feature 1..120: note = Artificially Synthesized Probe
  source 1..120: mol_type = other DNA
cggcctagaagtaggttcttgatgtatccttcatgtctcgtcttccctctcgcaccctgcacccttctcgcccagtgcttactgcttgctgggtgctggtctcctgcttaaagagcagac

SEQ ID NO: 6617 - DNA, 120 bp, synthetic construct
  misc_feature 1..120: note = Artificially Synthesized Probe
  source 1..120: mol_type = other DNA
gctgaaaaaagcttttcttgatcctgcttcccaccagcttcacgtcagttctttgcccttctttgcgccaaactcctccaaagatttgtgtttttttcatggtgtgtgcatcctccctca

SEQ ID NO: 6618 - DNA, 120 bp, synthetic construct
  misc_feature 1..120: note = Artificially Synthesized Probe
  source 1..120: mol_type = other DNA
cagaactctgaacccttccagggccaccgtgtgcttgacttacagattagtgagggtgtcttgcctatagttaactgttttcccgtataattattctgttaacccttttatagctaataa

SEQ ID NO: 6619 - DNA, 120 bp, synthetic construct
  misc_feature 1..120: note = Artificially Synthesized Probe
  source 1..120: mol_type = other DNA
gagggcgtgcagcaggcggtgtgagcatctggctctgctgactggaaaagataggtgcacaaatgtaaaaccgtatcacttttgtttctttttttaaaagaatacttcattttcataaag

SEQ ID NO: 6620 - DNA, 120 bp, synthetic construct
  misc_feature 1..120: note = Artificially Synthesized Probe
  source 1..120: mol_type = other DNA
ggggtttgtggtccctcaccattctcgactgctgcttttatatttgttgtatttctgataggaccgttgctcacgttgctcttctgatctgaaaaaagaaataggcttctcattttttca

SEQ ID NO: 6621 - DNA, 120 bp, synthetic construct
  misc_feature 1..120: note = Artificially Synthesized Probe
  source 1..120: mol_type = other DNA
tcgagccctgttctgagaccaaattccaggtgccgaaagacattaaacaggattgtgctcttcactggcatctatcaaagagcaccaacatgatataaattaaaacccacagtaaaatct

SEQ ID NO: 6622 - DNA, 120 bp, synthetic construct
  misc_feature 1..120: note = Artificially Synthesized Probe
  source 1..120: mol_type = other DNA
ctagattgctgtagctccttctgtgccttgtcatgaagtgtgaacttgattccatgggcagtgggaagccactgaatttttaaagaagatgatggtaaggtcacaattttagaaagataa

SEQ ID NO: 6623 - DNA, 120 bp, synthetic construct
  misc_feature 1..120: note = Artificially Synthesized Probe
  source 1..120: mol_type = other DNA
gccaccgcgcccggccattacgcctgactaattttttttgtatttttagtagagagagggtttcaccgtgtcagccaggatggtcttgatctcctgacctcgtgatctgcctgcctcggc

SEQ ID NO: 6624 - DNA, 120 bp, synthetic construct
  misc_feature 1..120: note = Artificially Synthesized Probe
  source 1..120: mol_type = other DNA
ctctgctcattgcaacctccacctcccaggtttaaacgattctcctgtctcagtctcccaagtagctgggattacagcgtgtggcaccatgtctggctaacttttgtattttcttgtaga

SEQ ID NO: 6625 - DNA, 120 bp, synthetic construct
  misc_feature 1..120: note = Artificially Synthesized Probe
  source 1..120: mol_type = other DNA
atatactaagatgtttactgttggtggtaagattaggggccatttttgtttcttgtgatttgttttttctctcctgatgacactgctagagcccccagcacagtgtttgaatgctgtgga

SEQ ID NO: 6626 - DNA, 120 bp, synthetic construct
  misc_feature 1..120: note = Artificially Synthesized Probe
  source 1..120: mol_type = other DNA
attcatttgctgatgttttgttaggggttactgatgtggagttccctttgttttctgtgtaatgctgttctcacagaaggcgctgggaggtgtttcctcctcttcttactaattcctgag

SEQ ID NO: 6627 - DNA, 120 bp, synthetic construct
  misc_feature 1..120: note = Artificially Synthesized Probe
  source 1..120: mol_type = other DNA
aaatgcctctacgttgtatctgtatcttgtattgtgttcctgtttttagatgaaagtcttgtggcttttttttagttgcttatgctattaaaagcatcaggtgggaccaggtgcggtggc

SEQ ID NO: 6628 - DNA, 120 bp, synthetic construct
  misc_feature 1..120: note = Artificially Synthesized Probe
  source 1..120: mol_type = other DNA
gtgtgcaggggttactttggaaccctgagaattgtatttagctccaggcctcaggattttgctataactttgtagtagctgcattacacatcccacaaattcttttggcctataaaatat

SEQ ID NO: 6629 - DNA, 120 bp, synthetic construct
  misc_feature 1..120: note = Artificially Synthesized Probe
  source 1..120: mol_type = other DNA
gtccggccaaaatcgtcctctttaaagcagccactgggtttggaatttattaaatacttgaaaatctcaaaaagttaaaaatgtcaggtgaactgttgttttttccccccagtaccaacc

SEQ ID NO: 6630 - DNA, 120 bp, synthetic construct
  misc_feature 1..120: note = Artificially Synthesized Probe
  source 1..120: mol_type = other DNA
cacttatttgaatctttgttaaaatggcatttgtagacaagagatcagagtccctgaggtaaaagcggatctgctatttggtgctacgataaggctaaatagcagtgagaatttctgctg

SEQ ID NO: 6631 - DNA, 120 bp, synthetic construct
  misc_feature 1..120: note = Artificially Synthesized Probe
  source 1..120: mol_type = other DNA
cctaccccctcactctccacccccgcagcttgtattgtgatgagtttgatgtatatccttcaagatctttgcctttaattttttagagagatgcttgaacccgtcaacaatataatattg

SEQ ID NO: 6632 - DNA, 120 bp, synthetic construct
  misc_feature 1..120: note = Artificially Synthesized Probe
  source 1..120: mol_type = other DNA
aaggagtcttttctaataattgcattggtctcatagccacaaattaaagaaatttatgattgcatctgtaaggtttgtttgtatacctctaaatcttttttccccttgctggttttttta

SEQ ID NO: 6633 - DNA, 120 bp, synthetic construct
  misc_feature 1..120: note = Artificially Synthesized Probe
  source 1..120: mol_type = other DNA
tttatttcttgatggtgtcctttgcagcacagatgtttttagttttgatgacgtccaatttatctgttttttctttggttgcttgtgcttttggtgtgataatttaagaaattgttgcct

SEQ ID NO: 6634 - DNA, 120 bp, synthetic construct
  misc_feature 1..120: note = Artificially Synthesized Probe
  source 1..120: mol_type = other DNA
cagtaacacactgtcctgattattgtagctgtgtattaaatgggaaaatgtgagtcctccagctgtatccttctttttccaattgttttggctctcttgaccctctgaatttccttatga

SEQ ID NO: 6635 - DNA, 120 bp, synthetic construct
  misc_feature 1..120: note = Artificially Synthesized Probe
  source 1..120: mol_type = other DNA
gagccattgtgcccagcgtggaactgttcttgaaatttcatttttatattcttcattggtagtttatataaactcggttcattttcatgtgttcatctcataccttgccacgctgctgga

SEQ ID NO: 6636 - DNA, 120 bp, synthetic construct
  misc_feature 1..120: note = Artificially Synthesized Probe
  source 1..120: mol_type = other DNA
agctacagttttctttggtcaatggatcccacctcctcctcagaaatacattgtatgtgagtttggtatgtgtccttcaggagtatttttgtgcgtgttcatagataattgagctgtgtg

SEQ ID NO: 6637 - DNA, 120 bp, synthetic construct
  misc_feature 1..120: note = Artificially Synthesized Probe
  source 1..120: mol_type = other DNA
ctagatttgccgatggacgtcatgtagaatttggaagtgaggaatgcagggtgacttactcttgtgtatttgcttttctatttcacagtatttcatagagctcttcccatgtcagtacat

SEQ ID NO: 6638 - DNA, 120 bp, synthetic construct
  misc_feature 1..120: note = Artificially Synthesized Probe
  source 1..120: mol_type = other DNA
gcactgctgctttaaacagcatcatatattcttccacatgtacatgtccaagagtgtttctagataagcaccatgaagttaaggtgctgggtcatacagagaggactcatttaaacatgt

SEQ ID NO: 6639 - DNA, 120 bp, synthetic construct
  misc_feature 1..120: note = Artificially Synthesized Probe
  source 1..120: mol_type = other DNA
ggatattcctgattgtattgaagtgcaaaacaggcagaactaatgagaagggtgatgtgtgtaagaatttggaaatggtataggatgagaatcatacacaacaccagccagtatcaggca

SEQ ID NO: 6640 - DNA, 120 bp, synthetic construct
  misc_feature 1..120: note = Artificially Synthesized Probe
  source 1..120: mol_type = other DNA
aggccgggctaaggggactggacttgtttttgaacagttcaagttagcgggtatctaacaagcagtgactgatgtcttccatgtggcagatactaaacactttaattttatatttattaa

SEQ ID NO: 6641 - DNA, 120 bp, synthetic construct
  misc_feature 1..120: note = Artificially Synthesized Probe
  source 1..120: mol_type = other DNA
aggaggcgcacagctgaggccggctccgtgcccttcttcctgcctgtgaggcagtctcgttggtcggcagtcttgttggtcagcaaccttgtggtttctgataggttccatgaattttca

SEQ ID NO: 6642 - DNA, 120 bp, synthetic construct
  misc_feature 1..120: note = Artificially Synthesized Probe
  source 1..120: mol_type = other DNA
ttgatgttgcaggtaaaccagattgtcagaattgtactctcggtcttgaaggagatggtagataaactagagcatcagcatattagtggcggtaagaacggcaagtagccgtttccagct

SEQ ID NO: 6643 - DNA, 120 bp, synthetic construct
  misc_feature 1..120: note = Artificially Synthesized Probe
  source 1..120: mol_type = other DNA
tcagatattgaaaggattcattctttttctctccacccctttcgataattagctggtgaaattggtatgtggaaaatggtttaaaattagggggcgggtagagagtgctcttcatctcac

SEQ ID NO: 6644 - DNA, 120 bp, synthetic construct
  misc_feature 1..120: note = Artificially Synthesized Probe
  source 1..120: mol_type = other DNA
atcggccggcctggccttgtgctcactgcacacagggtcatacagtttacctagcatactgtttgaagatttttttgaagcggttttaaatttctggtaactttaaagatttttctttta

SEQ ID NO: 6645 - DNA, 120 bp, synthetic construct
  misc_feature 1..120: note = Artificially Synthesized Probe
  source 1..120: mol_type = other DNA
gatcattattactggtttgttgacaaaacgtggacgcattttgtcttatccagcatgttgtagaaaagcagggattgccgtggaaactccacactttgactaggaaaagaaatgatcact

SEQ ID NO: 6646 - DNA, 120 bp, synthetic construct
  misc_feature 1..120: note = Artificially Synthesized Probe
  source 1..120: mol_type = other DNA
caggagcaggcatttgaaccctgaaggcgcgctgccgtcttctctggaaaggtgatgctgagctcttcacaaaagtttaataatttatactgtaggtataatagaaattgtcttttaaaa

SEQ ID NO: 6647 - DNA, 120 bp, synthetic construct
  misc_feature 1..120: note = Artificially Synthesized Probe
  source 1..120: mol_type = other DNA
aatacatttattttatggacttgacatgtgagtatttctcctatccctctatcccttttggatattttctgagctgtgaatgtaactgggtgtctcatgtcatgacagcctgtagtgccc

SEQ ID NO: 6648 - DNA, 120 bp, synthetic construct
  misc_feature 1..120: note = Artificially Synthesized Probe
  source 1..120: mol_type = other DNA
tcatgagaacagcaaggggaacgtccgcccccatgatccagtcagctcctaccaggtccctcccccaacattgaggattacagttaaacatgagatttgggtggggacacagagcaaacc

SEQ ID NO: 6649 - DNA, 120 bp, synthetic construct
  misc_feature 1..120: note = Artificially Synthesized Probe
  source 1..120: mol_type = other DNA
ttgtatttttaatagagacagggtttcaccatgttggtcaggctggtctcaaactcctgacctcatgatccacccacctcggcctcccaaagtgctgggtccttctcacatttcaaaaca

SEQ ID NO: 6650 - DNA, 120 bp, synthetic construct
  misc_feature 1..120: note = Artificially Synthesized Probe
  source 1..120: mol_type = other DNA
cacctgctgggttaacaccatgtagaagccttggtagctgccagcttgcaccctttgggtcagtgtcctgagatgtatctggggccgtttcagccaccactggagctggagtggctgtga

SEQ ID NO: 6651 - DNA, 120 bp, synthetic construct
  misc_feature 1..120: note = Artificially Synthesized Probe
  source 1..120: mol_type = other DNA
ctttgttctcataaacaagcaggaccaagaccggaggcttgtggccttgccctggttgtagattgaggattttctattggttttaattttaagaaacatggacatttaagatagtgtttg

SEQ ID NO: 6652 - DNA, 120 bp, synthetic construct
  misc_feature 1..120: note = Artificially Synthesized Probe
  source 1..120: mol_type = other DNA
ttgcgtttgaaagttggacatgaaatctcctgagtgttcttgagtttgggcagatgtactgaggataagaagaacttccaaggagctgggtttttctggacttgagataatgtgattttt

SEQ ID NO: 6653 - DNA, 120 bp, synthetic construct
  misc_feature 1..120: note = Artificially Synthesized Probe
  source 1..120: mol_type = other DNA
ttctgcagtgcggggtctgagtccaagtagtttgctcactccagctaggtggatgttgtgagtggaaaggtcttgatttaggatacataaaacacaattttgttttaactaattcatttt

SEQ ID NO: 6654 - DNA, 120 bp, synthetic construct
  misc_feature 1..120: note = Artificially Synthesized Probe
  source 1..120: mol_type = other DNA
tggcctatcatttacatttgtattgtaaactaatttgtccttaatctggaggtttcataaaatcctagagtccgtcagccataaggagacttggcagcgctgcttgggggggctggtctc

SEQ ID NO: 6655 - DNA, 120 bp, synthetic construct
  misc_feature 1..120: note = Artificially Synthesized Probe
  source 1..120: mol_type = other DNA
gggaatacagcagtttctgtgaaaagtactttttctgaatgaaaaaaactcagttgaatggcattgttttccatgttggtccatctctgtcatgtctggctaatcgaagagtcagctgga

SEQ ID NO: 6656 - DNA, 120 bp, synthetic construct
  misc_feature 1..120: note = Artificially Synthesized Probe
  source 1..120: mol_type = other DNA
acttcggtgtcctgacctggtcgatgcaaaggggctgacaccaccgcttgggcaccgtctgtgcaaatatcagcacagtgaaaaaggcaattgaggtcctagtattaccatgaaaatagt

SEQ ID NO: 6657 - DNA, 120 bp, synthetic construct
  misc_feature 1..120: note = Artificially Synthesized Probe
  source 1..120: mol_type = other DNA
tgctgctgcgtcgggagaggcctggctaggagtgttttatgtgtttatgttcacttctccaaccagactctaagcttcttgaaggcaaggatttttgtgtaaaaaaaaaaaaaaaaattc

SEQ ID NO: 6658 - DNA, 120 bp, synthetic construct
  misc_feature 1..120: note = Artificially Synthesized Probe
  source 1..120: mol_type = other DNA
ttattagtccccgtcttctgactttctttgcttcacctaggtttatggtatagtttctaatctatcccattcctaaatagcacagttgcacagacaaacacaaaagctctgccagagaag

SEQ ID NO: 6659 - DNA, 120 bp, synthetic construct
  misc_feature 1..120: note = Artificially Synthesized Probe
  source 1..120: mol_type = other DNA
tctccctggtcacccctcctttgaccttcctagtggaacttgtttcctacgtgacaccagatgccacaagccccaggttattccattacgctttaggctttgcctgtgccctgttccctt

SEQ ID NO: 6660 - DNA, 120 bp, synthetic construct
  misc_feature 1..120: note = Artificially Synthesized Probe
  source 1..120: mol_type = other DNA
taggggtcccagtttattattttgcaagttgataatcagttgtcccagcaacatttatgaaaaagacctttcttccctcattgaattgttcttgcaccctcgttgaaaatcagttggctt

SEQ ID NO: 6661 - DNA, 120 bp, synthetic construct
  misc_feature 1..120: note = Artificially Synthesized Probe
  source 1..120: mol_type = other DNA
gggaatttctgcataaaagcttgtgtcatctttagggctcatttggtttcttccattccaatctgcattctttttatttctgtttcttccttatggccctacttcgaatctctagtacag

SEQ ID NO: 6662 - DNA, 120 bp, synthetic construct
  misc_feature 1..120: note = Artificially Synthesized Probe
  source 1..120: mol_type = other DNA
aattcagcagtctggttgtactcttgtgttttagttgctaattgagtctgtttttaagtaaatgattgtgtcagatgcaggtgggaacagtttgaccctcacattgttctttccctttgg

SEQ ID NO: 6663 - DNA, 120 bp, synthetic construct
  misc_feature 1..120: note = Artificially Synthesized Probe
  source 1..120: mol_type = other DNA
gctatgaaacaaaataattttctgtagacagttttatataagccagccaaagaaattgtgttggtggtggtgtcatagggggaggaaattgtgttggtgtcatggtggggggaggaaatt

SEQ ID NO: 6664 - DNA, 120 bp, synthetic construct
  misc_feature 1..120: note = Artificially Synthesized Probe
  source 1..120: mol_type = other DNA
ctggtaattttgtgtcttctcttgctgtttcctttttcccatctcttttgttttaataacggcaaatggactttggtgcattgaggagaagccagtaagtgtcagtggttatccgacagg

SEQ ID NO: 6665 - DNA, 120 bp, synthetic construct
  misc_feature 1..120: note = Artificially Synthesized Probe
  source 1..120: mol_type = other DNA
gatacaggttttcaaagtgttcatggtgcttttagtgtgctctctcagtttgatgtgaatttgggtgtaagttctaggtttgtgatcacattcccgtggaattttctctctctgacattg

SEQ ID NO: 6666 - DNA, 120 bp, synthetic construct
  misc_feature 1..120: note = Artificially Synthesized Probe
  source 1..120: mol_type = other DNA
aattcttctataatctctgttgtaaattctgattcctcaagtgggggttctcttggacttgacacctcctgtttgtgacttttttttcctctcagatttagctttttcccccaccagggt

SEQ ID NO: 6667 - DNA, 120 bp, synthetic construct
  misc_feature 1..120: note = Artificially Synthesized Probe
  source 1..120: mol_type = other DNA
ccccacaccagggtccctgacgtcaccctgtgtagccaccaaccagacctgaacctgtgccagcctctcatctgcagattccatttttataattttgtcatttcttttttttttaagaca

SEQ ID NO: 6668 - DNA, 120 bp, synthetic construct
  misc_feature 1..120: note = Artificially Synthesized Probe
  source 1..120: mol_type = other DNA
ttacgtacacgttttggatgtaagatttacttctgtgggtcaaacacacaggagcataatcactgggttctatggccttcgggtgtttcattgaacgaggaaattgctgaaccacactcc

SEQ ID NO: 6669 - DNA, 120 bp, synthetic construct
  misc_feature 1..120: note = Artificially Synthesized Probe
  source 1..120: mol_type = other DNA
gggctgaggttgaatttatttttgcctgtggatggcgccccagtcacagttttaaaactcacgttagaaactgtacatcattcgtctctctgaagttatgcttttattacagtcctactt

SEQ ID NO: 6670 - DNA, 120 bp, synthetic construct
  misc_feature 1..120: note = Artificially Synthesized Probe
  source 1..120: mol_type = other DNA
ctgggcctgagcccggggtgtgtctgtgtctgtggttctgggcctgagccgggggtgtgtctgtgtctgtggttctgggcctgagcccggggtgtgtctgtgtccgtggttctgggcctg

SEQ ID NO: 6671 - DNA, 120 bp, synthetic construct
  misc_feature 1..120: note = Artificially Synthesized Probe
  source 1..120: mol_type = other DNA
aaagtcattccagtgataaaacgaatgttgcaggctttaataaatccaatattctcataaaagtttaaacatgaaggtgttgtcacggctgcagtctcacgatcccgtggccagaaccaa

SEQ ID NO: 6672 - DNA, 120 bp, synthetic construct
  misc_feature 1..120: note = Artificially Synthesized Probe
  source 1..120: mol_type = other DNA
agttctaacagtggcttcactgcagtcaaacctggtgtgctggagaaagaccaagaaacgttatacagcagacgtgtggcattcgtgtggtagacttgtggcattcgtgtggcagacgtg

SEQ ID NO: 6673 - DNA, 120 bp, synthetic construct
  misc_feature 1..120: note = Artificially Synthesized Probe
  source 1..120: mol_type = other DNA
gccacatgttcacccatgtcatggacccaccgagcactttgagttacttatgaccttggttacttctccctggccttgactatagttgatgcaggtgccttgtcgtgtgtgtgtgtgtgt

SEQ ID NO: 6674 - DNA, 120 bp, synthetic construct
  misc_feature 1..120: note = Artificially Synthesized Probe
  source 1..120: mol_type = other DNA
ttgagttgtaagactttttcatgtattctggataataattcctgatggatttgcagatgttttctccattccataacctgctttttcactgttaactatgtcctttgatgcacataaatt

SEQ ID NO: 6675 - DNA, 120 bp, synthetic construct
  misc_feature 1..120: note = Artificially Synthesized Probe
  source 1..120: mol_type = other DNA
ttttagcttagtaagtgtattatctaagtcaggggttggaacatttttttctgcaaagaaccagctagaaaatgtttcaggttttgtggaccacatgtggtcactgttcctcctccctcc

SEQ ID NO: 6676 - DNA, 120 bp, synthetic construct
  misc_feature 1..120: note = Artificially Synthesized Probe
  source 1..120: mol_type = other DNA
ttgatttcctagcttgttaacattctcaagatgaagactgttttctttactagtatgtgactcacttggtctatgtggggagaagaccctggagttggaagctttcctggtttgtaggtg

SEQ ID NO: 6677 - DNA, 120 bp, synthetic construct
  misc_feature 1..120: note = Artificially Synthesized Probe
  source 1..120: mol_type = other DNA
aaaggacaaataaaatctggttctagagcttcgagcacctagttgttgtgtcttgctagtttcctttaatctgaaccattctcagccttctttgtctttctgaaccgtggtgttttgagt

SEQ ID NO: 6678 - DNA, 120 bp, synthetic construct
  misc_feature 1..120: note = Artificially Synthesized Probe
  source 1..120: mol_type = other DNA
gagattttcttttcctattttagctttattatatcgccatcttttaaaaagagctttctaaaaacaaactacccagcgtgtttagcaggctccagtttacccttccacagcccccttcct

SEQ ID NO: 6679 - DNA, 120 bp, synthetic construct
  misc_feature 1..120: note = Artificially Synthesized Probe
  source 1..120: mol_type = other DNA
cgtctagatgaggggaacacggtggtgccccaaaactcggagtcaccagcaactgcagagccccaaggggatagggtgggagagtgtgctatagctctcttgctgtcaccacccacagta

SEQ ID NO: 6680 - DNA, 120 bp, synthetic construct
  misc_feature 1..120: note = Artificially Synthesized Probe
  source 1..120: mol_type = other DNA
agcattccttctttttacagagtggactggcatctttgttagcagcttgttctgtatctttcccacgtgtagcggttcacaatttaaaaacaatcctcgcagtaccaaaaactgatttca

SEQ ID NO: 6681 - DNA, 120 bp, synthetic construct
  misc_feature 1..120: note = Artificially Synthesized Probe
  source 1..120: mol_type = other DNA
ctcctcacagagacagcctacaactataaaaaatgacaacaacaaaaacaccccaaaaccagtaacagcaacaaaacagtacaccctggaaaaggaggagaatcagcttttcagagtttc

SEQ ID NO: 6682 - DNA, 120 bp, synthetic construct
  misc_feature 1..120: note = Artificially Synthesized Probe
  source 1..120: mol_type = other DNA
aatcttgaaagcagatgagaaaagagactcatcacatacacgtttcctcagtgagatcattggcaggtttctcatcagaaactttgggggacagaatatatcaccggtatattaagagtg

SEQ ID NO: 6683 - DNA, 120 bp, synthetic construct
  misc_feature 1..120: note = Artificially Synthesized Probe
  source 1..120: mol_type = other DNA
caggtgtacctgctcaatattaaactttccagccaccagactcaggagacaaatctctttatcttttatggcaacactaaatggacaaaggcagatgcatcaagagaaaaaaaacagatg

SEQ ID NO: 6684 - DNA, 120 bp, synthetic construct
  misc_feature 1..120: note = Artificially Synthesized Probe
  source 1..120: mol_type = other DNA
tgagaggccacggtgagctggtcacttgagctcaggagttccagagcggcctgggcaacatagcaaaaccctgtctcttaaaaaaaatacaaaaattagccaggcatggtggcaagtgcc

SEQ ID NO: 6685 - DNA, 120 bp, synthetic construct
  misc_feature 1..120: note = Artificially Synthesized Probe
  source 1..120: mol_type = other DNA
atgagacttggtgtcttttgatgcacaaagctttctatctccttgtttccctgtttccctgcttcttactgctgcacttggctagtcgtaaagaaaagacactgttaacggaataaaaag

SEQ ID NO: 6686 - DNA, 120 bp, synthetic construct
  misc_feature 1..120: note = Artificially Synthesized Probe
  source 1..120: mol_type = other DNA
caaaagaacaaatgttgtaccattccacttaaaggaggtccctagagtcgtccaactgatggacacagaaagagtagaaggggctggagtctggggctggaggaagggaatggagagtta

SEQ ID NO: 6687 - DNA, 120 bp, synthetic construct
  misc_feature 1..120: note = Artificially Synthesized Probe
  source 1..120: mol_type = other DNA
gttcattgtccacacttgggtagaagctgcaggtccctactgggttcattgtccacacttgggtagaagctgcaggttgctgcagaagttgcagtgcttcccttgcgcttttttgctggt

SEQ ID NO: 6688 - DNA, 120 bp, synthetic construct
  misc_feature 1..120: note = Artificially Synthesized Probe
  source 1..120: mol_type = other DNA
aatgtgtagcaaattttatacctaacatctgtttcacacatacaacctgtcactcagtaagaggcccttagacaccattcttcacttgtttgcagcagacagacttcctgacatgattta

SEQ ID NO: 6689 - DNA, 120 bp, synthetic construct
  misc_feature 1..120: note = Artificially Synthesized Probe
  source 1..120: mol_type = other DNA
ctgattaaatccaggcctccttcatccccccacaaaatatctattcaaaatatcaagatgattatgatagtgagtttaggattcccagggctaccaagggatttctgttgcttgagcaca

SEQ ID NO: 6690 - DNA, 120 bp, synthetic construct
  misc_feature 1..120: note = Artificially Synthesized Probe
  source 1..120: mol_type = other DNA
gtgggcctgttgtgatggggtttgctggtgattttggtgatcaagttttgtaaactgtctcttacctttgaaaaacatttgaatggtgtttcttttcctttcttgtccccttttgacttt

SEQ ID NO: 6691 - DNA, 120 bp, synthetic construct
  misc_feature 1..120: note = Artificially Synthesized Probe
  source 1..120: mol_type = other DNA
tgtcttgggtgacagcacaaggaaagagcatcacaaagttggccgtggttctgaaaattaacagtctggtcacttctagaccctgataaaatcccctgtttacaattggcttagattttt

SEQ ID NO: 6692 - DNA, 120 bp, synthetic construct
  misc_feature 1..120: note = Artificially Synthesized Probe
  source 1..120: mol_type = other DNA
ggagttacattcatgctttttcagttctgaggggtcagttaggagtgacgcatttcataaggacgaacagtggaaagttaagaatcaagttgacatgcaaatctgtggtttattgttcga

SEQ ID NO: 6693 - DNA, 120 bp, synthetic construct
  misc_feature 1..120: note = Artificially Synthesized Probe
  source 1..120: mol_type = other DNA
accagtgtttgttcctctgtaagccgcttgctaaatagcccctgctcatttttcttctggattttgcatcttttgaatgtagtctgacgatcttttttgtcaacgaagagttgatctgtt

SEQ ID NO: 6694 - DNA, 120 bp, synthetic construct
  misc_feature 1..120: note = Artificially Synthesized Probe
  source 1..120: mol_type = other DNA
attaaatgactgtcaaggcacgaaaagaatcaagaaacaaaagcaaagccaagaagaaaatgtggtcagtgtaaaacagaacaagatggcaggaacagccttaactagatgggcactgac

SEQ ID NO: 6695 - DNA, 120 bp, synthetic construct
  misc_feature 1..120: note = Artificially Synthesized Probe
  source 1..120: mol_type = other DNA
accgtgtaggatggtcgtgtttgaagtgctaactctgtaggatggtcgtgtttgaagtgctaaccctgtaggatggtcatgtttgatttcgttctttctataaatggaattacacagaat

SEQ ID NO: 6696 - DNA, 120 bp, synthetic construct
  misc_feature 1..120: note = Artificially Synthesized Probe
  source 1..120: mol_type = other DNA
acttactttgccatttggatgccttttgtgaagtgcctattcacatcccaaacatttatctactgggctgtttgtcctttttgaaacatgttttgtaggggttctttggcctggaaacaa

SEQ ID NO: 6697 - DNA, 120 bp, synthetic construct
  misc_feature 1..120: note = Artificially Synthesized Probe
  source 1..120: mol_type = other DNA
gtttcattgccttgtcttgtttttaaaataagaaacctgtccagtgacatgaaaactcctgtcaaagccgactgaagtgtcggaatgcttatagaagggttagaacatttcgatggtcag

SEQ ID NO: 6698 - DNA, 120 bp, synthetic construct
  misc_feature 1..120: note = Artificially Synthesized Probe
  source 1..120: mol_type = other DNA
cagggagcctgtgacatgtataaaggtcgattgtaagactggggtattaaatcagtggtcaaggggtcatgaactttttaataactatggttgggccagttgactaatattttgggaaaa

SEQ ID NO: 6699 - DNA, 120 bp, synthetic construct
  misc_feature 1..120: note = Artificially Synthesized Probe
  source 1..120: mol_type = other DNA
ttgtggcctctgaaaatctttttatgattgttctgtgtgttttgtgatgtgtttattgaattatcccattcataagatacagtgagtacctgaaccctcactgatacagcacccagcggg

SEQ ID NO: 6700 - DNA, 120 bp, synthetic construct
  misc_feature 1..120: note = Artificially Synthesized Probe
  source 1..120: mol_type = other DNA
atttgagggtttccaggtagaatggacagaactttctggtggtgaggactggagggaagaggggttctgctccgtccctactgaagcctgttattccttgaggagggtccagatcggaat

SEQ ID NO: 6701 - DNA, 120 bp, synthetic construct
  misc_feature 1..120: note = Artificially Synthesized Probe
  source 1..120: mol_type = other DNA
tcaaataagatggatacatttcactttctgcttttgttttgttttatctctaaagggactgagctgagagagttagggaaaagcgcagggtgcctttaagcgtgtgacccagcaaaatgt

SEQ ID NO: 6702 - DNA, 120 bp, synthetic construct
  misc_feature 1..120: note = Artificially Synthesized Probe
  source 1..120: mol_type = other DNA
ggtttagggtgccaagggccgtttttgtttccagcttaaccgaggtgcacctggcatccaataaaatgcacagaaataaattacacaatttgacaagttttaacatgcttatgaccttga

SEQ ID NO: 6703 - DNA, 120 bp, synthetic construct
  misc_feature 1..120: note = Artificially Synthesized Probe
  source 1..120: mol_type = other DNA
ttagaagagcaaacgtttttaaggttttcttgaagtccaagttacgagttattttacttggggggttcatgcttttgtgctctaagaaatctttgacagacccaggtcacagaggttttg

SEQ ID NO: 6704 - DNA, 120 bp, synthetic construct
  misc_feature 1..120: note = Artificially Synthesized Probe
  source 1..120: mol_type = other DNA
gtggttgacttttcctgtctgtctaagatctaggtggagcatgtggcttgaatgaaaagactggttaccatacctctctgtgctagtgttcatttatttccagtcattgaaataagattg

SEQ ID NO: 6705 - DNA, 120 bp, synthetic construct
  misc_feature 1..120: note = Artificially Synthesized Probe
  source 1..120: mol_type = other DNA
aaaataatatgcgggagagaaaatgatagtgaaactggaatggtctaaaccatagtgggtttcaacttgtggttttgaatggattaattagaagtagtccatttcctggggccccagcct

SEQ ID NO: 6706 - DNA, 120 bp, synthetic construct
  misc_feature 1..120: note = Artificially Synthesized Probe
  source 1..120: mol_type = other DNA
atgacaaatagctagctttttagggttttgaacactgagggaggtttgagtcacctatgtaattcacctaggaaatcacatctttagcttaagatagaaatcttaggctagtccggctgg

SEQ ID NO: 6707 - DNA, 120 bp, synthetic construct
  misc_feature 1..120: note = Artificially Synthesized Probe
  source 1..120: mol_type = other DNA
ttgtgtgacattttgtaaactgcctcccagaattgatttccctgtgtttgatcagcgccgattggtcagtcagcgattggcctgttcagtcatgctcttgatgtagatcatcagtgtgta

SEQ ID NO: 6708 - DNA, 120 bp, synthetic construct
  misc_feature 1..120: note = Artificially Synthesized Probe
  source 1..120: mol_type = other DNA
gttcatgacgcagtttcctcgtttgttctgtccctgctggaaagtccctagttctagagattggttggctgcttctgaatggtagagcttaagttttatttttctttactataggcattt

SEQ ID NO: 6709 - DNA, 120 bp, synthetic construct
  misc_feature 1..120: note = Artificially Synthesized Probe
  source 1..120: mol_type = other DNA
gagaggtaatagtgagtatttgagacaatgattcatcttctatttctgctttgactgtttaacaaaaaagaaaacgtgaaatgcgatctggcttcctttgggagcggcacccactgtagc

SEQ ID NO: 6710 - DNA, 120 bp, synthetic construct
  misc_feature 1..120: note = Artificially Synthesized Probe
  source 1..120: mol_type = other DNA
gttgtatttcttttttatgatcatggttttgtcaaggtttttcctaccttgctataaacaaagtgagtagattgaggcaggatagtcacaccaaggtgagtccagaactgcccagaactg

SEQ ID NO: 6711 - DNA, 120 bp, synthetic construct
  misc_feature 1..120: note = Artificially Synthesized Probe
  source 1..120: mol_type = other DNA
tggtcttattggccagcggatccatcttcagctcgattattgcgtcttagctgcacattgtggaagtaagtgagctgtgaacaggacaaccatccgtgtagcaatgctgggcattattcc

SEQ ID NO: 6712 - DNA, 120 bp, synthetic construct
  misc_feature 1..120: note = Artificially Synthesized Probe
  source 1..120: mol_type = other DNA
ttcttcccatttgccacgctgttggctaaaagaatctggattccagattctggacttagctcataactttcttgtgttgtttaagtcatttgccttagttcctatagcctgaaagttaga

SEQ ID NO: 6713 - DNA, 120 bp, synthetic construct
  misc_feature 1..120: note = Artificially Synthesized Probe
  source 1..120: mol_type = other DNA
aaaatgaagggccatgttgtctggctgtctcactttctctgatattggcagctgctgatgcttaacacctacatttgttgtttattcattggaggtttcaaaatggtgctgattttatca

SEQ ID NO: 6714 - DNA, 120 bp, synthetic construct
  misc_feature 1..120: note = Artificially Synthesized Probe
  source 1..120: mol_type = other DNA
ttttcgagacaggttctcacttggacccccaggctggaatgcagtggctctcattgcagcctccacctttggggctcaggtgattctcccagctgagcctcccgagtggctgggactaca

SEQ ID NO: 6715 - DNA, 120 bp, synthetic construct
  misc_feature 1..120: note = Artificially Synthesized Probe
  source 1..120: mol_type = other DNA
ttcagaccagcaaaatcacccagtgacacatttcccagaacacaccgtgttgttacgtgagacatgactgcatcacggtccctttgttaagttgatatatttagattatctccatttaat

SEQ ID NO: 6716 - DNA, 120 bp, synthetic construct
  misc_feature 1..120: note = Artificially Synthesized Probe
  source 1..120: mol_type = other DNA
tttatcacagtctacctccaacaaatcattataccacataacatacagtgtaagaatcttacagtaggtcctgtcttgtatcttgtttctgcgttttaattttatatatgctaaaactct

SEQ ID NO: 6717 - DNA, 120 bp, synthetic construct
  misc_feature 1..120: note = Artificially Synthesized Probe
  source 1..120: mol_type = other DNA
gagtgtggcttgcatggtttctaatgagacattggctgaacttgcctctgttcctttgcatactatatgtcatttttctctgtctgccaccaatatttgctttggttttcagcagtttga

SEQ ID NO: 6718 - DNA, 120 bp, synthetic construct
  misc_feature 1..120: note = Artificially Synthesized Probe
  source 1..120: mol_type = other DNA
ggaggcactcacagctgcctggattgcctttcctttcttgagtgagtttgttttgtttgttttccttagagctaatcattgcctccctattcatttttttgttttctgtgtacttgttat

SEQ ID NO: 6719 - DNA, 120 bp, synthetic construct
  misc_feature 1..120: note = Artificially Synthesized Probe
  source 1..120: mol_type = other DNA
gcagagcctgtgggcactgggtattaaattgcgctgagaaagtgctacctgtgttccgcttgataatggttctaaggttatatgaagtatgatttgttagcaatgcatatggagttattt

SEQ ID NO: 6720 - DNA, 120 bp, synthetic construct
  misc_feature 1..120: note = Artificially Synthesized Probe
  source 1..120: mol_type = other DNA
ccaccttgttaaaggattccttgttttatctcttttttcccaaccctaactggatcccattgtcatttatttgatatatccttcccagaacatctccttccttacattctcctgccgttc

SEQ ID NO: 6721 - DNA, 120 bp, synthetic construct
  misc_feature 1..120: note = Artificially Synthesized Probe
  source 1..120: mol_type = other DNA
gggggcatttgtagttcttctttagtgaaatgccactcaattatttgcttatttttgggggggctacttcttgttttcttattggctatcagagaactttccgtagcaaacctgtaaggc

SEQ ID NO: 6722 - DNA, 120 bp, synthetic construct
  misc_feature 1..120: note = Artificially Synthesized Probe
  source 1..120: mol_type = other DNA
tgctcatgtgccgctgcctcctgcagtttgtgcagatgatgggcgtttccttctctgggctccctgtttgtcccccgtgctgaggcgtgtagcaggtgctcgataagtgcttgcaaagcc

SEQ ID NO: 6723 - DNA, 120 bp, synthetic construct
  misc_feature 1..120: note = Artificially Synthesized Probe
  source 1..120: mol_type = other DNA
tttgggagactttctttggacttcacaccttgcatgtcctccccatcttcaaacatcctttttttggttctgctacatctgtttatctctggctttctgcaagaaaatgctgttcttacg

SEQ ID NO: 6724 - DNA, 120 bp, synthetic construct
  misc_feature 1..120: note = Artificially Synthesized Probe
  source 1..120: mol_type = other DNA
ctctccagtcgtccacctgaaaaagtttcagttgttaactcaacgttattgcttcctgctgttttttccagaagtctctgagctgatgctgatgcttatggtgatttctgacatttaaga

SEQ ID NO: 6725 - DNA, 120 bp, synthetic construct
  misc_feature 1..120: note = Artificially Synthesized Probe
  source 1..120: mol_type = other DNA
atagattcagcttgaagctcattcatgagagtgtatttgaacacgctgcccagaagtctaggaaaagttgccctagttttctcaggaaatttggttctgaatcctgaaccgttaaatcca

SEQ ID NO: 6726 - DNA, 120 bp, synthetic construct
  misc_feature 1..120: note = Artificially Synthesized Probe
  source 1..120: mol_type = other DNA
tcgctgaccagaccccagactgttcctgaccccactctctcccccatcccttggtgattgtgttagtctgcttttgtgtcaatataaagaaatgcccagggctggatgatttatatagaa

SEQ ID NO: 6727 - DNA, 120 bp, synthetic construct
  misc_feature 1..120: note = Artificially Synthesized Probe
  source 1..120: mol_type = other DNA
ttggttttctgtttctgtgtctccgagttctctgatgagtgagaataggttgcccactggtgttgaggctttttatggtgttcatatccagttacgcaagatattagaactattctctac

SEQ ID NO: 6728 - DNA, 120 bp, synthetic construct
  misc_feature 1..120: note = Artificially Synthesized Probe
  source 1..120: mol_type = other DNA
agatgtgtggtgatgacggcatctcactgagatgtgtggtgatgacgccgagacgtgtggtgatgacgccgagacgtgtggtgatgacgccgggatgtgtggtgatgacgctgggatgtg

SEQ ID NO: 6729 - DNA, 120 bp, synthetic construct
  misc_feature 1..120: note = Artificially Synthesized Probe
  source 1..120: mol_type = other DNA
agtgataatttggtctctgagctcatagctttaggcttgatttctctgacgttcatcgtctctgggttgaaaaggatgattaagaagccctttactggacagtacgtcaagtaaaaagaa

SEQ ID NO: 6730 - DNA, 120 bp, synthetic construct
  misc_feature 1..120: note = Artificially Synthesized Probe
  source 1..120: mol_type = other DNA
ctggtgcagtctgacttctgatcctttgtgtgtgacctattatttctggagactttaggaactttccttgaaccccactggtctgaagttgtacctcattgtaatgtgggtctttttaga

SEQ ID NO: 6731 - DNA, 120 bp, synthetic construct
  misc_feature 1..120: note = Artificially Synthesized Probe
  source 1..120: mol_type = other DNA
gcctcagtctgtcccccgtttccggagtcataactgatggtgttttgttactatttgcctggaatgatttttccctccttttattctgaccttttccctcgtttttggatatatgtattt

SEQ ID NO: 6732 - DNA, 120 bp, synthetic construct
  misc_feature 1..120: note = Artificially Synthesized Probe
  source 1..120: mol_type = other DNA
ggtcgttcttgcgtcttttgaattggttttattttgattttgccatttctcttctctctgttagttacaaactttccagtttttgccccagtggttcctgtcagtctcacatgcagactt

SEQ ID NO: 6733 - DNA, 120 bp, synthetic construct
  misc_feature 1..120: note = Artificially Synthesized Probe
  source 1..120: mol_type = other DNA
aaaattaaaacccaaaaacatatggttgcatcatgcatacagaaaggtccttaaaatgtaaacatctggttaacaaatcatcctactctggccctgacattcgcacccccgtgagacaca

SEQ ID NO: 6734 - DNA, 120 bp, synthetic construct
  misc_feature 1..120: note = Artificially Synthesized Probe
  source 1..120: mol_type = other DNA
tccctcgtgttgcaagatttcatgccgtgtctgcagtttctggagagcactgagcgaggtgccacacgctgccatccgaactcaccacagacactcatgttttcatcggtctgctcttct

SEQ ID NO: 6735 - DNA, 120 bp, synthetic construct
  misc_feature 1..120: note = Artificially Synthesized Probe
  source 1..120: mol_type = other DNA
tcgtagatgcttttgttgggtgacacaccctggaagagggcgtctagatcccagccctgggggccctcaggtttcaggggccaccccccagtaggcagagctggttgacggtggacattg

SEQ ID NO: 6736 - DNA, 120 bp, synthetic construct
  misc_feature 1..120: note = Artificially Synthesized Probe
  source 1..120: mol_type = other DNA
tggcaggtctgtttggaaatgccgccgcgcgggtgtcgctctgactcttccttttgctccgctgcttccctccactcttagagctttcttggactttgtctcagtgccctgtgttctcat

SEQ ID NO: 6737 - DNA, 120 bp, synthetic construct
  misc_feature 1..120: note = Artificially Synthesized Probe
  source 1..120: mol_type = other DNA
ccgtgcccggcctctccacccccttagccgttatgagttagcctcattttccatatagaccattctagggctgtttaaacattccttatttaattgtgttacttttggtttttaattact

SEQ ID NO: 6738 - DNA, 120 bp, synthetic construct
  misc_feature 1..120: note = Artificially Synthesized Probe
  source 1..120: mol_type = other DNA
agaataattatgtctttgaatacgtgtttagaaaactcagacattgttggtcactgaaacagtgcagctctctttttttgagtgtggaagcttgtaagtcacttctccccaggcggtggc

SEQ ID NO: 6739 - DNA, 120 bp, synthetic construct
  misc_feature 1..120: note = Artificially Synthesized Probe
  source 1..120: mol_type = other DNA
accatgcccagcgctaacagcttttttttttacagatacagaaaacttctaaagtttatacggagtctcaagagacccagagaagccaaacaattttgtgaaagaacagagttggagaac

SEQ ID NO: 6740 - DNA, 120 bp, synthetic construct
  misc_feature 1..120: note = Artificially Synthesized Probe
  source 1..120: mol_type = other DNA
gatttcttggatatgatacaaaagcatgatcaaagaaatagacaaacttgattaaaattaaaaacgtttggccctgggaaatgatgtgcagccggaaagacagccacccccttgcctgtc

SEQ ID NO: 6741 - DNA, 120 bp, synthetic construct
  misc_feature 1..120: note = Artificially Synthesized Probe
  source 1..120: mol_type = other DNA
gatcgctaagcataggattacgctgtgatctgtagcaactccactcctaagtgtatgccacaggcatgcaaaccaggaacacaaagagatcttcatacaacagtgtttactgcagcattg

SEQ ID NO: 6742 - DNA, 120 bp, synthetic construct
  misc_feature 1..120: note = Artificially Synthesized Probe
  source 1..120: mol_type = other DNA
tcatttgaaaccagggaggcagtttttattgtgctgaaagaagcaaagccaaaaaaatgtgaacccagaatcctacatccagtaaacgtacccttcagcgaatgatggtgaaatcaaaca

SEQ ID NO: 6743 - DNA, 120 bp, synthetic construct
  misc_feature 1..120: note = Artificially Synthesized Probe
  source 1..120: mol_type = other DNA
aactacccaaaggagggcagtgtgaaagtggaatcacactgttgtaaaggtattttattgtgggaggtggtacagtattaatctaagaagaccagtaaagacgaatattgtaatccctgg

SEQ ID NO: 6744 - DNA, 120 bp, synthetic construct
  misc_feature 1..120: note = Artificially Synthesized Probe
  source 1..120: mol_type = other DNA
aaataggcaaagaacataaacgtgcagttcccagaaaaagaaatacatgcatatgaccaacaagcagatgaaaacacaggactgagggaccatcttacagtcactgaattccatacaacg

SEQ ID NO: 6745 - DNA, 120 bp, synthetic construct
  misc_feature 1..120: note = Artificially Synthesized Probe
  source 1..120: mol_type = other DNA
acttgaaaattaaggcagacctttaacaaccatgcatcattttgtattcataataaaattacaattctgaacactagccgtgtgggaaccgggtgtgctggctttccttgaggaaggtga

SEQ ID NO: 6746 - DNA, 120 bp, synthetic construct
  misc_feature 1..120: note = Artificially Synthesized Probe
  source 1..120: mol_type = other DNA
ggcgctctttgtgttcccactttttgccatctattattttaagttctgtggtacacggacaactattgctgaatcattgacggtgtcttcactgtgccaggcgactgaccactcatgggg

SEQ ID NO: 6747 - DNA, 120 bp, synthetic construct
  misc_feature 1..120: note = Artificially Synthesized Probe
  source 1..120: mol_type = other DNA
agatgtagctttaatcatgaaggctgctgtgtctgtgacagtaggatgtgcaggctgactgtccaccgcaggggagatgtagctttaatcgtggaggctgctgtgtctgtgacattggga

SEQ ID NO: 6748 - DNA, 120 bp, synthetic construct
  misc_feature 1..120: note = Artificially Synthesized Probe
  source 1..120: mol_type = other DNA
tggcaggatgacggaggctggacacccatgatctgggccacagagtacaagcacgtggacctcgtgaagctgctgctgtccaagggctctgacatcaacatccgagacaacgtaagttcg

SEQ ID NO: 6749 - DNA, 120 bp, synthetic construct
  misc_feature 1..120: note = Artificially Synthesized Probe
  source 1..120: mol_type = other DNA
cctggcccctggctctctctttgaaacaaaggaaagaaaagtgaacattatcataccacggttttctaggatgtgatttaagatgcttcagtgacaattagttttgtaaggcccatttgt

SEQ ID NO: 6750 - DNA, 120 bp, synthetic construct
  misc_feature 1..120: note = Artificially Synthesized Probe
  source 1..120: mol_type = other DNA
aataagaaagaagatttgacacagaaaaagaagatttctaaaagcacactattaaatctccaatgtgctgaagtctggtgtctgaggagggagggctgacacttcctctcagagcttgag

SEQ ID NO: 6751 - DNA, 120 bp, synthetic construct
  misc_feature 1..120: note = Artificially Synthesized Probe
  source 1..120: mol_type = other DNA
tggttactaagagagatgctgtgaatactcatgccttcatttttcttgattaaacccctgggagtagaatggttagaacatatgacaggtgtctaggcttaacattttcagagactgcca

SEQ ID NO: 6752 - DNA, 120 bp, synthetic construct
  misc_feature 1..120: note = Artificially Synthesized Probe
  source 1..120: mol_type = other DNA
gtgccatttgttgagaaaaccattctttctacatagaattgactctgtaccattgccaaaagccagttgtctgcatttgtgagtcagttacccatgtgttattccacatgtgtcagtcat

SEQ ID NO: 6753 - DNA, 120 bp, synthetic construct
  misc_feature 1..120: note = Artificially Synthesized Probe
  source 1..120: mol_type = other DNA
gatgcattgatctgcatatctgcctttaggcaagtactgtcctttcttgactgatgtagctttacagtaggtcttgcaaaatcatttttctcctcccaaacttgatactgctattctcct

SEQ ID NO: 6754 - DNA, 120 bp, synthetic construct
  misc_feature 1..120: note = Artificially Synthesized Probe
  source 1..120: mol_type = other DNA
gtccttattttgctttcatctttgaaagatattcttagaattctggatgcgtagttatttcttccaatgctttaaatggcggtttccctgggtcctcacctgcagtgtttgcagtgagaa

SEQ ID NO: 6755 - DNA, 120 bp, synthetic construct
  misc_feature 1..120: note = Artificially Synthesized Probe
  source 1..120: mol_type = other DNA
tgggttttgcaaaacttgtatggtgctaaggactcttcttcgtgtgaatgttcttgaactttgttctggaactcagtcacttgaaagcagtcagatcatgttggattttgcttttcaggt

SEQ ID NO: 6756 - DNA, 120 bp, synthetic construct
  misc_feature 1..120: note = Artificially Synthesized Probe
  source 1..120: mol_type = other DNA
ttataaaatcataaatcattctgataaaggaaaaagaaaagaggcccctaagcaagcagccttttgttcaaggagctctgaaatgtatggaggagggaagccagaaacaaagagcagagg

SEQ ID NO: 6757 - DNA, 120 bp, synthetic construct
  misc_feature 1..120: note = Artificially Synthesized Probe
  source 1..120: mol_type = other DNA
acacacttcaggaacgtgaaacgctcacgtgcttttaatccagcaatcctgcctctgaggatgcatccttgagaaataatgtagaaaatgaaaagcactaaaatatttgctggcattgta

SEQ ID NO: 6758 - DNA, 120 bp, synthetic construct
  misc_feature 1..120: note = Artificially Synthesized Probe
  source 1..120: mol_type = other DNA
cgctgttttatccctggggcgatagagttagggatacttcattgttctgatttatattcttggctgcctggcagagttgaacattttcttatgtttaccgttcatctttttcttacctac

SEQ ID NO: 6759 - DNA, 120 bp, synthetic construct
  misc_feature 1..120: note = Artificially Synthesized Probe
  source 1..120: mol_type = other DNA
agagaagtgtctttcccagtccacgtttgagatcagctgtggtttatttctgggttagggaggattgtcatgaaaaaattcccaagttggagtctcagacctgatactcctcacatggct

SEQ ID NO: 6760 - DNA, 120 bp, synthetic construct
  misc_feature 1..120: note = Artificially Synthesized Probe
  source 1..120: mol_type = other DNA
tcccttcttatccttgagggtaaatttgaatgaaaaatccaagaaaaatcaaatgccgccctggattttacactcttcctgctaagaaaacagcctgctgactttgacagtgaatgtggg

SEQ ID NO: 6761 - DNA, 120 bp, synthetic construct
  misc_feature 1..120: note = Artificially Synthesized Probe
  source 1..120: mol_type = other DNA
gaagacctcattctctttgtagttgcctcccgtgaaagagctggaaggcagataaaggttctgtcaggcccagccctgggccctctcattgctcttccaaggcttcttaccgacccaaag

SEQ ID NO: 6762 - DNA, 120 bp, synthetic construct
  misc_feature 1..120: note = Artificially Synthesized Probe
  source 1..120: mol_type = other DNA
agaagcacttaccagaatcagggttaacagaactggaagacgtagttgtgactgggaggggaaatggaaggcctgtgcctgcacgtctgaccccccggcgcctctcttctcagtactgcg

SEQ ID NO: 6763 - DNA, 120 bp, synthetic construct
  misc_feature 1..120: note = Artificially Synthesized Probe
  source 1..120: mol_type = other DNA
tacacatggagtttttccctaggtgggtgttcaagtttggccagaaaccatcgtttttatgtccgtttaagccacactgggcacttagtagaaatgggttgatgtcagttcaattaaaga

SEQ ID NO: 6764 - DNA, 120 bp, synthetic construct
  misc_feature 1..120: note = Artificially Synthesized Probe
  source 1..120: mol_type = other DNA
tctggtcttgagcatttcctccgcaaatgtgcccgagattggagaagtcaaagctcctctgagtcataagggaaagttatgcacacttaaatttagctgaacactcatttttatagtatt

SEQ ID NO: 6765 - DNA, 120 bp, synthetic construct
  misc_feature 1..120: note = Artificially Synthesized Probe
  source 1..120: mol_type = other DNA
cttcggatacagaaccagttttcttcctcatttcagtgacgtggcaccagctggcttttgctgaccattgtggcaacaggctgaggctgtggcctgggttcaccactactctctattttt

SEQ ID NO: 6766 - DNA, 120 bp, synthetic construct
  misc_feature 1..120: note = Artificially Synthesized Probe
  source 1..120: mol_type = other DNA
tgagacccaccactccagtcctccaaaccacaactgagaatcttgggttggggcttggcaacccctgagactgcacagaggtgaaggacgggcgccgtgtaccaagactgtagagaggct

SEQ ID NO: 6767 - DNA, 120 bp, synthetic construct
  misc_feature 1..120: note = Artificially Synthesized Probe
  source 1..120: mol_type = other DNA
ctttactgtagcctcgttcccatcattgctctggaattcatccattgtctattttaaaacctcttgaaacttgcagtaactccaagccagtggggaaataaaggtttttctcatctcaag

SEQ ID NO: 6768 - DNA, 120 bp, synthetic construct
  misc_feature 1..120: note = Artificially Synthesized Probe
  source 1..120: mol_type = other DNA
ttttgaaaacttgaatatttcccagaaacggtcatgtttgctttcacgtggcttccatgtgtaggttgacagccgttctgtgtgtgatgtaagatcagactcaaggtttatttttttccc

SEQ ID NO: 6769 - DNA, 120 bp, synthetic construct
  misc_feature 1..120: note = Artificially Synthesized Probe
  source 1..120: mol_type = other DNA
ctgtgcccagcttcaccatagagtttgtgtcttgttctttttggtcttcatgtaagttctgaagtcagcttaacaagttctacagaagctcctgtagggatttgattgggattgtattag

SEQ ID NO: 6770 - DNA, 120 bp, synthetic construct
  misc_feature 1..120: note = Artificially Synthesized Probe
  source 1..120: mol_type = other DNA
ccacctcagtgagtgagagctccaaacactgtgacttagatttgctgtcctgatgcttgatgaagagcctcttttcatatgtgtgttgccatccttttacttcttttgtgaagtaatttt

SEQ ID NO: 6771 - DNA, 120 bp, synthetic construct
  misc_feature 1..120: note = Artificially Synthesized Probe
  source 1..120: mol_type = other DNA
gcttgtcttcttgagttgtaggagctctttccatcttctgactctgatgtacatataaatatgtgtgtgatgtgaatattttcttagtctgtgccttgcctcctcactttcttaacagtg

SEQ ID NO: 6772 - DNA, 120 bp, synthetic construct
  misc_feature 1..120: note = Artificially Synthesized Probe
  source 1..120: mol_type = other DNA
gaccctgtgtctgtaggtggcccagctgtctttgagtttgatattgagtttctctcagcagagccttgtagcttttagtatgtagatcttacactgtgttttgttaaatgtattcctaag

SEQ ID NO: 6773 - DNA, 120 bp, synthetic construct
  misc_feature 1..120: note = Artificially Synthesized Probe
  source 1..120: mol_type = other DNA
atcacagtcagaagcaggagcccttagcatctcagaaaccctgatgctcttgtatttgaaggaggcatatttttcctcttgttgcttgatggatagaaatagagtaggtttttaaaatta

SEQ ID NO: 6774 - DNA, 120 bp, synthetic construct
  misc_feature 1..120: note = Artificially Synthesized Probe
  source 1..120: mol_type = other DNA
aaactgtctgtgtggaagggccatttccatattcccagttcactgtgggccaatccttttgtaaaataaggactgcaacttaccaggctgcttttaagttgtcacattcaacaggcacaa

SEQ ID NO: 6775 - DNA, 120 bp, synthetic construct
  misc_feature 1..120: note = Artificially Synthesized Probe
  source 1..120: mol_type = other DNA
aaacctaggtggaaggttcttcatcagagaaaccttggaagagcagcacaggagggtacatttaaagccctcagcggtgtccgttcctttgagggttctgggatctgaagcctctgaacc

SEQ ID NO: 6776 - DNA, 120 bp, synthetic construct
  misc_feature 1..120: note = Artificially Synthesized Probe
  source 1..120: mol_type = other DNA
gtgcagagctggaaggttctcagggtgggaggagggttatttttaacgcactgcactagagcatctctaaggccggtggttctggacagaaaaaccacaaaaatgagaagaccaggaata

SEQ ID NO: 6777 - DNA, 120 bp, synthetic construct
  misc_feature 1..120: note = Artificially Synthesized Probe
  source 1..120: mol_type = other DNA
gctttatttgtttcatccttttttgctgatacagtgtaaagttagttacaaatgtgacattttacccccagtgacgtcagagtgtgcctgtgaatagtgctgcctgacgagattgagatt

SEQ ID NO: 6778 - DNA, 120 bp, synthetic construct
  misc_feature 1..120: note = Artificially Synthesized Probe
  source 1..120: mol_type = other DNA
cttacaataaaaattttggtttctaaaatctttagtttcaaaatagcactccagatattaccgataacagtaagcaccagtccagctcccggatggcatctgcgcttctttgcagcgtct

SEQ ID NO: 6779 - DNA, 120 bp, synthetic construct
  misc_feature 1..120: note = Artificially Synthesized Probe
  source 1..120: mol_type = other DNA
gattctttttctgtttctccgctgagacttctcatttctctgatattttcatgccttgaaatctttctttgttcttcattgaggacagccttaggagctgccttgaaaatacgtgtctgt

SEQ ID NO: 6780 - DNA, 120 bp, synthetic construct
  misc_feature 1..120: note = Artificially Synthesized Probe
  source 1..120: mol_type = other DNA
ttgcctatctgccttactccagccgtccttctctggactgttgtctttatctggttctggtcgggcagagatttgtgtcacagactttgacaccccacccatcttagaagctcggagcag

SEQ ID NO: 6781 - DNA, 120 bp, synthetic construct
  misc_feature 1..120: note = Artificially Synthesized Probe
  source 1..120: mol_type = other DNA
ctccaagccctgggtctccagagagaattgcttttaaaggggttgcgtggttaggtcaggcccacccacctcgtccccctctctatggtcaattcagaatccatcatcacaggccagtgc

SEQ ID NO: 6782 - DNA, 120 bp, synthetic construct
  misc_feature 1..120: note = Artificially Synthesized Probe
  source 1..120: mol_type = other DNA
tcctgggcttgtctcgggtttatgctagtggttttcctgtagttctaaaaactgcgacctgggatgcggcacggcagatcggggtgaggaagctttggccttgccttaatttatctggct

SEQ ID NO: 6783 - DNA, 120 bp, synthetic construct
  misc_feature 1..120: note = Artificially Synthesized Probe
  source 1..120: mol_type = other DNA
gcagcccccgccggttccgttgacgctggcaccttctgttgattttttaagccacatgctatgatgaataaactgatttattttctaccattactgaacattaggacaaacacaaaataa

SEQ ID NO: 6784 - DNA, 120 bp, synthetic construct
  misc_feature 1..120: note = Artificially Synthesized Probe
  source 1..120: mol_type = other DNA
agggcttttcgtgtaacctcagtaacacgctcagacactccacggtttaatacacagaattcacgcaggtgtttttgatgcttttccagcacagtcataactgccctgcactttgtgaat

SEQ ID NO: 6785 - DNA, 120 bp, synthetic construct
  misc_feature 1..120: note = Artificially Synthesized Probe
  source 1..120: mol_type = other DNA
gtgtacaaacaggtattggttgaattaagccaacagcaaactttttgggtgtcacgaaggcccaccagggtggccccacaactgggccctgtcacagaaagttccagccgtttaaaatga

SEQ ID NO: 6786 - DNA, 120 bp, synthetic construct
  misc_feature 1..120: note = Artificially Synthesized Probe
  source 1..120: mol_type = other DNA
gcccccccccgttgcacttcctgcttttctaattgtccagagggtgactctcactgcagtgttattttgcagtttcattgttgataaaattgagcatctcttcttcttatatttattaca

SEQ ID NO: 6787 - DNA, 120 bp, synthetic construct
  misc_feature 1..120: note = Artificially Synthesized Probe
  source 1..120: mol_type = other DNA
catctgatttctttcactgtaaattagtttcgcctgttctaggagtttctataacaggaaccatgcagtgggttactttttttggcctagcttctgctcagcggcttttgcatttatctg

SEQ ID NO: 6788 - DNA, 120 bp, synthetic construct
  misc_feature 1..120: note = Artificially Synthesized Probe
  source 1..120: mol_type = other DNA
aaataatgatttgtggtggcactggtcctccagccgtgtccttattcctaaagatgactctttggctatttggctacactaggtccttcctatctttatataaattttagaatcggcatg

SEQ ID NO: 6789 - DNA, 120 bp, synthetic construct
  misc_feature 1..120: note = Artificially Synthesized Probe
  source 1..120: mol_type = other DNA
ctccatgccaccgtccccccgtatcctccatgccaccgtccccccgtatcctccatgccaccgtccctccgtatcctccacgccaccgtccccctgtatcctccacgccaccgtccccct

SEQ ID NO: 6790 - DNA, 120 bp, synthetic construct
  misc_feature 1..120: note = Artificially Synthesized Probe
  source 1..120: mol_type = other DNA
acaccaatctgttcctgtcagtatagattaacatttctgttctggaatttcctataattgggtccatggagtgcgcacttcattgcctctggcttctttgacccaacatgtattttattt

SEQ ID NO: 6791 - DNA, 120 bp, synthetic construct
  misc_feature 1..120: note = Artificially Synthesized Probe
  source 1..120: mol_type = other DNA
ttacagaacagctgcaagtacaatacagaaatcttttttctctgatctgctggagaataaattcctgacttcgtaccccatcatccccaaatacttccatgaatatttcctacacacagg

SEQ ID NO: 6792 - DNA, 120 bp, synthetic construct
  misc_feature 1..120: note = Artificially Synthesized Probe
  source 1..120: mol_type = other DNA
aggtatagctaggcgagattacatggtttcctgcctagttgaagggcttaaaaaggcagcttacaaaactgttaattatgacaaacttaaagaaactacccaaggtaaagacgaaaaccc

SEQ ID NO: 6793 - DNA, 120 bp, synthetic construct
  misc_feature 1..120: note = Artificially Synthesized Probe
  source 1..120: mol_type = other DNA
cgcccccactggaggttgcattgtcccccaggattcctcctaagccgtgccctgtctgtgcgcgcccccactggaggttgcattgtcccccaggattcctcctaagccgtgccctgtctg

SEQ ID NO: 6794 - DNA, 120 bp, synthetic construct
  misc_feature 1..120: note = Artificially Synthesized Probe
  source 1..120: mol_type = other DNA
ggagcccaaacccaacgttctttggccgactccctcccagatctcctcggcttagcagctgaagactgacgctgcctgatcgcatcccctaggaagccccctggatcatcacggacgccg

SEQ ID NO: 6795 - DNA, 120 bp, synthetic construct
  misc_feature 1..120: note = Artificially Synthesized Probe
  source 1..120: mol_type = other DNA
tctttctcatgatttactttctttccacccctctgcttctcaccttattcaatatattgatgaccttcttctttgtagcccctcctttgaatcttctcaatgagacaccctcctgctcct

SEQ ID NO: 6796 - DNA, 120 bp, synthetic construct
  misc_feature 1..120: note = Artificially Synthesized Probe
  source 1..120: mol_type = other DNA
ggctatgctatagtatcttccacatctatcattgaggctatcgctctaccccccaactacctctcagcaagccaaactcgttgccttaactcaagccctcacttttgcaaaggaattatg

SEQ ID NO: 6797 - DNA, 120 bp, synthetic construct
  misc_feature 1..120: note = Artificially Synthesized Probe
  source 1..120: mol_type = other DNA
tcataccccttaccgtcctcaatcttcaggaaaggtagaatggattaatggtcttttaaaaacacacctcaccaagctcagcctccaacttaaaaaagaggactctgtcaaggatagagc

SEQ ID NO: 6798 - DNA, 120 bp, synthetic construct
  misc_feature 1..120: note = Artificially Synthesized Probe
  source 1..120: mol_type = other DNA
cctgggataatagttggtgtgtctgtttctccttacagctctatcagcttcttcttcacatatttcgacatgttggtgttaggcacacacatgtgcaggattgttatgtcttctttgaga

SEQ ID NO: 6799 - DNA, 120 bp, synthetic construct
  misc_feature 1..120: note = Artificially Synthesized Probe
  source 1..120: mol_type = other DNA
ctactatgtttctatgtttgtaactctttctatttattgtagttgtcctttgtattgtccccctttttctgcctttctgggtgttgttgccgttgttttagacacaggctcttgctgtgt

SEQ ID NO: 6800 - DNA, 120 bp, synthetic construct
  misc_feature 1..120: note = Artificially Synthesized Probe
  source 1..120: mol_type = other DNA
caccacacccggctagtttttgtatttttagtagagatggggtttgaccatatgggtcaggctggtttcgaactcctgccctcaactgattcacccacctcgtcctcccaaagtgctggg

SEQ ID NO: 6801 - DNA, 120 bp, synthetic construct
  misc_feature 1..120: note = Artificially Synthesized Probe
  source 1..120: mol_type = other DNA
ttgtatatcctttgttcttttcttattgtttttctttgtggtttggtggttttctgtagtactgttttgattcctttctctttctcattgtgtatctgctgtactgtagtactgttttga

SEQ ID NO: 6802 - DNA, 120 bp, synthetic construct
  misc_feature 1..120: note = Artificially Synthesized Probe
  source 1..120: mol_type = other DNA
cttttgacagttagagtataatgtgccactgggagtaccttcttgggttgactacatttgagaactcttgaactttccggttctggatgtccatatccttcttttcagctattatttcat

SEQ ID NO: 6803 - DNA, 120 bp, synthetic construct
  misc_feature 1..120: note = Artificially Synthesized Probe
  source 1..120: mol_type = other DNA
cccgagtagctgagaccacaggtgtgcaccatcatgcctggctaatttttgtattttttgcagagatggggttttgccatgttgcccaagctggtctcaaattcctgggcccaagtgatt

SEQ ID NO: 6804 - DNA, 120 bp, synthetic construct
  misc_feature 1..120: note = Artificially Synthesized Probe
  source 1..120: mol_type = other DNA
tatattgacatctctatgtctagtggaagaattgcctcttccagtcttatggagtagcattcatagggaaactgttttctgtagatgtgtcctatagtgtcagttaggtgggatgctttg

SEQ ID NO: 6805 - DNA, 120 bp, synthetic construct
  misc_feature 1..120: note = Artificially Synthesized Probe
  source 1..120: mol_type = other DNA
gccacagaagtatagagggggtgtcctaagactgaaacccctagaagtttctcactcttgtgctagtctacatgctgcaatttttcaacatgtagcaatttttcaaagttactattaagt

SEQ ID NO: 6806 - DNA, 120 bp, synthetic construct
  misc_feature 1..120: note = Artificially Synthesized Probe
  source 1..120: mol_type = other DNA
aggttacctctgtgggtctagaattctaagttggctgattatttccccttttcagcacttgaaagatgtagttccactgccttttggatgagaaatcaatgaatgttctgcagtgtcaca

SEQ ID NO: 6807 - DNA, 120 bp, synthetic construct
  misc_feature 1..120: note = Artificially Synthesized Probe
  source 1..120: mol_type = other DNA
tttttttgagacggagtcttgctctttcgcccaggccatggtgcagtggcactatctcggcttactgcaagctccgcctcctgggttcacgccattctcctgcctcagcctcccgagtag

SEQ ID NO: 6808 - DNA, 120 bp, synthetic construct
  misc_feature 1..120: note = Artificially Synthesized Probe
  source 1..120: mol_type = other DNA
tcaacttgaccctcaagtcttctctaaaagttttgttagagaaggtctcaagtaggctttattctatggataacttaggtctacacttgaggcatggcctttctgagttttccgctgaat

SEQ ID NO: 6809 - DNA, 120 bp, synthetic construct
  misc_feature 1..120: note = Artificially Synthesized Probe
  source 1..120: mol_type = other DNA
atcagtgtcatgtactttctgtttccaatatctgcaaacagttttatatatttttatccagttttatggtttatggcaggaagattatctaatagtagttactacatcatggccagaagc

SEQ ID NO: 6810 - DNA, 120 bp, synthetic construct
  misc_feature 1..120: note = Artificially Synthesized Probe
  source 1..120: mol_type = other DNA
tactaacttgttgaataccaattccaacaacatttgttgaataatctttcctttcctcacaaattttaagtctcatctactaaatttgtgtacacacacacccgttttcttctatggcac

SEQ ID NO: 6811 - DNA, 120 bp, synthetic construct
  misc_feature 1..120: note = Artificially Synthesized Probe
  source 1..120: mol_type = other DNA
cctaaaacgtcccattgctgtgtcattgcaagttctttcatgactgcgtatgtctttcccagtgaggcaatttgtcaccttctttgcctgtttttggttgaatcatctttttattgttca

SEQ ID NO: 6812 - DNA, 120 bp, synthetic construct
  misc_feature 1..120: note = Artificially Synthesized Probe
  source 1..120: mol_type = other DNA
ctttcagattagctttgttatgaatatttctatttccttgcacccatctttttacactcccatttctccaggggaaaacgtccagaaacaaatgaatcctcaggtctggaactcaggaga

SEQ ID NO: 6813 - DNA, 120 bp, synthetic construct
  misc_feature 1..120: note = Artificially Synthesized Probe
  source 1..120: mol_type = other DNA
ggctctcaccctcacagaatgtcccatgaataattatgtaactaaaagtgctgtgtgttgcaggtagcaactaaccggggctggtggcgtgggcagtaaaaagaatttaccaagactgtt

SEQ ID NO: 6814 - DNA, 120 bp, synthetic construct
  misc_feature 1..120: note = Artificially Synthesized Probe
  source 1..120: mol_type = other DNA
gttgttattatcacaaattacatcttgacacactgggccaccagcaggacttataattattgtaataggcagttgtctctttaaattgcaaggcacttacagcgaaggtgcctgcatgct

SEQ ID NO: 6815 - DNA, 120 bp, synthetic construct
  misc_feature 1..120: note = Artificially Synthesized Probe
  source 1..120: mol_type = other DNA
ctcatcgttacatctttgggacccagattttccccaggggacccttactttctacctttgcagagctgacccaccggtggcccttcactctggttaagtgcctgtttacctctgtggtag

SEQ ID NO: 6816 - DNA, 120 bp, synthetic construct
  misc_feature 1..120: note = Artificially Synthesized Probe
  source 1..120: mol_type = other DNA
tgagcacaagagctgaggccattggtcatgacattcccatagttggaggcctatgaagcacactttcaaggaaactgcaactgtttaaaataacagtaatgtcctatgtgtgtttttttt

SEQ ID NO: 6817 - DNA, 120 bp, synthetic construct
  misc_feature 1..120: note = Artificially Synthesized Probe
  source 1..120: mol_type = other DNA
cctgatgagaatagtgcagtgcacagctgcaaaaagtctagacaagttattggtaaaccagatctgaattgtacgcaaagatgattatgtttgatttaccccaggaatgacaggttggtt

SEQ ID NO: 6818 - DNA, 120 bp, synthetic construct
  misc_feature 1..120: note = Artificially Synthesized Probe
  source 1..120: mol_type = other DNA
gatgcagagggactgtctaaaccctgatgactgctgaccaagttagtggccggcagatttgggcattcgtaatgctgtccacctcgggtttgaaaggaatgaagagagctaaatgtagaa

SEQ ID NO: 6819 - DNA, 120 bp, synthetic construct
  misc_feature 1..120: note = Artificially Synthesized Probe
  source 1..120: mol_type = other DNA
cacatagattctgtacttaccatccccaaattgcaatgtctcagactcaggcttagagcatggcatgaacatcaaaggcaggaacctgtttatctttgaattggaaagatacagcaaaat

SEQ ID NO: 6820 - DNA, 120 bp, synthetic construct
  misc_feature 1..120: note = Artificially Synthesized Probe
  source 1..120: mol_type = other DNA
aggattttgagttcaaattgatgtttagggacaaggggtcaaggtatggagaggaaataaccatgtttcctaacccataaaacaagactggtgacacaggatgctgaaagcattcattat

SEQ ID NO: 6821 - DNA, 120 bp, synthetic construct
  misc_feature 1..120: note = Artificially Synthesized Probe
  source 1..120: mol_type = other DNA
agctctttagggctggggctgcacacccaaagagtagaactctgtgggtctgttattgtccccttagaaggccagggtatatttcttctccctgtttattttcattatttttacttttat

SEQ ID NO: 6822 - DNA, 120 bp, synthetic construct
  misc_feature 1..120: note = Artificially Synthesized Probe
  source 1..120: mol_type = other DNA
tattttttgtatttttcagtagagatggggtttcaccatattggccaggctggtctctaactcctgacctcaggtgatcctcccgccttggcctcccaaagtgctgcaatcacaggtgtg

SEQ ID NO: 6823 - DNA, 120 bp, synthetic construct
  misc_feature 1..120: note = Artificially Synthesized Probe
  source 1..120: mol_type = other DNA
aaaaaaaaaagaatagtacttaattctagcccactccacttcccttccacaggtggcacaactctttacagacaactttgactaccaaactcgagatgactttgtgcgaggtctcttagt

SEQ ID NO: 6824 - DNA, 120 bp, synthetic construct
  misc_feature 1..120: note = Artificially Synthesized Probe
  source 1..120: mol_type = other DNA
cctgtgggcctctcattggatgactcttcacattccagggtaccctgtagtcacattcaggagcaagtagataattaacatgcagtaacaacatctatttagcacattacagtttacaaa

SEQ ID NO: 6825 - DNA, 120 bp, synthetic construct
  misc_feature 1..120: note = Artificially Synthesized Probe
  source 1..120: mol_type = other DNA
gcgtggatatgattctaataaggttttttgagttcagagggtccccagaaatcctgaaggttctcgggttcttaagctctgtgtgtagtctataattgttgtaaacttggtgaagtatct

SEQ ID NO: 6826 - DNA, 120 bp, synthetic construct
  misc_feature 1..120: note = Artificially Synthesized Probe
  source 1..120: mol_type = other DNA
ctcagaaagggtttggtatcgagtcaagactagatgacttagagcattctgaatgatgttggcccatgaacttatccttgctttgatttcagtgttccagaatgaagttttaggaacact

SEQ ID NO: 6827 - DNA, 120 bp, synthetic construct
  misc_feature 1..120: note = Artificially Synthesized Probe
  source 1..120: mol_type = other DNA
ataattccacagaacctgtatcatctcccttttgtccacccatgtcatcagtatggatttgcttggatgtccaggtataggtgaatgcttaggaatatactgcagctcccttctttcttc

SEQ ID NO: 6828 - DNA, 120 bp, synthetic construct
  misc_feature 1..120: note = Artificially Synthesized Probe
  source 1..120: mol_type = other DNA
cttttgcaggtactgatggctttctaccagctggagatcctggctgaggaaacaattctgagctggttcagccaaagagatacaactgacaagggccagcagttgcgcaagaatcaacag

SEQ ID NO: 6829 - DNA, 120 bp, synthetic construct
  misc_feature 1..120: note = Artificially Synthesized Probe
  source 1..120: mol_type = other DNA
atcagaaataaggaaatcagctcaaggtcacatgactcttgaggggtaaagctaaggacttgaccctcagaatccagaactctgtccttcagcgtattgtgtttcagtgaagggaaaatt

SEQ ID NO: 6830 - DNA, 120 bp, synthetic construct
  misc_feature 1..120: note = Artificially Synthesized Probe
  source 1..120: mol_type = other DNA
caccacctgtactttccctacactatcattttgacacttaacatagaaacaactcaattcagcaaccaagttttacaaccactgttgctaccaatcaaatggtgatgcatcagatcccaa

SEQ ID NO: 6831 - DNA, 120 bp, synthetic construct
  misc_feature 1..120: note = Artificially Synthesized Probe
  source 1..120: mol_type = other DNA
atggtaattctactgaactattacagagtgggccaggaacacatttatggattctggggatgtgtactgtaattctttgattgggatagtggaaactctagccaaaaaaaaaaaaaaaaa

SEQ ID NO: 6832 - DNA, 120 bp, synthetic construct
  misc_feature 1..120: note = Artificially Synthesized Probe
  source 1..120: mol_type = other DNA
gagcacatttgaaagctgagaaataaaaattaggctgtgtggctatggcttgtaagtaaagtgaacatgagataaagctgacaaggtttcagaggaagatcacagagagcttcataggtc

SEQ ID NO: 6833 - DNA, 120 bp, synthetic construct
  misc_feature 1..120: note = Artificially Synthesized Probe
  source 1..120: mol_type = other DNA
cttatggaaccccatatagcatgaaatgtagaaaatccctataccttttgatccagaaataaattatgttcacataaaaatttacatggctgagagcaatggatcacgcctgaaatccca

SEQ ID NO: 6834 - DNA, 120 bp, synthetic construct
  misc_feature 1..120: note = Artificially Synthesized Probe
  source 1..120: mol_type = other DNA
caaatattactaatataattgaggtaaaaagaaatcttagaaaaaaaatgtcagctggtttagcatggtggctcacgcctgtaatctcagcactttgaaaggctgaggtggcttgatcaa

SEQ ID NO: 6835 - DNA, 120 bp, synthetic construct
  misc_feature 1..120: note = Artificially Synthesized Probe
  source 1..120: mol_type = other DNA
ctgtgaaaaaacccaaaaaaacaagacgttgcgcaccaattgagccgttcaaaattataaaagtgttcacgaaaacaatacaaggaaaacaggatctacaaactgaagtatttctaaagc

SEQ ID NO: 6836 - DNA, 120 bp, synthetic construct
  misc_feature 1..120: note = Artificially Synthesized Probe
  source 1..120: mol_type = other DNA
atgtcctgactttttaatgtggaattcaaaaatggtatttgctcatgatcttccccctcaaaaacagaattttcttcttaaaaagtcattcattcattagctggctgtgctggcatgcac

SEQ ID NO: 6837 - DNA, 120 bp, synthetic construct
  misc_feature 1..120: note = Artificially Synthesized Probe
  source 1..120: mol_type = other DNA
aggttaatgaaatgaccacagtgagcttactgtggtgagagtcaactgccaatcacttaaaatatctgacttataatgtggtaggatgtttcactgtactataaacaggagtcatatgac

SEQ ID NO: 6838 - DNA, 120 bp, synthetic construct
  misc_feature 1..120: note = Artificially Synthesized Probe
  source 1..120: mol_type = other DNA
cccatgctcctaaggttaagaatgcttgataaactcagtctgctcaaatatataaaggaaggagtagactggataatcaaagctctcatcaaaatcaatctcagtatgtgcccacagagt

SEQ ID NO: 6839 - DNA, 120 bp, synthetic construct
  misc_feature 1..120: note = Artificially Synthesized Probe
  source 1..120: mol_type = other DNA
tttgcttgtctccaatattagatggcagaaataatgatcttagctgtgtctacagaccatggatgattctactatccttagtctggttctcctggtgctatgttaaccccatctaggaat

SEQ ID NO: 6840 - DNA, 120 bp, synthetic construct
  misc_feature 1..120: note = Artificially Synthesized Probe
  source 1..120: mol_type = other DNA
taaaagccaaacaaactagataaatgcaaatctgattggggaaggtggctcaaggcttcctttttctctgtaggagaatgaaaagcttttttttggggggtgcagaagactggagttatt

SEQ ID NO: 6841 - DNA, 120 bp, synthetic construct
  misc_feature 1..120: note = Artificially Synthesized Probe
  source 1..120: mol_type = other DNA
gatactggcattgccttgacaaaccgtgaattctgaacacttcagcctttgatatcttaaaatctctggtacaggaaattccagatattgcactgaaaacagtttgcagaaatgaggacc

SEQ ID NO: 6842 - DNA, 120 bp, synthetic construct
  misc_feature 1..120: note = Artificially Synthesized Probe
  source 1..120: mol_type = other DNA
gatatgtatgttatgtctactacataacagattccctgctatacctagagacccaagacacactgaaactcatcactcaacggaattcacagaaatgacgcagagagacaactacagtgt

SEQ ID NO: 6843 - DNA, 120 bp, synthetic construct
  misc_feature 1..120: note = Artificially Synthesized Probe
  source 1..120: mol_type = other DNA
aaaagaaggcgagaaacaggttggctgatatttctcagaggaacaaattagccaagaagaaatgagagtgccaggagtggggaaactattaaatgtgattctatatttaatcaaatacct

SEQ ID NO: 6844 - DNA, 120 bp, synthetic construct
  misc_feature 1..120: note = Artificially Synthesized Probe
  source 1..120: mol_type = other DNA
acatctgcagttacttcttccactaaagtcttgaacgcttcaaagtcatcaatacgggttggaatcaaattcttcctaactcttgttcatgttgatattctgacctcccatgaatcatga

SEQ ID NO: 6845 - DNA, 120 bp, synthetic construct
  misc_feature 1..120: note = Artificially Synthesized Probe
  source 1..120: mol_type = other DNA
ccacttgaacttactctatatcagcaataaggctgttttgttttcttatcattcatgtgtttgctggaggaggactttcgatctccttcaagaatttttcctttgctttcacaacctggc

SEQ ID NO: 6846 - DNA, 120 bp, synthetic construct
  misc_feature 1..120: note = Artificially Synthesized Probe
  source 1..120: mol_type = other DNA
cttcacctagacagaaaaatgagatgcatttcaacatgtacttgataatttgtcagcaactgccaccccattatcaataaaaaagaagaagaaaaggcaagaaaaccaccaacgaggtca

SEQ ID NO: 6847 - DNA, 120 bp, synthetic construct
  misc_feature 1..120: note = Artificially Synthesized Probe
  source 1..120: mol_type = other DNA
caaatgacgtttttagttttggaaaatttgaaaacatcttaagtgcttatcaacaaggaattatttaaatcagcagttctcaaaatgtggtctgcagacaggcaggaggccctaagatcc

SEQ ID NO: 6848 - DNA, 120 bp, synthetic construct
  misc_feature 1..120: note = Artificially Synthesized Probe
  source 1..120: mol_type = other DNA
gaagatctgcataactcactgaaccattattttccaaataagcagtgtatgatgttaaaaatcttacacaggtaagagatccattccagatgcaagacactgacagaccaatggatttta

SEQ ID NO: 6849 - DNA, 120 bp, synthetic construct
  misc_feature 1..120: note = Artificially Synthesized Probe
  source 1..120: mol_type = other DNA
catccacgcaagtgactactatgcaactattaaaaagtttaaaaaaaaaagcttaactgtgtggtaaagttttcctaaaattgatatgaaacccagaaaccactgaggaaaagcagtatt

SEQ ID NO: 6850 - DNA, 120 bp, synthetic construct
  misc_feature 1..120: note = Artificially Synthesized Probe
  source 1..120: mol_type = other DNA
agcaaggatatagaaaccaggaactctcaaactgttaagtctaagccaataaaacagaataatgtggcagtatctgcgcaaaggttgttaaagggtaatctttgttctaggagatctgaa

SEQ ID NO: 6851 - DNA, 120 bp, synthetic construct
  misc_feature 1..120: note = Artificially Synthesized Probe
  source 1..120: mol_type = other DNA
aatgtttctgaactgccattttcttcccaccatcagcattcagtgaactcaagttaattctcatataccccagaaaataaataaaaacaaacctactggaaaggagtgggaagagttggg

SEQ ID NO: 6852 - DNA, 120 bp, synthetic construct
  misc_feature 1..120: note = Artificially Synthesized Probe
  source 1..120: mol_type = other DNA
ccattatgaccaatacttttcaaactaatctctcacatagctccttttgaactcaagactcacacataaaactgtctgctggtcatgggtcatccaagtgaaaatagaaccctcaacctt

SEQ ID NO: 6853 - DNA, 120 bp, synthetic construct
  misc_feature 1..120: note = Artificially Synthesized Probe
  source 1..120: mol_type = other DNA
atattaagatactgcatatggtactgaagggggtatcaggaaggatacaggatggaaactaaagtttcaagagtataacaactgtatcactgggcactgtggtgcgtctctacaatccca

SEQ ID NO: 6854 - DNA, 120 bp, synthetic construct
  misc_feature 1..120: note = Artificially Synthesized Probe
  source 1..120: mol_type = other DNA
gtgttcaaacagataattactgaatgacatttcctatcccactagcttaaaattaatgatgggtttccaggcagacagtgggagtctcgatgaaaacaatgagagactggcaggcaggta

SEQ ID NO: 6855 - DNA, 120 bp, synthetic construct
  misc_feature 1..120: note = Artificially Synthesized Probe
  source 1..120: mol_type = other DNA
gaaaaacatattcagttcctagaattttaaagtgttattttgaattaaaataaaagtcccactgtaagtaactgattactatagtcttcatatcaagaacacataatcggccgggcatgg

SEQ ID NO: 6856 - DNA, 120 bp, synthetic construct
  misc_feature 1..120: note = Artificially Synthesized Probe
  source 1..120: mol_type = other DNA
ccagggctgaataaactgtcatagcaacaagagaaagttgaaagcgaagaaaaaaagcaagcaagggtgagaaaagtctaacaactggctgcaaagaatgtcaggtagctttttactaca

SEQ ID NO: 6857 - DNA, 120 bp, synthetic construct
  misc_feature 1..120: note = Artificially Synthesized Probe
  source 1..120: mol_type = other DNA
aaattaaatgaaatgaaactttaaaaacaaacacaaaccagattgtcatcagaatatgagatgcactgcttctgatcacaccctctagagccatgttccccatgttggaatcccagctct

SEQ ID NO: 6858 - DNA, 120 bp, synthetic construct
  misc_feature 1..120: note = Artificially Synthesized Probe
  source 1..120: mol_type = other DNA
cagcctggatccacctctaaccccaacttgatgagtcctttaagtcttaagatgagtatgataggagaaaactttcagagtaccatagggatttaagtgatctagggtaagtccttaaaa

SEQ ID NO: 6859 - DNA, 120 bp, synthetic construct
  misc_feature 1..120: note = Artificially Synthesized Probe
  source 1..120: mol_type = other DNA
tcttcataatcccgtgaaacaaccattattctctccactcttcagacaaatctgaagtcctggaaaagtaaacatgtcatttaaatccaggactaccagggtttacggctaagaacacca

SEQ ID NO: 6860 - DNA, 120 bp, synthetic construct
  misc_feature 1..120: note = Artificially Synthesized Probe
  source 1..120: mol_type = other DNA
ctaaatgttctttatattcctcagcttcttccaagtccttttcactttctaaaatctgccaaagaacagtatatgcagcttccaacctgtgctggcaaacaaggcttatcacctgggatt

SEQ ID NO: 6861 - DNA, 120 bp, synthetic construct
  misc_feature 1..120: note = Artificially Synthesized Probe
  source 1..120: mol_type = other DNA
ctaaatacttgatcaaaataagtagcactaactcatgagtgaatagagctgattaagtttgttgggctatagctaaatatttacatttctggatactcagcaagctatacttgaacacat

SEQ ID NO: 6862 - DNA, 120 bp, synthetic construct
  misc_feature 1..120: note = Artificially Synthesized Probe
  source 1..120: mol_type = other DNA
tcttaagggagcactaacatgtacctactgatcaaattactttgcacatattatatagcttaagccaacatcacaaattcagtctgggtttggggaggtgataacacagacacaagaaat

SEQ ID NO: 6863 - DNA, 120 bp, synthetic construct
  misc_feature 1..120: note = Artificially Synthesized Probe
  source 1..120: mol_type = other DNA
tatatcaacactaaaatggcattacaaccagtgcacaaaactgttgactgcagtaacatgataatttccatttcaattattccttaaagctttataagaagtatttgaaaggcaaatctt

SEQ ID NO: 6864 - DNA, 120 bp, synthetic construct
  misc_feature 1..120: note = Artificially Synthesized Probe
  source 1..120: mol_type = other DNA
agctttaataaggtcattttgttttctgtaacaacttcttatccaacaaattttttttttcttcttttcttgccttcagaggagggtatcactattacttaggctggagtgcaggggtgc

SEQ ID NO: 6865 - DNA, 120 bp, synthetic construct
  misc_feature 1..120: note = Artificially Synthesized Probe
  source 1..120: mol_type = other DNA
actctgtgacactctggaaaagacaaaaagatcagtggttggtggggagggtataaacaagcagaacagaggatttttagggcttagtaaaattattctgcacgatattataaccgcaga

SEQ ID NO: 6866 - DNA, 120 bp, synthetic construct
  misc_feature 1..120: note = Artificially Synthesized Probe
  source 1..120: mol_type = other DNA
gtattataacaaagttatattaaagcccaaataaacatctgaaactactcctggactgctcagtgtattccaataatctgcccatcccctcatgggccaacagccaatatcatatttttg

SEQ ID NO: 6867 - DNA, 120 bp, synthetic construct
  misc_feature 1..120: note = Artificially Synthesized Probe
  source 1..120: mol_type = other DNA
agggagtgagggtgagagagcaacaggtcacactaaaaaataatttttagctaccagaataatttcagactcatcagcagctacaacagaagtccaccatgaaacttgacttcagaatcc

SEQ ID NO: 6868 - DNA, 120 bp, synthetic construct
  misc_feature 1..120: note = Artificially Synthesized Probe
  source 1..120: mol_type = other DNA
agatacatacatgggaggttaatgtagaaaaaacaaaaagcaagggaatgcttgactcaaaagtcagaaaagaagatggaggaggggccaaagatacaagaatgtgatcacgggagtatt

SEQ ID NO: 6869 - DNA, 120 bp, synthetic construct
  misc_feature 1..120: note = Artificially Synthesized Probe
  source 1..120: mol_type = other DNA
tgctgtatatgcacaaatctctattaaaagttaaacaactgacaatgctggttgcctctaggtcatctgcctggatagggatcagcttcaggagactgtgtacttttgcataaaacttga

SEQ ID NO: 6870 - DNA, 120 bp, synthetic construct
  misc_feature 1..120: note = Artificially Synthesized Probe
  source 1..120: mol_type = other DNA
accatgcccggccagaatttctagcttctgaggccatactgcacaattaggtagccattacctacatgtggttaattattaatattaaataaagtttaaaatttatttccttggttgcac

SEQ ID NO: 6871 - DNA, 120 bp, synthetic construct
  misc_feature 1..120: note = Artificially Synthesized Probe
  source 1..120: mol_type = other DNA
ttaaccctcctaatcccaccatccataaaccatctggcatattctttcagttagaattttacacttatttgtgtacctacgcatcagtatcaaccctaacatacaagttttactgaagga

SEQ ID NO: 6872 - DNA, 120 bp, synthetic construct
  misc_feature 1..120: note = Artificially Synthesized Probe
  source 1..120: mol_type = other DNA
ctagcaaatgccagaaatcaaattagaaagggggagaaggttaagtgtccatccactttctttagaaatccacaaagttctcaattagttactaaaacacgattggtgtaattgcttggt

SEQ ID NO: 6873 - DNA, 120 bp, synthetic construct
  misc_feature 1..120: note = Artificially Synthesized Probe
  source 1..120: mol_type = other DNA
tgcttacaactataaatccatatccttaattccatatccctataaatccaatgctggttagatttgtaatgattccacaaaaatttactgaatatagtgtgactaaacttcattttcctg

SEQ ID NO: 6874 - DNA, 120 bp, synthetic construct
  misc_feature 1..120: note = Artificially Synthesized Probe
  source 1..120: mol_type = other DNA
ggagacatgattagggacttttgaaggaacactagtgatttttatggtagggataggagtgggaagaacatcttaggattgtgaatcacaggctttgcatttcttgctaatggctaagga

SEQ ID NO: 6875 - DNA, 120 bp, synthetic construct
  misc_feature 1..120: note = Artificially Synthesized Probe
  source 1..120: mol_type = other DNA
caccgcactcagcaagtatatttttttcttttaattgaagaaatctggaatatgaaccccagagccaaatttacgtggattatcgaggaactctgatatagtgggttctttcattaagca

SEQ ID NO: 6876 - DNA, 120 bp, synthetic construct
  misc_feature 1..120: note = Artificially Synthesized Probe
  source 1..120: mol_type = other DNA
caaaaatcatccagatacctatgcatgatgggataagcaggaaaagcccatggctctttttaagtgtttatgattatgcacagcagaaaaccattatggaagctcacaaactagctgaag

SEQ ID NO: 6877 - DNA, 120 bp, synthetic construct
  misc_feature 1..120: note = Artificially Synthesized Probe
  source 1..120: mol_type = other DNA
ttagtttccagcttcacacactttgtttttaggttcccctactccccaaatttaaacataacatccaaatctcccaaagtctgtaccagaacaaatactgtatcactaaccacatcccta

SEQ ID NO: 6878 - DNA, 120 bp, synthetic construct
  misc_feature 1..120: note = Artificially Synthesized Probe
  source 1..120: mol_type = other DNA
taaaagtcaaagcaaactggtaaaccattagcaaaaccacaagctaccatgaaaagatacacaaaagtatctggcaaccaaggtctagagctggttccagagtgtgaaaggttttctgat

SEQ ID NO: 6879 - DNA, 120 bp, synthetic construct
  misc_feature 1..120: note = Artificially Synthesized Probe
  source 1..120: mol_type = other DNA
caagcatggaggggcgaggacaatgtgataccccttctcaccaccaccatccctcattctacttggagagcttcaccgtgacacacgagtgttccttcccaccccagacctttctcgctt

SEQ ID NO: 6880 - DNA, 120 bp, synthetic construct
  misc_feature 1..120: note = Artificially Synthesized Probe
  source 1..120: mol_type = other DNA
aagtccctcaggtctaggtttggcaggtttggcaaaaacacagcaacgctcggttaaatctgaatttcgggtaagtatatcctgggcctcatttggaagagacttagattaaaaaaaaaa

SEQ ID NO: 6881 - DNA, 120 bp, synthetic construct
  misc_feature 1..120: note = Artificially Synthesized Probe
  source 1..120: mol_type = other DNA
caaaaaaataaattaaaaaacccacattgattatctgacatttgaatgcgattgtgcatcctgaattttgtctggaggccccacccgagccaatccagcgtcttgtcccccttctccccc

SEQ ID NO: 6882 - DNA, 120 bp, synthetic construct
  misc_feature 1..120: note = Artificially Synthesized Probe
  source 1..120: mol_type = other DNA
cagggcccgcggggcccctcgagcaccttcgccctcaggcccgtcgccggatggggacgacaaggcgcggctgagccccgacccccggggccgcccctgagccccgcctctccctccccg

SEQ ID NO: 6883 - DNA, 120 bp, synthetic construct
  misc_feature 1..120: note = Artificially Synthesized Probe
  source 1..120: mol_type = other DNA
ccgatctgctgtcaatcaacaaacttactgagattctttgtgtctctccattcaccagtcctgtggcccagggcaggggccgcctctgtctttgggaaaaggggcaaaagtccccacctt

SEQ ID NO: 6884 - DNA, 120 bp, synthetic construct
  misc_feature 1..120: note = Artificially Synthesized Probe
  source 1..120: mol_type = other DNA
ctcgctctgtcgcccaggctggagcgcagtggcacaatctcagctcactgcaacctccgcctcccaggttcaagcgattctcctgcctcagcctcccaggtagctgggactacaggcgcc

SEQ ID NO: 6885 - DNA, 120 bp, synthetic construct
  misc_feature 1..120: note = Artificially Synthesized Probe
  source 1..120: mol_type = other DNA
tctgcactctcgtgaggggccggcaggccggcgtctgtttcgtacgtgccctgggtgtccctctgctccccacccgctcccagcccggactgcagcaacaggcaccgtggctagacccta

SEQ ID NO: 6886 - DNA, 120 bp, synthetic construct
  misc_feature 1..120: note = Artificially Synthesized Probe
  source 1..120: mol_type = other DNA
caggtacagctcccgccaagactcgtgctcctgtggcttttcttccttgaagtcctggaggcaatgaatcctccataattcatctgtctctcgagcgagtgcggcattgtctttctctgt

SEQ ID NO: 6887 - DNA, 120 bp, synthetic construct
  misc_feature 1..120: note = Artificially Synthesized Probe
  source 1..120: mol_type = other DNA
gcgctttctctcggctctgggctcgcgactgggagacctcgggtgaggtctctgttgccccggaggtgttctgcgtgctgtccgtctgtgctcagggctgtgagatgggctcctgggggc

SEQ ID NO: 6888 - DNA, 120 bp, synthetic construct
  misc_feature 1..120: note = Artificially Synthesized Probe
  source 1..120: mol_type = other DNA
tgaagggtagggtttgctccaatttgcactgaatataaaccagactttggtatcggggcagggagtgagccagaagaaggaaggaaggagaaagcaggaggaattagcaagctgcaaatt

SEQ ID NO: 6889 - DNA, 120 bp, synthetic construct
  misc_feature 1..120: note = Artificially Synthesized Probe
  source 1..120: mol_type = other DNA
acccttgattttacttattcaagtaataagaaagcaaagaagagtttggccaaatcctctagtcgctctcatagctgaaggcacccaccggggccacttctgtccccagcgtcttctcgg

SEQ ID NO: 6890 - DNA, 120 bp, synthetic construct
  misc_feature 1..120: note = Artificially Synthesized Probe
  source 1..120: mol_type = other DNA
agtgctacaagtggggcgccggaagagccccaggcgtgcagaagctcacaaaaggccacccgtcctcggtccattcatttttgttcactgttgattcagccccattcattgatgggctgg

SEQ ID NO: 6891 - DNA, 120 bp, synthetic construct
  misc_feature 1..120: note = Artificially Synthesized Probe
  source 1..120: mol_type = other DNA
atagaaaagggcagctagagctggaacctgatagggaattgggggcccaaggagatttcggagcaggaaaatgagaaccagaaaggatttgaaggccaccagccatggagaacagactgc

SEQ ID NO: 6892 - DNA, 120 bp, synthetic construct
  misc_feature 1..120: note = Artificially Synthesized Probe
  source 1..120: mol_type = other DNA
gctggaagctaggagaagcaggagtctctctctgcactgcctcctgtccctgagctcagagaggacacctcagccctttgagaggtagagagactccctgtgaggtccttttttttgttt

SEQ ID NO: 6893 - DNA, 120 bp, synthetic construct
  misc_feature 1..120: note = Artificially Synthesized Probe
  source 1..120: mol_type = other DNA
gagaaatctgacctctgctctcccttctcaaactcacccttccagaaactaagcgttgtggatcaagaaaaagttgacaaatttatgattgagctagatgggaccgagaataagtgtgag

SEQ ID NO: 6894 - DNA, 120 bp, synthetic construct
  misc_feature 1..120: note = Artificially Synthesized Probe
  source 1..120: mol_type = other DNA
ccaaccccacaccctacacccaaatcatattgagagtttctttgaggcaaagatcttggcatttctttgtatcttcttgagtccttcttaaaccagtgccttcttgatgaatggaaactc

SEQ ID NO: 6895 - DNA, 120 bp, synthetic construct
  misc_feature 1..120: note = Artificially Synthesized Probe
  source 1..120: mol_type = other DNA
tatatactaggcacatgctaagaactttacattcaatttctctaattttcagcaaaagatcctacagggaagtaggtgctatccccattttacagaaatgaggaaagagaggctgggcac

SEQ ID NO: 6896 - DNA, 120 bp, synthetic construct
  misc_feature 1..120: note = Artificially Synthesized Probe
  source 1..120: mol_type = other DNA
taatatactgatttcagtgacctgctttgccatcgacttggatccttccaattcttagccccattaaaatccccatttaagctcttctgccctgtcacccctccatgaggctccttctga

SEQ ID NO: 6897 - DNA, 120 bp, synthetic construct
  misc_feature 1..120: note = Artificially Synthesized Probe
  source 1..120: mol_type = other DNA
ctctcagattccgctgttctcagcagcatctcaagagcccgaaatcaagataagtcttttcctctcctacttcccaaagaacttagtcactgccctccctgcagagtgcttgctacccaa

SEQ ID NO: 6898 - DNA, 120 bp, synthetic construct
  misc_feature 1..120: note = Artificially Synthesized Probe
  source 1..120: mol_type = other DNA
aggacatctgccgctacatcgaccgcagcttctccttctggaaagagaaggaggcagagctgtttgacatctgagcagcggaattcggaattctcagttcaccctcgagcgtcttaacgt

SEQ ID NO: 6899 - DNA, 120 bp, synthetic construct
  misc_feature 1..120: note = Artificially Synthesized Probe
  source 1..120: mol_type = other DNA
tcctctgtaacattcaggaaataaaactctttgctgtaaactgcctgcgttggacaccacacctgcccctgatgtcattgtagccccacgattgtagtgcccgtatccactctattggga

SEQ ID NO: 6900 - DNA, 120 bp, synthetic construct
  misc_feature 1..120: note = Artificially Synthesized Probe
  source 1..120: mol_type = other DNA
tccctataataccccagaatctctctctcatgctctaataactttgttcccggttactcagtccctgcctcctattaacctggccttttctacccttcagttaacctaaccccactatca

SEQ ID NO: 6901 - DNA, 120 bp, synthetic construct
  misc_feature 1..120: note = Artificially Synthesized Probe
  source 1..120: mol_type = other DNA
gcgcatgcctgtaatcccagctactcgggaggctgaggcagcagaatcacttgaatctggaaggcggaggttgcagtgagccaggatcacgccgttttgtactctagcctgggcaacaga

SEQ ID NO: 6902 - DNA, 120 bp, synthetic construct
  misc_feature 1..120: note = Artificially Synthesized Probe
  source 1..120: mol_type = other DNA
tcaaatgttcagcagccacatgtgcttagtgactactctgtcaacaggcagatctaccctctatgttctaataacttgtctctaattctcagtccctctctcaattatatggtctctctg

SEQ ID NO: 6903 - DNA, 120 bp, synthetic construct
  misc_feature 1..120: note = Artificially Synthesized Probe
  source 1..120: mol_type = other DNA
gaaggggttttcccttcctctctgacccagatctgcgcgcggcctagcccgggcctcatttcttatccccgccaagggtttcctctcagtcatttgtttaccagaaacatgaaaactgcc

SEQ ID NO: 6904 - DNA, 120 bp, synthetic construct
  misc_feature 1..120: note = Artificially Synthesized Probe
  source 1..120: mol_type = other DNA
cctgcctgcagtggctgctgtcgcagggcggctgcagagtgcaggtgggtccgcgcggttcgccaggggcactgaggcttcctcctcaggacagagtcctggcccagagtcccccggggc

SEQ ID NO: 6905 - DNA, 120 bp, synthetic construct
  misc_feature 1..120: note = Artificially Synthesized Probe
  source 1..120: mol_type = other DNA
aaattctgggtgtgggggcagccatgggagggaggaaccacaaccgatttccacttagaccactgggtgacctggagatggaaggggaggagtcagggtaactctaaactggcttactat

SEQ ID NO: 6906 - DNA, 120 bp, synthetic construct
  misc_feature 1..120: note = Artificially Synthesized Probe
  source 1..120: mol_type = other DNA
tgtgtctagatgttcccgggaattctcctcccagcacaggtcctgtaagcactcccctccagcccctttctcagcagacacacacaatggggtgtgcactgatgacacattcagcagttc

SEQ ID NO: 6907 - DNA, 120 bp, synthetic construct
  misc_feature 1..120: note = Artificially Synthesized Probe
  source 1..120: mol_type = other DNA
gttagttgcccaaggacagaagcaggactcaaacccaggatccgcttgacccaaaaaaaacattgctgaatgaggcctggccaatccctccagggaagacagagagcacagagctacctt

SEQ ID NO: 6908 - DNA, 120 bp, synthetic construct
  misc_feature 1..120: note = Artificially Synthesized Probe
  source 1..120: mol_type = other DNA
tgagatgtaaatgtgaatgtggacccagcctcaggacgagagcagctttggtatgaattcactgcttccaaacaaactaggatttggatcatgtcaaagtcagtgggatttagactagga

SEQ ID NO: 6909 - DNA, 120 bp, synthetic construct
  misc_feature 1..120: note = Artificially Synthesized Probe
  source 1..120: mol_type = other DNA
aggaagtgacacgctgcagaggagctggaaggctggacagcctcggggaagctcagctaattccaggtctataccttggggtgttataacagaaagcgcttgagattgcaggaatgtcct

SEQ ID NO: 6910 - DNA, 120 bp, synthetic construct
  misc_feature 1..120: note = Artificially Synthesized Probe
  source 1..120: mol_type = other DNA
tcacagcaagctggaaaaccagttagcccagagattttatcaacttcagcaggtgcctccttccccgaaagcctcccctacccccgaccagactagactggaatgggattggaaagtacc

SEQ ID NO: 6911 - DNA, 120 bp, synthetic construct
  misc_feature 1..120: note = Artificially Synthesized Probe
  source 1..120: mol_type = other DNA
cttctatgtgccaggcaatattctaaatgccagtgatatgctggtgaaccagacaagcttccctgcctcgtggagctgacaggtacagaaatggtgttttagagaggctgattcaccagc

SEQ ID NO: 6912 - DNA, 120 bp, synthetic construct
  misc_feature 1..120: note = Artificially Synthesized Probe
  source 1..120: mol_type = other DNA
agactccatctcaaaaaaaaagaaaaaagaaaagaaaagacagtgcaagtcctggtctggtgcagtggctcatgcctgtaatcccagcactttgggaagctgaggcgggcggatcacgag

SEQ ID NO: 6913 - DNA, 120 bp, synthetic construct
  misc_feature 1..120: note = Artificially Synthesized Probe
  source 1..120: mol_type = other DNA
accaaaagctaacccctaggagaaacccctgagacacattccatctcttcactccctgcatgcccgaatttccagccaggcccttcatcacacagacagatgtgtgttttcatcccatct

SEQ ID NO: 6914 - DNA, 120 bp, synthetic construct
  misc_feature 1..120: note = Artificially Synthesized Probe
  source 1..120: mol_type = other DNA
cccacacgggcgacccatgtttcttttgtgtaatcagaggtgacttgatgaatagttacagttcatccatagcatctttgttcccaggagaaagaaaacaaatcatgatttatatgatca

SEQ ID NO: 6915 - DNA, 120 bp, synthetic construct
  misc_feature 1..120: note = Artificially Synthesized Probe
  source 1..120: mol_type = other DNA
cctgtggggttacaaggaccagctgagagaacgtgtgtgttgtactcatcacagtgcttgagacagagtaatcattcagtaaatggtggctgctatcactattattatttactattatta

SEQ ID NO: 6916 - DNA, 120 bp, synthetic construct
  misc_feature 1..120: note = Artificially Synthesized Probe
  source 1..120: mol_type = other DNA
gcttggattccaggtgtgtgatgagaatttcattttggtccttatgctcatccatatctttgtaatactccccagtgactgtgagagtgcccattgttcttcttgtcctcaggccaaggt

SEQ ID NO: 6917 - DNA, 120 bp, synthetic construct
  misc_feature 1..120: note = Artificially Synthesized Probe
  source 1..120: mol_type = other DNA
gtggagcatgtggttgatctagggggtgaaacactgggggaggtagatgggcaggatgtgaagtcctgtgaagaattggcctcctaagcacaaaaggtgaattggaacccaataggtcgc

SEQ ID NO: 6918 - DNA, 120 bp, synthetic construct
  misc_feature 1..120: note = Artificially Synthesized Probe
  source 1..120: mol_type = other DNA
cattcagtacatagtggacatcctgagggctgccagattaacaaaaacagcaacaaccaaacccaggacgtttgactagctttgaatctcagataaacaagctgtactttagtataagta

SEQ ID NO: 6919 - DNA, 120 bp, synthetic construct
  misc_feature 1..120: note = Artificially Synthesized Probe
  source 1..120: mol_type = other DNA
tagacttcttctcaaaaaaaaaagtaggactgagggcagggcagtgctgggtgggacgccctcagggacctctgagggagggtggctcaggactcagtccagggggagccccccgggcag

SEQ ID NO: 6920 - DNA, 120 bp, synthetic construct
  misc_feature 1..120: note = Artificially Synthesized Probe
  source 1..120: mol_type = other DNA
ctgggaataggcaggctcattcacctacccatagacattagcttgggtataactcacagccaccctctgcagaaaagagtgtttaagtgtcccgttccacatatggataaagtgagtctg

SEQ ID NO: 6921 - DNA, 120 bp, synthetic construct
  misc_feature 1..120: note = Artificially Synthesized Probe
  source 1..120: mol_type = other DNA
ctagcggtcataggacagcaaacactattcattggattctgacttaggcaggcaccctgccgagtgccttaaaggtgtaatctccgttactcttcacagtacattaaaaaaatagttggc

SEQ ID NO: 6922 - DNA, 120 bp, synthetic construct
  misc_feature 1..120: note = Artificially Synthesized Probe
  source 1..120: mol_type = other DNA
aaaaaaaaagttgacaatatggcatttactgggtgccatgtcctggagctcagcagagcaagtagtgctgttatccccatttgcagataaagaaagttaggcacaaaaagcataggtgac

SEQ ID NO: 6923 - DNA, 120 bp, synthetic construct
  misc_feature 1..120: note = Artificially Synthesized Probe
  source 1..120: mol_type = other DNA
ctgggcttgaatcttaacctggaggaacctgagagaccgtctagtgatggggaagagaccccagagagcggtgtggcttggccaagatcccacagcgaaggcatgactgagtaggaccct

SEQ ID NO: 6924 - DNA, 120 bp, synthetic construct
  misc_feature 1..120: note = Artificially Synthesized Probe
  source 1..120: mol_type = other DNA
accattcattattcttagctactcacatacaaaagcacacacttgtacatgtgtacatacagcatacagatatgaacacacagagccatgcgaatatctgcacacacccaccctacacac

SEQ ID NO: 6925 - DNA, 120 bp, synthetic construct
  misc_feature 1..120: note = Artificially Synthesized Probe
  source 1..120: mol_type = other DNA
ctcactagtgggcatagggtggggatccctgggtccatggcatgttcaagagtcaaagctcctggcgagtcccacaaggggtcagggctggacactggactgggaggagagtaagagcag

SEQ ID NO: 6926 - DNA, 120 bp, synthetic construct
  misc_feature 1..120: note = Artificially Synthesized Probe
  source 1..120: mol_type = other DNA
gctccagtagctgccctcttcatgccaccttagaccaagctcccacagtggcttcccctttcatctctgggaggcagagggggccctggaatcgctgagttcccaacgcagactgttggc

SEQ ID NO: 6927 - DNA, 120 bp, synthetic construct
  misc_feature 1..120: note = Artificially Synthesized Probe
  source 1..120: mol_type = other DNA
gcatccgcgacggctgggggggttcagcctgggattggcgggccccgggtgatgtcaggccgtcggagcccataggctggctgtgcgcgggtggctgtaacctgagaggaagtatcaggt

SEQ ID NO: 6928 - DNA, 120 bp, synthetic construct
  misc_feature 1..120: note = Artificially Synthesized Probe
  source 1..120: mol_type = other DNA
ttcctaacggctgcgccgcggaccccaaggcgtccagggagctgccaccgccgcccccaccgccgccgccgcccctgccggaggccgcgagttcgccaccgccggccccgcctctgcccc

SEQ ID NO: 6929 - DNA, 120 bp, synthetic construct
  misc_feature 1..120: note = Artificially Synthesized Probe
  source 1..120: mol_type = other DNA
agagatcatgcttagtggcacccctcaaagcttcatctccctgactagaagtgcagagcagagctagtccccctacggttcctatggagccccagcccctgcagaccagagcccatgtaa

SEQ ID NO: 6930 - DNA, 120 bp, synthetic construct
  misc_feature 1..120: note = Artificially Synthesized Probe
  source 1..120: mol_type = other DNA
cacctcatacctaccctcatacccacatatgcacccaagcattctgcacctggctgatggttttgcctaaataaatgagccagccacaccgattttccctttctcctactcttctccccc

SEQ ID NO: 6931 - DNA, 120 bp, synthetic construct
  misc_feature 1..120: note = Artificially Synthesized Probe
  source 1..120: mol_type = other DNA
gccccacaccgccagctgcggggtttcagccgctgctcaatggaagcttggttcccgtgccgcccactactcctgcgccgggagtgcagctggacgtggaggctctcatccccacgcacg

SEQ ID NO: 6932 - DNA, 120 bp, synthetic construct
  misc_feature 1..120: note = Artificially Synthesized Probe
  source 1..120: mol_type = other DNA
ggcccccgagtgccatttatgtgccccacacactgttgtagcctctggagattcatggtgaacatatcaaggcctgctctaaggtggctgcggacatgtgtgcgagtcaccaagcacaca

SEQ ID NO: 6933 - DNA, 120 bp, synthetic construct
  misc_feature 1..120: note = Artificially Synthesized Probe
  source 1..120: mol_type = other DNA
tatttgtatgtggggagtggatcgcatagggtcaagatgaatcagggacctctgtggaggcgatggcaggcccagggggaaaactggacatcagaggtggagaaaagtgagcaaatgaga

SEQ ID NO: 6934 - DNA, 120 bp, synthetic construct
  misc_feature 1..120: note = Artificially Synthesized Probe
  source 1..120: mol_type = other DNA
tgcccgacgcgccctggctgcccgggccgctctgcctgggtcgctcgcactcgctcagctggtgccgcgaggctgtggcgcgcgagatcctcgagtgcggcgtctccgtgcagcatctcc

SEQ ID NO: 6935 - DNA, 120 bp, synthetic construct
  misc_feature 1..120: note = Artificially Synthesized Probe
  source 1..120: mol_type = other DNA
gcgggatccggcgtccgagtcctggtgggccggcctggggcaggatctggctctggctgcgggtcctgactcgggtcagggttgggcctccgatccagcccgctccggggcagggttcaa

SEQ ID NO: 6936 - DNA, 120 bp, synthetic construct
  misc_feature 1..120: note = Artificially Synthesized Probe
  source 1..120: mol_type = other DNA
ctgctctccaatgcagaatacccagatgagggcagggtctcagaggtccccccaacatctggagaaaactgggaagtatcctgctcctggctagggattccaggtggggttgaaggttgc

SEQ ID NO: 6937 - DNA, 120 bp, synthetic construct
  misc_feature 1..120: note = Artificially Synthesized Probe
  source 1..120: mol_type = other DNA
ctaagctttgttcttgtttctggcagcttctgacctctccccagcatagaacatgtcccctttttgttaattttcccaaagcagcaccaacacaaggcagattttaattttttttttttt

SEQ ID NO: 6938 - DNA, 120 bp, synthetic construct
  misc_feature 1..120: note = Artificially Synthesized Probe
  source 1..120: mol_type = other DNA
aggcaggagaatggcgtgaacccaggaggcggaggttgcagtgagccaagatcacgccactgcactccagcctgggcgacagagtgagactccgtctcaaaaaaaaaaaaaaaaaggctg

SEQ ID NO: 6939 - DNA, 120 bp, synthetic construct
  misc_feature 1..120: note = Artificially Synthesized Probe
  source 1..120: mol_type = other DNA
gaatttgggggaatgagcaagatgctgacattaagcattgcctgggaagggcctattatttccgttatttctgcttttatgtaaccattggttactttgggggctataacacgtataatt

SEQ ID NO: 6940 - DNA, 120 bp, synthetic construct
  misc_feature 1..120: note = Artificially Synthesized Probe
  source 1..120: mol_type = other DNA
aatcttaaactttgtgcacccttcccactctgaagaacagtgagccagccggccagggtgcgggtatctcctacctaccctggggcccctcactgtatgttgactattgacaaatattta

SEQ ID NO: 6941 - DNA, 120 bp, synthetic construct
  misc_feature 1..120: note = Artificially Synthesized Probe
  source 1..120: mol_type = other DNA
ggcagaggggagagctgggcaacagtgagttgcacagacttgtcttattaccgctgtggtatgtgcaggaaggggaggtgctggttctgaggctccagagggcttgtctttttttttttt

SEQ ID NO: 6942 - DNA, 120 bp, synthetic construct
  misc_feature 1..120: note = Artificially Synthesized Probe
  source 1..120: mol_type = other DNA
gcgtaataaacaagataggtgagtgcatatgcagcgtggtctgttgtgctgagggctgaagagaaaccagaagcagggctcagaggccaggaggactctgcaaagggatttggcattatc

SEQ ID NO: 6943 - DNA, 120 bp, synthetic construct
  misc_feature 1..120: note = Artificially Synthesized Probe
  source 1..120: mol_type = other DNA
cagagtgtatgctgtcctagaagcaaaagaagaaagtgtttcagtgtttctaggagcaggaagtgatcaacagccttagatcctccttttaggccaagtaacatgaggactaagaattga

SEQ ID NO: 6944 - DNA, 120 bp, synthetic construct
  misc_feature 1..120: note = Artificially Synthesized Probe
  source 1..120: mol_type = other DNA
tatgtgtggcatcatagttaccttgggcactgggacctgtatttccccttcgtctcttcactcactcatttccccaagacatgtgaaactgccttttcctgcatcaggaaaagtagtaga

SEQ ID NO: 6945 - DNA, 120 bp, synthetic construct
  misc_feature 1..120: note = Artificially Synthesized Probe
  source 1..120: mol_type = other DNA
agataacgaaaactgaggcttagggaagaacaatgacttgctagaagtcaaaaagcaagccaagtgcaggctccaaactgcacacaggattttgagccctagtgccacactaatgcagaa

SEQ ID NO: 6946 - DNA, 120 bp, synthetic construct
  misc_feature 1..120: note = Artificially Synthesized Probe
  source 1..120: mol_type = other DNA
agtgggtgatgcttttgctgctgcttaatcctaccccctcttcaaagcagagtgggacttggagagcaaaggcccatgcccccttcgctcctcctctcatcatttgcattgggcattagt

SEQ ID NO: 6947 - DNA, 120 bp, synthetic construct
  misc_feature 1..120: note = Artificially Synthesized Probe
  source 1..120: mol_type = other DNA
tactgcagcagtcctcctttaggtaaccaaatcaggaagcccttcactggctgcaacagagtggcaaacccatccttttggtagtaatgactcagtggacttttggttgagatggcatgc

SEQ ID NO: 6948 - DNA, 120 bp, synthetic construct
  misc_feature 1..120: note = Artificially Synthesized Probe
  source 1..120: mol_type = other DNA
atgatgattagtgaactctacctgttagccaagagaccccatgcacccttcctagttaactaagatgatctacatggtaacttcacattggcaaaaattaccaaggggaccctccctaat

SEQ ID NO: 6949 - DNA, 120 bp, synthetic construct
  misc_feature 1..120: note = Artificially Synthesized Probe
  source 1..120: mol_type = other DNA
accagcttgggtgggctcatattctgccagggaagacaaccagtcaccagggaaaaacacacacacacaaatgagatcatttccaatcagaaggaataagaagaaaataagacacatgat

SEQ ID NO: 6950 - DNA, 120 bp, synthetic construct
  misc_feature 1..120: note = Artificially Synthesized Probe
  source 1..120: mol_type = other DNA
gcagttactggaaatgcagttactagaaaacttttaagtttgttttgaacaacttgggtgtgtaaatctatttcaactgtcatctttaggaatgtgtttctcatagaaatttagcacctg

SEQ ID NO: 6951 - DNA, 120 bp, synthetic construct
  misc_feature 1..120: note = Artificially Synthesized Probe
  source 1..120: mol_type = other DNA
ttctttttttttttttcttttgagacagggtttccctctttcacctaggctggagtacagtggtatgatcacagctcactgcagtcttgacctcctgaactcaagggatcctcccacctc

SEQ ID NO: 6952 - DNA, 120 bp, synthetic construct
  misc_feature 1..120: note = Artificially Synthesized Probe
  source 1..120: mol_type = other DNA
tcaagaaatccagctgtcatctgccctgtctggttacagtcatcatcgatggcctgaatggggagagacagaagactgtatgacaatcagtggagctcatggaccattcaggcctctgtc

SEQ ID NO: 6953 - DNA, 120 bp, synthetic construct
  misc_feature 1..120: note = Artificially Synthesized Probe
  source 1..120: mol_type = other DNA
tacagctcatatgtgaccctggatcaagctgtgcctgaagcccctgatttacgtgagataataaattcgctttctggcttaagccagtttgagttgtgaatctgcttcctagaacaaaca

SEQ ID NO: 6954 - DNA, 120 bp, synthetic construct
  misc_feature 1..120: note = Artificially Synthesized Probe
  source 1..120: mol_type = other DNA
catcatgtctctgctctgtcctgtcacctttggctgaggcctcattctcccccatgtgaccatcacctcggcctcccagcctctaaactcacccaaaaggatctttcttctttttttctt

SEQ ID NO: 6955 - DNA, 120 bp, synthetic construct
  misc_feature 1..120: note = Artificially Synthesized Probe
  source 1..120: mol_type = other DNA
cagaggggcttgacttggctgctatcctcagggggacctaggagtctggctcgcagcccctccttcctcagacccaggagtccagggccccatcccctccttcctcagacccaggagtcc

SEQ ID NO: 6956 - DNA, 120 bp, synthetic construct
  misc_feature 1..120: note = Artificially Synthesized Probe
  source 1..120: mol_type = other DNA
acatctgacttgatcatccctactgttgtcactgctcctctcaggcctgaaagagtgtttctcaaatttacagtatttatggtaacccacagtgagaggtacattttactgtatctccaa

SEQ ID NO: 6957 - DNA, 120 bp, synthetic construct
  misc_feature 1..120: note = Artificially Synthesized Probe
  source 1..120: mol_type = other DNA
acagaaacaagagaagcggagctttgtgcttgcctaaagacgtacccacaactacatagataacggagagttatgcagatagctttacagataagatactcaaacagctacagagatgaa

SEQ ID NO: 6958 - DNA, 120 bp, synthetic construct
  misc_feature 1..120: note = Artificially Synthesized Probe
  source 1..120: mol_type = other DNA
accatactctgacattttctaccctttttcggaaaaatgccagccctctgcctggatgtcatgatcacacatggtcacaacctaatttggaaaacaccagcatgaaagacctctttgcta

SEQ ID NO: 6959 - DNA, 120 bp, synthetic construct
  misc_feature 1..120: note = Artificially Synthesized Probe
  source 1..120: mol_type = other DNA
gccagcctgcaaagaccctgtttctaagtgatttccccttctcaggtgccagggattgaaacctggctgttttggagggctattttatttcttggcccaccacaatcctttttttctttc

SEQ ID NO: 6960 - DNA, 120 bp, synthetic construct
  misc_feature 1..120: note = Artificially Synthesized Probe
  source 1..120: mol_type = other DNA
ttttataaggtcattctggattcttggtggagaaaattggaaaaggatgagaggaagtggggagagagctgggtggctgtttgtcaccaaagtgagaggtgacagtggctcagacagctg

SEQ ID NO: 6961 - DNA, 120 bp, synthetic construct
  misc_feature 1..120: note = Artificially Synthesized Probe
  source 1..120: mol_type = other DNA
gccttttttcttaaaaaaaaaaacacaacataggagttgcccctttaagacagaaaagaacctcatccacccatcagtaagaggccccaagcttcttgctgtgagtcagggaggcttctg

SEQ ID NO: 6962 - DNA, 120 bp, synthetic construct
  misc_feature 1..120: note = Artificially Synthesized Probe
  source 1..120: mol_type = other DNA
gaaaaaaaaaaagttttataattgaggtaaatcattcagcattaagtgctggctttctcttaaagagacgacatatccaccaatatcaaaaacagcctcaaagctgggcgtggcggctca

SEQ ID NO: 6963 - DNA, 120 bp, synthetic construct
  misc_feature 1..120: note = Artificially Synthesized Probe
  source 1..120: mol_type = other DNA
agagggattttataaagtgattttcgacagctcttcctgaacccctgacacagctcaaggacttgtgtggttctgtcctctaggcttttctgtcaagcgagtccctgggcacgtgctagg

SEQ ID NO: 6964 - DNA, 120 bp, synthetic construct
  misc_feature 1..120: note = Artificially Synthesized Probe
  source 1..120: mol_type = other DNA
cctgaaggttaagcttcatcagcttcctgtaaaatgtgcccctgaacaggacagggtgttactgagttgccaaatacctattaaaatgttagatacacgcacatacccagaaacatacac

SEQ ID NO: 6965 - DNA, 120 bp, synthetic construct
  misc_feature 1..120: note = Artificially Synthesized Probe
  source 1..120: mol_type = other DNA
gaatgtgagtcactccctccactcagttaggttggctccttgaactttcatctctagcaaacatactttcctctccctttctagttgctaagtataggggaaaacacagcaaaacacagg

SEQ ID NO: 6966 - DNA, 120 bp, synthetic construct
  misc_feature 1..120: note = Artificially Synthesized Probe
  source 1..120: mol_type = other DNA
ctgacagctttgggagaagggaaagagggtgggacagtacccaggtctaatctggtgtttaggaagctggcagggtctgaatcatttatttgttctgaaaaggacatcaacagacacatc

SEQ ID NO: 6967 - DNA, 120 bp, synthetic construct
  misc_feature 1..120: note = Artificially Synthesized Probe
  source 1..120: mol_type = other DNA
taggactccaaagatgtgacagtaacgaacagtcagagcagggaggaaaccaagtgttgggtcccaggaccccaagaggaatgtgtctcaaaagggctacaggtgacatccctgtcatgt

SEQ ID NO: 6968 - DNA, 120 bp, synthetic construct
  misc_feature 1..120: note = Artificially Synthesized Probe
  source 1..120: mol_type = other DNA
gtgcctcagtttctccgtgcattaaacagggaccgtgacttcttccagtgggtaagaaatagagaaagcaactcactctgaacagttatcaagagagtgaatccagaacgagggaaaaga

SEQ ID NO: 6969 - DNA, 120 bp, synthetic construct
  misc_feature 1..120: note = Artificially Synthesized Probe
  source 1..120: mol_type = other DNA
aagtctgaaaggaagaaatcaaggttaaaactaaggggcctaggtagagttccaggccccactggagacccagaaatcctaggaacctttcctcttcaggaaactagagttttggtcctg

SEQ ID NO: 6970 - DNA, 120 bp, synthetic construct
  misc_feature 1..120: note = Artificially Synthesized Probe
  source 1..120: mol_type = other DNA
tcccagaatattcctaaaattgctttccctcctccatggacactatgggaaatttagttttcccccagttccctaagctccacaagtaaggcccaggaaaacccatgccctgcagaattc

SEQ ID NO: 6971 - DNA, 120 bp, synthetic construct
  misc_feature 1..120: note = Artificially Synthesized Probe
  source 1..120: mol_type = other DNA
cattctaggcagatggaacagcatatacaaagaattgaggaatgtcaagaaattcagcatggctgtaaatagggttggaatgacaccgtgaagcaccaaagagtgtcatttgtgaccttg

SEQ ID NO: 6972 - DNA, 120 bp, synthetic construct
  misc_feature 1..120: note = Artificially Synthesized Probe
  source 1..120: mol_type = other DNA
tactcgctttctacagggaagctcctaaatctaactgcccctagcagctagactccaaatggatcattcattgctccctggcaattaaaccgctggctttaacaacttctttttttatct

SEQ ID NO: 6973 - DNA, 120 bp, synthetic construct
  misc_feature 1..120: note = Artificially Synthesized Probe
  source 1..120: mol_type = other DNA
gggaccactgttctagcaggtaaactccttgaatttaatactgaagccccctaaaagtctaatgtccatccattcattcttgtaacagatacttcaacacttgacacacacgtaactata

SEQ ID NO: 6974 - DNA, 120 bp, synthetic construct
  misc_feature 1..120: note = Artificially Synthesized Probe
  source 1..120: mol_type = other DNA
tgccatgtaagacaggtctttgctcctccttcgccttccaccatgattgtgaggcctccccagccatgtggaactatgagtccattaaacctctttttctttataaatgacccagtctta

SEQ ID NO: 6975 - DNA, 120 bp, synthetic construct
  misc_feature 1..120: note = Artificially Synthesized Probe
  source 1..120: mol_type = other DNA
agtacagctcaggccattgcttcagagggtgcaagccccaagccttggtggcttacacgtggtgctgggcctgctggtgaacagaagtcaagaacagaggtttgggagcctccagctaga

SEQ ID NO: 6976 - DNA, 120 bp, synthetic construct
  misc_feature 1..120: note = Artificially Synthesized Probe
  source 1..120: mol_type = other DNA
caaagtgctgagataacaggtgtgagccaccatgcccggcctcagatgagactttggactgtggacttttgagttaatagtgaaatgagttgagactttgggggactgttgggaaggtat

SEQ ID NO: 6977 - DNA, 120 bp, synthetic construct
  misc_feature 1..120: note = Artificially Synthesized Probe
  source 1..120: mol_type = other DNA
gaagggatattcaaatgtgatacctaaagtgataaatcattaaggaaaagatcagtcagaaggttctgaatggcagcaacaccataaacaaaatctaaagagaaccaatatgctgggaaa

SEQ ID NO: 6978 - DNA, 120 bp, synthetic construct
  misc_feature 1..120: note = Artificially Synthesized Probe
  source 1..120: mol_type = other DNA
accgtgaccggccaatctatgtttttttttcatctgataatcaagaaggctactaagtgattaacgaatgggtaacatactcctatacagcacagatacactggacgtagggataattca

SEQ ID NO: 6979 - DNA, 120 bp, synthetic construct
  misc_feature 1..120: note = Artificially Synthesized Probe
  source 1..120: mol_type = other DNA
tgtgatgtgcccgatgactaacaatttattgactttacaataatgtgaaagtgatacattttatttctttttttcatttgtctttttttttcttcagtaaagatgggctctcactatgtt

SEQ ID NO: 6980 - DNA, 120 bp, synthetic construct
  misc_feature 1..120: note = Artificially Synthesized Probe
  source 1..120: mol_type = other DNA
ggttacagtgagcagagatcatgccactgcattccagcctgagtgacagagcaacactccgtctcaaaaaaaaaaaacaaaaaacaaaagtcaatatcctcagcttgggtgacagagcga

SEQ ID NO: 6981 - DNA, 120 bp, synthetic construct
  misc_feature 1..120: note = Artificially Synthesized Probe
  source 1..120: mol_type = other DNA
acattctgcaaaatcaaaacgatttttggactttttgcccattttcactcgcattccccaaaaacatttgggggagaggggcgcggttctaaaagtttcatgacctatagtgacataatt

SEQ ID NO: 6982 - DNA, 120 bp, synthetic construct
  misc_feature 1..120: note = Artificially Synthesized Probe
  source 1..120: mol_type = other DNA
gtggcaagtaagctctcagcttcttttccatttggttcccaagttctttcccttcattactcaaaactatagtaaacacctcttatctgcctgggatacatttcaagacccggagtggat

SEQ ID NO: 6983 - DNA, 120 bp, synthetic construct
  misc_feature 1..120: note = Artificially Synthesized Probe
  source 1..120: mol_type = other DNA
tcacaatgttaaaaggaggaagtattgaaacccacacttgagccacataagaatcaatggtggagcttttaaaacatgccaattccttgtgtccacccagaacaattaaatcagactctc

SEQ ID NO: 6984 - DNA, 120 bp, synthetic construct
  misc_feature 1..120: note = Artificially Synthesized Probe
  source 1..120: mol_type = other DNA
agccaccacaacctgcccattttgtagggcaaaaattatggccagtggaccaaatttggcctgccatcagtttttgtaaggcctgtaagctaagaatcattttaactttttttcacattg

SEQ ID NO: 6985 - DNA, 120 bp, synthetic construct
  misc_feature 1..120: note = Artificially Synthesized Probe
  source 1..120: mol_type = other DNA
tccttcacagaaaaaggtggccaactgctgctctatagcaataagaaggaaagaactccaagtataaaccaacatcatgtagagtggaaaaaaggccagacacaaaagagtacactgtat

SEQ ID NO: 6986 - DNA, 120 bp, synthetic construct
  misc_feature 1..120: note = Artificially Synthesized Probe
  source 1..120: mol_type = other DNA
gcctggccaacatggtgaaaccctatctctactaaaaatacaaaaattagccagacatggtggcacatgcctggaatcccagctatttgggaggctgagacagcagaatcgcttgcgctc

SEQ ID NO: 6987 - DNA, 120 bp, synthetic construct
  misc_feature 1..120: note = Artificially Synthesized Probe
  source 1..120: mol_type = other DNA
aaaaaaaaaaaaagttgcctaaggctgaggggggaaaagggaaggataggggtgatggctaaggggtgtggggtctttttggagtaatggaaacattttccaattaatggtagtaatgga

SEQ ID NO: 6988 - DNA, 120 bp, synthetic construct
  misc_feature 1..120: note = Artificially Synthesized Probe
  source 1..120: mol_type = other DNA
gactcaaatgaactgtccctatttggcaaaactctctaacctggaggctgtcttctgtcacctgacattctgtccccaaagtcagccaaactttattatacatctttagcaattgatcag

SEQ ID NO: 6989 - DNA, 120 bp, synthetic construct
  misc_feature 1..120: note = Artificially Synthesized Probe
  source 1..120: mol_type = other DNA
cctcttcctaagatccagaagcagaaaccccagcccactctttccccgggagtcgggagtccggagccccactaccttcccctatcagaacaaaagagttccaacttcctaacatcccaa

SEQ ID NO: 6990 - DNA, 120 bp, synthetic construct
  misc_feature 1..120: note = Artificially Synthesized Probe
  source 1..120: mol_type = other DNA
cagacaatgggtgaaacacagacgctaattcacataacagagagtaggcaaccttaagaatgaattgatgcagactcctatagaattcctctgttatgactgggttcttattttctcctc

SEQ ID NO: 6991 - DNA, 120 bp, synthetic construct
  misc_feature 1..120: note = Artificially Synthesized Probe
  source 1..120: mol_type = other DNA
tttctgatcctagaaacagcttgctataggtccttaaggcaaatgccaggagtcaaagaaactgtagaacagtctcaggatgtaaacaataaaatcactgaccaaggagttatatccctg

SEQ ID NO: 6992 - DNA, 120 bp, synthetic construct
  misc_feature 1..120: note = Artificially Synthesized Probe
  source 1..120: mol_type = other DNA
atctgacattaacaaattccagtcaccaaagagtccaatccttcaaaatgtgctgcgagaaaagttgactgcctgaatgctatttgttgtaggaaataagagataatgggatcgttttga

SEQ ID NO: 6993 - DNA, 120 bp, synthetic construct
  misc_feature 1..120: note = Artificially Synthesized Probe
  source 1..120: mol_type = other DNA
gctaattttaaaagttaccatggcataaattcgatcatttactgggtagcacagtgtttaattatttgacacggcttcgaagtacttccatgcagttccggtttcaggtaatggcagtgc

SEQ ID NO: 6994 - DNA, 120 bp, synthetic construct
  misc_feature 1..120: note = Artificially Synthesized Probe
  source 1..120: mol_type = other DNA
ggtttcataaaagagacagcaacattacctgccaaactgagaaagcaaaaacaaggtctggggtgctgatgagtgtgtcatcatctaccatcaacactgctaaaatgaaaggacaaaaat

SEQ ID NO: 6995 - DNA, 120 bp, synthetic construct
  misc_feature 1..120: note = Artificially Synthesized Probe
  source 1..120: mol_type = other DNA
cattactctcccaggaagtttgcagatgtggcaacacctggagtagaaatggaaacaacatacaaatgttagcattcttacgagtccctgtgttttcatgtttttttccaatgaggaaag

SEQ ID NO: 6996 - DNA, 120 bp, synthetic construct
  misc_feature 1..120: note = Artificially Synthesized Probe
  source 1..120: mol_type = other DNA
ttaatagtttagatgcttacagagattacatgcccttcccaagattaccaagtaatttcagtaatagtgctaggatttccaacaggaaaatctgccccgagagcctaggttgttcatggg

SEQ ID NO: 6997 - DNA, 120 bp, synthetic construct
  misc_feature 1..120: note = Artificially Synthesized Probe
  source 1..120: mol_type = other DNA
tgctaaccacagctgaagtatactaactgcaaagagctactgtcactcttcttcttggtataacactgcctctgtacattttatttttggtactccccctcttcttggaaaagtgaactg

SEQ ID NO: 6998 - DNA, 120 bp, synthetic construct
  misc_feature 1..120: note = Artificially Synthesized Probe
  source 1..120: mol_type = other DNA
agacactcatgagtgactgcttccttctcatgtattcttttaagtaggagtttatcccctgtatccatcacagacatttcctttcagatagctcctaatcccccaattttacctgtatca

SEQ ID NO: 6999 - DNA, 120 bp, synthetic construct
  misc_feature 1..120: note = Artificially Synthesized Probe
  source 1..120: mol_type = other DNA
tctgacagctcttagtctattccccttctgtccttcacccatccccatgactgcagtaaatataactttgataaatacagtaaatgccaacaaaacaaaaatccttcctcttctcctcat

SEQ ID NO: 7000 - DNA, 120 bp, synthetic construct
  misc_feature 1..120: note = Artificially Synthesized Probe
  source 1..120: mol_type = other DNA
attacataattatatgacttattgcacaaacacagaaactcagagagctgaaagagacttcagggtcctccttagccagtttccttgtttcacagataaacaactcaaggtccggggata

SEQ ID NO: 7001 - DNA, 120 bp, synthetic construct
  misc_feature 1..120: note = Artificially Synthesized Probe
  source 1..120: mol_type = other DNA
ctacataatctatcaaagttccctagaagaaacaccgttgaaggattctttcctcaaggctagttccttcagactggaaagcaataattatccagagagaagctgaaaacaaacatgcca

SEQ ID NO: 7002 - DNA, 120 bp, synthetic construct
  misc_feature 1..120: note = Artificially Synthesized Probe
  source 1..120: mol_type = other DNA
acatctcctataaatgtttccctcaccactctccaccctgagtattccagtgaactctgattactgtgtttctagtccttgttttcaggtatttcaactatcgactgttcttttgctgtt

SEQ ID NO: 7003 - DNA, 120 bp, synthetic construct
  misc_feature 1..120: note = Artificially Synthesized Probe
  source 1..120: mol_type = other DNA
gccagaaatggtacatgaaaggtcatttttcttcacaagtcttttccaggtgctatacaagattcggggaagagtttttgatgtaaggtttttacccacattcaggaaagtcattctttt

SEQ ID NO: 7004 - DNA, 120 bp, synthetic construct
  misc_feature 1..120: note = Artificially Synthesized Probe
  source 1..120: mol_type = other DNA
aacataaatattatgcataaagtcgttttcaagcaccacttgcttccttcaatccagctatctgctcctgaggtagacaatgaggtcctttctactttcaaactgcgcaggtctgaatta

SEQ ID NO: 7005 - DNA, 120 bp, synthetic construct
  misc_feature 1..120: note = Artificially Synthesized Probe
  source 1..120: mol_type = other DNA
atggtagtgagcaagaagaaccaatttctgccctcacagagctgagcattactaatgaaagttgtcagagctctccctgcttcatgttatagattacctcaaactgacaatgtttcaaat

SEQ ID NO: 7006 - DNA, 120 bp, synthetic construct
  misc_feature 1..120: note = Artificially Synthesized Probe
  source 1..120: mol_type = other DNA
cagaagcaggctcacttgtcactattaagataaatcaaagaattttctgtgatgtttctgtcagtcagcaggaaatttaaaaacaaaacaaaaaatggtgctttcaatgccattgtccat

SEQ ID NO: 7007 - DNA, 120 bp, synthetic construct
  misc_feature 1..120: note = Artificially Synthesized Probe
  source 1..120: mol_type = other DNA
aataggccaaaaaaaaggggccacaggccccatgcaagtccgaaatccagtggggcggtcattaaatcttaaggttcttaaataatctcctttgactctgtgtctcacatctagaacatg

SEQ ID NO: 7008 - DNA, 120 bp, synthetic construct
  misc_feature 1..120: note = Artificially Synthesized Probe
  source 1..120: mol_type = other DNA
tgctaaagtatagcaagagtgacctttgctgcagttcccaataagttcctcatctccatctgagaccacatcagcctggacttcattgtccatatcactatcagcattttggtcaaaacc

SEQ ID NO: 7009 - DNA, 120 bp, synthetic construct
  misc_feature 1..120: note = Artificially Synthesized Probe
  source 1..120: mol_type = other DNA
gccatccagttatcagaaatgcaaaaacctgaaaagacatctcaaaaggccaatcttagtttcacaatagtgatgttatcttcaagagtaactggaaaagttgcaaatcttatgacctct

SEQ ID NO: 7010 - DNA, 120 bp, synthetic construct
  misc_feature 1..120: note = Artificially Synthesized Probe
  source 1..120: mol_type = other DNA
cagagaaccctaatataaggatccagaagcaaaataaatgcacacgatcccaactatctaatgttacacatttgaaaccagaggatgtatgccatggagcaaaacatttgaacatgtcag

SEQ ID NO: 7011 - DNA, 120 bp, synthetic construct
  misc_feature 1..120: note = Artificially Synthesized Probe
  source 1..120: mol_type = other DNA
gttttaaatttggtcattatgctctttaagactgaaagatgtgaagacatcaccatcactttttgaaaggagaaggtcctcatgggaatacctatcatatatcttgggggatggggagtg

SEQ ID NO: 7012 - DNA, 120 bp, synthetic construct
  misc_feature 1..120: note = Artificially Synthesized Probe
  source 1..120: mol_type = other DNA
aacgagagcaaaacatgcatatatcctcactacaaaaagaaaaatactaatactggagcattttgctgtgtctccttacctcgagtgcagtagattgcagtagggccagccgatttattt

SEQ ID NO: 7013 - DNA, 120 bp, synthetic construct
  misc_feature 1..120: note = Artificially Synthesized Probe
  source 1..120: mol_type = other DNA
ctgttcaatttctttccttctagaaaccagcatccaggcacaggaggggaggcccttcttggtggcccaggctttggcgggattatttttcaaagaactttaggagtgggtggtgctttc

SEQ ID NO: 7014 - DNA, 120 bp, synthetic construct
  misc_feature 1..120: note = Artificially Synthesized Probe
  source 1..120: mol_type = other DNA
actggggtgcaggcgattttatcttctttgctccattctgttccttccagataatcgtgtgttcttcatcaggttttcctcagttcttgagagcttttctgatgcaaatctgctttcacc

SEQ ID NO: 7015 - DNA, 120 bp, synthetic construct
  misc_feature 1..120: note = Artificially Synthesized Probe
  source 1..120: mol_type = other DNA
gggtgttccggaggcgagggtgtcccgggagtgtgggtgtcccgggggcgtgggtgtcccgggggttgtgggtgtcccgggagtgtgggtgttccggaggcgagggtgtcccgggagtgt

SEQ ID NO: 7016 - DNA, 120 bp, synthetic construct
  misc_feature 1..120: note = Artificially Synthesized Probe
  source 1..120: mol_type = other DNA
ttgagcccgattctttggtgtccccgcctgcatcctcagcctccttccaaaccagaccagttctctaggggcgtcgacgtgtgaaactgattttaaagaaaacaggcagtggcctttctc

SEQ ID NO: 7017 - DNA, 120 bp, synthetic construct
  misc_feature 1..120: note = Artificially Synthesized Probe
  source 1..120: mol_type = other DNA
gcctcggaccaggacggaggcctggggaaggcggatctggccgccggagacgcggtgcgggtggagacgagggatttggatttccgcgggcggctgtacggatttccacgcgcggttcac

SEQ ID NO: 7018 - DNA, 120 bp, synthetic construct
  misc_feature 1..120: note = Artificially Synthesized Probe
  source 1..120: mol_type = other DNA
aaacaacacttagggacctgggactttctccagctcacgctcacgggtcacctcacactccaagatcacctcaaagaggacacctcacacagggcacacttcacactcacaggtcacctc

SEQ ID NO: 7019 - DNA, 120 bp, synthetic construct
  misc_feature 1..120: note = Artificially Synthesized Probe
  source 1..120: mol_type = other DNA
ccatacctcacacagatcacctcatactcacagatcacttcattctcacaggatacctcacactcagggcacacttcacactcacaggtcacacctcacacagatcatctcattctcaca

SEQ ID NO: 7020 - DNA, 120 bp, synthetic construct
  misc_feature 1..120: note = Artificially Synthesized Probe
  source 1..120: mol_type = other DNA
aaggctaacatgaccctttccagacaaattgaggatggtcatgcctagcatttttatacacctagttttgaaagcatttctcatctgttgtattctcacagcaccccgtgagtttaagtt

SEQ ID NO: 7021 - DNA, 120 bp, synthetic construct
  misc_feature 1..120: note = Artificially Synthesized Probe
  source 1..120: mol_type = other DNA
ccacttccacatcccaccacgcaggaccgcttggtaaacttccccttctctactttccattacaaaggtttgaggggtttgttttttttttaaccatctgaatattaaattatcacaaag

SEQ ID NO: 7022 - DNA, 120 bp, synthetic construct
  misc_feature 1..120: note = Artificially Synthesized Probe
  source 1..120: mol_type = other DNA
aggctaccctttctctggcacagcagttcatccttgaccacccaagaccacattcttacactgaatgagctctcctgtgcagcagccattttcttctctaagcagaagagagcccagcaa

SEQ ID NO: 7023 - DNA, 120 bp, synthetic construct
  misc_feature 1..120: note = Artificially Synthesized Probe
  source 1..120: mol_type = other DNA
agtttgattcatctttaggtagaatttcattcaccttctactaaagtcaaacaacacatcttctccctgaaaagtgagcagagggcggttttaagacgtaagccctctgtttcctccaaa

SEQ ID NO: 7024 - DNA, 120 bp, synthetic construct
  misc_feature 1..120: note = Artificially Synthesized Probe
  source 1..120: mol_type = other DNA
ggttactctttgaggtgggatctttgcctgatctttgcaaaatcaggagcattggatcaaagctatgtgaagatcctgtgaggtgaacagtgaaatctcacagcgacatttgtattcttg

SEQ ID NO: 7025 - DNA, 120 bp, synthetic construct
  misc_feature 1..120: note = Artificially Synthesized Probe
  source 1..120: mol_type = other DNA
gtcacttccacagacagacagacatccccaaaaggggagcaaccatgctgggcacgactgctgtggccaccgtgctctcagccactttcccatgcccaaataaaacgataaaagactggg

SEQ ID NO: 7026 - DNA, 120 bp, synthetic construct
  misc_feature 1..120: note = Artificially Synthesized Probe
  source 1..120: mol_type = other DNA
acagagagagactgagggagagactctgaggacatggagagagactcaaagagactccaagattcaaagagactaatagagacacagagatggaatagaaaagatgagaggcagaggcag

SEQ ID NO: 7027 - DNA, 120 bp, synthetic construct
  misc_feature 1..120: note = Artificially Synthesized Probe
  source 1..120: mol_type = other DNA
aattttcaacatcactgaaatgaaccctcacatggaagctattttttaaaaacaaaagctgtttgatagatgtttgaggctgtagctcccaggatcctgtggaattggatgttctctccc

SEQ ID NO: 7028 - DNA, 120 bp, synthetic construct
  misc_feature 1..120: note = Artificially Synthesized Probe
  source 1..120: mol_type = other DNA
gcccgagatggcgcggggacccagcgctccggcggcgggcgccctgcacgcggcccgggcccggggacagccccggagctggtagccgcccggcaccgatggaccttgacccgcgaggcg

SEQ ID NO: 7029 - DNA, 120 bp, synthetic construct
  misc_feature 1..120: note = Artificially Synthesized Probe
  source 1..120: mol_type = other DNA
tgccgctgggctttcagacacttggcgagggtgctctgggtgggcaccttggagaaggtctggatgtgcctattgagtcttttaaacccagtggctggagcagaattatcagaggggctt

SEQ ID NO: 7030 - DNA, 120 bp, synthetic construct
  misc_feature 1..120: note = Artificially Synthesized Probe
  source 1..120: mol_type = other DNA
caaggctgctctcattaaaatcaaatttagcctcttgcatcattgtgcccctggttgttggaacaaaagcagagagctggggaaggttcctgacagactgggcgtgtctgtgagtttcat

SEQ ID NO: 7031 - DNA, 120 bp, synthetic construct
  misc_feature 1..120: note = Artificially Synthesized Probe
  source 1..120: mol_type = other DNA
tggaggagtttgaaggcaacatctccaggtactttgggatctgctgaattggacaaaaaagggcatccagttgctgatttcaggaaaatatgccactgcagcttctgagcgtggaggttt

SEQ ID NO: 7032 - DNA, 120 bp, synthetic construct
  misc_feature 1..120: note = Artificially Synthesized Probe
  source 1..120: mol_type = other DNA
cattaaggaaatatccgatgcattgatcaacatgtttgtccattcagcagattttactggcacctcctgcatgtcagaccccctttctgggtggtggggagttgaggatgagttcagcct

SEQ ID NO: 7033 - DNA, 120 bp, synthetic construct
  misc_feature 1..120: note = Artificially Synthesized Probe
  source 1..120: mol_type = other DNA
agatctgggggtgaatcctggctctgccagccattagccagagtggaagtgggcaaatggattaacgcctccagcacctggtttctcaccgagaacacagagaaggttataatctggacc

SEQ ID NO: 7034 - DNA, 120 bp, synthetic construct
  misc_feature 1..120: note = Artificially Synthesized Probe
  source 1..120: mol_type = other DNA
tgccatgatccacaccatgcaccacgtgtgcctttgtcatcgaaatacctgcagttcccaaatacatctggcctcacagggttgttggggcttaaatgtgcaaatacgagtaaagaggtg

SEQ ID NO: 7035 - DNA, 120 bp, synthetic construct
  misc_feature 1..120: note = Artificially Synthesized Probe
  source 1..120: mol_type = other DNA
attaaatttctatcatgcacaattatggatgcaaagaatgaatgacatcccactggcatgtgaggattcgggcagcttctggactgaaatacagacttcataattgctccatccagattg

SEQ ID NO: 7036 - DNA, 120 bp, synthetic construct
  misc_feature 1..120: note = Artificially Synthesized Probe
  source 1..120: mol_type = other DNA
cgactttccttctgatgcagacatggtccccactggggcaaggctgcagttttcttttaaaaaacagatctttcaaaataaaaggggccttgaagaaaatcgtggaataaataacagtct

SEQ ID NO: 7037 - DNA, 120 bp, synthetic construct
  misc_feature 1..120: note = Artificially Synthesized Probe
  source 1..120: mol_type = other DNA
agtgcacgttaatcacattaactagccatgttaactagtgacgtagattaataatgatgaatcaataggaatgagtcctgtatactgacggatatccgggcgataggattcttcagcgag

SEQ ID NO: 7038 - DNA, 120 bp, synthetic construct
  misc_feature 1..120: note = Artificially Synthesized Probe
  source 1..120: mol_type = other DNA
cctgtttccagaagaaggactgaactgaccagatttgcatgatatgtttttattgcactgggaattggggcctagaggcccactggggtttgattgtgctgttggtttcatgatggcctg

SEQ ID NO: 7039 - DNA, 120 bp, synthetic construct
  misc_feature 1..120: note = Artificially Synthesized Probe
  source 1..120: mol_type = other DNA
aggaaggaactgttaaatcctgtgaccccagttactaatggaaatgggggcatcaaatggggcttaatccggctactaattttctcatcgtcacttcgttattatcttactaaaaaatgt

SEQ ID NO: 7040 - DNA, 120 bp, synthetic construct
  misc_feature 1..120: note = Artificially Synthesized Probe
  source 1..120: mol_type = other DNA
tcctgagcactcacagcattgcccccatgtagtcctaagggtggtcctggatgaggcgtgtcacccccattctgcaggagcagccgagtttctggcaggtcacatgaggcaccaccgtac

SEQ ID NO: 7041 - DNA, 120 bp, synthetic construct
  misc_feature 1..120: note = Artificially Synthesized Probe
  source 1..120: mol_type = other DNA
cttccttccatgacattccctctctggccgtccccctgctccacatcccacgtcactccaccagatacctctcagatcctcagatatttcttggatttttccatttttccatcttcctcc

SEQ ID NO: 7042 - DNA, 120 bp, synthetic construct
  misc_feature 1..120: note = Artificially Synthesized Probe
  source 1..120: mol_type = other DNA
cgcacacgtgtccactgtgaggcgtcggtcacggtcccctcggccccgcacacgtgtccactgtgacgcgtcggtcactgtcccctcggccccgcacacgtgtccactgtgaggcgtcgg

SEQ ID NO: 7043 - DNA, 120 bp, synthetic construct
  misc_feature 1..120: note = Artificially Synthesized Probe
  source 1..120: mol_type = other DNA
gtgcgtgggtgtgtgtggtcgtgcaggggtatgtaggggtgtgtcggggggtgtctgtgggtgtgtaaatgtaggttggtgtttgttggtgtgtaggtgtgtgctgatgtgagtgggtgt

SEQ ID NO: 7044 - DNA, 120 bp, synthetic construct
  misc_feature 1..120: note = Artificially Synthesized Probe
  source 1..120: mol_type = other DNA
agcaacagaggtggcctcattttctctcctctcccacggcctccccacctcctccctttttataggacggaaaacctactgctggttattcttaccctgtgagaataagcatttgtattt

SEQ ID NO: 7045 - DNA, 120 bp, synthetic construct
  misc_feature 1..120: note = Artificially Synthesized Probe
  source 1..120: mol_type = other DNA
tttttttttcctgttttaatcttggtggtaactaattcagaagctcttcatatactttgcaggtaaaacaaaatatagctgcctgcttgcaagttgtggctggaggcagatgtttgcagc

SEQ ID NO: 7046 - DNA, 120 bp, synthetic construct
  misc_feature 1..120: note = Artificially Synthesized Probe
  source 1..120: mol_type = other DNA
ggggtttatatacagaagcctttatgtttgtccatcctcacatagccctgtgagttataggaggtgacgcttaccgctgcgtaaagacgagagaactggggtttagagaaggaaagtaga

SEQ ID NO: 7047 - DNA, 120 bp, synthetic construct
  misc_feature 1..120: note = Artificially Synthesized Probe
  source 1..120: mol_type = other DNA
atgatcgtttcttcttccgcagaggctgtggtttgcatacgaaagcagctgtggttcatgaccatagcattaatgagttaaaatccatgattaatagttctctttaaaggccgggcacac

SEQ ID NO: 7048 - DNA, 120 bp, synthetic construct
  misc_feature 1..120: note = Artificially Synthesized Probe
  source 1..120: mol_type = other DNA
tttctaatagtcgctgaaaagcacgtagccggcacatcaacccaagcgctcctgggtgcttttgctttagggttacgttaagatatttacgttctttttttaaagtcagctttattgaga

SEQ ID NO: 7049 - DNA, 120 bp, synthetic construct
  misc_feature 1..120: note = Artificially Synthesized Probe
  source 1..120: mol_type = other DNA
atttgagttgtttccgcttttgacaatcaaggataatgttgctttgagcaaccgtgtatgaggttttgcagggcaggtattttcagctctcttggatgtattctggggagcagttgccgg

SEQ ID NO: 7050 - DNA, 120 bp, synthetic construct
  misc_feature 1..120: note = Artificially Synthesized Probe
  source 1..120: mol_type = other DNA
taggacgtccaatttagttacttttgttattctcgtgcttttggtgtaattacgtttgaatgctgaaagcacgtgtgttaggcgaagagtggtgcgggaggcggtacctgcacttggcac

SEQ ID NO: 7051 - DNA, 120 bp, synthetic construct
  misc_feature 1..120: note = Artificially Synthesized Probe
  source 1..120: mol_type = other DNA
cctggtgtatggagaggatggggctgggtggggggagcagggcccgtggtgtatggagaggatggggctgggtggggggagcagggcccctggtgtatggagaggatggggctgggtggg

SEQ ID NO: 7052 - DNA, 120 bp, synthetic construct
  misc_feature 1..120: note = Artificially Synthesized Probe
  source 1..120: mol_type = other DNA
aagagactgtctgcaaacagctgtcccaaggcccaggaactcctcccagccaagacacatgaacagaggcagttgcagaagggcttgcggggctgacacagtatttctagatgcagaaac

SEQ ID NO: 7053 - DNA, 120 bp, synthetic construct
  misc_feature 1..120: note = Artificially Synthesized Probe
  source 1..120: mol_type = other DNA
cgtccagagagggcaaaacagatgcaatattaataagaaagacgggagaacaatgacccggggcccgcgcgtcactgcaaagctttccatttgtacgaggagaggactgagaggttcgat

SEQ ID NO: 7054 - DNA, 120 bp, synthetic construct
  misc_feature 1..120: note = Artificially Synthesized Probe
  source 1..120: mol_type = other DNA
ggctggtcactcctccatcccagggctcactcagccaatgcttattgattagtatagactgggaaaccgaggtgggagaggtgacaggagctgacacaggcccaggacgcacagatcact

SEQ ID NO: 7055 - DNA, 120 bp, synthetic construct
  misc_feature 1..120: note = Artificially Synthesized Probe
  source 1..120: mol_type = other DNA
tcttctcctagagcccatgaactaaggctcggggaaacaaaatggttttgaggaccagtgagggatcggtttggaatttcgaaggattttctgttctgctgataaaaattcatgtttctc

SEQ ID NO: 7056 - DNA, 120 bp, synthetic construct
  misc_feature 1..120: note = Artificially Synthesized Probe
  source 1..120: mol_type = other DNA
aacgtttcagagaggggtgatgcgtggagggactgaaacgaaggagcatggcagagacgggcttggtgaagggggcgttgttccactgaccttctggggtctctcccacaaactgagtta

SEQ ID NO: 7057 - DNA, 120 bp, synthetic construct
  misc_feature 1..120: note = Artificially Synthesized Probe
  source 1..120: mol_type = other DNA
atctgggcacagggcggagcctcgtctccagcagggcagggggctgcaggagccgttcttagcatctgggcacagggcggagcctcgtctccagcagggcagggggctgcaggagccgtt

SEQ ID NO: 7058 - DNA, 120 bp, synthetic construct
  misc_feature 1..120: note = Artificially Synthesized Probe
  source 1..120: mol_type = other DNA
gtgtatgcatgtgtatgagtgtgtaagggcatgtgtgtgcatgcatgtcctgtgtgggtgcacgtgtcggtgtgcgtgtgtgacgtgtacatgtgtaacgtgtgtaagggtgtgcatgtg

SEQ ID NO: 7059 - DNA, 120 bp, synthetic construct
  misc_feature 1..120: note = Artificially Synthesized Probe
  source 1..120: mol_type = other DNA
cccaggtagaggacgttcacgttgcttccagtttcctggcttatttttatagtcagaagaaaaatgaacttttttcatttgaagaacaatcctgaaatgagctttcgagagactctatgg

SEQ ID NO: 7060 - DNA, 120 bp, synthetic construct
  misc_feature 1..120: note = Artificially Synthesized Probe
  source 1..120: mol_type = other DNA
catggcggctgtcccctgagccttctctcactgagcagaatggcaccgtcacggggtcgcatggcggctgtcccctgagccttctctcactgagcagaatggcaccgtcacggggtcgca

SEQ ID NO: 7061 - DNA, 120 bp, synthetic construct
  misc_feature 1..120: note = Artificially Synthesized Probe
  source 1..120: mol_type = other DNA
aatggcaccgtcacgggggtcgcatggcggctgtcccctgagccttctctcactgagcagaacggcaccgtcacggggtcgcacggcggctgtcccctgagccttctctcattgcgcaga

SEQ ID NO: 7062 - DNA, 120 bp, synthetic construct
  misc_feature 1..120: note = Artificially Synthesized Probe
  source 1..120: mol_type = other DNA
caaagttacatcaactgaggctggccacagaaggtagctgtcttctcctgccctcacctggcagctagacatttctttgcttaataagtaaaaggaaattattaacaattatgtaaccat

SEQ ID NO: 7063 - DNA, 120 bp, synthetic construct
  misc_feature 1..120: note = Artificially Synthesized Probe
  source 1..120: mol_type = other DNA
gtccatgaatactggatgagccgacagtagcgtgtttaaaactacagtgggtctgagactttcaagcaattctttttccccgtttgcttttgaaataaagtctaaaccatcgcaattgtt

SEQ ID NO: 7064 - DNA, 120 bp, synthetic construct
  misc_feature 1..120: note = Artificially Synthesized Probe
  source 1..120: mol_type = other DNA
agtgctgcctgtccccatgggttccgaagaaggcaggttcattggaaaagcttggaaatctctagtccttagatcacaggggctcttgtcagtgtggctgtctcagactgtgaggactca

SEQ ID NO: 7065 - DNA, 120 bp, synthetic construct
  misc_feature 1..120: note = Artificially Synthesized Probe
  source 1..120: mol_type = other DNA
agcctggtattaaacagcttaatatatctcgctaatgacaggtggtggttttctgctgtgtgagtgatgagaagattacccaagatagaaaggctaatttttgcctccgtgccttcattt

SEQ ID NO: 7066 - DNA, 120 bp, synthetic construct
  misc_feature 1..120: note = Artificially Synthesized Probe
  source 1..120: mol_type = other DNA
ttagatgagtcgcgatacagaaagctctgaggatagagcctggcacatggaaagtcctgtgtgtttactgccctcagtaatatactgaataatacctattggtaaatgaagggaaaattc

SEQ ID NO: 7067 - DNA, 120 bp, synthetic construct
  misc_feature 1..120: note = Artificially Synthesized Probe
  source 1..120: mol_type = other DNA
tacggcctctcaggcaccgggtctttttctgcctgtctggcagggtttgggaggtggtggttttccataatgcatgaatggttggtgtttgacccacccctctttgggcctcagtttccc

SEQ ID NO: 7068 - DNA, 120 bp, synthetic construct
  misc_feature 1..120: note = Artificially Synthesized Probe
  source 1..120: mol_type = other DNA
cacatccctgttggcttctagtccctcataggcattggtaataagctgccagtttcctctatttttaaccaaagcaaacgttttctattttcccacaaactgaagagcgttgaaatgttt

SEQ ID NO: 7069 - DNA, 120 bp, synthetic construct
  misc_feature 1..120: note = Artificially Synthesized Probe
  source 1..120: mol_type = other DNA
tcctttgtgaacagcagtgccttctctcgatcattctgtgtggttttctaagtgtcatgagccttagcattgatggcctgactggatttggaggaaacaggtcgtaatttcacagccttt

SEQ ID NO: 7070 - DNA, 120 bp, synthetic construct
  misc_feature 1..120: note = Artificially Synthesized Probe
  source 1..120: mol_type = other DNA
tggctccttcctgcacagttcagtgagtgacttaggaagaacagaaaggcgggtgttgaaaatctgccctgtccttcccgctctgaggctgtccttctggcagagtcacgtggaaggttt

SEQ ID NO: 7071 - DNA, 120 bp, synthetic construct
  misc_feature 1..120: note = Artificially Synthesized Probe
  source 1..120: mol_type = other DNA
ggcaggtgaagttctattccaccctgcacatagtcagcttgtttgttttaataatttccttcttcgaatgtgatgttttgtttatcgtcacataaaaagcaaaaccagaccccctccctg

SEQ ID NO: 7072 - DNA, 120 bp, synthetic construct
  misc_feature 1..120: note = Artificially Synthesized Probe
  source 1..120: mol_type = other DNA
tctgcagaaagggaaactgaggcctagggccacccagcaagcactctttctgctcccctcatgggccaagggacatctcacagggcacagcagagaacttgagggtggagatgatgataa

SEQ ID NO: 7073 - DNA, 120 bp, synthetic construct
  misc_feature 1..120: note = Artificially Synthesized Probe
  source 1..120: mol_type = other DNA
atcggcagatagaaaagctcacattttagcatcacacaacgttgtcactgtacctcaggtgataatagtgcagtatgcgttcacagcaacagtggtggagataatggtgatgacggtgat

SEQ ID NO: 7074 - DNA, 120 bp, synthetic construct
  misc_feature 1..120: note = Artificially Synthesized Probe
  source 1..120: mol_type = other DNA
acattgatagaaatggaaggaatgaggtggcaagagctcaaggctgcagatagatctagacttctctggacaattctttgactgagtcctcattcattcatttgtttatgaaacacctgt

SEQ ID NO: 7075 - DNA, 120 bp, synthetic construct
  misc_feature 1..120: note = Artificially Synthesized Probe
  source 1..120: mol_type = other DNA
tgtgcatatatgtccatgcacacgtgtgcatctgtgagtgtgcgagtgtatggatgcacatgtgcatgaatgtgtgtacgcacatgtatctgtgcacatatgtgtgtgcacacgtgttaa

SEQ ID NO: 7076 - DNA, 120 bp, synthetic construct
  misc_feature 1..120: note = Artificially Synthesized Probe
  source 1..120: mol_type = other DNA
ctcagaaggccccattctcagagctgcactgcacaccactagccaggtgtgcccattagatttaagataaaatcagacttaaaactcagtttctggaggctctggtcacatttcgagtgt

SEQ ID NO: 7077 - DNA, 120 bp, synthetic construct
  misc_feature 1..120: note = Artificially Synthesized Probe
  source 1..120: mol_type = other DNA
aggagacctgtgccacccgggagacctgtgccacccaagagacctgtgccacccgggagacctgtgccacccaagagacctgtgccacccgggagacctgtgccacccaagagacctgtg

SEQ ID NO: 7078 - DNA, 120 bp, synthetic construct
  misc_feature 1..120: note = Artificially Synthesized Probe
  source 1..120: mol_type = other DNA
aaggctttttaacctcaaaaatatccaacactccagaatttaccacccctggaactgcgggctgactgcagcggaccatttggtttgacctttagtgttttagaaaaatgaaatccattt

SEQ ID NO: 7079 - DNA, 120 bp, synthetic construct
  misc_feature 1..120: note = Artificially Synthesized Probe
  source 1..120: mol_type = other DNA
cttggtggaggaagcatgcttacacgcttacacgcttacgcgcttacacacttatgctcagacacgaccttgacaattcctccacgtttccaccatgaccacatcggtcaaacacttgcg

SEQ ID NO: 7080 - DNA, 120 bp, synthetic construct
  misc_feature 1..120: note = Artificially Synthesized Probe
  source 1..120: mol_type = other DNA
tctcagtgacaaaccgtttctgtttctgtcttgttttctcagacaaacgagggagcaggagacaccccctgactttttttatttctctgactacgagaggcacaatgcggagattgctgc

SEQ ID NO: 7081 - DNA, 120 bp, synthetic construct
  misc_feature 1..120: note = Artificially Synthesized Probe
  source 1..120: mol_type = other DNA
attggagtttaaagggcttttttaaagatcaaagtcttctgtggtgactatagaaatcgccagaagccagattttccaccatttcagctatctagaacagcctgaacccaaaaagggctt

SEQ ID NO: 7082 - DNA, 120 bp, synthetic construct
  misc_feature 1..120: note = Artificially Synthesized Probe
  source 1..120: mol_type = other DNA
ctttaatttaattttgttttaaatttagccctggaatgagggcaggctttagctatgcaggcagttggtgctgtgtgcccatcagtgaggcatcgccagccccagtccctcaggggcctc

SEQ ID NO: 7083 - DNA, 120 bp, synthetic construct
  misc_feature 1..120: note = Artificially Synthesized Probe
  source 1..120: mol_type = other DNA
aggatggcctgaacgttaggcaggaatagatgtctttgttggtgctgaggtttataaaaccttcaagactctacgtgataagtacagcgcacacataaacacatgattttctacttaatt

SEQ ID NO: 7084 - DNA, 120 bp, synthetic construct
  misc_feature 1..120: note = Artificially Synthesized Probe
  source 1..120: mol_type = other DNA
catctgtttaattcatgcagataaaatccaattagggcccctgattagctgcgtcttcagatttgctggcacataaaaccttgacctaaaagctcatttcctgcagatgtttcagatcga

SEQ ID NO: 7085 - DNA, 120 bp, synthetic construct
  misc_feature 1..120: note = Artificially Synthesized Probe
  source 1..120: mol_type = other DNA
ccgtctcaaaaaaaaaaaagactgagttgattattagtccaagcaggtgaattaagtcacctctatgtcccatgttggctgacacttggaatccccaggtcctcagcaggccagggacgg

SEQ ID NO: 7086 - DNA, 120 bp, synthetic construct
  misc_feature 1..120: note = Artificially Synthesized Probe
  source 1..120: mol_type = other DNA
gatttcttccagaagcctctgtgagcatttgactttctctcaagcagcaggggcccaggagcccggattcctctcctagagaacaaaatctgttcagattcgtttgctccactttgcttt

SEQ ID NO: 7087 - DNA, 120 bp, synthetic construct
  misc_feature 1..120: note = Artificially Synthesized Probe
  source 1..120: mol_type = other DNA
ccaaccgtgatgccatttcctggtgactggaggaggcaggatctctcctgggtttgtccgctaccctggctttctccttgctgtttgtgtcttttattattactaaaatggaaaaggact

SEQ ID NO: 7088 - DNA, 120 bp, synthetic construct
  misc_feature 1..120: note = Artificially Synthesized Probe
  source 1..120: mol_type = other DNA
tcagagcagtgaacccgcactgctagcgggcctggacagcgcttgcatttttctgattattctttctttattaaggtataattcatgtaccacaaaatttaccatttaaaagcgtacagt

SEQ ID NO: 7089 - DNA, 120 bp, synthetic construct
  misc_feature 1..120: note = Artificially Synthesized Probe
  source 1..120: mol_type = other DNA
ttgtcggccatcagggtcgtctttggagaatcagctgttcaagccctctgcccatttattagttttttttgtctttttgtgattgagtgatgagagttcttcatacactctaaatgctag

SEQ ID NO: 7090 - DNA, 120 bp, synthetic construct
  misc_feature 1..120: note = Artificially Synthesized Probe
  source 1..120: mol_type = other DNA
ctcctcactcctgcgggagaaacggcccctgttctttccgccccacgttgtcctcgtgagtgtgtagtccaggtcctgtttccccacagagactctgcaaaaaacacggggcccagaggt

SEQ ID NO: 7091 - DNA, 120 bp, synthetic construct
  misc_feature 1..120: note = Artificially Synthesized Probe
  source 1..120: mol_type = other DNA
cacgagctgtgacactttctgcctctctccgcaggaaacatggaccgtcaccactacgagacttttgagaagtttgggaatgaaacgttcatcatccacttagacaatggaagagggtga

SEQ ID NO: 7092 - DNA, 120 bp, synthetic construct
  misc_feature 1..120: note = Artificially Synthesized Probe
  source 1..120: mol_type = other DNA
actgactggggtgctggagatgggtggggtggacccactgcctgaggtgctggagataggcagggtggacccactgcctggggtgctggagatgggtgggatggacccactgcccggggt

SEQ ID NO: 7093 - DNA, 120 bp, synthetic construct
  misc_feature 1..120: note = Artificially Synthesized Probe
  source 1..120: mol_type = other DNA
agtgggccgccctcctcacctccccatcctcctgggtgagcgggccgccctcctcacctccccatcctcctgccgggcccctctgggaaatacaccggccaccacatcctgcaagggcac

SEQ ID NO: 7094 - DNA, 120 bp, synthetic construct
  misc_feature 1..120: note = Artificially Synthesized Probe
  source 1..120: mol_type = other DNA
ggcgccggaggcattccatcctttctgtagggaaaggagcctttatttactattttgtatttatatttgatgaataagtatataaacagagacgtgtacacagatgccaatcacctacca

SEQ ID NO: 7095 - DNA, 120 bp, synthetic construct
  misc_feature 1..120: note = Artificially Synthesized Probe
  source 1..120: mol_type = other DNA
catgaatcatgctgacaacacaggactgatttttcgtttgattattttaacacagacagatgtaaatcccaaaagacgttgggaaatggcacagccgatgaaaacctcacgatgacagta

SEQ ID NO: 7096 - DNA, 120 bp, synthetic construct
  misc_feature 1..120: note = Artificially Synthesized Probe
  source 1..120: mol_type = other DNA
tggtggaaaagaaaacagatgtcagtgtgttttctcctaagcttttgtgccatggaaagagagctcagtgtatcaaagacacaaagatgcaaccgcatttatgccttcattcaaagttca

SEQ ID NO: 7097 - DNA, 120 bp, synthetic construct
  misc_feature 1..120: note = Artificially Synthesized Probe
  source 1..120: mol_type = other DNA
ggcatgcataagtcacctcttggtttgctgaggtcaggagcagccaaagattcttttggtggcagagtagaaaaaaaagaaaacatttgtaattaaaacagtcggctgaaaaggcaataa

SEQ ID NO: 7098 - DNA, 120 bp, synthetic construct
  misc_feature 1..120: note = Artificially Synthesized Probe
  source 1..120: mol_type = other DNA
gggtgaaaatccgttagagttgttatgaggattaaacaggatcatgcaggttaagcactgttagaaactatcaataactgtgaaagtagacatcacagcagaaaaacggtcacatccgtg

SEQ ID NO: 7099 - DNA, 120 bp, synthetic construct
  misc_feature 1..120: note = Artificially Synthesized Probe
  source 1..120: mol_type = other DNA
accagcaattgggcttttaacagccctccagatgatctgattcacattacagtttgaaaagtactagcctgtgtcttccccatgtgatgaatttcagtgcactaataaagggctatttta

SEQ ID NO: 7100 - DNA, 120 bp, synthetic construct
  misc_feature 1..120: note = Artificially Synthesized Probe
  source 1..120: mol_type = other DNA
aaacatatgcaatctaaaacaagaatgtttttgtccctgttctgattgctttccctgcaaatttctcgtctgtttgcagatggactaatcgctggtgagctaatgtacgagtataggagg

SEQ ID NO: 7101 - DNA, 120 bp, synthetic construct
  misc_feature 1..120: note = Artificially Synthesized Probe
  source 1..120: mol_type = other DNA
actgcgcccggccacctgggactattattaagaagactgatgttccaacaacaagaactagaaagaaaatgctgataaaattctgaaatgtatttataaagagcatttaggggccaagat

SEQ ID NO: 7102 - DNA, 120 bp, synthetic construct
  misc_feature 1..120: note = Artificially Synthesized Probe
  source 1..120: mol_type = other DNA
gtgcgtgctgcgtggttaagaaagttgcgaggaagatttctgacaaacccacaaaactggggtgatattaactgttgtgaaaaaaagccaatataagattagtcgatcagatccttcaat

SEQ ID NO: 7103 - DNA, 120 bp, synthetic construct
  misc_feature 1..120: note = Artificially Synthesized Probe
  source 1..120: mol_type = other DNA
acatcaaagccacaatgctaacccagcaatcgggacatccaaaaaagtttcaaatcatcatacggatttcagtctgagcatacttgtctctaatgaagagtacacacattttgactggac

SEQ ID NO: 7104 - DNA, 120 bp, synthetic construct
  misc_feature 1..120: note = Artificially Synthesized Probe
  source 1..120: mol_type = other DNA
atccttagagactgaagactaatccctccttgatgagctatgtgaagatcaaacccagataaaagacaactaaaaaatgtaacgtcgacaaccacgagaaaagaccttctgtggagaaac

SEQ ID NO: 7105 - DNA, 120 bp, synthetic construct
  misc_feature 1..120: note = Artificially Synthesized Probe
  source 1..120: mol_type = other DNA
aaaagctcgtaaaattctcactctctctgggaaaaaagttggctacatcaacaagccttccactgctggtataaccaaaacacccagaattgaagagagaactcagttagctttagttca

SEQ ID NO: 7106 - DNA, 120 bp, synthetic construct
  misc_feature 1..120: note = Artificially Synthesized Probe
  source 1..120: mol_type = other DNA
cccactctacgcacacagaatgcaaatatacctccctgagagaacagcagaaaaccaaagctttggaaatcccacttaatgacagtattatttttgctctgttcattataccaagctcta

SEQ ID NO: 7107 - DNA, 120 bp, synthetic construct
  misc_feature 1..120: note = Artificially Synthesized Probe
  source 1..120: mol_type = other DNA
tcacaaatctacaggagagggcttagggagtgagggtagaagttaggccttacatttaagtactacagagcacagattcatttgtccactgtataaatcattaaaatgcgtcttttagga

SEQ ID NO: 7108 - DNA, 120 bp, synthetic construct
  misc_feature 1..120: note = Artificially Synthesized Probe
  source 1..120: mol_type = other DNA
ctgaatataaaatgaaatttatggtttgaaagtcttccactaagatgcaacgctgtggagaaacatacctccaagatgctatagtcagttcctcgagcatacatgacaaccgcatgcgtg

SEQ ID NO: 7109 - DNA, 120 bp, synthetic construct
  misc_feature 1..120: note = Artificially Synthesized Probe
  source 1..120: mol_type = other DNA
ataagtacagccatgctagaaaatattatccagctatcaaaaagaatcaggtttaaaggtactggctcggaaccatacgaaaggtgctctttaccatactgctaagtggagggaaaaggc

SEQ ID NO: 7110 - DNA, 120 bp, synthetic construct
  misc_feature 1..120: note = Artificially Synthesized Probe
  source 1..120: mol_type = other DNA
gaaaagataattaacagacatttcaagaacatcacctttcatgtatagccatcaaaggcttcaaaggccgtctgaaaccatctgtgacaccgactttcatacactcatgtgcagtacctt

SEQ ID NO: 7111 - DNA, 120 bp, synthetic construct
  misc_feature 1..120: note = Artificially Synthesized Probe
  source 1..120: mol_type = other DNA
caaagacagcaattctatgaaagtttgtttttgtatgaaatgtaagctgttcaaatagaagaggggaaccacgccaagcagctcttctctatgaatccacaaccaaaccacaaagaaagc

SEQ ID NO: 7112 - DNA, 120 bp, synthetic construct
  misc_feature 1..120: note = Artificially Synthesized Probe
  source 1..120: mol_type = other DNA
aggaagagaggaaggaagaggaggagtggggaggagaaagagaagaggttgacaagaggaggaaaagtgagaagggggaggaggaggggtagtgaggaggaggggtgatgaggaggagtg

SEQ ID NO: 7113 - DNA, 120 bp, synthetic construct
  misc_feature 1..120: note = Artificially Synthesized Probe
  source 1..120: mol_type = other DNA
ctgcctgtgagcgatgccctaatctcctacaaacgagtgcatgcaagtaatacacatttcccaacagcaagaattaccaataatgattagattctctgatgcctcttaaatatgtacttg

SEQ ID NO: 7114 - DNA, 120 bp, synthetic construct
  misc_feature 1..120: note = Artificially Synthesized Probe
  source 1..120: mol_type = other DNA
cctttaatcttagatacacccattattcttctgaaatttcattcttaatcatcaccagtgtccttctcattcccaaatcgaaggcttcttttggttctccttcacaggcctacctctctg

SEQ ID NO: 7115 - DNA, 120 bp, synthetic construct
  misc_feature 1..120: note = Artificially Synthesized Probe
  source 1..120: mol_type = other DNA
aggctgcctctgacaccaatgctttctacacggagccatatctaagctttgtggattctaatttttcctttgcaaatagtttcttcatttggtattcatagacaccaaaatccactggtg

SEQ ID NO: 7116 - DNA, 120 bp, synthetic construct
  misc_feature 1..120: note = Artificially Synthesized Probe
  source 1..120: mol_type = other DNA
gcatttctagttattgatgtggtgatttgtaaacaacgtaaatcaacctttttcacttaccgtttctcggtcgagaagtttggtcactttgacttctcccctgacggggtcaattgtgaa

SEQ ID NO: 7117 - DNA, 120 bp, synthetic construct
  misc_feature 1..120: note = Artificially Synthesized Probe
  source 1..120: mol_type = other DNA
ggtaatactcatgagagctctcataatccagattctcaatgataaatacggcccctgaatagaaatcaaaattacttccagcattctgcaatgccaccacattttcccactatgactgaa

SEQ ID NO: 7118 - DNA, 120 bp, synthetic construct
  misc_feature 1..120: note = Artificially Synthesized Probe
  source 1..120: mol_type = other DNA
catctactgacaacacagggtcacttaatacaaggcaacgtggttaagcaaatctagttttcttggtggaatgaagggtttcctctcagatacatggtaggttacctgttttagaatcta

SEQ ID NO: 7119 - DNA, 120 bp, synthetic construct
  misc_feature 1..120: note = Artificially Synthesized Probe
  source 1..120: mol_type = other DNA
ttcatgggaatctggcttcttagactatttcgtataggagccaataatacagtacctaacaaacctttacaaatcacatctgtttatcattgagctttggtgacaaagatctgaaaagca

SEQ ID NO: 7120 - DNA, 120 bp, synthetic construct
  misc_feature 1..120: note = Artificially Synthesized Probe
  source 1..120: mol_type = other DNA
gatgataaacagcttgctcctcacgatcaaggggggttgacgttttcagttcacctacaaacaaaaacaaatggactcacttgtaatttaagacgtgacttgcagttgtacatcttattt

SEQ ID NO: 7121 - DNA, 120 bp, synthetic construct
  misc_feature 1..120: note = Artificially Synthesized Probe
  source 1..120: mol_type = other DNA
tttcagcgttagagcggatgtctgcgtctgtagcagagatctgcatgatcaattttccaggaaggacgtcttcaggaatagtgtctgaatataaagtctgcaaagagtttaaacaaaaac

SEQ ID NO: 7122 - DNA, 120 bp, synthetic construct
  misc_feature 1..120: note = Artificially Synthesized Probe
  source 1..120: mol_type = other DNA
agaatgtcgcaccccttctgaaaatataaagtacaaataagaactggaattaactcctcatccctcagaagttccccttcccctcatgactgaatataagggttcttccatcttaagtct

SEQ ID NO: 7123 - DNA, 120 bp, synthetic construct
  misc_feature 1..120: note = Artificially Synthesized Probe
  source 1..120: mol_type = other DNA
ataatgggcacgatgcttccaaactaagcttaagaactcgtctcatgtcatctctaccttaccgatataaaaggctccaaagtccctattttctctaggatcgagttcaaatcccttgga

SEQ ID NO: 7124 - DNA, 120 bp, synthetic construct
  misc_feature 1..120: note = Artificially Synthesized Probe
  source 1..120: mol_type = other DNA
ttcacttcaactatcgcttttgatgagaaggtgccatcagttgccgtgatagtaagaaggtaattgtcccttttttccctgtctagaggtttcttcacatataccttccattcattctgt

SEQ ID NO: 7125 - DNA, 120 bp, synthetic construct
  misc_feature 1..120: note = Artificially Synthesized Probe
  source 1..120: mol_type = other DNA
atctgaattactctacttccccctggcaggttttcaacaatgaatgcctcatatggactagattcaaagaccgggctgttgtcatttgcatctttcacttggatactaacatctacagaa

SEQ ID NO: 7126 - DNA, 120 bp, synthetic construct
  misc_feature 1..120: note = Artificially Synthesized Probe
  source 1..120: mol_type = other DNA
gtttgagagggtgataatccctgttgcactgtcaatgacaaaatgtttatgatcattgccagacagaatggaatactgcaacttgtctatgtctgaactgtctgcatcataggcttttac

SEQ ID NO: 7127 - DNA, 120 bp, synthetic construct
  misc_feature 1..120: note = Artificially Synthesized Probe
  source 1..120: mol_type = other DNA
tttatttaaggtgtcaagctcaaattgctttttcagtgaaatttcacccaagggtccaatttgaaagtgttcatgatgttccttgaggtagtaatgcacttccccgtttctgccactgtc

SEQ ID NO: 7128 - DNA, 120 bp, synthetic construct
  misc_feature 1..120: note = Artificially Synthesized Probe
  source 1..120: mol_type = other DNA
gctagaatcaatagcaaaatatgtgtgtacagatggttcaacaatgtgatatacaagcaaagcatttgagtctttatcagcatcagctgctcgaatcaccagtgggacattcctgtctgt

SEQ ID NO: 7129 - DNA, 120 bp, synthetic construct
  misc_feature 1..120: note = Artificially Synthesized Probe
  source 1..120: mol_type = other DNA
ttcaagagacaattgtccatggataaatgtgtgtaacccaccccactttacaggttttgaagattgcaacaacattcccttcttatctttttcaggtcaacttatcctctaggtcagtgg

SEQ ID NO: 7130 - DNA, 120 bp, synthetic construct
  misc_feature 1..120: note = Artificially Synthesized Probe
  source 1..120: mol_type = other DNA
attaacaggaaacacttcctctacagtcttcacttccttcctttcatacattttccaaaaatccacggccattttttagagaccagatccagcctgcttttcattaagtcttactggctc

SEQ ID NO: 7131 - DNA, 120 bp, synthetic construct
  misc_feature 1..120: note = Artificially Synthesized Probe
  source 1..120: mol_type = other DNA
gtggcagaaaaggtctgtacgaggctgggggcttattcactgactttagctacaatatgagtgatttttaaacaactttaaattgttccctgtatgggaacagggcaattatctagacaa

SEQ ID NO: 7132 - DNA, 120 bp, synthetic construct
  misc_feature 1..120: note = Artificially Synthesized Probe
  source 1..120: mol_type = other DNA
agggagttccattctctgaataccagattcctaatcctgtcagtcattagaagcattcaaagaatgcacatgcttctactcagacaccaacaatcatattttaaccacccagttgttgac

SEQ ID NO: 7133 - DNA, 120 bp, synthetic construct
  misc_feature 1..120: note = Artificially Synthesized Probe
  source 1..120: mol_type = other DNA
cacataaactgagcttcatcagcctacagaatgaatgaatgaatgaatgagggaccaacatggcacctggcacataaagtgagcttcatcagcctacagaatgaatgaatgaatgaatga

SEQ ID NO: 7134 - DNA, 120 bp, synthetic construct
  misc_feature 1..120: note = Artificially Synthesized Probe
  source 1..120: mol_type = other DNA
tgaatgaatgaatgagggaatggcagtggaaaacagaccaaaaacatcctgctatgccaggactgcttcctggtggtcccccttgttatcccgactctggatctcttggcctctgggtcc

SEQ ID NO: 7135 - DNA, 120 bp, synthetic construct
  misc_feature 1..120: note = Artificially Synthesized Probe
  source 1..120: mol_type = other DNA
tcattcgtgtcgctgacattgaccacaatccttgcaaagttgcgttttacaggcacatcttgatctcgtacctaaaaagaattgacacattatcaatcccattggtgctttccttataac

SEQ ID NO: 7136 - DNA, 120 bp, synthetic construct
  misc_feature 1..120: note = Artificially Synthesized Probe
  source 1..120: mol_type = other DNA
acacttgccacgtctttacgtgggcttaacttctcttacgcctccacagagaaggtatctgtaggtcactcatgtacggataacaatttaccaggatttatagaagactaatttcttaaa

SEQ ID NO: 7137 - DNA, 120 bp, synthetic construct
  misc_feature 1..120: note = Artificially Synthesized Probe
  source 1..120: mol_type = other DNA
ggcttaccaggcaatgttctgcacatgcacagcctaaccatgtctcatatattatcatgtaaagtttttaagagtccagagactggctgagatattcagaaagctcttaaggagataatg

SEQ ID NO: 7138 - DNA, 120 bp, synthetic construct
  misc_feature 1..120: note = Artificially Synthesized Probe
  source 1..120: mol_type = other DNA
agcaaagttgtttgaatgaaagaaaaaaaaggtaactggatttggtaagttacctggagatacaagataaagccaagtgactggaatcaatggcggtcagcatcctaagccacacacgca

SEQ ID NO: 7139 - DNA, 120 bp, synthetic construct
  misc_feature 1..120: note = Artificially Synthesized Probe
  source 1..120: mol_type = other DNA
ttattgggaaagaggtgcactgttaattattcatagacgtagggtctttagtaatgagaatgcttggcaaagagggacagctccactgtttatgaagctccttttgttagatttctgggt

SEQ ID NO: 7140 - DNA, 120 bp, synthetic construct
  misc_feature 1..120: note = Artificially Synthesized Probe
  source 1..120: mol_type = other DNA
aatgacactctgcttgctcctgaaacctcaggatgcttcttctatctaggaatattccttctgtacactccaaacggcccacactgagaaccaaagaaaagtaataagaaagaacagaat

SEQ ID NO: 7141 - DNA, 120 bp, synthetic construct
  misc_feature 1..120: note = Artificially Synthesized Probe
  source 1..120: mol_type = other DNA
cttccaaggaggagcattttgaaagaaaagagtggccaattagaaagacaatgcttgttaaggcaaagtgaaccctaattgtccaggaagcaactaactgaaagaaagcaagaaagcaac

SEQ ID NO: 7142 - DNA, 120 bp, synthetic construct
  misc_feature 1..120: note = Artificially Synthesized Probe
  source 1..120: mol_type = other DNA
catgactaaggggcagaaggggaaaaatggacataaagtcccccccagagagatgaatcgcaacagagactcttgttcttaaatacccttgtaactaaaatgtgaggaaacaataaaaaa

SEQ ID NO: 7143 - DNA, 120 bp, synthetic construct
  misc_feature 1..120: note = Artificially Synthesized Probe
  source 1..120: mol_type = other DNA
ccattgtcaactgccttaatctacaacatttgggcagaggggattaaaaacagcaaatcaggagttacaacccagaaatgaatgaagcacagactggtttggtcttaaactgagccaatt

SEQ ID NO: 7144 - DNA, 120 bp, synthetic construct
  misc_feature 1..120: note = Artificially Synthesized Probe
  source 1..120: mol_type = other DNA
gcaggctctcttctcgcattagtttaagtggaaagtgaacctcacccaaatgttaagctaccaaaaacttaatacctttaggccatggaagagatacgtgaagattctgctttacacatt

SEQ ID NO: 7145 - DNA, 120 bp, synthetic construct
  misc_feature 1..120: note = Artificially Synthesized Probe
  source 1..120: mol_type = other DNA
gaagggaaaatttatttcccatccatgtccaaatatgactttcaaagtgctatatatctggtatctgcttccacctagcctttgatattcacggagaaaagaggactctggagtgacgta

SEQ ID NO: 7146 - DNA, 120 bp, synthetic construct
  misc_feature 1..120: note = Artificially Synthesized Probe
  source 1..120: mol_type = other DNA
acagaaaaatatcacttatgtaaatgcaaatgaattccacatgacactgtttatagatctgttcgccccctgtgtgtgcgcaagcataaaatacaaagatctgaatccggcccatgacag

SEQ ID NO: 7147 - DNA, 120 bp, synthetic construct
  misc_feature 1..120: note = Artificially Synthesized Probe
  source 1..120: mol_type = other DNA
ggtttcaatatacattttgtcagaaaagattttttaaaagtgagatgaagttatccaggatttcaatctcatccatctcctttaactgctcaagagataactgagagttgacagaaatga

SEQ ID NO: 7148 - DNA, 120 bp, synthetic construct
  misc_feature 1..120: note = Artificially Synthesized Probe
  source 1..120: mol_type = other DNA
acaattcaacgaaacagtgttctctttttaacaagggcaacagaaggctatatcatacctccacactggggttttcccagatcataggtatagattaaaaggtgctaaagggaaatgctt

SEQ ID NO: 7149 - DNA, 120 bp, synthetic construct
  misc_feature 1..120: note = Artificially Synthesized Probe
  source 1..120: mol_type = other DNA
tttaatttcatcccaatgcaatgaatggtaatattagcccctttctttccacttcagcctgagtcactgcctcacccttcagtttaaactgaagcgggtttaaacttttaaactcactgc

SEQ ID NO: 7150 - DNA, 120 bp, synthetic construct
  misc_feature 1..120: note = Artificially Synthesized Probe
  source 1..120: mol_type = other DNA
ctactcaggaggcataattcacaaatcaagatcctgcaagaaaccctgcagggtgggtttacttttctgcggagaacacgtaagatatttcagactgacaaaaacaaacaaataacaaca

SEQ ID NO: 7151 - DNA, 120 bp, synthetic construct
  misc_feature 1..120: note = Artificially Synthesized Probe
  source 1..120: mol_type = other DNA
tcattaacaaagccaggagtaggatttcgttctcttgaggctcagatgagcgtttttttctccctatcacacctgactgcgtaatttgctgtattatagtatttcaacactccatgaact

SEQ ID NO: 7152 - DNA, 120 bp, synthetic construct
  misc_feature 1..120: note = Artificially Synthesized Probe
  source 1..120: mol_type = other DNA
gaaccctaaattatgagttatttcaagggcggaagaactgcccagcagaaccctaaactaaattatgacagctatttcaagccactcaattttgacagtttgttagccaaggtattatgc

SEQ ID NO: 7153 - DNA, 120 bp, synthetic construct
  misc_feature 1..120: note = Artificially Synthesized Probe
  source 1..120: mol_type = other DNA
cctcacccggcaggaaatttacttggaacacttttcaattactctactagagaataagcacaggaagggaaaaagatcaaggaaaaaaggtaaaaatctggtcacccgataccttccttt

SEQ ID NO: 7154 - DNA, 120 bp, synthetic construct
  misc_feature 1..120: note = Artificially Synthesized Probe
  source 1..120: mol_type = other DNA
acaatttatttaaggaaacaactaccacatgtaaaaggcagaggtgaatattaaactgtcctctcacagttcgctttttagccaccactaattatgtgtttcccaagacccagctctggg

SEQ ID NO: 7155 - DNA, 120 bp, synthetic construct
  misc_feature 1..120: note = Artificially Synthesized Probe
  source 1..120: mol_type = other DNA
ggtagctggagggaagagaggagagaggagggaagagaggagacaggagaacttcattttatacactactttattgtggccatctttaatctttaatgggcatattactcaaataaattt

SEQ ID NO: 7156 - DNA, 120 bp, synthetic construct
  misc_feature 1..120: note = Artificially Synthesized Probe
  source 1..120: mol_type = other DNA
ccataagaagcataattaacattgcaaaaaatgcaacaaagaagtggccgggagagcccacctgaagattccatctgttcttcaactgcttattaagtcctaaaacatcacccagaatct

SEQ ID NO: 7157 - DNA, 120 bp, synthetic construct
  misc_feature 1..120: note = Artificially Synthesized Probe
  source 1..120: mol_type = other DNA
agcaggatgcctcggctctggaatgggacttccttaacatctctggctgagaaccacaactcagctaagtcttttgttttcagttatgaatatacaaaatatgacacaaattatacatca

SEQ ID NO: 7158 - DNA, 120 bp, synthetic construct
  misc_feature 1..120: note = Artificially Synthesized Probe
  source 1..120: mol_type = other DNA
tacagaaataacagactgtaactgtggaactccagatagcacctgactgtccctttgtaaacatgtcatccatggaacattctagtctacggatctgtacccaaccagcttaaataaaat

SEQ ID NO: 7159 - DNA, 120 bp, synthetic construct
  misc_feature 1..120: note = Artificially Synthesized Probe
  source 1..120: mol_type = other DNA
cagggaccccataccctagtcttcagacgtctcttctgctttcaattctaccttactagctgtttcttgttgaaaattgatggcattaaaacataagatcgacagcaaaactcaatttac

SEQ ID NO: 7160 - DNA, 120 bp, synthetic construct
  misc_feature 1..120: note = Artificially Synthesized Probe
  source 1..120: mol_type = other DNA
caaaatgggggagatgataaagacctgctaagtatacttagagccaactgtttgagctgaaattgggagctctgaaaacttaacaggacacatcaacacagaaaaagtaggaaaacctca

SEQ ID NO: 7161 - DNA, 120 bp, synthetic construct
  misc_feature 1..120: note = Artificially Synthesized Probe
  source 1..120: mol_type = other DNA
attcacattgcctgacctctggtagctctgacctctgtgaagtcttagattatttgtaaaatgaagaaaatgtaaataaggagcacagcaggctattggtatctgtagtcaccatctcac

SEQ ID NO: 7162 - DNA, 120 bp, synthetic construct
  misc_feature 1..120: note = Artificially Synthesized Probe
  source 1..120: mol_type = other DNA
aatctcaggaagacagaaatacaggtagcagctgtcaaagagcctaaaaccttttaagatgcaaatatagacacacagaaatcacaaacatacatatatagtcaaagaggatgccctgta

SEQ ID NO: 7163 - DNA, 120 bp, synthetic construct
  misc_feature 1..120: note = Artificially Synthesized Probe
  source 1..120: mol_type = other DNA
aaaataagaaaagagagttaatatactaaggaagggaacggagtgtctggagaactgggtgaaagtaaaacctgactgggtatcttcctgtactatttgcacgttgtgccatgtgattgc

SEQ ID NO: 7164 - DNA, 120 bp, synthetic construct
  misc_feature 1..120: note = Artificially Synthesized Probe
  source 1..120: mol_type = other DNA
gagaaatggaagtatgtgtccacagaaaggcttgtactcaatgttcacagcggatttacaaactgccaaaaactggcagcaatacaaatgcctattactaggtgagtggataaacaaatt

SEQ ID NO: 7165 - DNA, 120 bp, synthetic construct
  misc_feature 1..120: note = Artificially Synthesized Probe
  source 1..120: mol_type = other DNA
tcacaaaaagagaatggatgcggtctttcacttgtatctcctaaaaatgaaaacccactgcccccctacttgcaaacaatataataagaatgtctgaaatgcagacagacagttcttggc

SEQ ID NO: 7166 - DNA, 120 bp, synthetic construct
  misc_feature 1..120: note = Artificially Synthesized Probe
  source 1..120: mol_type = other DNA
tttctcaaaatgcatccctggcattcagcctcccatgactgtacttgatgcataaacaaatgctttaaatgatgataactgtaggtattctctagctgctggacgtttaggataatcacc

SEQ ID NO: 7167 - DNA, 120 bp, synthetic construct
  misc_feature 1..120: note = Artificially Synthesized Probe
  source 1..120: mol_type = other DNA
aggcatgtgtacttcaggccctgaggatcacaccccaactttctgctgaggtgggggaagagaagcatctagaaacagatctaatgaagctatatttactatattatttaataattccat

SEQ ID NO: 7168 - DNA, 120 bp, synthetic construct
  misc_feature 1..120: note = Artificially Synthesized Probe
  source 1..120: mol_type = other DNA
ttagtctaattcatcaaacaaattactataggggtagttctggtcttgaattgccacctgagatatgacatatacgtgtgttgtggggaggggtacatatttgtttctgtccatggttcc

SEQ ID NO: 7169 - DNA, 120 bp, synthetic construct
  misc_feature 1..120: note = Artificially Synthesized Probe
  source 1..120: mol_type = other DNA
ttttacttctagatttctctctctggaggtctgggaccgccactagagaggcatacatacattctggactccaaattcatcctcacaattcttatatacctctgacttttctcttatgtt

SEQ ID NO: 7170 - DNA, 120 bp, synthetic construct
  misc_feature 1..120: note = Artificially Synthesized Probe
  source 1..120: mol_type = other DNA
gtggatttccacttgtaattttgtacatgagcttgtcattagagctcgaatctggatcaaatgcctcgatctggaccacagatacatctttaggagaattttccatgatttctgggtaat

SEQ ID NO: 7171 - DNA, 120 bp, synthetic construct
  misc_feature 1..120: note = Artificially Synthesized Probe
  source 1..120: mol_type = other DNA
tgcaaccttcaaagtccacaataaggggctgctcagatctcctgagtgttgaggtccttttatttctttcaatcgcctcaaacaaatgggaagacaaccagcatgctataaaaatataaa

SEQ ID NO: 7172 - DNA, 120 bp, synthetic construct
  misc_feature 1..120: note = Artificially Synthesized Probe
  source 1..120: mol_type = other DNA
tattgccattcagaagcattacaatgatttgttattgcttcattatttcatactgaaccttcagaaagggggtataatactgcttctagaaacatggaagaaacctcagaaccaaatggt

SEQ ID NO: 7173 - DNA, 120 bp, synthetic construct
  misc_feature 1..120: note = Artificially Synthesized Probe
  source 1..120: mol_type = other DNA
aaataaaataaacctcagaaccaaataaaaatgagctaactggttcctccgtacagcagacaactgaagatgaactcaaacatgcttccctgttctctaacccaagcataatgcacacac

SEQ ID NO: 7174 - DNA, 120 bp, synthetic construct
  misc_feature 1..120: note = Artificially Synthesized Probe
  source 1..120: mol_type = other DNA
aagggaaaaaagaattatgaaatggaagtatatcaccctcacatctgaggtttgcaattacagatagaaacagctatgatttttccgtcgtgccttatttctagttcgggccgtaagcgt

SEQ ID NO: 7175 - DNA, 120 bp, synthetic construct
  misc_feature 1..120: note = Artificially Synthesized Probe
  source 1..120: mol_type = other DNA
cttgttcttaaagaacgttgaaatgatttgtccaactccaagaagctaaacaggtgtagttcagaatccagagtgaaggacttccttaatcaggggttcatcacgatccaaaccattctt

SEQ ID NO: 7176 - DNA, 120 bp, synthetic construct
  misc_feature 1..120: note = Artificially Synthesized Probe
  source 1..120: mol_type = other DNA
gacaaaaggaaccaacaaaaactatagtttttacaggtatctttctatttacacatattcacgacctcacctttttgggcacctatgtatatccacccccaaactcttctctgcggtctc

SEQ ID NO: 7177 - DNA, 120 bp, synthetic construct
  misc_feature 1..120: note = Artificially Synthesized Probe
  source 1..120: mol_type = other DNA
caaggctttcaacaaagcctcgttacttctgactctcagaaatacctatcatcagcaacaacccagcaacacaaatttgcaaacgctaccctcctttctgatatgtcacatacttaatgt

SEQ ID NO: 7178 - DNA, 120 bp, synthetic construct
  misc_feature 1..120: note = Artificially Synthesized Probe
  source 1..120: mol_type = other DNA
accaatactgattctttaattgtaacatcttacatactcatgtaagatgtcaacaacgtgagaagctggggcagggagcagggagttatgtgagcattctactttctgctccatttttct

SEQ ID NO: 7179 - DNA, 120 bp, synthetic construct
  misc_feature 1..120: note = Artificially Synthesized Probe
  source 1..120: mol_type = other DNA
tttgataataaaagaaagtcaaaataagtaaaagaaagtaagtcaaccaagaagcatccctcgtgggccaatcaaactgctaggcagtatactagtgtaccgtacaggtgcctctctgcc

SEQ ID NO: 7180 - DNA, 120 bp, synthetic construct
  misc_feature 1..120: note = Artificially Synthesized Probe
  source 1..120: mol_type = other DNA
gaaatgtagctgccagatgccgttttcccaacatttgaaaatctgggctaaagcgaatttcattgtatcgggagggaaaaggaatggacttattatatgatggtacatacacagcttcaa

SEQ ID NO: 7181 - DNA, 120 bp, synthetic construct
  misc_feature 1..120: note = Artificially Synthesized Probe
  source 1..120: mol_type = other DNA
ggatgcagacttagtaaaagctttaatatgccatattgtttaatcttcacaattagcccagtggtctctccccattttccatattcagaagcagaggcttaaggctcaaaagtcactggt

SEQ ID NO: 7182 - DNA, 120 bp, synthetic construct
  misc_feature 1..120: note = Artificially Synthesized Probe
  source 1..120: mol_type = other DNA
ctagagtggtgggtggcagatgtagagctctgaagtgtaaatcagctgtaaaagttttgtggcagatcaacagaaacgttttaaggaaaaaccctctttaggaaagaaatctcattaaga

SEQ ID NO: 7183 - DNA, 120 bp, synthetic construct
  misc_feature 1..120: note = Artificially Synthesized Probe
  source 1..120: mol_type = other DNA
caaaaagaagagcaaaatgaggtcctatgagaagacagttaaataaaagagtaacttattccttggaccagcagagagagaggaaaagaagggcacctgtttgagaagggaaacagcatt

SEQ ID NO: 7184 - DNA, 120 bp, synthetic construct
  misc_feature 1..120: note = Artificially Synthesized Probe
  source 1..120: mol_type = other DNA
tacaagcagtgttcagctacttctaatacccaatttgttgccaaaaccaatacctgtaagaactcagaagcttaagttaggtcaagctaacctaatcaggaagtgattcacggacactga

SEQ ID NO: 7185 - DNA, 120 bp, synthetic construct
  misc_feature 1..120: note = Artificially Synthesized Probe
  source 1..120: mol_type = other DNA
aagcacagaactgaaacaagaaaaaatgaaaaatagagaataactgcagtagttcttatattatctctgtccttaactttctctgagagcaaagttgttcattaagagagctgttcttta

SEQ ID NO: 7186 - DNA, 120 bp, synthetic construct
  misc_feature 1..120: note = Artificially Synthesized Probe
  source 1..120: mol_type = other DNA
tcgatggaatactgggcagtcacaaaaaggaattacatgtgccctgtaatttcttcagtgattggaacagtaaaagtaccttttgtttaaaaaaatatttaggctgggctgggcacggtg

SEQ ID NO: 7187 - DNA, 120 bp, synthetic construct
  misc_feature 1..120: note = Artificially Synthesized Probe
  source 1..120: mol_type = other DNA
catatccctggctttaattattgtccttaaaaaagaaatacaactcaacagactaacacaatctgttcaaaagagacacgcaaaggggtaccagtgttgagaagcaaaggctaagccatc

SEQ ID NO: 7188 - DNA, 120 bp, synthetic construct
  misc_feature 1..120: note = Artificially Synthesized Probe
  source 1..120: mol_type = other DNA
atttcggaattggagagggaaacaagagtgaatgtaggttttattctcagtctgttacttcaaagtattggccttataatcaaccatccttacagcatgcctgttaactgtcccaactca

SEQ ID NO: 7189 - DNA, 120 bp, synthetic construct
  misc_feature 1..120: note = Artificially Synthesized Probe
  source 1..120: mol_type = other DNA
gtttagtcaccaaatatataaaattattagttgtcatatggaggcgataagggacgttggatgatctccttatctaacagctgggaagaaaacctaggttgccacccagattcaggacta

SEQ ID NO: 7190 - DNA, 120 bp, synthetic construct
  misc_feature 1..120: note = Artificially Synthesized Probe
  source 1..120: mol_type = other DNA
ttaactacctcatcccagaccttccaccatacaagcttgtgtttcagggctattattccctctgattaaaaattgtcttcaaatagttggctcttcgttcttgtcattcaggtgaccact

SEQ ID NO: 7191 - DNA, 120 bp, synthetic construct
  misc_feature 1..120: note = Artificially Synthesized Probe
  source 1..120: mol_type = other DNA
tattaaactacattctcttgttgtttaatcgtctcatctagactgaatctcctctccaattataactatatccaatcccagatgaaggtctcactgcacagttataggagtgcttccgtg

SEQ ID NO: 7192 - DNA, 120 bp, synthetic construct
  misc_feature 1..120: note = Artificially Synthesized Probe
  source 1..120: mol_type = other DNA
atgacaggaagggcactccaagggcattacactgagatcaaacaaagcattccagaaaggcaaaggctcttctcacagggaaaggaagaataagtcttacatttcatgaatgaataagct

SEQ ID NO: 7193 - DNA, 120 bp, synthetic construct
  misc_feature 1..120: note = Artificially Synthesized Probe
  source 1..120: mol_type = other DNA
tactgtctggtttagaaaaataatggatttcttacttccagatgattaaagatgcattcatttggtactgctgcctttagaagagttccccatggtgcaggaaggcagaaagtttgtgca

SEQ ID NO: 7194 - DNA, 120 bp, synthetic construct
  misc_feature 1..120: note = Artificially Synthesized Probe
  source 1..120: mol_type = other DNA
tttccactcataaatctgccatcattttgatttctgtttctaaatccaaatattcagtggcagcaagaatgcagagaaatgggcactcacaaactgctgatgggatgtctagttctcata

SEQ ID NO: 7195 - DNA, 120 bp, synthetic construct
  misc_feature 1..120: note = Artificially Synthesized Probe
  source 1..120: mol_type = other DNA
tgtaatcatttccaaattcccttttcatgaccttaaatgggacttctaaagctaagcagatgccccagcaggaaataaatttgcaactcaacagaggcacccacagagatatggcaagat

SEQ ID NO: 7196 - DNA, 120 bp, synthetic construct
  misc_feature 1..120: note = Artificially Synthesized Probe
  source 1..120: mol_type = other DNA
agcagccacaatgtggcagggtaggttttcataacctgtattcgtttaaacccaaggacacaaaaagtaccgcaataaatataaagcagaaaatcaccccagcatgcagatcccaaaatt

SEQ ID NO: 7197 - DNA, 120 bp, synthetic construct
  misc_feature 1..120: note = Artificially Synthesized Probe
  source 1..120: mol_type = other DNA
tccagcataggtaatttgcaaaaaaattataaccaaagtgaatgatcagagacgtagctctaggtcacttatttcgtgtacgtcattcacagaagaaaatctaatagcctgcacggtggc

SEQ ID NO: 7198 - DNA, 120 bp, synthetic construct
  misc_feature 1..120: note = Artificially Synthesized Probe
  source 1..120: mol_type = other DNA
ttggaatatttctaataagtggtttcatggtctactctgggacatgaatcactgttgtgttttgttttagcttatacagagtacaccgtgctgattaggtgcctctagtgcagattcatc

SEQ ID NO: 7199 - DNA, 120 bp, synthetic construct
  misc_feature 1..120: note = Artificially Synthesized Probe
  source 1..120: mol_type = other DNA
gaagaatggcagctgggacttactacttctctaaaaatctctgttaaagaaggccacaagtttgtttttcttcccccccatgtatatgtcaatgtgttcaaagacatccactcccaaaat

SEQ ID NO: 7200 - DNA, 120 bp, synthetic construct
  misc_feature 1..120: note = Artificially Synthesized Probe
  source 1..120: mol_type = other DNA
gtaggaagacgatggaggagcattgctttggtatcttcagacttcaagcatccccctggtatctctgcttacgttctagtttaaatggaaatgtgctaaaaataacttgaagatatactg

SEQ ID NO: 7201 - DNA, 120 bp, synthetic construct
  misc_feature 1..120: note = Artificially Synthesized Probe
  source 1..120: mol_type = other DNA
catctccccatttctcataacgctcaacctctctcaaatgcaacttgctatgaacagatttctactcaaatacacagtgaacaacttccacaacggtttcctttccttcctttaatcatc

SEQ ID NO: 7202 - DNA, 120 bp, synthetic construct
  misc_feature 1..120: note = Artificially Synthesized Probe
  source 1..120: mol_type = other DNA
ttttatacttaaaacaaaagaaatacttttcaatccagaggatgatacaggcaatagcactactctacagcccaaggacacaacacgtaactcaggtatattcacctggaaggccagcct

SEQ ID NO: 7203 - DNA, 120 bp, synthetic construct
  misc_feature 1..120: note = Artificially Synthesized Probe
  source 1..120: mol_type = other DNA
cattttgttgcctcaaccaacagactaacttggtatttacatgacaaacccgccttttttcacttaaatatgtaaacaccttcagctgggcaacaaatcgaaagaagaggatcatgggac

SEQ ID NO: 7204 - DNA, 120 bp, synthetic construct
  misc_feature 1..120: note = Artificially Synthesized Probe
  source 1..120: mol_type = other DNA
gccttaataagtaaaggaatactagtggtgtggcattaagggttttccatggtgagctggcaaaactaaagaccaaagcctggcctagaaagctgcttaacttaaacgaggtatcaatga

SEQ ID NO: 7205 - DNA, 120 bp, synthetic construct
  misc_feature 1..120: note = Artificially Synthesized Probe
  source 1..120: mol_type = other DNA
tattgaatcaaatcactgtctctctgaagaaagaatatacagctttccacagattctcaaagtttctgtgacgccaaaaccatcaagaaccacagttttggagcctacaaataggcgtcc

SEQ ID NO: 7206 - DNA, 120 bp, synthetic construct
  misc_feature 1..120: note = Artificially Synthesized Probe
  source 1..120: mol_type = other DNA
actccatgagcagagtataacaccacgtaattttactcactaattgtgacaatctagtgagacagtctatggaaagaccataaaatagggcctgtacacggcaagtactcactaaacgtt

SEQ ID NO: 7207 - DNA, 120 bp, synthetic construct
  misc_feature 1..120: note = Artificially Synthesized Probe
  source 1..120: mol_type = other DNA
tccacaagaaaagccttccaacaattaacgtcctgtccagttcagatgggcagcatttttaccgattaaatcacacttttacaactgcaaacacaaatatgacacctgtccatctcttca

SEQ ID NO: 7208 - DNA, 120 bp, synthetic construct
  misc_feature 1..120: note = Artificially Synthesized Probe
  source 1..120: mol_type = other DNA
ctgttgtttttagtaagaaaatggaacttccttaggatttcgactagatcctattttcaccttaacatcttcctgcttcaaagaaggacccttcccctggtagaaattgttaccacgccc

SEQ ID NO: 7209 - DNA, 120 bp, synthetic construct
  misc_feature 1..120: note = Artificially Synthesized Probe
  source 1..120: mol_type = other DNA
tgctccaacactctccatcgtgtgaatgcagccattttctcttaagaaaaatgtcctcatttcccttcctgtatttcatgaatgctgacttaagttgtgacaacggctgtacttccatat

SEQ ID NO: 7210 - DNA, 120 bp, synthetic construct
  misc_feature 1..120: note = Artificially Synthesized Probe
  source 1..120: mol_type = other DNA
agccatttgcagaacatgtacaaaccacggagctaagaacacagagctaacaggactgtccgtttggtgacagatttttaggtagtccatagaatttctacttctacaaaaacagaaaac

SEQ ID NO: 7211 - DNA, 120 bp, synthetic construct
  misc_feature 1..120: note = Artificially Synthesized Probe
  source 1..120: mol_type = other DNA
ggaccacagaataaatgacctacaaatttccagcttctctctcacctttaaatctcaatatttacacacagtttcttatatacttaccaaccacactgcccacaatcccaacacctcccc

SEQ ID NO: 7212 - DNA, 120 bp, synthetic construct
  misc_feature 1..120: note = Artificially Synthesized Probe
  source 1..120: mol_type = other DNA
aataatgtttttctaaacagcagttacatttttcatgtgctacacacctatcagatggcatggatcccagggtgggtgttgactgaagactctcttgtttttttgtgtgtgtggtattac

SEQ ID NO: 7213 - DNA, 120 bp, synthetic construct
  misc_feature 1..120: note = Artificially Synthesized Probe
  source 1..120: mol_type = other DNA
acctctgaatggcacgccagatggtagcagtagttgttctaagtatgagcctgcaaatacactgactgaaaaaagttggaaagacttctcaaagtcagaacaaaaccataatgatgcttt

SEQ ID NO: 7214 - DNA, 120 bp, synthetic construct
  misc_feature 1..120: note = Artificially Synthesized Probe
  source 1..120: mol_type = other DNA
ctggggtatcccaaggtcatagacggtaatattcagggtgtatttgtctgttgtttcacggtcaagaggagataaaattttcagcattcctgtttccatatcaatcatgaagcaactatc

SEQ ID NO: 7215 - DNA, 120 bp, synthetic construct
  misc_feature 1..120: note = Artificially Synthesized Probe
  source 1..120: mol_type = other DNA
tatttgctctcccacgcctagatctctgggaattgtcccttcacaatttattttctcaaacaaaggtgtgttgtcattcaagttattgagagtaattgtagcaaggacttcgacttcccg

SEQ ID NO: 7216 - DNA, 120 bp, synthetic construct
  misc_feature 1..120: note = Artificially Synthesized Probe
  source 1..120: mol_type = other DNA
catagagcttggtctctaggtaatcaagtctaccagttaacactatcacaccactggttgggtgaatagcaaacatatctgttcgatctttaaaactgtagtaaaattccccgttggttc

SEQ ID NO: 7217 - DNA, 120 bp, synthetic construct
  misc_feature 1..120: note = Artificially Synthesized Probe
  source 1..120: mol_type = other DNA
aaaagctggcaaacataatgcccctacagtattgtgagaatgcaaagcttctgacaactaattcagaaaaaaacaaaaaccagcagtggttttacatggcgctccataagaacagcttgt

SEQ ID NO: 7218 - DNA, 120 bp, synthetic construct
  misc_feature 1..120: note = Artificially Synthesized Probe
  source 1..120: mol_type = other DNA
cagcccagttgaaattggtacgacaacattaatttatagtatcttaacttagctactgccaactctgccccataagtcattgccttagggggaaaaaaagacctgatgtgcttaaagcaa

SEQ ID NO: 7219 - DNA, 120 bp, synthetic construct
  misc_feature 1..120: note = Artificially Synthesized Probe
  source 1..120: mol_type = other DNA
ttatttaaaagagaggagaaggggggtagatacaatgtacccacggatatactttaaaatggacagaaaagtctaggcagacaagcaactgttaacagtggtaacttctggagaaccggt

SEQ ID NO: 7220 - DNA, 120 bp, synthetic construct
  misc_feature 1..120: note = Artificially Synthesized Probe
  source 1..120: mol_type = other DNA
cattatactagatacaactaacaaaccagtactgacacatcatcaactacagtccatacttcactcaaatttgctcattttacccaaggccttctctccatcctagaatcccttccaaga

SEQ ID NO: 7221 - DNA, 120 bp, synthetic construct
  misc_feature 1..120: note = Artificially Synthesized Probe
  source 1..120: mol_type = other DNA
gaatctttttttttctcaagatccgtctggactcatggataaaggacaatttttaggactttagagtttagtatgaatcaaatgagaagtcccccagcggattctgaaccgaggagtgcc

SEQ ID NO: 7222 - DNA, 120 bp, synthetic construct
  misc_feature 1..120: note = Artificially Synthesized Probe
  source 1..120: mol_type = other DNA
cacgggacacaatacagctgggacggacttgtggaccacattcctaactgaaatctttgaaaaacctgaatgtactctgcaaacttggctaacagaatgctactgtgagtagaataaatt

SEQ ID NO: 7223 - DNA, 120 bp, synthetic construct
  misc_feature 1..120: note = Artificially Synthesized Probe
  source 1..120: mol_type = other DNA
attaggtgagacacagcatcacacaatgcaccaattctgttaaacgccgcatatttattactgagcggtcacaattcttacaagcacaagtagtcattctagcctttatggaacaggaca

SEQ ID NO: 7224 - DNA, 120 bp, synthetic construct
  misc_feature 1..120: note = Artificially Synthesized Probe
  source 1..120: mol_type = other DNA
taattcttttcaacccatcttcatatgattttcagcatgaacggaggaagctgtgaccctagaaattgagcagcagccttaggcttggtatatgtcatttaatcacttctgctaactcca

SEQ ID NO: 7225 - DNA, 120 bp, synthetic construct
  misc_feature 1..120: note = Artificially Synthesized Probe
  source 1..120: mol_type = other DNA
taaatgacagaccaggaaagtgaatgttccatgtacagcaagaaaacggaaatcttcagggagaaaagtccatcttccctcctcctcttaaaatgttctcttcacctgttctctcttctt

SEQ ID NO: 7226 - DNA, 120 bp, synthetic construct
  misc_feature 1..120: note = Artificially Synthesized Probe
  source 1..120: mol_type = other DNA
actctggcattacaaacttgtcttccaactcttcctccacatgcatttattaccacccttaaagatctcatctactctgcctcaaatcatgaaggatcagtgcaccaaatctgcaatttc

SEQ ID NO: 7227 - DNA, 120 bp, synthetic construct
  misc_feature 1..120: note = Artificially Synthesized Probe
  source 1..120: mol_type = other DNA
tgcaacaagttcagtaaccaagctgtcttgagccaataacaccacctagtggtgaaggctctaaagtaatgtaacatcttgacctcttcccttccgaaagataatgcaaacattactatt

SEQ ID NO: 7228 - DNA, 120 bp, synthetic construct
  misc_feature 1..120: note = Artificially Synthesized Probe
  source 1..120: mol_type = other DNA
gtcaccacccaccttacgctgcctcaaaattggctatagataatgccagatcagtgtctgtgttgcagattatcacaaagctctaaccttaatattctatgaaggatacagattaaatca

SEQ ID NO: 7229 - DNA, 120 bp, synthetic construct
  misc_feature 1..120: note = Artificially Synthesized Probe
  source 1..120: mol_type = other DNA
catttttctgttggcacctgtccggaccatggatttaaatgatctactaacatgatgagaacccaacggggatacttcaaaagagacaaatgaatatacaggtggcccgaaatgatttta

SEQ ID NO: 7230 - DNA, 120 bp, synthetic construct
  misc_feature 1..120: note = Artificially Synthesized Probe
  source 1..120: mol_type = other DNA
tttttttaaaggcaatgaaggaccaaaaactctttcttttaaaaagatcttagaagttcctcctccagagaagacagaaaacactgacaaaccgcacattgtgcagatgttcagccccga

SEQ ID NO: 7231 - DNA, 120 bp, synthetic construct
  misc_feature 1..120: note = Artificially Synthesized Probe
  source 1..120: mol_type = other DNA
ggcagggcgaggcttgtgatgccgaggttagttacggccagccacaggcgctgtgcaaggaattggggaaagctccctgccaagaaagggaaacgttagcttagctaaaaaaaaaaaaaa

SEQ ID NO: 7232 - DNA, 120 bp, synthetic construct
  misc_feature 1..120: note = Artificially Synthesized Probe
  source 1..120: mol_type = other DNA
gttcaaagttaacgcagtcaccttataagccatcttagaggtgaccggaaaaaataataataataaaggtgtctagcaggttgtggctgggaaggaaaaataatgcctgcaagatgagtg

SEQ ID NO: 7233 - DNA, 120 bp, synthetic construct
  misc_feature 1..120: note = Artificially Synthesized Probe
  source 1..120: mol_type = other DNA
ccccgatgcgccctccctaggcaccattgctataataagttacattcaaaataatgcacaaacagcatcgcctctcaagttctttttaacagtgctctatatgtattttatgaactccca

SEQ ID NO: 7234 - DNA, 120 bp, synthetic construct
  misc_feature 1..120: note = Artificially Synthesized Probe
  source 1..120: mol_type = other DNA
agatctgagttgatccctcagagtctacattaattctgtctccccaattctctcttcctcattattttccttggaccaactgatatctttattctctgatctcttgcagttccagttgat

SEQ ID NO: 7235 - DNA, 120 bp, synthetic construct
  misc_feature 1..120: note = Artificially Synthesized Probe
  source 1..120: mol_type = other DNA
ctaaatatgtatttttcccttgtgctatccacaaaagcctcaccagttgctcagagccctcccctttactccacttgatctttttctttttcttcttgtaatctccaagtagacaccaca

SEQ ID NO: 7236 - DNA, 120 bp, synthetic construct
  misc_feature 1..120: note = Artificially Synthesized Probe
  source 1..120: mol_type = other DNA
ggaagcagaaaagcccaccacccacttaaacctgtaaggagtttctattcatcaagagatggagactgcaatattcttcagggaaaaatgcttcattcaatatgcaagacaaaataacca

SEQ ID NO: 7237 - DNA, 120 bp, synthetic construct
  misc_feature 1..120: note = Artificially Synthesized Probe
  source 1..120: mol_type = other DNA
ataaatgtatgccacagtaaattttttcaaagtaaacagcatccagatctattttagacatttccagcacctcagaaactccttcttgcccatttctagtccacccctgacactgacttc

SEQ ID NO: 7238 - DNA, 120 bp, synthetic construct
  misc_feature 1..120: note = Artificially Synthesized Probe
  source 1..120: mol_type = other DNA
tggacccgagccctaatcatatggctgacaccaaagtcatgaaggtaggggaatgattgttgagtaggaaattagtaatgtctgctaaaagctgcatctcgtgagttttgatatataata

SEQ ID NO: 7239 - DNA, 120 bp, synthetic construct
  misc_feature 1..120: note = Artificially Synthesized Probe
  source 1..120: mol_type = other DNA
acttagccaaaccaactgcctctggagaaaagaaaagtagttgaagcatttttggttatgtgtagaggtgtatgtcgaaaggaaaagcccattgacttggagcttgttttgctagtgata

SEQ ID NO: 7240 - DNA, 120 bp, synthetic construct
  misc_feature 1..120: note = Artificially Synthesized Probe
  source 1..120: mol_type = other DNA
ggtgtacaatgtgctttactatcgaaatggcaaagcctttaagtttttccactggaattctaacctcaccattctgaaaaccaacataagtcacaatggcacctaccattgctcaggcat

SEQ ID NO: 7241 - DNA, 120 bp, synthetic construct
  misc_feature 1..120: note = Artificially Synthesized Probe
  source 1..120: mol_type = other DNA
aacctttctctgtctgagaaaaaaaaaagttcactcctgtgggaaagaaattattgtcccagattatcttttaaagtcaggaacaaaaataatgagtcactgaaatgtggcgggcacctg

SEQ ID NO: 7242 - DNA, 120 bp, synthetic construct
  misc_feature 1..120: note = Artificially Synthesized Probe
  source 1..120: mol_type = other DNA
tctttttcctttgcctttccttcctccatttctttccttcattttctcctctgtccttctttttttctccttcattttattttcccctccctcccactcttccctccactccatgacccc

SEQ ID NO: 7243 - DNA, 120 bp, synthetic construct
  misc_feature 1..120: note = Artificially Synthesized Probe
  source 1..120: mol_type = other DNA
ctggtctctaaatagtatctcttctctttgtctttttctgtttcaggcctccagttaccaactcctgtctggtttcatgtccttttctatctggcagtgggaataatgtttttagtgaac

SEQ ID NO: 7244 - DNA, 120 bp, synthetic construct
  misc_feature 1..120: note = Artificially Synthesized Probe
  source 1..120: mol_type = other DNA
cacccagactcttgatgttctgttgctttccacatcagaacccgctctgagaaaagtctagtaacctatacttgaatgataaatgaatggccagagtgtttgccttctttgaaatttatg

SEQ ID NO: 7245 - DNA, 120 bp, synthetic construct
  misc_feature 1..120: note = Artificially Synthesized Probe
  source 1..120: mol_type = other DNA
aagtcatcaaagatttaccccattttttccattcttattggggctgccacatttacgtcttcatcacttgataactcaatttttatagcaccctctgatggggtcttgattgatcctgtc

SEQ ID NO: 7246 - DNA, 120 bp, synthetic construct
  misc_feature 1..120: note = Artificially Synthesized Probe
  source 1..120: mol_type = other DNA
tgggctctcttatctcccacctagattcaaccagtgaatgatttccagagcaatggcacatcaaattaatatggctactgctctctttgaatttatattctactgagggatataaacggt

SEQ ID NO: 7247 - DNA, 120 bp, synthetic construct
  misc_feature 1..120: note = Artificially Synthesized Probe
  source 1..120: mol_type = other DNA
gaaaagttttagtggactgctgagggccgagtccaaattgcagagaattagacagtgaatgagaggagaagaaatcaggacagcctatgtaagaaaaacaatggagaaatttagttttga

SEQ ID NO: 7248 - DNA, 120 bp, synthetic construct
  misc_feature 1..120: note = Artificially Synthesized Probe
  source 1..120: mol_type = other DNA
tgtgtggtaatttcaataacacgcagctgagcaagtaaaggcatggcgaatacaggtgcatttggtagagacagagaaaggcaacgaagttaaggggatttgcaaggaggtaattataat

SEQ ID NO: 7249 - DNA, 120 bp, synthetic construct
  misc_feature 1..120: note = Artificially Synthesized Probe
  source 1..120: mol_type = other DNA
tgaaccccaaaccctcccaaacacagagccctgggatcttttctttctctgaacctccatagcattttatccaaattcctctaatgtcatctcttttacatcagattacacatgtgctta

SEQ ID NO: 7250 - DNA, 120 bp, synthetic construct
  misc_feature 1..120: note = Artificially Synthesized Probe
  source 1..120: mol_type = other DNA
caaaaatctggaagacctaaatgccaagcaaaagagttgttaaataaatcacaggacagccaaatagtaggatatagtgtagccatttaaaatgacaacatgggcggggaacggtggctc

SEQ ID NO: 7251 - DNA, 120 bp, synthetic construct
  misc_feature 1..120: note = Artificially Synthesized Probe
  source 1..120: mol_type = other DNA
gtcacagaaaatgagaactctgatctctctctcaactgccttccgctgtccaaataaaaccaagggcttcctctctccaaataaaattcaggcacatgcaaaatcacatggcctgcatat

SEQ ID NO: 7252 - DNA, 120 bp, synthetic construct
  misc_feature 1..120: note = Artificially Synthesized Probe
  source 1..120: mol_type = other DNA
aaagagtatgtatgtatggggtgtctgtgtgtctgtgctggtggggagaggttggtggggagagagagaaagaactggtgaggatatctcaggtaaagtatatgtatttcgagggtgttt

SEQ ID NO: 7253 - DNA, 120 bp, synthetic construct
  misc_feature 1..120: note = Artificially Synthesized Probe
  source 1..120: mol_type = other DNA
ggcagagcttaataaatattttgctggagaggttgatgatcttacaaagctcccattgaaaggtggctctctgtaaagcaaagttacaatgagattgtgatgaacattgtccttgtggct

SEQ ID NO: 7254 - DNA, 120 bp, synthetic construct
  misc_feature 1..120: note = Artificially Synthesized Probe
  source 1..120: mol_type = other DNA
agaatggaaaatccaagaaattttcccgttcggatcccaacttctccatcccacaagcaaaccacagtcacagtggtgattaccactgcacaggaaacataggctacacgctgtactcat

SEQ ID NO: 7255 - DNA, 120 bp, synthetic construct
  misc_feature 1..120: note = Artificially Synthesized Probe
  source 1..120: mol_type = other DNA
ttgtattatagtcattcattcgtttattagatcattcatttgacaagacttgaacaaactagcttatgtgtcagccaatgcgtgagacatggtgggtgatgccaagagaagtccagtccc

SEQ ID NO: 7256 - DNA, 120 bp, synthetic construct
  misc_feature 1..120: note = Artificially Synthesized Probe
  source 1..120: mol_type = other DNA
gacgacctctctggagatgagaagagaaacaccagtcccagatacagaagagagggctgtgtccgaatttctggtaccaggaatctggtgatatttccagagcaagaaatcagagatact

SEQ ID NO: 7257 - DNA, 120 bp, synthetic construct
  misc_feature 1..120: note = Artificially Synthesized Probe
  source 1..120: mol_type = other DNA
tgtgttcacaccagggccaaaacagatctggaaaaaacaaagtccaagcaactggattatccatcttgttgtgtggttctgtctgcactggcataagcacatttcacaaggcacttttgc

SEQ ID NO: 7258 - DNA, 120 bp, synthetic construct
  misc_feature 1..120: note = Artificially Synthesized Probe
  source 1..120: mol_type = other DNA
gaaagctcagcaattccctgaaaagaatgcagctcaagtgactgctccactttttcaccttggcctttgcggaaggctgtggctgggctaccctatgcatcgatcaatgaggtcatattt

SEQ ID NO: 7259 - DNA, 120 bp, synthetic construct
  misc_feature 1..120: note = Artificially Synthesized Probe
  source 1..120: mol_type = other DNA
aaaacattataaaaacaacattctgtttaccttttcaaggctgtattggttggagtgtagactgaactgcctggggtctgtttctcttcagtgatgagactcttaggaaggcaggaatgg

SEQ ID NO: 7260 - DNA, 120 bp, synthetic construct
  misc_feature 1..120: note = Artificially Synthesized Probe
  source 1..120: mol_type = other DNA
taaatgcaatgaacaaagctacacaggaattagatattgaagcagaaaaggtggttttacagtccctgcattaacctctaattcttactaccctggccaagaaagcattttcacctcctg

SEQ ID NO: 7261 - DNA, 120 bp, synthetic construct
  misc_feature 1..120: note = Artificially Synthesized Probe
  source 1..120: mol_type = other DNA
tttaaatttatggtccttccagtctcttgttgagcttcgaatgtttgtcttcacagagaaatatagtcctgtgtccactgcaaaaaggagtaccatcaccaagcagaaagagacttggta

SEQ ID NO: 7262 - DNA, 120 bp, synthetic construct
  misc_feature 1..120: note = Artificially Synthesized Probe
  source 1..120: mol_type = other DNA
ctatctcatgttgtgaaggtctactgtgatagtcaaaccaggtgcatgtaaagaattgtttagcacagagtctagcacactgaaaggtgcccaataaatgtcagcttatttttgttacgg

SEQ ID NO: 7263 - DNA, 120 bp, synthetic construct
  misc_feature 1..120: note = Artificially Synthesized Probe
  source 1..120: mol_type = other DNA
tgtggcttttggaatgtagaagtcagaattatgatgaaaatacttcctgcctttgccattctgtaaatatgtgaccttatgcagagcagtgttcttccagctgtgacacctcaggtgaat

SEQ ID NO: 7264 - DNA, 120 bp, synthetic construct
  misc_feature 1..120: note = Artificially Synthesized Probe
  source 1..120: mol_type = other DNA
tatatcgccagagcttattctcacgatcatgtcaccaagtaatcagacttcacaaagagagaacatgaggtcatggtcgggaaagggcctgaataattaaaaaataatgatgttataggt

SEQ ID NO: 7265 - DNA, 120 bp, synthetic construct
  misc_feature 1..120: note = Artificially Synthesized Probe
  source 1..120: mol_type = other DNA
aggaggacataagtgaaatgggtcctaaaggattaaaggatgctcagaagtttacctggtgaagctaattctcatggtcacagtttaatatagccttgattggctagacttctaaagcca

SEQ ID NO: 7266 - DNA, 120 bp, synthetic construct
  misc_feature 1..120: note = Artificially Synthesized Probe
  source 1..120: mol_type = other DNA
gagctatcacattaccaaatttatgcttaattataggtttgagtatagcattgatgaggagacagaaagatatgatgctaggccactaggattgctttgggaggtggcttagggcattac

SEQ ID NO: 7267 - DNA, 120 bp, synthetic construct
  misc_feature 1..120: note = Artificially Synthesized Probe
  source 1..120: mol_type = other DNA
cttttatctctaagaatatcatctctggctcttaccaagtatttcaggaccctttgtttcaccctttattggtgattttcctcttccccttcatcaactcaccgatatggacttctagct

SEQ ID NO: 7268 - DNA, 120 bp, synthetic construct
  misc_feature 1..120: note = Artificially Synthesized Probe
  source 1..120: mol_type = other DNA
aagggtacaggttgaatttccctgaaccaagctacagaaagagcctcaacccatatccccacaagaaagggtagaaattgaaaatcatagaggagaaccctggaatgtcaaactgaaaga

SEQ ID NO: 7269 - DNA, 120 bp, synthetic construct
  misc_feature 1..120: note = Artificially Synthesized Probe
  source 1..120: mol_type = other DNA
attcaaaatctatatgctcctgggatatgtaatccacaggagctactgactttttagtgtgatttgatcattagatttccaggttagaagaaacccaggtagggtagagaaatgggccct

SEQ ID NO: 7270 - DNA, 120 bp, synthetic construct
  misc_feature 1..120: note = Artificially Synthesized Probe
  source 1..120: mol_type = other DNA
actagacaccgtccggtacagccgggaggcatacgtattatagcccagctcgtggatccgctccacaaactcgcactcggcgctgtagtgctcctgcggggatgagatatcatggtcagt

SEQ ID NO: 7271 - DNA, 120 bp, synthetic construct
  misc_feature 1..120: note = Artificially Synthesized Probe
  source 1..120: mol_type = other DNA
agaaaaaaaaagaaattgcagaaaagaaaaaagaagaaagaacacaaaaagcaggaagggaaggggacacagccaggtttgatgagcccagactctccattaaacgctgcgctcaggggc

SEQ ID NO: 7272 - DNA, 120 bp, synthetic construct
  misc_feature 1..120: note = Artificially Synthesized Probe
  source 1..120: mol_type = other DNA
gagagagtggaaatggcctccagaggctcccagactggaccgagcagcatctgacctcgcaggacctcagggaacaagatgcttcaagcaccccatcctgtttttcagcgacatgaaagc

SEQ ID NO: 7273 - DNA, 120 bp, synthetic construct
  misc_feature 1..120: note = Artificially Synthesized Probe
  source 1..120: mol_type = other DNA
cagaagccatgaactgggctgatttgcttttttaggaagcccctttaacatgcactagcagagtgcaacacatggtaagtgcccaggacactgactggtgaacgaaggactgaatgtcag

SEQ ID NO: 7274 - DNA, 120 bp, synthetic construct
  misc_feature 1..120: note = Artificially Synthesized Probe
  source 1..120: mol_type = other DNA
atgggtgaaaggatggaaggaaggagggagcatggacggatggacatgtgaatgggcagatggacagatgaacggttggaaggatggatggaaagaaggatgagagaaaggaaagaagga

SEQ ID NO: 7275 - DNA, 120 bp, synthetic construct
  misc_feature 1..120: note = Artificially Synthesized Probe
  source 1..120: mol_type = other DNA
atgggtgagtggatgggaggaaggagggagtagcctctggaccagagaaaatgaaggggcgcatcccggctttctggaccttcctttagcaaaacggctaaaaatctgtgatgaaatcat

SEQ ID NO: 7276 - DNA, 120 bp, synthetic construct
  misc_feature 1..120: note = Artificially Synthesized Probe
  source 1..120: mol_type = other DNA
ggtccatttattttggtggaaatttggagaacaatcacttccctgctctcagctactctcaagggagggtggtagtgatgacaaggatgggggaaacctttgctaacctggcattctcca

SEQ ID NO: 7277 - DNA, 120 bp, synthetic construct
  misc_feature 1..120: note = Artificially Synthesized Probe
  source 1..120: mol_type = other DNA
ataatataaaccactggcaataacacagccagggtgcctgccacccagatcatgctggcaatagacctggcgggagatcattgtactcgccgggggacctggaagggcaggaagccagtt

SEQ ID NO: 7278 - DNA, 120 bp, synthetic construct
  misc_feature 1..120: note = Artificially Synthesized Probe
  source 1..120: mol_type = other DNA
ggtcggcaggaggaggagaagtcgtcaaaataataaagaggatgataaatgccttgtccggctccttttctccgacacattcaaagggcttaaacttgtcagagctgcccaaagcagcag

SEQ ID NO: 7279 - DNA, 120 bp, synthetic construct
  misc_feature 1..120: note = Artificially Synthesized Probe
  source 1..120: mol_type = other DNA
agagggagagagggaacgcgagtccctttaatttccacccaggagcaatgaaatttccgttgctgcgcaaagcgctgaaagaaaggacggttcgccaacaaaaggccgacgtggtcccca

SEQ ID NO: 7280 - DNA, 120 bp, synthetic construct
  misc_feature 1..120: note = Artificially Synthesized Probe
  source 1..120: mol_type = other DNA
gtggaggacgctgggctgggaaccagcaccttgggacggccgggtagttcgggccttgaggagtcccacaccctgacagctggcgccccccacgccccgcctagctctcctcggcctggg

SEQ ID NO: 7281 - DNA, 120 bp, synthetic construct
  misc_feature 1..120: note = Artificially Synthesized Probe
  source 1..120: mol_type = other DNA
gcgcggcgaggctcgggttggggcggggcgggggcgggggcggggccggacccggggaagccgcccgcccgcggggacgtccgcaccgcgagggttaaggccgggagcccggcggggcgg

SEQ ID NO: 7282 - DNA, 120 bp, synthetic construct
  misc_feature 1..120: note = Artificially Synthesized Probe
  source 1..120: mol_type = other DNA
tggggagggcggccagacccctgatccccgcggcccgggaccggggagggcggtatctcccagttccacgtgttagtgacggcgcccccaatgtccccaggtccggacaggccgagatga

SEQ ID NO: 7283 - DNA, 120 bp, synthetic construct
  misc_feature 1..120: note = Artificially Synthesized Probe
  source 1..120: mol_type = other DNA
cgtgttgaccactcaggattgtccgcgctgtgtccaccagtcctgaggcttcgcacccctcccctgccgcccagcaagcgcgccgcatccaacctggccttatatgggcacgttcgggtg

SEQ ID NO: 7284 - DNA, 120 bp, synthetic construct
  misc_feature 1..120: note = Artificially Synthesized Probe
  source 1..120: mol_type = other DNA
attttatttctcacagtgggaacttgagaggttctgcatgaaatgtctttcacaaataactctgaaggaagtcgtttcagggctttctgagaagtgccacctttgaacttttgcaagcat

SEQ ID NO: 7285 - DNA, 120 bp, synthetic construct
  misc_feature 1..120: note = Artificially Synthesized Probe
  source 1..120: mol_type = other DNA
ctgcccatcttggcagaaggctcaattacttcttgcctggtgctgttaaggggctgaggggtgaacattggctgagcagtgacaggaaagagggagccgggctgttgcccttgtgtgtgg

SEQ ID NO: 7286 - DNA, 120 bp, synthetic construct
  misc_feature 1..120: note = Artificially Synthesized Probe
  source 1..120: mol_type = other DNA
tgaagctgggtgggcctggtgaggtctggactgggatgggtacggaggaatctttgcctgttttagtgctgtacaaggttctctccagggcgtgggactgcctgatgatgctctggtgcc

SEQ ID NO: 7287 - DNA, 120 bp, synthetic construct
  misc_feature 1..120: note = Artificially Synthesized Probe
  source 1..120: mol_type = other DNA
ggggccacacagccagctcctcagcggtcagctccacctgcccctccctccccagcgcacactggctccgtctgtccccacagacgccccaccctgctgtgttgttgaccagcatcagcc

SEQ ID NO: 7288 - DNA, 120 bp, synthetic construct
  misc_feature 1..120: note = Artificially Synthesized Probe
  source 1..120: mol_type = other DNA
ggaggatttggaggcatccgccttcttggcgcactgcctccgagtctagtcctccatacctgacagcagtgaggccctgtctcagactcagtttactctcatgtctcgctcccatgtggc

SEQ ID NO: 7289 - DNA, 120 bp, synthetic construct
  misc_feature 1..120: note = Artificially Synthesized Probe
  source 1..120: mol_type = other DNA
tcagtgtgctcccacccaggacagggccaggcactcgctctcttgcttcttctggacagttgtgtgggtgaacacttgtgtgcacccatgaacatgcacgtgtgaggcctgtgcccaggt

SEQ ID NO: 7290 - DNA, 120 bp, synthetic construct
  misc_feature 1..120: note = Artificially Synthesized Probe
  source 1..120: mol_type = other DNA
agaggtgatagggattctctgtgagggtccctgtccccagacttgggggtcagaatgggagctgctccctgagtgtctgaagacgccagtgggagacgtcacagggccactgttaactgt

SEQ ID NO: 7291 - DNA, 120 bp, synthetic construct
  misc_feature 1..120: note = Artificially Synthesized Probe
  source 1..120: mol_type = other DNA
atctgtggtccctgaactcaggtctgatattgacacagacgtgggtgctgcacagactctcatccacacattgcacaggctcaggcagcccgccgtgctcggttgcttgtggatagctgt

SEQ ID NO: 7292 - DNA, 120 bp, synthetic construct
  misc_feature 1..120: note = Artificially Synthesized Probe
  source 1..120: mol_type = other DNA
ggctggagccgcttccgcgtgctgccgcaggggctgaaggtgaagcaggtggagcgggaggatgccggcgtgtacgtgtgcaaggccaccaacggcttcggcagcctgagcgtcaactac

SEQ ID NO: 7293 - DNA, 120 bp, synthetic construct
  misc_feature 1..120: note = Artificially Synthesized Probe
  source 1..120: mol_type = other DNA
ggaaaactggctgtcccccacccccaccccacagtcctttcaaaggggacgatgaccgggtggtatgagagtctcgtctgttcaccagccctcggccccttgatgtaggctagggttact

SEQ ID NO: 7294 - DNA, 120 bp, synthetic construct
  misc_feature 1..120: note = Artificially Synthesized Probe
  source 1..120: mol_type = other DNA
ctcacaggcacgcaccccgtgaacacgacggtggacttcggggggaccacgtccttccagtgcaaggtgcgcagcgacgtgaagccggtgatccagtggctgaagcgcgtggagtacggc

SEQ ID NO: 7295 - DNA, 120 bp, synthetic construct
  misc_feature 1..120: note = Artificially Synthesized Probe
  source 1..120: mol_type = other DNA
acgcacacacgcacatgcacagatatgccgcctgggcacacagataagctgcccaaatgcacgcacacgcacagagacatgccagaacatacaaggacatgctgcctgaacatacacacg

SEQ ID NO: 7296 - DNA, 120 bp, synthetic construct
  misc_feature 1..120: note = Artificially Synthesized Probe
  source 1..120: mol_type = other DNA
agaggctggagcccatggctagtggctcatccccactgcattctccccctgacacagagaaggggccttggtatttatatttaagaaatgaagataatattaataatgatggaaggaaga

SEQ ID NO: 7297 - DNA, 120 bp, synthetic construct
  misc_feature 1..120: note = Artificially Synthesized Probe
  source 1..120: mol_type = other DNA
tgccagcacagcccaaacagacctcccaacaaatcattgcctgactatgtatttcccacttcctggcaaactcctactcatgcagcaaaacccaaatcaaatggcccctcctccaggaca

SEQ ID NO: 7298 - DNA, 120 bp, synthetic construct
  misc_feature 1..120: note = Artificially Synthesized Probe
  source 1..120: mol_type = other DNA
gcttagcaaagtcagggctgctgaccccatccctcctagggagccaattgatggcgcagagcacaaggtagccaggagacaaaaggttctggaaggaaggccaaggacactggcatggag

SEQ ID NO: 7299 - DNA, 120 bp, synthetic construct
  misc_feature 1..120: note = Artificially Synthesized Probe
  source 1..120: mol_type = other DNA
aaacaaacaaaaaaaacagccaggctcctggctactcatacaagtgccaaatggagctctggcaacatccctgggttccagccactcccaaactgctctcctagccctcaaactccatca

SEQ ID NO: 7300 - DNA, 120 bp, synthetic construct
  misc_feature 1..120: note = Artificially Synthesized Probe
  source 1..120: mol_type = other DNA
aaactcctgacctcaagtgatccacctgcctcagcctcccaaagtgctggtattacaggcatgagccaccgctccaggcctacttatttatttattttattttagagacagggccatgtt

SEQ ID NO: 7301 - DNA, 120 bp, synthetic construct
  misc_feature 1..120: note = Artificially Synthesized Probe
  source 1..120: mol_type = other DNA
agccagctaatccaaacttggcagttccatgagctatcgatccctcctttctgcttgaacctgtttgagtgggtttctatcaccttcaaccagcaggtccaaacttgtatgaagctacac

SEQ ID NO: 7302 - DNA, 120 bp, synthetic construct
  misc_feature 1..120: note = Artificially Synthesized Probe
  source 1..120: mol_type = other DNA
tggagagaagcagaaagtgaggtgggagaagtgatagcaggagggggaagaccagacaactcaaggccccaagggctgtgactaggattccactttactctgaggaaaactgggacccat

SEQ ID NO: 7303 - DNA, 120 bp, synthetic construct
  misc_feature 1..120: note = Artificially Synthesized Probe
  source 1..120: mol_type = other DNA
tatccacttgcattctacaacactccactggtctgggatataccacgagtctgtaacaggccctagcttaggggcagttggggatctacccatattctgggctattctagaatattctga

SEQ ID NO: 7304 - DNA, 120 bp, synthetic construct
  misc_feature 1..120: note = Artificially Synthesized Probe
  source 1..120: mol_type = other DNA
tcattccctcctcagtaaagtgcaggggaagtgacttgccgccttggagctgcgggacttgacgaacgagttcccctccctaagcctcggttttcctcctttttattaagagacaggttc

SEQ ID NO: 7305 - DNA, 120 bp, synthetic construct
  misc_feature 1..120: note = Artificially Synthesized Probe
  source 1..120: mol_type = other DNA
agtggggaaccccacgtgcaggacactgggcaggatgggacagacttcagggtgacagtgctggtgctagagaccagctcagtgaacaatggttggtctggtttttttgtttttttgttt

SEQ ID NO: 7306 - DNA, 120 bp, synthetic construct
  misc_feature 1..120: note = Artificially Synthesized Probe
  source 1..120: mol_type = other DNA
cagtattgttattacaattgatagtggtaatgatatcttattatttgcatgggcaccagcattatttggtatattagatatcagtactatactagtagcaagacgtcttccacagaaaac

SEQ ID NO: 7307 - DNA, 120 bp, synthetic construct
  misc_feature 1..120: note = Artificially Synthesized Probe
  source 1..120: mol_type = other DNA
acattgtgcatgtgtgtgagtcagtggatagagtacatcaatgtgaagcatctccagtagttgcctctggctggtgatcacggtggtgaccacgtgacttccaaccctcacagcacagat

SEQ ID NO: 7308 - DNA, 120 bp, synthetic construct
  misc_feature 1..120: note = Artificially Synthesized Probe
  source 1..120: mol_type = other DNA
agcctcttctccaaaggggagaccctccccaaaagcaccaactgtaatcacccagaaaccccaagcgttttttccttccacactctgaatctaacactatcccccacaaccccaacatca

SEQ ID NO: 7309 - DNA, 120 bp, synthetic construct
  misc_feature 1..120: note = Artificially Synthesized Probe
  source 1..120: mol_type = other DNA
tctgagcttcatcctgaccatctgcgaaatggggataaacacccccatctatgcactctcaccttgggggctgctgggggcacagtccactctaaatgttatttccttaaagagttcaag

SEQ ID NO: 7310 - DNA, 120 bp, synthetic construct
  misc_feature 1..120: note = Artificially Synthesized Probe
  source 1..120: mol_type = other DNA
tcagcaaacggaagacacttaaagtggtaggttctcaagagagaagaagtttttaagactagagctaagcaagacatttaaaaggacatgggttgggatttgggaacacgtttattccag

SEQ ID NO: 7311 - DNA, 120 bp, synthetic construct
  misc_feature 1..120: note = Artificially Synthesized Probe
  source 1..120: mol_type = other DNA
aaaaaaaaaaaaaagagttttacccagcctttttggaaatgactcaaggtactcagcgtagtggataagtgagctagaaggaaggtactagaagggatgaatcccctccgaatgatcagg

SEQ ID NO: 7312 - DNA, 120 bp, synthetic construct
  misc_feature 1..120: note = Artificially Synthesized Probe
  source 1..120: mol_type = other DNA
tttttttttttttttttttttgagacagagtttcacttttgttgcccaggctggagtgcaatggctcgatcttggctcaccgtaacctccgcctcctgggttcaagcgactctcctgcct

SEQ ID NO: 7313 - DNA, 120 bp, synthetic construct
  misc_feature 1..120: note = Artificially Synthesized Probe
  source 1..120: mol_type = other DNA
gctggtgacccctatattttaagtgcctactagagtctggtagtgtcctatacatcacatatatgtgattttactaatcttcacaacaaccccacacaaaaatcccacgaagttggcact

SEQ ID NO: 7314 - DNA, 120 bp, synthetic construct
  misc_feature 1..120: note = Artificially Synthesized Probe
  source 1..120: mol_type = other DNA
atacgccacagacagccccaaatactctgcaaaggaatttgaactttcttctgtatacagttggaaacaacaaatggcttttgagtccaagagtgatgcaatcacagtgacgcattaaaa

SEQ ID NO: 7315 - DNA, 120 bp, synthetic construct
  misc_feature 1..120: note = Artificially Synthesized Probe
  source 1..120: mol_type = other DNA
agatctcagtaatgcaggggctgttgggtgcttcctgcaaatccctgagagggcagaagatagcttctgttaattcattattcttccaataaatgttgattgagtacctattttcatcag

SEQ ID NO: 7316 - DNA, 120 bp, synthetic construct
  misc_feature 1..120: note = Artificially Synthesized Probe
  source 1..120: mol_type = other DNA
tctgtttctccagttccacatcccagaaagcaaggagaaagggggtgtacaggtggagttcaagagggagatagtcatggtgacctctcagttccattctcccaccatattgagtatatg

SEQ ID NO: 7317 - DNA, 120 bp, synthetic construct
  misc_feature 1..120: note = Artificially Synthesized Probe
  source 1..120: mol_type = other DNA
atccaagggaggcagtgctatctgttcattcatccttttgaccaatatttattgagcccaaattcaatagcaggcattgcacttcctactgtggatagaatagtgacttagacttgtgct

SEQ ID NO: 7318 - DNA, 120 bp, synthetic construct
  misc_feature 1..120: note = Artificially Synthesized Probe
  source 1..120: mol_type = other DNA
gttgtactagccacatttcaaatgaccaccatattagacagtagagatacagaacatttccatcatcacaggaagttctggccaggcacagtggctcacacctgtaaccccagcactctg

SEQ ID NO: 7319 - DNA, 120 bp, synthetic construct
  misc_feature 1..120: note = Artificially Synthesized Probe
  source 1..120: mol_type = other DNA
tcaaaaaaaaaatagacggtttctccctgtcctcaagctccacccttgcactagagggtggttcaagaatggaaagcagagagtggagaagatgaagtccttctctttctctttgcatac

SEQ ID NO: 7320 - DNA, 120 bp, synthetic construct
  misc_feature 1..120: note = Artificially Synthesized Probe
  source 1..120: mol_type = other DNA
ataccttggatgatctttaccaaacgcacttgctttacagatatcagatctttccttgaaaacaacaggattggaattgtaactaacacttccgtgctgagagtgtctaaacccggattc

SEQ ID NO: 7321 - DNA, 120 bp, synthetic construct
  misc_feature 1..120: note = Artificially Synthesized Probe
  source 1..120: mol_type = other DNA
agtgtccagacctatctaccgattgctcgtggtaggatccctgtcttcctcctctccttgaccccgggtgtccacgaatggtgtcctgaccctcttgggacgctgagtgcctggagctgt

SEQ ID NO: 7322 - DNA, 120 bp, synthetic construct
  misc_feature 1..120: note = Artificially Synthesized Probe
  source 1..120: mol_type = other DNA
tgtgagtgtctagagctgtccgcctgagtggaagcttcatggtgatgcgaccatgagtgcctggagccatctcctgattgttcgtcattacgagtttgtctgctggcacttctggatcct

SEQ ID NO: 7323 - DNA, 120 bp, synthetic construct
  misc_feature 1..120: note = Artificially Synthesized Probe
  source 1..120: mol_type = other DNA
ctgtgagtgtctagagatgtcggcatgagtggaagcttcatggtgacgtgacactgagtgcctggagctgtctcctgattgttcctcattacgtgttgttctgcttgcacttctggatcc

SEQ ID NO: 7324 - DNA, 120 bp, synthetic construct
  misc_feature 1..120: note = Artificially Synthesized Probe
  source 1..120: mol_type = other DNA
catgggaggactcagactgttcatgagtgctcacctggtagaggaaagatcctgaatgtccagacgtttcccctgaccggccacgtgcggactcttggtggctctgctgatgggacccag

SEQ ID NO: 7325 - DNA, 120 bp, synthetic construct
  misc_feature 1..120: note = Artificially Synthesized Probe
  source 1..120: mol_type = other DNA
tggtgtggctgtgatgagaccctgagtgtccagatctatctaccaattgctcgtagtgggatccctgccttcctccactgcttgaccccgggtgtccatgaatggtgtcctgaccctctt

SEQ ID NO: 7326 - DNA, 120 bp, synthetic construct
  misc_feature 1..120: note = Artificially Synthesized Probe
  source 1..120: mol_type = other DNA
tgtctagagctgtcggcccaagaggaagcttcatgatgatgcgaccctgagtgcctagagccatctcctgattgttccttgtcatatgtttttctgcttgcacttctggatcctgactgc

SEQ ID NO: 7327 - DNA, 120 bp, synthetic construct
  misc_feature 1..120: note = Artificially Synthesized Probe
  source 1..120: mol_type = other DNA
tgtttgtctgctgacacttctggatcctgactgcccacgggagacatcagacctttcctgggacgtggtgtggctgtgatgagaccctgagtgtccagaactatctaccgattgctcata

SEQ ID NO: 7328 - DNA, 120 bp, synthetic construct
  misc_feature 1..120: note = Artificially Synthesized Probe
  source 1..120: mol_type = other DNA
ctagagctgtttcgtgcctgctcatggcgggatccttgtcttcctccagtgctgggtgcagtctgtccgtgtgtggactcagactgttcatgagagctcacctggtagaggaaagacctt

SEQ ID NO: 7329 - DNA, 120 bp, synthetic construct
  misc_feature 1..120: note = Artificially Synthesized Probe
  source 1..120: mol_type = other DNA
atctcttgactgctcccgagaagatccatgatggtttctggaagcagacccagacaacctctcggagtcgtctgagtgtctctcactgtcactgtcctggctaacactggatccctggtg

SEQ ID NO: 7330 - DNA, 120 bp, synthetic construct
  misc_feature 1..120: note = Artificially Synthesized Probe
  source 1..120: mol_type = other DNA
accatcttgggatgctgagtgcctggagttgtctcgtgcctgctcatggtgggatccttgtcttactccagtgctgggccctgtccatccatgggaggactcagactgtttatgagtgct

SEQ ID NO: 7331 - DNA, 120 bp, synthetic construct
  misc_feature 1..120: note = Artificially Synthesized Probe
  source 1..120: mol_type = other DNA
gtgtctagagctgtcagcctgagaggaagcttcatgatgacgtgaccctgagtgcctggtgccgtctcctgattgttcctcatttcgtgtttgtctgcttgcacttctggatcctgactg

SEQ ID NO: 7332 - DNA, 120 bp, synthetic construct
  misc_feature 1..120: note = Artificially Synthesized Probe
  source 1..120: mol_type = other DNA
cctacgctttcttgtcctggactcctgcaatggtacctggcttgtattttcatgtcttgacctgttcacttgagatgatgatttgccatcagatgaccttgatctttcatatattttgtt

SEQ ID NO: 7333 - DNA, 120 bp, synthetic construct
  misc_feature 1..120: note = Artificially Synthesized Probe
  source 1..120: mol_type = other DNA
attgatgagaaaaacaaatgctctatctttggtcttgtcagagactcttaccttcaggatttgccgaaattccttttccagaagttccttcagctcttttttactcaatgtgtcagtgtt

SEQ ID NO: 7334 - DNA, 120 bp, synthetic construct
  misc_feature 1..120: note = Artificially Synthesized Probe
  source 1..120: mol_type = other DNA
tctcacagacctcagtgtgctctaggtaagatcatccctcttgctgatcttgccattgctagcaacaagaatttagaaaggctgactggttttaagcagtaaaatttacttatacaaatt

SEQ ID NO: 7335 - DNA, 120 bp, synthetic construct
  misc_feature 1..120: note = Artificially Synthesized Probe
  source 1..120: mol_type = other DNA
ccattggaaaagagtttcctcattctcctaatatctgatctcccaacctactacatttctatccatataccttgccttcactttatttagggtaataaacagtctgtgctcctcctgtcc

SEQ ID NO: 7336 - DNA, 120 bp, synthetic construct
  misc_feature 1..120: note = Artificially Synthesized Probe
  source 1..120: mol_type = other DNA
gtttccttctctagtagtttatttttatcaccacagaaacatgctggagtatcttccatcttaaaacccttccctcgaaccattattccaccctcccccaacatttctcctaacatctta

SEQ ID NO: 7337 - DNA, 120 bp, synthetic construct
  misc_feature 1..120: note = Artificially Synthesized Probe
  source 1..120: mol_type = other DNA
tatttgggggtactttaaggaaaggaggttttgtggtagaggggacatttgaacttaaaatggaaaaataagaaggaagtagccttgttaattagagaattttagcacaaggaacagtgc

SEQ ID NO: 7338 - DNA, 120 bp, synthetic construct
  misc_feature 1..120: note = Artificially Synthesized Probe
  source 1..120: mol_type = other DNA
tcaagcaaagaaaaacagagctaatcaccagagacctactgtaaaggaaatattaaaggataattctagttggaagcacagaggagcaagaaagaataagaacaatggaaagagcatatg

SEQ ID NO: 7339 - DNA, 120 bp, synthetic construct
  misc_feature 1..120: note = Artificially Synthesized Probe
  source 1..120: mol_type = other DNA
gatcaattctccaggaagcctcaaaatacataaataaaaatcgacagaagtataaggaggaccaggcaatctacaatcatagtggggtatttaaatacacttctctcagcaactgataga

SEQ ID NO: 7340 - DNA, 120 bp, synthetic construct
  misc_feature 1..120: note = Artificially Synthesized Probe
  source 1..120: mol_type = other DNA
tcatttccagtgggggagaaactgcaggtcagatggctttactgaattctattcaaagtgaaagaaagaaataactataacatcacatagattatttcagagaaatgaaaaacaggaaac

SEQ ID NO: 7341 - DNA, 120 bp, synthetic construct
  misc_feature 1..120: note = Artificially Synthesized Probe
  source 1..120: mol_type = other DNA
gagggctaagattaggtaagaccatctttaagaagactaagttggaagacataccagatagcaaggtgtgttataaaggaagaaaatatggcatgatgcaaggctaaacaaatggaatga

SEQ ID NO: 7342 - DNA, 120 bp, synthetic construct
  misc_feature 1..120: note = Artificially Synthesized Probe
  source 1..120: mol_type = other DNA
aatggatagatttggcaggtttgtaggcagagttgactggacgtggtgatgaatcagtgtgatgagaaaacaggaatcatggataacttctagattttggtatgagcaaacagttatttc

SEQ ID NO: 7343 - DNA, 120 bp, synthetic construct
  misc_feature 1..120: note = Artificially Synthesized Probe
  source 1..120: mol_type = other DNA
tactcttgcttagaatcttgccctttgccttggctagtttcttttgtgtttaagatctcaactcaaagataattccctagagaggtcttcccctggccatctaatttaaagcactttcct

SEQ ID NO: 7344 - DNA, 120 bp, synthetic construct
  misc_feature 1..120: note = Artificially Synthesized Probe
  source 1..120: mol_type = other DNA
gtggtcagtctccgtggtcctaacgtggggatgtggctctttctcctggtgagatggttgggcactgtgagctgggataggggtcctgagcagaatgcctccagccttcaggggatctct

SEQ ID NO: 7345 - DNA, 120 bp, synthetic construct
  misc_feature 1..120: note = Artificially Synthesized Probe
  source 1..120: mol_type = other DNA
ttaacctccaacactgtgtgactcccagacccacagattcctcgtgggaaaacagggaccaggccaccacccagtgtgatgaaaggaggtcgccaaagagacattcccatggaagtgctg

SEQ ID NO: 7346 - DNA, 120 bp, synthetic construct
  misc_feature 1..120: note = Artificially Synthesized Probe
  source 1..120: mol_type = other DNA
caaactaacaaaaaacaaggagggactggagccctgtcagggtctgatgggaaccaccaaggacacagtggagcatggcatgcgttcagacttcagaaaacacacacagactcgactcaa

SEQ ID NO: 7347 - DNA, 120 bp, synthetic construct
  misc_feature 1..120: note = Artificially Synthesized Probe
  source 1..120: mol_type = other DNA
tattgtctcttttctattcctgtcactttctgatccttttgcctcttttcagttttgttttcctcttttcacgtccatcctctgtgtctggcactatcagtctgctcatacatattgtcc

SEQ ID NO: 7348 - DNA, 120 bp, synthetic construct
  misc_feature 1..120: note = Artificially Synthesized Probe
  source 1..120: mol_type = other DNA
gatacagggtggtgcagtttctcaaatgaacaaatccatcatgtgtcttcttctgacttctggatactatcttgcttccttaggacccatgtcttctggaactttcttcttcctctacca

SEQ ID NO: 7349 - DNA, 120 bp, synthetic construct
  misc_feature 1..120: note = Artificially Synthesized Probe
  source 1..120: mol_type = other DNA
ctttgatctcaaggagctgtgctgtttctcgaaggtgtgtagaggtttgaatttacgtggcgatcattctctgtgacaccttttacttaattaccttgttttttgaatgtcgaaatgctg

SEQ ID NO: 7350 - DNA, 120 bp, synthetic construct
  misc_feature 1..120: note = Artificially Synthesized Probe
  source 1..120: mol_type = other DNA
acagggtcaggtgctgaagggacattgtgagaagtgacctagaaggcaagaggtgagccctctgtcacgctggcataagggccgcttgagggctctttggtcaagcagtaacgccagtgt

SEQ ID NO: 7351 - DNA, 120 bp, synthetic construct
  misc_feature 1..120: note = Artificially Synthesized Probe
  source 1..120: mol_type = other DNA
tcgatacctgcagtgcaggaggctcacgaagcccttacctgaagccgctttcttgtctatgcctgctctctatctgctcaaactcctccgaggccagcaccatcccactgtctgtctggt

SEQ ID NO: 7352 - DNA, 120 bp, synthetic construct
  misc_feature 1..120: note = Artificially Synthesized Probe
  source 1..120: mol_type = other DNA
taggacagaaagcagctgtgagtcgtggcatcgcaggagggcccaaatgtgcccaaggctcaccctggacttgcactttcaaaggacagtcgttgggttctgccatttgccttacgaatt

SEQ ID NO: 7353 - DNA, 120 bp, synthetic construct
  misc_feature 1..120: note = Artificially Synthesized Probe
  source 1..120: mol_type = other DNA
ctcccagggactcttggggactcacccccagactaatcagtgatttagataatcagagattcctgggaggaatcttggcccaaacacagtccactccacctctccgggagaaaaagtacg

SEQ ID NO: 7354 - DNA, 120 bp, synthetic construct
  misc_feature 1..120: note = Artificially Synthesized Probe
  source 1..120: mol_type = other DNA
gaaaccagcacatctcagccatcaagacagataaggggtcaaggtagcagaatgctggctgtgccagcctcgctaagttctcccaacagcccttccaggtacatttatggatgaggcagg

SEQ ID NO: 7355 - DNA, 120 bp, synthetic construct
  misc_feature 1..120: note = Artificially Synthesized Probe
  source 1..120: mol_type = other DNA
cccactctgccctcctcctgacacgtctcccactcttgtccagctaccctcgttcctccttcaagtgttagcccagcgtcccctcctggtgatgctttccctgaacactcggctctgttc

SEQ ID NO: 7356 - DNA, 120 bp, synthetic construct
  misc_feature 1..120: note = Artificially Synthesized Probe
  source 1..120: mol_type = other DNA
cctacactcttcctgctcctttagtttccgcagtagcgtggatcagttgccacttggtgacattttaactttttcaagttcactgccctaccctggcctggagacttcatcatgctcgca

SEQ ID NO: 7357 - DNA, 120 bp, synthetic construct
  misc_feature 1..120: note = Artificially Synthesized Probe
  source 1..120: mol_type = other DNA
agcacccccactcccctctcttcccagcttacggcataagggaggtttttgtaactgcagacaacctgacacttccctccaaccagcggccatgctgggctggatggctcatcaagacca

SEQ ID NO: 7358 - DNA, 120 bp, synthetic construct
  misc_feature 1..120: note = Artificially Synthesized Probe
  source 1..120: mol_type = other DNA
cggtcacctcccttctccacttccgaaatccacttcctttcggagcactgggcccgccggtcacctcccttctccacttcctttcggagcactgggccccgccggtcacctcccttctcc

SEQ ID NO: 7359 - DNA, 120 bp, synthetic construct
  misc_feature 1..120: note = Artificially Synthesized Probe
  source 1..120: mol_type = other DNA
catcatggagagagcttgtggaattgtggggacagcagagaaagttgtggagtcaaacagactctgctgctgaccagccaagagaccttgggaggtcaactccatgctttgggcagagtt

SEQ ID NO: 7360 - DNA, 120 bp, synthetic construct
  misc_feature 1..120: note = Artificially Synthesized Probe
  source 1..120: mol_type = other DNA
ctcagcctctgggacacccacgtcctactccagagcaccctctcctgcccctcagcctctgggacacccacgtcctactccagagcaccctctcctgcccctcagcctctggtacaccca

SEQ ID NO: 7361 - DNA, 120 bp, synthetic construct
  misc_feature 1..120: note = Artificially Synthesized Probe
  source 1..120: mol_type = other DNA
ggcaatttcctattcagcctctgatgacccagtcaatcgtaaaacatctgtgtgaaaattgtccccgaggtgtcttcccttcctaaggcagagcccattccacactctcccatgaaagcc

SEQ ID NO: 7362 - DNA, 120 bp, synthetic construct
  misc_feature 1..120: note = Artificially Synthesized Probe
  source 1..120: mol_type = other DNA
gagctgctgctcctcaccagctaggctgccccttccgcccgctgaccccacacctttcagcattttcacggccacggtgtcacagctgctgcccttgtggatgccgaaagcggaggcttc

SEQ ID NO: 7363 - DNA, 120 bp, synthetic construct
  misc_feature 1..120: note = Artificially Synthesized Probe
  source 1..120: mol_type = other DNA
actgatttggccataccactgtggcttgggcagaactttgcccaggacagatggcacttcctgcggggttctcagtcaaggaggggacagaaaaaaagacagacaacctctgcggggttg

SEQ ID NO: 7364 - DNA, 120 bp, synthetic construct
  misc_feature 1..120: note = Artificially Synthesized Probe
  source 1..120: mol_type = other DNA
gtcatggctgcgccggtcttgcacttcgcacacatagtggccctcgtgctcgggcgcgacgcgggggatactcaggctgagcgtggcgtggcgcgccccaggtgccacctcctccaggct

SEQ ID NO: 7365 - DNA, 120 bp, synthetic construct
  misc_feature 1..120: note = Artificially Synthesized Probe
  source 1..120: mol_type = other DNA
aggtcactaccacatttgaaaatctgagtaaaccacagagcttctccccagagcaaaattcacacgagtcacaaggtctcagggcttgggaaggggagggtgggagtgggtatagctagg

SEQ ID NO: 7366 - DNA, 120 bp, synthetic construct
  misc_feature 1..120: note = Artificially Synthesized Probe
  source 1..120: mol_type = other DNA
gcacttcctgtccaggactggaacaggaagaggctctggaggtgtgtaggaaaacaggaagtgactggaggaagtaggtgcctttgttcagtacccccttctcggcgttgcccccaggct

SEQ ID NO: 7367 - DNA, 120 bp, synthetic construct
  misc_feature 1..120: note = Artificially Synthesized Probe
  source 1..120: mol_type = other DNA
ccggcctgtttctggagctctgtctcccacccttcaggctcaggacccggcaacccatcctacacaggctgccaacaccagcttcctgtgcccactgtccctcaggcacatgtgcactct

SEQ ID NO: 7368 - DNA, 120 bp, synthetic construct
  misc_feature 1..120: note = Artificially Synthesized Probe
  source 1..120: mol_type = other DNA
tcctgctgggtgctcagagacatgtgcttccttctccctccagatgatgcaattacgtgtccagaggtcttcgctcttgagggaggtgggcaggggccagacccatcctgtgtccagctt

SEQ ID NO: 7369 - DNA, 120 bp, synthetic construct
  misc_feature 1..120: note = Artificially Synthesized Probe
  source 1..120: mol_type = other DNA
gcattggtcactgaggtctgcagtagcacctcctgccttgccccaaagcctctgaactctccacaagtagtgagatgaccatgtcactgctggggcagccgccttctctccctgcctgtg

SEQ ID NO: 7370 - DNA, 120 bp, synthetic construct
  misc_feature 1..120: note = Artificially Synthesized Probe
  source 1..120: mol_type = other DNA
ggaactgaggtggtgctgtctgcatggctctggtcctgagtctgccacttgctggatctgagactccttcattgcctcaatggagatgacatgcaccttgcagctgtcgtgaggtttaac

SEQ ID NO: 7371 - DNA, 120 bp, synthetic construct
  misc_feature 1..120: note = Artificially Synthesized Probe
  source 1..120: mol_type = other DNA
ggcagttaggaaaagcccctcgctgtgcccaccacacccacatgtaacagaaggctggtactgaaacctttcacagtgtggcaggaacagacagaccttccatctgaaatatcacattat

SEQ ID NO: 7372 - DNA, 120 bp, synthetic construct
  misc_feature 1..120: note = Artificially Synthesized Probe
  source 1..120: mol_type = other DNA
tcccagtcaaaggtgacacctgagttaaactcagcccacacggtgcagttcaggaccagcttctcccctaccagcagctccagcgacttcctgggcaacagctggatgtcatagagctcg

SEQ ID NO: 7373 - DNA, 120 bp, synthetic construct
  misc_feature 1..120: note = Artificially Synthesized Probe
  source 1..120: mol_type = other DNA
tggacaccagacagggcacccacatggcgtccttcctgttgaccaagagcgtgtcaggcttgttgatgaatggctgctcaaagtctatggagagggagcaagctgttggggaagggacgt

SEQ ID NO: 7374 - DNA, 120 bp, synthetic construct
  misc_feature 1..120: note = Artificially Synthesized Probe
  source 1..120: mol_type = other DNA
ccgggaggcagagcttgcagtgagccgagatcgcaccactgcactccagcctgggtgacagagtgagactccatctcagaaaaaaaaaaagaaatgctgatgggggtgtgtggttgaggc

SEQ ID NO: 7375 - DNA, 120 bp, synthetic construct
  misc_feature 1..120: note = Artificially Synthesized Probe
  source 1..120: mol_type = other DNA
gtgtgtgagtctgtgtgtgcctatgtctgagtggtgtgtgtggcttcctgcgtatgtgcaaacatgcatgcatgtttgtgtatctcggacatgctggcgtgtgttcacacatgagtgtgt

SEQ ID NO: 7376 - DNA, 120 bp, synthetic construct
  misc_feature 1..120: note = Artificially Synthesized Probe
  source 1..120: mol_type = other DNA
tcccctcaggtggtgaggggctaagaaggaatccctctgagctgggctttgaaggagggggattttttttccaggtagtggaaagtaagtccatgccaggaagacagctgggcatgtatg

SEQ ID NO: 7377 - DNA, 120 bp, synthetic construct
  misc_feature 1..120: note = Artificially Synthesized Probe
  source 1..120: mol_type = other DNA
aacacaaccagactgaactgtggttttatgatcacatctgaacagaggctcaattttattcatcttcctaagcccaagacagagatgtgcaaaggagattcaacgggtggatataagaaa

SEQ ID NO: 7378 - DNA, 120 bp, synthetic construct
  misc_feature 1..120: note = Artificially Synthesized Probe
  source 1..120: mol_type = other DNA
ggatggatggaagtatgggtggatgggagggtgggtggatggatggatggatggaagtatgggtggatgggagggtgggtggatggatggatggatggaagtatgggtggatgggagggt

SEQ ID NO: 7379 - DNA, 120 bp, synthetic construct
  misc_feature 1..120: note = Artificially Synthesized Probe
  source 1..120: mol_type = other DNA
cgcaagctttttcatgacatgtctcctttttcatgacataccataacttattccagtgacccctctgcctttaccaaccttccactgtgccctgtgtgatcggcaaactttgctgtagac

SEQ ID NO: 7380 - DNA, 120 bp, synthetic construct
  misc_feature 1..120: note = Artificially Synthesized Probe
  source 1..120: mol_type = other DNA
tgcctcctgcctgcaaaccaggccctccatcgtgcccagggtccccccaccacggatttctcttctaatcaccagtctttgctatgcaatcatctcccatcgtttttgtttgtttgtttg

SEQ ID NO: 7381 - DNA, 120 bp, synthetic construct
  misc_feature 1..120: note = Artificially Synthesized Probe
  source 1..120: mol_type = other DNA
tctagctccagccaggactactgtttgcaacttcagttttaagcatccagctgcccactggacttgggacaccccacagacaacccgcagtctacgtttccgatgctaaactgcagacgt

SEQ ID NO: 7382 - DNA, 120 bp, synthetic construct
  misc_feature 1..120: note = Artificially Synthesized Probe
  source 1..120: mol_type = other DNA
ggttagatggttggatggatggaaagtagatggatggatggctcaacagacctctgaaacctcagagactcttgtcagaccctgttgttccactggaaaagatgcttcctgttttatagg

SEQ ID NO: 7383 - DNA, 120 bp, synthetic construct
  misc_feature 1..120: note = Artificially Synthesized Probe
  source 1..120: mol_type = other DNA
tccaccacacccctccttggggcctggcctccatctggcttcatgccctagttggctgagggcaaagccctttaagctaatgatgccgtttttttcaaaagcttctttcctgaaaacgga

SEQ ID NO: 7384 - DNA, 120 bp, synthetic construct
  misc_feature 1..120: note = Artificially Synthesized Probe
  source 1..120: mol_type = other DNA
acccacagcacgtggagggtccgagtcatcaagcggctcctgggccggggtgtcatcagcccatggctctgtccccaggcccaacacagccggcacagggatggcactgggattatccat

SEQ ID NO: 7385 - DNA, 120 bp, synthetic construct
  misc_feature 1..120: note = Artificially Synthesized Probe
  source 1..120: mol_type = other DNA
aaaaaaaaaaaaaaagaataagctgtctctggctcatgcacacggatccctctgctctcacctgcctcctgaatgcttggtttgctacagctgctgtatcactgtgaccctgtgttgtcg

SEQ ID NO: 7386 - DNA, 120 bp, synthetic construct
  misc_feature 1..120: note = Artificially Synthesized Probe
  source 1..120: mol_type = other DNA
ttaagggaagctactattcattctacagatgtctgtataatttgcatttctgcattttacaaaatgtaatcatctcttccatcagcgtgggaaaccctgctctccctcccactaggttgg

SEQ ID NO: 7387 - DNA, 120 bp, synthetic construct
  misc_feature 1..120: note = Artificially Synthesized Probe
  source 1..120: mol_type = other DNA
gttcaagacaagggcttctgtgtgtcttttcgtcgtggcatattcccaggattggacttagccagcaatttacccatggctggttttgaggatccaagggaccaaaagaagccatagtat

SEQ ID NO: 7388 - DNA, 120 bp, synthetic construct
  misc_feature 1..120: note = Artificially Synthesized Probe
  source 1..120: mol_type = other DNA
gcttatcttgtgggtgagttggggggggccctgaaggctcatttacagcagtccctttggggcagaatggagacaaatttctggaagatgctggaaacagggagtggtgatgaggttgag

SEQ ID NO: 7389 - DNA, 120 bp, synthetic construct
  misc_feature 1..120: note = Artificially Synthesized Probe
  source 1..120: mol_type = other DNA
taagccagacacagagaagcacctccccttgcagctgattcgcttaatttccctggttcccccattcccctctgtcccatcatactcaagtgctcccaactttcctccctccttatctgg

SEQ ID NO: 7390 - DNA, 120 bp, synthetic construct
  misc_feature 1..120: note = Artificially Synthesized Probe
  source 1..120: mol_type = other DNA
cttggggaaactgaggtgcagggaggggaaaggagggggcccaggtcacacagaaaggactttacggcagaggcaggacaagagtctggttctatgatcaatagcacacttttaaggggt

SEQ ID NO: 7391 - DNA, 120 bp, synthetic construct
  misc_feature 1..120: note = Artificially Synthesized Probe
  source 1..120: mol_type = other DNA
tggggaagtgacacatgtccttggtctaagcttctccatgtgtaaaatgggtctgacactccctgtgagaattacaagcatgtaaagccagtatttaattcctatggcgtgcagaaatgt

SEQ ID NO: 7392 - DNA, 120 bp, synthetic construct
  misc_feature 1..120: note = Artificially Synthesized Probe
  source 1..120: mol_type = other DNA
ccggccgggatggatctccggcgcgcgtgggtcgggacggcgcggcgcggggaccccgcggggaagcgagtaagggcgcgaaggatccgggctcagcgcgcagcccggcagggcccggct

SEQ ID NO: 7393 - DNA, 120 bp, synthetic construct
  misc_feature 1..120: note = Artificially Synthesized Probe
  source 1..120: mol_type = other DNA
attctggtgtgtgctggattttgtgtgtgtctctgtgtgttggagatgcgctcacccaccctgtgctgggaggaaatgaggactcaaaagtgttagatctggaaaactagagctgaaagg

SEQ ID NO: 7394 - DNA, 120 bp, synthetic construct
  misc_feature 1..120: note = Artificially Synthesized Probe
  source 1..120: mol_type = other DNA
ttcctaatccctgaaggagaaaatctggtcagtttcctcacaatcatgaagtccttcctggagcctctctgaagtctttactgctgcagggtccagctctgcttgcccggtagccttctt

SEQ ID NO: 7395 - DNA, 120 bp, synthetic construct
  misc_feature 1..120: note = Artificially Synthesized Probe
  source 1..120: mol_type = other DNA
ctctaagaaagcaacatatcgcctctttccttggactcttcaccttctctagctaggaagtccttcctgatgtctaacctctccctttctggcttgagttgacacctggtcttcatggac

SEQ ID NO: 7396 - DNA, 120 bp, synthetic construct
  misc_feature 1..120: note = Artificially Synthesized Probe
  source 1..120: mol_type = other DNA
atagacaaaacgagcaggacaagatcatccctggagcagcccttagcttcctcatcctatctgggccgtaaaggctggatgctcaccaaacagtaaaaatgagttcagatgcaacaagac

SEQ ID NO: 7397 - DNA, 120 bp, synthetic construct
  misc_feature 1..120: note = Artificially Synthesized Probe
  source 1..120: mol_type = other DNA
ttcatagaggtggctctgcttctctgtgccttcccgcaagcgtggtcaatctgcctaaagtgggaagggttttggagaaaaaattatttggggtggcaatgccaaatccagtatgatctg

SEQ ID NO: 7398 - DNA, 120 bp, synthetic construct
  misc_feature 1..120: note = Artificially Synthesized Probe
  source 1..120: mol_type = other DNA
attaatatccttaataatagattggtattaatgagcagttctgataatgatatgtacagaatgtgagaggcccctggcccaacggacagtgggatcctgggccatttctttgcccccact

SEQ ID NO: 7399 - DNA, 120 bp, synthetic construct
  misc_feature 1..120: note = Artificially Synthesized Probe
  source 1..120: mol_type = other DNA
aacccagtagggctgatctctcagactagcagaggagagaaggggtcctagtaggtatgtctcagaaaggaatggatggaagctttgaggggtagcatttcttgtttccttgaaaccaaa

SEQ ID NO: 7400 - DNA, 120 bp, synthetic construct
  misc_feature 1..120: note = Artificially Synthesized Probe
  source 1..120: mol_type = other DNA
tctgtctgttgatttgtccatctgtccagctttccatccatcaatctctccatccgatgatctgtccattcatccaactgttcatctttacatacataaatacatctatctatccaccca

SEQ ID NO: 7401 - DNA, 120 bp, synthetic construct
  misc_feature 1..120: note = Artificially Synthesized Probe
  source 1..120: mol_type = other DNA
acccattttccgaaactgatgctgggttaagagccagggaggccagaattttgccctcagaacttccaacattgatggggagaaaggagctagaaaccccctctttcttggcattcccag

SEQ ID NO: 7402 - DNA, 120 bp, synthetic construct
  misc_feature 1..120: note = Artificially Synthesized Probe
  source 1..120: mol_type = other DNA
gtatagacttccacaggtgtacacacctccacagggtatacagttccattggtgaatatacctccacaggtgtacactcctcaacaggtatacacccctccacaagtatacacactttca

SEQ ID NO: 7403 - DNA, 120 bp, synthetic construct
  misc_feature 1..120: note = Artificially Synthesized Probe
  source 1..120: mol_type = other DNA
cagggtacacacctccacaggatccatacctccatagggtacacacctccgcaggatccatacctccacagggtacacacctccactgggtacacacctccacaggatccataccatcac

SEQ ID NO: 7404 - DNA, 120 bp, synthetic construct
  misc_feature 1..120: note = Artificially Synthesized Probe
  source 1..120: mol_type = other DNA
acagggtacacacctccacaggatccatacctccacagggtacacacctccacaggatccatacctccacagggtacacacctccacagggtacagacctccacagggtacacacctcca

SEQ ID NO: 7405 - DNA, 120 bp, synthetic construct
  misc_feature 1..120: note = Artificially Synthesized Probe
  source 1..120: mol_type = other DNA
ctctctgggcctcaattttctcccctaaaaaaatgggcttgatgaccttgctcccctgacagtggtgtgttggtaaatgttcaccagtcagctttcaaaagtaaataaatcataatgttt

SEQ ID NO: 7406 - DNA, 120 bp, synthetic construct
  misc_feature 1..120: note = Artificially Synthesized Probe
  source 1..120: mol_type = other DNA
tgctggtatttgctgatacttgcacacacatcccatccagttccagtgctccctgaaactggaacaggcaggataaaggttggacctctatgaaagatcccttctgaatgcagatgtcag

SEQ ID NO: 7407 - DNA, 120 bp, synthetic construct
  misc_feature 1..120: note = Artificially Synthesized Probe
  source 1..120: mol_type = other DNA
ttggccaagcaaggctatgaaagtcatggctgtgaactgaagcctctgttaaggcctctgacatacaggaacttggctggagctggagatgatgttctggagaatagggaacaggtgcaa

SEQ ID NO: 7408 - DNA, 120 bp, synthetic construct
  misc_feature 1..120: note = Artificially Synthesized Probe
  source 1..120: mol_type = other DNA
tgatcccctgtgggatctttgggcaaatcctatgggactttgggcaaattgcctcccctcattttccctgttaccctgtctgtcaaatgaggcttattgatggtttattcagcaaagatg

SEQ ID NO: 7409 - DNA, 120 bp, synthetic construct
  misc_feature 1..120: note = Artificially Synthesized Probe
  source 1..120: mol_type = other DNA
gttctaatagatcaatgagaaaaccatccaaattgttcacacagtggccagcccagagcagaccctcagcaaactgtagcatttatcagaggccacttgggcaaagagaagtacatttaa

SEQ ID NO: 7410 - DNA, 120 bp, synthetic construct
  misc_feature 1..120: note = Artificially Synthesized Probe
  source 1..120: mol_type = other DNA
ctccgatatcatgtacccaaggctctaggtcttcatggggaaactgaagatcagaaaggggcagtggcctgcacaaagtcacaggttagagtttggaggacacaggtggaacagcacttg

SEQ ID NO: 7411 - DNA, 120 bp, synthetic construct
  misc_feature 1..120: note = Artificially Synthesized Probe
  source 1..120: mol_type = other DNA
cccaggtttcatggcagggtgccctcatgaaatcggggccaagggtaggctatttcttctccaccatttagggtcttcccagagctcagccatagaccccctttaccccagaacagagta

SEQ ID NO: 7412 - DNA, 120 bp, synthetic construct
  misc_feature 1..120: note = Artificially Synthesized Probe
  source 1..120: mol_type = other DNA
ggattccagtgtgtgacttctcactgtttgtttaaatgtccagaaactccagccagacctacacacccatatgcaaatgtgacaagaaaaacacattccagaggccaagggaaagggttt

SEQ ID NO: 7413 - DNA, 120 bp, synthetic construct
  misc_feature 1..120: note = Artificially Synthesized Probe
  source 1..120: mol_type = other DNA
gcatattgcttcccctctttgggctcagccccatcatctgtcaaatgaaggggttggacacaagtgctcttggcccttctaggcccgagattctatgattatggcaatctctgcatcaac

SEQ ID NO: 7414 - DNA, 120 bp, synthetic construct
  misc_feature 1..120: note = Artificially Synthesized Probe
  source 1..120: mol_type = other DNA
tctctgttctctgttgttctccaggaataagctttgggggaagcagaataggggttgcttttatgtaaggttcaagacacaggaaagaggaagggagaaaataaggcctaatctagtcat

SEQ ID NO: 7415 - DNA, 120 bp, synthetic construct
  misc_feature 1..120: note = Artificially Synthesized Probe
  source 1..120: mol_type = other DNA
aagaaagagatagagggaagcaaagagaaggcatgagaggacatcctctctgccatgaggggcctgggtggaatgaccgaagctatcctgaggctcatggtctgacccagggtagaggat

SEQ ID NO: 7416 - DNA, 120 bp, synthetic construct
  misc_feature 1..120: note = Artificially Synthesized Probe
  source 1..120: mol_type = other DNA
ccttccatctgtcctttcattcatccaaccaacagtgacacttggccaaatatgtgtcaggccctacatgggatcgggtcatcagctagtgtgagctgaggggaagggagaggaacttaa

SEQ ID NO: 7417 - DNA, 120 bp, synthetic construct
  misc_feature 1..120: note = Artificially Synthesized Probe
  source 1..120: mol_type = other DNA
taactagtaatgacagcttccgtttaatgagtgccttctatgtgacaggcaccatccttaatcctcacaactctgaggtagctattactttcttcacttcaaagttgaggaaactgaggt

SEQ ID NO: 7418 - DNA, 120 bp, synthetic construct
  misc_feature 1..120: note = Artificially Synthesized Probe
  source 1..120: mol_type = other DNA
ctctctagaggcaggacaggggctcttctcccaaggtggacaaacacatcagacagggtggtccattcccctaaggtcgcacagtagatgggatcagttactggatcaagctatttggct

SEQ ID NO: 7419 - DNA, 120 bp, synthetic construct
  misc_feature 1..120: note = Artificially Synthesized Probe
  source 1..120: mol_type = other DNA
gcttaattatttttcctgggagccatgtaatccctgttttatggggctgaggagtgaagaggtctaacagctttttgttccctttggttctagttgttgcttttagccacttgcatcact

SEQ ID NO: 7420 - DNA, 120 bp, synthetic construct
  misc_feature 1..120: note = Artificially Synthesized Probe
  source 1..120: mol_type = other DNA
aaggagtatccaggagacgttgcttatgccaggatgacacacttagggacgtatgcacatgctcatacgcactgtcccttcatataccaaacccacttagacacacaaacatatgtgcaa

SEQ ID NO: 7421 - DNA, 120 bp, synthetic construct
  misc_feature 1..120: note = Artificially Synthesized Probe
  source 1..120: mol_type = other DNA
aaaaaaagagagaatcagagaatgaggcaaggccccgagtaagggttccagtctggggaagactgtggaggagggaggtctcatggtgttctttctctcttgggcctttcagaagagctg

SEQ ID NO: 7422 - DNA, 120 bp, synthetic construct
  misc_feature 1..120: note = Artificially Synthesized Probe
  source 1..120: mol_type = other DNA
cccacttgctctctgccatccagagaatggggaaagagggatgtccttgcccctgtctccctcctcctggtgctccaaacatggtccaactgacctcatcatcaaaccactcttggcagg

SEQ ID NO: 7423 - DNA, 120 bp, synthetic construct
  misc_feature 1..120: note = Artificially Synthesized Probe
  source 1..120: mol_type = other DNA
tatgtgctttctcatctgggcctagaggataggaaggattattaaacctgcttcatggaagcacacagaggcttgagaacttactctaggtcacttagctagaaagagggagagttggga

SEQ ID NO: 7424 - DNA, 120 bp, synthetic construct
  misc_feature 1..120: note = Artificially Synthesized Probe
  source 1..120: mol_type = other DNA
ttaaaggtcaaggaaggaaaatactacctgtcccctatgccactaagccaacgtgtgtgtcagctggtagctgggggcgcagaggacatcacctggggtgctgcctctcacacatttctg

SEQ ID NO: 7425 - DNA, 120 bp, synthetic construct
  misc_feature 1..120: note = Artificially Synthesized Probe
  source 1..120: mol_type = other DNA
aagcaatacacattcagtatgttcctcgacttaggatgcggttatgtccgataaacccattgtaaattgaaaccaccgaaagtcaaaaaccactttcgacttacgatgtttcccactcac

SEQ ID NO: 7426 - DNA, 120 bp, synthetic construct
  misc_feature 1..120: note = Artificially Synthesized Probe
  source 1..120: mol_type = other DNA
cctgccgcagccagatgggcgctgggtgctgcggtccgagccgcacggccgcttcttcggaggcaccgaggaccagctgtcctgcttcgccacagccgtttccccggccgagctgtggac

SEQ ID NO: 7427 - DNA, 120 bp, synthetic construct
  misc_feature 1..120: note = Artificially Synthesized Probe
  source 1..120: mol_type = other DNA
aggggcaggaggcccacagcctggcctggtgccatgaggggcatgtgggcaggaggctgtggggggtccatatctccccttctttttctccaccccattttctggacttcatttatttat

SEQ ID NO: 7428 - DNA, 120 bp, synthetic construct
  misc_feature 1..120: note = Artificially Synthesized Probe
  source 1..120: mol_type = other DNA
ggcaatccttaggtggttaaagggggtaagtgggacagtggcagtgagaatgcttcctccatggaagccaaagacactagacctttaggcatttgtatatggacagcttggaaagcagac

SEQ ID NO: 7429 - DNA, 120 bp, synthetic construct
  misc_feature 1..120: note = Artificially Synthesized Probe
  source 1..120: mol_type = other DNA
atggtgatggtgatgatggtgatgatagtgatggcgatgatggtgatgatagtgatggtgatgatggtgatgatgataatggtgatgatggtggtggtgatggtggtggtggtgatggtg

SEQ ID NO: 7430 - DNA, 120 bp, synthetic construct
  misc_feature 1..120: note = Artificially Synthesized Probe
  source 1..120: mol_type = other DNA
gactgtatggaccatttttcagtctcttgatcctcaaccaccctgcatctgaccctatcatccctttgaggggagaatcccctactcaagaccagctcccatctcccactttagaagcag

SEQ ID NO: 7431 - DNA, 120 bp, synthetic construct
  misc_feature 1..120: note = Artificially Synthesized Probe
  source 1..120: mol_type = other DNA
aggacaaagtccagaggaaaaagaggcactggctctgcttgtgtcttcataggagtaagaaaacttctcccctaagtcctagcagacacttcttcacactcatttgccagaactgagtcc

SEQ ID NO: 7432 - DNA, 120 bp, synthetic construct
  misc_feature 1..120: note = Artificially Synthesized Probe
  source 1..120: mol_type = other DNA
atccccttcattaggtcctgcctgtgcccatccagcagcttagggtgagttataaatagaggctggggtaagccctgggtcaagagagcagggcaaggagattaccagctgattactgat

SEQ ID NO: 7433 - DNA, 120 bp, synthetic construct
  misc_feature 1..120: note = Artificially Synthesized Probe
  source 1..120: mol_type = other DNA
catccccattaccatctccaccatccccatctccatccccaccatccccatctccatccccatctctgccatccccaccatcaccatccccatctccatttacatccccatccccatccc

SEQ ID NO: 7434 - DNA, 120 bp, synthetic construct
  misc_feature 1..120: note = Artificially Synthesized Probe
  source 1..120: mol_type = other DNA
tgctgtcatggagtcatacttgctagtcaagataactcgtcttggcaagggaaacaggtctgaatgtccttatctccgctgctgggaaccccctaggcgccttgccaaggccgcacatga

SEQ ID NO: 7435 - DNA, 120 bp, synthetic construct
  misc_feature 1..120: note = Artificially Synthesized Probe
  source 1..120: mol_type = other DNA
agtgatttgctaaattattttttaatggagaacttctctggagacaggaggctggctgggcagggagctgaggcagggaggaaaagtctcccaggagccactggttgaagggtggacggg

SEQ ID NO: 7436 - DNA, 120 bp, synthetic construct
  misc_feature 1..120: note = Artificially Synthesized Probe
  source 1..120: mol_type = other DNA
ttctctgggaccagatgctgaaaagaggcgtctttcctataaagaacccgaagaccatgaggtcttagggcagctgcagaaagtgctgagcccatgagagagacgctccttctctgggac

SEQ ID NO: 7437 - DNA, 120 bp, synthetic construct
  misc_feature 1..120: note = Artificially Synthesized Probe
  source 1..120: mol_type = other DNA
tgttttctagaacaagacagtgggggtgatacaaggggtcttgggggagtatacacttatacagtggtcagggtgggctctgcagacacatttgggtctccgtctgtggtgccgccgtga

SEQ ID NO: 7438 - DNA, 120 bp, synthetic construct
  misc_feature 1..120: note = Artificially Synthesized Probe
  source 1..120: mol_type = other DNA
gccaaggggttctcagtggggaatatgctcacttcatcttggaagattcagccaactctccaccagaaagtcatcatcaacagcccctaccctcgaccatggatgagagcaaatgctccc

SEQ ID NO: 7439 - DNA, 120 bp, synthetic construct
  misc_feature 1..120: note = Artificially Synthesized Probe
  source 1..120: mol_type = other DNA
agtgtaaaccaacccagcactcctcgtccaccttcacattgttcgcagggaatgtaaatcaacccagccctccccgtccaccttcgcattgctcagagggagtgtaaaccaacccagcac

SEQ ID NO: 7440 - DNA, 120 bp, synthetic construct
  misc_feature 1..120: note = Artificially Synthesized Probe
  source 1..120: mol_type = other DNA
tatacttaaattcatgactgtcttcaaatgcctgtccgggtctaaagttcatcaacccattaaagtatagaaaagatcatcttgttctggggaggccatttgaactgtgatacaagaccc

SEQ ID NO: 7441 - DNA, 120 bp, synthetic construct
  misc_feature 1..120: note = Artificially Synthesized Probe
  source 1..120: mol_type = other DNA
gccgaccttcacagtgagcgttaagctcttacaggtggcgcgtcgggagctgtttcttcctccccgtgaggccgccgaccttcgcagcgagtgttacagctcttacaggtggcgcgtagc

SEQ ID NO: 7442 - DNA, 120 bp, synthetic construct
  misc_feature 1..120: note = Artificially Synthesized Probe
  source 1..120: mol_type = other DNA
tctgcaaatccgggactgtttatccgaggccctcatcttggctccctctgtgcctgtgtgtggattccacgtgcatttggggcctgcctttctcacccagccttgtaaggtagacttccc

SEQ ID NO: 7443 - DNA, 120 bp, synthetic construct
  misc_feature 1..120: note = Artificially Synthesized Probe
  source 1..120: mol_type = other DNA
ccctgtagggctggcccctacacctctctcccctctctccctctctctccctccctctctctccacctacctctctcccccctccctccctcccctctttccccctctccctctctcccc

SEQ ID NO: 7444 - DNA, 120 bp, synthetic construct
  misc_feature 1..120: note = Artificially Synthesized Probe
  source 1..120: mol_type = other DNA
aacgggtcgtctctggcctgcctgagagcactcatcactgtgttcctgagattcttgcaggcctcctttcctggaattgcaggcttctaaagaagggccctgccttgctccaggtctgtg

SEQ ID NO: 7445 - DNA, 120 bp, synthetic construct
  misc_feature 1..120: note = Artificially Synthesized Probe
  source 1..120: mol_type = other DNA
agttgccccctggggacccctcagcaaactgctgctcatgcttcgccgccccccagcaccactgccccatcgctgacgggcgggaaagattttaattcaccaagtcttcacatctaacaa

SEQ ID NO: 7446 - DNA, 120 bp, synthetic construct
  misc_feature 1..120: note = Artificially Synthesized Probe
  source 1..120: mol_type = other DNA
aaaccctccttggaggagaaaactttgaacccaggtgtccaagaattaccatagataaaattccacagagcatgcactggcaatcaaaaatcacacaacacaaagcaaagcagcctcacc

SEQ ID NO: 7447 - DNA, 120 bp, synthetic construct
  misc_feature 1..120: note = Artificially Synthesized Probe
  source 1..120: mol_type = other DNA
tgctgcttagacagaaaggatgacgttggaatgctgtcactggctcctaaaactctggaatttcagtaataaacaggtatttacctactcaatactttaaacaccttcaagtactcccca

SEQ ID NO: 7448 - DNA, 120 bp, synthetic construct
  misc_feature 1..120: note = Artificially Synthesized Probe
  source 1..120: mol_type = other DNA
aaaaaattttgttaacagccaagaatacaacagacaaggccacaaacgcaccaatgattgaggctgggttttggaaaaccactgtgaatccagaggaaaggagtggaagagaaagtaaag

SEQ ID NO: 7449 - DNA, 120 bp, synthetic construct
  misc_feature 1..120: note = Artificially Synthesized Probe
  source 1..120: mol_type = other DNA
tttgcacagctgagcatatcataggtcacaaaaaaacctcaataaggtgtccaaaataaaaagtgaaatctcatcttctgaacacaagtcaataaaatgaagggggaggagggggaggga

SEQ ID NO: 7450 - DNA, 120 bp, synthetic construct
  misc_feature 1..120: note = Artificially Synthesized Probe
  source 1..120: mol_type = other DNA
actccggaagtcgctgtttcccagcagtatggaaatgctgccacatgttaacaaagggaagtcctgcctcgttccctggaaaatccccaggaggccagagctccccagcttcactccgcc

SEQ ID NO: 7451 - DNA, 120 bp, synthetic construct
  misc_feature 1..120: note = Artificially Synthesized Probe
  source 1..120: mol_type = other DNA
ccctgaaaaggcgaattgcagggttaggatggaacatgtgggacatgctaacggcaggacgttcatgcttctgttttctttgtatgataaacagaaccgcaagcaaccacataaatataa

SEQ ID NO: 7452 - DNA, 120 bp, synthetic construct
  misc_feature 1..120: note = Artificially Synthesized Probe
  source 1..120: mol_type = other DNA
gaggtccttcagcccaggagcagcagcacctgagcgggtggtctggcatctctgggataaacctgtccctctcctaacactcacaaaaataactttgaaaggggtgcaaagctcagctct

SEQ ID NO: 7453 - DNA, 120 bp, synthetic construct
  misc_feature 1..120: note = Artificially Synthesized Probe
  source 1..120: mol_type = other DNA
gacaccaggacagggctcggccctgacattctgagacacggcagccacaggagagcccagagacctcaccttggtgcctgctcatgtcgataagtcgggaagctacccgggcagcgttga

SEQ ID NO: 7454 - DNA, 120 bp, synthetic construct
  misc_feature 1..120: note = Artificially Synthesized Probe
  source 1..120: mol_type = other DNA
agtgaggatggtggctgcagggtgggggctcagcaagctaactccagtggagatggagaggcggcagtggggaccatgctgggccacctcgtgtggcctcacacagccctttcagtcagt

SEQ ID NO: 7455 - DNA, 120 bp, synthetic construct
  misc_feature 1..120: note = Artificially Synthesized Probe
  source 1..120: mol_type = other DNA
tcattgtgagaggcaacctgaactcacacccaatatatggagctcttggcagtttatgagctttaaaaaaaagtgtccctggatccctggaaagttctgctccagaagctgtaccatttt

SEQ ID NO: 7456 - DNA, 120 bp, synthetic construct
  misc_feature 1..120: note = Artificially Synthesized Probe
  source 1..120: mol_type = other DNA
aaaaaaaaaactaaaaagattcttcaccttagttatctggatttccagaaccccatcctgtccataagggccctgcagggttcttcacaggcatcaaacctggtcctctctagaacaagt

SEQ ID NO: 7457 - DNA, 120 bp, synthetic construct
  misc_feature 1..120: note = Artificially Synthesized Probe
  source 1..120: mol_type = other DNA
aggaaaagatgttttgctagttctagaatattcagacagttccagaaacgtcccccttctctccaactctcccaactagaatcactctggatacgggcacccatttgcttcaggaacacc

SEQ ID NO: 7458 - DNA, 120 bp, synthetic construct
  misc_feature 1..120: note = Artificially Synthesized Probe
  source 1..120: mol_type = other DNA
aagaggaagttaaaggtttagactcctggggctgaggtagggagagcctgagtcctaggtttcagggatgagagccttggaatttcggggcatggggactggaagacaagtggttttcaa

SEQ ID NO: 7459 - DNA, 120 bp, synthetic construct
  misc_feature 1..120: note = Artificially Synthesized Probe
  source 1..120: mol_type = other DNA
aaaaaaaaaaaaaaaagaaagtggtccaggttcctacacctttcctgaaggaatctcgagtctcccctcctgtaagttccgctgatactggactcttccaccagcctgtttctcaggagt

SEQ ID NO: 7460 - DNA, 120 bp, synthetic construct
  misc_feature 1..120: note = Artificially Synthesized Probe
  source 1..120: mol_type = other DNA
cacactcaaattccagaatcccagcccctagtcactccttttggggaattctagggtcccgtgccaaactgctactttccagacctgcactgcacgaaggcaaccattccaaggctggag

SEQ ID NO: 7461 - DNA, 120 bp, synthetic construct
  misc_feature 1..120: note = Artificially Synthesized Probe
  source 1..120: mol_type = other DNA
gggaggctgaggcgggcggatcacaaggtcaggaggtggaggccatcctggctaacacggtgaaaccctgtctctactaaaaatacaaaaaattatccgggcgcgtggtggagggcgcct

SEQ ID NO: 7462 - DNA, 120 bp, synthetic construct
  misc_feature 1..120: note = Artificially Synthesized Probe
  source 1..120: mol_type = other DNA
ctgggtaatccttccccacagactgaccctcccattcaagatacatcaatgtcaaagactcaggagtttgacttgattcccagaagtttaaccatcatctccccaggctcgggactccca

SEQ ID NO: 7463 - DNA, 120 bp, synthetic construct
  misc_feature 1..120: note = Artificially Synthesized Probe
  source 1..120: mol_type = other DNA
tggcattttgtagacagcagcaatttccctcaaccccagaatatttggaatgttccagaagtcctcatttacagtcgatcccacctgtaccctataagtggtggtcctgggcttgaactt

SEQ ID NO: 7464 - DNA, 120 bp, synthetic construct
  misc_feature 1..120: note = Artificially Synthesized Probe
  source 1..120: mol_type = other DNA
ctccagccagccgtagggcgtgaagatgtcggagtcgctgcggtaggacatggtgagattgaagtatctgtccagggcttccaggtgctggcagttagggggtggctccaagttgaacca

SEQ ID NO: 7465 - DNA, 120 bp, synthetic construct
  misc_feature 1..120: note = Artificially Synthesized Probe
  source 1..120: mol_type = other DNA
cacagatgagaaaactgagaccaagtgactcacagcaaaaatcagcacagctggtgtttgaacaaagggaccttgtcccagagtccacttccttctacctattagacaagacctttcctg

SEQ ID NO: 7466 - DNA, 120 bp, synthetic construct
  misc_feature 1..120: note = Artificially Synthesized Probe
  source 1..120: mol_type = other DNA
aatacacgaaaaacttttgacttacacaccttaaatggattcactgtatgggttgcgaattatatcccgatgaaactgttttcaaatgacatggtggttgcctgctttctctgttggacc

SEQ ID NO: 7467 - DNA, 120 bp, synthetic construct
  misc_feature 1..120: note = Artificially Synthesized Probe
  source 1..120: mol_type = other DNA
agctctttgggaggccgaggcgggcagatcacgaggtcagaagatcaagaccatcctggctaacacggtgaaaccctgtctctactaaaaatacaaaaaaaaattagctgggcgtagtgg

SEQ ID NO: 7468 - DNA, 120 bp, synthetic construct
  misc_feature 1..120: note = Artificially Synthesized Probe
  source 1..120: mol_type = other DNA
cccttggtggcaagtcaattgcagggacgcctgctttggctgctcaccttaccccttctctccgtgtctctaccccttctctactttcctgaggggcaagcaccccccaccccgtttcca

SEQ ID NO: 7469 - DNA, 120 bp, synthetic construct
  misc_feature 1..120: note = Artificially Synthesized Probe
  source 1..120: mol_type = other DNA
ctgagatgttttacagccctagaccctgaaaggtcacaatgccgtcttattctcaaaatgcattttattttattacccaatctgctcctgacattaaataaagctccaaaaattaaattc

SEQ ID NO: 7470 - DNA, 120 bp, synthetic construct
  misc_feature 1..120: note = Artificially Synthesized Probe
  source 1..120: mol_type = other DNA
catgtgagatcgcgatgaggactgagatcccaccccagttgaacccaagatattttttcctagaaaaagattaaaaaatgctactctgctgagacatcacaaagatcaggaagcaaaaag

SEQ ID NO: 7471 - DNA, 120 bp, synthetic construct
  misc_feature 1..120: note = Artificially Synthesized Probe
  source 1..120: mol_type = other DNA
aaaaagaaaaaaaaaatgcatcttaagtccaccccaggcagggcagggccagagagaatccaaggccagaaaagatgagtggggggaggctgttgatggggttggggtgcagaggggact

SEQ ID NO: 7472 - DNA, 120 bp, synthetic construct
  misc_feature 1..120: note = Artificially Synthesized Probe
  source 1..120: mol_type = other DNA
ggggtgtgcggctgtctccatgcttgtcacttctctgcgataacttgtttcagtaatattaatagatggtatctgctagtatatacatacacataatgtgtgtgtctgtgtgtatctgta

SEQ ID NO: 7473 - DNA, 120 bp, synthetic construct
  misc_feature 1..120: note = Artificially Synthesized Probe
  source 1..120: mol_type = other DNA
agtttgtactttaggcttgaacttcccacacgtgttatttggcccacattgtgtttgaagaaactttgggattggttgccagtgcttaaaagttaggacttagaaaatggatttcctggc

SEQ ID NO: 7474 - DNA, 120 bp, synthetic construct
  misc_feature 1..120: note = Artificially Synthesized Probe
  source 1..120: mol_type = other DNA
ctggatagatggttagcaacctctgtcaccagctgggcctctttttttctatactgaattaatcacatttgtttaacctgtctgttccatagttcccttgcacatcttgggtatttgagg

SEQ ID NO: 7475 - DNA, 120 bp, synthetic construct
  misc_feature 1..120: note = Artificially Synthesized Probe
  source 1..120: mol_type = other DNA
cacaatttctaagtaaatgctctatctgtatttacttttataaaattcacaattaaaaatgaaggttcacatagtcaagttgttccaaacacacttaaatgtctcctaggctgggtgtgg

SEQ ID NO: 7476 - DNA, 120 bp, synthetic construct
  misc_feature 1..120: note = Artificially Synthesized Probe
  source 1..120: mol_type = other DNA
gacaagaccaccacctgtgatcctatgaccttttggctttaggcctaacaagcaggttataccctcactcactttcaaatcatttttattgtcttgcagacaatttacacaagtttacac

SEQ ID NO: 7477 - DNA, 120 bp, synthetic construct
  misc_feature 1..120: note = Artificially Synthesized Probe
  source 1..120: mol_type = other DNA
tccatgtattgcttatatacaaggtattctgctgtatctgttctgctatggcttgccccttttgttcaacactgtttttgtgcgtcatctgcattgatgcatgcagttgtcctttatttg

SEQ ID NO: 7478 - DNA, 120 bp, synthetic construct
  misc_feature 1..120: note = Artificially Synthesized Probe
  source 1..120: mol_type = other DNA
ttgcctctcacctagttctccattcttttgttcagagcctgaataccctcaggctctgtacttggggtatttctgttctcttgttttatgctcacggttgtgaggtttgttgtgagtacc

SEQ ID NO: 7479 - DNA, 120 bp, synthetic construct
  misc_feature 1..120: note = Artificially Synthesized Probe
  source 1..120: mol_type = other DNA
tcattcgttaagagtctgtacttgttaatttgctcacttgctaaaatttgttaccccaaaatcagtacccctagccttttggggtcgtttcaaagatgtgtgcagagcggcaaaaaaatg

SEQ ID NO: 7480 - DNA, 120 bp, synthetic construct
  misc_feature 1..120: note = Artificially Synthesized Probe
  source 1..120: mol_type = other DNA
tgatcgattggtaacaatgttgtgaccagcagcttacagggtacctagccttgtatttctcctataaataatttgctcgttgagtgtttgtggcaactttgtagcacataactaccaaga

SEQ ID NO: 7481 - DNA, 120 bp, synthetic construct
  misc_feature 1..120: note = Artificially Synthesized Probe
  source 1..120: mol_type = other DNA
tgatgtgatggaaatgctgtgtctgcaccactagccacatgtggccacaggattctcgaaactggtggtgcagttgaggagctgactttatattttatctcattaaatttaaatgtaaat

SEQ ID NO: 7482 - DNA, 120 bp, synthetic construct
  misc_feature 1..120: note = Artificially Synthesized Probe
  source 1..120: mol_type = other DNA
agtaggaaaccgggaaccaggggagaggagaagagaagagaggataattttttttaagaaaagcaacatattccctttttcttagaaaaaatggagcactcggttacaggcactcgaatg

SEQ ID NO: 7483 - DNA, 120 bp, synthetic construct
  misc_feature 1..120: note = Artificially Synthesized Probe
  source 1..120: mol_type = other DNA
tattttatttaataccctaatagttagagcaggccatgctgctatcacaaatagacccaaatatttaatagctcaaaccaataacgtttgtgtcctcctctctgggcagtacagggttgg

SEQ ID NO: 7484 - DNA, 120 bp, synthetic construct
  misc_feature 1..120: note = Artificially Synthesized Probe
  source 1..120: mol_type = other DNA
tgaagtcaagttaaacaataagattggagaccagcaatgccctcagcctggtttttgcagcaggactgagtcccttgttttggctcaatgggaagtctttgctgttcaaagccttagctt

SEQ ID NO: 7485 - DNA, 120 bp, synthetic construct
  misc_feature 1..120: note = Artificially Synthesized Probe
  source 1..120: mol_type = other DNA
gtttgtgcagccttttatctccaatgctccatttcattccatctcctggcttattcttttcttgtcacatctactaaaagcaacaagaagccaccggtattcaggaacattctacctgtc

SEQ ID NO: 7486 - DNA, 120 bp, synthetic construct
  misc_feature 1..120: note = Artificially Synthesized Probe
  source 1..120: mol_type = other DNA
tgcaagcaagctgcctgctcacttctagtcattaacccctccctcttttccttctagtcattaacccttcagagtaactattctgattaccaatagcatagattagttctgcctgttgtt

SEQ ID NO: 7487 - DNA, 120 bp, synthetic construct
  misc_feature 1..120: note = Artificially Synthesized Probe
  source 1..120: mol_type = other DNA
aaaaaaaaaaaaagagtggagctgatgggtcatagcatgtaaatgcattcaactttagtagatactgtccaacagttttccaaagtgattgtccaacttacttgcctatcagcagtatct

SEQ ID NO: 7488 - DNA, 120 bp, synthetic construct
  misc_feature 1..120: note = Artificially Synthesized Probe
  source 1..120: mol_type = other DNA
ataaatctaaatattaaaaaaatctccaatagattttagatggcattcaccatctttgtgaaaagttgaacattactaatgaaatctgatcatatctttagaaggataaacagtgatagc

SEQ ID NO: 7489 - DNA, 120 bp, synthetic construct
  misc_feature 1..120: note = Artificially Synthesized Probe
  source 1..120: mol_type = other DNA
tgatattaataaaatggaagcatttggtaatcatgttttgggttttgtgcttcctctgcagctctctagatgagaccacctatgaaagactagcagaggaaacgctggactctttagcag

SEQ ID NO: 7490 - DNA, 120 bp, synthetic construct
  misc_feature 1..120: note = Artificially Synthesized Probe
  source 1..120: mol_type = other DNA
cttattcctagagattttgattacttggtctggggtgtggcatgacctgggcagggcactgggatttttaagctccacagatgattccaatatgcagctagtatgagaacttgttttttt

SEQ ID NO: 7491 - DNA, 120 bp, synthetic construct
  misc_feature 1..120: note = Artificially Synthesized Probe
  source 1..120: mol_type = other DNA
ttgactaataccagaaaatgtcacgaagcgtgcattttggattcaatcatggaattgttgaggacaatcagccatcagactaaagcgatagaaatagtattggaaattgcagcgggagca

SEQ ID NO: 7492 - DNA, 120 bp, synthetic construct
  misc_feature 1..120: note = Artificially Synthesized Probe
  source 1..120: mol_type = other DNA
aaatctataaatttagaaaggaggactatttctaaagagggtcccactacctgtaggcaggaagcagagcctctggccataactgaaaaacaagcacttccaagaaggggcaaagggaac

SEQ ID NO: 7493 - DNA, 120 bp, synthetic construct
  misc_feature 1..120: note = Artificially Synthesized Probe
  source 1..120: mol_type = other DNA
ctgtggtcagtggttatcaggaaggaatgctagtcagttgtgctgaaaccactaaaaaggaagggcagaattaggtgatgagttgataccagtggtgaagtgagtctttttttttttttt

SEQ ID NO: 7494 - DNA, 120 bp, synthetic construct
  misc_feature 1..120: note = Artificially Synthesized Probe
  source 1..120: mol_type = other DNA
tgtaaatgagacttttccaaaacatgctttcgttgatgcctctcagcatttatacaccttttaccaactcgctactggccacatagacaaatgaaagcagtaatccagatacacccaaga

SEQ ID NO: 7495 - DNA, 120 bp, synthetic construct
  misc_feature 1..120: note = Artificially Synthesized Probe
  source 1..120: mol_type = other DNA
tgtcttagaactgagggttcttcatcttttttggatcaggacctccctctaagaatctgatgactgctctggtccctctcccaataaaaacttccatactcacctgttaaaaaaaaaaaa

SEQ ID NO: 7496 - DNA, 120 bp, synthetic construct
  misc_feature 1..120: note = Artificially Synthesized Probe
  source 1..120: mol_type = other DNA
gcgagctgcagtttcctcagctatgagatgagtgacattaacctcctctcttcagatttataagaggatcaattaaaatggcataggtaaaagtgcatcctagcaagttggtatctactt

SEQ ID NO: 7497 - DNA, 120 bp, synthetic construct
  misc_feature 1..120: note = Artificially Synthesized Probe
  source 1..120: mol_type = other DNA
taatgcagctagtttctttcctgtcaccactttccttccaaaatagtttcaagatctgtgggggaaaaaatctatttacagtgaacagactggtgggaggaagttgagcattggggtttt

SEQ ID NO: 7498 - DNA, 120 bp, synthetic construct
  misc_feature 1..120: note = Artificially Synthesized Probe
  source 1..120: mol_type = other DNA
ccagtctatcattgttggatgagctctttatctcatggaaaaataatttataaaactctgtatgagaggagtgggaaatagtattaacgggtgcggggtttctttttgggacaatggaaa

SEQ ID NO: 7499 - DNA, 120 bp, synthetic construct
  misc_feature 1..120: note = Artificially Synthesized Probe
  source 1..120: mol_type = other DNA
agagtttcagtgttacaaggtgaaaagttctagagttatgctgcccagcagtgtgaatatactttattgttctgtacacttaacatggttaatatggtaaatttagcgttatgtgctttt

SEQ ID NO: 7500 - DNA, 120 bp, synthetic construct
  misc_feature 1..120: note = Artificially Synthesized Probe
  source 1..120: mol_type = other DNA
gtagtcaagttggaaacaatttacacaaagtgccaaacaccaagcctggcacagtaggaaccgagtaaatagtggttaatatttttatcagtgtctgcattgctgacgtctccatcattt

SEQ ID NO: 7501 - DNA, 120 bp, synthetic construct
  misc_feature 1..120: note = Artificially Synthesized Probe
  source 1..120: mol_type = other DNA
gttttaatttctttatgctttttttccacctaatcccctagagtggtgtcttaactgtcaaactgggtggagatctaggaacctatgtgatcaacaagcagacgccaaacaagcaaatct

SEQ ID NO: 7502 - DNA, 120 bp, synthetic construct
  misc_feature 1..120: note = Artificially Synthesized Probe
  source 1..120: mol_type = other DNA
cttttgaccttgtagcgtttgaacaagttgcactttgtcttcaaagcaagttaaagtttgacctctacttgttttgagcctctcaggtaaagggttatttgaattccctttgcaggttgg

SEQ ID NO: 7503 - DNA, 120 bp, synthetic construct
  misc_feature 1..120: note = Artificially Synthesized Probe
  source 1..120: mol_type = other DNA
ttggacacactgcccagcaatacgctctagctgtgttcagaagcatgggaatttggaaagatctgctgagcatgccgtttactgtcacagatactatcttcctcaaaaaaaaaaaatata

SEQ ID NO: 7504 - DNA, 120 bp, synthetic construct
  misc_feature 1..120: note = Artificially Synthesized Probe
  source 1..120: mol_type = other DNA
caaaaacatgaaattatcaacaataaagatcatccttgagtctgctttgaaaagtagggtgaaattctgcagaggcattcaactggcaagataccaccctcatagccagatctgcaggtc

SEQ ID NO: 7505 - DNA, 120 bp, synthetic construct
  misc_feature 1..120: note = Artificially Synthesized Probe
  source 1..120: mol_type = other DNA
tacgttgaccatgccagaggccagtccttgattgctccaaaccctctgttcgagggttccaaatgaaatgagcaggtcctcgtgtcaggacctaggttagtttctgaaaaagcatgaaaa

SEQ ID NO: 7506 - DNA, 120 bp, synthetic construct
  misc_feature 1..120: note = Artificially Synthesized Probe
  source 1..120: mol_type = other DNA
gactaagcaaggtgcatgaaaacttgaaccacatgtgtcacacccatgaccactacatgaagatggcccaaaacctggcccaggaattgaagaaagactcttccaatttgctgtaagaaa

SEQ ID NO: 7507 - DNA, 120 bp, synthetic construct
  misc_feature 1..120: note = Artificially Synthesized Probe
  source 1..120: mol_type = other DNA
acaccagccagtgctgctgcctttaaagcacttttgactgatctcttgttaatttagcaactgttattggttgatgctgcagttgctcttattgaagtttgattgatagcattaggatgg

SEQ ID NO: 7508 - DNA, 120 bp, synthetic construct
  misc_feature 1..120: note = Artificially Synthesized Probe
  source 1..120: mol_type = other DNA
gcattcccaaagcaacgtgcatgtgccattattcactggatgagcttgaggtggatgaactagcccaccaggctctcaatgtcatgaatttaacactgaattaagaaaaatatgttttaa

SEQ ID NO: 7509 - DNA, 120 bp, synthetic construct
  misc_feature 1..120: note = Artificially Synthesized Probe
  source 1..120: mol_type = other DNA
tcattttgtgttattttctagagctttactccagtcaatttcttgggggcagcatttgtggaatcagtggttcatctgaagggctgtgctgtggaattactatgcatttgttttgtcttc

SEQ ID NO: 7510 - DNA, 120 bp, synthetic construct
  misc_feature 1..120: note = Artificially Synthesized Probe
  source 1..120: mol_type = other DNA
aaaaatcttccaaagacaagaaaagaggaaaaaaagccgttttcatgagctgagtgatgtagcgtaacaaacaaaatcatggagctgaggaggtgccttgtaaacatgaaggggcagata

SEQ ID NO: 7511 - DNA, 120 bp, synthetic construct
  misc_feature 1..120: note = Artificially Synthesized Probe
  source 1..120: mol_type = other DNA
agtctgatggaaatgtttaagtgcagtaggccagtgccagtgagaaaataaataacatcatacatgtttgtatgtgtttgcatcttgcttctactgaaagtttcagtgcaccccacttac

SEQ ID NO: 7512 - DNA, 120 bp, synthetic construct
  misc_feature 1..120: note = Artificially Synthesized Probe
  source 1..120: mol_type = other DNA
tcgcctcatttatggtgtggtccagtcatccatgtgaaggatgagtttccaggaaaaggttattaaatattcactgtaacatactggaggaggtgaggaattgcataatacaatcttaga

SEQ ID NO: 7513 - DNA, 120 bp, synthetic construct
  misc_feature 1..120: note = Artificially Synthesized Probe
  source 1..120: mol_type = other DNA
ttgcattaaattataggtttacaatatgctttatccagctatacctgccccaaattctgacagatgcttttgccacctctaaaggaagacccatgttcatagtgatggagtttgtgtgga

SEQ ID NO: 7514 - DNA, 120 bp, synthetic construct
  misc_feature 1..120: note = Artificially Synthesized Probe
  source 1..120: mol_type = other DNA
ttgaaatgtttattagctgaagatttatttagacagttgaggaaaacatcagcacccagcagtaaaattggctctcaaagattttcttctcctgtggaaagtcagacctctgaggcccca

SEQ ID NO: 7515 - DNA, 120 bp, synthetic construct
  misc_feature 1..120: note = Artificially Synthesized Probe
  source 1..120: mol_type = other DNA
ttcagaaaggcaatctcttgtctgtaaaacctaagcaggaccaaggccaagtttcttagcctgaaaaatgtgcttttctgactgaactgttcaggcactgactctacatataattatgct

SEQ ID NO: 7516 - DNA, 120 bp, synthetic construct
  misc_feature 1..120: note = Artificially Synthesized Probe
  source 1..120: mol_type = other DNA
cctcagagtccaaccatcctactcattagaccagtgttcttcaaactggtctgatggaaaaatcacctaaggggcgtgtctaaaatgtaaatatcccatcctcatctcacacttactaat

SEQ ID NO: 7517 - DNA, 120 bp, synthetic construct
  misc_feature 1..120: note = Artificially Synthesized Probe
  source 1..120: mol_type = other DNA
tctcaaagtctgtataagcctccccctctattccttgtcccccaaagatcacaatctccttcagacactattaatgtcccccaagtggcaaagtccctattcattttcattttctctttt

SEQ ID NO: 7518 - DNA, 120 bp, synthetic construct
  misc_feature 1..120: note = Artificially Synthesized Probe
  source 1..120: mol_type = other DNA
ccagaggattttgacatttttttgtcctccttattctttctcagccttctctgtccatttcccacccccattttcagacctgagaggctcacctaaataatttaggtgtggataattcag

SEQ ID NO: 7519 - DNA, 120 bp, synthetic construct
  misc_feature 1..120: note = Artificially Synthesized Probe
  source 1..120: mol_type = other DNA
tccacaggctgagggttaggaaaaaaaaaagaaaagaaatagtgtgctttctttctcctgttctaaggtagaaaaccatggcaaggtatccatggataccttgagagcagtggacagaat

SEQ ID NO: 7520 - DNA, 120 bp, synthetic construct
  misc_feature 1..120: note = Artificially Synthesized Probe
  source 1..120: mol_type = other DNA
tctgagctccttgcctctcttctttctagccgctgggtaagggtgatgcctagcctggcttattgcaccttccttttggcggttggcttgtcgcgaatcttcatcttagcacatttccct

SEQ ID NO: 7521 - DNA, 120 bp, synthetic construct
  misc_feature 1..120: note = Artificially Synthesized Probe
  source 1..120: mol_type = other DNA
tctctggttcattatagctaaaaaaggacacattacctattcacatagaccctcacaggcacaaaacagaacatgggagtgggccccaagggcagatggccaagagccagtggccttcta

SEQ ID NO: 7522 - DNA, 120 bp, synthetic construct
  misc_feature 1..120: note = Artificially Synthesized Probe
  source 1..120: mol_type = other DNA
ccagaaacaagtttatttacacaaggacacacagtgtaacgggttacaaaatacttaactgaaatccatatccagggagacaaagcaaggagtgggtttacatgagaaccagaccagcca

SEQ ID NO: 7523 - DNA, 120 bp, synthetic construct
  misc_feature 1..120: note = Artificially Synthesized Probe
  source 1..120: mol_type = other DNA
cactctgcatcttaaagacagtagtggatcctccagatcctcccctgaggctggagaagggaggagagtgaaattaaggcatttccccccaaatcagctgaaaccaaggcaccgacttcc

SEQ ID NO: 7524 - DNA, 120 bp, synthetic construct
  misc_feature 1..120: note = Artificially Synthesized Probe
  source 1..120: mol_type = other DNA
taactgccccactcagccccagatatccctcacaacaggggcaaacatggcctttttggacaaacgcatactcagaaagcctggccattagctgttccttaggaccaaggaaaagcttcc

SEQ ID NO: 7525 - DNA, 120 bp, synthetic construct
  misc_feature 1..120: note = Artificially Synthesized Probe
  source 1..120: mol_type = other DNA
atccataataaaatacagcatcagtgaactaaatgccctatcacagtcaaaacattaacagactggctgaagactccaatccaatgacaaggagcatcactgaaacaccagggaccaaca

SEQ ID NO: 7526 - DNA, 120 bp, synthetic construct
  misc_feature 1..120: note = Artificially Synthesized Probe
  source 1..120: mol_type = other DNA
agcctggaaagaagttcccgttgtcatagcgatgcagagagatgtagagcacagaggggtcattgtagaacgcctgctgggtgccattgccatggtgaatgtcctatgaggggaggtaga

SEQ ID NO: 7527 - DNA, 120 bp, synthetic construct
  misc_feature 1..120: note = Artificially Synthesized Probe
  source 1..120: mol_type = other DNA
ggattacaggctttgagccattgtgcccaaccacaagcacgtaagattctgaaggaggatccaacatttacatgaatttttaagccagaattgggcttccaagagattttgtccttcctg

SEQ ID NO: 7528 - DNA, 120 bp, synthetic construct
  misc_feature 1..120: note = Artificially Synthesized Probe
  source 1..120: mol_type = other DNA
aaacaccaaataaatcacagacgtgacaattgcgggaggagcatgaatcagctgttccttcgggaggagaaaaaggaaacaacaatcagaggctttggaatgctttctcttcatgtgcct

SEQ ID NO: 7529 - DNA, 120 bp, synthetic construct
  misc_feature 1..120: note = Artificially Synthesized Probe
  source 1..120: mol_type = other DNA
tctttggccctttcttgtcagacctggaggagaagccttgattggacaacagatcttcaaagtcgttctcagagacttttggcttttgagctagaaaagaacagaaacttttttttgttt

SEQ ID NO: 7530 - DNA, 120 bp, synthetic construct
  misc_feature 1..120: note = Artificially Synthesized Probe
  source 1..120: mol_type = other DNA
cctgtggagatggagatcggaaactcggcatctggttgtccatgaggggcaactactgtttctataacgcagagcaccacgtatattggaaaacatgcgcttgcaaaatagaacaccgat

SEQ ID NO: 7531 - DNA, 120 bp, synthetic construct
  misc_feature 1..120: note = Artificially Synthesized Probe
  source 1..120: mol_type = other DNA
gatcctttaactttttattttggaataatcagaatagcaggaagctgtaaataccctgagcacctgcgcccagcatcccccagggagggcgtctctcataacctcagagaagcactgagc

SEQ ID NO: 7532 - DNA, 120 bp, synthetic construct
  misc_feature 1..120: note = Artificially Synthesized Probe
  source 1..120: mol_type = other DNA
ctgttacggacttgtgtgtgaatgagagtttccgtttctctgggataaatgtcccacggtagctcagtagctgtgtgtttagcttcgtaggaaaccgaccacctgttctccagagcggcc

SEQ ID NO: 7533 - DNA, 120 bp, synthetic construct
  misc_feature 1..120: note = Artificially Synthesized Probe
  source 1..120: mol_type = other DNA
tctccacagacgcgtctgtctgccatcgccgcaatgttgatttgtggcttcagagtaagcctcaaagccaggaacagtgacttctcccatttcatttttccattacaaaaatattccagg

SEQ ID NO: 7534 - DNA, 120 bp, synthetic construct
  misc_feature 1..120: note = Artificially Synthesized Probe
  source 1..120: mol_type = other DNA
taaaagatctttgtagattgcttcagagtccctgcgcagacaatcgtgtcatctgcagacaggagtaattttatttctccctttgtagtgcgtgtaactttgatctccttttcttgccaa

SEQ ID NO: 7535 - DNA, 120 bp, synthetic construct
  misc_feature 1..120: note = Artificially Synthesized Probe
  source 1..120: mol_type = other DNA
ctggcctggctgtgggtctctagacatgcttgttaccaagctgacgacgttctgctcatgactggctgacagtgctgccataaaaggtgctgactttctgaattttgttaaatgcctttt

SEQ ID NO: 7536 - DNA, 120 bp, synthetic construct
  misc_feature 1..120: note = Artificially Synthesized Probe
  source 1..120: mol_type = other DNA
tttatagaatttttcaaaggatctacttgatattgggtaagttgtggcaggaactggttttgaggaatttatcaatttcacgtaagtcgtcaagcatactgcacagaggcgcctgcaccc

SEQ ID NO: 7537 - DNA, 120 bp, synthetic construct
  misc_feature 1..120: note = Artificially Synthesized Probe
  source 1..120: mol_type = other DNA
atgtcctcaagacatagtaaatccccaaaaccacctgaaacataaaaagaacattcaaagacgaaaaaactcttgggacttcatgacagaacagaaggcacttcagatgtgagctcgcaa

SEQ ID NO: 7538 - DNA, 120 bp, synthetic construct
  misc_feature 1..120: note = Artificially Synthesized Probe
  source 1..120: mol_type = other DNA
tgctcctcagggaaaacagcttcacagctcacacccagaaccaaaccatgctcatatcattatgattatgattctgcagtaccactttctggaatctatctaaaatgtgaatgctcttca

SEQ ID NO: 7539 - DNA, 120 bp, synthetic construct
  misc_feature 1..120: note = Artificially Synthesized Probe
  source 1..120: mol_type = other DNA
tgattctcaaaagaaatacacgtaaccaaaaccactcaaactaagagtcaacctcattcataagaaagaaatcaaactggcgagacaccttcacagtgatcatccaaccaggagacaaac

SEQ ID NO: 7540 - DNA, 120 bp, synthetic construct
  misc_feature 1..120: note = Artificially Synthesized Probe
  source 1..120: mol_type = other DNA
cagtgaacacacgaatgatacgaacacaaaccagccctattgctgatacagaggaagttcgggtgatctggagagaaggtcggaccagccccactgcccatacagaggaagttcgggtga

SEQ ID NO: 7541 - DNA, 120 bp, synthetic construct
  misc_feature 1..120: note = Artificially Synthesized Probe
  source 1..120: mol_type = other DNA
catgcagatataagacggcctaagtcatccgctaagatccggctgagaccactgatgaagcggctgcacccgccagactctccatgcagatataagacggcctaagtcatctgctaagat

SEQ ID NO: 7542 - DNA, 120 bp, synthetic construct
  misc_feature 1..120: note = Artificially Synthesized Probe
  source 1..120: mol_type = other DNA
gacggaagaagctccatgtgggtaaacgctatccaagagcactgcgtgccatagggaaccttttgtgaaagggagagacaatcacgtggcaaacttcatcgtcttattttcagaaatggc

SEQ ID NO: 7543 - DNA, 120 bp, synthetic construct
  misc_feature 1..120: note = Artificially Synthesized Probe
  source 1..120: mol_type = other DNA
acaaaaacaaaaccccacacaaaaaacccccttaactcttatgcttactgggaaaacaaaatctgactggctttctaggggtgttcgctttgactgtggtctggaagcaaacccgcgaca

SEQ ID NO: 7544 - DNA, 120 bp, synthetic construct
  misc_feature 1..120: note = Artificially Synthesized Probe
  source 1..120: mol_type = other DNA
ctgagaacaagcatctgcgcattcccatccaaaagggtttgtcaggaccccactttctgccgccatccccacagcctgcgttcccgcctctcctaaaacccaccagagcccgaggtggct

SEQ ID NO: 7545 - DNA, 120 bp, synthetic construct
  misc_feature 1..120: note = Artificially Synthesized Probe
  source 1..120: mol_type = other DNA
ggaagggcacgttcccttcctgcaagcaccttcgaaacacgcccatgcagtgagaatgactcagcctcatcactcatctactgtgaagccactcgccttcagaacagaaacacgtaccag

SEQ ID NO: 7546 - DNA, 120 bp, synthetic construct
  misc_feature 1..120: note = Artificially Synthesized Probe
  source 1..120: mol_type = other DNA
tcactctcgtctctgtcctccatcagggcagactcgctctccttggaagaggcattttctgcaccagtctctgcctccttctcttctgcgaaaaggaaacaaaaccacaggctagtgaga

SEQ ID NO: 7547 - DNA, 120 bp, synthetic construct
  misc_feature 1..120: note = Artificially Synthesized Probe
  source 1..120: mol_type = other DNA
gatgaagagcgagggttgttatttcagactttgtgggcatgttctttttttttcacctttaaaaagatatgaaatcattcttagctcgtgagccattaaagaacaggctgacatgccggg

SEQ ID NO: 7548 - DNA, 120 bp, synthetic construct
  misc_feature 1..120: note = Artificially Synthesized Probe
  source 1..120: mol_type = other DNA
atgaatgcacacacagcacacacagatgcacagtacacatgaatgcacacagtacacacagatgcacagtacacacgaatgcacacacagcagagatgcatggtacacacaaatgcacac

SEQ ID NO: 7549 - DNA, 120 bp, synthetic construct
  misc_feature 1..120: note = Artificially Synthesized Probe
  source 1..120: mol_type = other DNA
aggtgtctctctccacagagacactcaccagaacagggttcacctaattcacctgcgggatcttaccaaacttagacagaatgtcttgctgctcctcccggctggaaaacaggattttgg

SEQ ID NO: 7550 - DNA, 120 bp, synthetic construct
  misc_feature 1..120: note = Artificially Synthesized Probe
  source 1..120: mol_type = other DNA
taaatgtgttttccataaaaatgacgacgtccgccctgacaaaaatccacaactgtcaacagatgcccataaaaccaagacctctagaatccggctgccagggaattgggaacatgattc

SEQ ID NO: 7551 - DNA, 120 bp, synthetic construct
  misc_feature 1..120: note = Artificially Synthesized Probe
  source 1..120: mol_type = other DNA
ttttaactgtcacttctctgagctccacacatgcctgtgatgtgtgaaaggcctctagttcaccccttcctgctcaccctctaaaacatcctctccctgcacgaggggagagcaccctgt

SEQ ID NO: 7552 - DNA, 120 bp, synthetic construct
  misc_feature 1..120: note = Artificially Synthesized Probe
  source 1..120: mol_type = other DNA
agatgccatttctccaagtattcgctgaagtttgcaaaactcaggtcaagttggttaaaccttgtaaaaaaaaaaaaactatatcctgttcttgtctacctgttccactgcctggggaga

SEQ ID NO: 7553 - DNA, 120 bp, synthetic construct
  misc_feature 1..120: note = Artificially Synthesized Probe
  source 1..120: mol_type = other DNA
attcaaccaggatgctctgaggtactgaacctcttttcttctttttgttaaaaaaaaaaaaagtatcctctttggcgtctgcagagcttgatttcgtggttctgacgtcctccatcagtt

SEQ ID NO: 7554 - DNA, 120 bp, synthetic construct
  misc_feature 1..120: note = Artificially Synthesized Probe
  source 1..120: mol_type = other DNA
tcagtaccttggtctttaaaacactattttaagcaccgcctccaccgtggctgaaaactctaagagcactgggtgtttttcttcctccaaaggaggaaaaaagaaacaaaattattaaag

SEQ ID NO: 7555 - DNA, 120 bp, synthetic construct
  misc_feature 1..120: note = Artificially Synthesized Probe
  source 1..120: mol_type = other DNA
gcacaagcggtaccaacgtacttggcaaatttcacagtggtggcgttccgaggcacaaaccccgtgtggaactgaatctggaacatcttcatggatgccatctgcaaagagagcaaacac

SEQ ID NO: 7556 - DNA, 120 bp, synthetic construct
  misc_feature 1..120: note = Artificially Synthesized Probe
  source 1..120: mol_type = other DNA
aacaaaaaacagaatgagaaattgtccacttagctaaaatgtgtaataaccaataaagaataacccccatgaagagcctcacaagaattctaaagtctcctgggcactcggatccctgtg

SEQ ID NO: 7557 - DNA, 120 bp, synthetic construct
  misc_feature 1..120: note = Artificially Synthesized Probe
  source 1..120: mol_type = other DNA
tttatagccccaaatctgatctttctccttgcatattccatgtgcatttgaaagaaataaatgtgtgtttttctattgttgggtggaacgtcctagaacgctctacagctgtgtcagcct

SEQ ID NO: 7558 - DNA, 120 bp, synthetic construct
  misc_feature 1..120: note = Artificially Synthesized Probe
  source 1..120: mol_type = other DNA
tgttttccttttacttcctgttgacttcttaattacagcaccgaagaaaaacccttactgtttgttctaggctttctgacgagaaccttgcggctgacatctttctttttgtacctgatg

SEQ ID NO: 7559 - DNA, 120 bp, synthetic construct
  misc_feature 1..120: note = Artificially Synthesized Probe
  source 1..120: mol_type = other DNA
ctcagcacatcaattagttacttcagtttcccccagagtcacagagtgcagctctttctctcgtctcctccatctggaggcagaagaaagggtctcggccaggtctgggcctcccttata

SEQ ID NO: 7560 - DNA, 120 bp, synthetic construct
  misc_feature 1..120: note = Artificially Synthesized Probe
  source 1..120: mol_type = other DNA
ctgtactcatgtctgagcagcgtcaggtgctccacacggcacctgtgtcaggtgctccacacggcattttcacgtgcattatccaccagagcccaccacatacatggcatttgtcagaga

SEQ ID NO: 7561 - DNA, 120 bp, synthetic construct
  misc_feature 1..120: note = Artificially Synthesized Probe
  source 1..120: mol_type = other DNA
cagacccaaagacaccaagcacagggactttcttccgtgtcccagggtgaagaacaggccccagctcatgactggcgctcagatcctgttgaactatgcatgaaataatgaactttgaca

SEQ ID NO: 7562 - DNA, 120 bp, synthetic construct
  misc_feature 1..120: note = Artificially Synthesized Probe
  source 1..120: mol_type = other DNA
gacaggttgtagacggcatagtgccctgggtgcttggagtccaggaacaaccgcacatcttcgatgttgtttttgagcgctgactccacaccttctgctgggaatgacatcactgaaaca

SEQ ID NO: 7563 - DNA, 120 bp, synthetic construct
  misc_feature 1..120: note = Artificially Synthesized Probe
  source 1..120: mol_type = other DNA
aattctggatgtgatgtaagatatgtccaggtcaccctttgcataactggaattaaaaagaagagaacttggttatgacaagaaacactccgcagttaggtcacagggcttaagccagag

SEQ ID NO: 7564 - DNA, 120 bp, synthetic construct
  misc_feature 1..120: note = Artificially Synthesized Probe
  source 1..120: mol_type = other DNA
agggaagacggggaggcacggtgagcctgacgcttggccacttttgcagcaagagacaaacaggccacacaaagcatggctactggacctataatctaatcaccggtagaaaaacaaaaa

SEQ ID NO: 7565 - DNA, 120 bp, synthetic construct
  misc_feature 1..120: note = Artificially Synthesized Probe
  source 1..120: mol_type = other DNA
gagcctccaggcccaaccagaactcactgttgcttctaagtcaactttacaaacacgaggttatgcagcttcatctgcctcaagcacgtgatgtgaacagaaggcagagcaaaacaaaca

SEQ ID NO: 7566 - DNA, 120 bp, synthetic construct
  misc_feature 1..120: note = Artificially Synthesized Probe
  source 1..120: mol_type = other DNA
ctcacatgcactcacaggcactcgcacacatgcatacacatgcacgcagctcacgcacacaggcacttgtgtgcatgcgtacacatgcatgtggctcacacacacttgcatgcgtgtgta

SEQ ID NO: 7567 - DNA, 120 bp, synthetic construct
  misc_feature 1..120: note = Artificially Synthesized Probe
  source 1..120: mol_type = other DNA
gtacatgcaggcacaagtgcacacacgtctacctggtgctggggacacaaaacagtgatcacagcacagaacaaaaaacataagaaaaagcccgaaggtgtcgccagctgtggaaggaac

SEQ ID NO: 7568 - DNA, 120 bp, synthetic construct
  misc_feature 1..120: note = Artificially Synthesized Probe
  source 1..120: mol_type = other DNA
gtcctgcgagtgaggtcttcacaggcggctttggtggcacaagtggtgttaaaaaaaaaacacctggccaaagtccctcatgcagacaggagaccgaggcccaggcagcaccgagcagat

SEQ ID NO: 7569 - DNA, 120 bp, synthetic construct
  misc_feature 1..120: note = Artificially Synthesized Probe
  source 1..120: mol_type = other DNA
tcttcccttggctggctttagtccgaatcctgaccccctcctgaactgcaccaagacaccagctttgctgagctctgtgagccccagggaactgccgaacctgagggtgtgctcagggac

SEQ ID NO: 7570 - DNA, 120 bp, synthetic construct
  misc_feature 1..120: note = Artificially Synthesized Probe
  source 1..120: mol_type = other DNA
aaccatattaagcagacacatggcctgtctgtcccaggatgttccatcacttcagctcctgggttctgggggccaccctgtgaggctcactacctcctgggggcagtattttatttcatt

SEQ ID NO: 7571 - DNA, 120 bp, synthetic construct
  misc_feature 1..120: note = Artificially Synthesized Probe
  source 1..120: mol_type = other DNA
tcgaggatctggtgatggagatgctgcaccctgtccacggctgggtcagaaaagactctgaggaaagcatcttccagccaacacgtgctgctccctcccaggcctcacacttccacaaag

SEQ ID NO: 7572 - DNA, 120 bp, synthetic construct
  misc_feature 1..120: note = Artificially Synthesized Probe
  source 1..120: mol_type = other DNA
accccctgcactggcagaggtcacagaccaccagaggccactccctctacacacatcagtgacgtcagaagcaagaagggagcggcaaagggaagaacaaaaaccgaacaaaatgatcaa

SEQ ID NO: 7573 - DNA, 120 bp, synthetic construct
  misc_feature 1..120: note = Artificially Synthesized Probe
  source 1..120: mol_type = other DNA
gctgtggaagaccgtgtactgcgtgtcgtgcggggggatcgagtacttcccattgactattcgaagtttcgctccatcctcaaaagggtgctgccggaagcacagcaggtacaagatgca

SEQ ID NO: 7574 - DNA, 120 bp, synthetic construct
  misc_feature 1..120: note = Artificially Synthesized Probe
  source 1..120: mol_type = other DNA
aggattttcgcagaactggccttgaacaatcagcgacttctcgtcaatcacccaatatgtgagcccagagaagggactggtgattacttcggcatcaggatcttatccagccaagagtaa

SEQ ID NO: 7575 - DNA, 120 bp, synthetic construct
  misc_feature 1..120: note = Artificially Synthesized Probe
  source 1..120: mol_type = other DNA
cccagatatcctgcttctcgccgatcgggaagttggaatacaagtctatgatttctggtgttctatacattggtgttgtattcctcgtgatctgaaaaaatacaaacatttcaaaggaaa

SEQ ID NO: 7576 - DNA, 120 bp, synthetic construct
  misc_feature 1..120: note = Artificially Synthesized Probe
  source 1..120: mol_type = other DNA
ttatacagcaggacagcgcacggccttgggcaggccacaatttcttaaagggaatgggaaaatgagagcttacggaaagcaggataaagcgccctccactcatgctgaaaagcacgaaga

SEQ ID NO: 7577 - DNA, 120 bp, synthetic construct
  misc_feature 1..120: note = Artificially Synthesized Probe
  source 1..120: mol_type = other DNA
ctgagaagcgggccccgaggggctgagggatttcacagagttcagtaaatgagccttcctcaaagatgtcttaaattacttctgatcaaatgtaatatgtgtaattcagaaaaataaaaa

SEQ ID NO: 7578 - DNA, 120 bp, synthetic construct
  misc_feature 1..120: note = Artificially Synthesized Probe
  source 1..120: mol_type = other DNA
aaaaaaaaagtatacagagacacaaagaactagaaagggccacacaattgtgaagcccacattacaccttctggcgcagctctgataacagggcatgggagctcgggccaaacagggaat

SEQ ID NO: 7579 - DNA, 120 bp, synthetic construct
  misc_feature 1..120: note = Artificially Synthesized Probe
  source 1..120: mol_type = other DNA
gattcttcaccaattcaacccttctgtttctgttctccttaaaatacacactcaagccccgctacacgacccatcacacttcaaaaatgcgaaccaggagggtctcggtgtcatgagaaa

SEQ ID NO: 7580 - DNA, 120 bp, synthetic construct
  misc_feature 1..120: note = Artificially Synthesized Probe
  source 1..120: mol_type = other DNA
gaaaaaggccacacttacccattttcaaaatctacgtgaagacacctgtgctataaagtaggagtgtacagccaagtagagaaaaggcagccctaaccagagaaacacagagggaagctg

SEQ ID NO: 7581 - DNA, 120 bp, synthetic construct
  misc_feature 1..120: note = Artificially Synthesized Probe
  source 1..120: mol_type = other DNA
gtctgagagaagccacactttgggaaaaccagggaaggctgagaacaggagggcaagagacaaggctcggttcctcccacctcactgcggataatggtgtcaaaaccacataaaaaatgt

SEQ ID NO: 7582 - DNA, 120 bp, synthetic construct
  misc_feature 1..120: note = Artificially Synthesized Probe
  source 1..120: mol_type = other DNA
acacttagcagattatgagaatacacaagctgctccaacgaaccaaacacacaagccagtggaaaatctttgaaaaaggcaagaaacaaaaggaagtttactgaagagcaagacccgaat

SEQ ID NO: 7583 - DNA, 120 bp, synthetic construct
  misc_feature 1..120: note = Artificially Synthesized Probe
  source 1..120: mol_type = other DNA
tgagacagatgctaattttcttcagggctggaaaagcaacgtttctggaagatccgcttccactgttgagaggctcacgcacatcttctaggtgagatggtgtagcctcacctgctctca

SEQ ID NO: 7584 - DNA, 120 bp, synthetic construct
  misc_feature 1..120: note = Artificially Synthesized Probe
  source 1..120: mol_type = other DNA
aggtgactccctttgaccttttctgcctggcagatgggaaactgcctgactgcagatctcctcttcgtttgcaactctgtaacttcaccctgtcttctgattgcttttcgtaaccaatca

SEQ ID NO: 7585 - DNA, 120 bp, synthetic construct
  misc_feature 1..120: note = Artificially Synthesized Probe
  source 1..120: mol_type = other DNA
ccaggcatgtcattaacatggatacaaagagaaatgactacaaatacacaagtgctcaaacctctaagtgaacactcagtgtcctcagatgacaaatgatcattctcacattcacgacag

SEQ ID NO: 7586 - DNA, 120 bp, synthetic construct
  misc_feature 1..120: note = Artificially Synthesized Probe
  source 1..120: mol_type = other DNA
cctctcagccctcaccacagctccctcaaaagctttgtgctgaccctctgagaaacaggggggctctcaggaaaaatgaggggcacccatagaaggaatggggtgctcagaaagagagga

SEQ ID NO: 7587 - DNA, 120 bp, synthetic construct
  misc_feature 1..120: note = Artificially Synthesized Probe
  source 1..120: mol_type = other DNA
tcaagccttccaaagccggaatgtctagaaccaagatttacccctcgcaaaggctttctgatctcggaaatgacaaacgagggagataatcagcaaaacatccatcactagacccacagg

SEQ ID NO: 7588 - DNA, 120 bp, synthetic construct
  misc_feature 1..120: note = Artificially Synthesized Probe
  source 1..120: mol_type = other DNA
ctaactctgtgttatttgtattttgtcaatcagcatgtattcttttataatgaaaactgacaagtaacaccacgagcgggaggccccacggcgtgatgcgtgctcccgacaaatcttaat

SEQ ID NO: 7589 - DNA, 120 bp, synthetic construct
  misc_feature 1..120: note = Artificially Synthesized Probe
  source 1..120: mol_type = other DNA
tgagcaggaagtggacaatggacgccccttgtgctgccttcaacttttccgccagtttgacgtttcagaacacaacactgagaaacacaagcggcacatccccacagtgtcagatgaaga

SEQ ID NO: 7590 - DNA, 120 bp, synthetic construct
  misc_feature 1..120: note = Artificially Synthesized Probe
  source 1..120: mol_type = other DNA
cactcacacagaccactctgcccctagaactctccgaaagcaccaccccaacccaccggcctctcttcctgtcctgacaaacggaccatggagtcgttgtgccatcttcctgggctcaac

SEQ ID NO: 7591 - DNA, 120 bp, synthetic construct
  misc_feature 1..120: note = Artificially Synthesized Probe
  source 1..120: mol_type = other DNA
catgtccacagttctgtgcacttcaaaataaatgtagacaatattaacacactgaagtcagaatacttgaatcgaacccttacaattttagacgtcagagcggaagatgagggagagagc

SEQ ID NO: 7592 - DNA, 120 bp, synthetic construct
  misc_feature 1..120: note = Artificially Synthesized Probe
  source 1..120: mol_type = other DNA
actgcacagtacagaccctcccacagtgacccctatttacagaaatgctagcaacaaatattttttacaagcagcttttaaactccttgtattcatagagcccttattttggcacatgga

SEQ ID NO: 7593 - DNA, 120 bp, synthetic construct
  misc_feature 1..120: note = Artificially Synthesized Probe
  source 1..120: mol_type = other DNA
tatgattttatttaacatatcaggctttaaaaataccttcactaagtaaaatacaaattgacttgtggcgtggccagcagttttctacaaaacataatggccccagcgtacacgcccccc

SEQ ID NO: 7594 - DNA, 120 bp, synthetic construct
  misc_feature 1..120: note = Artificially Synthesized Probe
  source 1..120: mol_type = other DNA
actgcctttcacttcctctactccagagacagacaggaataacctaagaacagaggtcaatagaaggaaaaacaaaaccacaagcagttctccaaagaccaacgagactgataaattcta

SEQ ID NO: 7595 - DNA, 120 bp, synthetic construct
  misc_feature 1..120: note = Artificially Synthesized Probe
  source 1..120: mol_type = other DNA
tctggtgaaatctactaaagaaaagctaccataacaaacgcattcaggatggttgttggatataagggcaacatacaaaaaccaactgtgcttccacatgcccaaggttaggcagtgatt

SEQ ID NO: 7596 - DNA, 120 bp, synthetic construct
  misc_feature 1..120: note = Artificially Synthesized Probe
  source 1..120: mol_type = other DNA
gcaacaacatgaataacacacgaaaaggcagtatgccgagtaaaagatgccaggcgaaaaaagagtacatacacatacatacagtcaatgtacagaaaactccagaaaacacaaacgacc

SEQ ID NO: 7597 - DNA, 120 bp, synthetic construct
  misc_feature 1..120: note = Artificially Synthesized Probe
  source 1..120: mol_type = other DNA
acatgtttgctgccttgattagcgtggcagatacagtgtgtgacacacacatacatacatgacatgtgccgaaacatttaaaacatgcagcctgtatatctcatttttatctcaactgtt

SEQ ID NO: 7598 - DNA, 120 bp, synthetic construct
  misc_feature 1..120: note = Artificially Synthesized Probe
  source 1..120: mol_type = other DNA
aaaaaatatattaaacacaaaaaaaaggaggaactaaaactcctctcattttcagatgccatgactggaaagacagaaggctccaaaggcctcagcgccccatgaccttagaaaggcaga

SEQ ID NO: 7599 - DNA, 120 bp, synthetic construct
  misc_feature 1..120: note = Artificially Synthesized Probe
  source 1..120: mol_type = other DNA
atcccagccactctttattaacttgttcctttttcctgacactttctgatatctaacattacatcacacactactcggatacctgtttaccgtctgtctcagctagactacaaacaccat

SEQ ID NO: 7600 - DNA, 120 bp, synthetic construct
  misc_feature 1..120: note = Artificially Synthesized Probe
  source 1..120: mol_type = other DNA
agtaatatctggacttgatctcaggacttactacacagctaaattaatcaaggctatgtggtattggcagagggacagatacaaagatgactggaatggaaagaaaatcgcagaaacagc

SEQ ID NO: 7601 - DNA, 120 bp, synthetic construct
  misc_feature 1..120: note = Artificially Synthesized Probe
  source 1..120: mol_type = other DNA
ccaaaaagatcctgtttaggggacgaaaggacaagctgcagactaggaacagatacttgaaaaccccatgtctacgaaggacttaaatctacaataaagaacactcaaaacttggtcaaa

SEQ ID NO: 7602 - DNA, 120 bp, synthetic construct
  misc_feature 1..120: note = Artificially Synthesized Probe
  source 1..120: mol_type = other DNA
ttgctggtgggaatgtatggccactcaagaaaacaatctggcagttttctaacaaactaaacacataattaccacacatgaaccagcaactgcactcttaaacatttatcccagaaatga

SEQ ID NO: 7603 - DNA, 120 bp, synthetic construct
  misc_feature 1..120: note = Artificially Synthesized Probe
  source 1..120: mol_type = other DNA
aaaaaaattgctgaacatcatcatcagggaaattccaatgaaatcacaatgagatcgacaccactgcacactcacaagaatggatgtaatcaaaatgagagaccacaagaaatgctggtg

SEQ ID NO: 7604 - DNA, 120 bp, synthetic construct
  misc_feature 1..120: note = Artificially Synthesized Probe
  source 1..120: mol_type = other DNA
aagaataaaaaaataacaggcacaggatatgaatgtgcaatgccagaaggggaggctgagcagcaaataagcattaccaaactcgctactcagaaaggcacaaatcaaagcttgacactt

SEQ ID NO: 7605 - DNA, 120 bp, synthetic construct
  misc_feature 1..120: note = Artificially Synthesized Probe
  source 1..120: mol_type = other DNA
gtgaggaataaacaaacgtctgtggtttataggcccccagtgtacgacgttctgttacagcagcacagacggactgggacacggggatgcgcacccacacagacaaccatgagcaattca

SEQ ID NO: 7606 - DNA, 120 bp, synthetic construct
  misc_feature 1..120: note = Artificially Synthesized Probe
  source 1..120: mol_type = other DNA
atccacataaagtactactgaccatgctcggcaaatacgaagagcccctaagggttgctgtggtggttctgaccatttttacttcacgctgggaactagccaaagtggacaaatgttgat

SEQ ID NO: 7607 - DNA, 120 bp, synthetic construct
  misc_feature 1..120: note = Artificially Synthesized Probe
  source 1..120: mol_type = other DNA
aacagcacggagcttcagaggctggtgccctcagtcacaagtcctatgtgggaagagggtcggctacaaggctggctcgccacagcaacctaagggtctacttttttttgagatagagtc

SEQ ID NO: 7608 - DNA, 120 bp, synthetic construct
  misc_feature 1..120: note = Artificially Synthesized Probe
  source 1..120: mol_type = other DNA
tgggagggtttctgaaacttgcaaccaagagtcttgcttgtaccacatgattctgcaactgtcagtcagtaccaaatattcacagtgccctcacccagtccagaacattcttttttcttt

SEQ ID NO: 7609 - DNA, 120 bp, synthetic construct
  misc_feature 1..120: note = Artificially Synthesized Probe
  source 1..120: mol_type = other DNA
tcaattacagaatactttcccaagtcttctgggagtatcccacgatatacaggttatatgctgcaatgaccattctgaaacctgaaaaattctggaagtgtaaacatctgtactcaaggg

SEQ ID NO: 7610 - DNA, 120 bp, synthetic construct
  misc_feature 1..120: note = Artificially Synthesized Probe
  source 1..120: mol_type = other DNA
aaatcatacccaaaatctgtttggttttgaccacaatggagacaaagtgtgtgataatgctacagtcaaaatgtctccgcaggccttttgtgataatcagaattctgggatagtctcctg

SEQ ID NO: 7611 - DNA, 120 bp, synthetic construct
  misc_feature 1..120: note = Artificially Synthesized Probe
  source 1..120: mol_type = other DNA
caactctcaagttccctggactgtagaagaaccagccctaacctccaaagtccagtcctgtccctgcctgctcaataaccccagatgtccggcaaaaggccaaggcttaaacccacctcc

SEQ ID NO: 7612 - DNA, 120 bp, synthetic construct
  misc_feature 1..120: note = Artificially Synthesized Probe
  source 1..120: mol_type = other DNA
ctctttatttggtctctgctgaagcagtcgtgccagcctcctagacacggcctcaggtttgtcgctgtccatgtcctccagcacccctcttaccagaccacaaggagctgcattatgatg

SEQ ID NO: 7613 - DNA, 120 bp, synthetic construct
  misc_feature 1..120: note = Artificially Synthesized Probe
  source 1..120: mol_type = other DNA
gtgaagtcccacagccgctgtgttggccgcgccacatcctcacacttcttcagggtgggcatgcggcccgtgccgtcatccaccagacacttggagtcaggcaagaaggctgtggagccc

SEQ ID NO: 7614 - DNA, 120 bp, synthetic construct
  misc_feature 1..120: note = Artificially Synthesized Probe
  source 1..120: mol_type = other DNA
caatcacgcgacagtcctgagcggtaagtgctgttgccgtctctcttgactgaggggggagtgatgcacccccagcccatctgaccccaaaggcctggttcctttttaattttttgagat

SEQ ID NO: 7615 - DNA, 120 bp, synthetic construct
  misc_feature 1..120: note = Artificially Synthesized Probe
  source 1..120: mol_type = other DNA
tcgtgagcaagtgtagatgcttattgcttttgtccaccgcgtctccaggctgctgggtttgcagcagcagctgacccatccaccacggccaccacgagaggtcacacaggtttgaattgg

SEQ ID NO: 7616 - DNA, 120 bp, synthetic construct
  misc_feature 1..120: note = Artificially Synthesized Probe
  source 1..120: mol_type = other DNA
gcacttagtgaaacatacatctgtgtaggaagagctgtgtacattagcaaaactgggtgcaaatgtatactcgtgtccgcgtgctcttgtacatatgagtgtttgcatggatttacgtac

SEQ ID NO: 7617 - DNA, 120 bp, synthetic construct
  misc_feature 1..120: note = Artificially Synthesized Probe
  source 1..120: mol_type = other DNA
gtcaccttctggtatgtgggcctgggacagtcccctatcttctctgtgcctcagttactcattggtaaagtggggacgatcacgccagaaactcattgttgctctgttatgaggttttaa

SEQ ID NO: 7618 - DNA, 120 bp, synthetic construct
  misc_feature 1..120: note = Artificially Synthesized Probe
  source 1..120: mol_type = other DNA
tgagaaaagccagaattcaggctctttatgggaaattacaaattagaaaacaaacagcaatcctcaacttgaagcgggtcagccactcataggccaaagcccaacaggaaacaaccaaaa

SEQ ID NO: 7619 - DNA, 120 bp, synthetic construct
  misc_feature 1..120: note = Artificially Synthesized Probe
  source 1..120: mol_type = other DNA
cccacagagaaagttcaggtctgggttgcgtcctctctgggacttctttctcttgtgcgttacacgatggctgtggggaggggggtttattctaccgaccccaacacttaacaggttttt

SEQ ID NO: 7620 - DNA, 120 bp, synthetic construct
  misc_feature 1..120: note = Artificially Synthesized Probe
  source 1..120: mol_type = other DNA
agtcaattccttagatgaactttcacagctaagcccacgtccccaccatctgctattaatctgtttccctggagagccctgagccagccccgtcccatcctatcctaccctatcctgtgc

SEQ ID NO: 7621 - DNA, 120 bp, synthetic construct
  misc_feature 1..120: note = Artificially Synthesized Probe
  source 1..120: mol_type = other DNA
aagttggcctttgcatcccgagggagcgaaccgcgtttctgcatcaggttcacatcgtggcaggtggtttctgggtttctgtctgttgtctctgctgtgggacaacctgcctgagaaaag

SEQ ID NO: 7622 - DNA, 120 bp, synthetic construct
  misc_feature 1..120: note = Artificially Synthesized Probe
  source 1..120: mol_type = other DNA
agaccctgtctgaaaacataaaaagtaaaaataaaccccaaatgtcaccatcaagtcttcagggtgagtcctctccctccatcctgtttagagccgccgtccttgccccatagctgggcg

SEQ ID NO: 7623 - DNA, 120 bp, synthetic construct
  misc_feature 1..120: note = Artificially Synthesized Probe
  source 1..120: mol_type = other DNA
ccgggagattgatgcttatgcagagggagaatttaaaggctctcccatcacagtctcaagggaaacagtttaacccctctataaatttcagatgaatattggcaataacttctccactct

SEQ ID NO: 7624 - DNA, 120 bp, synthetic construct
  misc_feature 1..120: note = Artificially Synthesized Probe
  source 1..120: mol_type = other DNA
ttgcatgcagcacatagtaccagttaatgctagttactagccatgcatccccactgcccaagacaatccgagttgatacccctgtcttggggtaattattaatagcacctctggtaactc

SEQ ID NO: 7625 - DNA, 120 bp, synthetic construct
  misc_feature 1..120: note = Artificially Synthesized Probe
  source 1..120: mol_type = other DNA
tgcgtggtctaaaaagggtggagccctcagttcggggaaatcctgctgcctttcccagaaaactcaggaataatccatcccttgtttagcaaatgatcaaaaaataaccacaaaagttaa

SEQ ID NO: 7626 - DNA, 120 bp, synthetic construct
  misc_feature 1..120: note = Artificially Synthesized Probe
  source 1..120: mol_type = other DNA
cctcctgggctgtggggctgtgcagagctggcatgggcaggctgtgctgcggtcagggaagctgaccatcttaatggttgaattgagaagaagctccaacttgccaaaagccaaacttgc

SEQ ID NO: 7627 - DNA, 120 bp, synthetic construct
  misc_feature 1..120: note = Artificially Synthesized Probe
  source 1..120: mol_type = other DNA
ccatgtgacggttttacatctgctcaggaggtgaaggtcccattattcagtggatgtgaggtgctgctgggaccatgtctgcagctgtgagtgatgcttgcgtcagtggacactccgcat

SEQ ID NO: 7628 - DNA, 120 bp, synthetic construct
  misc_feature 1..120: note = Artificially Synthesized Probe
  source 1..120: mol_type = other DNA
acctcgacacggaaaccccacccgggtctgcagccctcagaccgtgacatggaaaccccacccgggtctgcagccctcagaccgtgacacggaaaccccacccgggtctgcagccctcag

SEQ ID NO: 7629 - DNA, 120 bp, synthetic construct
  misc_feature 1..120: note = Artificially Synthesized Probe
  source 1..120: mol_type = other DNA
cactcacacacatgtgcactcagctgtcattcctgtcagcctctgatgtacctgcagggacagctcattctgtgagcacctaggggttctggggtcagccctcatgtccgaggaggggtg

SEQ ID NO: 7630 - DNA, 120 bp, synthetic construct
  misc_feature 1..120: note = Artificially Synthesized Probe
  source 1..120: mol_type = other DNA
tgcctggtggtacccccttctctgggatccgtgcgtaacaaaccatctcaccaatggccattgtctcctggcctgctggctgcgctgtcctgaataacgataaagccacttggagaccag

SEQ ID NO: 7631 - DNA, 120 bp, synthetic construct
  misc_feature 1..120: note = Artificially Synthesized Probe
  source 1..120: mol_type = other DNA
cagtggctggacgtgtggagggaagggagacggtggcggggcacacacaggggcttgtccatgcccatctaatgatagacagagacatagagagacgtagacagagacacagaaacagag

SEQ ID NO: 7632 - DNA, 120 bp, synthetic construct
  misc_feature 1..120: note = Artificially Synthesized Probe
  source 1..120: mol_type = other DNA
agtgggaagaagaatttggggataacttggctctttcttgactgataggtttagctgtgtgacgaactgtgtgtttccttttgggtgttgtgatccactaaactgttataaaatctggtt

SEQ ID NO: 7633 - DNA, 120 bp, synthetic construct
  misc_feature 1..120: note = Artificially Synthesized Probe
  source 1..120: mol_type = other DNA
cattcacccacctagccactatctatccattcatccacacgcactcatccatccatccatccactcatccatctatccacccatccatccctgcatccacccagccatccatccatccgt

SEQ ID NO: 7634 - DNA, 120 bp, synthetic construct
  misc_feature 1..120: note = Artificially Synthesized Probe
  source 1..120: mol_type = other DNA
ctttaacaaaaggcagggcttcatattcactctggaggaaattgtgtgcatacctttgagagatttcattgaacctgatttttaaaaaagatttacaatctgcttagcgtgtccctgccc

SEQ ID NO: 7635 - DNA, 120 bp, synthetic construct
  misc_feature 1..120: note = Artificially Synthesized Probe
  source 1..120: mol_type = other DNA
gatagatcagttgttttaaaagttaaaagtaacattaggaaacaaggtgaaattctccatagctcatgaggagcagaagccggctgcagtgagtggcatggaagccatgaggctctgggg

SEQ ID NO: 7636 - DNA, 120 bp, synthetic construct
  misc_feature 1..120: note = Artificially Synthesized Probe
  source 1..120: mol_type = other DNA
aagaaccagatatgaaaaatacccatggaagaaagtctcctaaatgtaagatgcagtcagtaacttgagaaaccaaggctaagcaagtggctcgaattgctgtctggatgtggctgaaga

SEQ ID NO: 7637 - DNA, 120 bp, synthetic construct
  misc_feature 1..120: note = Artificially Synthesized Probe
  source 1..120: mol_type = other DNA
taaatgcaacccgcacttgctggaatcgaatttcagcaaaaggtttctcaggttcacatgggagagtaaaagcaagagaataatagtcaagaaagtcctaaaatagtaatggggacaggt

SEQ ID NO: 7638 - DNA, 120 bp, synthetic construct
  misc_feature 1..120: note = Artificially Synthesized Probe
  source 1..120: mol_type = other DNA
catctcctcacaaaaagtagatacagttcacagttactaattcctgtgtatcaaaaactcaacaccataaaatgaagccagaccaacagggaaagcgcttggtcacacacgcagtttctg

SEQ ID NO: 7639 - DNA, 120 bp, synthetic construct
  misc_feature 1..120: note = Artificially Synthesized Probe
  source 1..120: mol_type = other DNA
cacactccacacactgtaatgtacacaccccacacataccacacaatccacactgcacacactgtatatacacgtgccacatgcataaacacaacccacaccccacacactgtacataca

SEQ ID NO: 7640 - DNA, 120 bp, synthetic construct
  misc_feature 1..120: note = Artificially Synthesized Probe
  source 1..120: mol_type = other DNA
accccccacacacacaccacacaactgaaactccactgtacatacacatcccacacacatacataccacacaatccacactccacacactgtatatacacatgccacacacaacacacac

SEQ ID NO: 7641 - DNA, 120 bp, synthetic construct
  misc_feature 1..120: note = Artificially Synthesized Probe
  source 1..120: mol_type = other DNA
tacacaccatatacacgctgcacatactgtacatacacctcacacatacatcccttataccccatatacacatcccacacactgtacatacacatcccacacacatacacctcatatacc

SEQ ID NO: 7642 - DNA, 120 bp, synthetic construct
  misc_feature 1..120: note = Artificially Synthesized Probe
  source 1..120: mol_type = other DNA
tttacatctaaaacagcttttctaaagaaaagaaaactggtgtttaaggaatgtctgcacgtgatgaaaattagcatgcttgctgtatcccaggcactgagagccccactgcgtttaatc

SEQ ID NO: 7643 - DNA, 120 bp, synthetic construct
  misc_feature 1..120: note = Artificially Synthesized Probe
  source 1..120: mol_type = other DNA
tcctgacctttattaagcctaatagacgcgatggactcattttcctctaactggctctaggactttcctcattagaagatgagcagctggcatttctaccgtcgcagaaatgtaaattgg

SEQ ID NO: 7644 - DNA, 120 bp, synthetic construct
  misc_feature 1..120: note = Artificially Synthesized Probe
  source 1..120: mol_type = other DNA
aagaaatcatggtcaccggcatctgtgaagcaccaactcagtgccagttacggggttcagggcaccacaggtgttcactgatttaatcctaataaaggaatcctttctccgatgaggaag

SEQ ID NO: 7645 - DNA, 120 bp, synthetic construct
  misc_feature 1..120: note = Artificially Synthesized Probe
  source 1..120: mol_type = other DNA
ctgacccacaagattgtgaacaaaatgaaacagtcactttaagccactaaattatggggtgatctgctacaaggcaaaaggagctggggtacaaaccaactgcaggggggtttggtgggt

SEQ ID NO: 7646 - DNA, 120 bp, synthetic construct
  misc_feature 1..120: note = Artificially Synthesized Probe
  source 1..120: mol_type = other DNA
cactcgatggggcgacagaggagacagcgtggagcccctagtgccacacactcgatggggcgacagaggagacagcgtggagtccctagtgccacacactcgatggggcgacagaggaga

SEQ ID NO: 7647 - DNA, 120 bp, synthetic construct
  misc_feature 1..120: note = Artificially Synthesized Probe
  source 1..120: mol_type = other DNA
gtgccacacactcgatggggcgacagaggagacagcgtggagtccctagtgccacacactcgatggggcgacagaggagacagtgtggagtccctactgccacacactcgatggggcgac

SEQ ID NO: 7648 - DNA, 120 bp, synthetic construct
  misc_feature 1..120: note = Artificially Synthesized Probe
  source 1..120: mol_type = other DNA
cgtggagtccctggtgccacacactcgatggggcgacagaggagacagcgtggagtccctagtgccacacactcgatggcgtgagagaggagacagcgtggagtccctagtgccacacac

SEQ ID NO: 7649 - DNA, 120 bp, synthetic construct
  misc_feature 1..120: note = Artificially Synthesized Probe
  source 1..120: mol_type = other DNA
gacagaggagacagcgtggagtccctggtgccacacactcgatggggcgacagaggagacagcgtggagtccctagtgccacacactcgatggcgtgagagaggagacagcgtggagtcc

SEQ ID NO: 7650 - DNA, 120 bp, synthetic construct
  misc_feature 1..120: note = Artificially Synthesized Probe
  source 1..120: mol_type = other DNA
tgtggtcattggagctgggacccggagactgggaatcaggcagcttccaaacaaactgtgtggggtagagccaagatttgaacccagggtcctagaggagaggtggacaggaggagagag

SEQ ID NO: 7651 - DNA, 120 bp, synthetic construct
  misc_feature 1..120: note = Artificially Synthesized Probe
  source 1..120: mol_type = other DNA
cttctttcctttcttctatctttcctttcaagctccaaacttgcactttgatttccttcaagagtccacccttatctgtacctggttaaaataatcagcgaaaaccaaagccatcccgaa

SEQ ID NO: 7652 - DNA, 120 bp, synthetic construct
  misc_feature 1..120: note = Artificially Synthesized Probe
  source 1..120: mol_type = other DNA
tctgacatctgcttataccgtacacaggtgctcacacctgcccaaacacctgcctacaccttctgacacctgcttttacctgttcactgctgctcacacctgcccatacctgtttacacc

SEQ ID NO: 7653 - DNA, 120 bp, synthetic construct
  misc_feature 1..120: note = Artificially Synthesized Probe
  source 1..120: mol_type = other DNA
gctaccatttacctaacacacgtctttaaatccacccaaaggataactgcatgaattttaacaggaaactctttatcactgccttaggagaggaccattatctcttgccaaaaatgagag

SEQ ID NO: 7654 - DNA, 120 bp, synthetic construct
  misc_feature 1..120: note = Artificially Synthesized Probe
  source 1..120: mol_type = other DNA
agactgagagagacaaagagagacagacacaaggagatagagtgacacagagagacagaccacagagagagatgcagagagaggggaatcatttcttgtgaggggcctggcctcaggcag

SEQ ID NO: 7655 - DNA, 120 bp, synthetic construct
  misc_feature 1..120: note = Artificially Synthesized Probe
  source 1..120: mol_type = other DNA
tgtttataatttaccttatcttgctggaacccttctgtttcctgggaagttaccagaacctgatcaccagcagaattggaatgtgcagtatgatctatacatgtttacacacatgccaca

SEQ ID NO: 7656 - DNA, 120 bp, synthetic construct
  misc_feature 1..120: note = Artificially Synthesized Probe
  source 1..120: mol_type = other DNA
ccctccctatacccattacacacacaccacacccccttcccggggccctccctatacccattacacacacaacacacccccttcccggggccctccctatacccattacacacacgccac

SEQ ID NO: 7657 - DNA, 120 bp, synthetic construct
  misc_feature 1..120: note = Artificially Synthesized Probe
  source 1..120: mol_type = other DNA
ccctatacccattacacacacgccacacccccttcccggggccctccctatacccattacacacacgccacacccccttcccggggccctccctatacccattacacacacgccacaccc

SEQ ID NO: 7658 - DNA, 120 bp, synthetic construct
  misc_feature 1..120: note = Artificially Synthesized Probe
  source 1..120: mol_type = other DNA
caatcacccatcaatcaccggccaatcacccgtcaatcaccgtctcttgccagctttgcatcctaaatattttttggaagagtcccgtgtccgccacaccccacaagaaagaaagttcac

SEQ ID NO: 7659 - DNA, 120 bp, synthetic construct
  misc_feature 1..120: note = Artificially Synthesized Probe
  source 1..120: mol_type = other DNA
gtggtgatggggacaggtgagtctcctgtccctcaccaggagaactgggttctggttctcagcctgtctcccaccgtagagcaacctctgaccgccagacaggacaccaaggtgaaaact

SEQ ID NO: 7660 - DNA, 120 bp, synthetic construct
  misc_feature 1..120: note = Artificially Synthesized Probe
  source 1..120: mol_type = other DNA
ccggcacccacacccccagcccagcctgctgaccctcgcccagccagggccctccgtggtccggcacccacacccccagcccagcctgctgaccctcgcccagccagggccctccgtggt

SEQ ID NO: 7661 - DNA, 120 bp, synthetic construct
  misc_feature 1..120: note = Artificially Synthesized Probe
  source 1..120: mol_type = other DNA
aaggcacctgcaaacagtcctgacatccttcacagatctggtctcaattcaatttattaaactagatattttaaagcacttggtcggggggatttctggtatgatatcaggcattcaaag

SEQ ID NO: 7662 - DNA, 120 bp, synthetic construct
  misc_feature 1..120: note = Artificially Synthesized Probe
  source 1..120: mol_type = other DNA
cccacctttccaaggtcccaatccattgtcacctgggggcaattcataaacagcaaaacaaagggcatgaaaaataaagtagacatgggaaatgccatcttttgtgattctacaaaattt

SEQ ID NO: 7663 - DNA, 120 bp, synthetic construct
  misc_feature 1..120: note = Artificially Synthesized Probe
  source 1..120: mol_type = other DNA
aataattctaaaacgtcagccgacttagcctggccccatctctgtgaaatcatgcattggtatgctagttatattttttctaatatgtattgagagtgcatcagtgctgcaaatcccctg

SEQ ID NO: 7664 - DNA, 120 bp, synthetic construct
  misc_feature 1..120: note = Artificially Synthesized Probe
  source 1..120: mol_type = other DNA
tttatcatatacaacaggtatttctcctgttttcttaacaacaaccatcatttcagggtgatctctgatgaagtgaagagccagattctctgccacatctattgtagcgggtagcgtctt

SEQ ID NO: 7665 - DNA, 120 bp, synthetic construct
  misc_feature 1..120: note = Artificially Synthesized Probe
  source 1..120: mol_type = other DNA
acactgtgatggtcgaaacaccgcagaggtgcccactttagtgtggttgatttgtgttatatgagtttcaccaatggcccattgagtgctttgatcttccacagaccctgataacaagaa

SEQ ID NO: 7666 - DNA, 120 bp, synthetic construct
  misc_feature 1..120: note = Artificially Synthesized Probe
  source 1..120: mol_type = other DNA
caattttaactttggtttcagtcaacacttgccaccttcaatcagaggcactgaaacgaaaagttaaaattaaaactggagtacgttaaggatgaaaagcacaggaaggcatgtccagtt

SEQ ID NO: 7667 - DNA, 120 bp, synthetic construct
  misc_feature 1..120: note = Artificially Synthesized Probe
  source 1..120: mol_type = other DNA
gtcttgcggacgccgacactgacatttaatgttatttaaaaactgtttctgagaaggcagagaagcacgtgccacgttttagaaagagtttgcatccacaatggaaagagtgaaatgtag

SEQ ID NO: 7668 - DNA, 120 bp, synthetic construct
  misc_feature 1..120: note = Artificially Synthesized Probe
  source 1..120: mol_type = other DNA
acctaggtaatcctttgcccacagtgaaaattgttaggacttaaaaagtgaggtggttatccctgcacctaaagttccattccccaaagagatcacggaaatgccgtcctggagcagggc

SEQ ID NO: 7669 - DNA, 120 bp, synthetic construct
  misc_feature 1..120: note = Artificially Synthesized Probe
  source 1..120: mol_type = other DNA
tggaaattttcaagtgtatgcaaaaggagaaagatgagcagaatgtgttctcagtttcagcgatgatcagcatcgtgtccttcttatttttttctctcgcctattactcctgatcctcca

SEQ ID NO: 7670 - DNA, 120 bp, synthetic construct
  misc_feature 1..120: note = Artificially Synthesized Probe
  source 1..120: mol_type = other DNA
tttcattgatgtattttgaaatggcttgcaatgctgtgtcttgtgggggaactcaacattctgtagagacttccctttcttttggaggtcttttctgatccagacaagattaaccagaag

SEQ ID NO: 7671 - DNA, 120 bp, synthetic construct
  misc_feature 1..120: note = Artificially Synthesized Probe
  source 1..120: mol_type = other DNA
atccattcacctgctgacgcatatgaggctactgtgagtaacgccgctgtgaacgtttgtgtggaagcctttgcatgtacgcatgtctcatttattttgagaaaaacacctgggagtgga

SEQ ID NO: 7672 - DNA, 120 bp, synthetic construct
  misc_feature 1..120: note = Artificially Synthesized Probe
  source 1..120: mol_type = other DNA
atttttaaaatgtcaaacacaaggcgatccttttcctgctaattggggattatcaagtgcattttgaatgaagaaaaataaccttcaagccgttagtactggctcctgtgaaccctgagg

SEQ ID NO: 7673 - DNA, 120 bp, synthetic construct
  misc_feature 1..120: note = Artificially Synthesized Probe
  source 1..120: mol_type = other DNA
ttcctgctcctgtgggagctgcattcatttgcaagaattaattgaggatctactatgtgccacgccctgttcccacaaattggaatacaatcatgaactaaggaataaaaacaatccgtg

SEQ ID NO: 7674 - DNA, 120 bp, synthetic construct
  misc_feature 1..120: note = Artificially Synthesized Probe
  source 1..120: mol_type = other DNA
aataaggcagaatcctttgtggagacagttacgggagggggtgctatttgcagatggataactgggttttcagttgtgaaaattaaatttggaccggtttaaaattgcattttgacgtga

SEQ ID NO: 7675 - DNA, 120 bp, synthetic construct
  misc_feature 1..120: note = Artificially Synthesized Probe
  source 1..120: mol_type = other DNA
ccatacacaaggtgaccccctcagcccagaagctcacttcccacgccccttgcactaggctaaggcctcgggggcactcgtggccatctccagtgactgagcagggcctgagaggccgga

SEQ ID NO: 7676 - DNA, 120 bp, synthetic construct
  misc_feature 1..120: note = Artificially Synthesized Probe
  source 1..120: mol_type = other DNA
tgtattgtaaacattctcttaggacccactgaaccacatgtggttcagcgtggaggtcacagagagatgagaccccagcctcatgatgctgacattccagtgggagacacagcaaataag

SEQ ID NO: 7677 - DNA, 120 bp, synthetic construct
  misc_feature 1..120: note = Artificially Synthesized Probe
  source 1..120: mol_type = other DNA
gggactttgtagatgtatccggttgagtatcttgagatgaaatcctcctggatttggggtgagctctgtgtctagtctgggtcctcatgagaagaagagaggatgcagacacatgggaga

SEQ ID NO: 7678 - DNA, 120 bp, synthetic construct
  misc_feature 1..120: note = Artificially Synthesized Probe
  source 1..120: mol_type = other DNA
gctcagccagggagatttcatcactcagaaaaatgctttctgacaagaaaacgtcactccactcatctgtagaggaaaaagcttggattgcacagttttcatgaacttgcaaaatgtgta

SEQ ID NO: 7679 - DNA, 120 bp, synthetic construct
  misc_feature 1..120: note = Artificially Synthesized Probe
  source 1..120: mol_type = other DNA
cagcactcattctcaatgacctctcatttgatttagaatccatgttcggtacccacttcttgccccagaatatcgacggccttttattgatggatctcagcggccactcgctttataaac

SEQ ID NO: 7680 - DNA, 120 bp, synthetic construct
  misc_feature 1..120: note = Artificially Synthesized Probe
  source 1..120: mol_type = other DNA
gaagacaatgaagaccaggatgactcttccaaatctcgcttttctgcaaggctcaacccagccccaagaaaaagataaaggagcgcaaagattttccaacaagtcccaaatgcccatcaa

SEQ ID NO: 7681 - DNA, 120 bp, synthetic construct
  misc_feature 1..120: note = Artificially Synthesized Probe
  source 1..120: mol_type = other DNA
tgtgctgcaaagtcaagaacctgacccagccacccactgataaagagatcatcctggatttagggcaggtcctaaatccaacgacggtgtccttaaagagagggcagaggaaatgcaaca

SEQ ID NO: 7682 - DNA, 120 bp, synthetic construct
  misc_feature 1..120: note = Artificially Synthesized Probe
  source 1..120: mol_type = other DNA
gattttagtaccacagccattggcagggcaacactggtgtgaagctagacaaagagaaagatgcattgaaatagataaaggagtaaagtgaagaaataatactgcttcggaaaatgggga

SEQ ID NO: 7683 - DNA, 120 bp, synthetic construct
  misc_feature 1..120: note = Artificially Synthesized Probe
  source 1..120: mol_type = other DNA
gactttatcaaaataaaaaaccatctgttctttgaaagacactcaggtgtagaaagccaagccacagccgactggagaaaatactttcaaagcacgcatctgataaaggacttgtatcca

SEQ ID NO: 7684 - DNA, 120 bp, synthetic construct
  misc_feature 1..120: note = Artificially Synthesized Probe
  source 1..120: mol_type = other DNA
gtggggcataggaagctgggcccatggtcagacatggtttcagctcaaataccagaagtgaccgtgaagaaagcaggaatttggctccatggattcggggccgagggcggaatcgtgaaa

SEQ ID NO: 7685 - DNA, 120 bp, synthetic construct
  misc_feature 1..120: note = Artificially Synthesized Probe
  source 1..120: mol_type = other DNA
aatggttctgagtctacgactgtaatcaataggaactcaatttgacttcaattgacttcaattctttctttaagaagaaatggattggatgtgtctgaggtcccaggtggagctgtcggc

SEQ ID NO: 7686 - DNA, 120 bp, synthetic construct
  misc_feature 1..120: note = Artificially Synthesized Probe
  source 1..120: mol_type = other DNA
tgtgtgtttcttccaggtttctttatcccattttgaaccaattttatcacaccataaaattaagagattgtcctctttaaaacaatgaagccaggacagatccaccaagcctccctccga

SEQ ID NO: 7687 - DNA, 120 bp, synthetic construct
  misc_feature 1..120: note = Artificially Synthesized Probe
  source 1..120: mol_type = other DNA
attctttctggacttttctgtgttttccgcaggagaatgctcttacttcatgccattaatgtgcacctaacacctgacactcatcacaaacctttgtagacaaactgctgtttaaattgg

SEQ ID NO: 7688 - DNA, 120 bp, synthetic construct
  misc_feature 1..120: note = Artificially Synthesized Probe
  source 1..120: mol_type = other DNA
actcagcctgagtggaacccgagggttctttgcaggacttaagtggcgccgtttctgtcagacagaaaataaactaagtttatggtatttggaaagcatcagagttcagcaagatcacgg

SEQ ID NO: 7689 - DNA, 120 bp, synthetic construct
  misc_feature 1..120: note = Artificially Synthesized Probe
  source 1..120: mol_type = other DNA
agcctcagagctgtgggtgagtctccaaatggttttgtttgaacgtaacattaaaagtctaagttgtggcttgggctgaattagaagctacagcaccacacacacatgcacacataagca

SEQ ID NO: 7690 - DNA, 120 bp, synthetic construct
  misc_feature 1..120: note = Artificially Synthesized Probe
  source 1..120: mol_type = other DNA
tctttctagcttaagccaatttgagatggattttctgtcacttgctgttgaaggagtcctggtccagcccaggtggatttcgtgcaaatgaaacccacataatgcaagtctgtgtggaag

SEQ ID NO: 7691 - DNA, 120 bp, synthetic construct
  misc_feature 1..120: note = Artificially Synthesized Probe
  source 1..120: mol_type = other DNA
tgttactgtgctgggatgtaggacggcttctcggataaggtcattcatttttatgattctgcttaatttggatttgccagtcttcctttcattatcccatgggccagtcttaataatcaa

SEQ ID NO: 7692 - DNA, 120 bp, synthetic construct
  misc_feature 1..120: note = Artificially Synthesized Probe
  source 1..120: mol_type = other DNA
tttctgccgggatagttggcctctgaggggttaaagccatgcagggaatccaagtctgagtttcaagtgggccgggctgagcttgcttttgtttacttctttaatcatccatggacgctt

SEQ ID NO: 7693 - DNA, 120 bp, synthetic construct
  misc_feature 1..120: note = Artificially Synthesized Probe
  source 1..120: mol_type = other DNA
aaaataccaaaaataaaataatcaggcatcaaacatacaagttatttgaggacttaaaaacagcacagcaggctggaacaggaggcccctaacccgatggtgtcatctctacatccacag

SEQ ID NO: 7694 - DNA, 120 bp, synthetic construct
  misc_feature 1..120: note = Artificially Synthesized Probe
  source 1..120: mol_type = other DNA
tttattcttatttcccacagggaaggcctaacaaggcttgaccaatcagtgaagggcattccccagactgctggctgtgactgggtcccagataagcacgtgacccactatgggccaatg

SEQ ID NO: 7695 - DNA, 120 bp, synthetic construct
  misc_feature 1..120: note = Artificially Synthesized Probe
  source 1..120: mol_type = other DNA
gtcaacagattccctttttgggttgagccatttctaattggattttatgtcttactgactgaactatcaggatggccagcagtaaggggtttcgttttggaggatgagggacacaaatgt

SEQ ID NO: 7696 - DNA, 120 bp, synthetic construct
  misc_feature 1..120: note = Artificially Synthesized Probe
  source 1..120: mol_type = other DNA
tgcaggggtgggctgggtgtgggagtgtgtgtgtcactggtgtcaaagcctcctcactttttttgggaaagaaatgggatataaatacatgtgtaaatatctatataaaattcacattct

SEQ ID NO: 7697 - DNA, 120 bp, synthetic construct
  misc_feature 1..120: note = Artificially Synthesized Probe
  source 1..120: mol_type = other DNA
gggtcccacatcccacagagggggaatccaatgggacccctgcagctctaagaacagaaaacccaattcagatgtgcttaaagaaaaaactaaaaatacgtgtgtgcgcgtgtgtgcgtg

SEQ ID NO: 7698 - DNA, 120 bp, synthetic construct
  misc_feature 1..120: note = Artificially Synthesized Probe
  source 1..120: mol_type = other DNA
tacttggagaccttcctctgtcagatggctctgatgtttccactgttgctgtgagcaggaaagggttaacttggcagctggctcctccacaccctgagcgcccacatccggcccctcctt

SEQ ID NO: 7699 - DNA, 120 bp, synthetic construct
  misc_feature 1..120: note = Artificially Synthesized Probe
  source 1..120: mol_type = other DNA
ccaaaccgaagtcattccagccccatgcctgtagctggcgccacatgaaaacaccactgtgttcttatttatggagcatgtttctttaaactggcctattttaaaactaaatgcattttt

SEQ ID NO: 7700 - DNA, 120 bp, synthetic construct
  misc_feature 1..120: note = Artificially Synthesized Probe
  source 1..120: mol_type = other DNA
tcagccaaactttatccgagcaacaatgccaattaatctggcgcttgtcgcggctactccctcagggcaggtgtgagggtcagcgaccaagctccatcctgagtggcactgaggcaaagc

SEQ ID NO: 7701 - DNA, 120 bp, synthetic construct
  misc_feature 1..120: note = Artificially Synthesized Probe
  source 1..120: mol_type = other DNA
tcactcactttctgggccggtagtcggggatgctccgatcgagggagatgcggtcgctgagctgagcgttgtagccgtactcctcatacttgccttccgcctcctggccgtcatcacgca

SEQ ID NO: 7702 - DNA, 120 bp, synthetic construct
  misc_feature 1..120: note = Artificially Synthesized Probe
  source 1..120: mol_type = other DNA
agaggatgcgggaactccgctcagtctctatcaacccgaaactgctctgatggtcaggcctactaatgttaaaaatattaacccgaaaattgcaacggctctaagattaggtattttaaa

SEQ ID NO: 7703 - DNA, 120 bp, synthetic construct
  misc_feature 1..120: note = Artificially Synthesized Probe
  source 1..120: mol_type = other DNA
ggctttgagcctcccggaacctctggactttctggaatattccattttaaatgagtaaacaaagtgtccgtatttatgtaggactgaaggatacagattggacgtagaattgaaaaatga

SEQ ID NO: 7704 - DNA, 120 bp, synthetic construct
  misc_feature 1..120: note = Artificially Synthesized Probe
  source 1..120: mol_type = other DNA
ccgttttcattctcttggttttcatctcatcggcttgatcttttgtcgtgccatgttgccaactagcctgtccattgaattggttttgttgtcatatatttaatcccaaaagaggcttct

SEQ ID NO: 7705 - DNA, 120 bp, synthetic construct
  misc_feature 1..120: note = Artificially Synthesized Probe
  source 1..120: mol_type = other DNA
cattgccacccaacaggctgttctctgtgctgtcctctgcccagtccaggaatagacagcacaggaggaggaagcagaggcagaaacagccacaagctcatgtccacagcacccacatcc

SEQ ID NO: 7706 - DNA, 120 bp, synthetic construct
  misc_feature 1..120: note = Artificially Synthesized Probe
  source 1..120: mol_type = other DNA
cgcccacgtcctcagcgcccacaaccacagcacccacgtccacatcacccacgtccatagcacccacatccacagcacccacatccacagcacccacaaccacagcacccacgtccacag

SEQ ID NO: 7707 - DNA, 120 bp, synthetic construct
  misc_feature 1..120: note = Artificially Synthesized Probe
  source 1..120: mol_type = other DNA
attttcctccctgcctcattttcctcccagaactcagaactcatcaccatctaaaatcatcccctccgctacgctctctgcttcccctcaacgtgcaagagacaggactttgtcctgcct

SEQ ID NO: 7708 - DNA, 120 bp, synthetic construct
  misc_feature 1..120: note = Artificially Synthesized Probe
  source 1..120: mol_type = other DNA
aggtaacttggttttccatgtgtttctgcataaagatgccttatttaatacctattgacgattcttagagccaacagctccatgacccatgctggagccaagcttctccacacacgcatt

SEQ ID NO: 7709 - DNA, 120 bp, synthetic construct
  misc_feature 1..120: note = Artificially Synthesized Probe
  source 1..120: mol_type = other DNA
ccacgagcatttggggattacagatgaattttagggagtaggaacatttgcaaacacagaatctgtgaatgatgtggctgacagtactttgatatcctggtgaccactatggacacattg

SEQ ID NO: 7710 - DNA, 120 bp, synthetic construct
  misc_feature 1..120: note = Artificially Synthesized Probe
  source 1..120: mol_type = other DNA
cctgtctcttatctccagcgtggcctcatatcttctttcacaaagaattccttccaagaggcaggattgcttgatcccaccaggaagcaaggacaaacgatgaagaaactggtaaaagtg

SEQ ID NO: 7711 - DNA, 120 bp, synthetic construct
  misc_feature 1..120: note = Artificially Synthesized Probe
  source 1..120: mol_type = other DNA
ttcctcctccagacagaatcaacactgcaagcttgtcatcttatccttgaataagatgtaattttgagaataatgggaaatttgcatctattagctcagcctttgaaaggtctgtcccac

SEQ ID NO: 7712 - DNA, 120 bp, synthetic construct
  misc_feature 1..120: note = Artificially Synthesized Probe
  source 1..120: mol_type = other DNA
ctgagatgaccaagccacttccatcataaccaactcactcgagataactaactcactcccaggataatcaagacactgccaagataaccaactcactcccatgataatgaagtcactcca

SEQ ID NO: 7713 - DNA, 120 bp, synthetic construct
  misc_feature 1..120: note = Artificially Synthesized Probe
  source 1..120: mol_type = other DNA
agacaaccaagccaatcccacaataatcaactcactctcataataaccaactcacatccaagaaaactcactcactcctgagaaaatcaactcccaaaattaccaactcactcctgagat

SEQ ID NO: 7714 - DNA, 120 bp, synthetic construct
  misc_feature 1..120: note = Artificially Synthesized Probe
  source 1..120: mol_type = other DNA
acctaaccatacctgagatgaccaagccactcctgagataactcactcccataactcacccactcccaccacatctaacccatccctgagataaccaagccactgctgagataacccact

SEQ ID NO: 7715 - DNA, 120 bp, synthetic construct
  misc_feature 1..120: note = Artificially Synthesized Probe
  source 1..120: mol_type = other DNA
tgctcccaccacacctaactcatccctgagataaccaagccactgctgagataacccactcccatgataactaacccactcccaccacacctaacccacccctgagatgaccaagccact

SEQ ID NO: 7716 - DNA, 120 bp, synthetic construct
  misc_feature 1..120: note = Artificially Synthesized Probe
  source 1..120: mol_type = other DNA
aactgcaaagctctcaaagagggtgtccaaagggaccaagaaaggcaccacccctgtatggtggcaggcaaaggcgttaaatagccactaaaccatggtcgctccactttcaggagagga

SEQ ID NO: 7717 - DNA, 120 bp, synthetic construct
  misc_feature 1..120: note = Artificially Synthesized Probe
  source 1..120: mol_type = other DNA
atcagtattttcacactccatattattctgtaagatcacgtaatgcctcagcgcagttcgatccatgtatctggtgtctgccgcctgcattctgtttttatcactacgtcttgagtattt

SEQ ID NO: 7718 - DNA, 120 bp, synthetic construct
  misc_feature 1..120: note = Artificially Synthesized Probe
  source 1..120: mol_type = other DNA
accccgggcaccttgagcagcacagggccaccagggcatcttcatttaacacgagaggcagctgcccagaatccaccaccaaaaacggaagcagaggagagatgagaagcagcaccctct

SEQ ID NO: 7719 - DNA, 120 bp, synthetic construct
  misc_feature 1..120: note = Artificially Synthesized Probe
  source 1..120: mol_type = other DNA
ccggggcacaccctcacccagacacgccctcacccagacacgccctcacctgggcacatcctcaccggggcacaccctcacccagacacaccctcacccgggcacaccctcgcccgggca

SEQ ID NO: 7720 - DNA, 120 bp, synthetic construct
  misc_feature 1..120: note = Artificially Synthesized Probe
  source 1..120: mol_type = other DNA
tgggcacagcctcgcccgggcacacgctcacccagacacacccttgcccgggcacaccctcgcccggacacaccctcacccgggcacagaatcgcccagacacaccctcaccggggcaca

SEQ ID NO: 7721 - DNA, 120 bp, synthetic construct
  misc_feature 1..120: note = Artificially Synthesized Probe
  source 1..120: mol_type = other DNA
tgcaggggacccttacacaggcagcgttggaagcggctgtccgcaccggaaccgcctgcggagtgtgagggcgccggcacctgcccgggcctccccacggagctgacataactgccgggg

SEQ ID NO: 7722 - DNA, 120 bp, synthetic construct
  misc_feature 1..120: note = Artificially Synthesized Probe
  source 1..120: mol_type = other DNA
ccagtgtacagatttatatctctacatgtcagcagtggattcacattttggaagaaatggcattaagttaacaaatacgcactgggtctatctagatctgttcattaggcaggacagctg

SEQ ID NO: 7723 - DNA, 120 bp, synthetic construct
  misc_feature 1..120: note = Artificially Synthesized Probe
  source 1..120: mol_type = other DNA
agctgtagctcagtgaaatccactctgggcgtctggatgccagagctgtgaaagaagaaatgtgtgtcattttaggctgccccgtctgtggtgagctgtgacagcagccccaggaaaata

SEQ ID NO: 7724 - DNA, 120 bp, synthetic construct
  misc_feature 1..120: note = Artificially Synthesized Probe
  source 1..120: mol_type = other DNA
ttagatgaatgcagcaggatggtgggttgaatgagggccccaaaagctatctccactctgaacctgtggatgtgggagtaaggtctttccaggtataattaaggtaaggatttcaagatg

SEQ ID NO: 7725 - DNA, 120 bp, synthetic construct
  misc_feature 1..120: note = Artificially Synthesized Probe
  source 1..120: mol_type = other DNA
agtggaacttgctgggtggaatttctgagaaatatgtctaaaaaaggagactgctggaatctgaggttttcaccttttatccacagccctgtactgtttttcgtgcctggaaccaggact

SEQ ID NO: 7726 - DNA, 120 bp, synthetic construct
  misc_feature 1..120: note = Artificially Synthesized Probe
  source 1..120: mol_type = other DNA
aacatcaacttctaaaaagcaataaatacctgacaagatggcaagaaattgctaggccagaagtgaagggaaaatgggaatcagagaaatgagtgggcctgcaatttgctttttccctaa

SEQ ID NO: 7727 - DNA, 120 bp, synthetic construct
  misc_feature 1..120: note = Artificially Synthesized Probe
  source 1..120: mol_type = other DNA
actggtcttttaagattacctggggacccaaactaataacatattgtcaatagtgaaaagactgactgcccttctgataccatgaagtcatgaatattttgcaggacatggcaatacctg

SEQ ID NO: 7728 - DNA, 120 bp, synthetic construct
  misc_feature 1..120: note = Artificially Synthesized Probe
  source 1..120: mol_type = other DNA
cttcctcgtcttctctcgtagtccagcattccagatcctgtcttccctttctcaatgcttgtctgtcctcactctatagagtctcctactatatttattcaccctccactcatctaccca

SEQ ID NO: 7729 - DNA, 120 bp, synthetic construct
  misc_feature 1..120: note = Artificially Synthesized Probe
  source 1..120: mol_type = other DNA
ccatcctaccagtcaatcaatacttactaagcacatactatacatcaggcatcatgttatctgtctgtccaaatcctgccccacttgaactctctttctgtctccatctttgctaacttt

SEQ ID NO: 7730 - DNA, 120 bp, synthetic construct
  misc_feature 1..120: note = Artificially Synthesized Probe
  source 1..120: mol_type = other DNA
actgcaaagtgctcgagcctcagaatattaacaggcattttccaccattttctcaaaatagtgtgaaaatagccccttgcagaattcagaccccgtctgttcttttctgacttagaaata

SEQ ID NO: 7731 - DNA, 120 bp, synthetic construct
  misc_feature 1..120: note = Artificially Synthesized Probe
  source 1..120: mol_type = other DNA
cacgtccccatttcacgatgcatttttatgcccctattctgggaggaaacagagatcccctataaccgagcatatacttcctttaaaaatctatttagtgctatagcttcactaaaaaag

SEQ ID NO: 7732 - DNA, 120 bp, synthetic construct
  misc_feature 1..120: note = Artificially Synthesized Probe
  source 1..120: mol_type = other DNA
agcatggtcctattctacaccccacagagcacagcctgcaccctatggagcacggtcccatcctacaccccacagagcacagcctgcaccctacaccccacagagcacagcctcatccta

SEQ ID NO: 7733 - DNA, 120 bp, synthetic construct
  misc_feature 1..120: note = Artificially Synthesized Probe
  source 1..120: mol_type = other DNA
gcacctctagatttcattatttccctggcgctccacagggtcgaggatggcgtttcaaagaacaattgcacttggtttatttacttaaaaataaaacactgatgggcacactggctcatg

SEQ ID NO: 7734 - DNA, 120 bp, synthetic construct
  misc_feature 1..120: note = Artificially Synthesized Probe
  source 1..120: mol_type = other DNA
tgctccccatggttgaagctagttgtgatggtgaattctgcatccatagagagggccttggatgcccaggtggctggaagtattgcttccaggtgcgtctgtgcgagatttgagtctgaa

SEQ ID NO: 7735 - DNA, 120 bp, synthetic construct
  misc_feature 1..120: note = Artificially Synthesized Probe
  source 1..120: mol_type = other DNA
acagacgcccccacctcggatctttctggattcctggggaatctgtcgtctctacagaagcttgagttcatattacttaacagtttcttttaaatcgactcatcttttaagttaaattaa

SEQ ID NO: 7736 - DNA, 120 bp, synthetic construct
  misc_feature 1..120: note = Artificially Synthesized Probe
  source 1..120: mol_type = other DNA
agaatcaaggccatggtacaccagctgctccggagaccttggtttcccgtctgctaatgagtcgcccgtctcatctgggtcctggcagatccgagtgaaactgaaaatgtgcttcaagca

SEQ ID NO: 7737 - DNA, 120 bp, synthetic construct
  misc_feature 1..120: note = Artificially Synthesized Probe
  source 1..120: mol_type = other DNA
ggggcgtcctcccctccaaacccccactgtctctcctcgtcttagaagggccacagtcattggatttagggcccactaatccccagtcctggctgagggcatcttatctaattacttctg

SEQ ID NO: 7738 - DNA, 120 bp, synthetic construct
  misc_feature 1..120: note = Artificially Synthesized Probe
  source 1..120: mol_type = other DNA
atcctgcccgtttgtcctcagtgggagatctgacatggaaatttacagacttatttttgtcaagtttccagccaatgaaggataaactgtcctttcagaaaatagttccaagactctgaa

SEQ ID NO: 7739 - DNA, 120 bp, synthetic construct
  misc_feature 1..120: note = Artificially Synthesized Probe
  source 1..120: mol_type = other DNA
atttgggaaataaaactcacaaatgaataggaaaagctttctgctggaaaccgcacttcctagcaaggagaatttctcaaagcgtttccaaaatggaaacgcttacgcagagcagagcag

SEQ ID NO: 7740 - DNA, 120 bp, synthetic construct
  misc_feature 1..120: note = Artificially Synthesized Probe
  source 1..120: mol_type = other DNA
actcagtcaccttctactcacgggtgcgctggagacacacaagtgtctcttaagttcatttaaacaaaacaatgaattgtttggagaaaaaccctctcgcttgctcactggacagatatt

SEQ ID NO: 7741 - DNA, 120 bp, synthetic construct
  misc_feature 1..120: note = Artificially Synthesized Probe
  source 1..120: mol_type = other DNA
gaaaattttcttaaaggcagaagggtttgaatgcccagacaactgaatggagacagttcttccccttcttttccttgagtttagaggctctgaaatttagcgtttatgagacttactgtg

SEQ ID NO: 7742 - DNA, 120 bp, synthetic construct
  misc_feature 1..120: note = Artificially Synthesized Probe
  source 1..120: mol_type = other DNA
aaaggttgagggcaaagacagaggcagacagatggcaggggccgttcggagaaaggctgacaagggaggacagctaggatgaaggaaagaaggagaaacaattttaaaagaaagaaagga

SEQ ID NO: 7743 - DNA, 120 bp, synthetic construct
  misc_feature 1..120: note = Artificially Synthesized Probe
  source 1..120: mol_type = other DNA
agcctgttacggatgctttctggaggaggtttgctggggctgccaaggcagaagcctgaatcatcggcacggaacggaaagccacaccagctagtgatgtaggcacatgcaaactttctc

SEQ ID NO: 7744 - DNA, 120 bp, synthetic construct
  misc_feature 1..120: note = Artificially Synthesized Probe
  source 1..120: mol_type = other DNA
acggtcccccagcgtgcccaccttggcgtgtcggctgcgcacccggcggtcgccgctcacgatgcgcacgagctcctgggagcggccctgcaggcggcagtacacggagaacaggacgat

SEQ ID NO: 7745 - DNA, 120 bp, synthetic construct
  misc_feature 1..120: note = Artificially Synthesized Probe
  source 1..120: mol_type = other DNA
aaggggaccccagtgctctcgagatcaccgtcccttcccgagaaggtccagctccgggctcccgaacccaccctctctcagaaggtcccggcgcaaagacggtgccaccaggcacggcca

SEQ ID NO: 7746 - DNA, 120 bp, synthetic construct
  misc_feature 1..120: note = Artificially Synthesized Probe
  source 1..120: mol_type = other DNA
tgctggagcgtgccattggcttgcgcaagaaagttacttggagtctgagagatgctggggaaagtttgcagttcacttcgcatggtccagtagaaccagtttctcctcccctccccttcc

SEQ ID NO: 7747 - DNA, 120 bp, synthetic construct
  misc_feature 1..120: note = Artificially Synthesized Probe
  source 1..120: mol_type = other DNA
tttatactgatcaaaacgtcttcagcctttgacatacgtgtttttatttgcgtaaacgggagcttattttaataatcaggtgatggcgattcaccgggtaaaccctaatgtgcgcaacct

SEQ ID NO: 7748 - DNA, 120 bp, synthetic construct
  misc_feature 1..120: note = Artificially Synthesized Probe
  source 1..120: mol_type = other DNA
aaaatggctggtttattaacgtggtcttccgcagatgctaaacaaaggctatcttacatagcacaattatctgatatgtgcaccatctcatttaatttgcacaactctgtggcttggagc

SEQ ID NO: 7749 - DNA, 120 bp, synthetic construct
  misc_feature 1..120: note = Artificially Synthesized Probe
  source 1..120: mol_type = other DNA
atgttattatcactctcttcttaaacgtcgtcataccctatcatggtacctacattcttcctcctttgctgctgagaccttcagtggggtgcatcataatatatcattctgtgctcatag

SEQ ID NO: 7750 - DNA, 120 bp, synthetic construct
  misc_feature 1..120: note = Artificially Synthesized Probe
  source 1..120: mol_type = other DNA
ataagttcaattcgattaaattatttccatgctacagggaacaaagaactggttggaacatggcttccggttccttgagagacttctcagcaatctacagatgctctaaagcacttagtc

SEQ ID NO: 7751 - DNA, 120 bp, synthetic construct
  misc_feature 1..120: note = Artificially Synthesized Probe
  source 1..120: mol_type = other DNA
ataggcagtgggttatgagaggtgaggcgaactgatttcaatagtctgtgtctttcaggtccttaatcacttgcataaaaagttgaagaacatgtcaaagaagtctgaagcatccaagaa

SEQ ID NO: 7752 - DNA, 120 bp, synthetic construct
  misc_feature 1..120: note = Artificially Synthesized Probe
  source 1..120: mol_type = other DNA
cttgaataaaggacagctcttcctgactttccttctttatgaacagtaatgtggctaaaaagccatctgatagtccagagtcaaaaccagtggtagagaattggttatagagcacaaaca

SEQ ID NO: 7753 - DNA, 120 bp, synthetic construct
  misc_feature 1..120: note = Artificially Synthesized Probe
  source 1..120: mol_type = other DNA
tgtttggagcatcagggaagggagagattaatttcccttgggagggattgggctcgtcaaactttaactgagaagacaccattgatctgtgataaatgtgtgttaatgattcaaaagatt

SEQ ID NO: 7754 - DNA, 120 bp, synthetic construct
  misc_feature 1..120: note = Artificially Synthesized Probe
  source 1..120: mol_type = other DNA
tgtggtgatggtggtggatggtggtggtggtcacagtggtggtggtgttggtgttggtggtggtcatgatggtcatggtggtgatgatggtggtcatggtggtcatggtggcgattgtgg

SEQ ID NO: 7755 - DNA, 120 bp, synthetic construct
  misc_feature 1..120: note = Artificially Synthesized Probe
  source 1..120: mol_type = other DNA
gcacagaaaattgctactggtgcacacgtgttcatcatttgattggtaatggaagatgtgacagggatttggctacttgtttccagccctttctctcaatgtataagtaaagttcccttt

SEQ ID NO: 7756 - DNA, 120 bp, synthetic construct
  misc_feature 1..120: note = Artificially Synthesized Probe
  source 1..120: mol_type = other DNA
tcaaaatgggatagacacccatactggatggttgcttcctggagaaaattggattaaaggacctcttgatgtcctatcaagccactgggttcttttaatgtttgctttttttgttgtttc

SEQ ID NO: 7757 - DNA, 120 bp, synthetic construct
  misc_feature 1..120: note = Artificially Synthesized Probe
  source 1..120: mol_type = other DNA
cagccctttctaaggaaaggagatgcttcagccttaggggttgataccaagcattttttattgcctttaaattgaggtggggaagacaactttccttttgttgtgacttttatgtaattc

SEQ ID NO: 7758 - DNA, 120 bp, synthetic construct
  misc_feature 1..120: note = Artificially Synthesized Probe
  source 1..120: mol_type = other DNA
tgattcttatccatggctctaagagcaatgggactagtaaaaattaaaaggtaaacttggaatgagtcacagacacacaaagttaacaaacactgccagagaaaacactccggcctcagg

SEQ ID NO: 7759 - DNA, 120 bp, synthetic construct
  misc_feature 1..120: note = Artificially Synthesized Probe
  source 1..120: mol_type = other DNA
cttactttgctacctcatgtcaatccttgaagagctggcatctcatgcgttatagtctggttgtcatttctattgcagtgggactccagttcatgggaagtgataagaagagtctttttg

SEQ ID NO: 7760 - DNA, 120 bp, synthetic construct
  misc_feature 1..120: note = Artificially Synthesized Probe
  source 1..120: mol_type = other DNA
tttagagtatttctgtttagaaaacagactggtggccacaggtaaacccttcatcacatctgtatgctgtgatgggaaggccaggggagggggtctgctttcctgctccatgaaacccag

SEQ ID NO: 7761 - DNA, 120 bp, synthetic construct
  misc_feature 1..120: note = Artificially Synthesized Probe
  source 1..120: mol_type = other DNA
gggtaagctgccaaggcttggggcttacacctgctaaagcgatggcttgagctatatgttggcccctattagccacagctgggacacaggacaccaaaccccaagactacacaaagaagc

SEQ ID NO: 7762 - DNA, 120 bp, synthetic construct
  misc_feature 1..120: note = Artificially Synthesized Probe
  source 1..120: mol_type = other DNA
atgctctaaaatattacagcctggactatgtctgagagaaagaagttacttgagtcctaacctttggccaagaggctgaaaggtgcacctctttgcgcttaatgttccttttttcctatg

SEQ ID NO: 7763 - DNA, 120 bp, synthetic construct
  misc_feature 1..120: note = Artificially Synthesized Probe
  source 1..120: mol_type = other DNA
cattgccttttctttgaatccaaagacagagttttcaattaatcacaaactaagctatctagctcttgtctttcaacatgtgtggaacagacgaggttgccctgaggcttaattccagtc

SEQ ID NO: 7764 - DNA, 120 bp, synthetic construct
  misc_feature 1..120: note = Artificially Synthesized Probe
  source 1..120: mol_type = other DNA
tcaggaaggcctataaacaagtgttcaagtgtcacattcgcaaagattcacacctgagtgatactaaagaaagtaaaagtcgaatagacaccccaccatcaaccaattgtactcatgtgt

SEQ ID NO: 7765 - DNA, 120 bp, synthetic construct
  misc_feature 1..120: note = Artificially Synthesized Probe
  source 1..120: mol_type = other DNA
agtcaattcagtgttgtactggtgacctgggatgcagtagtaggcactgttgattcaaatttatcctgtgaaactggctttatagagttaacaaaacagagtcagagaccactgtcttaa

SEQ ID NO: 7766 - DNA, 120 bp, synthetic construct
  misc_feature 1..120: note = Artificially Synthesized Probe
  source 1..120: mol_type = other DNA
ggagcagaaaaattttatcctgacgatgatacttcctgtgatttgtggaacttgaagttgctgttgcaaactccagaacaacttctttgggtgtgaactcacaaaactgtgtaaagaagt

SEQ ID NO: 7767 - DNA, 120 bp, synthetic construct
  misc_feature 1..120: note = Artificially Synthesized Probe
  source 1..120: mol_type = other DNA
atacaatgaccaattctgaagcaccttcttttccgtcactaaataaagacagcttcccaaggacacactttttctcccagcatcaggttgagggagaaatattgcttatacctttgaagt

SEQ ID NO: 7768 - DNA, 120 bp, synthetic construct
  misc_feature 1..120: note = Artificially Synthesized Probe
  source 1..120: mol_type = other DNA
ttccttttcagtcatggccatggctatctgtaaacaccaaaatgctcatgctgaagcagcattacattgaggaaaataacctattgggcagcttcatcatgttcttgctttaaatgattt

SEQ ID NO: 7769 - DNA, 120 bp, synthetic construct
  misc_feature 1..120: note = Artificially Synthesized Probe
  source 1..120: mol_type = other DNA
aacctcagctgaattttctctctgaatcttttcaatgttggctccatttgccatactcagacaattgcttgaagagctgaactgttagctcaagatttcgttggcactgttggatagaaa

SEQ ID NO: 7770 - DNA, 120 bp, synthetic construct
  misc_feature 1..120: note = Artificially Synthesized Probe
  source 1..120: mol_type = other DNA
cagctcctcttcttctgctcagccaggtgattcttacctccattggcctttggatgtctgcgtaataatttgttgagaatcattagagaacaactaatccaaaaaatctatcatccttta

SEQ ID NO: 7771 - DNA, 120 bp, synthetic construct
  misc_feature 1..120: note = Artificially Synthesized Probe
  source 1..120: mol_type = other DNA
tcagtggaaatctgcccattttgttgaaaagaaaggaaacagggtacacaaatgctgtttgggaacattgtgtcaggatcacctagctttgacgatgagagtgttttttaaaacggaaac

SEQ ID NO: 7772 - DNA, 120 bp, synthetic construct
  misc_feature 1..120: note = Artificially Synthesized Probe
  source 1..120: mol_type = other DNA
aagaaggatttggaaaatgtcagtgagtttgaaactggctgtacagttgaatgagctgggcagttgaaagtacccgtgatgctctggccttaccttagatcagagattcttatattttat

SEQ ID NO: 7773 - DNA, 120 bp, synthetic construct
  misc_feature 1..120: note = Artificially Synthesized Probe
  source 1..120: mol_type = other DNA
gaaagcagtgctgaatgtggatcttcttatgccagatactgttataattattctctagagagctggccatacaatttatctcattatttatagatctagcatgaatgccagtaagctgac

SEQ ID NO: 7774 - DNA, 120 bp, synthetic construct
  misc_feature 1..120: note = Artificially Synthesized Probe
  source 1..120: mol_type = other DNA
atatggctagaaacaatggtcctactccccagcttagagatctcactggagagtctacagaaaacctctaagaatggatgaaatctcacagggagagagaatagagtaagataaggctaa

SEQ ID NO: 7775 - DNA, 120 bp, synthetic construct
  misc_feature 1..120: note = Artificially Synthesized Probe
  source 1..120: mol_type = other DNA
aaaaaaaaaaaagggccaggcacagtggcacacacctgtagtcccagcactttgggaggccaaggtgggcaggcagatttcctgagctcagaagttcgagaccaccctgggcaacatggt

SEQ ID NO: 7776 - DNA, 120 bp, synthetic construct
  misc_feature 1..120: note = Artificially Synthesized Probe
  source 1..120: mol_type = other DNA
ggtagagaacgactgctcgggacacttttccaagttgccttggggaatgttgatacaagcattttttatttttatatgtggtttttatttttattttttattttcttggagatggattct

SEQ ID NO: 7777 - DNA, 120 bp, synthetic construct
  misc_feature 1..120: note = Artificially Synthesized Probe
  source 1..120: mol_type = other DNA
gtggtatcaatttagagcccacatagcaagtggcttcaaggggtaattatttggctccatgggggtgggggaaggtgagatatgactgctgttacatgctgtcacttttttttttttttt

SEQ ID NO: 7778 - DNA, 120 bp, synthetic construct
  misc_feature 1..120: note = Artificially Synthesized Probe
  source 1..120: mol_type = other DNA
gtgagattcaatgagatgatgggaaatgatcattagacttctcagtaggggcatgtggcagagacaatgctatacattcacaaatccatttccttttgctcttggacagctagattacat

SEQ ID NO: 7779 - DNA, 120 bp, synthetic construct
  misc_feature 1..120: note = Artificially Synthesized Probe
  source 1..120: mol_type = other DNA
caattaagattacttaccctgacaaatatagggcaaaagatgtgttacaatataccatgcagctaagagtagagaccagaaagatggcctctgtttttaagaaacttggcaggccgggca

SEQ ID NO: 7780 - DNA, 120 bp, synthetic construct
  misc_feature 1..120: note = Artificially Synthesized Probe
  source 1..120: mol_type = other DNA
cactggtgttcttgggaaaatggagctgtctacaagctctagtcactcaaacaaatataaatgagagaatggaaaagcagatctcctgttcctgtctcacctctttgggtaatatgaaca

SEQ ID NO: 7781 - DNA, 120 bp, synthetic construct
  misc_feature 1..120: note = Artificially Synthesized Probe
  source 1..120: mol_type = other DNA
acaaaagtaccaggggaggaattaatttgaattttatcctagtgttagccaattggtcccatccaaggaaaatttagaaaagggaaggggatgtgtaaaggaaacactaggccccaccta

SEQ ID NO: 7782 - DNA, 120 bp, synthetic construct
  misc_feature 1..120: note = Artificially Synthesized Probe
  source 1..120: mol_type = other DNA
tgacatgtgcatcccaatgctttacacagcctaggtgcctagcacatgctagatgcttggtaaatatttgctgaatgaaagatcaaatgaatgattgcagcaagcaagtcctgtaggcat

SEQ ID NO: 7783 - DNA, 120 bp, synthetic construct
  misc_feature 1..120: note = Artificially Synthesized Probe
  source 1..120: mol_type = other DNA
acttctgctgcagagagtgatactcctttacctcaggacccagtgatcatccccttttccaagcaaagtctgctcgaggagtctggtaactatggatttcccctcttacaactttcaaac

SEQ ID NO: 7784 - DNA, 120 bp, synthetic construct
  misc_feature 1..120: note = Artificially Synthesized Probe
  source 1..120: mol_type = other DNA
cctaactttcttatcccatgagagaggtgtgtaaaggagaaagctagaggtgaactagtagagagagacttgctaggaggccttagcaataatccagtaatctaaaggaaagatgatggt

SEQ ID NO: 7785 - DNA, 120 bp, synthetic construct
  misc_feature 1..120: note = Artificially Synthesized Probe
  source 1..120: mol_type = other DNA
caaacttggtgaaactacatctccaatgtgctttctaatctcctgccagctcttctcaagcaggggatcctgggagatgtagttttcagatacctggttgggtttgggagtaggtgctaa

SEQ ID NO: 7786 - DNA, 120 bp, synthetic construct
  misc_feature 1..120: note = Artificially Synthesized Probe
  source 1..120: mol_type = other DNA
agcagaaagggccttgaatcctggcctggaatttgggcagatatagcattaataaaactgtgcatctcaaacttttatcacatactctaatatcagaggagtgtgaaccttcagagatct

SEQ ID NO: 7787 - DNA, 120 bp, synthetic construct
  misc_feature 1..120: note = Artificially Synthesized Probe
  source 1..120: mol_type = other DNA
tgcagcggccacactccccactcagggccccgggccccgccgccctggggagcgcacaaagcgccgcggacgcgtccccgaggcgcggggtctcaccagcgctgtctcccctcggtgggc

SEQ ID NO: 7788 - DNA, 120 bp, synthetic construct
  misc_feature 1..120: note = Artificially Synthesized Probe
  source 1..120: mol_type = other DNA
cattgggcacctcgggaaccccccacattgggcacctcgggaacccccgcattgggcacctcgggaaccctcccattgggcacctcgggaacccccctattgggcacctcgggaaccccc

SEQ ID NO: 7789 - DNA, 120 bp, synthetic construct
  misc_feature 1..120: note = Artificially Synthesized Probe
  source 1..120: mol_type = other DNA
ggggggtgctcccagtggctctagagtcaacatgacaggcatcgaatggctcctgtttctctggcagagttggggcagagccaggcttggccacgctgggctctaaggggctgtcatttt

SEQ ID NO: 7790 - DNA, 120 bp, synthetic construct
  misc_feature 1..120: note = Artificially Synthesized Probe
  source 1..120: mol_type = other DNA
acccacaggaagaccctccctgcttctcccacagaattcagttggtgcagaaactgggctctgtagcaacgaaaggccgatttgtgtagctgttgccaccccgaactcccagctcagatg

SEQ ID NO: 7791 - DNA, 120 bp, synthetic construct
  misc_feature 1..120: note = Artificially Synthesized Probe
  source 1..120: mol_type = other DNA
ccaccagcaatgagacgaggggctctgcgaccctcagagctgccagccagccagccctgggtggcaagagtgactcctcctggggtctcctccctcctatcgccctcttttttttttttt

SEQ ID NO: 7792 - DNA, 120 bp, synthetic construct
  misc_feature 1..120: note = Artificially Synthesized Probe
  source 1..120: mol_type = other DNA
gcctgtctgtctgtctgtctggttgcttgtgcatgtgtcccccagccacaggtcccctccgctcaggtgatggacttcctgtttgagaagtggaagctctacggtgaccagtgtcaccac

SEQ ID NO: 7793 - DNA, 120 bp, synthetic construct
  misc_feature 1..120: note = Artificially Synthesized Probe
  source 1..120: mol_type = other DNA
ttggcgatgcacctgggaaggatgaaaatggcattggggttcagcccccagagagggaggtgctgagagaaggtcacggagaatgggggaccccagtgtgggtttggggcacatttgaga

SEQ ID NO: 7794 - DNA, 120 bp, synthetic construct
  misc_feature 1..120: note = Artificially Synthesized Probe
  source 1..120: mol_type = other DNA
gcaatgccatccacgcgaatctgtttgcgtccttcgtgctgaaagccagctccgtgctggtcattgatgggctgctcaggacccgctacagccagaaaattggcgacgacctcagtgtca

SEQ ID NO: 7795 - DNA, 120 bp, synthetic construct
  misc_feature 1..120: note = Artificially Synthesized Probe
  source 1..120: mol_type = other DNA
tgcccctgactcgcacccttctcacacagatcaacttcttcatcttcgtccgcatcgttcagctgctcgtggccaagctgcgggcacggcagatgcaccacacagactacaagttccggt

SEQ ID NO: 7796 - DNA, 120 bp, synthetic construct
  misc_feature 1..120: note = Artificially Synthesized Probe
  source 1..120: mol_type = other DNA
gccccgtccccctccccaggtgcagtcggagctgcggcggcgttggcaccgctggcgcctgggcaaagtgctatgggaggagcggaacaccagcaaccacagggcctcatcttcgcccgg

SEQ ID NO: 7797 - DNA, 120 bp, synthetic construct
  misc_feature 1..120: note = Artificially Synthesized Probe
  source 1..120: mol_type = other DNA
ttccaccttcctctgtctttcctcttctttcttcagacctcgcatgatagaaaatcaaagttggtgatttattttttattatgttaaaggtgacagatcttggcttaagaaaaaccagat

SEQ ID NO: 7798 - DNA, 120 bp, synthetic construct
  misc_feature 1..120: note = Artificially Synthesized Probe
  source 1..120: mol_type = other DNA
caggtatgtctttaacaaatggaacactaactactgaggttaacgggattagaaagcagtagtaattagaagggctaggtgacagacaaaagagaactacaacctaatcctagctttgcc

SEQ ID NO: 7799 - DNA, 120 bp, synthetic construct
  misc_feature 1..120: note = Artificially Synthesized Probe
  source 1..120: mol_type = other DNA
gagccactgcgcctagccagaaatcttaaacataactttaagtattcaactaacctctgtttttcttttaaagcagaacatctctatttagtaccaagaagtagaaaaagatgaagtcac

SEQ ID NO: 7800 - DNA, 120 bp, synthetic construct
  misc_feature 1..120: note = Artificially Synthesized Probe
  source 1..120: mol_type = other DNA
ggtatatattgtctcaataaagtggacctatctgtgtgtcctggacacagtaaataacaaatggtgatgtgcctgaatgccagatgtgtgtaggttcagtaaaactccatgttcttgcaa

SEQ ID NO: 7801 - DNA, 120 bp, synthetic construct
  misc_feature 1..120: note = Artificially Synthesized Probe
  source 1..120: mol_type = other DNA
acaaaaaaaacacaattatgaactctgaactactggccaggaacggcggctcatgcttgtaatcccaacactttgggaagccaaggcgggtagatcacttgaggtcacgagttcaagacc

SEQ ID NO: 7802 - DNA, 120 bp, synthetic construct
  misc_feature 1..120: note = Artificially Synthesized Probe
  source 1..120: mol_type = other DNA
tgtctccaaaaaaaaaaaagcactctaattaatccagggtacaaacaaattactattcaatgtaaacaaaattcatggcatggatcattctaagatcctaagaacactcaccttgtttgt

SEQ ID NO: 7803 - DNA, 120 bp, synthetic construct
  misc_feature 1..120: note = Artificially Synthesized Probe
  source 1..120: mol_type = other DNA
gcaagaccctgttctccaaaactaagtaaaataaaatgattttaaaaaactattctcaactcaggagctgcaagagaccagccgccagccagatctggctcacaggctttagcaacctaa

SEQ ID NO: 7804 - DNA, 120 bp, synthetic construct
  misc_feature 1..120: note = Artificially Synthesized Probe
  source 1..120: mol_type = other DNA
cctcatagtaggtatacagagatgccaaggaagatataattgtgattatcaacacacaagcatcttacatgtctgaggaattttgtacagtcacgtgccgcctaatggcattttggtcaa

SEQ ID NO: 7805 - DNA, 120 bp, synthetic construct
  misc_feature 1..120: note = Artificially Synthesized Probe
  source 1..120: mol_type = other DNA
ccctgctcttctttttcctctttccttaattgcccagtacaaaacacacacatttccttcttgaataggacatgtttcctactttcagtgttaagcttgcaacatctcttaaaacaccac

SEQ ID NO: 7806 - DNA, 120 bp, synthetic construct
  misc_feature 1..120: note = Artificially Synthesized Probe
  source 1..120: mol_type = other DNA
atcaggtgcctctttaggcagagttgacctaagagagcttcagtgcagcttgggttacaaagtaaaattttacaggaatgaaactgacctcctggaacaactataatttgactaagttct

SEQ ID NO: 7807 - DNA, 120 bp, synthetic construct
  misc_feature 1..120: note = Artificially Synthesized Probe
  source 1..120: mol_type = other DNA
attccacttcaaagaactgaatgtttcaggtcactctgacgttcaggtaagaaagtttaagatgtgtacactgtgttttgactgaaagactctccctaccatctttactaactacttccg

SEQ ID NO: 7808 - DNA, 120 bp, synthetic construct
  misc_feature 1..120: note = Artificially Synthesized Probe
  source 1..120: mol_type = other DNA
ttctctcactctgctacaaatcgccggttatatgccaattatgagcagtttgaagctaaaacaccttttcaaagtaagcactggacaactataaacaccacctgagactaccttctttga

SEQ ID NO: 7809 - DNA, 120 bp, synthetic construct
  misc_feature 1..120: note = Artificially Synthesized Probe
  source 1..120: mol_type = other DNA
gcagaggttgcagtgattcaaagacctaagtctttattttactaagcatgctgtttaggctaaaggcaatgattagtacaattctcctttaacccttggcccgacaggaagaagtggata

SEQ ID NO: 7810 - DNA, 120 bp, synthetic construct
  misc_feature 1..120: note = Artificially Synthesized Probe
  source 1..120: mol_type = other DNA
tggaataaatttatcaaccattccagctccaaacaggtttctaaaacaatgagctaatgagacaagagccatcactgatctacgcaatcgaagcagaggagcagtcagtgtatcaaacat

SEQ ID NO: 7811 - DNA, 120 bp, synthetic construct
  misc_feature 1..120: note = Artificially Synthesized Probe
  source 1..120: mol_type = other DNA
tttaataagcgcttctgttttaattttacttcggagttctcagtaacggtccatttagtaaactaaaggcctccccatttggggtctcaacgatgcacgcagatgggagataaacttaag

SEQ ID NO: 7812 - DNA, 120 bp, synthetic construct
  misc_feature 1..120: note = Artificially Synthesized Probe
  source 1..120: mol_type = other DNA
atcttagtctggcacaggtgtcttcaggctgaaaattcacccctgagtctctatcttctttgaccagtatctccaggaataacccgaaatttttccgggggttgtcattccaatccttag

SEQ ID NO: 7813 - DNA, 120 bp, synthetic construct
  misc_feature 1..120: note = Artificially Synthesized Probe
  source 1..120: mol_type = other DNA
aaagaaagccagaggttcttatcttcacatccacaggttcccagagattcctggatgaaatgtagagggtgcacgaacttagatgggaaaaataattacatcattatttccactaaactc

SEQ ID NO: 7814 - DNA, 120 bp, synthetic construct
  misc_feature 1..120: note = Artificially Synthesized Probe
  source 1..120: mol_type = other DNA
gtatttcaatatttaattggtttcttttgaaatcctaaatattttactttaggcacttaaaccattattctgagaaagagtcaatagactgggccgggacatggtggctcacaccagtga

SEQ ID NO: 7815 - DNA, 120 bp, synthetic construct
  misc_feature 1..120: note = Artificially Synthesized Probe
  source 1..120: mol_type = other DNA
cgatttttgtccatggatgcccctcttctgaagttacaaatgtgctctccctgttttctaagctaactttcctgcctgaattttcaaattttacctattcctctaggaaaaggcccaata

SEQ ID NO: 7816 - DNA, 120 bp, synthetic construct
  misc_feature 1..120: note = Artificially Synthesized Probe
  source 1..120: mol_type = other DNA
gggaagtaagcagcagggtcagaacaggcagggcatggtgggtcaactcttgcagaattttgcagacgagaattttacgtggaggagcagtacgactcaatacgcatttttaaaaggtaa

SEQ ID NO: 7817 - DNA, 120 bp, synthetic construct
  misc_feature 1..120: note = Artificially Synthesized Probe
  source 1..120: mol_type = other DNA
ctcacacactagctgtatgatcttgaatagattacaggttacctactgtctgagcctaatttccttactgttaggaacttgataagaatatctaacttcctctcaggatcgtggctggaa

SEQ ID NO: 7818 - DNA, 120 bp, synthetic construct
  misc_feature 1..120: note = Artificially Synthesized Probe
  source 1..120: mol_type = other DNA
aggagaagaaggttgttatggacttggagtcggccaagcacatttatcctgggacccaaccattgttgaacccctcctaccttcaaatcacctttttaaatattttaatttttatcaatt

SEQ ID NO: 7819 - DNA, 120 bp, synthetic construct
  misc_feature 1..120: note = Artificially Synthesized Probe
  source 1..120: mol_type = other DNA
ataaggaatggactgaagaattttctagctgatgagggggattcaagagaccattgaagccagcagtggccacagaggaaggaaacatgcctctaactatgtagtttcccatcaccagga

SEQ ID NO: 7820 - DNA, 120 bp, synthetic construct
  misc_feature 1..120: note = Artificially Synthesized Probe
  source 1..120: mol_type = other DNA
ctcttacttaaagctgacaacaatcctgtgaaatgattctatacctctgattttagtgaaaacactgaggttcagaaaggctatgtaatcagccagcatgtggaggggcaaagatctgaa

SEQ ID NO: 7821 - DNA, 120 bp, synthetic construct
  misc_feature 1..120: note = Artificially Synthesized Probe
  source 1..120: mol_type = other DNA
gtgtttccagctgggaagataaagattagagagtgggcaagctgcggagactccagtctagggacacttgaatcttttaatatctgaaccccaaaagcagagggtacctttttccactca

SEQ ID NO: 7822 - DNA, 120 bp, synthetic construct
  misc_feature 1..120: note = Artificially Synthesized Probe
  source 1..120: mol_type = other DNA
caatcctgttttcaaagtctaaagtggccaccgccaagcaagcagtcattagaaggagctcgtctctcccttgcttcatcctcagacccctggggatcctctctgagctcccatacatct

SEQ ID NO: 7823 - DNA, 120 bp, synthetic construct
  misc_feature 1..120: note = Artificially Synthesized Probe
  source 1..120: mol_type = other DNA
gccaggtatggtggcgcgtacctgtagtcccagctactcaggaggctgaggcagaagaatcgcttgaacccaggaggtggaagttgcagtgagccaagatcgagccactgcactccagcc

SEQ ID NO: 7824 - DNA, 120 bp, synthetic construct
  misc_feature 1..120: note = Artificially Synthesized Probe
  source 1..120: mol_type = other DNA
ggaggagtgtaagcagcgactcactcattcttcttccccttttgggccagcagccagttcacaaagtcttgttggtgaatcttgtccatggcaatactgtagtcactgatgaaagtccct

SEQ ID NO: 7825 - DNA, 120 bp, synthetic construct
  misc_feature 1..120: note = Artificially Synthesized Probe
  source 1..120: mol_type = other DNA
aaaaaaaaaaaaaaaagggatcggggtcccctcatctgaaaagactgagtcacacaattccctcctttattcctcctgccctggcccttcctgattcaattccttggttcacattccata

SEQ ID NO: 7826 - DNA, 120 bp, synthetic construct
  misc_feature 1..120: note = Artificially Synthesized Probe
  source 1..120: mol_type = other DNA
ccaattaaaaaaaaaaaaaaaagggccaggcacagggattacatgccttcaatcccagcgctttgggaggccaaggtggatggatcatctaaggtcaggagttcgagaccagcctgacca

SEQ ID NO: 7827 - DNA, 120 bp, synthetic construct
  misc_feature 1..120: note = Artificially Synthesized Probe
  source 1..120: mol_type = other DNA
ttatttcctgagctaagacagaaaaaagccaggacatgttgagagagcaaccagtaggggttctgaaagctggagaggggcaaagccctgaggtttggaccctttcttttcctttttctt

SEQ ID NO: 7828 - DNA, 120 bp, synthetic construct
  misc_feature 1..120: note = Artificially Synthesized Probe
  source 1..120: mol_type = other DNA
atcagcgctaccttctcatttctctttctctttttttgagacagggtttcgctctgtcacccgggttggagtgcagtgacacaatcgtggctcactgcagcctcgacctcctgggctcag

SEQ ID NO: 7829 - DNA, 120 bp, synthetic construct
  misc_feature 1..120: note = Artificially Synthesized Probe
  source 1..120: mol_type = other DNA
ctcagatcccggggtgccacactcccaggggccccctttgcacgctctgcgcaaaagatgggcaggtcttaggactagcggacccctagatattccagaaaatcctctgcgcagacctag

SEQ ID NO: 7830 - DNA, 120 bp, synthetic construct
  misc_feature 1..120: note = Artificially Synthesized Probe
  source 1..120: mol_type = other DNA
gagaatcaaggaaggcagtatcatcaaccggatcgaggcagtgtgcgtgggtgacagcatcgaagccatcaacgaccactccattgtgggctgccgccactacgaggtggccaagatgct

SEQ ID NO: 7831 - DNA, 120 bp, synthetic construct
  misc_feature 1..120: note = Artificially Synthesized Probe
  source 1..120: mol_type = other DNA
ttttcttttttttttcctttcttttttcttttcttttctttttttttttttgagacggagtctagctctgtcgcccagactgcagtgcagtggctagatttcagctcactgcaagctccg

SEQ ID NO: 7832 - DNA, 120 bp, synthetic construct
  misc_feature 1..120: note = Artificially Synthesized Probe
  source 1..120: mol_type = other DNA
cataactagactttctcaatgaagaaaacagtgtattgatttacacactagcacattctcctcatgtagccatgggttggccctttggatagcgttgttctatagaacagagacagagat

SEQ ID NO: 7833 - DNA, 120 bp, synthetic construct
  misc_feature 1..120: note = Artificially Synthesized Probe
  source 1..120: mol_type = other DNA
atgttagttctaaacctgctccattacaacacctcattctggacttgtgatttagtttgctggggatgcgaagtgtggaatctcgaataggtctctggagacttgccgtacagatgtaag

SEQ ID NO: 7834 - DNA, 120 bp, synthetic construct
  misc_feature 1..120: note = Artificially Synthesized Probe
  source 1..120: mol_type = other DNA
gcattgagaataagctctgttctaaaactcaggccagccctgagaccaagcccagctctagaactcagatgagctttgagaccatgcccagcactgagaccaagccctgttctagaactc

SEQ ID NO: 7835 - DNA, 120 bp, synthetic construct
  misc_feature 1..120: note = Artificially Synthesized Probe
  source 1..120: mol_type = other DNA
ttaattttggaacccatgtgagattcatgaagcagcccagctctggaaccccagtcagctcaggattcagagacagctcccaaatcaaatcctattcaagaactcagaccagctcagaaa

SEQ ID NO: 7836 - DNA, 120 bp, synthetic construct
  misc_feature 1..120: note = Artificially Synthesized Probe
  source 1..120: mol_type = other DNA
attcaactggactttgggaagcagagcagttctgaaagtcagcttagctttggaactcagcccagctctgggacccagataagctcaagaattcaagccagctctggaagtcagcttagt

SEQ ID NO: 7837 - DNA, 120 bp, synthetic construct
  misc_feature 1..120: note = Artificially Synthesized Probe
  source 1..120: mol_type = other DNA
ttagttctggaacccagcctgtttctggaacccaatccagttccagaactcacaccagttcaagaatctggctgagccctggaaatggaatctgcccacagacccctggccttgacccta

SEQ ID NO: 7838 - DNA, 120 bp, synthetic construct
  misc_feature 1..120: note = Artificially Synthesized Probe
  source 1..120: mol_type = other DNA
acggcccggagtctaaagcattggtttgtcagccttctaaaattaatgtggaagtacgagagaatataccagaacgttcttgtagcgaattaaattatctccagacttagtccttccttt

SEQ ID NO: 7839 - DNA, 120 bp, synthetic construct
  misc_feature 1..120: note = Artificially Synthesized Probe
  source 1..120: mol_type = other DNA
ggaacaggcactgagcctgtagaattagataaaatacatagaatggccaatgatgaaaaatgccatgtagatgtgtgaagcagaggagggagtgtgtgtatgtgtgttagagtattgttt

SEQ ID NO: 7840 - DNA, 120 bp, synthetic construct
  misc_feature 1..120: note = Artificially Synthesized Probe
  source 1..120: mol_type = other DNA
ataaaaatttagaaaagaatacctcttctagttttcccacccccatccccacatcagggccagtcaggttcacatgtgcatttggttcattatgtgtctttagtgttttaatttggaaca

SEQ ID NO: 7841 - DNA, 120 bp, synthetic construct
  misc_feature 1..120: note = Artificially Synthesized Probe
  source 1..120: mol_type = other DNA
tacttgttttttctgtctttgatgtagcgctccttcaacatcaacgtgtgaggcggattgtgtgcagtgggtaggagagtgtggtctgtggaatgagctgagcagaaagataatcaggct

SEQ ID NO: 7842 - DNA, 120 bp, synthetic construct
  misc_feature 1..120: note = Artificially Synthesized Probe
  source 1..120: mol_type = other DNA
gacgtgcgggtgaagcaggagcagaggagaagcctcccggcaggggtggtggcatttgggggtggtggtatttgggggtagagactcccgctcaggtatggctgtgtctggcccaagagg

SEQ ID NO: 7843 - DNA, 120 bp, synthetic construct
  misc_feature 1..120: note = Artificially Synthesized Probe
  source 1..120: mol_type = other DNA
ggggcgggggccaggctgagggtggccccagtgtggcatctggctcctgggctggccagattcccagggaacagtcacccagcacctcgtgtgtatttcgactttattattattattatt

SEQ ID NO: 7844 - DNA, 120 bp, synthetic construct
  misc_feature 1..120: note = Artificially Synthesized Probe
  source 1..120: mol_type = other DNA
ccaccctctgcctgggaataggctgctgtgaacttgggtgtaaatatttgagtctctgcttccaatttctgagagtagctttgctggatcttattagaattccatgtttagctttttgag

SEQ ID NO: 7845 - DNA, 120 bp, synthetic construct
  misc_feature 1..120: note = Artificially Synthesized Probe
  source 1..120: mol_type = other DNA
tgggattcccggcttctctgcccatttttaacttgagtttattgttgggctgtagttctgtgttctggatgtgagtctcttacatacgtggtttgccagtgtttattttctcccattctg

SEQ ID NO: 7846 - DNA, 120 bp, synthetic construct
  misc_feature 1..120: note = Artificially Synthesized Probe
  source 1..120: mol_type = other DNA
tgtagtgggtggcactgtttgtgcgtggataattgtggtgtcttggcacattgacccttttatcaatgtataacatctttgtctcttaaaatagtttcagccacttcagctctcttttgc

SEQ ID NO: 7847 - DNA, 120 bp, synthetic construct
  misc_feature 1..120: note = Artificially Synthesized Probe
  source 1..120: mol_type = other DNA
acaggcatgagccacgatagcaagccttaactctaatttttgaagggctatttttagaattctcggttttgtcagtttcttccattgaatggtacctgttttcctgtttctttgaacgtc

SEQ ID NO: 7848 - DNA, 120 bp, synthetic construct
  misc_feature 1..120: note = Artificially Synthesized Probe
  source 1..120: mol_type = other DNA
ggaaaaagcaaccggctggcccatgtgtccgagccgagcacctgcgtctacgcgctgacgttcgagacccccctcgtctgccacccccacgccttgctaggtaggggtgcgggacgcagt

SEQ ID NO: 7849 - DNA, 120 bp, synthetic construct
  misc_feature 1..120: note = Artificially Synthesized Probe
  source 1..120: mol_type = other DNA
ccgcagggaccagctgaccaggcttgtgctcagagaagcagacaaaacaaagattcaaggttttaattaattcccatactgataaaaataactccatgaattctgtaaaccattgcataa

SEQ ID NO: 7850 - DNA, 120 bp, synthetic construct
  misc_feature 1..120: note = Artificially Synthesized Probe
  source 1..120: mol_type = other DNA
gaaaccaagtcgatagttaccttggagtagtggactagctgcagaatgtcacggacccacttcctttaaaacaacagaatgttgctatcagtttgtcttacgttaaaacagttcttaaac

SEQ ID NO: 7851 - DNA, 120 bp, synthetic construct
  misc_feature 1..120: note = Artificially Synthesized Probe
  source 1..120: mol_type = other DNA
cttaaaaaagtaattctaaaagctctgacgtcggatcccctctgctgcgttttttgttagtatcaaactgtctttcagagggttaagggagaaaacaaaacccatgatgctccttcactt

SEQ ID NO: 7852 - DNA, 120 bp, synthetic construct
  misc_feature 1..120: note = Artificially Synthesized Probe
  source 1..120: mol_type = other DNA
aggactctcttttgtgaggaaatttttaataaaaacaagtaactcaaaagcactgaattttccagaccctctaacacatttccctccggatcctgtgagagcctgagatcacttatgacg

SEQ ID NO: 7853 - DNA, 120 bp, synthetic construct
  misc_feature 1..120: note = Artificially Synthesized Probe
  source 1..120: mol_type = other DNA
acgcaggaaaaccggggtgagaacatagagctacttttccttcggtattttcagaattagtctgtcctaagagaaaaaaaaatacatggtgaacatcactcacttgaggacttcccataa

SEQ ID NO: 7854 - DNA, 120 bp, synthetic construct
  misc_feature 1..120: note = Artificially Synthesized Probe
  source 1..120: mol_type = other DNA
acctcatttcagaccagtacatctgcagaggaggccacgcggacccattctctctctcctaactcatataataaatattattttagattttcttagcaaactaggggacaacttacagac

SEQ ID NO: 7855 - DNA, 120 bp, synthetic construct
  misc_feature 1..120: note = Artificially Synthesized Probe
  source 1..120: mol_type = other DNA
cctaaatcctgcaggtaaattattcccaacaaattttcaaaaggcaatcaataataagtaggttcttcttcaataacatgagcatatgcttcttaaagactgggtgacaggccgggcgca

SEQ ID NO: 7856 - DNA, 120 bp, synthetic construct
  misc_feature 1..120: note = Artificially Synthesized Probe
  source 1..120: mol_type = other DNA
ttcttgttaaaggcaaaacaaaacttaaatttcatgtcttagaaaaacatcgaccacacaatcaaataaataacattgataagagccttctggggcagcggcgcacggaggcgagtccac

SEQ ID NO: 7857 - DNA, 120 bp, synthetic construct
  misc_feature 1..120: note = Artificially Synthesized Probe
  source 1..120: mol_type = other DNA
gccacagactacagctctcccagacgcttctcccatcagatactcaagaccttgatgtggaatttccgtaagaaattaagtaagttttccagcttaggctcccttttctgggacttcaaa

SEQ ID NO: 7858 - DNA, 120 bp, synthetic construct
  misc_feature 1..120: note = Artificially Synthesized Probe
  source 1..120: mol_type = other DNA
tcctgggccatctccaactcagacttgacgttctgtggaaaatgaagtcagatttttaaaagctaacagatcttaaacatcctgccaagatccgagtttgtattttcataggttaagcac

SEQ ID NO: 7859 - DNA, 120 bp, synthetic construct
  misc_feature 1..120: note = Artificially Synthesized Probe
  source 1..120: mol_type = other DNA
tgcagcagctgctgtagcccctccagctccttcctgccctgctgctcccgcctgtgcccagcgcctcagatacaggtacctgcagcagctgctgtagcccctccagctccttcctccctg

SEQ ID NO: 7860 - DNA, 120 bp, synthetic construct
  misc_feature 1..120: note = Artificially Synthesized Probe
  source 1..120: mol_type = other DNA
gtgagtgaggctcaggattctggagacggaggctgggtgccttctactcctatgattcactcaagtactcggcaatttgcaaaatatagatgaccctcgctgtgctgaaggtgtgaatta

SEQ ID NO: 7861 - DNA, 120 bp, synthetic construct
  misc_feature 1..120: note = Artificially Synthesized Probe
  source 1..120: mol_type = other DNA
acgcagcaagtgcacacttatgtggctgctgctatctgttgaatgaacacatttattcgagatttctcggtctaaatagtttttatagtcttcttccagtgtattcacagcctggacaac

SEQ ID NO: 7862 - DNA, 120 bp, synthetic construct
  misc_feature 1..120: note = Artificially Synthesized Probe
  source 1..120: mol_type = other DNA
tcttaaaggttgtggcaaagccaggtcataggaacgaaagcagcttcactgttaggccgaaaagtttgaattgtgaagcaattacttttttacaagttcaattcaaacgggatttaaagg

SEQ ID NO: 7863 - DNA, 120 bp, synthetic construct
  misc_feature 1..120: note = Artificially Synthesized Probe
  source 1..120: mol_type = other DNA
cacagaaccacccctcttatctgccgaacacaaatgggatcatatgctattctcaagtttgcttttgcaatgcaacacgacatacaggacaccactcccagcacaatataaatacacatg

SEQ ID NO: 7864 - DNA, 120 bp, synthetic construct
  misc_feature 1..120: note = Artificially Synthesized Probe
  source 1..120: mol_type = other DNA
tggacaagatgcttcatctggcgatcctcctcttctttgcgctgcaaaactgcctgcacctagatcagattgcaggaggacagataaggaaggacgtcgaattacaaacacacaaggctg

SEQ ID NO: 7865 - DNA, 120 bp, synthetic construct
  misc_feature 1..120: note = Artificially Synthesized Probe
  source 1..120: mol_type = other DNA
tccctttctcgtgctctaattcaagagccaacttcttgtttgactcctcaaggcgttttatcttcttcctaaagcctctggattcttgaagctgaaacataccaatgtcactgtaaaatt

SEQ ID NO: 7866 - DNA, 120 bp, synthetic construct
  misc_feature 1..120: note = Artificially Synthesized Probe
  source 1..120: mol_type = other DNA
aagacaacaaaaacaaagaacaatggacaccacacaaccctgcgatggacaccacaggaccgtgcttgcttcatgatctgaaggctgtcgtggtcatggtcagttgcttccccaggcccc

SEQ ID NO: 7867 - DNA, 120 bp, synthetic construct
  misc_feature 1..120: note = Artificially Synthesized Probe
  source 1..120: mol_type = other DNA
caaccttcctttttgttaaagaagttgaattaaccgaccacagcatgcacacgatgacacacggggatagttgggacaaacaaaatcatctcttcagttcaatgcttcaaaaatacagaa

SEQ ID NO: 7868 - DNA, 120 bp, synthetic construct
  misc_feature 1..120: note = Artificially Synthesized Probe
  source 1..120: mol_type = other DNA
cagcccttagtgagcccaaagaaaatggcaactgaatcaatctccccaacattttacaaagcaaccaggtgagaggaagcacttgatttatttattgaatttcagacacagagtctctat

SEQ ID NO: 7869 - DNA, 120 bp, synthetic construct
  misc_feature 1..120: note = Artificially Synthesized Probe
  source 1..120: mol_type = other DNA
gaacttctctgagccaaggagatttcttgaggaaaatcaggtgaacgccacaggccacaggccatgtggggttcatgagggagacgcgaggcaatgctcagtcactgtgggttcctggta

SEQ ID NO: 7870 - DNA, 120 bp, synthetic construct
  misc_feature 1..120: note = Artificially Synthesized Probe
  source 1..120: mol_type = other DNA
cccatcacccccaccaaaggcactgctcaggctcgccctggaggacttgggccttgagaaaaatcctgagagagacgtctgccttcttacaaaccactcttttttttttttattgagatg

SEQ ID NO: 7871 - DNA, 120 bp, synthetic construct
  misc_feature 1..120: note = Artificially Synthesized Probe
  source 1..120: mol_type = other DNA
acttcagaaacttcataagcaaaacgtagcacttggtctaacgtgccatcagacgactctccccaaatttactgttgctctcctgatttctcgtctcacctcccggttcctcagcctgga

SEQ ID NO: 7872 - DNA, 120 bp, synthetic construct
  misc_feature 1..120: note = Artificially Synthesized Probe
  source 1..120: mol_type = other DNA
ggtcaagctggcttcaacaaaaatgtttaccacttatcgggggcataacttttttgaggtaaagatacatttcatcaaatctaagactccatcgactgagacacaccactgtttatccac

SEQ ID NO: 7873 - DNA, 120 bp, synthetic construct
  misc_feature 1..120: note = Artificially Synthesized Probe
  source 1..120: mol_type = other DNA
taaaataaaataaaatacagcagcgctcacaacgctgcttcaggggtcaccctcgctcagaaataaaacacagcagcactcacaatatagcttcggggtcacccttgctcagatcccata

SEQ ID NO: 7874 - DNA, 120 bp, synthetic construct
  misc_feature 1..120: note = Artificially Synthesized Probe
  source 1..120: mol_type = other DNA
caagtgaagaaatcaacaacagatttttaccttttgttggagaaactgttcctttattttttgcatttgctttttcagagcagcagtctcctgctgcaggtgttccacctgtgggagaca

SEQ ID NO: 7875 - DNA, 120 bp, synthetic construct
  misc_feature 1..120: note = Artificially Synthesized Probe
  source 1..120: mol_type = other DNA
gaaaggacacatctgcagagttgttacactgaggactataggaggggaatgtgtctgcacagatgttacactgagggctccaagagggggatgcatgtgcatgaatattacactgagggc

SEQ ID NO: 7876 - DNA, 120 bp, synthetic construct
  misc_feature 1..120: note = Artificially Synthesized Probe
  source 1..120: mol_type = other DNA
actcggagggctccacacagacccaccgcacgggacccgcactcggagggctccacacagacccaccccacgggacccgcactcggagggctccacacagacccaccgcacgggacccgc

SEQ ID NO: 7877 - DNA, 120 bp, synthetic construct
  misc_feature 1..120: note = Artificially Synthesized Probe
  source 1..120: mol_type = other DNA
atagggaagagcttgtttagggcctaggttttctgtctgaatacagaacacactgcatgcaaatcctagttatcactagagcatgactgaagaatgagcctttttccctacaatatggag

SEQ ID NO: 7878 - DNA, 120 bp, synthetic construct
  misc_feature 1..120: note = Artificially Synthesized Probe
  source 1..120: mol_type = other DNA
atccacagaattgggacaattcctctaaatttactcccccaacactgtaaacagtaatgacctgtctgagtgcctctttactagaaaatcacttagtacaggtcagtgtttgtagtgaca

SEQ ID NO: 7879 - DNA, 120 bp, synthetic construct
  misc_feature 1..120: note = Artificially Synthesized Probe
  source 1..120: mol_type = other DNA
atcagcatcattcctgcaaggagggttctgattcaaaacaaaacacagcagaatgcattacctggccggatttgatagctaattcttctcttaacttctctaaagtttccgacgtttcct

SEQ ID NO: 7880 - DNA, 120 bp, synthetic construct
  misc_feature 1..120: note = Artificially Synthesized Probe
  source 1..120: mol_type = other DNA
cacatcggggtacacttcttagggaaaacacaaattcctaacttgaaacttgaaattcttttcagttcttctctactaagcccttgaagcactatggctgacgcaacgtgattcttctca

SEQ ID NO: 7881 - DNA, 120 bp, synthetic construct
  misc_feature 1..120: note = Artificially Synthesized Probe
  source 1..120: mol_type = other DNA
aagccttaacgagcagtcactgcccgccatccatgagaatatttaagagatacacacagagagacggaacatgtaagaaaacacacatggtatcgatgtctgcgtctgttctcctaagct

SEQ ID NO: 7882 - DNA, 120 bp, synthetic construct
  misc_feature 1..120: note = Artificially Synthesized Probe
  source 1..120: mol_type = other DNA
ctccctcctgaacgttactgggaatgaagggatacatttgggtaccaaaaaaatgtattaaaaactctgattaaggaatgctgaacctgggttccaaaggtatttggaaaaagcagtgag

SEQ ID NO: 7883 - DNA, 120 bp, synthetic construct
  misc_feature 1..120: note = Artificially Synthesized Probe
  source 1..120: mol_type = other DNA
gcatgcgctactgcacctggcccaaactatacttctaaaatacacctggcttggcctacgtctttaaatacctcatataaatgcactgcagctgtaaaaaagtgtattaatttgtatact

SEQ ID NO: 7884 - DNA, 120 bp, synthetic construct
  misc_feature 1..120: note = Artificially Synthesized Probe
  source 1..120: mol_type = other DNA
aaccaaaaacaaaaagactgaggctgaccaaaggtactcttcagcatctctgaggtcatcctaattagtctaggtgctgagactcggatcgaggttcactcgaaccattcgcctgtcggt

SEQ ID NO: 7885 - DNA, 120 bp, synthetic construct
  misc_feature 1..120: note = Artificially Synthesized Probe
  source 1..120: mol_type = other DNA
taaaaacaaaaacatgcctgtgaactctaaaaacagaaaaatctcaggaaaaagcaccgttctacatgaagacaagaagcgtgacctgccctggaaggtagatgtgggccgtacctggat

SEQ ID NO: 7886 - DNA, 120 bp, synthetic construct
  misc_feature 1..120: note = Artificially Synthesized Probe
  source 1..120: mol_type = other DNA
aacaggatgaattgaaaaaaataaaccaaaagaaaaaaatgaagtacatcttctccatgaaacacctcacatcctctctgtgtttaaaaacactagacagtgttggccgggcacagtggc

SEQ ID NO: 7887 - DNA, 120 bp, synthetic construct
  misc_feature 1..120: note = Artificially Synthesized Probe
  source 1..120: mol_type = other DNA
tttttcctaagggattgggtatcacgaaatgctcaaggactaaaatattaaagcgattacaagagtactactgtctctcggccggctttctctttcctagtattagaatgtagcctctgt

SEQ ID NO: 7888 - DNA, 120 bp, synthetic construct
  misc_feature 1..120: note = Artificially Synthesized Probe
  source 1..120: mol_type = other DNA
gcctgcagctcagccttctctttaagtgcctgaaaagatcccaacaaccacaatgattttaagaaaacgagtcacttccatccagtgtattaacaggaacacaaccagcgagtcagtcag

SEQ ID NO: 7889 - DNA, 120 bp, synthetic construct
  misc_feature 1..120: note = Artificially Synthesized Probe
  source 1..120: mol_type = other DNA
gttcaaaacaccaaacgtgtacacgggtgcacatgtatgcgcacacacacagaatgccagacgtgtagagggacccctgagagattaaaagcggattcagatctggggggaaatgggcaa

SEQ ID NO: 7890 - DNA, 120 bp, synthetic construct
  misc_feature 1..120: note = Artificially Synthesized Probe
  source 1..120: mol_type = other DNA
cagaaatcactacaaagaaaaaaggttcaccatgccagaaaaagctgcaacccaccaagagaatttgactcttatggactgtgagacacctaacatctagcaaatattctggtagagacg

SEQ ID NO: 7891 - DNA, 120 bp, synthetic construct
  misc_feature 1..120: note = Artificially Synthesized Probe
  source 1..120: mol_type = other DNA
tgagacatgcaagcgtcgtgcagcttagtgacaagtctatgtaaacgggagactggatattttagtaacacagaccattgctgatctaattctactgattaaaaagcagcagacttgtta

SEQ ID NO: 7892 - DNA, 120 bp, synthetic construct
  misc_feature 1..120: note = Artificially Synthesized Probe
  source 1..120: mol_type = other DNA
tgactggactgagaagaaaacaaaagtacaaaaattacatttaaaatccacaagcagcatacttaaaactgccattcagaaaggtggcaccgatcactactccctccgctgacaaccaga

SEQ ID NO: 7893 - DNA, 120 bp, synthetic construct
  misc_feature 1..120: note = Artificially Synthesized Probe
  source 1..120: mol_type = other DNA
aactattcttgttttatattttattatactggaacagcccgtgtcctctgtctcttgcctcggtgcctgagtggcttgccacccacagacttcctcaacagaactttcctggctactctc

SEQ ID NO: 7894 - DNA, 120 bp, synthetic construct
  misc_feature 1..120: note = Artificially Synthesized Probe
  source 1..120: mol_type = other DNA
tccacctcttgtggagggcctgacgtcagtcaggcccgcgcacagttatccggaggcctaaccatcaacctgtgatgctgtgcttcagtggtcacactcctagtctgctttcatgttcca

SEQ ID NO: 7895 - DNA, 120 bp, synthetic construct
  misc_feature 1..120: note = Artificially Synthesized Probe
  source 1..120: mol_type = other DNA
gattaaagtatttaaaaacataaccttaaaggtataagaagaacacgctggtcattttattgatcttcttctactgaagagatccttttgaaacatgacataggctgggcgcgatggtgg

SEQ ID NO: 7896 - DNA, 120 bp, synthetic construct
  misc_feature 1..120: note = Artificially Synthesized Probe
  source 1..120: mol_type = other DNA
acctgaatgggtaaaatgccatcaaatagcaccgcatgttacagagacatcttttctaagatatggtaaactttagtgcggttttaagaaattaccacagcccaaccttcagcaaccacc

SEQ ID NO: 7897 - DNA, 120 bp, synthetic construct
  misc_feature 1..120: note = Artificially Synthesized Probe
  source 1..120: mol_type = other DNA
aggcacaagaacttggtcattttgtacttaattacccatatactttacacctaaacaatgcacagccatcttgtttggaaggacaatttctagatcaagagagaactgtgagccccggac

SEQ ID NO: 7898 - DNA, 120 bp, synthetic construct
  misc_feature 1..120: note = Artificially Synthesized Probe
  source 1..120: mol_type = other DNA
ctccgggacaggaggggaaaatttacaactttttagccaaaaccagaatttaaaatatctaaaacccagacctttcattgtaggtgatgaaagagttgcatggtacgtgccaacgtgtta

SEQ ID NO: 7899 - DNA, 120 bp, synthetic construct
  misc_feature 1..120: note = Artificially Synthesized Probe
  source 1..120: mol_type = other DNA
agagctcacacatctgtaacttcaggaccccaaagtaaataaactaagttgaaaaaaatcaggaatctagacttttttacatgctacttctcaacttaaatgctggcagtgagttttcag

SEQ ID NO: 7900 - DNA, 120 bp, synthetic construct
  misc_feature 1..120: note = Artificially Synthesized Probe
  source 1..120: mol_type = other DNA
acggatgcttacacagttgcgtttcttgcataggaagactgagtctgagagactgcaaagcttcttttctaacactgccctcagcactagttccctgagacttccttaggttgtcatgga

SEQ ID NO: 7901 - DNA, 120 bp, synthetic construct
  misc_feature 1..120: note = Artificially Synthesized Probe
  source 1..120: mol_type = other DNA
ctctaaggtgaacccgccctccacacctccacgctctaaggtgaacccaccctccacacctccacgctctaaggtgaacccgccctccactcctccacgctctaaggtgaacccgcactc

SEQ ID NO: 7902 - DNA, 120 bp, synthetic construct
  misc_feature 1..120: note = Artificially Synthesized Probe
  source 1..120: mol_type = other DNA
aaaaccacaaacacttaaaacacagctgacaatctttctagcaggcactggtaacagcagtgttaatcagagtcacagcctcacatttacaaaggctgattttggagtcatttcaaagcc

SEQ ID NO: 7903 - DNA, 120 bp, synthetic construct
  misc_feature 1..120: note = Artificially Synthesized Probe
  source 1..120: mol_type = other DNA
aaaaaaagaaaaggtttctttcacttgcaaatgtgagttcaaactaacagcagatacttactgtcatgcctcccgaaagaaaaaccagaataaaagcaggggtgccagacaggaagccag

SEQ ID NO: 7904 - DNA, 120 bp, synthetic construct
  misc_feature 1..120: note = Artificially Synthesized Probe
  source 1..120: mol_type = other DNA
tatcattttacaggaattagactgtgacttctgctagtaaattagcacatctgtagtctacagttttaaagcactgaacctcctggccaggaagaggcatgagaactgagtgaataacta

SEQ ID NO: 7905 - DNA, 120 bp, synthetic construct
  misc_feature 1..120: note = Artificially Synthesized Probe
  source 1..120: mol_type = other DNA
acgtcgaaaaaaaaaaaaggtagaattttaggcagggaacatgataaagacccatagatcccttcagggaaacactgctgctgccccacacgtttaatggagttctgtttagcaggaatg

SEQ ID NO: 7906 - DNA, 120 bp, synthetic construct
  misc_feature 1..120: note = Artificially Synthesized Probe
  source 1..120: mol_type = other DNA
cttaatgtctgtatcggtgccaactaaagaacattctgctgggacagcgcagctctgaatctgtggagtaggtgtcacacagggcaactgagctttaaattttatttaaaattaatttgg

SEQ ID NO: 7907 - DNA, 120 bp, synthetic construct
  misc_feature 1..120: note = Artificially Synthesized Probe
  source 1..120: mol_type = other DNA
tttcatattaacctacattatgttctgtgtttaacatttttcatgagaaacattacacaaccttcgcctctagcttacaaatcccacacagaaggtatagacaagaagcccacatggggc

SEQ ID NO: 7908 - DNA, 120 bp, synthetic construct
  misc_feature 1..120: note = Artificially Synthesized Probe
  source 1..120: mol_type = other DNA
aaagcaatgtctgaagcacagaagtgaaggaagttaccaaggctggtcaaaagctaatcctgtgtgcaacgaattctcaatctcatgtttgcgtctatgatcatctagtaacatctctca

SEQ ID NO: 7909 - DNA, 120 bp, synthetic construct
  misc_feature 1..120: note = Artificially Synthesized Probe
  source 1..120: mol_type = other DNA
caaaatgattaagtatttgaatcctggagcatcaacactgccttttaaaatacagcaaagtctaaactagtccagctgaaacatctgtgagcttcagttccaatgagggagtccagggag

SEQ ID NO: 7910 - DNA, 120 bp, synthetic construct
  misc_feature 1..120: note = Artificially Synthesized Probe
  source 1..120: mol_type = other DNA
gtactacaaacatggctctattttaaataaagaggccagtctaatcagtctcacttatgatcactcgcactcctgcgtctctagagagaagagacaggacaaagctgtcacttagaactg

SEQ ID NO: 7911 - DNA, 120 bp, synthetic construct
  misc_feature 1..120: note = Artificially Synthesized Probe
  source 1..120: mol_type = other DNA
aatcgctaaaagccaactgaaggcattctcacttgggaaagtatgctacttcttaaggcaatcgggggaaaaaaagctcctcttcaatctgagtgatgtcagatgatttatttccttctt

SEQ ID NO: 7912 - DNA, 120 bp, synthetic construct
  misc_feature 1..120: note = Artificially Synthesized Probe
  source 1..120: mol_type = other DNA
ctggaatgaagacaagtcggccagcgacaaagacaaacaaggaagtacacggactcctgaaaccccgacttcccacgaaccacccgacaccatgtcacgcctttcagctgcaaagggcca

SEQ ID NO: 7913 - DNA, 120 bp, synthetic construct
  misc_feature 1..120: note = Artificially Synthesized Probe
  source 1..120: mol_type = other DNA
acctagaagtgaactgtgacaagaggaatctgacagcgctgcctccagacctgccgaaagacacaaccatcctccacctgagtgagaacctcctgtacaccttctccctggcaaccctga

SEQ ID NO: 7914 - DNA, 120 bp, synthetic construct
  misc_feature 1..120: note = Artificially Synthesized Probe
  source 1..120: mol_type = other DNA
atccaacacaagaatccactaaggagcagaccacattcccacctagatggaccccaaatttcacacttcacatggaatccatcacattctccaaaactccaaaatccactactgaaccaa

SEQ ID NO: 7915 - DNA, 120 bp, synthetic construct
  misc_feature 1..120: note = Artificially Synthesized Probe
  source 1..120: mol_type = other DNA
tcctattggaatctagttgggggttggaggggtaaggaacacagggtgatagggaggggtcttagttcctttttctgtatcagaagccctgtcttcacaacacaggcacacaatttcagt

SEQ ID NO: 7916 - DNA, 120 bp, synthetic construct
  misc_feature 1..120: note = Artificially Synthesized Probe
  source 1..120: mol_type = other DNA
catgatccactgcacttggcccagtggtacagttttacactcattagatggtcaagaaatgcctaaacgctataataaatatagaactttaccttgagaagacctaacatttccttcaga

SEQ ID NO: 7917 - DNA, 120 bp, synthetic construct
  misc_feature 1..120: note = Artificially Synthesized Probe
  source 1..120: mol_type = other DNA
cgttatctgatgcattgcaaaagagaggacagttataaggggtggggaagagatggaatctctctttctctgaccctttttaaaatctcaaccttcccacctgatcttaatgcccaattc

SEQ ID NO: 7918 - DNA, 120 bp, synthetic construct
  misc_feature 1..120: note = Artificially Synthesized Probe
  source 1..120: mol_type = other DNA
tccagatttgaaccccaactctatcacctattagatgtcagttatctggcaagtgactcagcatctgtgagccagttccccatgtgtccaataaaattaacaagatcccttataggttga

SEQ ID NO: 7919 - DNA, 120 bp, synthetic construct
  misc_feature 1..120: note = Artificially Synthesized Probe
  source 1..120: mol_type = other DNA
gattacagacaaagcgataattttaatatactgtaaaaattgctgtaataggcagcccacaagacactgagcgagagcagaggaaaccatcgatccagcctggacggtcaaggctttctt

SEQ ID NO: 7920 - DNA, 120 bp, synthetic construct
  misc_feature 1..120: note = Artificially Synthesized Probe
  source 1..120: mol_type = other DNA
aataaaaaatagaactacgtgggatcaggtgcctcatgaaagccagagtcatgtgggcccagtggaagtatctaacctattatcagggaatctgtgaaggtgtttagtctggaaggaaat

SEQ ID NO: 7921 - DNA, 120 bp, synthetic construct
  misc_feature 1..120: note = Artificially Synthesized Probe
  source 1..120: mol_type = other DNA
caaattcgaaaggtgtaagacttatcttccatgaccggcttagtaagaagcagatccgttcagcaattgatagacacttggttttttttccacgttttgctgttatgaatattgctgctg

SEQ ID NO: 7922 - DNA, 120 bp, synthetic construct
  misc_feature 1..120: note = Artificially Synthesized Probe
  source 1..120: mol_type = other DNA
tgggagtctttttatggtggaaccagcttggaaaaaactagtttatgctcagctctcggtggcataatgagagtgtgggtattatttggtctttgttatttctcttcgtgtgagatgcat

SEQ ID NO: 7923 - DNA, 120 bp, synthetic construct
  misc_feature 1..120: note = Artificially Synthesized Probe
  source 1..120: mol_type = other DNA
gcccctgcaatccagcctgggtgacagagtgagactctgtttaaaaaaaaaaaaaaaaaaaaaaggtggccctggtgcggtggctcacgcctgtaatcccagcactttgggaggccgagg

SEQ ID NO: 7924 - DNA, 120 bp, synthetic construct
  misc_feature 1..120: note = Artificially Synthesized Probe
  source 1..120: mol_type = other DNA
ttaatggttttttttttcttgtaaatttgtttaacttccttgtagattctggatattagacttttgtgaattgatagattgcaaacattttctcccattctgtaggttgtctgttcactc

SEQ ID NO: 7925 - DNA, 120 bp, synthetic construct
  misc_feature 1..120: note = Artificially Synthesized Probe
  source 1..120: mol_type = other DNA
tatcattgacattcctcacacaattagaaaaaactataaaattcatatggaaccaaaaaagggcccatatagccaagacaatactaagcaaaaagaacaaagctggaggcctcaggctca

SEQ ID NO: 7926 - DNA, 120 bp, synthetic construct
  misc_feature 1..120: note = Artificially Synthesized Probe
  source 1..120: mol_type = other DNA
cagtgactgcggtgatggtgacgcgaatctacaactgtgacaaattggcatagaactagacacctactttatgccaatgtcaaattcctggtttttatgttgtactctaattacgtaaga

SEQ ID NO: 7927 - DNA, 120 bp, synthetic construct
  misc_feature 1..120: note = Artificially Synthesized Probe
  source 1..120: mol_type = other DNA
gataaaccatccacctagagtaggattgggggcagcatcttaacatctaactacttaggacacccaccctgtttacaggcagaaataaaggatttttaaaacaaagcaaatctgtgaaag

SEQ ID NO: 7928 - DNA, 120 bp, synthetic construct
  misc_feature 1..120: note = Artificially Synthesized Probe
  source 1..120: mol_type = other DNA
aaaaaaaaaaaaaagcagcagcatttgtaaagcacacctggcacattctgggctattaacaaggaaatgcatgcagctcccgtccacctttttcaacctcagttctatttcttctggatt

SEQ ID NO: 7929 - DNA, 120 bp, synthetic construct
  misc_feature 1..120: note = Artificially Synthesized Probe
  source 1..120: mol_type = other DNA
gtcaaaaaaaaaaaaaagaaacctccattctcccagctgcctgtagcccagggcttcctgccctcccacttccttcccacctctggccccgcccctgcagcccagggcttcctgccctcc

SEQ ID NO: 7930 - DNA, 120 bp, synthetic construct
  misc_feature 1..120: note = Artificially Synthesized Probe
  source 1..120: mol_type = other DNA
gacagtacacagtaatttgcagagtgcctgttgcctagcaagcgctggagtaagtaaatagcttaagcttatactgtgctgtaagcttgtattgccacatacaattgttacgttgtaaat

SEQ ID NO: 7931 - DNA, 120 bp, synthetic construct
  misc_feature 1..120: note = Artificially Synthesized Probe
  source 1..120: mol_type = other DNA
ataaataaaaaacttgtccaagatcataagtggcagagttgaaatctgcactcacagagtttgattccagggtctccgctcctaaacacgaacctacactactctgatgtgaggttgttg

SEQ ID NO: 7932 - DNA, 120 bp, synthetic construct
  misc_feature 1..120: note = Artificially Synthesized Probe
  source 1..120: mol_type = other DNA
tttataacgcggaatagaccacagtgcagctggccaggaattagggtggcgtgagtgaggcactctcctgggatgtaaaatttaattattcccaaacaattaacatatttgaaaaaatta

SEQ ID NO: 7933 - DNA, 120 bp, synthetic construct
  misc_feature 1..120: note = Artificially Synthesized Probe
  source 1..120: mol_type = other DNA
gtggggccctggacggggtctgggaacagaaataggatattagtggaaagactggtgaaattcaaatagcctggagtttacttgatataatatagttgtgtctatggttagttttttgtt

SEQ ID NO: 7934 - DNA, 120 bp, synthetic construct
  misc_feature 1..120: note = Artificially Synthesized Probe
  source 1..120: mol_type = other DNA
ggttgcctgtttttcgttttggcacagactctggtatgacttgacacaggcactggctgattctgcctttatttgaaattctggtttttttcattgtggatgtttttgcaatttattttg

SEQ ID NO: 7935 - DNA, 120 bp, synthetic construct
  misc_feature 1..120: note = Artificially Synthesized Probe
  source 1..120: mol_type = other DNA
tcgcttttatggacattcctgcctgctgggcgcggtgataagacatttgcatgcatatgctttactctgtcctaataatttcttcaaaagacacacaggaatgtaatttaagtgagagaa

SEQ ID NO: 7936 - DNA, 120 bp, synthetic construct
  misc_feature 1..120: note = Artificially Synthesized Probe
  source 1..120: mol_type = other DNA
ctcagcgtgtaagtcaggacgtctcagcatgtgctggccatgggtttcccggtatttacaacatttgcttgaatcagtattccatgattacatgataggatataatatatataataatcg

SEQ ID NO: 7937 - DNA, 120 bp, synthetic construct
  misc_feature 1..120: note = Artificially Synthesized Probe
  source 1..120: mol_type = other DNA
tggactccaagtcgccataatcgtacgggttacccaccattatcagtcccctcttatacatcaggctagtgagacagtatcttatccacagtcctacagctggcaggagtagattcaaac

SEQ ID NO: 7938 - DNA, 120 bp, synthetic construct
  misc_feature 1..120: note = Artificially Synthesized Probe
  source 1..120: mol_type = other DNA
taaatgagcgtggaatactactcagccattaaaaggagtgaaataatgtcttttggccaggcacagtggctcacatctgtaatgccagcactctgggaggccgaggtgggtggatcacga

SEQ ID NO: 7939 - DNA, 120 bp, synthetic construct
  misc_feature 1..120: note = Artificially Synthesized Probe
  source 1..120: mol_type = other DNA
atacatccatggatggataatgaatgagaggttgtttatattcacagttaaccctctcatctccagtaatgcaaccatcttcttcctgcttagccttttggagatgctgtccctttagtg

SEQ ID NO: 7940 - DNA, 120 bp, synthetic construct
  misc_feature 1..120: note = Artificially Synthesized Probe
  source 1..120: mol_type = other DNA
cattttttaaaaaaggggcaactgcagtgtagtagaacaaagttgtgaccaatgctaggatactctgttcatttcctgacccagccatgaatacactggaataactcatgcaaaatgcca

SEQ ID NO: 7941 - DNA, 120 bp, synthetic construct
  misc_feature 1..120: note = Artificially Synthesized Probe
  source 1..120: mol_type = other DNA
agtgctagcttcatcaatactcagtggcagtcaattgcttttccagggctgccttatgcttgaaattaaatctttgctatccagagttaggactgtccccggacttcctaacttgcctct

SEQ ID NO: 7942 - DNA, 120 bp, synthetic construct
  misc_feature 1..120: note = Artificially Synthesized Probe
  source 1..120: mol_type = other DNA
cctttttcctaggactgaagaggaactggcaggagcacaggtctcaggaaggaaccaggcagcctgggttgattctctagttaagagcagagtggcttgtttcatatttctttctttcta

SEQ ID NO: 7943 - DNA, 120 bp, synthetic construct
  misc_feature 1..120: note = Artificially Synthesized Probe
  source 1..120: mol_type = other DNA
tctaatccaaaatggctttggattagacttttcttcttacttttctgtgctttctccctgtagccactgtgatttatggcccaccagataggaacctagtttcctgctaacatagaaaat

SEQ ID NO: 7944 - DNA, 120 bp, synthetic construct
  misc_feature 1..120: note = Artificially Synthesized Probe
  source 1..120: mol_type = other DNA
gattcactctgacatctctgtggggatcattctcttcgttattttcctcaagaccaggggctagagctcaggtctgtcctttctgacaggcagcttaacaccataaaaagcagagacttt

SEQ ID NO: 7945 - DNA, 120 bp, synthetic construct
  misc_feature 1..120: note = Artificially Synthesized Probe
  source 1..120: mol_type = other DNA
aacaaaaaaagaactccagtagaacagatactgttcagcactaccagggttgtgctaggtgtggaagctcagtgaaatcttaagagttgacagttcttagaaaagggccatgtggacagg

SEQ ID NO: 7946 - DNA, 120 bp, synthetic construct
  misc_feature 1..120: note = Artificially Synthesized Probe
  source 1..120: mol_type = other DNA
gtcacttttttcttaattgcaaccccgattctcagcacccttttcatcttggttttcctcaatagcccttaccaccagcagacacacatcatctgttgtacttgcttatttggcacatat

SEQ ID NO: 7947 - DNA, 120 bp, synthetic construct
  misc_feature 1..120: note = Artificially Synthesized Probe
  source 1..120: mol_type = other DNA
gacgtcgggcgtgattcctgcagaagacacctgtgcacgaccgggaagtgggaaggagtgtttgagcaaatcatgggcgggagtgcggccaagggagctctgatcactgatactggtgga

SEQ ID NO: 7948 - DNA, 120 bp, synthetic construct
  misc_feature 1..120: note = Artificially Synthesized Probe
  source 1..120: mol_type = other DNA
ggaggagcatatctcatacccacagggagagtttctcaaggctgacattttcttggagaagttaactctaatatatcctcaatgcaagttttagtagcgacaagaagaatcttagatcac

SEQ ID NO: 7949 - DNA, 120 bp, synthetic construct
  misc_feature 1..120: note = Artificially Synthesized Probe
  source 1..120: mol_type = other DNA
caaggagctgaggacactgcctaaaacgtgccagcaaacaccatggacacacattgggaggatgaggttacttcaggcttcatgagcactcatcttcggaaagcgtttatttatttattt

SEQ ID NO: 7950 - DNA, 120 bp, synthetic construct
  misc_feature 1..120: note = Artificially Synthesized Probe
  source 1..120: mol_type = other DNA
gtttctttcctgaattgtagacacctatggactcatggtgacaaaccacagaggcttcaaatgaaaagtggggcccctgagagacaggacagtcaggaaaggaaggagctttttcttttt

SEQ ID NO: 7951 - DNA, 120 bp, synthetic construct
  misc_feature 1..120: note = Artificially Synthesized Probe
  source 1..120: mol_type = other DNA
atttaaaaaatagaaaagttttcctgtgaagtcttccagaaagttcctgtgcacatacacatctgtcatctcctctttgaaacacgtacacatgtgcacatgcacacaggttggttttct

SEQ ID NO: 7952 - DNA, 120 bp, synthetic construct
  misc_feature 1..120: note = Artificially Synthesized Probe
  source 1..120: mol_type = other DNA
tacctgactcaggctgataaggtatttatagttcaaaaaaagttgctgaatggcagtaatcccctggtgaggaacattccccatggctgtgctctccaaagtttgccaagattgggtgaa

SEQ ID NO: 7953 - DNA, 120 bp, synthetic construct
  misc_feature 1..120: note = Artificially Synthesized Probe
  source 1..120: mol_type = other DNA
ccaccacacccagccaagacttgctttttctaacctcttttgtcacacgcctgtgagggagggttgagaagttgaacaacttattttatttctttctgtattgatggaaattttcccatg

SEQ ID NO: 7954 - DNA, 120 bp, synthetic construct
  misc_feature 1..120: note = Artificially Synthesized Probe
  source 1..120: mol_type = other DNA
ctcccgagtagctgggattacaggtacctgccaccacacccagctaatttttgtgtttttagtagagatggagtttcaccatgttggctaggctggtctcgaactcctgacttcataatc

SEQ ID NO: 7955 - DNA, 120 bp, synthetic construct
  misc_feature 1..120: note = Artificially Synthesized Probe
  source 1..120: mol_type = other DNA
agtgtcctcatgacaaggcagcttatttctcccagagtgagtgatccaatagagagtaaggcagatgcctggaggtcttttgtgacctaatatcaggattcacattctttctttttttta

SEQ ID NO: 7956 - DNA, 120 bp, synthetic construct
  misc_feature 1..120: note = Artificially Synthesized Probe
  source 1..120: mol_type = other DNA
tagtacagttcctttcaatctgaagacatgagaatttaaagagacaaattacccctcacacacccagcatacaatggtgaggtgggcatgggatgactggtatgtatgggataattattt

SEQ ID NO: 7957 - DNA, 120 bp, synthetic construct
  misc_feature 1..120: note = Artificially Synthesized Probe
  source 1..120: mol_type = other DNA
tttatgaaactgtttgaatgtcttcacaacatgatagacagcttccccaaagcgagtcatccaagagagcaaagcagaaactgcacgttctctgaactcacttctgaagtcacatttcac

SEQ ID NO: 7958 - DNA, 120 bp, synthetic construct
  misc_feature 1..120: note = Artificially Synthesized Probe
  source 1..120: mol_type = other DNA
aaaaatacaaaaaaattagctaggcatgctggtggcgcaggcttgtagtcccagctactcaggagactgaggcatgagaattgttagaacccagaaagtggagactctgtctcaaaaaaa

SEQ ID NO: 7959 - DNA, 120 bp, synthetic construct
  misc_feature 1..120: note = Artificially Synthesized Probe
  source 1..120: mol_type = other DNA
ttccgagtgaaccatggtttgtggatcaggtcagtacagctgccctagactgtttccatgcctagcagcaaataaggttgactgatgaaatcctgaacacatcagtttgaacctttgtgt

SEQ ID NO: 7960 - DNA, 120 bp, synthetic construct
  misc_feature 1..120: note = Artificially Synthesized Probe
  source 1..120: mol_type = other DNA
gtttttatttatgttctatttactcacatgaatgtacataaaatatgaagaattccatctgaattctgagataccttccagcctgggccgaagagagcctcaggttgactgcagcccctc

SEQ ID NO: 7961 - DNA, 120 bp, synthetic construct
  misc_feature 1..120: note = Artificially Synthesized Probe
  source 1..120: mol_type = other DNA
atgtgacatgctaggtaggggtagaggatgcattccatttttcacttaaggacataaagccccaatgaagggaggtgacattttgccccctacttagtgtgtgtggttttgttttttttt

SEQ ID NO: 7962 - DNA, 120 bp, synthetic construct
  misc_feature 1..120: note = Artificially Synthesized Probe
  source 1..120: mol_type = other DNA
cataaggctggctaaccatagcactgttgcctgcctgcaactgactggtcagtagggcttctcctcctatgtggaataggtaaggaattgctggccctgtctgccctggggaccagaata

SEQ ID NO: 7963 - DNA, 120 bp, synthetic construct
  misc_feature 1..120: note = Artificially Synthesized Probe
  source 1..120: mol_type = other DNA
tgaattaagtgtcctttgccaagtcatggctgttgagaggcccatgaggtcaggtcagtgtttattgagtacctgctgcatacctagcttggggaaaggtagagaggccctcagagaggc

SEQ ID NO: 7964 - DNA, 120 bp, synthetic construct
  misc_feature 1..120: note = Artificially Synthesized Probe
  source 1..120: mol_type = other DNA
cctgagttactagagtgtatcctgctgaatcaagaaggtgatatctgaagaacccagggataggagcaggcgaagttcctgcaggtggggtctcgggtgagctacagccatcagctcagg

SEQ ID NO: 7965 - DNA, 120 bp, synthetic construct
  misc_feature 1..120: note = Artificially Synthesized Probe
  source 1..120: mol_type = other DNA
ggatctgtcatgtgtgaggaaagtgtctgttcaggttaggtgtgtataatgcagcctttcagagccgcgtctgtctgaggtcctaggagctggaatcagacaggtttgtatggctgggtt

SEQ ID NO: 7966 - DNA, 120 bp, synthetic construct
  misc_feature 1..120: note = Artificially Synthesized Probe
  source 1..120: mol_type = other DNA
attaaactgtcctgcagttgaggtcaggcacaggtagaacggatctatcaggtgaggcccaaggagtccggattaggctcatctagaaagacctggatgtggtagatgacctctgaggat

SEQ ID NO: 7967 - DNA, 120 bp, synthetic construct
  misc_feature 1..120: note = Artificially Synthesized Probe
  source 1..120: mol_type = other DNA
cttcacaaagctgagtgtgttcatgagacctaaaaagtcatagtcaagcccaggtaagaagaaccaagtgtgttggatgaggtgtaagcagctgaggtgtgaagtagaggtaggcagagc

SEQ ID NO: 7968 - DNA, 120 bp, synthetic construct
  misc_feature 1..120: note = Artificially Synthesized Probe
  source 1..120: mol_type = other DNA
acccatctttgacaggtatataactctgtagcctgaggcactggagttggacacaaataggcagaactaggtctcccaggtgaaaccattgcatcgatgctcagtgctggtatgtttatc

SEQ ID NO: 7969 - DNA, 120 bp, synthetic construct
  misc_feature 1..120: note = Artificially Synthesized Probe
  source 1..120: mol_type = other DNA
tagggtcagacacaattaggtgagtagtgtgggctcttatatcaagggaaagccgtagtcattgtaggtgtttgtacctgggtctgcctggtgatgtctagggaaccctaaagatcagct

SEQ ID NO: 7970 - DNA, 120 bp, synthetic construct
  misc_feature 1..120: note = Artificially Synthesized Probe
  source 1..120: mol_type = other DNA
aagaaaaaaatagaactgcatctgttagatgagatgtgagagcctatgtcaagcatgatgtagtctgtaggactgcgtctgtcaggtaaggttcccggaaacccagagcctttccaagtg

SEQ ID NO: 7971 - DNA, 120 bp, synthetic construct
  misc_feature 1..120: note = Artificially Synthesized Probe
  source 1..120: mol_type = other DNA
tcaggttccttttataagtggcctcagcaccatgttccaatttctcctcagcacttgtttctcagtttcacatttattggcatgattatttgatgtacgtctctctcccacactctgtgt

SEQ ID NO: 7972 - DNA, 120 bp, synthetic construct
  misc_feature 1..120: note = Artificially Synthesized Probe
  source 1..120: mol_type = other DNA
tgaggaggtaacatctagtacaggtatgaaatctgggtcttcctgtgtctgagaaggtagcacctggcacaggtatgaggatctgggtcttcccaatgtttgaggaggtagcatctggca

SEQ ID NO: 7973 - DNA, 120 bp, synthetic construct
  misc_feature 1..120: note = Artificially Synthesized Probe
  source 1..120: mol_type = other DNA
agaatctggatcttctagtgtctgaggaggtgggatctggtattaattatgagaatctggttctgtcagtgactgaggaggtaggatctggcataagcatgaggatctgggtctgtcaat

SEQ ID NO: 7974 - DNA, 120 bp, synthetic construct
  misc_feature 1..120: note = Artificially Synthesized Probe
  source 1..120: mol_type = other DNA
taggatctcatacaggtatgaggatctgggtttttcaatgtctgaggaggtaggatctggcacaggcatgagcatctgggtctgaccatgtctaaagagttgaagctgtgtgcaggtatg

SEQ ID NO: 7975 - DNA, 120 bp, synthetic construct
  misc_feature 1..120: note = Artificially Synthesized Probe
  source 1..120: mol_type = other DNA
ggagctctttgccccattgcccttgggcctggccaaggtccatctgtgctccttgtctcaggatgaatctttgtaactgaggttggttccatttgagtgtcatctgagtttgatcaccat

SEQ ID NO: 7976 - DNA, 120 bp, synthetic construct
  misc_feature 1..120: note = Artificially Synthesized Probe
  source 1..120: mol_type = other DNA
aaccctatccttgcttttgtttagtacaaagccagtccctgtccagcagctcttgagttgctctgggcaggtacagaaggcttcaccaacacctggaagcaaatcctgtgactgaaggag

SEQ ID NO: 7977 - DNA, 120 bp, synthetic construct
  misc_feature 1..120: note = Artificially Synthesized Probe
  source 1..120: mol_type = other DNA
tgagactctgtctctttgggaaaaaaagaagctgtgcactctggaccccagcctgctctcccttaagaaatgagctgattttgtgaccgattttgtctttagggaggtccttgcctgacc

SEQ ID NO: 7978 - DNA, 120 bp, synthetic construct
  misc_feature 1..120: note = Artificially Synthesized Probe
  source 1..120: mol_type = other DNA
ctgcatcacaaggtaagagcccccatctggccccatctggggggtctggctcacattgcacccagacctctgaaaacctggtgcattggttggcaatcacgttagttttctattcctgcc

SEQ ID NO: 7979 - DNA, 120 bp, synthetic construct
  misc_feature 1..120: note = Artificially Synthesized Probe
  source 1..120: mol_type = other DNA
gctactagataatccaggaaaatctccccttttgtttattttatttatttattttattttagagatagcatgtcactctgttgctgaggctggagtgcactggcccaatcatagctcact

SEQ ID NO: 7980 - DNA, 120 bp, synthetic construct
  misc_feature 1..120: note = Artificially Synthesized Probe
  source 1..120: mol_type = other DNA
tgtagttcttaaagagcagttatcactgttccctgccttgtggtgtcatcggatgtgtccccctcgctccaactgagctgtacagcgagtgacccaggctgggactgacccctgctgaga

SEQ ID NO: 7981 - DNA, 120 bp, synthetic construct
  misc_feature 1..120: note = Artificially Synthesized Probe
  source 1..120: mol_type = other DNA
tcaaggggtttagggatcaggactctcttggagacattccttggtgttttctgcaggtctttgaaggaaatcgcccaaccaactctattgtgttcaccaagctcacaccattcatgcttg

SEQ ID NO: 7982 - DNA, 120 bp, synthetic construct
  misc_feature 1..120: note = Artificially Synthesized Probe
  source 1..120: mol_type = other DNA
tatgtttgtttcgggtgaattcctggacaagaccgaggatgactgccatctcctggcaagacgctcaggtagttcttttgctttaaaaggcagatattgaaaactggaattttttttttt

SEQ ID NO: 7983 - DNA, 120 bp, synthetic construct
  misc_feature 1..120: note = Artificially Synthesized Probe
  source 1..120: mol_type = other DNA
gttgcccaggctggagtgcagtggtgtgatctcggctcactgcaagctccacctcccggcttcacgccattctcctgcctcagcctcccgagtagctgggactacaggtgcccgccacca

SEQ ID NO: 7984 - DNA, 120 bp, synthetic construct
  misc_feature 1..120: note = Artificially Synthesized Probe
  source 1..120: mol_type = other DNA
gctgttgtaactacaatgccagggcacactcggctgcaggacagtgagtagggtgagtagggtagtaggacagtgagtagggtgagtaggctgcaggacagtgagtagggtgagtagggt

SEQ ID NO: 7985 - DNA, 120 bp, synthetic construct
  misc_feature 1..120: note = Artificially Synthesized Probe
  source 1..120: mol_type = other DNA
gcctgggcagcattgtcgcaggacgtgagtgatgatgggaagttcgccctgcctgacccgcaatcccttgccccctaaacacacaggctcacgcacacagcacagcttacaggaccaagt

SEQ ID NO: 7986 - DNA, 120 bp, synthetic construct
  misc_feature 1..120: note = Artificially Synthesized Probe
  source 1..120: mol_type = other DNA
agctttggagaatggatttggagtgtcttgggcgatccagccagcgcaggccccccggcccggttgcttcctcagttcccggctgtgtccttggtgtcctttctccaccacctgtgagca

SEQ ID NO: 7987 - DNA, 120 bp, synthetic construct
  misc_feature 1..120: note = Artificially Synthesized Probe
  source 1..120: mol_type = other DNA
ttctcttcttttccttattaataaaacacacaatgcctagctggggggtcggaaggcaaatgccctagatggtggggtcacgtctttctccttctccttcctccttctgctggctgaagt

SEQ ID NO: 7988 - DNA, 120 bp, synthetic construct
  misc_feature 1..120: note = Artificially Synthesized Probe
  source 1..120: mol_type = other DNA
gaagcacgagcagatgttccgcgaggccgtgaaccaggccaacaagcggcacggctcctggaagattcagctcaatgccacctccgtcacgcacaagcccaacgccatccagatggctct

SEQ ID NO: 7989 - DNA, 120 bp, synthetic construct
  misc_feature 1..120: note = Artificially Synthesized Probe
  source 1..120: mol_type = other DNA
cacacatgctcacactcacaccaaatgttacattagcacacactcatgcacctcagcatcacacaatcaatttcatatgctcatctgcacacatgcagatccattgacacctgctcatgt

SEQ ID NO: 7990 - DNA, 120 bp, synthetic construct
  misc_feature 1..120: note = Artificially Synthesized Probe
  source 1..120: mol_type = other DNA
tttagatctgccccatggggccttggtcatgggcaggaaggctgggctgcacccccaatgcctcccttcccttccttgaggatgaggccagcactcaaagtaagggcttggtgttgttca

SEQ ID NO: 7991 - DNA, 120 bp, synthetic construct
  misc_feature 1..120: note = Artificially Synthesized Probe
  source 1..120: mol_type = other DNA
cccacattcatgcacgtccacacgctctcacgtgtccaactcacacatctgcaaacatgctcacatgcacactcatgtgctcttacacacacaatacacactctcttgcacatagagggc

SEQ ID NO: 7992 - DNA, 120 bp, synthetic construct
  misc_feature 1..120: note = Artificially Synthesized Probe
  source 1..120: mol_type = other DNA
cacaaagagggagcaggtgaaaaataacctggaagcctcagaggaccacaagatcagcaagagtccacagggacactgaaggaaccagggcttacctggacagacacagagaactgaggc

SEQ ID NO: 7993 - DNA, 120 bp, synthetic construct
  misc_feature 1..120: note = Artificially Synthesized Probe
  source 1..120: mol_type = other DNA
ccacagaaacccacgtcccttagggtgctatggggccaacactaaacctcctccatttccgagattatatgtgggaggagaggccggggtgggagagaggttcccagggtctaaaaagtg

SEQ ID NO: 7994 - DNA, 120 bp, synthetic construct
  misc_feature 1..120: note = Artificially Synthesized Probe
  source 1..120: mol_type = other DNA
agacacgagggggtcccagggtctagaaagtgtccccagggtggtagggacggggtgggagacacgagggggtcccagggtctagaacgtgtccccatgggggtggggacaggggtggga

SEQ ID NO: 7995 - DNA, 120 bp, synthetic construct
  misc_feature 1..120: note = Artificially Synthesized Probe
  source 1..120: mol_type = other DNA
gggctccctctgcactcctcaccaagacccattagccacctggttctaggacacactgacccccaacacagccaggcgtccactctgtggggctgcagagagatcagagctgggatttgg

SEQ ID NO: 7996 - DNA, 120 bp, synthetic construct
  misc_feature 1..120: note = Artificially Synthesized Probe
  source 1..120: mol_type = other DNA
acacacaagcatgctcagaccatctggcccttccccaaccttcacaggcctttgtggactaaccctcccatgctgacacccacaggcgcatgccacccctgcaggcgcacataacgcaca

SEQ ID NO: 7997 - DNA, 120 bp, synthetic construct
  misc_feature 1..120: note = Artificially Synthesized Probe
  source 1..120: mol_type = other DNA
ttctctgtgcacattattcatcagagtaaaaaaaggaactatgaaaacctcgaccaactgtcctatgacaacaagcgcggacccaaggtatatatgcatggacgtgcacgccacccacgg

SEQ ID NO: 7998 - DNA, 120 bp, synthetic construct
  misc_feature 1..120: note = Artificially Synthesized Probe
  source 1..120: mol_type = other DNA
agtagcttagggggaaatcagttaggtacccgggaaatcaagctgctctggacaggtccggtgccacagagcaaccttggggtggagcccactgtaaaaagctccctatttgcaaatggc

SEQ ID NO: 7999 - DNA, 120 bp, synthetic construct
  misc_feature 1..120: note = Artificially Synthesized Probe
  source 1..120: mol_type = other DNA
caggaaaaaagatttttaaagacgtgaccaggcaaagtcccaagggtatgcacaggtcccaaagaaggaatgccccgcccagggaaagacccgcccagaaaaaaagacccgccaagggaa

SEQ ID NO: 8000 - DNA, 120 bp, synthetic construct
  misc_feature 1..120: note = Artificially Synthesized Probe
  source 1..120: mol_type = other DNA
cccagggaaagccccacccagtgaaagcccctaccagaaaaagccccgcccagaaaaagcccctcttagagaaagccccgccagactctcagaagttaatttcctttttcgttgttttga

SEQ ID NO: 8001 - DNA, 120 bp, synthetic construct
  misc_feature 1..120: note = Artificially Synthesized Probe
  source 1..120: mol_type = other DNA
agccacttgtggcctcttctgttattttctgaattgtttacacttcccttactcatcacagagcttgagagaaattctgtagctgtgatgggataaaaggatggatgggcaggtgaacaa

SEQ ID NO: 8002 - DNA, 120 bp, synthetic construct
  misc_feature 1..120: note = Artificially Synthesized Probe
  source 1..120: mol_type = other DNA
atgcatacaccatacacatgtgcacaaatgtatgtacacacaccatagtcacaccatgcatcatctctacccacacatgcagaattgtgtataggtcatacacaacacatacgcatgtat

SEQ ID NO: 8003 - DNA, 120 bp, synthetic construct
  misc_feature 1..120: note = Artificially Synthesized Probe
  source 1..120: mol_type = other DNA
ctcggcctcccaaagggctgggatgacaggcatcagccaccacccccagctccaacaactttttttttttttttttttttttttttttttttttttttaagatggagtctcactctgtca

SEQ ID NO: 8004 - DNA, 120 bp, synthetic construct
  misc_feature 1..120: note = Artificially Synthesized Probe
  source 1..120: mol_type = other DNA
gtatcagctatttccataaaacgatcggatgagttttgatggacagatcaggcttttgtttacaactgttttgctcctaatcattccaccacatcacatgtcatggacctgaattgcgtc

SEQ ID NO: 8005 - DNA, 120 bp, synthetic construct
  misc_feature 1..120: note = Artificially Synthesized Probe
  source 1..120: mol_type = other DNA
agatattgtgaaagttaaacaacataatccccgtaaaacacttcgagcagtgcctggtatctggccagcaagtgatcaatggtgatccattaccatcctgggaccccatcagagccttct

SEQ ID NO: 8006 - DNA, 120 bp, synthetic construct
  misc_feature 1..120: note = Artificially Synthesized Probe
  source 1..120: mol_type = other DNA
acatcctctggacactgttacttctctcctctccccccacacccccagcaccaccacatctaatggcacaatcatctgccctcttctcaacactgacaccagtacctgggccgtcactgg

SEQ ID NO: 8007 - DNA, 120 bp, synthetic construct
  misc_feature 1..120: note = Artificially Synthesized Probe
  source 1..120: mol_type = other DNA
cagctatgcttccttccctagagtgctgatgtcttccaagtatgcggatggggtgactggtcgcgtggagttcaatgaggatggggaccggaagttcgccaactacagcatcatgaacct

SEQ ID NO: 8008 - DNA, 120 bp, synthetic construct
  misc_feature 1..120: note = Artificially Synthesized Probe
  source 1..120: mol_type = other DNA
gtctgaaagcagcggtcaaacgctaatggccaaaaggccccatctaggctgtgagatggagatggctttttacaaatttgtttctggcctcactaattttttaaaaatactagcatatat

SEQ ID NO: 8009 - DNA, 120 bp, synthetic construct
  misc_feature 1..120: note = Artificially Synthesized Probe
  source 1..120: mol_type = other DNA
gcacagcagggtgggggtcagcctgcaggctgggctgtttctcaccccaggaagatgcctggcatacacgggacatcagcggctcctctgctggagggaatcatgtctttttttttttga

SEQ ID NO: 8010 - DNA, 120 bp, synthetic construct
  misc_feature 1..120: note = Artificially Synthesized Probe
  source 1..120: mol_type = other DNA
cacggtgcctcagtgttgctacggcttttgcatcgacctgctcatcaagctggcacggaccatgaacttcacctacgaggtgcacctggtggcagatggcaagttcggcacacaggagcg

SEQ ID NO: 8011 - DNA, 120 bp, synthetic construct
  misc_feature 1..120: note = Artificially Synthesized Probe
  source 1..120: mol_type = other DNA
ctcagcgggcaggcagacatgatcgtggcgccgctaaccataaacaacgagcgcgcgcagtacatcgagttttccaagcccttcaagtaccagggcctgactattctggtcaagaaggtg

SEQ ID NO: 8012 - DNA, 120 bp, synthetic construct
  misc_feature 1..120: note = Artificially Synthesized Probe
  source 1..120: mol_type = other DNA
gaatggcttcatggaagacctggacaagacgtgggttcggtatcaggaatgtgactcgcgcagcaacgcccctgcgacccttacttttgagaacatggccggtgcgttctccttcatcca

SEQ ID NO: 8013 - DNA, 120 bp, synthetic construct
  misc_feature 1..120: note = Artificially Synthesized Probe
  source 1..120: mol_type = other DNA
tgtgtatggcacgtgagtccaagatgcattttgccctccgccgacccaagccccttgacacccttcggagacccccccctttcctgctatgtccttgtgctccgtgactctaatccgaat

SEQ ID NO: 8014 - DNA, 120 bp, synthetic construct
  misc_feature 1..120: note = Artificially Synthesized Probe
  source 1..120: mol_type = other DNA
taatcacttatacatattcattttaggatagaaagagtggtagagcagagcctgaccctaaaaagaaagccacatttagggctatcacctccaccctggcttccagcttcaagaggcgta

SEQ ID NO: 8015 - DNA, 120 bp, synthetic construct
  misc_feature 1..120: note = Artificially Synthesized Probe
  source 1..120: mol_type = other DNA
caaagagccaggccttctgccctttggagcccagaatcccccacctcctgctcggggcagcttgtccctgtagcggatatgcacactcggaccagaggcccccagagcgaacccagcctt

SEQ ID NO: 8016 - DNA, 120 bp, synthetic construct
  misc_feature 1..120: note = Artificially Synthesized Probe
  source 1..120: mol_type = other DNA
gggtattgattgttggttcttatttatagagcaccgggggtggacgcggcgctttgcaaaaccaaaaagacacagtgctgccgcgacgcgctattgagagggaggagggccagctgcagc

SEQ ID NO: 8017 - DNA, 120 bp, synthetic construct
  misc_feature 1..120: note = Artificially Synthesized Probe
  source 1..120: mol_type = other DNA
cagcctgagccacagtggggcccatggccccagctggctgggtcgcccctcctcgggcgcctgcgctcctctgcagcctgagctccaccctcccctcttcttgcggcaccgcccacccac

SEQ ID NO: 8018 - DNA, 120 bp, synthetic construct
  misc_feature 1..120: note = Artificially Synthesized Probe
  source 1..120: mol_type = other DNA
gtgcttggagcagcccatcggcaagaagctctttcagcagttcctacaatcggcagagaagcacctgccggccctggagctctggaaagacatcgaggactatgacacggcagacaatga

SEQ ID NO: 8019 - DNA, 120 bp, synthetic construct
  misc_feature 1..120: note = Artificially Synthesized Probe
  source 1..120: mol_type = other DNA
tggaactcggggcgagtaactatgctgtgtggttgtagcagtaatttttaaaaattagctttcttgacatctaattcccccaccgtgccattcacatctaactgtaaatttaacccaaca

SEQ ID NO: 8020 - DNA, 120 bp, synthetic construct
  misc_feature 1..120: note = Artificially Synthesized Probe
  source 1..120: mol_type = other DNA
gaccagaagtcccctgtatgtgaaggaattcacatgtctggttttctgaaatgggggtgcaggcatgttttgaagtcatttgcaattgctttgtgaaaggcgcatttaaagcatgtttgc

SEQ ID NO: 8021 - DNA, 120 bp, synthetic construct
  misc_feature 1..120: note = Artificially Synthesized Probe
  source 1..120: mol_type = other DNA
ggcctcctctcctgtttcctgtgacgatactcctggtgccacctcgtttaaattatttcttgtttaaatcatttcttttatttgttaggttttgcttctctgcaaaacctgtccgtggaa

SEQ ID NO: 8022 - DNA, 120 bp, synthetic construct
  misc_feature 1..120: note = Artificially Synthesized Probe
  source 1..120: mol_type = other DNA
acatggttctgaggccccagctctgtctttccatgattttactccccattaaacccggggtgcatggttcccacgtgtcttcccccaggtaccacatctacaacgtgaatgaggagaacc

SEQ ID NO: 8023 - DNA, 120 bp, synthetic construct
  misc_feature 1..120: note = Artificially Synthesized Probe
  source 1..120: mol_type = other DNA
ccctccttagcctttgggttttgccaatattgtgtctatttacctcaacctaattgtttgtatcaccacatttatctcatttttctcttccctctctcttaactctgtcttgctctccat

SEQ ID NO: 8024 - DNA, 120 bp, synthetic construct
  misc_feature 1..120: note = Artificially Synthesized Probe
  source 1..120: mol_type = other DNA
tgagtttgtgtatataggtgtgtctgtgtgcacatgggcgtctgtgtggttgtgcatttgtgtgcatgtgagtgttgtgaaccctgatatctgaggcaggtaccagttaatttagaaagt

SEQ ID NO: 8025 - DNA, 120 bp, synthetic construct
  misc_feature 1..120: note = Artificially Synthesized Probe
  source 1..120: mol_type = other DNA
gtgtacagcagccacaccgtgaatttgagttcttcctctctcctccgcagtcttgagggtccgcgtgtcgggctcacttctgctgggatttccagagaatgtcgcttccccgtggttgtt

SEQ ID NO: 8026 - DNA, 120 bp, synthetic construct
  misc_feature 1..120: note = Artificially Synthesized Probe
  source 1..120: mol_type = other DNA
tgcggacccaggggcgtgcacagggcggggccggtcatgcgcggtcctagtttgaggtcaggggcgggatccaggggcgtgcacagggcggggccggtcatgcgcggtcctagtttgagt

SEQ ID NO: 8027 - DNA, 120 bp, synthetic construct
  misc_feature 1..120: note = Artificially Synthesized Probe
  source 1..120: mol_type = other DNA
atgcgcggtcctagtttgagttcaggggcgggagaatttgtgaacagagcaggtagagctgtctccctcacgctttctgtcaatatttactggccgctgcgtggctgcaggtccctcagg

SEQ ID NO: 8028 - DNA, 120 bp, synthetic construct
  misc_feature 1..120: note = Artificially Synthesized Probe
  source 1..120: mol_type = other DNA
catgcagccatctggagggagggcccagagctcatggctgccgccactggagacaagagggcggagcactcagggaggcagcccacggtctatggactgggttgtgggttgtggactgtg

SEQ ID NO: 8029 - DNA, 120 bp, synthetic construct
  misc_feature 1..120: note = Artificially Synthesized Probe
  source 1..120: mol_type = other DNA
cgaggagtacccatggcgatgaggagtacccatggcgatgaggagtacccatggcgatgaggagtacccatggcgatgaggaatacccatggcaaggagtacccatggtgatgaggagta

SEQ ID NO: 8030 - DNA, 120 bp, synthetic construct
  misc_feature 1..120: note = Artificially Synthesized Probe
  source 1..120: mol_type = other DNA
acacagagcgtggagtggaaagtgtgttttgaatttagtaaagtgttgggaagcagccactcagatactctcgtggacagagctgatggctggacacacatgtgatctgctttccctcct

SEQ ID NO: 8031 - DNA, 120 bp, synthetic construct
  misc_feature 1..120: note = Artificially Synthesized Probe
  source 1..120: mol_type = other DNA
acagtcccccagtccccgtggctgagcccagacccgcccctccatcccgacacagtcccccagtccctgcggctgcacccagacccgtccctccatcccgacagtcccccagtccccgca

SEQ ID NO: 8032 - DNA, 120 bp, synthetic construct
  misc_feature 1..120: note = Artificially Synthesized Probe
  source 1..120: mol_type = other DNA
gattctccccagtaaaagagtccaggaaggctgcctcagtgcagctacagtcaacaagtcccgccctgtgcccagcactagagtgggcatggggcatttttggttgtcatttttggttgt

SEQ ID NO: 8033 - DNA, 120 bp, synthetic construct
  misc_feature 1..120: note = Artificially Synthesized Probe
  source 1..120: mol_type = other DNA
cggatcctaggccaccagaactgcaaatagggataacattgggaggtgccagtcccttattcaagacaagtggagaaaagctggctttttccctgtgaggctgactcagagctcagggct

SEQ ID NO: 8034 - DNA, 120 bp, synthetic construct
  misc_feature 1..120: note = Artificially Synthesized Probe
  source 1..120: mol_type = other DNA
cctggtgctggagggagcccaagatcaaatggaggccagtggctcaggccgtctgccggggagaaagtcatccacccaccagcacttgcttgacaagtggatgcggaagatactatgtgc

SEQ ID NO: 8035 - DNA, 120 bp, synthetic construct
  misc_feature 1..120: note = Artificially Synthesized Probe
  source 1..120: mol_type = other DNA
gcgtgtatgtgtgtgtgttcatgcacttttgcatctgagacacagccataccctctaggaccctgtggtcaggtggaagggtcaggccacgtgcagtgtgactaacttaggacagggcca

SEQ ID NO: 8036 - DNA, 120 bp, synthetic construct
  misc_feature 1..120: note = Artificially Synthesized Probe
  source 1..120: mol_type = other DNA
ctttcatcccagactccaaaactgtctacgcaaaggatattcaggacgtgggtgccttttccaccgtcaaaggtgtggcctttgacaaaacagacacagaattctttcaggaatttgcca

SEQ ID NO: 8037 - DNA, 120 bp, synthetic construct
  misc_feature 1..120: note = Artificially Synthesized Probe
  source 1..120: mol_type = other DNA
acaatgcacctggcatttccaactgcactttgaacactgaaggttccccaaatgctttgtgtgttttaactgcaggaagttagttctgttgcaactgcctccaggacacactccctcttg

SEQ ID NO: 8038 - DNA, 120 bp, synthetic construct
  misc_feature 1..120: note = Artificially Synthesized Probe
  source 1..120: mol_type = other DNA
cctcttcctgttggggagaagaggaccctggcaatccacaattttggagatttgctggctgcagccaaaatggggacccaactccctcctatgtggttttagagcttctggagggaagat

SEQ ID NO: 8039 - DNA, 120 bp, synthetic construct
  misc_feature 1..120: note = Artificially Synthesized Probe
  source 1..120: mol_type = other DNA
ctggaatacacagactcaagctatgaggaaaagaagtacacgatgggggacggtaatggcaccctcgtgttcgggctctgcccactcacgctaagttggcaccaagcaacccatggtggc

SEQ ID NO: 8040 - DNA, 120 bp, synthetic construct
  misc_feature 1..120: note = Artificially Synthesized Probe
  source 1..120: mol_type = other DNA
atcagcagttattctcacgactccaatgtcatgtcaacaaaagcagaggcaattcccaccaaccttaggacacgatccaggcatcccagggtagaaattcagttcctgtatggtaaagtt

SEQ ID NO: 8041 - DNA, 120 bp, synthetic construct
  misc_feature 1..120: note = Artificially Synthesized Probe
  source 1..120: mol_type = other DNA
tttgcaggaaacaaggtaaaggaggagtgatatggggaatgagatctgttttgcttcacgtgttatggaggttccagcccacatattcttggccttctgcagatcacttttgtagatttt

SEQ ID NO: 8042 - DNA, 120 bp, synthetic construct
  misc_feature 1..120: note = Artificially Synthesized Probe
  source 1..120: mol_type = other DNA
ttcatgaccatagatggagctggcaatagtaggactgacacaacggtgacattgatgtctagtactgaacccacaggcaatattcatagctacctccagaagctttgcatgattggaccc

SEQ ID NO: 8043 - DNA, 120 bp, synthetic construct
  misc_feature 1..120: note = Artificially Synthesized Probe
  source 1..120: mol_type = other DNA
acccttgctgatcttgtttcagagcacaaatcctactttagtacagatctgggaatttgaggcattagtccaacgggcttctgagcctagaatctgtttccctttcccatcaagaaatct

SEQ ID NO: 8044 - DNA, 120 bp, synthetic construct
  misc_feature 1..120: note = Artificially Synthesized Probe
  source 1..120: mol_type = other DNA
aggccagaactggagagagacagaaccaggctacactgcagttctattccccttactaggtatttaaatgtaaggaagttgctgaacttctgtttcccacatgagaaatggtgataatag

SEQ ID NO: 8045 - DNA, 120 bp, synthetic construct
  misc_feature 1..120: note = Artificially Synthesized Probe
  source 1..120: mol_type = other DNA
tctctgggtttacttcctctctttcctgggtacctgtgagagaaatgtctttagtccttgcataactgaaagtgcctttacatgcttactgaatactctggctgaggatttagtctgttc

SEQ ID NO: 8046 - DNA, 120 bp, synthetic construct
  misc_feature 1..120: note = Artificially Synthesized Probe
  source 1..120: mol_type = other DNA
tactgcgcctgaccatatcttttgcttttttacttaagctttttctgtttatcattctgaggtctataattccaaaggccgtgtggggatctacaggttgatctcttcctgactcacatc

SEQ ID NO: 8047 - DNA, 120 bp, synthetic construct
  misc_feature 1..120: note = Artificially Synthesized Probe
  source 1..120: mol_type = other DNA
ggaatacttactctgctataatgaaaataaatgtgctaacactatgtgcaaaaacatggatgggtctcacagatgtgttgagtaaaaggatccagacaggagaaaggacacacaatctca

SEQ ID NO: 8048 - DNA, 120 bp, synthetic construct
  misc_feature 1..120: note = Artificially Synthesized Probe
  source 1..120: mol_type = other DNA
aaaactgtatatgttggcagtctatatgcatgcctacttctaatattgatggctatctcacattagttcctgtggattaactatagtttgcctagtcattcttatgctatggcgtatgtg

SEQ ID NO: 8049 - DNA, 120 bp, synthetic construct
  misc_feature 1..120: note = Artificially Synthesized Probe
  source 1..120: mol_type = other DNA
atgaatctacttgttcgtgaatctcctgtataaaactctctgtttacccattctctaccggtggcttagtcatctccaggagaaagattaaagaatgatcttgtggcagtcaaggctttt

SEQ ID NO: 8050 - DNA, 120 bp, synthetic construct
  misc_feature 1..120: note = Artificially Synthesized Probe
  source 1..120: mol_type = other DNA
atggaaagcactgtctgagatgcctcacagtaaactccaaggagattttgagggaagatattatctttcctggtaaatctccgtgttgatgatcattgttttaaagtctccagagatgaa

SEQ ID NO: 8051 - DNA, 120 bp, synthetic construct
  misc_feature 1..120: note = Artificially Synthesized Probe
  source 1..120: mol_type = other DNA
tgtttacctttttatattgatctagcgtcagagtttgagaaattgtagaaagattagaaacgactctgattaccctagatactaatgtttccacatgggctttctgccccccagagtacc

SEQ ID NO: 8052 - DNA, 120 bp, synthetic construct
  misc_feature 1..120: note = Artificially Synthesized Probe
  source 1..120: mol_type = other DNA
tctcttaaggtaacttattgcttccacttctgtttccatctctaactttgtgcctgttctactttcttgaaattctagtttgtttgccttattcttggtatcacaggcatgttggaaaaa

SEQ ID NO: 8053 - DNA, 120 bp, synthetic construct
  misc_feature 1..120: note = Artificially Synthesized Probe
  source 1..120: mol_type = other DNA
tcccacctgatatgtagttggagatgggcaaatacagcgtccttgaagcatcattttattcatagtgcctggaatgtagtaggatctcgacaattgttgtttcaataaaggaatgaccaa

SEQ ID NO: 8054 - DNA, 120 bp, synthetic construct
  misc_feature 1..120: note = Artificially Synthesized Probe
  source 1..120: mol_type = other DNA
tttaatatggacatttatcggttcccaaattaatacttttataatttcttatgcctgccttactttaatctcttaatcctgttatcttcttaagctgaggatataggtcacctcaggacc

SEQ ID NO: 8055 - DNA, 120 bp, synthetic construct
  misc_feature 1..120: note = Artificially Synthesized Probe
  source 1..120: mol_type = other DNA
cagtccagtcctcagaaacgcttgttcggctccctgatgattggtgaattttctatgtattgtctcgggtaactatgggtcacatggagtctaaatattatgcttatctctgctatatta

SEQ ID NO: 8056 - DNA, 120 bp, synthetic construct
  misc_feature 1..120: note = Artificially Synthesized Probe
  source 1..120: mol_type = other DNA
tttcccttatctacacatacttttactgtcacttctatgccaactccatctcatgtgcctgctcttgaaacttccatgcaatgcttattacgccagaacaaagaaacaagtggattagag

SEQ ID NO: 8057 - DNA, 120 bp, synthetic construct
  misc_feature 1..120: note = Artificially Synthesized Probe
  source 1..120: mol_type = other DNA
gatggcaatcaaactggcttgactgaattcttttcttggagcctgctataattgtggtcaacttcatcatacccaaaaaaattgcactgttaaaagcggccaagccagctcaacaaacat

SEQ ID NO: 8058 - DNA, 120 bp, synthetic construct
  misc_feature 1..120: note = Artificially Synthesized Probe
  source 1..120: mol_type = other DNA
aattaatattccacataactcttctcgtgctcccagtcaacatataatggaaaacgtggggactgttcctggactcagtctcggtccaaaacatgaaggaattactaaattcctttatgg

SEQ ID NO: 8059 - DNA, 120 bp, synthetic construct
  misc_feature 1..120: note = Artificially Synthesized Probe
  source 1..120: mol_type = other DNA
ctatgggttataaataccctcctctgtgcctcggacatgcaactcgttgtatccatctagaaactcaagtctgggctgcttatcttctggagagattagctacaggaaaatggggacatt

SEQ ID NO: 8060 - DNA, 120 bp, synthetic construct
  misc_feature 1..120: note = Artificially Synthesized Probe
  source 1..120: mol_type = other DNA
tcctttacgggactccaattggcattacgataattcttatcgacccaggtatgcccctctacttcttcagcatccccaggcacctcggtttgcttctttatggtggagaacatcgggcat

SEQ ID NO: 8061 - DNA, 120 bp, synthetic construct
  misc_feature 1..120: note = Artificially Synthesized Probe
  source 1..120: mol_type = other DNA
gatgaacagaaaacgtgtccccattgacagcaacatgttgcgccagaaagccttgagcctataccaagacttcagcaagggatgctctgaaactgacaccaagccatttactgcgagtaa

SEQ ID NO: 8062 - DNA, 120 bp, synthetic construct
  misc_feature 1..120: note = Artificially Synthesized Probe
  source 1..120: mol_type = other DNA
agcagataaaattcatctaaatcctgctaccccaacaaagaaaactgtttatttcaactggtgctacatgaatattcgttttactgtgtcggccagatgctcacacaaaaggcagagctg

SEQ ID NO: 8063 - DNA, 120 bp, synthetic construct
  misc_feature 1..120: note = Artificially Synthesized Probe
  source 1..120: mol_type = other DNA
ctttcaccagaattatggttttgggcaatctggtctgggcgcagtggctgaaagtgcaatggcagcactttgggagtccgaggtggaaggatcacctgggcttaggagtttgagaccagc

SEQ ID NO: 8064 - DNA, 120 bp, synthetic construct
  misc_feature 1..120: note = Artificially Synthesized Probe
  source 1..120: mol_type = other DNA
caaggcccatttgacctggctttgtttcccaccaaacagaagaatggaaaagtcacatcatatggacgcttatctgaagactaagctaaacattaacaaaaagagagggggaaataattg

SEQ ID NO: 8065 - DNA, 120 bp, synthetic construct
  misc_feature 1..120: note = Artificially Synthesized Probe
  source 1..120: mol_type = other DNA
cttcctactacatcatttttagacacaaatcaactattatttttcttctgttgcccaatccccaaaacagtaatctgatcctacatttgaaaaaaaacctgggcccagtgcagtgcctca

SEQ ID NO: 8066 - DNA, 120 bp, synthetic construct
  misc_feature 1..120: note = Artificially Synthesized Probe
  source 1..120: mol_type = other DNA
cagagacagctttctgactagaggtaattcaaaaccagctcatgttgacctaaccgttttaggaattgcttcagtctcaaagaagttggagttgtttatgaagaggcagcaaaattccac

SEQ ID NO: 8067 - DNA, 120 bp, synthetic construct
  misc_feature 1..120: note = Artificially Synthesized Probe
  source 1..120: mol_type = other DNA
cactcaatctcgtgctttacataaacatctaaaaatcgtcggcctcggggttgtaaagttttggagtttaacttaggtgaacagtaatgtctctccattttcaaaacccaccggctaatt

SEQ ID NO: 8068 - DNA, 120 bp, synthetic construct
  misc_feature 1..120: note = Artificially Synthesized Probe
  source 1..120: mol_type = other DNA
cgcgccttcgaggaacaaaaaaaaaaaaaaaaaaaaaaaaaaagaaaaaaaagaaaaaaaaaaggaggaggaggaggagggtgagagagaagctgggagagcagagaaaaggggccaccg

SEQ ID NO: 8069 - DNA, 120 bp, synthetic construct
  misc_feature 1..120: note = Artificially Synthesized Probe
  source 1..120: mol_type = other DNA
aaggaaaatgaaatggaaaaagctgtctccttcccgctccccgacttctccactttttcttaatccagcttttgctttttcgtgtagcgaattttgtcctccctaggttatggatttgcg

SEQ ID NO: 8070 - DNA, 120 bp, synthetic construct
  misc_feature 1..120: note = Artificially Synthesized Probe
  source 1..120: mol_type = other DNA
tctcttttaaattcaactttgccgcagacaatggcttgatcagccaacagtgcagaggagaagtctccagtccttcagggaacaaaaggggaagttagtttgcaaatgagaacgtgcagg

SEQ ID NO: 8071 - DNA, 120 bp, synthetic construct
  misc_feature 1..120: note = Artificially Synthesized Probe
  source 1..120: mol_type = other DNA
gtagcaatgctgcttacatttgagtgtcttccgtgccccctccatggctcttgagcgctttggatgtacagtatttttcttatttaatctttgtgacaagtctgtaattctattctatag

SEQ ID NO: 8072 - DNA, 120 bp, synthetic construct
  misc_feature 1..120: note = Artificially Synthesized Probe
  source 1..120: mol_type = other DNA
ggacgactgacggtagattgctcagaaaactggctgagagttgagaattcctgttagccatgattagaaaagttaaaagtttcataagtctccagtttaaaaaggggccatggatttaag

SEQ ID NO: 8073 - DNA, 120 bp, synthetic construct
  misc_feature 1..120: note = Artificially Synthesized Probe
  source 1..120: mol_type = other DNA
tttttaggtttttaaaattataatggatttctttccggggaaaataaccgcagataggtgggaggaatggttttagtttacagttgatgacccccctcctttccccacctacacccttag

SEQ ID NO: 8074 - DNA, 120 bp, synthetic construct
  misc_feature 1..120: note = Artificially Synthesized Probe
  source 1..120: mol_type = other DNA
acctaatcagttgcttattctaattgtagagttgagatacttgggaatcagtaggcttaagctggcagcatagctctatgaagactcatactcggttaactaaagtgtattggggctacc

SEQ ID NO: 8075 - DNA, 120 bp, synthetic construct
  misc_feature 1..120: note = Artificially Synthesized Probe
  source 1..120: mol_type = other DNA
tagttacttaaaaaatatatcatgagagggaagacaaatttataaattgagagagggtttatagcttatggctagcgacacaagtttgaagtctgactgcctggattccagtcctggccc

SEQ ID NO: 8076 - DNA, 120 bp, synthetic construct
  misc_feature 1..120: note = Artificially Synthesized Probe
  source 1..120: mol_type = other DNA
tgaggaagcgaaaattttactagtaatatcgactatgacgttaatctccaagaactctggagaatatgaattgcaagggcaaggacttattcctctgtgggattttcccctgtgactgtt

SEQ ID NO: 8077 - DNA, 120 bp, synthetic construct
  misc_feature 1..120: note = Artificially Synthesized Probe
  source 1..120: mol_type = other DNA
atatgaggaaagggcagagaaatagaccctgcaagattcattagtgttactccttcctcctgttcgttttctttcttcgttttcccccccggtaagcattaaaaaaaattttttttggct

SEQ ID NO: 8078 - DNA, 120 bp, synthetic construct
  misc_feature 1..120: note = Artificially Synthesized Probe
  source 1..120: mol_type = other DNA
aaaaagaaaatcctgtaagatgaatttgttcctttatgaagaataaatttgtgtctgccatttacaccgtgaatgcctttctttggagtggttccttgtagtgttttttgttgttgtcgt

SEQ ID NO: 8079 - DNA, 120 bp, synthetic construct
  misc_feature 1..120: note = Artificially Synthesized Probe
  source 1..120: mol_type = other DNA
ataactggttatatagaaccctgtttagcagacagagcctaggaagttttctgattgtataggttctatgcttttgagaattcctgcttgtgttttgatctcatttccatacacagtcct

SEQ ID NO: 8080 - DNA, 120 bp, synthetic construct
  misc_feature 1..120: note = Artificially Synthesized Probe
  source 1..120: mol_type = other DNA
ccaccgtgtccggccaaggtgactttttaaagttaaattttaaaacgatctttgaggagtaaatttgacataagcaggtgttcatgcacaaatgccttaaaaggtacacatacttcattt

SEQ ID NO: 8081 - DNA, 120 bp, synthetic construct
  misc_feature 1..120: note = Artificially Synthesized Probe
  source 1..120: mol_type = other DNA
cacctgtaagatttgagacaggacttgaattcagaacttttgcctgattgcaaagctcaccttcctaatagctttgctctgttgcctgccttctgtgaacagtgcttttaaaaaagtaaa

SEQ ID NO: 8082 - DNA, 120 bp, synthetic construct
  misc_feature 1..120: note = Artificially Synthesized Probe
  source 1..120: mol_type = other DNA
tttgttatttattgatgtaagtgccagctttatttcagcagatagaaattaacaattttgtatcttaaaatgtcagcatacgcccctagaaaaatttcacagccggctggccatggtgtc

SEQ ID NO: 8083 - DNA, 120 bp, synthetic construct
  misc_feature 1..120: note = Artificially Synthesized Probe
  source 1..120: mol_type = other DNA
ttcattataagcaaggcatacagaagtcctgcctattccaggtctagtgtagtctctggagaacttatcttttctaagatactatgtacagtaaacaggaagctctctgttggaggatat

SEQ ID NO: 8084 - DNA, 120 bp, synthetic construct
  misc_feature 1..120: note = Artificially Synthesized Probe
  source 1..120: mol_type = other DNA
ggtaggcactattatgatcccattttaaagttgagaaaaatgaggttaactaatctgaaaaatatagtaagggacagtgttaatataaaactaggcagccagacaactcctgctcttaac

SEQ ID NO: 8085 - DNA, 120 bp, synthetic construct
  misc_feature 1..120: note = Artificially Synthesized Probe
  source 1..120: mol_type = other DNA
gagacttgcattcaagttctgcccatcgttttggtgatggatgtcctttattgcaagactgtaatccaggatcacatttccacccagtttccttgcctctctaatatacttttttgagat

SEQ ID NO: 8086 - DNA, 120 bp, synthetic construct
  misc_feature 1..120: note = Artificially Synthesized Probe
  source 1..120: mol_type = other DNA
catgcttatattgaggttaagcattttgagcaggaatatccatgttttccttgcattttgttgggtgggacgtggtgtttgtctgtctggagactagtgttaactttgatgacttggtta

SEQ ID NO: 8087 - DNA, 120 bp, synthetic construct
  misc_feature 1..120: note = Artificially Synthesized Probe
  source 1..120: mol_type = other DNA
atgaagttaatttctttgctgtcattcgaaagacaaactgatagggtcagcaaactaccttaaacatgttctcattaaaacaaaaattaaaaacacagctcctatagccagacgtggtgg

SEQ ID NO: 8088 - DNA, 120 bp, synthetic construct
  misc_feature 1..120: note = Artificially Synthesized Probe
  source 1..120: mol_type = other DNA
tttttcctcttatacaaaagataactggagactagatctcaaagaatgaagacagctggaaagctggaagacaccagaaaaccaagaaagagagaacttccctgaaatactggccaaggc

SEQ ID NO: 8089 - DNA, 120 bp, synthetic construct
  misc_feature 1..120: note = Artificially Synthesized Probe
  source 1..120: mol_type = other DNA
tgggcctggtgtttctcatcagtttaaatccatttcaccttcgttgagactgagtcttcagtcttttaggtggcgagtcaaggttttactaatttaaactattgtctaaattcagggctg

SEQ ID NO: 8090 - DNA, 120 bp, synthetic construct
  misc_feature 1..120: note = Artificially Synthesized Probe
  source 1..120: mol_type = other DNA
gattacaggcgtgagccgctgccatattttccatttattttttttttaaccaaatgccttattttcttagaatgtgactgatgctgatacagaaagttcagtgtccactatcatctttgc

SEQ ID NO: 8091 - DNA, 120 bp, synthetic construct
  misc_feature 1..120: note = Artificially Synthesized Probe
  source 1..120: mol_type = other DNA
gtgttctagcacctgcccacttgccagtctgactggaaccttgttttgaagcagaaatgtattgaaagttcagaagtatctcagagaacagcatcataaaaaatattaagaacctcagtt

SEQ ID NO: 8092 - DNA, 120 bp, synthetic construct
  misc_feature 1..120: note = Artificially Synthesized Probe
  source 1..120: mol_type = other DNA
ttttgtgtgtctgtttaatcacagtatatcccgtgtcatcttgttctgaccagcccacagtaattgggtttgggtaggctcatgacacatatgcccagatcttttacacaaaatgtaatg

SEQ ID NO: 8093 - DNA, 120 bp, synthetic construct
  misc_feature 1..120: note = Artificially Synthesized Probe
  source 1..120: mol_type = other DNA
aagtctcgaacttggattagagtgattctaggcaggtgttgtctcttgacacctggaggaagctgccttcaccctaggcttaagattataagtaattttttcacgtaaaataactaactc

SEQ ID NO: 8094 - DNA, 120 bp, synthetic construct
  misc_feature 1..120: note = Artificially Synthesized Probe
  source 1..120: mol_type = other DNA
cagtgaaactgtagaaaacatcttagacaaagaaaacctcttaaaaacagcaggagtaggaatgggaatcacctaaaaagagaccgtagattacttctcaatagcgacagtggaagccaa

SEQ ID NO: 8095 - DNA, 120 bp, synthetic construct
  misc_feature 1..120: note = Artificially Synthesized Probe
  source 1..120: mol_type = other DNA
aataaatgttcatttctttttccaacccttcttattttaagttgagggtattcataaaagggattgagcatttccatttatggacgaggcaactgagtacagcccccaggggcacgcagc

SEQ ID NO: 8096 - DNA, 120 bp, synthetic construct
  misc_feature 1..120: note = Artificially Synthesized Probe
  source 1..120: mol_type = other DNA
caaaacaaaaacaaaaggccgggcgtggtgggaggccaaggtaggtggataacctgaagtcagaagttccagaccagcctggccaacatggcgaaactccatctctactaaaaatacaaa

SEQ ID NO: 8097 - DNA, 120 bp, synthetic construct
  misc_feature 1..120: note = Artificially Synthesized Probe
  source 1..120: mol_type = other DNA
gcagtaggcagaaaattgccctagtttcatgttctgactgtgatagtggcaatatgaccttgacaaatcactgcatttgtaaaatgagaacacatctctgttttctttcgctggggaatt

SEQ ID NO: 8098 - DNA, 120 bp, synthetic construct
  misc_feature 1..120: note = Artificially Synthesized Probe
  source 1..120: mol_type = other DNA
agccaccacgcccagtggattatggtttttattataaagcgcaacttcctaagtatgtatgcttcgttacttgttgatgggtaatctgggctagcagttaattcacatggtaacagataa

SEQ ID NO: 8099 - DNA, 120 bp, synthetic construct
  misc_feature 1..120: note = Artificially Synthesized Probe
  source 1..120: mol_type = other DNA
cgtgcctggccagaatatgctgtattataaagaatcttacatgttacttgatgcctgtgatctattttcttagtaagaagagaaacttctctccactcagcctcagtccactgtacccac

SEQ ID NO: 8100 - DNA, 120 bp, synthetic construct
  misc_feature 1..120: note = Artificially Synthesized Probe
  source 1..120: mol_type = other DNA
ctcgagtccatggtgaggccttctgttccatcattccatagttgggtaggcctgcactgtagataaggttgatttgtttttgtggaagatagaattttatggtttttagttttaatgagt

SEQ ID NO: 8101 - DNA, 120 bp, synthetic construct
  misc_feature 1..120: note = Artificially Synthesized Probe
  source 1..120: mol_type = other DNA
ttaatctcgtagaaatatgcttagtaaaagtcagtaaatactctgcccacctaaaagtgattctggctgtgtgtacacaggggaatacttctggaggtggggattatgtaatgaatgctg

SEQ ID NO: 8102 - DNA, 120 bp, synthetic construct
  misc_feature 1..120: note = Artificially Synthesized Probe
  source 1..120: mol_type = other DNA
ggaatcactgaaatatgtcaggatagatactgaagagttaagaaaaatggtagtgtttgttgtacggtgttccttgcttggctttactctgggttaatgagatgcattagagagaaggta

SEQ ID NO: 8103 - DNA, 120 bp, synthetic construct
  misc_feature 1..120: note = Artificially Synthesized Probe
  source 1..120: mol_type = other DNA
tattgcaaaattaaacagttctcctccactccctcacagatacgagtcaccttatcacagtcttcagtgagttttgtaatctgcatttagagcagtggtgagcttatttgacattggaac

SEQ ID NO: 8104 - DNA, 120 bp, synthetic construct
  misc_feature 1..120: note = Artificially Synthesized Probe
  source 1..120: mol_type = other DNA
ctattgtaattgtactgggagtcctcgaacgcacacatataatatggcaaacctaataggtaaatatgtgttctgactgcttcaccaatcgcctggtcccccatcattccctttcctcag

SEQ ID NO: 8105 - DNA, 120 bp, synthetic construct
  misc_feature 1..120: note = Artificially Synthesized Probe
  source 1..120: mol_type = other DNA
gtggcgtgcacctgtagtcccagctgctctggaggctgaggtacgagaatcgcttgagcccaggaggcggaggttgcagtgagctgagatctcgccattgcactccagcctggactcttg

SEQ ID NO: 8106 - DNA, 120 bp, synthetic construct
  misc_feature 1..120: note = Artificially Synthesized Probe
  source 1..120: mol_type = other DNA
tgttcaagcattgattatgtttctgtgtttctttatactaataatgctgttttgattgtgtgtgtatcagctgctgtctgccccaccaataccataagcccgcctgcagctgtacttatt

SEQ ID NO: 8107 - DNA, 120 bp, synthetic construct
  misc_feature 1..120: note = Artificially Synthesized Probe
  source 1..120: mol_type = other DNA
ctcagcctttctagtagctgggattacaggcgtgtgtcactacactcggctaattttttttttttttttcgagacggagtctcgctctgtcgcccaggctagagtgcagtggcacgatct

SEQ ID NO: 8108 - DNA, 120 bp, synthetic construct
  misc_feature 1..120: note = Artificially Synthesized Probe
  source 1..120: mol_type = other DNA
ccagtgtgtattgtacactcatgaaacatctgaatttggaccagccaagttgcaagtgccacatgtatctatttgttatcgtgctagactttgcaagcctagaatttttttgtgtcgata

SEQ ID NO: 8109 - DNA, 120 bp, synthetic construct
  misc_feature 1..120: note = Artificially Synthesized Probe
  source 1..120: mol_type = other DNA
taaacttctagactcaagcagccctcacttcagcccccagacagctaggactgcagacatacaacactatacctggctattttcatttttttgcagagatgtgtccttgttatgttgcca

SEQ ID NO: 8110 - DNA, 120 bp, synthetic construct
  misc_feature 1..120: note = Artificially Synthesized Probe
  source 1..120: mol_type = other DNA
agcatgctcatctctctaattccatgcaaagccaccttttcttactcttgtcacatcataaaacaaagctcttacaagaaaacagtcaaaggaggagattgaggttttactgcagggtca

SEQ ID NO: 8111 - DNA, 120 bp, synthetic construct
  misc_feature 1..120: note = Artificially Synthesized Probe
  source 1..120: mol_type = other DNA
tgcagaccttttttagagccaaagaagcatgtaggtaagtaagtgctttgcttccttgatagctggctggcctccgttttgctagattttcatacactttaatggtttctgttttattgt

SEQ ID NO: 8112 - DNA, 120 bp, synthetic construct
  misc_feature 1..120: note = Artificially Synthesized Probe
  source 1..120: mol_type = other DNA
gatgcggatttcagcttcctttagggaagtctagccatttcatttgaagggaaaacaggataaagagtaataccctttagagccaggtttatttgagactttcggaagtaaataaccagt

SEQ ID NO: 8113 - DNA, 120 bp, synthetic construct
  misc_feature 1..120: note = Artificially Synthesized Probe
  source 1..120: mol_type = other DNA
tttccacctttgggtattgggaataatgttacagtgaacatacttgagcaaggttttgtctggacatattccttgatatctcttggatatttacgtaggagtgcaattactaggaatagg

SEQ ID NO: 8114 - DNA, 120 bp, synthetic construct
  misc_feature 1..120: note = Artificially Synthesized Probe
  source 1..120: mol_type = other DNA
cactgcgcctggccctcacttaagcttttgacttcatattcaagaaaccattgcgtaaacccaaaggcatgaagatatgacttctgtgttttcttccacaagtcttatagcttcaactct

SEQ ID NO: 8115 - DNA, 120 bp, synthetic construct
  misc_feature 1..120: note = Artificially Synthesized Probe
  source 1..120: mol_type = other DNA
ctgcctcagccttctgagtaactgggattacaggcgcccgccaccacacctggctaatttttatatttttttagcagagacgggggttcaccatgttggccaggctggtctcaaacccct

SEQ ID NO: 8116 - DNA, 120 bp, synthetic construct
  misc_feature 1..120: note = Artificially Synthesized Probe
  source 1..120: mol_type = other DNA
aacatgccctctttgacttggtatttctgaatagtagagttcctgggaaaagccagaggcattggtcacactgtgaattggccttagagtggtatttggaagttaatatgctattctgta

SEQ ID NO: 8117 - DNA, 120 bp, synthetic construct
  misc_feature 1..120: note = Artificially Synthesized Probe
  source 1..120: mol_type = other DNA
ggctttcttctccttgcagttgtggccccatcaaagtgaaaactgaacccacagaagattctggtatgtactagcacttttagaatcaatggtgaaattaaggaagacttttccttagtg

SEQ ID NO: 8118 - DNA, 120 bp, synthetic construct
  misc_feature 1..120: note = Artificially Synthesized Probe
  source 1..120: mol_type = other DNA
gccgcgttaacgtgtgtgtgcgtgcatgtgaatgagagcttttatgtatgtaagtgtattttgggagagctgcaagaaagtgttgaattatccttttttggaaaaggtatttgagtcttt

SEQ ID NO: 8119 - DNA, 120 bp, synthetic construct
  misc_feature 1..120: note = Artificially Synthesized Probe
  source 1..120: mol_type = other DNA
taaaattgttaactttgtaaccttaaggagaatactaaggttttttttaaggaacaattctaggcagtggctgccaccccatcagctttccatctgacttctgaggtggggtagtgtttg

SEQ ID NO: 8120 - DNA, 120 bp, synthetic construct
  misc_feature 1..120: note = Artificially Synthesized Probe
  source 1..120: mol_type = other DNA
cagaagagaatagttagtatatgcaagcatataatcttcacacaaacacatttgtaacagacaaggaagacaataggcatagtcgccacagtctacgtttctgcagcttaccagactttt

SEQ ID NO: 8121 - DNA, 120 bp, synthetic construct
  misc_feature 1..120: note = Artificially Synthesized Probe
  source 1..120: mol_type = other DNA
tcttttgtatctggccacaaaggtctgcttcaaatcatctgtcctaattgtgggcaaagctttatgcagaaaggtgtgctttgtacccttacacaaatccctgtaataaaagggatgtat

SEQ ID NO: 8122 - DNA, 120 bp, synthetic construct
  misc_feature 1..120: note = Artificially Synthesized Probe
  source 1..120: mol_type = other DNA
acatatctaatacaccatcttcattgcatccaagataatgaaatatctataaccccaaaagtttcctgtgtccccttgttattcattgccctgcccagtattcaggcaacacggatctgt

SEQ ID NO: 8123 - DNA, 120 bp, synthetic construct
  misc_feature 1..120: note = Artificially Synthesized Probe
  source 1..120: mol_type = other DNA
tatttcattgaagcctttctttgggctcccccaaatccccacttttctctctattcttaagttaaccatgatcttgaaaactgagaattgtccttcctgatggtgatgtgctttactacg

SEQ ID NO: 8124 - DNA, 120 bp, synthetic construct
  misc_feature 1..120: note = Artificially Synthesized Probe
  source 1..120: mol_type = other DNA
gaccagaatattgagaatgccacatagttaaacttgtgaagagcaactaaagcagtacttagaggtcaattagtagccttcactaaggttgcatttttaaatcctgtaaatagcacatct

SEQ ID NO: 8125 - DNA, 120 bp, synthetic construct
  misc_feature 1..120: note = Artificially Synthesized Probe
  source 1..120: mol_type = other DNA
tgcccgctgtgctggaagaaagggagaatgaattaatagctgttagtttgtcacatttctatttcagtagagattcaaggagatggtttacgttattttagagattctaaggaaggtata

SEQ ID NO: 8126 - DNA, 120 bp, synthetic construct
  misc_feature 1..120: note = Artificially Synthesized Probe
  source 1..120: mol_type = other DNA
tgaatctcgaaatgggtacatgacacactttcctattgaaggtaaagtacacatttataccttatctcagaacagtcagaagccaggttactgttttattggttagtgatgcaaatattg

SEQ ID NO: 8127 - DNA, 120 bp, synthetic construct
  misc_feature 1..120: note = Artificially Synthesized Probe
  source 1..120: mol_type = other DNA
gcatgaaacattccacagcaaaccctgaacttatttatagggagttaattaagtgtctgatcacagcaagcatttactctgatctgtttgtgtatgtgtgtctttgacagatgagcatgg

SEQ ID NO: 8128 - DNA, 120 bp, synthetic construct
  misc_feature 1..120: note = Artificially Synthesized Probe
  source 1..120: mol_type = other DNA
caggagagagtttctccctttattttgtactcacaactactccataaatgactttgtcagtttaccagctctacagctttggttttagaattgaacgcctgactgaggtacagttctttt

SEQ ID NO: 8129 - DNA, 120 bp, synthetic construct
  misc_feature 1..120: note = Artificially Synthesized Probe
  source 1..120: mol_type = other DNA
aaatatgttgcatacaaagccagaggatatagtcttgtgtgcacttgtgacactcagtctcttgataggaaagtctccattgtaaagcctgggttgtggttttattgaacagtagaaacc

SEQ ID NO: 8130 - DNA, 120 bp, synthetic construct
  misc_feature 1..120: note = Artificially Synthesized Probe
  source 1..120: mol_type = other DNA
tggagctggaatccctaatttctaattaagtaaagtggaggagaaagtgttgatagtttagtgagtaatttttaaagcaagtccctgcccccttcaacgacccgcaaatactacttagag

SEQ ID NO: 8131 - DNA, 120 bp, synthetic construct
  misc_feature 1..120: note = Artificially Synthesized Probe
  source 1..120: mol_type = other DNA
tttttctagctgctgcgtaacctttcttggtttgctgtctgtctctctttctctcttaataacctgtcacctactgatgtcacttggttatttctagtgtttgactactccaaactactc

SEQ ID NO: 8132 - DNA, 120 bp, synthetic construct
  misc_feature 1..120: note = Artificially Synthesized Probe
  source 1..120: mol_type = other DNA
ccaccgcacctggccattcatttcttttaaactaagacattgtgccataagcctgatttaatgttcacatttgtgattaagtagtagaattttgctagtagacctctttcttttcagaag

SEQ ID NO: 8133 - DNA, 120 bp, synthetic construct
  misc_feature 1..120: note = Artificially Synthesized Probe
  source 1..120: mol_type = other DNA
tttatttgtacttggagtcggtggtaaacatttaaaacatacgtgacttaggtttgggaaatcggccttggactaataggaccgcatgcctcagttttcgtaaacaccgtgactacattt

SEQ ID NO: 8134 - DNA, 120 bp, synthetic construct
  misc_feature 1..120: note = Artificially Synthesized Probe
  source 1..120: mol_type = other DNA
gggcagttggactacctaccatccctttcttgtggaatttatgtttaagatagtgccagatacttgactgcagcatataattagggactaaactattcatatgttcatttaatccctcca

SEQ ID NO: 8135 - DNA, 120 bp, synthetic construct
  misc_feature 1..120: note = Artificially Synthesized Probe
  source 1..120: mol_type = other DNA
ggtgtattcgttaatatgttgcaaaaaggaagttggtgttttctaaacacaaattttgagttagggacggtgttgccaacttgaaggtattggcggagtgcttttgttagtgtgggtagc

SEQ ID NO: 8136 - DNA, 120 bp, synthetic construct
  misc_feature 1..120: note = Artificially Synthesized Probe
  source 1..120: mol_type = other DNA
tgtgtcttgttaaacaaaaatggttgtttatactttggaaacggcagataattggaagagcaatgcccagtatgtgagggcaggccctagagctttagttgatgttttatgcttcagagt

SEQ ID NO: 8137 - DNA, 120 bp, synthetic construct
  misc_feature 1..120: note = Artificially Synthesized Probe
  source 1..120: mol_type = other DNA
tatagggtgtcttgaccatttttaatccttacagtcatacaaacccaggtgccagtcaagttttatttcacagggaggttgtcattttaaaattgttttctgtcctggtcccgtggctca

SEQ ID NO: 8138 - DNA, 120 bp, synthetic construct
  misc_feature 1..120: note = Artificially Synthesized Probe
  source 1..120: mol_type = other DNA
acaaaagcacttctgtctttctaagcacatacataggtcctaaaatgaatttgtctgatgttggtgacctcggaaccattttctccagttgattagcacggccagccagtcaataatttc

SEQ ID NO: 8139 - DNA, 120 bp, synthetic construct
  misc_feature 1..120: note = Artificially Synthesized Probe
  source 1..120: mol_type = other DNA
gcagtattcacttgaacacatcccaaacaaagaaaatttcaaatgtaacaaggaaaaagcctgctaaagctcacaatacagaaataactattgatactcaaaatagctttaaagccctgc

SEQ ID NO: 8140 - DNA, 120 bp, synthetic construct
  misc_feature 1..120: note = Artificially Synthesized Probe
  source 1..120: mol_type = other DNA
tctggattctcagtgtgactgataaatgttgcaacatgctctgcagggggaaaatgctttagcgtctattactgcatcataatctcatctttggaaagccaggagcattttgaaaattac

SEQ ID NO: 8141 - DNA, 120 bp, synthetic construct
  misc_feature 1..120: note = Artificially Synthesized Probe
  source 1..120: mol_type = other DNA
ccaagaccctagtgctgccccgatggtagggacttcttaatgagaattaacttttgctcaattttcagagaaatggaatgctcgcatcactgatctacgtaaacaagttgaagaattgtt

SEQ ID NO: 8142 - DNA, 120 bp, synthetic construct
  misc_feature 1..120: note = Artificially Synthesized Probe
  source 1..120: mol_type = other DNA
cgtgagccacccttcccggccactgcttttatcttgatgtataactgagttgatgctagatttcaattccttctttgtccttttactattctgtcctatagccacctttatataatgatc

SEQ ID NO: 8143 - DNA, 120 bp, synthetic construct
  misc_feature 1..120: note = Artificially Synthesized Probe
  source 1..120: mol_type = other DNA
tgtttaaatgatatctctttctctttttgtccttatagctcaagccataaaagccaaaggtccggtgacgatcccgtaccctcttttccagtctcatgttgaagatctttatgtagaagg

SEQ ID NO: 8144 - DNA, 120 bp, synthetic construct
  misc_feature 1..120: note = Artificially Synthesized Probe
  source 1..120: mol_type = other DNA
atctgccaacctcgccctcataggcctgagatttttaaagcatgcgtgggaatatatgattgtttttatagatgtgcagaggaagatagtcttgaatgcaatatgacattaaaggatccc

SEQ ID NO: 8145 - DNA, 120 bp, synthetic construct
  misc_feature 1..120: note = Artificially Synthesized Probe
  source 1..120: mol_type = other DNA
agacatgagcttctgaattcaacacgtgaagatttacagcttgataagccagcttcaggaggtaggtcttcaatctcgaggcagatcagaagattatgtgcaataattatttcacgctta

SEQ ID NO: 8146 - DNA, 120 bp, synthetic construct
  misc_feature 1..120: note = Artificially Synthesized Probe
  source 1..120: mol_type = other DNA
ctgaatacactgagttttgctttttcctagctctaatgaatgtttcgttcttcctctttttgtacagtgtcagcattgttttagaaataaatacattctagaatcttaggaataatttta

SEQ ID NO: 8147 - DNA, 120 bp, synthetic construct
  misc_feature 1..120: note = Artificially Synthesized Probe
  source 1..120: mol_type = other DNA
gaggagggtaattacggtcctgaacagttagtagcaaaaggctgcttccagatagtatttaggttgtgtcctctattgtccatgatgattttctttctctcttttcttcctaaggatatt

SEQ ID NO: 8148 - DNA, 120 bp, synthetic construct
  misc_feature 1..120: note = Artificially Synthesized Probe
  source 1..120: mol_type = other DNA
aaaaaaaatagaaaaatgcaatgaagtgttattgagcgtttttaagggagaaggcaaggatggcacacccagctcggtcacttgtgcatccagaagagatggaaggtgtttcaagtgaag

SEQ ID NO: 8149 - DNA, 120 bp, synthetic construct
  misc_feature 1..120: note = Artificially Synthesized Probe
  source 1..120: mol_type = other DNA
gcctgtgagttgcttctaaatgctttattactaatatcaactctgtttctacagaccagaacttctgactcacagtaccactgaagttactcagccaagaacgaatacaccaggtaaact

SEQ ID NO: 8150 - DNA, 120 bp, synthetic construct
  misc_feature 1..120: note = Artificially Synthesized Probe
  source 1..120: mol_type = other DNA
caccttaggaacttctgttgccaagaaccaataaatgcccataccctgtagtgtgtaaatgcccataccctgtagtgtgaagttttctgttgttagaaataagtgttaggaatcaagtat

SEQ ID NO: 8151 - DNA, 120 bp, synthetic construct
  misc_feature 1..120: note = Artificially Synthesized Probe
  source 1..120: mol_type = other DNA
aaagctcaaattcaaggttgtgaggaatgcagtcaccacttttgttaggggcagttgtgacagtgagtgactgcaaaaactgagaatgcgaagcctctattgtaaaaagaatgtgcaagt

SEQ ID NO: 8152 - DNA, 120 bp, synthetic construct
  misc_feature 1..120: note = Artificially Synthesized Probe
  source 1..120: mol_type = other DNA
tttcttttttttctgaagtgatttttccttttatgtccattgctttaagccatttgtgaaattgcacagtgatttctggagtggggacagaaggaaggcggtagtaaaagtcattggtgc

SEQ ID NO: 8153 - DNA, 120 bp, synthetic construct
  misc_feature 1..120: note = Artificially Synthesized Probe
  source 1..120: mol_type = other DNA
gtgaagtgttgctttatgtagatttttaggcacacatctgttagataaaacgaggattgcctgtagagaaagcaaataaaagcaaagtccctcttgttgaaactggtgtgggagcccttg

SEQ ID NO: 8154 - DNA, 120 bp, synthetic construct
  misc_feature 1..120: note = Artificially Synthesized Probe
  source 1..120: mol_type = other DNA
ctagcaaaatccattctgatttgcaacagcactgataaataacatggttattgggtttctttttgttttccagtcaaagaagattggaatgtcagaattaccaagctacggaagcaagtg

SEQ ID NO: 8155 - DNA, 120 bp, synthetic construct
  misc_feature 1..120: note = Artificially Synthesized Probe
  source 1..120: mol_type = other DNA
aaggaaaaaaagttcaggacctaaagaaggaaggtcccagaaactgggtttctgtttctttctaccactacacttgctactgaaaccaagcagatgacttcatttctcttggattccact

SEQ ID NO: 8156 - DNA, 120 bp, synthetic construct
  misc_feature 1..120: note = Artificially Synthesized Probe
  source 1..120: mol_type = other DNA
tggtgactcgcagtatgcctgagtacttgaatggaagtttaatttgctggtttttatctgctctgttattcctggtcaatcttgagagcgactaaatattgatgattgagtttctttctt

SEQ ID NO: 8157 - DNA, 120 bp, synthetic construct
  misc_feature 1..120: note = Artificially Synthesized Probe
  source 1..120: mol_type = other DNA
taaagcatctccttctgtatttttttttccctacaatatacaaaaggaactctgcttattttacagctttgcagtcccccaaaagaccacgaagtcctgggagtaattcaaaggttcctg

SEQ ID NO: 8158 - DNA, 120 bp, synthetic construct
  misc_feature 1..120: note = Artificially Synthesized Probe
  source 1..120: mol_type = other DNA
tcataaatgcagaaggaaatcactgcattaggatcattctctacatcccaggtgtcaagtttttaaataagagtttgccgtactggtgttgagtggcgcagaagtccctatttagtcatg

SEQ ID NO: 8159 - DNA, 120 bp, synthetic construct
  misc_feature 1..120: note = Artificially Synthesized Probe
  source 1..120: mol_type = other DNA
aatacgttcattatgtttcattttaccaggtgaattgttcctattggtgagtcagtatatatcaaaggttaaaggaatagcccgtagagccaggctgcctgagttcagatctgagttcaa

SEQ ID NO: 8160 - DNA, 120 bp, synthetic construct
  misc_feature 1..120: note = Artificially Synthesized Probe
  source 1..120: mol_type = other DNA
ttttatgtggaaggcttacctgagggtgtgccattccgaagaccatcgacttttggcattccgaggctggagaagatactcagaaacaaagccaaaattaagttcatcattaaaaagtaa

SEQ ID NO: 8161 - DNA, 120 bp, synthetic construct
  misc_feature 1..120: note = Artificially Synthesized Probe
  source 1..120: mol_type = other DNA
atgaattatttgaaatcaattgaaatgaattttaggtttcatttgcttggtgtcaggcttaattttgagtcacccagggatgctctcaagcaaagctggccacttttttttttttttttt

SEQ ID NO: 8162 - DNA, 120 bp, synthetic construct
  misc_feature 1..120: note = Artificially Synthesized Probe
  source 1..120: mol_type = other DNA
accagtgtaggggaagggcagccaatgagaggcagcaatggatgttaaatttacaattgtggtttgtctttttggctgtggttctttagataagcatgtgatttctgttcttcatgacta

SEQ ID NO: 8163 - DNA, 120 bp, synthetic construct
  misc_feature 1..120: note = Artificially Synthesized Probe
  source 1..120: mol_type = other DNA
aaaaataaattcatcacccaatgttaatactactgcatcaggtgttgaagaccttaacatcattcaggtgacaattccaggtatgagttctctgcttccatcagagtttttgggggtctc

SEQ ID NO: 8164 - DNA, 120 bp, synthetic construct
  misc_feature 1..120: note = Artificially Synthesized Probe
  source 1..120: mol_type = other DNA
ctgggcaacatcgtgagataccatctctttaccataaaaaaaaaaaaaagcagtatttaagttttgggttttctctgaactgtttcagatgatgataatgaaagactctcgaaagttgaa

SEQ ID NO: 8165 - DNA, 120 bp, synthetic construct
  misc_feature 1..120: note = Artificially Synthesized Probe
  source 1..120: mol_type = other DNA
tgtgtcatcattagaatgtcagatgtgcttctacgaactaagctgactcttttaattctttggcaaagggttggcaaactaggactgtttgccaaattcaggctgcctcctatttttaga

SEQ ID NO: 8166 - DNA, 120 bp, synthetic construct
  misc_feature 1..120: note = Artificially Synthesized Probe
  source 1..120: mol_type = other DNA
aaatctcataataaatcctcttgaggcttctcatacactcgtcttcttccaatcttctttccctcaaaatctcatattttggttccacttcacccaccgtcattctccatatcactccca

SEQ ID NO: 8167 - DNA, 120 bp, synthetic construct
  misc_feature 1..120: note = Artificially Synthesized Probe
  source 1..120: mol_type = other DNA
gcctggcacacatggggctctcaaatattgctgagcgagtgaacaaatgtcctttcaattccttaacgttgatgtcattttcaatagtattttgagccaaacttaattttgcgagtgtgt

SEQ ID NO: 8168 - DNA, 120 bp, synthetic construct
  misc_feature 1..120: note = Artificially Synthesized Probe
  source 1..120: mol_type = other DNA
gcagagcaagagggccgtcactttaacctgactctgccatccatttctaatgtctgccataagtcagtgagcaaaatgttcttcagtagaaatgtacacattgtgctcttaaaaaattcc

SEQ ID NO: 8169 - DNA, 120 bp, synthetic construct
  misc_feature 1..120: note = Artificially Synthesized Probe
  source 1..120: mol_type = other DNA
agccaagacttttttatcaggacaaaggattgtgcatttaaactatttcactagaactgggtggtggttttgctctctttcttctgggtgaattggatttgcaggttatgctgttgagtg

SEQ ID NO: 8170 - DNA, 120 bp, synthetic construct
  misc_feature 1..120: note = Artificially Synthesized Probe
  source 1..120: mol_type = other DNA
gttataataggagcagtagcttgagacccgaagtcaggaaactttgacaatggatttttttttttaatccagagacttgtactggaatttgccttaccctgtcagctcatggacttaagg

SEQ ID NO: 8171 - DNA, 120 bp, synthetic construct
  misc_feature 1..120: note = Artificially Synthesized Probe
  source 1..120: mol_type = other DNA
ttctatttgaaaaaaaaaaatcatttaaatgatcctttgttcacggctctccttaatgactgagtgaacagttcctatctgtatatttgactaaaccttttcctaagctatctctcatgg

SEQ ID NO: 8172 - DNA, 120 bp, synthetic construct
  misc_feature 1..120: note = Artificially Synthesized Probe
  source 1..120: mol_type = other DNA
ctttaactgggagcagtattttgttttgctcagtttcataatggagaacagctgttcgcagatgtaggtgctcccgaacatggaaagaatctttgcgcaatggtgcttgtatttcgggta

SEQ ID NO: 8173 - DNA, 120 bp, synthetic construct
  misc_feature 1..120: note = Artificially Synthesized Probe
  source 1..120: mol_type = other DNA
accagtcgatacagaagtttttcaggcttttctcaacacgcgaaaagatctcgttgccagattttgtacccgtcatgggcaccgtgtccagaagttcttcggacacatcgaaattctcat

SEQ ID NO: 8174 - DNA, 120 bp, synthetic construct
  misc_feature 1..120: note = Artificially Synthesized Probe
  source 1..120: mol_type = other DNA
tcctggtctatcttgcgttttcccacttttgacagagacagggagacaaagatatttcacttttctcttatcactactatgaggaaaacaacagcaaatgcttgatgacgcacgagaggg

SEQ ID NO: 8175 - DNA, 120 bp, synthetic construct
  misc_feature 1..120: note = Artificially Synthesized Probe
  source 1..120: mol_type = other DNA
attcccaagaaaactttgtaataacagagatgggaatgagcacagaaaggcatatgatttttacctactgtgagtctcaaatgacaagggtgacggccacagaaccacacaaaactcatt

SEQ ID NO: 8176 - DNA, 120 bp, synthetic construct
  misc_feature 1..120: note = Artificially Synthesized Probe
  source 1..120: mol_type = other DNA
ttcaaatgttacattaggaggttccctggtgactcatgctcgtgagaacacctctccgtattctacttgacaggatactgactcacttgcaagggctccggggaagacattaagaatatt

SEQ ID NO: 8177 - DNA, 120 bp, synthetic construct
  misc_feature 1..120: note = Artificially Synthesized Probe
  source 1..120: mol_type = other DNA
ctccaaaaaaaaaaaaaagagtgcgccacatcacacgtcacactcatggtgtgatatagatcactctccttcagactggttaatcaaactcaagtaacagagttatctaactttatcaca

SEQ ID NO: 8178 - DNA, 120 bp, synthetic construct
  misc_feature 1..120: note = Artificially Synthesized Probe
  source 1..120: mol_type = other DNA
ttccaggttcaagtgattctcctgagtagctgggattacaggcacgtaccactacacccagctaatgtttatttttagtagagatggagtttcaccatgttggccaggctggtctcaaac

SEQ ID NO: 8179 - DNA, 120 bp, synthetic construct
  misc_feature 1..120: note = Artificially Synthesized Probe
  source 1..120: mol_type = other DNA
gtcagagtctccagattccttctcttgactcacttacctgatgactgtgaatttgataaactcagctgcctccaagatcctcctcatggaactgatttccagatagccgggggccttgaa

SEQ ID NO: 8180 - DNA, 120 bp, synthetic construct
  misc_feature 1..120: note = Artificially Synthesized Probe
  source 1..120: mol_type = other DNA
caatgcttgataatctttccttctcattatctaaaaataattaaacaaataaacaaaccaaggttattaatgtattttctcccaagaaagctgttgggagaaatgcctgttagcacccga

SEQ ID NO: 8181 - DNA, 120 bp, synthetic construct
  misc_feature 1..120: note = Artificially Synthesized Probe
  source 1..120: mol_type = other DNA
aaaaaaaaaaaaaaagacaaggatgtttactttcaccaccacttttcggccttaaaatagaaatcttagccaatgaaatatgacaagtaaaaggaataagaggtactaggattagaaggt

SEQ ID NO: 8182 - DNA, 120 bp, synthetic construct
  misc_feature 1..120: note = Artificially Synthesized Probe
  source 1..120: mol_type = other DNA
cccgggcttgtccaggagaagcaaaatatccgattaataatgtctgatgtgagcaagatgctcgttgtgtagcaacttgcagaatattttatattcccgaaatgtcatttcttagctatc

SEQ ID NO: 8183 - DNA, 120 bp, synthetic construct
  misc_feature 1..120: note = Artificially Synthesized Probe
  source 1..120: mol_type = other DNA
accacgccagccttaaatcacactttcaacttcacttcctttagatacttgcacttcaactgagttcaccggctgcaggcctgcggagttacctttgatatttatctgtccactccagta

SEQ ID NO: 8184 - DNA, 120 bp, synthetic construct
  misc_feature 1..120: note = Artificially Synthesized Probe
  source 1..120: mol_type = other DNA
gttgtctacaacacctcaaagcattgggccctaatgggaatggctgctctattatatatatacattatactacattagagatttcaatctcttccccacaatttttttttttttttagat

SEQ ID NO: 8185 - DNA, 120 bp, synthetic construct
  misc_feature 1..120: note = Artificially Synthesized Probe
  source 1..120: mol_type = other DNA
caaaaaaaaaaaaaaacagaatcattttggtagtccatgtgtcactatctctctaaggcagatatatacaactaaaagtaagatcacattgcctgtaaatggcaaagatgtcccacgcct

SEQ ID NO: 8186 - DNA, 120 bp, synthetic construct
  misc_feature 1..120: note = Artificially Synthesized Probe
  source 1..120: mol_type = other DNA
gcacaagaagtgatagagcccttcatgttatatcttagggcaagagctcaactattcatagttttctgagaagacaggcatgccagaaagtcaccttccttattttccaacttacatgta

SEQ ID NO: 8187 - DNA, 120 bp, synthetic construct
  misc_feature 1..120: note = Artificially Synthesized Probe
  source 1..120: mol_type = other DNA
acattctggattttattgactacatccttgtggtgatgttttcatatgtgcctgtattccatgcatctcctaaaaactgctggttagatctaaaggctggatcagacttaggtctgattg

SEQ ID NO: 8188 - DNA, 120 bp, synthetic construct
  misc_feature 1..120: note = Artificially Synthesized Probe
  source 1..120: mol_type = other DNA
aactgtaggattatttactctaaatggcagcatgctagatcctaggtaaacacacatgggtgctcgccagtttttcagacaggtagtaattaaaatcttccatcccaaataacttttggg

SEQ ID NO: 8189 - DNA, 120 bp, synthetic construct
  misc_feature 1..120: note = Artificially Synthesized Probe
  source 1..120: mol_type = other DNA
tttgggagattttccccttcagggtggctgaatatccacgtgcatttacatgaaatgctgtgaagattcttctgtcatgaagcctgaactgacatatataaccatttttttttttttgag

SEQ ID NO: 8190 - DNA, 120 bp, synthetic construct
  misc_feature 1..120: note = Artificially Synthesized Probe
  source 1..120: mol_type = other DNA
acttgctttggtcaatgggacatcagccgatgggatgcaaagagaggcttgagaagagcttgatcatctgtgcctgctgcttctagaacctcatcaccatgggagccagcctagggtgcc

SEQ ID NO: 8191 - DNA, 120 bp, synthetic construct
  misc_feature 1..120: note = Artificially Synthesized Probe
  source 1..120: mol_type = other DNA
ttaacataatttataagttctgaggggtcgtctgaaaacctttaacagctctgttggtataaggacagtgaagctaaacatttaaaaatctgattttcagctggggacagtggctcagac

SEQ ID NO: 8192 - DNA, 120 bp, synthetic construct
  misc_feature 1..120: note = Artificially Synthesized Probe
  source 1..120: mol_type = other DNA
catcttcccagtttgtatgtggagcctgtggcttggggtattcttttaattctctgtgaccaggtaagacacaggcagaagatatctgagctctgaaaacatccaaggctaatattgagt

SEQ ID NO: 8193 - DNA, 120 bp, synthetic construct
  misc_feature 1..120: note = Artificially Synthesized Probe
  source 1..120: mol_type = other DNA
atattgtttttcttttggattatgattattattctttgaagccagggtctcgctctgtcacccaggccggagtgcagtggtgcaatcatggctcactccagcctttatctcctgggccca

SEQ ID NO: 8194 - DNA, 120 bp, synthetic construct
  misc_feature 1..120: note = Artificially Synthesized Probe
  source 1..120: mol_type = other DNA
gccactacacccggcctaagcttttttttttttaatcttaacctgttaacatttttcctctaattaatgctggttttcttttattgaggagtgaggagaagcaagaatggggtcaacccc

SEQ ID NO: 8195 - DNA, 120 bp, synthetic construct
  misc_feature 1..120: note = Artificially Synthesized Probe
  source 1..120: mol_type = other DNA
ggatctccgcagcaccaaatccccctcctcccctcaatcaaatgcaacaatgcctccattttaacattaatgtcttaataagttgttcccaaattaaacgtgtctaccgaaagtagtctt

SEQ ID NO: 8196 - DNA, 120 bp, synthetic construct
  misc_feature 1..120: note = Artificially Synthesized Probe
  source 1..120: mol_type = other DNA
aaaatgactaacatccaaaggcatagaaattgacagcaaatacacagaaaacggaactcccagatcgaagccaacgtggaaaagtcatcgagagagaaactgactcaaagcagccgctgt

SEQ ID NO: 8197 - DNA, 120 bp, synthetic construct
  misc_feature 1..120: note = Artificially Synthesized Probe
  source 1..120: mol_type = other DNA
tgtattattgtttttctatgatgatgatacaagtcagttgggacaacaatccatggccacctgccaccctgcccctctcatttgtcctttaatgtgagttagaggatgacaggaactcac

SEQ ID NO: 8198 - DNA, 120 bp, synthetic construct
  misc_feature 1..120: note = Artificially Synthesized Probe
  source 1..120: mol_type = other DNA
cgagtgaattaaaattaggctattggtttcatctttaaatgaactgaaggggcgggggtgcagagtgtgtcacctatttatgatgaatgaaatccctgctttgttctccaaaatccattt

SEQ ID NO: 8199 - DNA, 120 bp, synthetic construct
  misc_feature 1..120: note = Artificially Synthesized Probe
  source 1..120: mol_type = other DNA
atgcccagcgtatttttttttttaattcccatcttcatgcctatggaaagacatgggtaggtggagtgacaactgaggggtgagggaggtgactgagccaacattgactgtctttagcaa

SEQ ID NO: 8200 - DNA, 120 bp, synthetic construct
  misc_feature 1..120: note = Artificially Synthesized Probe
  source 1..120: mol_type = other DNA
aaaaaaaaaaaaaaagaactagctcctcgcttgataagcatatgggttttgaaatgttcaaacattctaagtagtcatggcaataagactgtctgtgacactgtcctactcctgggtgaa

SEQ ID NO: 8201 - DNA, 120 bp, synthetic construct
  misc_feature 1..120: note = Artificially Synthesized Probe
  source 1..120: mol_type = other DNA
ggcactgcacccatccagaaattatctttataacagaaatttgatttgctatacagttgaaacgtggcaataattgtataggaagactatacccctgaacccattcaagaccagccccag

SEQ ID NO: 8202 - DNA, 120 bp, synthetic construct
  misc_feature 1..120: note = Artificially Synthesized Probe
  source 1..120: mol_type = other DNA
acagagtctcactctgtcgcctaggctggagtgcagtggcgcaatctcagctcacagtaatctctgcctcctgggttcaggagattttcgtgcctcagcctccctagtaactgggattac

SEQ ID NO: 8203 - DNA, 120 bp, synthetic construct
  misc_feature 1..120: note = Artificially Synthesized Probe
  source 1..120: mol_type = other DNA
agcttgtactaatttacaccaacaggtgaagtttcctagaagagtcgtcaactggtaacatgggattagctgctagagggactgaggactctaaagagaacataagcagcaaattgcaag

SEQ ID NO: 8204 - DNA, 120 bp, synthetic construct
  misc_feature 1..120: note = Artificially Synthesized Probe
  source 1..120: mol_type = other DNA
gaagtggtaggaaatgaccaatgtaataaaggccatttataaaaagtccatggctaatatcactcaacaatgaaagactgatagctaagatcagaaatagcaaagatgggccaggtgcgg

SEQ ID NO: 8205 - DNA, 120 bp, synthetic construct
  misc_feature 1..120: note = Artificially Synthesized Probe
  source 1..120: mol_type = other DNA
taagatatctgtactaccaaaagccatctacagaattattgcaatccccatcaaaatctcaagggcacttctcgtacaaattaagaaatccactctaaaattcacatggggctgggcgcg

SEQ ID NO: 8206 - DNA, 120 bp, synthetic construct
  misc_feature 1..120: note = Artificially Synthesized Probe
  source 1..120: mol_type = other DNA
gcctgtaatcccagcactttgggagccagaggcaggcggatcacctgaggtcaggagtctaagaccaggctggacagcatggggaaaccctgtctctactaaaaaatacaaaaattagcc

SEQ ID NO: 8207 - DNA, 120 bp, synthetic construct
  misc_feature 1..120: note = Artificially Synthesized Probe
  source 1..120: mol_type = other DNA
atttaaagatggcttcattttttaatctgtctttttgatagtggagaccttaatttgggatctcggaagtaaatttgaatcaatctatcactcaattctcccctctctcatctctctctc

SEQ ID NO: 8208 - DNA, 120 bp, synthetic construct
  misc_feature 1..120: note = Artificially Synthesized Probe
  source 1..120: mol_type = other DNA
agtttttaacactgtagagtagttccttgacatatggccacatatactcactcacactggatgcttgcagcacaccgtggcatattgaaggctctgaaattgccatactaagaaaaggaa

SEQ ID NO: 8209 - DNA, 120 bp, synthetic construct
  misc_feature 1..120: note = Artificially Synthesized Probe
  source 1..120: mol_type = other DNA
agcaaacaccataaacatcataaaacccaaagaacatatttttattgactgcctgacatggatcttccaatatgccttttccctacatttttggctgcagactttctggttacctcttca

SEQ ID NO: 8210 - DNA, 120 bp, synthetic construct
  misc_feature 1..120: note = Artificially Synthesized Probe
  source 1..120: mol_type = other DNA
gaagagggccttggcttaggaagtgcttcatggatatttgtcaaatgaaaggaatgtgatcagttcttaaacaatgtccctggggaagatatttcgagttttcttcaaacagatcctaat

SEQ ID NO: 8211 - DNA, 120 bp, synthetic construct
  misc_feature 1..120: note = Artificially Synthesized Probe
  source 1..120: mol_type = other DNA
ggtttctgcactgtaaagttactgattttccatttttaatcaataaatatcttctgatcaggtactttggagttatgtaaatttctcatcaaattttcacccaccaggtaaagtttatct

SEQ ID NO: 8212 - DNA, 120 bp, synthetic construct
  misc_feature 1..120: note = Artificially Synthesized Probe
  source 1..120: mol_type = other DNA
aaagaaaaaaaacaaaagggatactgaagtgtttcatgattctgtcatttcgacaatgatccatctatggaatgtcagacaagtgtcaggctgtctcaccatggattcgagggcagacac

SEQ ID NO: 8213 - DNA, 120 bp, synthetic construct
  misc_feature 1..120: note = Artificially Synthesized Probe
  source 1..120: mol_type = other DNA
gtgcccagtcaactttcttttttaaaaactatttatttatttagacacagggtcttgctctgtcactcaggctggagtgcagtggggcaatctcaactcactgtagggtccgaagcagct

SEQ ID NO: 8214 - DNA, 120 bp, synthetic construct
  misc_feature 1..120: note = Artificially Synthesized Probe
  source 1..120: mol_type = other DNA
ccagatgaggagaggaggatttgtaccttattgatccaatgatgtttagtcagatttcagcatggttgtgacagctaccacactatttcacttacacatagaaagggtataatgggtttg

SEQ ID NO: 8215 - DNA, 120 bp, synthetic construct
  misc_feature 1..120: note = Artificially Synthesized Probe
  source 1..120: mol_type = other DNA
gtcctagaaagtcttttcttgagcattctagattccactcaccaagcaaatgcacatcaaagaatatgtaacggcaaagacatgttaagttcccattcaccagaacactcccttagatca

SEQ ID NO: 8216 - DNA, 120 bp, synthetic construct
  misc_feature 1..120: note = Artificially Synthesized Probe
  source 1..120: mol_type = other DNA
cacgggccttctctgtgcttcctgctctctggaaatgggtgcatccgggtcacatcagaagtttactgttctttgcttgtcccgaggttccttcctgggacagtccttagttgaaactat

SEQ ID NO: 8217 - DNA, 120 bp, synthetic construct
  misc_feature 1..120: note = Artificially Synthesized Probe
  source 1..120: mol_type = other DNA
gagccaccatgcccagccttattttatatatatatatgtattggtttttttttttgacatggagtctcactctgttgcccaggctggagtgaaatggcatgatcttggctcactgcaatc

SEQ ID NO: 8218 - DNA, 120 bp, synthetic construct
  misc_feature 1..120: note = Artificially Synthesized Probe
  source 1..120: mol_type = other DNA
ctcacaaaaaaaacaaaacaaaacaaaaattgactgtgatgatagttgtacaactctgtgaatctatttcaagaaaccactgaacagtacactttattttttttaattttcttttttttt

SEQ ID NO: 8219 - DNA, 120 bp, synthetic construct
  misc_feature 1..120: note = Artificially Synthesized Probe
  source 1..120: mol_type = other DNA
aattaacatgtactgaactacactctatgcgccgatgcttttacgatcacccaatttaaaacctacacaccctccaagggaaatattattttccgtgaaaggacacagagagcatgggag

SEQ ID NO: 8220 - DNA, 120 bp, synthetic construct
  misc_feature 1..120: note = Artificially Synthesized Probe
  source 1..120: mol_type = other DNA
ttgtgatccacccgccttggtcacccaaagtgctgggattacaggcgtgagccaccactcctggcatgcccagcgaatttttgtacttttagtagagacgaggtttccccatattggtca

SEQ ID NO: 8221 - DNA, 120 bp, synthetic construct
  misc_feature 1..120: note = Artificially Synthesized Probe
  source 1..120: mol_type = other DNA
ggattacaggtgtcagtcacctgcctggcccctgtgaattctgacatatataaagttacataggtaaaattaaggtataaaacagttctgtcatccccagaatattataccacaataatc

SEQ ID NO: 8222 - DNA, 120 bp, synthetic construct
  misc_feature 1..120: note = Artificially Synthesized Probe
  source 1..120: mol_type = other DNA
accgtgcctggccctttttgctcttttaaaactgtagatgtaaactccaaaaacttccaaatctcattttgtcttcccagcaatgctggaggcgtttctgtccttctagtgtaatatttt

SEQ ID NO: 8223 - DNA, 120 bp, synthetic construct
  misc_feature 1..120: note = Artificially Synthesized Probe
  source 1..120: mol_type = other DNA
caccacactgagccgcagggcttggttttaattaataaattctaccttcttcacagctcagcctacaagtacaaacacaagagtacatgtttcaccattcaacaaaaatgtaatgagcac

SEQ ID NO: 8224 - DNA, 120 bp, synthetic construct
  misc_feature 1..120: note = Artificially Synthesized Probe
  source 1..120: mol_type = other DNA
ccccccaaaaaaaaacgtatactgatggcaaggagtggaggggaatcacaagcaatacagtaaaaggagccagacacccatgaaatggcctcagggcatgtaggaacgcagatgaatcca

SEQ ID NO: 8225 - DNA, 120 bp, synthetic construct
  misc_feature 1..120: note = Artificially Synthesized Probe
  source 1..120: mol_type = other DNA
tgtgaatgtgatctctctctctctcagtataacttgttgtaacgtacttacccttcttcttcttcttgtaatgatgtgagaatctatgcctgaatctgtgtaaccatcccttactcgcag

SEQ ID NO: 8226 - DNA, 120 bp, synthetic construct
  misc_feature 1..120: note = Artificially Synthesized Probe
  source 1..120: mol_type = other DNA
gaggctgctggagtcttcaattgcagccgtgagcaatctccaactggccagtttccaagcttatatctagacatctgcttacttcaaattaccagcacgaaactaaaacatgattttttt

SEQ ID NO: 8227 - DNA, 120 bp, synthetic construct
  misc_feature 1..120: note = Artificially Synthesized Probe
  source 1..120: mol_type = other DNA
attttacaatggatctcaacgaagctgttattaagaaacaagaaagcttgggcttgagggatggagaatacagccttgcgagcctttttccccctagaactcgaaaccagaattgcaacg

SEQ ID NO: 8228 - DNA, 120 bp, synthetic construct
  misc_feature 1..120: note = Artificially Synthesized Probe
  source 1..120: mol_type = other DNA
cctttttattccccagcactctcgtcggtgctacaaaaaaaaaaaaaagacacaaagcgattcagatgtcttctgatgggtcaagttagaaccagtctggagctaaggtaggcactaaat

SEQ ID NO: 8229 - DNA, 120 bp, synthetic construct
  misc_feature 1..120: note = Artificially Synthesized Probe
  source 1..120: mol_type = other DNA
caaaaaaaaaaaaagcactaaaagtttatcttttatttgcaaactaaggtttacatgctgggtacccagctgtctggtaactgggtaggcagagggctaggggtatctgggacagttacc

SEQ ID NO: 8230 - DNA, 120 bp, synthetic construct
  misc_feature 1..120: note = Artificially Synthesized Probe
  source 1..120: mol_type = other DNA
attctcactcttacgctttacctttcaaaggcctgtctttccctgtaagtaatgtattataattcccaccattaccacatgcttctccaacccaccaaactgctatcttcagtttatggt

SEQ ID NO: 8231 - DNA, 120 bp, synthetic construct
  misc_feature 1..120: note = Artificially Synthesized Probe
  source 1..120: mol_type = other DNA
cttctatggaataatgagtgtatcccaaaagtaaatccatgatgaggtcccgtttttcgttcctccttggctacaaaatagacaaggaaaaggcaagccagccatttccgattcactata

SEQ ID NO: 8232 - DNA, 120 bp, synthetic construct
  misc_feature 1..120: note = Artificially Synthesized Probe
  source 1..120: mol_type = other DNA
accactgcactccagtttgggtgacacagtgagaccctgtctctaataaatatatatatatatataaaaattaaattaaattaaactcaaccaaaccaggctgggcatggtacctcaggt

SEQ ID NO: 8233 - DNA, 120 bp, synthetic construct
  misc_feature 1..120: note = Artificially Synthesized Probe
  source 1..120: mol_type = other DNA
aaaaaaaaaagaattcagagctggttaccttttcaaagaggatgcgcaagcaaatatatccaagagccacttcccctacttgactagtttgcagaagtggcattctgtaagcacgataaa

SEQ ID NO: 8234 - DNA, 120 bp, synthetic construct
  misc_feature 1..120: note = Artificially Synthesized Probe
  source 1..120: mol_type = other DNA
caagaccctatatctaaaatatgaaaattaagaaaaaggatattttagttggtgattatggtgccaacatgggcattccaggcagaagaaacagctcaagcaagagcaggagagcaagcg

SEQ ID NO: 8235 - DNA, 120 bp, synthetic construct
  misc_feature 1..120: note = Artificially Synthesized Probe
  source 1..120: mol_type = other DNA
ccctgagagaacacacaagcagaaagctcaacactgcttacctggtgaaaccctgcaatcgtttctgctccatactcgctctgaataatgggcttctgatacttcttataccagttctca

SEQ ID NO: 8236 - DNA, 120 bp, synthetic construct
  misc_feature 1..120: note = Artificially Synthesized Probe
  source 1..120: mol_type = other DNA
ccgagtaggaccaccccaagcttcagcatagcggtgcttacagctgagcagcaggggcttctgtgtccaactggctagtttctaatgcgtcctgaacacatttctttctagtaaaaatgc

SEQ ID NO: 8237 - DNA, 120 bp, synthetic construct
  misc_feature 1..120: note = Artificially Synthesized Probe
  source 1..120: mol_type = other DNA
cataaaaacttcccctagagattctcatcagccaggtgtgggccagatgaactctaagctcccttaaatctttgatgttttatgagtctattaaatcgaagtgcaaaaaatgctgagtcc

SEQ ID NO: 8238 - DNA, 120 bp, synthetic construct
  misc_feature 1..120: note = Artificially Synthesized Probe
  source 1..120: mol_type = other DNA
aaacaaacaaaaacaaaggggaaaaaaaaaaaagcatggagccgctgctttcttccctaacttgagatgtattttacataagggcatatgatcctctagtcctagaccgagctctctaac

SEQ ID NO: 8239 - DNA, 120 bp, synthetic construct
  misc_feature 1..120: note = Artificially Synthesized Probe
  source 1..120: mol_type = other DNA
aataaataagaagaaatggcccttagaagggaagaaaaacccaacagagggacccgtctgtgctcagagctcctggcacctgcccgaggcctccacagtacagactgtttttgtttttgt

SEQ ID NO: 8240 - DNA, 120 bp, synthetic construct
  misc_feature 1..120: note = Artificially Synthesized Probe
  source 1..120: mol_type = other DNA
actgcatgaaattggggtgtgctgtatgagtcaagaggcatttctaccacctctcctgcttctaccccaagtgaaaaatccaactctgaacgctgagttagaactgcacgattgtaagga

SEQ ID NO: 8241 - DNA, 120 bp, synthetic construct
  misc_feature 1..120: note = Artificially Synthesized Probe
  source 1..120: mol_type = other DNA
aaaagaacaaaaaagaaaaccacaatttgggtgggtagatatttggtcccctgaactatctgggtatggacggccttcccattgggctggacacgaggccgatcttgaacagcacatgcc

SEQ ID NO: 8242 - DNA, 120 bp, synthetic construct
  misc_feature 1..120: note = Artificially Synthesized Probe
  source 1..120: mol_type = other DNA
tcctcatgcttgttgacaccgtggaaatagaaaggtttcccattgatgaggaactggctcttggtgacagccacagtgcggatccccacagggagtgtgtagaagtcagacacaggcccc

SEQ ID NO: 8243 - DNA, 120 bp, synthetic construct
  misc_feature 1..120: note = Artificially Synthesized Probe
  source 1..120: mol_type = other DNA
cacctggcaccttaagttggccctgggtcccagtcccattcgccacgactttgttttctgcatccaaaagacgcacttccaacttgaacaggttactgcccttgacagagatctggtaat

SEQ ID NO: 8244 - DNA, 120 bp, synthetic construct
  misc_feature 1..120: note = Artificially Synthesized Probe
  source 1..120: mol_type = other DNA
actacgcatgtgcaaccagaggacggcccagaacgtgcttacagtaacacctcttcccagctccttaggaattcatcacggaagactcccagaaagggagtttccccagtaataatcggt

SEQ ID NO: 8245 - DNA, 120 bp, synthetic construct
  misc_feature 1..120: note = Artificially Synthesized Probe
  source 1..120: mol_type = other DNA
gcatgagccagtgcacccaggctgttctaaacttaacttccaaaatacctttccttggcaataaattgctctatggtgcattgtctttgctgtgggattcttttttaaattcttttttat

SEQ ID NO: 8246 - DNA, 120 bp, synthetic construct
  misc_feature 1..120: note = Artificially Synthesized Probe
  source 1..120: mol_type = other DNA
gccaagatcacgccatcgcactccagcctggcgacagagcgagactccagctcaaaaaaaaaaaagaagaaaaaaagaaagacagggtctgcgtctgttgcccagaccagagtgcagtgg

SEQ ID NO: 8247 - DNA, 120 bp, synthetic construct
  misc_feature 1..120: note = Artificially Synthesized Probe
  source 1..120: mol_type = other DNA
atcgatgtaggtggtgggtgtcgtgtacagaagtacagaccgctgcagtccagcgtagttgaaaaagtcaaaatatgtgttctggacaaagtaacccttgggatacctaggatgggagga

SEQ ID NO: 8248 - DNA, 120 bp, synthetic construct
  misc_feature 1..120: note = Artificially Synthesized Probe
  source 1..120: mol_type = other DNA
ctttccctcctgtactgaatgctgcaaagtcagaataagaggatgtagaccaggcaaaagccgcccagacctcacccagttccacttctctgcagatcacatccaagtcaggaggggaac

SEQ ID NO: 8249 - DNA, 120 bp, synthetic construct
  misc_feature 1..120: note = Artificially Synthesized Probe
  source 1..120: mol_type = other DNA
ttttaaaaattaaaaataaatattgaaaggaaggatactgcacagactcagcctttacctcgggaaagggctcggcaagagccttttctcctcctgcctaatccgccccggccctccagg

SEQ ID NO: 8250 - DNA, 120 bp, synthetic construct
  misc_feature 1..120: note = Artificially Synthesized Probe
  source 1..120: mol_type = other DNA
atgtaataacgccttatagagggaatgggcttctgatgaaaggatgtgtttggcttcatttcctctctcttcatcttacgcttttgcttgccttgctgctttgttatcatgcagtaagaa

SEQ ID NO: 8251 - DNA, 120 bp, synthetic construct
  misc_feature 1..120: note = Artificially Synthesized Probe
  source 1..120: mol_type = other DNA
ttctgttataaagaaaggtcgtaagttcttttccttctccggatactctacttacacaaataactctttcagtggaatgcaagcttcagtgagtgctccgacacagttctactgttagac

SEQ ID NO: 8252 - DNA, 120 bp, synthetic construct
  misc_feature 1..120: note = Artificially Synthesized Probe
  source 1..120: mol_type = other DNA
tttttaaataatgactttttttttcccccaaggagaagtctgcacaaaagcttatggccaagttcctctctggttctagggtgtaaaagaagggcactgggctagttttctccagtaaac

SEQ ID NO: 8253 - DNA, 120 bp, synthetic construct
  misc_feature 1..120: note = Artificially Synthesized Probe
  source 1..120: mol_type = other DNA
tactgtagaacttgttcactgcaatgacattctgttttttccattagtctctcagcttctaaaggacgaagactcatattggtatatctaatgtgagtgtggtgcctaccccactgtatg

SEQ ID NO: 8254 - DNA, 120 bp, synthetic construct
  misc_feature 1..120: note = Artificially Synthesized Probe
  source 1..120: mol_type = other DNA
aaagtttaatagaaactatatgctttcttagtgagttcataccaggggccacggtgaataaaacaaatgcaattggctagggatttagacagacagtacaggtagcagccactactcagc

SEQ ID NO: 8255 - DNA, 120 bp, synthetic construct
  misc_feature 1..120: note = Artificially Synthesized Probe
  source 1..120: mol_type = other DNA
taaaaggcaaaaggaactgcaaatattaacaccaacctggattttctatttcaacagaacttaaaggcacgtctgtgtcaggtgaggggagaggttttacatcagatgggcttttctatg

SEQ ID NO: 8256 - DNA, 120 bp, synthetic construct
  misc_feature 1..120: note = Artificially Synthesized Probe
  source 1..120: mol_type = other DNA
gtagaagttaactgttagaagtagttaaaaaagaaaagaggcaaaggaacttaatgtagatattactatcatatcttctgatggccccacaattgcagtgctgtcacacctctcagcctt

SEQ ID NO: 8257 - DNA, 120 bp, synthetic construct
  misc_feature 1..120: note = Artificially Synthesized Probe
  source 1..120: mol_type = other DNA
ttctcacctttatcagtcggcgaataccgtaagaaattaagaggatcgttccaataacaccagccatcaccccaaaaataatgagtgttatctctacaggagataaagagagcagcaaaa

SEQ ID NO: 8258 - DNA, 120 bp, synthetic construct
  misc_feature 1..120: note = Artificially Synthesized Probe
  source 1..120: mol_type = other DNA
atgcaggtcatctatgttctaagctttattccttccatagtattcttatgcatagtctccaatgtagtcactaaaaatgcttgttgagtcatttatatgttgggaatgaaacaattgaaa

SEQ ID NO: 8259 - DNA, 120 bp, synthetic construct
  misc_feature 1..120: note = Artificially Synthesized Probe
  source 1..120: mol_type = other DNA
tacctggttcagagaaatgatgggcaagttgtaccctttctcctataaagcaaaatttcaatgtaagtccaaataagtaaggcatgtgcaaagaaaaaaatcattttggaatcaaactgt

SEQ ID NO: 8260 - DNA, 120 bp, synthetic construct
  misc_feature 1..120: note = Artificially Synthesized Probe
  source 1..120: mol_type = other DNA
acaacaatgactccagagcaactatttaaaactaagaacataccggtttcctcttctggagggtaaacagttctaacagaaatttctgaaacttcatgagctctaggagtggctgcatat

SEQ ID NO: 8261 - DNA, 120 bp, synthetic construct
  misc_feature 1..120: note = Artificially Synthesized Probe
  source 1..120: mol_type = other DNA
ttgaagtgtgcattgccacctcagtggtacttaatgctgatatgctcacaatttctgtataaaatagaagttgagaaagggattaagaacgaggtgactgagcggaccataaagcatatt

SEQ ID NO: 8262 - DNA, 120 bp, synthetic construct
  misc_feature 1..120: note = Artificially Synthesized Probe
  source 1..120: mol_type = other DNA
tttcactcttctgagagttataaatcattatgataaaagtcagtaccctgaactctgtagatgtacatttgctcatctcttggagatattcaactgaggggaatggcacccaagtgcaat

SEQ ID NO: 8263 - DNA, 120 bp, synthetic construct
  misc_feature 1..120: note = Artificially Synthesized Probe
  source 1..120: mol_type = other DNA
caacaagccaaaaaaaatcaaaagtgttaatggccagaagccttaaatgggcatgtaacaataaacttgagatcagcctttggctcagcaacatgggaatacaactggaaaatgcagctg

SEQ ID NO: 8264 - DNA, 120 bp, synthetic construct
  misc_feature 1..120: note = Artificially Synthesized Probe
  source 1..120: mol_type = other DNA
attttattttattttattttattttattattattatactttaagtttttgggtacctgtgcacaatgtgcaggttagttacatatgtatacatgtgccatgctggtgtgctgcacccatt

SEQ ID NO: 8265 - DNA, 120 bp, synthetic construct
  misc_feature 1..120: note = Artificially Synthesized Probe
  source 1..120: mol_type = other DNA
ctgtaaatgccatctagtggttttgactatgagtacaaatatacatattcctccaagttgcctaactgttcagcacgatgttagggactacctgctgcaattttctttgtgaacatctgc

SEQ ID NO: 8266 - DNA, 120 bp, synthetic construct
  misc_feature 1..120: note = Artificially Synthesized Probe
  source 1..120: mol_type = other DNA
gctgaagaggtggtgaggcaccaaatgctgtgggccatgttctagaatttggactttatctttaaggcagtggaaagacaatgaatggtttgaagcagttttttatttagggaaaatcac

SEQ ID NO: 8267 - DNA, 120 bp, synthetic construct
  misc_feature 1..120: note = Artificially Synthesized Probe
  source 1..120: mol_type = other DNA
gatagcataagtctttcagtaggaattaatacccatgcatgcttagtggtaagaagaaggcacagaggcttgttactggaagtctatagtttacaaaacagtgtcatcttgaaggaacaa

SEQ ID NO: 8268 - DNA, 120 bp, synthetic construct
  misc_feature 1..120: note = Artificially Synthesized Probe
  source 1..120: mol_type = other DNA
tagattatatctcttacccctcagtgtccttatactatagccactatgagaaattatgttttgctctagcaatacggagatgagagtcagtttcttaatcccttcacatcttctggcagg

SEQ ID NO: 8269 - DNA, 120 bp, synthetic construct
  misc_feature 1..120: note = Artificially Synthesized Probe
  source 1..120: mol_type = other DNA
agaaacaataaaaataaaatgtgatattgtataagtacgcttcagtttcgctgtatgccaaaacttccagtggctgagctcttgtcaagatgtgataaagtcagctcatgcagctgctgc

SEQ ID NO: 8270 - DNA, 120 bp, synthetic construct
  misc_feature 1..120: note = Artificially Synthesized Probe
  source 1..120: mol_type = other DNA
tggaatgagccagtttctgctcatcttcagactggcatgctttggcagtccccatacagctaattggtcacacttcttcctttcctaacttggtagagaagggtgctttatgtattctat

SEQ ID NO: 8271 - DNA, 120 bp, synthetic construct
  misc_feature 1..120: note = Artificially Synthesized Probe
  source 1..120: mol_type = other DNA
accctattgttatatgttaattattctttgtggaggaggaaaaaaacatcagaagcattgcctgacttgcttaagttcacacagccaccaagtggcagacctggattttgaattcagacc

SEQ ID NO: 8272 - DNA, 120 bp, synthetic construct
  misc_feature 1..120: note = Artificially Synthesized Probe
  source 1..120: mol_type = other DNA
tcctgagtttcgaggtccactcttacattttctatggttgtagtgtcacctttatctataaagtgaacagctatagtatgtgatattagcctgaacgactttagaaataacatcatttgc

SEQ ID NO: 8273 - DNA, 120 bp, synthetic construct
  misc_feature 1..120: note = Artificially Synthesized Probe
  source 1..120: mol_type = other DNA
catcagtgctacatagattccctgagaaaattccaaccttcagtcaagatggtgcattcctctactaatgggttatgaaatcagtccagtgggttgtcactggcactaaaaaattaagtt

SEQ ID NO: 8274 - DNA, 120 bp, synthetic construct
  misc_feature 1..120: note = Artificially Synthesized Probe
  source 1..120: mol_type = other DNA
ccagaaagcacttagactttctatgtgtgctgcaccactaaaatgggaattctgagagagaatgctttcaaaaacataaagttagctaatgggacaattacacgtaggctatatacttta

SEQ ID NO: 8275 - DNA, 120 bp, synthetic construct
  misc_feature 1..120: note = Artificially Synthesized Probe
  source 1..120: mol_type = other DNA
aaacattttctatagcccatataaaaaggagcaaaaggctaacataacagccacacagttagagttccttagctgcaccacgtgaggaagacagaccgtcaaccttcattaaagtcttca

SEQ ID NO: 8276 - DNA, 120 bp, synthetic construct
  misc_feature 1..120: note = Artificially Synthesized Probe
  source 1..120: mol_type = other DNA
taattaaaaaaatgaaaaagtacaatttctggcaagattgtggagaaattggcacctcatacaccctggtgaaaaggtcaaaaggtgcagctcctgtggaaaagagttgagcagttcctt

SEQ ID NO: 8277 - DNA, 120 bp, synthetic construct
  misc_feature 1..120: note = Artificially Synthesized Probe
  source 1..120: mol_type = other DNA
gcttagaacagtgcacggcacaaagtaagtgctattatcagtgttggttattattattcagaacctgcctctgtatggaacctaacctgctgtatataaatctagggatggaaataccaa

SEQ ID NO: 8278 - DNA, 120 bp, synthetic construct
  misc_feature 1..120: note = Artificially Synthesized Probe
  source 1..120: mol_type = other DNA
ggattcattggggtttacagttgaaaaatgcttgtagataccatctactcggcgctttattgaataggcacaagaaaactgaggcccacgggtgttaaatgatttttcatggctaaacta

SEQ ID NO: 8279 - DNA, 120 bp, synthetic construct
  misc_feature 1..120: note = Artificially Synthesized Probe
  source 1..120: mol_type = other DNA
attttcagggttggctccgtctccttgttccacatttagcataaatgtcatctactcagaaaataactccctgctacccttttcttaagcagctttcggcattcatgtttatcatcttac

SEQ ID NO: 8280 - DNA, 120 bp, synthetic construct
  misc_feature 1..120: note = Artificially Synthesized Probe
  source 1..120: mol_type = other DNA
tttcaggcatcagtaagtgtattccattaaatattttgtttaatctttatgcaattattatgaggtaagtaccaacactgcctgcattttaaagacgaggacacataaaaatgtgggcac

SEQ ID NO: 8281 - DNA, 120 bp, synthetic construct
  misc_feature 1..120: note = Artificially Synthesized Probe
  source 1..120: mol_type = other DNA
aagcgaacaactccccacggtttcagtgttcatgcttttggcttctcgccatttggcagaaataggaaattataccttttgaaaactaaaagccatatagctaccaacatcttcgttaat

SEQ ID NO: 8282 - DNA, 120 bp, synthetic construct
  misc_feature 1..120: note = Artificially Synthesized Probe
  source 1..120: mol_type = other DNA
ggaggccaaggcaggtggatcacttgaggtcaggagtttgaaaccagcctggccaacacagcgaaaccccatctctgctattaaaaaaatacaaaaattagtcaggcatggtagcccgca

SEQ ID NO: 8283 - DNA, 120 bp, synthetic construct
  misc_feature 1..120: note = Artificially Synthesized Probe
  source 1..120: mol_type = other DNA
ttctcacctttatcagtcggcgaatactgtaagaaattaagaggatcgttccaataataccagccatcacacacaaaataatgagtattatcactacaggagctaaagagagcagcaaaa

SEQ ID NO: 8284 - DNA, 120 bp, synthetic construct
  misc_feature 1..120: note = Artificially Synthesized Probe
  source 1..120: mol_type = other DNA
ccagttaattagatgattttaaatgccttgctttttacatgagggcagagggaacttcacttgttttataagctcttatgaggcttctttcaagtactcagggttggttagaaaggtaaa

SEQ ID NO: 8285 - DNA, 120 bp, synthetic construct
  misc_feature 1..120: note = Artificially Synthesized Probe
  source 1..120: mol_type = other DNA
ttgacttacacaagaagcaatgcatttttaaaacatgtaaaaaataatgagaagaaaggaggcatatggagccattactccacagagatgccagtcccatgcaaagaagggtcatgcggc

SEQ ID NO: 8286 - DNA, 120 bp, synthetic construct
  misc_feature 1..120: note = Artificially Synthesized Probe
  source 1..120: mol_type = other DNA
cttttctggaggggaaacagttgtaacagaaatttctgaaacttcattagcagtatgagctggacatgtgtcccgtttgtgcttatctgcatataagagaagttgagaaagggaacaaga

SEQ ID NO: 8287 - DNA, 120 bp, synthetic construct
  misc_feature 1..120: note = Artificially Synthesized Probe
  source 1..120: mol_type = other DNA
cacatccctccagtccctgagctaagcgctttagtatatatcttacataatctttagagaattgctgcgtggtaagtattgtattattggccttattttaaaattaaggggccagaagcc

SEQ ID NO: 8288 - DNA, 120 bp, synthetic construct
  misc_feature 1..120: note = Artificially Synthesized Probe
  source 1..120: mol_type = other DNA
atgtgtttttcactcttctgagagttataaatcattatgataaacatcagtaccctgaactctgtagatgtacctttgctcatctcttggagacattcaaatgaggggaatggcacccaa

SEQ ID NO: 8289 - DNA, 120 bp, synthetic construct
  misc_feature 1..120: note = Artificially Synthesized Probe
  source 1..120: mol_type = other DNA
atagatgaagggtttgaagcagttttttatttagggaaaatcactgtcagtagtatggaggataacttaggggaaaaaaaacatgcgggagctttgcagtagagggtcccatcttgtgtt

SEQ ID NO: 8290 - DNA, 120 bp, synthetic construct
  misc_feature 1..120: note = Artificially Synthesized Probe
  source 1..120: mol_type = other DNA
aaagatagcataagcctttcagtaggaattaatacccatgcttgcttagtggtaagaggaaggcacagaggcttgctattggaagtctatagtttacaaaacagtgtcatcttgaaggaa

SEQ ID NO: 8291 - DNA, 120 bp, synthetic construct
  misc_feature 1..120: note = Artificially Synthesized Probe
  source 1..120: mol_type = other DNA
tggtaagcagcagaactgagacttaattctgctgacccccaatattagtctcaccttccagatctcgctgcctggttgagatgttgtcagcaagatttctctaatgttttagtatattag

SEQ ID NO: 8292 - DNA, 120 bp, synthetic construct
  misc_feature 1..120: note = Artificially Synthesized Probe
  source 1..120: mol_type = other DNA
gaaacaataaaaataaaatgtgatattgtataagtacccttcagttttgctgtatgccaaaacttccagtggctgagctctcatcaagatgtgataagctgctggtttgagttttggttc

SEQ ID NO: 8293 - DNA, 120 bp, synthetic construct
  misc_feature 1..120: note = Artificially Synthesized Probe
  source 1..120: mol_type = other DNA
agtttctgctcatcttcagactggcgtgctttggcagtccccatacaactaattggtaacacttcttcctttcctaacttggtagagaagggtgctgtatttattctatctcgaaggtgt

SEQ ID NO: 8294 - DNA, 120 bp, synthetic construct
  misc_feature 1..120: note = Artificially Synthesized Probe
  source 1..120: mol_type = other DNA
aattattctttgtggaggaggaaaagaaaacatcagaaacattgcctgacttgcttaagttcacacagccgccaagtggcagaactggattttgaattcagacctatgtaactacagaac

SEQ ID NO: 8295 - DNA, 120 bp, synthetic construct
  misc_feature 1..120: note = Artificially Synthesized Probe
  source 1..120: mol_type = other DNA
catcttcctgagtttcgaggtcaattcttacattttctatggttctagcgtcacctttatctataaagtgaacagctacagtatgggatattagcctgaacaactttagaaataacatca

SEQ ID NO: 8296 - DNA, 120 bp, synthetic construct
  misc_feature 1..120: note = Artificially Synthesized Probe
  source 1..120: mol_type = other DNA
gtattagcataactagaatgtctggatgtgaaacccaatcatcagtgctacatagattctctgagaaaattctaacctgcagtcaggatggcgcattcctctactaatgggctatgaaat

SEQ ID NO: 8297 - DNA, 120 bp, synthetic construct
  misc_feature 1..120: note = Artificially Synthesized Probe
  source 1..120: mol_type = other DNA
cttatctagctccagaaagtctaagactttctatgtgtgctgcaccactaaaatgggaattctgagagagaatgctttcaaaaacataaagttagctaatgggacaattacaagtaggct

SEQ ID NO: 8298 - DNA, 120 bp, synthetic construct
  misc_feature 1..120: note = Artificially Synthesized Probe
  source 1..120: mol_type = other DNA
catcaaaaggaggcctccagaatttaaaaacattttctatagcccatataaaaaggagcaaaaggctaacataacagccacacagttagagttccttagctgcaccacgtgaggaagaca

SEQ ID NO: 8299 - DNA, 120 bp, synthetic construct
  misc_feature 1..120: note = Artificially Synthesized Probe
  source 1..120: mol_type = other DNA
aaatggtgctgggacaactgcaaaataataaaggtggactcttgtcatacatcatatagaaaaattaactgataataaaccaaagatctaaatataagagaagaaatacaaaactcttag

SEQ ID NO: 8300 - DNA, 120 bp, synthetic construct
  misc_feature 1..120: note = Artificially Synthesized Probe
  source 1..120: mol_type = other DNA
ctgtggagaaattggcacctcatacactctggtgaaaaggtaaaaaggtgcagctcctgtggaaaagagttgagcagttccttagtaagttaaacataaaattactatgacccagcaatt

SEQ ID NO: 8301 - DNA, 120 bp, synthetic construct
  misc_feature 1..120: note = Artificially Synthesized Probe
  source 1..120: mol_type = other DNA
tgcttagaaaagtgcatggcacaaagtaagtgctatatcagtgttggttattattattcagaacctgcctatatatggaacctaacctgctgtatataaatctagggatggaaataccaa

SEQ ID NO: 8302 - DNA, 120 bp, synthetic construct
  misc_feature 1..120: note = Artificially Synthesized Probe
  source 1..120: mol_type = other DNA
catctcaggctgaattttggggatttattggggtttacagatgaaaaatgattgtagataccatctactcggtgcttgattgaatagacacaggaaaactgaggcccacaggtgttaaat

SEQ ID NO: 8303 - DNA, 120 bp, synthetic construct
  misc_feature 1..120: note = Artificially Synthesized Probe
  source 1..120: mol_type = other DNA
ttttcagggttggctccatctccttgttccacgtttagcataaatgtcatctactcagaaaataactccctgctacccttttcttaagcagttttcggcattcatgtttatcatcttacc

SEQ ID NO: 8304 - DNA, 120 bp, synthetic construct
  misc_feature 1..120: note = Artificially Synthesized Probe
  source 1..120: mol_type = other DNA
ttttgtttaatctttatgcaattattatgaggtaagtaccaacattgcctgcattttaaagacgaggacacataaaaatgtgggcccttaatttgccttaatgttccccagccttgagaa

SEQ ID NO: 8305 - DNA, 120 bp, synthetic construct
  misc_feature 1..120: note = Artificially Synthesized Probe
  source 1..120: mol_type = other DNA
agtgttcatccttttggcttctcaccatttggcagaaataggaaattacaccttttgaaaactaaaagccatatagctaccaacacctttgttaataactctttagtttggaaatgaatc

SEQ ID NO: 8306 - DNA, 120 bp, synthetic construct
  misc_feature 1..120: note = Artificially Synthesized Probe
  source 1..120: mol_type = other DNA
tgatttctctcttctattcagtattcttccacagagagggacccatagtcattaccttcaaggaacctaaatcctggtgtttttatggttacgggtggcatataatatacaggtaagcca

SEQ ID NO: 8307 - DNA, 120 bp, synthetic construct
  misc_feature 1..120: note = Artificially Synthesized Probe
  source 1..120: mol_type = other DNA
gttagtagctacagccgtcaggcacacaattacaccatgaacagtgaagtaaaaaaatgtcctttctttgctttcttcctctaatctcaatcccagaggcatgaaaacctagaaaaaaga

SEQ ID NO: 8308 - DNA, 120 bp, synthetic construct
  misc_feature 1..120: note = Artificially Synthesized Probe
  source 1..120: mol_type = other DNA
aggtctaaaatttcctttatttgcttttgtcagagcaaattatgttaccaataacacaacctacaagagagaagagccatgagaagggtcaagaacaatctatgagtaacttaagtggag

SEQ ID NO: 8309 - DNA, 120 bp, synthetic construct
  misc_feature 1..120: note = Artificially Synthesized Probe
  source 1..120: mol_type = other DNA
acagccccctcacccacagaaagaacttttaatgtagaactgtctgcaatcttttaaacatgcaacaaacaccattccttgtcatcagacctaccagattttatcatggtgtgactgtaa

SEQ ID NO: 8310 - DNA, 120 bp, synthetic construct
  misc_feature 1..120: note = Artificially Synthesized Probe
  source 1..120: mol_type = other DNA
gttttatttttatttagaagtagagaatacagtaataggcaggagaacagggagttaggatagccaagggttggggcataagcaaaggaatagcaggtgcagccagtttgcataagcaag

SEQ ID NO: 8311 - DNA, 120 bp, synthetic construct
  misc_feature 1..120: note = Artificially Synthesized Probe
  source 1..120: mol_type = other DNA
tcctcaatatccatcaaaatatgtgaaagcaagttagacaaaacttagggagagctttcattgggaaaatgggggacagatttatatttagaggctccctttaattgggcaaatgcaaaa

SEQ ID NO: 8312 - DNA, 120 bp, synthetic construct
  misc_feature 1..120: note = Artificially Synthesized Probe
  source 1..120: mol_type = other DNA
taacatcaccttgccttttaatagaaagtacaattaatatactatcatgtgtattttgtcttttttaaaactgtgtgctttacagtaaccttgtgggaaactgggactgtgggtgatcaa

SEQ ID NO: 8313 - DNA, 120 bp, synthetic construct
  misc_feature 1..120: note = Artificially Synthesized Probe
  source 1..120: mol_type = other DNA
atgattttaaatgccttgctttttacatgagggcagagggaacttcacttgttttataagctcttatgaggcttctttcaagtactcagggttggttagaaaggtaaaacatctaactta

SEQ ID NO: 8314 - DNA, 120 bp, synthetic construct
  misc_feature 1..120: note = Artificially Synthesized Probe
  source 1..120: mol_type = other DNA
ctgtgctaaccttccctctcagtccacatcttacttatgtctctgtctccacttgccattttacatcatgaagctctcttactaccaaagccacacaattttctagagtttaattattac

SEQ ID NO: 8315 - DNA, 120 bp, synthetic construct
  misc_feature 1..120: note = Artificially Synthesized Probe
  source 1..120: mol_type = other DNA
cagtattatttctgtgagatatttcagaggcaagaattcctctgtagtaggaattgtgtctacttagtaggctgtgtctacttagctcgcatttctcagtgtttgtcagtttctctgcag

SEQ ID NO: 8316 - DNA, 120 bp, synthetic construct
  misc_feature 1..120: note = Artificially Synthesized Probe
  source 1..120: mol_type = other DNA
aaggggtaacttgaagttgcattttggaaactgtctatgctaagaaaggtggaagcgcataataattatatagaacaaaacttctgtcccatatctcagtgtctccatctgctagggaca

SEQ ID NO: 8317 - DNA, 120 bp, synthetic construct
  misc_feature 1..120: note = Artificially Synthesized Probe
  source 1..120: mol_type = other DNA
aaaatagctaataaaataacaagccaaaaaaaatcaaaagtgttaatggccagaagccttaaatgggcatgtaacaataaacttgagatcagcctttggctcagctacatgggaatacaa

SEQ ID NO: 8318 - DNA, 120 bp, synthetic construct
  misc_feature 1..120: note = Artificially Synthesized Probe
  source 1..120: mol_type = other DNA
cagcatgagaatagtgctttattcataaaagatgttaaatgaaatgttaattgttataaatgcttggacaaattcttatggagaaagaattaggtgagtggtatggtttggatctgtgtc

SEQ ID NO: 8319 - DNA, 120 bp, synthetic construct
  misc_feature 1..120: note = Artificially Synthesized Probe
  source 1..120: mol_type = other DNA
tgtctgaaatatttccctccctatctttgcctaactactggcttttcaagtctcagttcaatgccacttcctttggaggtctttgctggcctctctaataagatttagactaaaagctct

SEQ ID NO: 8320 - DNA, 120 bp, synthetic construct
  misc_feature 1..120: note = Artificially Synthesized Probe
  source 1..120: mol_type = other DNA
aagaggtggtgaggcaccaaatgctgtgggccatgttctagaatttggactttatctttaaggcagtggaaagagaatgaatggtttgaagcagttttttatttagggaaaatcactgtc

SEQ ID NO: 8321 - DNA, 120 bp, synthetic construct
  misc_feature 1..120: note = Artificially Synthesized Probe
  source 1..120: mol_type = other DNA
aaaaaagatagcataagtctttcagtaggaattaatacccatgcatgcttagtggtaagaagaaggcacagaggcttgttactggaagtctatagtttacaaaacagtgtcatcttgaag

SEQ ID NO: 8322 - DNA, 120 bp, synthetic construct
  misc_feature 1..120: note = Artificially Synthesized Probe
  source 1..120: mol_type = other DNA
tatatctcttacccctcagtgtccttatactatagccactatgagaaattatgttttgctctagcaatacggagatgagagtcagtttcttaatcccttcacatcttctggcaggaacac

SEQ ID NO: 8323 - DNA, 120 bp, synthetic construct
  misc_feature 1..120: note = Artificially Synthesized Probe
  source 1..120: mol_type = other DNA
aacaataaaaataaagtgtgatattgtataagtacgcttcagtttcgctgtatgccaaaacttccagtggctgagctcttgtcaagatgtgataaagtcagctcatgcagctgctgcttt

SEQ ID NO: 8324 - DNA, 120 bp, synthetic construct
  misc_feature 1..120: note = Artificially Synthesized Probe
  source 1..120: mol_type = other DNA
agtttctgctcatcttcagaatggcgtgctttggcagtccccatacaactaattggtaacacttcttcctttcctaacttggtagagaagggtgctgtatttattctatctcgaaggtgt

SEQ ID NO: 8325 - DNA, 120 bp, synthetic construct
  misc_feature 1..120: note = Artificially Synthesized Probe
  source 1..120: mol_type = other DNA
agcattgtagggtgacctgcagtggcaaatccacattacggaagaacagatggttctggttattaacagtttgttaacttgaatcttaatttttccagccaagcatattccaatctggtc

SEQ ID NO: 8326 - DNA, 120 bp, synthetic construct
  misc_feature 1..120: note = Artificially Synthesized Probe
  source 1..120: mol_type = other DNA
tctaaaacttaagtttttcaaattgtctgttgagagcccttagtacaagtattagtaaacttcttatgtaaagggagagggagtaactactttaggatttgtgggccataactactttag

SEQ ID NO: 8327 - DNA, 120 bp, synthetic construct
  misc_feature 1..120: note = Artificially Synthesized Probe
  source 1..120: mol_type = other DNA
aacagtgctacagagattctctgagaaaattcaaacctgcagtcaagatggtgcattcctctagtaatgggctatgaaatcagtccagtgggttgtcactggcactaaaaatttaagttc

SEQ ID NO: 8328 - DNA, 120 bp, synthetic construct
  misc_feature 1..120: note = Artificially Synthesized Probe
  source 1..120: mol_type = other DNA
tgttttatcagagactaggatttcaacccctgcctttttttgttttccatttgcttggtagatcttcctccatccttttattttgagcctatgtgtgtctctgcacatgagatgggtttc

SEQ ID NO: 8329 - DNA, 120 bp, synthetic construct
  misc_feature 1..120: note = Artificially Synthesized Probe
  source 1..120: mol_type = other DNA
cacattggctcctgaggcttctgcattattcacgtagttctcgaggcttggctttcaactccatcagctcctttaagcacttctctgtattggttattctagttatacattcgtctaaac

SEQ ID NO: 8330 - DNA, 120 bp, synthetic construct
  misc_feature 1..120: note = Artificially Synthesized Probe
  source 1..120: mol_type = other DNA
actggcacaagacagggatgccctctctcaccactcctattcaacatagtattggaagttctggccagggcaattaggcaggagaacgaaataaagggtattcaattaggaaaagaggaa

SEQ ID NO: 8331 - DNA, 120 bp, synthetic construct
  misc_feature 1..120: note = Artificially Synthesized Probe
  source 1..120: mol_type = other DNA
ggcattaccattcaggacataggaatgggcaaggacttcatgtctaaaacaccaaaagcaatggcaacagaagccaaaattgacaaatgggatctaattaaactaaagagcttctgcaca

SEQ ID NO: 8332 - DNA, 120 bp, synthetic construct
  misc_feature 1..120: note = Artificially Synthesized Probe
  source 1..120: mol_type = other DNA
tgacgagttaatgggtgcagcacaccagcatggcacatgtatacatatgtaactaaccggcacattgtgcacatgtaccctaaagcttacagtataataataataaaaaaaattaagttg

SEQ ID NO: 8333 - DNA, 120 bp, synthetic construct
  misc_feature 1..120: note = Artificially Synthesized Probe
  source 1..120: mol_type = other DNA
accagtggctcatgcacacctttatccagcttatctagctccagaaagtctaagactttatatgtgtgctgaaccactaaaatgggaattctgagagagaatgctttcaaaaacataaag

SEQ ID NO: 8334 - DNA, 120 bp, synthetic construct
  misc_feature 1..120: note = Artificially Synthesized Probe
  source 1..120: mol_type = other DNA
cagaatttaaaaacattttctatagcccatataaaaaggagcaaaaggctaacataacagccacacagttagagttccttagctgcaccacgtgaggaagacagaccgtcaaccttcatt

SEQ ID NO: 8335 - DNA, 120 bp, synthetic construct
  misc_feature 1..120: note = Artificially Synthesized Probe
  source 1..120: mol_type = other DNA
atgggtgaaggactagaaccaacatttctccaaagatatgcaaaatgcagttaccaacaactacatgagaagattctcagcatcatgagttatcaggaaaatgcaagaaaccacagtgaa

SEQ ID NO: 8336 - DNA, 120 bp, synthetic construct
  misc_feature 1..120: note = Artificially Synthesized Probe
  source 1..120: mol_type = other DNA
cttagaacagtgcatggcacaaagtgagtgctatatcactgttggtttttattattcagaacctgcctatgtacggaacctaacctgctgtatataaatctagggatggaaataccaaag

SEQ ID NO: 8337 - DNA, 120 bp, synthetic construct
  misc_feature 1..120: note = Artificially Synthesized Probe
  source 1..120: mol_type = other DNA
aaaaaaaaaaaaaagagatgccttgtttcttcacttaacatgtgcttttcagactgatgtacctgctgtggtatgagtcagatgcacagggcaataatgatctgtctatgcggagcactc

SEQ ID NO: 8338 - DNA, 120 bp, synthetic construct
  misc_feature 1..120: note = Artificially Synthesized Probe
  source 1..120: mol_type = other DNA
cgggaactgtgctagattctggggatacacggctgaataaagtaggcatgatgatatcacaccagtccctttgtttcctccaattaaattagtatattatgacctagaatgcaaattttg

SEQ ID NO: 8339 - DNA, 120 bp, synthetic construct
  misc_feature 1..120: note = Artificially Synthesized Probe
  source 1..120: mol_type = other DNA
ttgtgtagttgtagaaattaaaaaaaaaaatcatttctttgccaggaaccctttccaaatttggggcacttgtaagtcacacagagttttcccaaatgctgggcacaccccccagtagag

SEQ ID NO: 8340 - DNA, 120 bp, synthetic construct
  misc_feature 1..120: note = Artificially Synthesized Probe
  source 1..120: mol_type = other DNA
taatggacccacagagaagcgaacaactccccacggtttcagtgttcatgcttttggcttctcaccatttggcagaaataggaaattatacctttttaaaactaaaagccatataacacc

SEQ ID NO: 8341 - DNA, 120 bp, synthetic construct
  misc_feature 1..120: note = Artificially Synthesized Probe
  source 1..120: mol_type = other DNA
ttagtgcaaattaaattcagaagggacgggggaaacagagtcgtggaggctttgaatctctcagaaaaaaggaaagacaggaaagctcagaaacaaagagacagaaggatgaaaaagaag

SEQ ID NO: 8342 - DNA, 120 bp, synthetic construct
  misc_feature 1..120: note = Artificially Synthesized Probe
  source 1..120: mol_type = other DNA
cgtgttggttgtgtggggaggggcgggtgggggctgagggtggcagagggggaaaaactcaccctcgtctccagcccgaacgctgaggcaccgatcccggctccgtcgccgcccgcgagg

SEQ ID NO: 8343 - DNA, 120 bp, synthetic construct
  misc_feature 1..120: note = Artificially Synthesized Probe
  source 1..120: mol_type = other DNA
tcagaaggctggggaagcgaggcctggggagggaagggactcacctgcccggcagatggggtcctcacctgcccgctgctgccagctacacctccgttgcccaggccctgggatcaaacc

SEQ ID NO: 8344 - DNA, 120 bp, synthetic construct
  misc_feature 1..120: note = Artificially Synthesized Probe
  source 1..120: mol_type = other DNA
acggctcagacctcacgttcctggagagtaggggtggggtgctgaggggcagagggaagtgccgcaaaccccctggtgggcgcggtgccagccccccaggccgattcccatccagttgac

SEQ ID NO: 8345 - DNA, 120 bp, synthetic construct
  misc_feature 1..120: note = Artificially Synthesized Probe
  source 1..120: mol_type = other DNA
ccacgataatggattatctccagcaacacaaggatcctggaccagagaataaagcagcagtggcgctcccagctctttagcatcttaagctcctgaattagcacctcaaacctgcattga

SEQ ID NO: 8346 - DNA, 120 bp, synthetic construct
  misc_feature 1..120: note = Artificially Synthesized Probe
  source 1..120: mol_type = other DNA
gtttcacactagggccgagatccccatcatccatggaactgggacacctcattgttcccctagtatctcctcccatctccccaaccttcaacagtgcaccctggggtgaatcagacacgt

SEQ ID NO: 8347 - DNA, 120 bp, synthetic construct
  misc_feature 1..120: note = Artificially Synthesized Probe
  source 1..120: mol_type = other DNA
acttccgattccacagctacaaccaattctgcaccatccgggtggtgagactgaaggggaagcctccagaaatattcatgtgctatgcaagagcccctgggctcttgagcctgccagaga

SEQ ID NO: 8348 - DNA, 120 bp, synthetic construct
  misc_feature 1..120: note = Artificially Synthesized Probe
  source 1..120: mol_type = other DNA
ccattaaatgcaggtagttgttccccttcaagcactagtcactggccataatttaaatcttgctatcttcttgccaccatgaaccctgtatgttgtaggctgaagacgttaaaagaaaca

SEQ ID NO: 8349 - DNA, 120 bp, synthetic construct
  misc_feature 1..120: note = Artificially Synthesized Probe
  source 1..120: mol_type = other DNA
attgtccatctagatttttagaggcactccttaggccctaaaacattaccactgggtctcagcccagttagtcctctgcagtttcttcacccccaaccccagtatcttcaaacagctcac

SEQ ID NO: 8350 - DNA, 120 bp, synthetic construct
  misc_feature 1..120: note = Artificially Synthesized Probe
  source 1..120: mol_type = other DNA
cttcacggccgaggcccacgccgcctgggacaagttcctatcggtcgtatcctctgtcctgaccgagaagtaccgctgagcgccgcctccgggacccccaggacaggctgcggcccctcc

SEQ ID NO: 8351 - DNA, 120 bp, synthetic construct
  misc_feature 1..120: note = Artificially Synthesized Probe
  source 1..120: mol_type = other DNA
gctaaagacctgaaaacccaggtgtccatcatcaggactaactggaaaaaccaagggtatccgcaccatggagagctcgactgaaaaaaaaaaatgaggataattggataatttcttttt

SEQ ID NO: 8352 - DNA, 120 bp, synthetic construct
  misc_feature 1..120: note = Artificially Synthesized Probe
  source 1..120: mol_type = other DNA
gccgggtgtggtggcgggtgcctgtagtcccagctacttgggaggctgaggcaggagaatggtgtgaacccgggaggcggagcttgcagtgagccaggttcaagccactgcccttcagcc

SEQ ID NO: 8353 - DNA, 120 bp, synthetic construct
  misc_feature 1..120: note = Artificially Synthesized Probe
  source 1..120: mol_type = other DNA
aaatgagccaatgtaagaatgtggtgatataataatcagaaaaaaggattgttccaggtgacctctgaacacagaacctcggctatgaccgaaagaactccaaagacactctaacactcc

SEQ ID NO: 8354 - DNA, 120 bp, synthetic construct
  misc_feature 1..120: note = Artificially Synthesized Probe
  source 1..120: mol_type = other DNA
aactgttaaataaaataacaagaatatgaaaaactcttgaatactactcatccagactctccagctgttaacattctaccacatcggcttgctctctcttgcccccacttgctctttctc

SEQ ID NO: 8355 - DNA, 120 bp, synthetic construct
  misc_feature 1..120: note = Artificially Synthesized Probe
  source 1..120: mol_type = other DNA
aaaaaaaaattcctgaagctcctcttgagcttacattctagtggactgtaaacagaaacatttttttttcctgtggataaagaaaagcagggcaagtaggggcttagacagaggagggga

SEQ ID NO: 8356 - DNA, 120 bp, synthetic construct
  misc_feature 1..120: note = Artificially Synthesized Probe
  source 1..120: mol_type = other DNA
ggggcacaggttgtgagacgtgcccgggacggcttgtggggcacaggctgtgagggtgcccgggtcggcttgtggggcacaggctgcaagaggtgcccgggacggcttgtggggcacagg

SEQ ID NO: 8357 - DNA, 120 bp, synthetic construct
  misc_feature 1..120: note = Artificially Synthesized Probe
  source 1..120: mol_type = other DNA
cagcccgagggcaggaagggcacccacactgagcctcaaacagctaattttgcaactgtaagtccatataattgtcttgaaaagtaatttgtttcaaaaagctaaaaaacgaatactctt

SEQ ID NO: 8358 - DNA, 120 bp, synthetic construct
  misc_feature 1..120: note = Artificially Synthesized Probe
  source 1..120: mol_type = other DNA
gcacacgtactaactaaaaggaatatattcagcacatagaaatggttgtctaacggaggaggggggagttaataaacagagaggataaaaagaaataaatcagtagagctggaggagggt

SEQ ID NO: 8359 - DNA, 120 bp, synthetic construct
  misc_feature 1..120: note = Artificially Synthesized Probe
  source 1..120: mol_type = other DNA
atgtctctgaccaagacttaggggaccatcattgtgtccatgtgggccaagatctccacgcaggccgacaccatcggcaccgagactctggagaggtgagtgtcagatgggactgccaga

SEQ ID NO: 8360 - DNA, 120 bp, synthetic construct
  misc_feature 1..120: note = Artificially Synthesized Probe
  source 1..120: mol_type = other DNA
ttctgacaagcagagggtgaaaggtttcgttctaggcctgaagggccttacagggcagccagggcactacagcctctaaagtcccagcatctgggatcagggcactgtcccagcttcaaa

SEQ ID NO: 8361 - DNA, 120 bp, synthetic construct
  misc_feature 1..120: note = Artificially Synthesized Probe
  source 1..120: mol_type = other DNA
ccttgagtcggacgggcgtttgtgcgtctcccggcttcccatatcgcacaaagattgtcacttcactaagcgtattggaagcgtgtcggggctcagggaacttttccacaaagcctgacg

SEQ ID NO: 8362 - DNA, 120 bp, synthetic construct
  misc_feature 1..120: note = Artificially Synthesized Probe
  source 1..120: mol_type = other DNA
gctagtgaagccccacgcagccgccctcctccccggtcactgacctggtcctgcaggctcttcacggtgtaccccagcaccaaggtctacttcccgcacctgagcgcctgccaggacgcg

SEQ ID NO: 8363 - DNA, 120 bp, synthetic construct
  misc_feature 1..120: note = Artificially Synthesized Probe
  source 1..120: mol_type = other DNA
ggtgtcgttctcgtgccgcggggcggcctcggggcccgcgccggggccggggccggcggaggaggcgggcagcgaggaggcgggcccggcgggggagccgcgcggcagccaggccagctt

SEQ ID NO: 8364 - DNA, 120 bp, synthetic construct
  misc_feature 1..120: note = Artificially Synthesized Probe
  source 1..120: mol_type = other DNA
cccgtgggctgtgtgtgaacaggggcccgtgaccgcggcggggttcccggggcgcgagcctgtggccggagaggtgtgtctccaggagtgtgtttgcgtggtggtcgcgggcgtgtgcgc

SEQ ID NO: 8365 - DNA, 120 bp, synthetic construct
  misc_feature 1..120: note = Artificially Synthesized Probe
  source 1..120: mol_type = other DNA
cagatgagtgttgaagtggaactgagcaggcagggaatggggttagcggggcctgtcttcgggactaggggagtcacggcagtcagattttaaaaaaggatttcgatgttgccaagctgg

SEQ ID NO: 8366 - DNA, 120 bp, synthetic construct
  misc_feature 1..120: note = Artificially Synthesized Probe
  source 1..120: mol_type = other DNA
tctttcacgccccacgtcccagtcccagtatacagcaggtgccacatatttgctgaattttctgaggggcagagcatgggtcctgggctgacgtgggtccagatttcggctctcaggcct

SEQ ID NO: 8367 - DNA, 120 bp, synthetic construct
  misc_feature 1..120: note = Artificially Synthesized Probe
  source 1..120: mol_type = other DNA
agagcaaaattaggtcaaaaataagtatagttcattcctactcccttcaccccagccgccgctgattctaaaggccacacaggtccacttgggaaagcctgagtcgtgcaaaggagggtg

SEQ ID NO: 8368 - DNA, 120 bp, synthetic construct
  misc_feature 1..120: note = Artificially Synthesized Probe
  source 1..120: mol_type = other DNA
caaaaaaataaaaaaaacctaaaaacccacatattcaagtcaccttcatcagccccccactcacttgggccgggccctgcctcaccccccaccccacggttcagcctcgcaccctgtgcg

SEQ ID NO: 8369 - DNA, 120 bp, synthetic construct
  misc_feature 1..120: note = Artificially Synthesized Probe
  source 1..120: mol_type = other DNA
gctttgggaacttcaggggaagaaccctgagctcggggcaggagaatgacatggtctgtctgggttcccatcccactgtttcacttatggctggaggagcctcagtttccgtgtcagagc

SEQ ID NO: 8370 - DNA, 120 bp, synthetic construct
  misc_feature 1..120: note = Artificially Synthesized Probe
  source 1..120: mol_type = other DNA
gaataaagggggagaatgtctgttaatcatcacctggaaaggaggccttcatgttatatggccgtttaaaaccaggtaccccttggcggtttctaggtcctcctggtggtttctaggtct

SEQ ID NO: 8371 - DNA, 120 bp, synthetic construct
  misc_feature 1..120: note = Artificially Synthesized Probe
  source 1..120: mol_type = other DNA
tgtctagactcagggaaaggaaggccttaaatttctagtccttttagtcatttgatttcacccttcaagcttgtgaggggacccctccccaccccgagatcaagtcagcctttttttttt

SEQ ID NO: 8372 - DNA, 120 bp, synthetic construct
  misc_feature 1..120: note = Artificially Synthesized Probe
  source 1..120: mol_type = other DNA
tgagtcgctgggtcccttccagcgtttggctcttgcagaccgagctgctgtgaacattttggtacaaatggctttttaatttttttctcttccttttggaccgtttcctcgggatcattt

SEQ ID NO: 8373 - DNA, 120 bp, synthetic construct
  misc_feature 1..120: note = Artificially Synthesized Probe
  source 1..120: mol_type = other DNA
ttaatggcaaaatcctatgaatctttgtgctggaaattcaagaccctcccttgtctgagtcaggcacacgcaggccatgtgggctcagaccccagtctggaacctccccttcagcaagag

SEQ ID NO: 8374 - DNA, 120 bp, synthetic construct
  misc_feature 1..120: note = Artificially Synthesized Probe
  source 1..120: mol_type = other DNA
tccgtctcggaaaaaaaaagaaatggcttctctcactgaacgtgacgtcctcaaggggcatctgcgccgtggcctgggtcagagcctcactccttttcgtggctgagtcgtgttccatgg

SEQ ID NO: 8375 - DNA, 120 bp, synthetic construct
  misc_feature 1..120: note = Artificially Synthesized Probe
  source 1..120: mol_type = other DNA
aattttatgtctttttaaggagccacccgtgtttgctccgagtcgttttgattttcattttctcgatagcgaaagggttgggcatctgtccagtagccatttgctgaccctctatgacct

SEQ ID NO: 8376 - DNA, 120 bp, synthetic construct
  misc_feature 1..120: note = Artificially Synthesized Probe
  source 1..120: mol_type = other DNA
tcctgtctatttttttaacgccaaccttgtgccaggcacattgtccctctctggtcatgtgaagcacttaatctattttgagccacctcttgggccttgtgaggtctcctgcatcttcaa

SEQ ID NO: 8377 - DNA, 120 bp, synthetic construct
  misc_feature 1..120: note = Artificially Synthesized Probe
  source 1..120: mol_type = other DNA
ccgagaagatcaagaagaagtatctgcgcacgtggttcgtggtggacttcgtgtcctccatccccgtggactacatcttccttatcgtggagaagggcattgactccgaggtctacaaga

SEQ ID NO: 8378 - DNA, 120 bp, synthetic construct
  misc_feature 1..120: note = Artificially Synthesized Probe
  source 1..120: mol_type = other DNA
atcttccacatgacctatgacctggccagcgcggtgatgaggatctgcaatctcatcagcatgatgctgctgctctgccactgggacggctgcctgcagttcctggtgcctatgctgcag

SEQ ID NO: 8379 - DNA, 120 bp, synthetic construct
  misc_feature 1..120: note = Artificially Synthesized Probe
  source 1..120: mol_type = other DNA
atccgtggagagaagctgagtgtggttatgatgagtcctgtcacccagacatctgcttagcgcgttttccaatggatttcccttttaattaacccacattaattattattattttattta

SEQ ID NO: 8380 - DNA, 120 bp, synthetic construct
  misc_feature 1..120: note = Artificially Synthesized Probe
  source 1..120: mol_type = other DNA
gaaactccgtcaaaaaagaaggaataataaatgaagttaggtcccagatactccttgcttcctagctgagatgtgctgactgttaagaagggttagttatgggagccctcggccgctaca

SEQ ID NO: 8381 - DNA, 120 bp, synthetic construct
  misc_feature 1..120: note = Artificially Synthesized Probe
  source 1..120: mol_type = other DNA
tagaatcagccctggccctcctgccaactcactgtgacaagtgtgcaaaccatgtcatctacctgggtctccatttctcttggttacctctgaacatggggagctcaccacctccagtgc

SEQ ID NO: 8382 - DNA, 120 bp, synthetic construct
  misc_feature 1..120: note = Artificially Synthesized Probe
  source 1..120: mol_type = other DNA
tcagggccaggcttcagggagagcaaggctgccccactgctcagatgcggcctctggcctgcagcgtccattgggttaatcctaggcttggcagtggaggggacacgggggagctgggag

SEQ ID NO: 8383 - DNA, 120 bp, synthetic construct
  misc_feature 1..120: note = Artificially Synthesized Probe
  source 1..120: mol_type = other DNA
gaaaaaaaaaatggaatttatcattgaaacgaattcaactttgatttaaatagaagcatgtttatttgctcttgttgaatctggccgcccctgtgtgtggcggaggcctgtctccccgct

SEQ ID NO: 8384 - DNA, 120 bp, synthetic construct
  misc_feature 1..120: note = Artificially Synthesized Probe
  source 1..120: mol_type = other DNA
ggctccaggcgcccttggcttgcagattgatctccctgatctctgcctccatctgctcacagccttctcccctgtgtgtctctgtctcttcttgtaaattcatccgtcgttggatcaggg

SEQ ID NO: 8385 - DNA, 120 bp, synthetic construct
  misc_feature 1..120: note = Artificially Synthesized Probe
  source 1..120: mol_type = other DNA
cacacactgcggttcgcttcgccaagaatgtttaattgcatttgatgactacggtttccattcattcatttgtagagatataacactcagaccacaaaatgcataaaatgcggtggcttt

SEQ ID NO: 8386 - DNA, 120 bp, synthetic construct
  misc_feature 1..120: note = Artificially Synthesized Probe
  source 1..120: mol_type = other DNA
tttccaccgctcttgtctacagccgcccctcctggtccgattgtattggcagatgtcgccaatacggtgtcaaacggcgaaggggcactgagcgttttttctttctcccgtccttggcgg

SEQ ID NO: 8387 - DNA, 120 bp, synthetic construct
  misc_feature 1..120: note = Artificially Synthesized Probe
  source 1..120: mol_type = other DNA
tgactacatcatccgcgaaggcaccatcgggaagaagatgtacttcatccagcacggcgtggtcagcgtgctcactaagggcaacaaggagatgaagctgtccgatggctcctacttcgg

SEQ ID NO: 8388 - DNA, 120 bp, synthetic construct
  misc_feature 1..120: note = Artificially Synthesized Probe
  source 1..120: mol_type = other DNA
gtacagtaggaagctctccacaacttgctctatacagtgagtatgcaacccgttcctgagtatcaggtgcttaggttataacttctgtatacagcaggtgctcagcacaggctgtgtaca

SEQ ID NO: 8389 - DNA, 120 bp, synthetic construct
  misc_feature 1..120: note = Artificially Synthesized Probe
  source 1..120: mol_type = other DNA
gtgctcagcctgtatatggcaggtactcaatatccatactataggccagagatgctacatatgtgcttattgtatacagtaggtggtaaatgcatgcttgctctacacggcaagcactgt

SEQ ID NO: 8390 - DNA, 120 bp, synthetic construct
  misc_feature 1..120: note = Artificially Synthesized Probe
  source 1..120: mol_type = other DNA
acggacgggcagggccggcggggcagccccctccgcgcccccggccgtcccccctcatcgccccgcgcccacccccatcgcccctgcccccggcggcggcctcgcgtgcgagggggctcc

SEQ ID NO: 8391 - DNA, 120 bp, synthetic construct
  misc_feature 1..120: note = Artificially Synthesized Probe
  source 1..120: mol_type = other DNA
ctggatttcctctttcaggaacccgggaccccatccggaccaaaggaactaccagagtttgggacccctgcctcctccagtcctgcttgctggagatctaggaaattatattctaagtat

SEQ ID NO: 8392 - DNA, 120 bp, synthetic construct
  misc_feature 1..120: note = Artificially Synthesized Probe
  source 1..120: mol_type = other DNA
gtgaatctggagcctcgaaatacagttgtagacccagacattatcttgaatccacatatatacacactccctctatgtctctcttcctcccattgttcctttcactcctgtctttgctgc

SEQ ID NO: 8393 - DNA, 120 bp, synthetic construct
  misc_feature 1..120: note = Artificially Synthesized Probe
  source 1..120: mol_type = other DNA
ttttcagaaatctggggataaagagtgagtgagtcataataccaactagtgcctgtaccacactgtcacatctattgtctccatgtaaatgttttcagcaatgctgtgagattagcacag

SEQ ID NO: 8394 - DNA, 120 bp, synthetic construct
  misc_feature 1..120: note = Artificially Synthesized Probe
  source 1..120: mol_type = other DNA
tttttttttttttttttttttttttttttttttgagacagagtttcactcttgttgcccaggctggagtgcaatggcgcaatctcggctcatggcaacctccacctcccaggttcaagcg

SEQ ID NO: 8395 - DNA, 120 bp, synthetic construct
  misc_feature 1..120: note = Artificially Synthesized Probe
  source 1..120: mol_type = other DNA
catccatagggctgaatgtagctgtagttgggtaatttcacagctgtatggtatgccagcccataaatagtgtatttatctacttatctgtctacatttttctacacaaggacatgtgtg

SEQ ID NO: 8396 - DNA, 120 bp, synthetic construct
  misc_feature 1..120: note = Artificially Synthesized Probe
  source 1..120: mol_type = other DNA
ttcttggccatgtcagcctatcttctgtcagtctagtggctggtgaaatatcctcatggtcttactcctcatctcactcccaccttaggttttactgggacctgatcatgctgctgctga

SEQ ID NO: 8397 - DNA, 120 bp, synthetic construct
  misc_feature 1..120: note = Artificially Synthesized Probe
  source 1..120: mol_type = other DNA
attctctgctgtgacacttactatgtggttctgggcacatgactgacctcagctttcctatctataagatgagagaaataagaaactgctttgcattagctatacatgtgtgccacaaaa

SEQ ID NO: 8398 - DNA, 120 bp, synthetic construct
  misc_feature 1..120: note = Artificially Synthesized Probe
  source 1..120: mol_type = other DNA
tgggtagcctgacttgaggcccattctgatgtgtgcccctgttgcgtctctgtttcctttcctgccctgtgtccatttgttccctgcccctgcatgtaccttttccttgtttgaacctat

SEQ ID NO: 8399 - DNA, 120 bp, synthetic construct
  misc_feature 1..120: note = Artificially Synthesized Probe
  source 1..120: mol_type = other DNA
ctttcaggggctagggtctttcttgaaggccctttgagggtgaaggatacatgaggagggactatagggatctctgtttttgggggatggtcctgcaagggctcatgggaaagatctgaa

SEQ ID NO: 8400 - DNA, 120 bp, synthetic construct
  misc_feature 1..120: note = Artificially Synthesized Probe
  source 1..120: mol_type = other DNA
ctgtagtttttaaagcttctcaggagattctaatgcacagccaggttgcaaactactgggccagagggccttttagaacccttagacagtgaaatccaaggatcctatgagatgagggaa

SEQ ID NO: 8401 - DNA, 120 bp, synthetic construct
  misc_feature 1..120: note = Artificially Synthesized Probe
  source 1..120: mol_type = other DNA
ctaccctcaaccccaccccatcctgatactctcatactctttgatatccaacatccatcttggattccttccctatccttaacttctccctcccggtacaacttctaggcaagaagaatt

SEQ ID NO: 8402 - DNA, 120 bp, synthetic construct
  misc_feature 1..120: note = Artificially Synthesized Probe
  source 1..120: mol_type = other DNA
gcatactgccatgaagacggtctctgtgtcctcagctcaagaatcctgtagcttgtcccatcataatccattcacccgttcatcatgtgtactgagcagctaccatgttcaaggtaatat

SEQ ID NO: 8403 - DNA, 120 bp, synthetic construct
  misc_feature 1..120: note = Artificially Synthesized Probe
  source 1..120: mol_type = other DNA
tgtatttattcatttactaactttatgtgttaccaattaattttgtttacccattcctttatccatccctcccctccttttcaggtaaggagacaggaggagtaggaggaggcagggcct

SEQ ID NO: 8404 - DNA, 120 bp, synthetic construct
  misc_feature 1..120: note = Artificially Synthesized Probe
  source 1..120: mol_type = other DNA
agctgcgcctggcgcttgtgcagctgctgggcctggccgtggacctgtgcggcgccgcgctcgcgccccacctggacgacgctctgcgcgcgctgcgctgctccctgctcgaccccttcg

SEQ ID NO: 8405 - DNA, 120 bp, synthetic construct
  misc_feature 1..120: note = Artificially Synthesized Probe
  source 1..120: mol_type = other DNA
acccgagttcaggttgttaaaagatcactgcagctgcgtggagaatagattccagaagtagaggaagagctggacttggggaaatgccgagatttccacgttggttaactttggatttca

SEQ ID NO: 8406 - DNA, 120 bp, synthetic construct
  misc_feature 1..120: note = Artificially Synthesized Probe
  source 1..120: mol_type = other DNA
gctcacccaaagtctcactggaatagccgtttcccagacgggccccaagtagtgcagagctgaggcaagaggcggcctggatgccagagaccctttggttctgacttttttttttttttt

SEQ ID NO: 8407 - DNA, 120 bp, synthetic construct
  misc_feature 1..120: note = Artificially Synthesized Probe
  source 1..120: mol_type = other DNA
actgttttaatgtttgatgttatgaattccaaggatgttagaaaggatgacttgtgtagttattgtctcttaggcacagtgtgcacttcagcagttgcagaaggttccttagtgctccca

SEQ ID NO: 8408 - DNA, 120 bp, synthetic construct
  misc_feature 1..120: note = Artificially Synthesized Probe
  source 1..120: mol_type = other DNA
aaaacagtgtgatgactctgtatggagagctctgtgtgaatactgaagctccatagctgatagctgtcggtgtaagcctactgtcactgtctaaaaataaccatcactgtctaaaaatac

SEQ ID NO: 8409 - DNA, 120 bp, synthetic construct
  misc_feature 1..120: note = Artificially Synthesized Probe
  source 1..120: mol_type = other DNA
acagaaggtcctgactgccttctgactcgtaggaaaccttccagcagcctgctagactcggcttaaatcactgaacttcactggaagggcctggaaataacttcatctcctccttacaag

SEQ ID NO: 8410 - DNA, 120 bp, synthetic construct
  misc_feature 1..120: note = Artificially Synthesized Probe
  source 1..120: mol_type = other DNA
ctctattctgttccattggtctgtgtgtctgtttttatgccagtgccaagctgttctggtcgctgtagctctgtagtataaattgaagtcaggtaatgtgatccctccagttttttgttt

SEQ ID NO: 8411 - DNA, 120 bp, synthetic construct
  misc_feature 1..120: note = Artificially Synthesized Probe
  source 1..120: mol_type = other DNA
gttctagctagagcttccagtactgtgttaactaacagtggtgaaagcgagcatccttgtcttgctccagatttagaagaaaggctttcaatttttccccattcagtgtggtactagctg

SEQ ID NO: 8412 - DNA, 120 bp, synthetic construct
  misc_feature 1..120: note = Artificially Synthesized Probe
  source 1..120: mol_type = other DNA
tagttgctcacagtatagttgctcacagtgtagctgctcacggtgttgctcacagtgtcgttgctcatattgtagttgctcatattgttgctcatagtgttgttcttcatggtatagctg

SEQ ID NO: 8413 - DNA, 120 bp, synthetic construct
  misc_feature 1..120: note = Artificially Synthesized Probe
  source 1..120: mol_type = other DNA
taaggcttgtttcgtggcctaacatatggtctgtccttgaaaatgatctgtgtgctgaggagaagaatgtgtattctgtagctgttggatgcaatgttctataaatacctatgaggtcca

SEQ ID NO: 8414 - DNA, 120 bp, synthetic construct
  misc_feature 1..120: note = Artificially Synthesized Probe
  source 1..120: mol_type = other DNA
tattgttttatttttgagatggagtctcactctgtcacccaggctggagtgcaatggcgccatctcagctcactgcaacctccgcctcccaggttcaagcgattctcctgcctcagcctc

SEQ ID NO: 8415 - DNA, 120 bp, synthetic construct
  misc_feature 1..120: note = Artificially Synthesized Probe
  source 1..120: mol_type = other DNA
attctttctattcttttttcttttgtcttctctgtgtattttcaaatagcccgtcttcaagctgctcactaattctttcttccacatagtcagttctgctgttgagaggctccaatgcat

SEQ ID NO: 8416 - DNA, 120 bp, synthetic construct
  misc_feature 1..120: note = Artificially Synthesized Probe
  source 1..120: mol_type = other DNA
gtttgttctgtggggactctctagccaggtggtggaatggccgtggagctgatttgggtttctcttagttgttatctgggcatttgtatttgtggttgctagtaaggccctgtgtcagtt

SEQ ID NO: 8417 - DNA, 120 bp, synthetic construct
  misc_feature 1..120: note = Artificially Synthesized Probe
  source 1..120: mol_type = other DNA
ttcccgcttcccttaaggagtgttggtgctggtccccgtctcaggcattgccctttgggagcttggctagagcacctggtgtgtgtgaagctggtttcttccgcctgcataggcaaggta

SEQ ID NO: 8418 - DNA, 120 bp, synthetic construct
  misc_feature 1..120: note = Artificially Synthesized Probe
  source 1..120: mol_type = other DNA
gttttgtaaatggcatttcccatctttttaacattggactgagtatatcgacagagatcagacggccccctttgtgtactgtcagtagagtgctcacaagatgaagtggaatttctggtc

SEQ ID NO: 8419 - DNA, 120 bp, synthetic construct
  misc_feature 1..120: note = Artificially Synthesized Probe
  source 1..120: mol_type = other DNA
tttcatcacttgagtctatctgcggggcatcttcttaaaagtaaataatagatacgcactgacgaggacaaaaagtaggtgaagcgcagcccacatcagatgcccagcccaaatcagatg

SEQ ID NO: 8420 - DNA, 120 bp, synthetic construct
  misc_feature 1..120: note = Artificially Synthesized Probe
  source 1..120: mol_type = other DNA
caaatcagatgcccagctcaaatcaatcatgtccagctcaaatcaatcattcccagctcaaatcagatgcacagcccaaatcagatgccctgagagatttgcagtctcaacttacttccc

SEQ ID NO: 8421 - DNA, 120 bp, synthetic construct
  misc_feature 1..120: note = Artificially Synthesized Probe
  source 1..120: mol_type = other DNA
taatgctatccctcccccctcacctcaccccacaacagttctcagagtgtgatgttccccttcctgtgtccatgtgttctcattgttcaattcccacctatgagtgagaatatgcggcgt

SEQ ID NO: 8422 - DNA, 120 bp, synthetic construct
  misc_feature 1..120: note = Artificially Synthesized Probe
  source 1..120: mol_type = other DNA
caatctgttttaaaatgtggaacttagacacgaggccacttacgaactcactgttgaactcacactcttgtctctgcatcagtgatgggagtggaatcccacgcgtgctgtggtgctctg

SEQ ID NO: 8423 - DNA, 120 bp, synthetic construct
  misc_feature 1..120: note = Artificially Synthesized Probe
  source 1..120: mol_type = other DNA
taaatacgatttctcagatttttttctacagtattttaaatgtcagatcagaagattttttgagtctcttcctcagaagtttgcactggccctgtattgccaagcacacaccctccctgc

SEQ ID NO: 8424 - DNA, 120 bp, synthetic construct
  misc_feature 1..120: note = Artificially Synthesized Probe
  source 1..120: mol_type = other DNA
tcacaggtaaagctgatgtaaacacttgcagactggtttttgtgagagtgttttattggataaacactcaggcgtggggttgctgggccataggtacagtccttactttgttagaaactc

SEQ ID NO: 8425 - DNA, 120 bp, synthetic construct
  misc_feature 1..120: note = Artificially Synthesized Probe
  source 1..120: mol_type = other DNA
gttttactttgcgattccctaatgagaggacattggggccttttcctgtgctgtggtgtgcttctgtgcacccgtacgtcgtctttggtggccattcagaactgccatccattaaatcga

SEQ ID NO: 8426 - DNA, 120 bp, synthetic construct
  misc_feature 1..120: note = Artificially Synthesized Probe
  source 1..120: mol_type = other DNA
taaggtacacaccatgtggaaatataattcgtaccatataatttgttgttagctttgcagacacagcgtaagtttccattaacagcactgaaacctccgccttaaaaaccaagcttcgtg

SEQ ID NO: 8427 - DNA, 120 bp, synthetic construct
  misc_feature 1..120: note = Artificially Synthesized Probe
  source 1..120: mol_type = other DNA
ctataatattaagtatagaaaaacaggcttcagaaccatgttcagaagcatgtgctgagtaacagcgtttgagtccataaggaccacgtggaggagggtggtcccctctgatagtaacat

SEQ ID NO: 8428 - DNA, 120 bp, synthetic construct
  misc_feature 1..120: note = Artificially Synthesized Probe
  source 1..120: mol_type = other DNA
actaattccataatacaggataaaaacagaaaaataaccagaaaaaggttaaaaatggggtgtcctggtacaagctgttcttattaaaacataccctttagcctggatgcagtggctcac

SEQ ID NO: 8429 - DNA, 120 bp, synthetic construct
  misc_feature 1..120: note = Artificially Synthesized Probe
  source 1..120: mol_type = other DNA
aatggcatcttttaataaggatactgtaaatgataggatcactcatacaccagaaagtgaacttggagtcaaaaaattaaccccagatgcgtcagggatctgaaggtaaagcccagaacc

SEQ ID NO: 8430 - DNA, 120 bp, synthetic construct
  misc_feature 1..120: note = Artificially Synthesized Probe
  source 1..120: mol_type = other DNA
gatttatctccagagtataggaagagctcttgaaactcagcaggaaaacaatccatttttttaaatgggcagaaaacaatttggaaagaccctttaccagggaagataggcggcaaacaa

SEQ ID NO: 8431 - DNA, 120 bp, synthetic construct
  misc_feature 1..120: note = Artificially Synthesized Probe
  source 1..120: mol_type = other DNA
tctctgatcatagggggacggcttcgcaggcgtgtctctctgatcatacacgtcagcacgtgtggcaagtgtgttgtttgcatctctgtgtggctctaaatgtttgttttttgagacagg

SEQ ID NO: 8432 - DNA, 120 bp, synthetic construct
  misc_feature 1..120: note = Artificially Synthesized Probe
  source 1..120: mol_type = other DNA
aactgatctcctttctgtgcccgtaggtaacagcgtgttgagggtgaacccttcatgctcattttcaagcacactcgggggtgcagtgccaggtgcatgttgtgtagacgtgttgtgtag

SEQ ID NO: 8433 - DNA, 120 bp, synthetic construct
  misc_feature 1..120: note = Artificially Synthesized Probe
  source 1..120: mol_type = other DNA
taaatgttccaggttccatgttatttacatgtcatgtttctgcttttcaaaaactaccgtgaatttaaaattgtctgtagttctctgtggaacctacaggagagcaagagacacgggggt

SEQ ID NO: 8434 - DNA, 120 bp, synthetic construct
  misc_feature 1..120: note = Artificially Synthesized Probe
  source 1..120: mol_type = other DNA
cctcgggtttggctctgagttttctcatgtttctttctcgcagtgtaccagatccgcagagctcgtcgggacgtttgtcagccctgaggtgtttctgaagctgatcttatcgacgctgaa

SEQ ID NO: 8435 - DNA, 120 bp, synthetic construct
  misc_feature 1..120: note = Artificially Synthesized Probe
  source 1..120: mol_type = other DNA
tgcctaaatccttatctcacaaactttatagcaaagaaagtgtagttttcacatctccatgttggttacaggaaaacggaattgtgtcatcccacagttgtgcatttggctccccatctt

SEQ ID NO: 8436 - DNA, 120 bp, synthetic construct
  misc_feature 1..120: note = Artificially Synthesized Probe
  source 1..120: mol_type = other DNA
tgagaacaggttgaaaatgtctttcaagaacaaaccgaaattgttttaaaagctcgtgtttaaacagagaagtccgtgtaaatgtattctaaactgagcctggcttcactccctgccctg

SEQ ID NO: 8437 - DNA, 120 bp, synthetic construct
  misc_feature 1..120: note = Artificially Synthesized Probe
  source 1..120: mol_type = other DNA
ctgaaatgtacatgacaggtcattctagaaactagccagatattgtcctcagaagtcagccagttagtacaggccttagagaaattgggctgtgggaaaaatcaggaatggaataaaaac

SEQ ID NO: 8438 - DNA, 120 bp, synthetic construct
  misc_feature 1..120: note = Artificially Synthesized Probe
  source 1..120: mol_type = other DNA
gtaggtgcagagctgagactccacctccccgtcaatcagtaaacatgttaagccatagaattttatttgtcttaaaacttggtgttatagaaaagctcaaaaatgcacagaagaggggca

SEQ ID NO: 8439 - DNA, 120 bp, synthetic construct
  misc_feature 1..120: note = Artificially Synthesized Probe
  source 1..120: mol_type = other DNA
tgtattctggcatcagggagtggagacagctgtttaatgttagggtcttcagcaaagaagcaaacaagaaataagacgtaacctttaaacctgcgcacttgagtagggtttaatagtgca

SEQ ID NO: 8440 - DNA, 120 bp, synthetic construct
  misc_feature 1..120: note = Artificially Synthesized Probe
  source 1..120: mol_type = other DNA
ttcctctgttcctaagcccccaaggagagcagccagctaaaagtaaaaggtggccaaggttatcatctctgtctgcccagttacttttacctggaggtctggtctgctgggcttaactct

SEQ ID NO: 8441 - DNA, 120 bp, synthetic construct
  misc_feature 1..120: note = Artificially Synthesized Probe
  source 1..120: mol_type = other DNA
gctttcatgtgaaaccttcaaagtgtgcttttccgtggcctgttttgtagcctggcttcttaaatacgtctggattttgttgcagaatctagatgtctagccgcatgggtgctgtgtgtg

SEQ ID NO: 8442 - DNA, 120 bp, synthetic construct
  misc_feature 1..120: note = Artificially Synthesized Probe
  source 1..120: mol_type = other DNA
ctctgtgcctggtagggactcaccttttttttcctgagacttggaaaaatacccaaaattgttctttgtcagttgcattcaaaactgtttccaaattagaaaagaaaatactggctgggc

SEQ ID NO: 8443 - DNA, 120 bp, synthetic construct
  misc_feature 1..120: note = Artificially Synthesized Probe
  source 1..120: mol_type = other DNA
attatgttctctgagccccatctgagcgcacacatgtgtggtgctcttgggagtcgggggcacagcctcaaatataatacaatatttccaacatcgtgtccttggaatacagatgatttt

SEQ ID NO: 8444 - DNA, 120 bp, synthetic construct
  misc_feature 1..120: note = Artificially Synthesized Probe
  source 1..120: mol_type = other DNA
ttttataaaaaagaattaatacaactaataagcaaatagagtgggaactatccagcccttctagtgatgaggaaatatgaattaaagactgtagggtcccgctgggcgtggtggctcacg

SEQ ID NO: 8445 - DNA, 120 bp, synthetic construct
  misc_feature 1..120: note = Artificially Synthesized Probe
  source 1..120: mol_type = other DNA
cgtgcttggaaggtagacacgtggcccgggcggaagtgtccttgcagcgagcaggagctggcgctgggagggcagacacgtggtccgggcggaagtgtccgtgcagcgagcgggagctcg

SEQ ID NO: 8446 - DNA, 120 bp, synthetic construct
  misc_feature 1..120: note = Artificially Synthesized Probe
  source 1..120: mol_type = other DNA
ttttcccatcccaggagttggacttgacctgtggacatttggctgttttctttttgtttttaagccagaaacactgtcttgtttccagtttaagatgtagagagggtgaaacagtcagaa

SEQ ID NO: 8447 - DNA, 120 bp, synthetic construct
  misc_feature 1..120: note = Artificially Synthesized Probe
  source 1..120: mol_type = other DNA
tgaccaaataggttttcatatggaaaaacgtgattttggggggttaaaattttctgctgcttttctgtgataatcaccttactgattgagaaagaggaagcggggaggtggtggccgata

SEQ ID NO: 8448 - DNA, 120 bp, synthetic construct
  misc_feature 1..120: note = Artificially Synthesized Probe
  source 1..120: mol_type = other DNA
cacaagctctcggcagggaatgcacagagaagcactaagtcaaagtcatctccgtgtggtcattaaaattccagtgaatgaaaaagttttagggaacattaactgttaatggcttatgta

SEQ ID NO: 8449 - DNA, 120 bp, synthetic construct
  misc_feature 1..120: note = Artificially Synthesized Probe
  source 1..120: mol_type = other DNA
ttcccaaagaaagtgcgcctaacaacgtcttgtggaaggcggttggcgtcaagagaagtaaagtgttcagatggcagtgattttaatgaacttactagctattttaataggaaagatttt

SEQ ID NO: 8450 - DNA, 120 bp, synthetic construct
  misc_feature 1..120: note = Artificially Synthesized Probe
  source 1..120: mol_type = other DNA
aaggaacgtgcctcattcagtggttcgatggtggttctgatcaatgcccagaagttctgatggagcttctgtcagacacaggctgagtatccttcaccccaaaattaaaaaaaaaaaaaa

SEQ ID NO: 8451 - DNA, 120 bp, synthetic construct
  misc_feature 1..120: note = Artificially Synthesized Probe
  source 1..120: mol_type = other DNA
aattcgcactgagaagcagctcctgagaggaggaggggcctcgtgttttggggtcgagttcgttttcctgtttggctcccccctcagccccattcatccctagtctgaaacgtttcttcc

SEQ ID NO: 8452 - DNA, 120 bp, synthetic construct
  misc_feature 1..120: note = Artificially Synthesized Probe
  source 1..120: mol_type = other DNA
aagtaagcaagttaaaaattgctcaaaatctaaattttacaatgaagattcaagcctactttttaggtaaagctttcaagccccctaagtccttccaggcaggagtgcacggatggtgag

SEQ ID NO: 8453 - DNA, 120 bp, synthetic construct
  misc_feature 1..120: note = Artificially Synthesized Probe
  source 1..120: mol_type = other DNA
aacccacgtgaaggaagcgtcgtgtggatgttacatttagcgttaaacgtaatctagagacagtttaaggtgtgccggaagatgtgtgtgggtcatgtgcaaatactatgccttttttta

SEQ ID NO: 8454 - DNA, 120 bp, synthetic construct
  misc_feature 1..120: note = Artificially Synthesized Probe
  source 1..120: mol_type = other DNA
aacggcattagattctcataggagcacaaatcctattgtgaactgtgcacgcgagggatccaagctgacgctccttatgaaactaatgcctgatgatccgtcactgtctcccatcgtccc

SEQ ID NO: 8455 - DNA, 120 bp, synthetic construct
  misc_feature 1..120: note = Artificially Synthesized Probe
  source 1..120: mol_type = other DNA
ctctcacctttgcttttctgtttttattctttagtaacaaacatcctgttcccactgactctggaacaagttcagtccatgcgattgttgggaattcactcactttttaaaacaggagct

SEQ ID NO: 8456 - DNA, 120 bp, synthetic construct
  misc_feature 1..120: note = Artificially Synthesized Probe
  source 1..120: mol_type = other DNA
gtctcaaagcctggcttggtaggatggcctgaactttggatgtttttcatgcctttcgttacataggatcctcttgctgagggtggatcatgccctccacattgcaaaagcatcagagac

SEQ ID NO: 8457 - DNA, 120 bp, synthetic construct
  misc_feature 1..120: note = Artificially Synthesized Probe
  source 1..120: mol_type = other DNA
ggagtatgaactaaatgcctttgtggacgtttagacgtgaaatgtctgctctagactcacacacctgtctcgctccctccttccagaactcttaaaacgcctagatgacgtgtccaacga

SEQ ID NO: 8458 - DNA, 120 bp, synthetic construct
  misc_feature 1..120: note = Artificially Synthesized Probe
  source 1..120: mol_type = other DNA
gtcactcacagcacagggcctgaggccacacaccacagagccttccacgctcagtgcattaaaatccgctggtccatctcacacttggaatgtaacgatttgcttttttttttctttttt

SEQ ID NO: 8459 - DNA, 120 bp, synthetic construct
  misc_feature 1..120: note = Artificially Synthesized Probe
  source 1..120: mol_type = other DNA
taattggattattagattgtctgctattgagcctgagctcctcatatattccagtgattaatccttgtcaggcggcggttctaagatacagtctcccatcccgtacccgcgggctgtccc

SEQ ID NO: 8460 - DNA, 120 bp, synthetic construct
  misc_feature 1..120: note = Artificially Synthesized Probe
  source 1..120: mol_type = other DNA
ttgtggtggcagggccaagctttggctcattgtgattttttgtgtgagagcttgacttgtatcctcggccacaaaccctgtcggttgttctgggagtgagggacttgggccgttcacttt

SEQ ID NO: 8461 - DNA, 120 bp, synthetic construct
  misc_feature 1..120: note = Artificially Synthesized Probe
  source 1..120: mol_type = other DNA
ggtctctccaggtcacggaaagaagctgcgaattggagaccaattggaaattgtttaaaaggaggacagcagctcacgtgcaggcctcgctgggacagcccatcctgccagatccacgca

SEQ ID NO: 8462 - DNA, 120 bp, synthetic construct
  misc_feature 1..120: note = Artificially Synthesized Probe
  source 1..120: mol_type = other DNA
aaattggataagaaagtcgcctgtttttctgagcctatttgctcctgtgaaacctgtttctaagcccaaaaatgccacctgaagactctgcaggacatcatttcatggtctgcccacaac

SEQ ID NO: 8463 - DNA, 120 bp, synthetic construct
  misc_feature 1..120: note = Artificially Synthesized Probe
  source 1..120: mol_type = other DNA
cagctggttcatgaactattggctgcatcctgcttaggtgcccaccaagaaggtttttacctacttaacaaaaaagaaagaagccaaagtgattagaaagaaatgaaatctctttttggg

SEQ ID NO: 8464 - DNA, 120 bp, synthetic construct
  misc_feature 1..120: note = Artificially Synthesized Probe
  source 1..120: mol_type = other DNA
tggacttctagtgacgaatagagcaattcaaaggttgtgggttcgaatcccaccagagtcgattttatttcaatttttcctttttatccgtttttttcttaaaggcccccatcccttctc

SEQ ID NO: 8465 - DNA, 120 bp, synthetic construct
  misc_feature 1..120: note = Artificially Synthesized Probe
  source 1..120: mol_type = other DNA
gagataccaaggccggacaggcgcacagagacaggaagccagatggacggaaagagggagaaaatgagggagacacagagacagacacgcgcgggtgttattaacctcgcctcggagcag

SEQ ID NO: 8466 - DNA, 120 bp, synthetic construct
  misc_feature 1..120: note = Artificially Synthesized Probe
  source 1..120: mol_type = other DNA
gacgaaactgtccaatcctaggggttggaaccaatgcccaacgcgtgaggaggagatttgaaaccgcaacccagggaatgaaattaaccacccgacataacagaggctggctcatcagag

SEQ ID NO: 8467 - DNA, 120 bp, synthetic construct
  misc_feature 1..120: note = Artificially Synthesized Probe
  source 1..120: mol_type = other DNA
attctcctctctcagtctcgtcctccctcctcccctctctgtgtctctcctcctcttttctctctacgtctccgtctggtgcagtttctctttgtctcagtggagaactttggggactct

SEQ ID NO: 8468 - DNA, 120 bp, synthetic construct
  misc_feature 1..120: note = Artificially Synthesized Probe
  source 1..120: mol_type = other DNA
aatttatattcagattcttattttcagtagggaagtaagaagttgcagctcagtgcacgtaaagttgagacagagatggagacatccagccccacctctctggaacaagaaagatgactg

SEQ ID NO: 8469 - DNA, 120 bp, synthetic construct
  misc_feature 1..120: note = Artificially Synthesized Probe
  source 1..120: mol_type = other DNA
tccatccttcattgtcacatgtgctgcacaaaagagtaagtgctggcacacagggtcccaggctgcgttagcccctgtgtgcatgctgcttcccagtaatgaggcagggaacacttctac

SEQ ID NO: 8470 - DNA, 120 bp, synthetic construct
  misc_feature 1..120: note = Artificially Synthesized Probe
  source 1..120: mol_type = other DNA
attctagggactgtcttcccctccatttcctcagagacgtcattccttaattgtctagagagaagagggggccctcagaggaaactcaggaaaactcatgccattctccattcaacggag

SEQ ID NO: 8471 - DNA, 120 bp, synthetic construct
  misc_feature 1..120: note = Artificially Synthesized Probe
  source 1..120: mol_type = other DNA
ctgattggcttctctagatatccaatacccaatgggagtgggaagtggggacgcgtcacgagtatcctggaagaaggacccgacacaagttgggagaagaagtgaaactcaggggagtgg

SEQ ID NO: 8472 - DNA, 120 bp, synthetic construct
  misc_feature 1..120: note = Artificially Synthesized Probe
  source 1..120: mol_type = other DNA
tctgtaactctgggttgttgcatttaaaattatcttcattccccaccctgagtttccctgtgtgagtccagaacatctcctgaatataaagaagcagggtttgttactgtctattgcaac

SEQ ID NO: 8473 - DNA, 120 bp, synthetic construct
  misc_feature 1..120: note = Artificially Synthesized Probe
  source 1..120: mol_type = other DNA
tccttcaccctgaagcacttcctttaaaattaaatgtagtacaggacccctaggaaattaattttatggctttgattatctaaaaatgtctttatttttgcctcccctcccccccccctt

SEQ ID NO: 8474 - DNA, 120 bp, synthetic construct
  misc_feature 1..120: note = Artificially Synthesized Probe
  source 1..120: mol_type = other DNA
attgctgggccatgtggtaatagatgggtaactgtataagaaactgccataccactttacaaattggctgccacattttttgcattcctaccagcaatatcagacattcctattttttcc

SEQ ID NO: 8475 - DNA, 120 bp, synthetic construct
  misc_feature 1..120: note = Artificially Synthesized Probe
  source 1..120: mol_type = other DNA
cagcactattttcaatagcaaagacatggaaccaacccacatgcccatcaatgatagtctgggtaaagaaaatgtggtagatatacaccatggaatactacacggccataaaaaggaatg

SEQ ID NO: 8476 - DNA, 120 bp, synthetic construct
  misc_feature 1..120: note = Artificially Synthesized Probe
  source 1..120: mol_type = other DNA
gaaagtgcatgtctggaaagagcgtatggttgggttccgtgtttttttaaaccaagtcacacaatctctgcccttcattggagtgttgattcatataggtttttgtcattattgatatga

SEQ ID NO: 8477 - DNA, 120 bp, synthetic construct
  misc_feature 1..120: note = Artificially Synthesized Probe
  source 1..120: mol_type = other DNA
aacaaatcctagccagtcttgagtatcatcatcctacgatttcagaactatcgtgaatataaaagtaatcaaagaacagtcctgcccagaaagaggagttatccctaaatatggtgtccc

SEQ ID NO: 8478 - DNA, 120 bp, synthetic construct
  misc_feature 1..120: note = Artificially Synthesized Probe
  source 1..120: mol_type = other DNA
gtaatttcttgatatgacagatgaggatttagctcttacaccatcactaccttcacttttccccccatattgtcccaaagtagttaccagatttaggggctaagtagtcaccacatcatt

SEQ ID NO: 8479 - DNA, 120 bp, synthetic construct
  misc_feature 1..120: note = Artificially Synthesized Probe
  source 1..120: mol_type = other DNA
tcatttctcaaaggcatctcaaactcagtgggcccaaacccagggcaaactccatcagaatatcctgctacttctgactttaaaatatatcttaaatcacagtttcttactacatgcaac

SEQ ID NO: 8480 - DNA, 120 bp, synthetic construct
  misc_feature 1..120: note = Artificially Synthesized Probe
  source 1..120: mol_type = other DNA
tgttaccagtgagaacctgctcactggctttaaactggttttcttaccttctcagttccatttctccgtacctcaattgatgatttctggtaagacctagaaaataaactgctttcactg

SEQ ID NO: 8481 - DNA, 120 bp, synthetic construct
  misc_feature 1..120: note = Artificially Synthesized Probe
  source 1..120: mol_type = other DNA
acagaactgccaccaactatccaaatcatgtctactctatttgctaattctggttgttaagtaagttttaagatctcaaccagacttctggcaagaaaatgagctcgttgtggaggttcc

SEQ ID NO: 8482 - DNA, 120 bp, synthetic construct
  misc_feature 1..120: note = Artificially Synthesized Probe
  source 1..120: mol_type = other DNA
catgtttaattatgtaaaaaagctctaaagtcaggtaatgtttttcatgtgcttctcttgagcagtctgaggaaagaatagaaacagaaaccccttgggacctgagtagacgcagctggc

SEQ ID NO: 8483 - DNA, 120 bp, synthetic construct
  misc_feature 1..120: note = Artificially Synthesized Probe
  source 1..120: mol_type = other DNA
gaaaatgacacacatgacttagagttacattctcttcccacccatgttcttccaggccttcagcaccctaatttaaaatcccctaaaacaaaggaaattgtcactagaaagaaaggaagc

SEQ ID NO: 8484 - DNA, 120 bp, synthetic construct
  misc_feature 1..120: note = Artificially Synthesized Probe
  source 1..120: mol_type = other DNA
tcaagaactcatccataaccttagaccctaagatcccagtcaccagccctaagaatcagtccctcagagctatcaggactgggattcagagcaacagtatgtagagtaatttccctagca

SEQ ID NO: 8485 - DNA, 120 bp, synthetic construct
  misc_feature 1..120: note = Artificially Synthesized Probe
  source 1..120: mol_type = other DNA
attactagctgtctaccctactccatttccttgctattgacaattactttcttgttctgaaatcagacattatcgtgtatgttctccacagaaaatattctgagatccgtgcagaggtcg

SEQ ID NO: 8486 - DNA, 120 bp, synthetic construct
  misc_feature 1..120: note = Artificially Synthesized Probe
  source 1..120: mol_type = other DNA
taagcctctgtttttttcttgaacctaactggattggcagctgagtacatttattcatgaatttaacagaagatcattgagctcacaccacataccagtcaatgtgtcaggtaccaggca

SEQ ID NO: 8487 - DNA, 120 bp, synthetic construct
  misc_feature 1..120: note = Artificially Synthesized Probe
  source 1..120: mol_type = other DNA
tgtcgaagcgcgcgtactcctctcggttatagatgtatctggtcacaagacgcacgcgctccgtcccgttggtgaagtagcacatgcccttaaactggaacacgaaatcctctgcgggga

SEQ ID NO: 8488 - DNA, 120 bp, synthetic construct
  misc_feature 1..120: note = Artificially Synthesized Probe
  source 1..120: mol_type = other DNA
gaagtgagtggtttcacaatatgtgttatttcccttctttacatcctccttcctactaaattcagtccaccattaactcgggtctctgaatcccactcaagtcaccatttgcccataaat

SEQ ID NO: 8489 - DNA, 120 bp, synthetic construct
  misc_feature 1..120: note = Artificially Synthesized Probe
  source 1..120: mol_type = other DNA
tgacgtcttcaaattgtactggatgaacatctgaggtgaaaatttcctctcgattatagaagagctgaagaacgaatgcctcggggattttgagaggcaaaagaaaaaaatgcgattcaa

SEQ ID NO: 8490 - DNA, 120 bp, synthetic construct
  misc_feature 1..120: note = Artificially Synthesized Probe
  source 1..120: mol_type = other DNA
tgacagtgactaggggcaatactaatggttataaagcaattagaacaacgcctggcaaacattacttctgacctcaaccaagacaataaatatctccacttctcttcttctctccctttc

SEQ ID NO: 8491 - DNA, 120 bp, synthetic construct
  misc_feature 1..120: note = Artificially Synthesized Probe
  source 1..120: mol_type = other DNA
aaatattgtagacgagatgaagaaagagttctgattgacttgctggctggtttctcatctcatgtttgcccagtttgtttcagttgttatagtctgttctcagtttttatgcattgcctt

SEQ ID NO: 8492 - DNA, 120 bp, synthetic construct
  misc_feature 1..120: note = Artificially Synthesized Probe
  source 1..120: mol_type = other DNA
agaggaggaattttggtgtaaattgcctgatcagaaatttggatccaaagtctttcctattatttctgtctcatgccttatcacctctaccatcattctggtgtgtcctgagtttgttcc

SEQ ID NO: 8493 - DNA, 120 bp, synthetic construct
  misc_feature 1..120: note = Artificially Synthesized Probe
  source 1..120: mol_type = other DNA
gctattatgctttcacatagtaaccatgcactgatgatttctggattagcaggacattagagccgtttggggaaagaaaggctttattcagggccactcatatactgagaactaacctca

SEQ ID NO: 8494 - DNA, 120 bp, synthetic construct
  misc_feature 1..120: note = Artificially Synthesized Probe
  source 1..120: mol_type = other DNA
tcaaatattacagccttgatgtaaggcacaagttcaacatctgatccacagaaagcctgagactcaatgaggataagtagtttgtctagagtgacaaagctaataaaaagcagggctgag

SEQ ID NO: 8495 - DNA, 120 bp, synthetic construct
  misc_feature 1..120: note = Artificially Synthesized Probe
  source 1..120: mol_type = other DNA
taaaatatataaaacaatgactgaagatagccttcagtttatgaggtcagaaagcttctcactccattccactgtgagggcactcatcacacttgagtgctccacttggcacctatttat

SEQ ID NO: 8496 - DNA, 120 bp, synthetic construct
  misc_feature 1..120: note = Artificially Synthesized Probe
  source 1..120: mol_type = other DNA
aaagaagcttcagaggtgcctcagaggtctactcagttcctctagaaattaatctattgcttttacaaacaaacagcacacacttttaattcagagattacacgaagggtgtatgccagg

SEQ ID NO: 8497 - DNA, 120 bp, synthetic construct
  misc_feature 1..120: note = Artificially Synthesized Probe
  source 1..120: mol_type = other DNA
gactcctcctggttatagaagtatctgtccaggaaccgcacccgctccgtcccattgaagaaatgacactccctcttaggctgccacaggaaacgtgctgtggggacacgaaccatccgg

SEQ ID NO: 8498 - DNA, 120 bp, synthetic construct
  misc_feature 1..120: note = Artificially Synthesized Probe
  source 1..120: mol_type = other DNA
gaactagcagcccttgcatttctgtccccactctaagaaacagcctggtacatatgaatatcagaaattgtgtcaataattcagacacaatatagtcactactcactaatgatggtcaaa

SEQ ID NO: 8499 - DNA, 120 bp, synthetic construct
  misc_feature 1..120: note = Artificially Synthesized Probe
  source 1..120: mol_type = other DNA
tctctatcatattctcacttgcccctcctcttagtggtactcaccacaattggcctctcccttctccttgaaaataatctattttcctggacttacacacatgatgttctcttggttttt

SEQ ID NO: 8500 - DNA, 120 bp, synthetic construct
  misc_feature 1..120: note = Artificially Synthesized Probe
  source 1..120: mol_type = other DNA
catcccttagatcttcacgactgtctacttattttgttgtctcagctgaatgtcactttctcaggtggagctccctaacatatgaactaaagtaggtgaatccatgtctctctttttcac

SEQ ID NO: 8501 - DNA, 120 bp, synthetic construct
  misc_feature 1..120: note = Artificially Synthesized Probe
  source 1..120: mol_type = other DNA
tctttcaatgaatctcatagtgctaaggttctgtgcaagctttagagatttctggaaatgatgacaacatagctggggaaaaatagaaactggaggaagaggtaagcagacatggctagt

SEQ ID NO: 8502 - DNA, 120 bp, synthetic construct
  misc_feature 1..120: note = Artificially Synthesized Probe
  source 1..120: mol_type = other DNA
atttctaaatcctctaaagaccctgaggacatgtgatgcaaaggttttattggtggagatttgaaaagaaatgatttgtgcaaaggccccttacacaagtctcatgaagagggcaagtac

SEQ ID NO: 8503 - DNA, 120 bp, synthetic construct
  misc_feature 1..120: note = Artificially Synthesized Probe
  source 1..120: mol_type = other DNA
ctttgagaaacaagttagaggatgcggtaagtcatggtatgccctcaacaccagggaaaacatcagcatggacagacaactgtgatactgaaaagtaaaggtgaagataaacaggctttt

SEQ ID NO: 8504 - DNA, 120 bp, synthetic construct
  misc_feature 1..120: note = Artificially Synthesized Probe
  source 1..120: mol_type = other DNA
cctctacgtacgttttcttacttaatcctcacaatggctccatgagatggatggcattattattcccatttcttaggttcagagagatgaaataatttgtctgaggtctcatagcctggg

SEQ ID NO: 8505 - DNA, 120 bp, synthetic construct
  misc_feature 1..120: note = Artificially Synthesized Probe
  source 1..120: mol_type = other DNA
tgttgcctgaaattctagagtcattctttgctttggcttatgattctgttgacatgacaatcccacagaaagagacagtgcttctccttttagtttctgttaaactgtttcctctgccag

SEQ ID NO: 8506 - DNA, 120 bp, synthetic construct
  misc_feature 1..120: note = Artificially Synthesized Probe
  source 1..120: mol_type = other DNA
tctctcccatcttttacaaacctttttggaaccctctaacctccaatttctttccccccattcaaagcaaagtccctcaaaagagctgttcccatttaacatctaccattctcatttgaa

SEQ ID NO: 8507 - DNA, 120 bp, synthetic construct
  misc_feature 1..120: note = Artificially Synthesized Probe
  source 1..120: mol_type = other DNA
aggccactctacagaaaggcctggcactgccttaacctgcttcattttttctccacagtgtttatgaacacctggcctgctgtatgtttgtttatttattatctgtctcatagtactaga

SEQ ID NO: 8508 - DNA, 120 bp, synthetic construct
  misc_feature 1..120: note = Artificially Synthesized Probe
  source 1..120: mol_type = other DNA
acatcgatccatatttccgaagtaactgatggaagagggaggtcagaggaagctactgccagacgtcacacagctcaacctgttccctgataaattttcaaaaaggggattctgagatat

SEQ ID NO: 8509 - DNA, 120 bp, synthetic construct
  misc_feature 1..120: note = Artificially Synthesized Probe
  source 1..120: mol_type = other DNA
agacttcagtctcacttacggctgtcacatcatactgtcagacccaggtgctggaatcagtgaagttgattccttccatgtcgttttatcctcagcaataaaatccatgaaatcatgggt

SEQ ID NO: 8510 - DNA, 120 bp, synthetic construct
  misc_feature 1..120: note = Artificially Synthesized Probe
  source 1..120: mol_type = other DNA
ctatttaaatttttggaagcccatttgcacatctctaaaaccactgcaaaatgggtccatattggaataggtccaatatgggtccaattggaataagccatactggaatagggtgggccc

SEQ ID NO: 8511 - DNA, 120 bp, synthetic construct
  misc_feature 1..120: note = Artificially Synthesized Probe
  source 1..120: mol_type = other DNA
actgtaaaagggaataataataccaaatttgcacagtggttttgaggactaaatgacataagttcttgggctggtcaaactcaattcccatgccatgttcttctcagtgttgacctggtg

SEQ ID NO: 8512 - DNA, 120 bp, synthetic construct
  misc_feature 1..120: note = Artificially Synthesized Probe
  source 1..120: mol_type = other DNA
cctctcagagcttatctcaagttagggagatggccaataaaaaagcaaccaagtaagtaatggagaaaatctcagaagtgatgtgccacagaggaaagatgggaaatgataggaacaagt

SEQ ID NO: 8513 - DNA, 120 bp, synthetic construct
  misc_feature 1..120: note = Artificially Synthesized Probe
  source 1..120: mol_type = other DNA
aagatctcagtgtacttttccattttgatgctcccacttattctccaaccactgctgagcaagaaaaaggtaagagagatgcttagaaagacacagatctgggagttgggccaatgttac

SEQ ID NO: 8514 - DNA, 120 bp, synthetic construct
  misc_feature 1..120: note = Artificially Synthesized Probe
  source 1..120: mol_type = other DNA
catgcccggcctctggctgcaatttgcacagcagtgtgaccttacagtagagtattcgcccttcctgggcctcggttttgtaatttataaagtgaggataacctactccctgctgggcta

SEQ ID NO: 8515 - DNA, 120 bp, synthetic construct
  misc_feature 1..120: note = Artificially Synthesized Probe
  source 1..120: mol_type = other DNA
taggactacaggcgcatgctatcatggctagctggtaaactgacccaaaattcaggtttgagagaaagtacttcctaggatttcttctgaccacacttatttgggaaaagatgtctaggt

SEQ ID NO: 8516 - DNA, 120 bp, synthetic construct
  misc_feature 1..120: note = Artificially Synthesized Probe
  source 1..120: mol_type = other DNA
aaaagatggccaagtgaagacacagagacacagaaaaggtggccctgggaaaacggaggcaaagactggagagatgcatctacaagccaggcaatgccaaggactgctggccaccaccag

SEQ ID NO: 8517 - DNA, 120 bp, synthetic construct
  misc_feature 1..120: note = Artificially Synthesized Probe
  source 1..120: mol_type = other DNA
ccaaaaaaaggtttttgcctaaatacagaaccaacgcctccaaagatgttcttgtctaaaattgtaagaaagttggcagatgccagcaactactgttgaaactcttgtggagagtttggt

SEQ ID NO: 8518 - DNA, 120 bp, synthetic construct
  misc_feature 1..120: note = Artificially Synthesized Probe
  source 1..120: mol_type = other DNA
tcttcttcacttaactatctttgtgaagcaggagttgtcagtcttcctcttttacaaacaaagaaaccacagacaggcatagagggttttagactttagggctagaagaggtcatctcta

SEQ ID NO: 8519 - DNA, 120 bp, synthetic construct
  misc_feature 1..120: note = Artificially Synthesized Probe
  source 1..120: mol_type = other DNA
tcttacacaggaatcctcctaaaatgcagcttccaaccttccattctcttgcatcaaaagctttctatggctccctaatatttacaggattacgcaaaaaattctaagaactccaggtcc

SEQ ID NO: 8520 - DNA, 120 bp, synthetic construct
  misc_feature 1..120: note = Artificially Synthesized Probe
  source 1..120: mol_type = other DNA
aattgtataaaaataaaaatacaattccttggccacactagtcacatctcaagttctcaagggccacatgggtatagtggccaccacatggaaaagctcaggtccagaatatttccatct

SEQ ID NO: 8521 - DNA, 120 bp, synthetic construct
  misc_feature 1..120: note = Artificially Synthesized Probe
  source 1..120: mol_type = other DNA
aacttgtgcagaggaatcacatcttgcatagctctgtcaactgccattgcacctatcacacgtaatactcaaagcagatgcttgaaaaaactgtttttttggctcatttccaactttacc

SEQ ID NO: 8522 - DNA, 120 bp, synthetic construct
  misc_feature 1..120: note = Artificially Synthesized Probe
  source 1..120: mol_type = other DNA
gtcaaaggcatcgcatgtaccctactgcataagccagaacttcattgagccatttcacctattcaccatggcctataggactctgtatgctgctgtatgtatgttagaagtagtttaaaa

SEQ ID NO: 8523 - DNA, 120 bp, synthetic construct
  misc_feature 1..120: note = Artificially Synthesized Probe
  source 1..120: mol_type = other DNA
tcaactccacttcatccctagtgtttggcaccgtgtttggtacaaagtagccactctttaaagttattaaaataacacataaaccatgaaggacacagctgtcccagaagagagcaatta

SEQ ID NO: 8524 - DNA, 120 bp, synthetic construct
  misc_feature 1..120: note = Artificially Synthesized Probe
  source 1..120: mol_type = other DNA
taaaacctgcttccaagctgcttttattagaacattataaactcaattccacttccttccttccccgtaacagctcttcacataataattcagtttttaaacacttaatatttgccaggc

SEQ ID NO: 8525 - DNA, 120 bp, synthetic construct
  misc_feature 1..120: note = Artificially Synthesized Probe
  source 1..120: mol_type = other DNA
tgacagagcttggacttgaacccatatctaggcctaatactaatactggttcctatgcttggaaccccatggagggccatctcattacaccaaatatttcttaaaagcttattaatatct

SEQ ID NO: 8526 - DNA, 120 bp, synthetic construct
  misc_feature 1..120: note = Artificially Synthesized Probe
  source 1..120: mol_type = other DNA
tagttccccaagcatctctaaaagcaacaacagttggaaatggagacgaaggaaatggaagcgtgttcttgattttcactaatgaagagttggagaggtctgaagttcaattagagggag

SEQ ID NO: 8527 - DNA, 120 bp, synthetic construct
  misc_feature 1..120: note = Artificially Synthesized Probe
  source 1..120: mol_type = other DNA
ggcaggcagctccagagagggggcatccttagatttcataccttaaaaaaatgattaagatttatctaggtgtactttctgaagggctgaaaaaaaaaaaaatctatccaggtgaagagg

SEQ ID NO: 8528 - DNA, 120 bp, synthetic construct
  misc_feature 1..120: note = Artificially Synthesized Probe
  source 1..120: mol_type = other DNA
agtgatctaaaaaaataaaaataataataaaagagaaaaggctgggtgcagtggcttacaccagtaattccagcactttgggaggtcgaggtgggaggatcacttgaggtcagaacttga

SEQ ID NO: 8529 - DNA, 120 bp, synthetic construct
  misc_feature 1..120: note = Artificially Synthesized Probe
  source 1..120: mol_type = other DNA
ttttctctatcatgacactgggagcattactcacagaattctcaaacctgtgttagagggctgcactcggcccaaacatactggcatggtattatttaaaatatgtctttcaagacttgt

SEQ ID NO: 8530 - DNA, 120 bp, synthetic construct
  misc_feature 1..120: note = Artificially Synthesized Probe
  source 1..120: mol_type = other DNA
tattctgtatatacaagaatatatatttatgagcaacatagcaacattattggtatgtgaatatctgtttaattccttgtttgcaattattttcagtatatttctagaagtgaaattcct

SEQ ID NO: 8531 - DNA, 120 bp, synthetic construct
  misc_feature 1..120: note = Artificially Synthesized Probe
  source 1..120: mol_type = other DNA
gtgtgtgtgtgtgtatatatatatatatatatatatatatatatatatatatataaaaactctcctattggttctgtttctctggagaaccctgtctaacacaatgagcaataatgttgc

SEQ ID NO: 8532 - DNA, 120 bp, synthetic construct
  misc_feature 1..120: note = Artificially Synthesized Probe
  source 1..120: mol_type = other DNA
atattttaaacaataaaaaaaaataagtaactgcacaagaaaaaaagacttaggcaaggcatacccttgccagctccccagtccctactactcctaattgtcacagacacgaggcttctc

SEQ ID NO: 8533 - DNA, 120 bp, synthetic construct
  misc_feature 1..120: note = Artificially Synthesized Probe
  source 1..120: mol_type = other DNA
tgtgattaaggcacaagttggtgctaggtgctaagaccgcagtagtaaataagattcaccacaattctgtgcacctttctcagaccttcagattttatggtaatagttttttttcccagg

SEQ ID NO: 8534 - DNA, 120 bp, synthetic construct
  misc_feature 1..120: note = Artificially Synthesized Probe
  source 1..120: mol_type = other DNA
gggattgcaggcatgagccaccatacccaactggataactcattttaagaagagatgagattatgttgaaaatgaagcccacagcagcaggtcatacacatcaatttttggggaataaac

SEQ ID NO: 8535 - DNA, 120 bp, synthetic construct
  misc_feature 1..120: note = Artificially Synthesized Probe
  source 1..120: mol_type = other DNA
tacaatatacttagaattaaatgataatggaaatatattaaaagacaaatgcttgtattggaaaaggtagttgaagagtagtgaatgaagtttctaactcaagatgtgaggccagatgca

SEQ ID NO: 8536 - DNA, 120 bp, synthetic construct
  misc_feature 1..120: note = Artificially Synthesized Probe
  source 1..120: mol_type = other DNA
tcaaatgattctcctgcctcagcctcctgagtagctgggatcacaggcacgtgccaccgtaccaagctaatttttgtatttttaatggagatgaggtttcaccatgttggccaggctggt

SEQ ID NO: 8537 - DNA, 120 bp, synthetic construct
  misc_feature 1..120: note = Artificially Synthesized Probe
  source 1..120: mol_type = other DNA
gtgtacaaatttatggacaataaatctgaaaactgtgttgaaatggatatttcccagaaaatcataactgaaaagaagtggcctaaaaataaaagaatctttgcatacactaggatggct

SEQ ID NO: 8538 - DNA, 120 bp, synthetic construct
  misc_feature 1..120: note = Artificially Synthesized Probe
  source 1..120: mol_type = other DNA
ggagggaaggaagtgctgggaagggaagagcgtcgtccctataaatgatatggaaaggagggaaggaagtgctgggaagggaagagcatggtccctataaatgataaggaaaggagggaa

SEQ ID NO: 8539 - DNA, 120 bp, synthetic construct
  misc_feature 1..120: note = Artificially Synthesized Probe
  source 1..120: mol_type = other DNA
ataaaaacccccaagaccttagcaggcagacacacaggtagccggacatggagaggagcacatcagtggaggaacacacaggcggctggacgtccagaggagcacatcagcaggcactgg

SEQ ID NO: 8540 - DNA, 120 bp, synthetic construct
  misc_feature 1..120: note = Artificially Synthesized Probe
  source 1..120: mol_type = other DNA
ctcagttccaatgtctcctcctacaggcagtcttcctggatcctctgaaaataattggcccttcccctgatctccagcatgttgttgttttagtgcttctttttagcccacattttaatc

SEQ ID NO: 8541 - DNA, 120 bp, synthetic construct
  misc_feature 1..120: note = Artificially Synthesized Probe
  source 1..120: mol_type = other DNA
gtggtctttccagtatatgaggcctgccttgactatactgcctccttcattatatcctgcatacagttggtactctgtaattgctttctggacacaagaataaagaaacaggattcagaa

SEQ ID NO: 8542 - DNA, 120 bp, synthetic construct
  misc_feature 1..120: note = Artificially Synthesized Probe
  source 1..120: mol_type = other DNA
ttgcggaaattttatgattgttttttactcatctaggcagagtacttggaatgccctagttcaatccccttgttttacaaataggaaacctgaggccagagaaggcaagtaagttgcctg

SEQ ID NO: 8543 - DNA, 120 bp, synthetic construct
  misc_feature 1..120: note = Artificially Synthesized Probe
  source 1..120: mol_type = other DNA
tttatttggaaatagggtcttcctgaggtaagcaagctgaaatgcaggcagggccctaccccaagctgagtggtgtgtgaggacaaagagaactttggacacagactcactagaggcagg

SEQ ID NO: 8544 - DNA, 120 bp, synthetic construct
  misc_feature 1..120: note = Artificially Synthesized Probe
  source 1..120: mol_type = other DNA
cccacagcatccgcacctcaccccacaacacatgacttgcccacaatcgcctccaccacaccccatcccacctcctacctgtgttcacaccatcccttcagttcagaatattcttctggc

SEQ ID NO: 8545 - DNA, 120 bp, synthetic construct
  misc_feature 1..120: note = Artificially Synthesized Probe
  source 1..120: mol_type = other DNA
cacattactcctaggaggtctcatggttcatcaccggtcggggcaccttgtaagctctgatgccatccaagggccctctgtagaacaagcacagacacatcagttggatacaagaccccc

SEQ ID NO: 8546 - DNA, 120 bp, synthetic construct
  misc_feature 1..120: note = Artificially Synthesized Probe
  source 1..120: mol_type = other DNA
gatgagtattgaccctgcattcaatgggcaatcactcatgttattttgggtaacagaccttgggtgaagccaatttagtggcaatttgtaataaaaataacagatgggctcagccagcaa

SEQ ID NO: 8547 - DNA, 120 bp, synthetic construct
  misc_feature 1..120: note = Artificially Synthesized Probe
  source 1..120: mol_type = other DNA
tttcttaaatggaagccaagtcatggtagcttacacaagacagaaagttttgtttgtttctcacaaacaaataaatgagtgaagctggtaaaccatccaggaggtaggacagctctgccc

SEQ ID NO: 8548 - DNA, 120 bp, synthetic construct
  misc_feature 1..120: note = Artificially Synthesized Probe
  source 1..120: mol_type = other DNA
acctgcactacaaactttgggcttgccagaccacacgctcatgccagagaatttcttaaaattgcatatgtgctccctgtctctctgtctatctaactattctattgattctctttcttt

SEQ ID NO: 8549 - DNA, 120 bp, synthetic construct
  misc_feature 1..120: note = Artificially Synthesized Probe
  source 1..120: mol_type = other DNA
ctgttagattcattttacagacctggattcaagctgcagctaattggctgtgcaaggctgacctccactgtgtggctgcggtgaggatgaagctgctgtctcattcacccgtttatcagt

SEQ ID NO: 8550 - DNA, 120 bp, synthetic construct
  misc_feature 1..120: note = Artificially Synthesized Probe
  source 1..120: mol_type = other DNA
tttttctttcttaaaaaaatggggatgcgggtggtggctacacgggtgtgcacatttatcaaaattcctctgattgcactcttaaatttgtgcttttctccctaagtacattcacttccc

SEQ ID NO: 8551 - DNA, 120 bp, synthetic construct
  misc_feature 1..120: note = Artificially Synthesized Probe
  source 1..120: mol_type = other DNA
acagcggaccatctcaataacaaaccgaaactctggctatctccaggtagtcgaacttgggatgccttttgttttcagtgcttgtaattttctgaatttttaaaataacgaacagagtct

SEQ ID NO: 8552 - DNA, 120 bp, synthetic construct
  misc_feature 1..120: note = Artificially Synthesized Probe
  source 1..120: mol_type = other DNA
cgaggcagagaggtccggagaagcagaaagagatgccgaccggcagagaaagagcgagacagacacaccgaggggtgagggggcaaaagggagcagcctcgcaattttcgcagaagaaaa

SEQ ID NO: 8553 - DNA, 120 bp, synthetic construct
  misc_feature 1..120: note = Artificially Synthesized Probe
  source 1..120: mol_type = other DNA
atatgaggaacctcaggcaaatatgggggattcttgtctatataaacagttttagtcatcgcaaactcataatgtcagcaccatcccgttagcacgatttctctagtcccgattgacagc

SEQ ID NO: 8554 - DNA, 120 bp, synthetic construct
  misc_feature 1..120: note = Artificially Synthesized Probe
  source 1..120: mol_type = other DNA
gtacacagcagcaagcaatgcacccgcgctcccgtcattacatcgcgccgccttcacccccgctacgatgaccactccgcagatgggcaagacgggctcagagagatgaagtgactttcc

SEQ ID NO: 8555 - DNA, 120 bp, synthetic construct
  misc_feature 1..120: note = Artificially Synthesized Probe
  source 1..120: mol_type = other DNA
ggcctgtgccgaggagcctctccgcaaagaaataaacacgccctgtctccccgaccccgactcgggccggtcagaagtagggagaatcacgctcgggaaaggggggtagggaacgacggg

SEQ ID NO: 8556 - DNA, 120 bp, synthetic construct
  misc_feature 1..120: note = Artificially Synthesized Probe
  source 1..120: mol_type = other DNA
attcccgtgtacccacccctatcccacagttcttaaaccgtgaccaatctagttccctctattggcctccttttatttgtactaacttatttttgttgccttattataaagcaaacacag

SEQ ID NO: 8557 - DNA, 120 bp, synthetic construct
  misc_feature 1..120: note = Artificially Synthesized Probe
  source 1..120: mol_type = other DNA
ctccagaattcctgcccctctcagaaccccggtttccctttccaacaagttgcaaggtggggcggaaggccacgaaagactcttgggggagaggcactgacagaaagggaaagagaagcc

SEQ ID NO: 8558 - DNA, 120 bp, synthetic construct
  misc_feature 1..120: note = Artificially Synthesized Probe
  source 1..120: mol_type = other DNA
atgtcctgttggcctcactcaaatcacaggaggcccagcatttacaaattacagaccctagttctcaccataggtgtgcggtggggaaacggaggcctggaggagagaaggggtgtgatt

SEQ ID NO: 8559 - DNA, 120 bp, synthetic construct
  misc_feature 1..120: note = Artificially Synthesized Probe
  source 1..120: mol_type = other DNA
ccctgcagtcaccacacaaccttgggactgcacccacatcggccagaagcagtcgaataaaacagttgcatcacagcgataacccctttggcctgagcttcaatgacccccttctaatag

SEQ ID NO: 8560 - DNA, 120 bp, synthetic construct
  misc_feature 1..120: note = Artificially Synthesized Probe
  source 1..120: mol_type = other DNA
cacccaagtgaagcaggacagggagatgggttttcttaggggctcaattctgccatggaagtgaacttttcaaacccgaacaacatatttctcctaggctgaaacacacaccaaatactg

SEQ ID NO: 8561 - DNA, 120 bp, synthetic construct
  misc_feature 1..120: note = Artificially Synthesized Probe
  source 1..120: mol_type = other DNA
tctgccctcgtgatcacaaagcagtgaaactgtccagaaaatgtccctttttattccatacgcaaataagtagattcatttaaaaaaacaacaacccggaggctgcgacgtctgcagaga

SEQ ID NO: 8562 - DNA, 120 bp, synthetic construct
  misc_feature 1..120: note = Artificially Synthesized Probe
  source 1..120: mol_type = other DNA
tccaaaccaacaccccgcaacacaccaacaccccgcaacacacaaacacaaacgcacacccatgccagaggacaacaaagggatgcagagcaaagaaaagaaacaaaaatactacacaag

SEQ ID NO: 8563 - DNA, 120 bp, synthetic construct
  misc_feature 1..120: note = Artificially Synthesized Probe
  source 1..120: mol_type = other DNA
ccaaacactttcaagactggaggttcagcctcatgggtttgggctgaaaccagaagctcacaggcggtgtctgagttcatgttccaagtaccaagctcccctactcatctcctaggaaca

SEQ ID NO: 8564 - DNA, 120 bp, synthetic construct
  misc_feature 1..120: note = Artificially Synthesized Probe
  source 1..120: mol_type = other DNA
tttgcaaaggatcactccacgacatggaaagggttatctaacaagtgagtgagggtcgtaggccacttactccccagcacacactaatattcatacagaggacagcatggatcccagagc

SEQ ID NO: 8565 - DNA, 120 bp, synthetic construct
  misc_feature 1..120: note = Artificially Synthesized Probe
  source 1..120: mol_type = other DNA
tgcgcctccgcagcccagagcgaagggcggcccgggaccggggggcggccgaggaccgaggcccagcgcgcccggcccgagcagcgcacgggcccgcgcctccccgccgggcccggtgcc

SEQ ID NO: 8566 - DNA, 120 bp, synthetic construct
  misc_feature 1..120: note = Artificially Synthesized Probe
  source 1..120: mol_type = other DNA
tgctcctctgcagagtcccaaatcccatgagcccaggcctttagcccagtccttgggcaagggggacatttcccaggggggtccaagatgggagaaaaagcaggtgagttcacaactcaa

SEQ ID NO: 8567 - DNA, 120 bp, synthetic construct
  misc_feature 1..120: note = Artificially Synthesized Probe
  source 1..120: mol_type = other DNA
tatttctcttttgttttataaatttataaatggcaaaaggctctgataaggtctgtgatcattaacttgtaggaatggtggcctggaaagatctgggccaacccacctcccacctagtgg

SEQ ID NO: 8568 - DNA, 120 bp, synthetic construct
  misc_feature 1..120: note = Artificially Synthesized Probe
  source 1..120: mol_type = other DNA
agtgcttcccgcctgccccgattgggttttctttaatgctaacagcatgctatttactttccatttaaatttgagatgttgctataaattatcaaccagctccttgttcctgcagagttt

SEQ ID NO: 8569 - DNA, 120 bp, synthetic construct
  misc_feature 1..120: note = Artificially Synthesized Probe
  source 1..120: mol_type = other DNA
tactgttgttcactttctctggttccctgtcaagacttgtgatcatctgatttgtttgttttctatctcctgccatgaaaatagaagctcttcaaggacaaggcccgtgttgccttattt

SEQ ID NO: 8570 - DNA, 120 bp, synthetic construct
  misc_feature 1..120: note = Artificially Synthesized Probe
  source 1..120: mol_type = other DNA
ttcctgctgtttaagttgaccatcaactcacttccatacagtgctttggagttcacaaagggcttacaaaatgcgctaagctcattttttcctcctccccatctctgaagtctgaaatat

SEQ ID NO: 8571 - DNA, 120 bp, synthetic construct
  misc_feature 1..120: note = Artificially Synthesized Probe
  source 1..120: mol_type = other DNA
cttctcccagaaaagggaaagacatgccctcttggttctctgactcctaactggcatttaaaattcacttttttgttgtggattttttgcccaactctactaggaattgtttaaaagtgg

SEQ ID NO: 8572 - DNA, 120 bp, synthetic construct
  misc_feature 1..120: note = Artificially Synthesized Probe
  source 1..120: mol_type = other DNA
aaatgggcacaccgtctacttcctagggttataagatgtaagtggccagtcctcagcacggtgcctggctcacagtaaatcctcaagaaacatgagttctcagacttttttttttttttt

SEQ ID NO: 8573 - DNA, 120 bp, synthetic construct
  misc_feature 1..120: note = Artificially Synthesized Probe
  source 1..120: mol_type = other DNA
atatcatgtatgcatatatagtatatattatgtaatttacaaagtacacaaggacaacagagaaaactgtccttctcactcccatccccagcaccccgttctcctctggaaggaaccaga

SEQ ID NO: 8574 - DNA, 120 bp, synthetic construct
  misc_feature 1..120: note = Artificially Synthesized Probe
  source 1..120: mol_type = other DNA
cctatctgtgacatattggtaatataagttcaggagagggagagagaaagaggcagggattgagacagagcaggagaggaggagagaaaatttatatggctcaggcagtctgatcccttc

SEQ ID NO: 8575 - DNA, 120 bp, synthetic construct
  misc_feature 1..120: note = Artificially Synthesized Probe
  source 1..120: mol_type = other DNA
aatttgcatcattttattccttgtccaaggtcacaggacaagcagagtcccacccacctgaaaggattcagttctaagacagcctttagggcaaaaagtcacaaagttgatctatctatc

SEQ ID NO: 8576 - DNA, 120 bp, synthetic construct
  misc_feature 1..120: note = Artificially Synthesized Probe
  source 1..120: mol_type = other DNA
caacctgcatttattacctattctgcgccaggcactctgtgggacgggagtagacttggtcctgaacatccaaagatgaatgaaatgggtccctgctttctttttctttttttagataga

SEQ ID NO: 8577 - DNA, 120 bp, synthetic construct
  misc_feature 1..120: note = Artificially Synthesized Probe
  source 1..120: mol_type = other DNA
attactcagggaatggtgggttttcttctccaggcctcataccccaccaaatcccaagggcactgtcaccttccaacctccatctatgtgtgacattttttgacatttcttttattaatt

SEQ ID NO: 8578 - DNA, 120 bp, synthetic construct
  misc_feature 1..120: note = Artificially Synthesized Probe
  source 1..120: mol_type = other DNA
cttttcatattggcactgagagattgatggatctcattctttataagggctgctggctgttatttgtttaactggccacctactgaaggacttttagggattttgcaatctgcgaataca

SEQ ID NO: 8579 - DNA, 120 bp, synthetic construct
  misc_feature 1..120: note = Artificially Synthesized Probe
  source 1..120: mol_type = other DNA
gcaaactgtggcccaaatagctttccctgggggatttttaacttttaaggagaaattggagaatttgagatgcagagtcaatatatgactgtagtattaggactctttcagtaacagggg

SEQ ID NO: 8580 - DNA, 120 bp, synthetic construct
  misc_feature 1..120: note = Artificially Synthesized Probe
  source 1..120: mol_type = other DNA
taaagtggtaccagctgatgaaggctggctgggtctcttcctctagctaacatttgcattttaagcctgattttcaagtctggaaagctgaatataattctgaatacactgaggacatat

SEQ ID NO: 8581 - DNA, 120 bp, synthetic construct
  misc_feature 1..120: note = Artificially Synthesized Probe
  source 1..120: mol_type = other DNA
agcaaccccttccatggatgctcacccaattcgattctctctacaatcctatggctcttttgctcactttatgaatggagagactgaggtcagacagactgtcaattgcccaaggtcaca

SEQ ID NO: 8582 - DNA, 120 bp, synthetic construct
  misc_feature 1..120: note = Artificially Synthesized Probe
  source 1..120: mol_type = other DNA
ttcatcccatccagtacattcaactccactccatccactgtactccatctactacattcaactctactccatccactcccctccatccattccatccaacttcatcccatctactacatt

SEQ ID NO: 8583 - DNA, 120 bp, synthetic construct
  misc_feature 1..120: note = Artificially Synthesized Probe
  source 1..120: mol_type = other DNA
ttcatttcaattcaactaaattcagttaaattcagttcagttgtcttctactgagcacctactgcatgtcaggtatagcactaggcagtgggaggaatggagctaataaatgcagtccca

SEQ ID NO: 8584 - DNA, 120 bp, synthetic construct
  misc_feature 1..120: note = Artificially Synthesized Probe
  source 1..120: mol_type = other DNA
aggcaggcactaagcataatacatcaattctgtggtacctcagaaggtgaagggtctatgggcaaattacagcagggtaagggggactgatgttttctaagtttttgttttatgaagaaa

SEQ ID NO: 8585 - DNA, 120 bp, synthetic construct
  misc_feature 1..120: note = Artificially Synthesized Probe
  source 1..120: mol_type = other DNA
cctagtgcgtgtctgggtgtgtatcggttgtgcatgcatttgtgtgcatgcctgtgtttctctgaaactcttagggccatatgaatttctaaaatctattcagattttagaaaggtaatc

SEQ ID NO: 8586 - DNA, 120 bp, synthetic construct
  misc_feature 1..120: note = Artificially Synthesized Probe
  source 1..120: mol_type = other DNA
aacttactacacagcacctgagtttagtacagtagcacctgtgcttagtacatagcacctgtgtttagtatagtagcacctgtgcttagtacatagcgcctgcatttagtacagtagcac

SEQ ID NO: 8587 - DNA, 120 bp, synthetic construct
  misc_feature 1..120: note = Artificially Synthesized Probe
  source 1..120: mol_type = other DNA
tgtgagccagaagcgactcttgcatgtgtttggtttggcttggctcagggttgaacattctttgaatttgttgccaacatttcaaaatcaggaattttcacatagaaatccagatttctg

SEQ ID NO: 8588 - DNA, 120 bp, synthetic construct
  misc_feature 1..120: note = Artificially Synthesized Probe
  source 1..120: mol_type = other DNA
tccactgatgtaggaggcccacccatattttcagggtaatctccttcactcaaagccaactgattgtggcattaaccacatctacaaagcacctgcattcacagcagcgcctagattagt

SEQ ID NO: 8589 - DNA, 120 bp, synthetic construct
  misc_feature 1..120: note = Artificially Synthesized Probe
  source 1..120: mol_type = other DNA
ttctgtcaccaatgtacccaccgggccactccttcctgccccaactccttccagctagtgacccacatgccatttgtactgaccccatcacctactcacacaggcatttcctgggtggct

SEQ ID NO: 8590 - DNA, 120 bp, synthetic construct
  misc_feature 1..120: note = Artificially Synthesized Probe
  source 1..120: mol_type = other DNA
ggaccattattctgtctagtaaaaggagctttctagaatgaagatttccaggcccagaatgcaagggtcctcatccaggtttttttgggatgggccggcaacacaaatagttctgaagca

SEQ ID NO: 8591 - DNA, 120 bp, synthetic construct
  misc_feature 1..120: note = Artificially Synthesized Probe
  source 1..120: mol_type = other DNA
atgcaaacagcatcggtggcagccacagaattatttccactcagtggtcttgactcccgtgcaaacacacattgggcttatctagcagtcccttcaagttaaatgaagtcattgtggcgc

SEQ ID NO: 8592 - DNA, 120 bp, synthetic construct
  misc_feature 1..120: note = Artificially Synthesized Probe
  source 1..120: mol_type = other DNA
cttccacttatgctttggttcaggagtagcctgcaaggacattagcctacttagggagatcaagaacttccaaagtatcttgtcaagatacaaaggatttctgaaagatttctgttgact

SEQ ID NO: 8593 - DNA, 120 bp, synthetic construct
  misc_feature 1..120: note = Artificially Synthesized Probe
  source 1..120: mol_type = other DNA
acagagtaattctggaaaaaccaatgagaacaaaaagggaaagcacacgcaacatgggaatgaggaagcagaatactacaactccaggccaacaaatctgaaaatagaacagaatcacta

SEQ ID NO: 8594 - DNA, 120 bp, synthetic construct
  misc_feature 1..120: note = Artificially Synthesized Probe
  source 1..120: mol_type = other DNA
aattatcaacctacccagaactattacccaactgaaaaaggcgaaagaaattaacaacagcaaaacctttagaataattcagtaactggctagttacaaaatcaataaccaatcgccaag

SEQ ID NO: 8595 - DNA, 120 bp, synthetic construct
  misc_feature 1..120: note = Artificially Synthesized Probe
  source 1..120: mol_type = other DNA
taggcaagttttgaaaaagtttaatggggaagtttagtccaaagctatggcgatccaaacaatgtggtaccagtgctagaatgtgcaggaagatcacaacccataataaagagttcacag

SEQ ID NO: 8596 - DNA, 120 bp, synthetic construct
  misc_feature 1..120: note = Artificially Synthesized Probe
  source 1..120: mol_type = other DNA
cacgcccagccagatcacagatttaactgtttagaaagaaataataaaagtacaagaataagatagtggtgaatatttatacaaccttgccatcagaattgggaagacctcgccgggctt

SEQ ID NO: 8597 - DNA, 120 bp, synthetic construct
  misc_feature 1..120: note = Artificially Synthesized Probe
  source 1..120: mol_type = other DNA
gcagatagggaggcgcgtacttttgagccagtgataacttcagaaaattaccctaagtcaatattctgaaaagttcgcaaggatgttagaagaacttcattatgtccttgactacaacag

SEQ ID NO: 8598 - DNA, 120 bp, synthetic construct
  misc_feature 1..120: note = Artificially Synthesized Probe
  source 1..120: mol_type = other DNA
atttcatccagctcaaaattcttaccaaagccaccttcctgcctgggtagtgtttaaagccaactagaaaacccatattcttgagatcggtacatggaagaggcatgtaagtaacatttt

SEQ ID NO: 8599 - DNA, 120 bp, synthetic construct
  misc_feature 1..120: note = Artificially Synthesized Probe
  source 1..120: mol_type = other DNA
gaactcagggtgtgtttgttttccatagaactggcctcacaggcagagacatcattttaaccaactttcttggaaagattcctgcaaaaccagaatcattccaaagtggaacttatcatt

SEQ ID NO: 8600 - DNA, 120 bp, synthetic construct
  misc_feature 1..120: note = Artificially Synthesized Probe
  source 1..120: mol_type = other DNA
cgtccaggttgctccagggccactattttaaaagaaagtaaatgaaaagacactgagatcttcagagaaaagcagaaggaatggaaagttcagtgcttttgtaaaagctgttgtgctttc

SEQ ID NO: 8601 - DNA, 120 bp, synthetic construct
  misc_feature 1..120: note = Artificially Synthesized Probe
  source 1..120: mol_type = other DNA
atctccctccttcctcgggttgtttgctcattaatccaaattcagcagggagaaagtctaaccacgtccatgggagaaggtttctagaaggagtagtcctcttaggtggttctcaaaggg

SEQ ID NO: 8602 - DNA, 120 bp, synthetic construct
  misc_feature 1..120: note = Artificially Synthesized Probe
  source 1..120: mol_type = other DNA
tacaaaatgcgtgttttttcagttcatatggttgcaacagcccttatgaaagatataaacatccctgccctgactgcataaatgttgaaggtagacctagttctggattcctgagtcaga

SEQ ID NO: 8603 - DNA, 120 bp, synthetic construct
  misc_feature 1..120: note = Artificially Synthesized Probe
  source 1..120: mol_type = other DNA
agaggcacatctaggtaaatcacaagcaggttcccaaagacaggacagctgtgagtccttaaatgagccataagcctttaactcttcatatcaaataagagctttatgttgagggaataa

SEQ ID NO: 8604 - DNA, 120 bp, synthetic construct
  misc_feature 1..120: note = Artificially Synthesized Probe
  source 1..120: mol_type = other DNA
ctttcagctcctacatgaaaaaaatttgagatagaacatgaaagcaagtcagataaaatatattcttgaaaatcaccaatgtgtgcacgctcgtggaagcagctttgggaccctgtcctg

SEQ ID NO: 8605 - DNA, 120 bp, synthetic construct
  misc_feature 1..120: note = Artificially Synthesized Probe
  source 1..120: mol_type = other DNA
aagcaagagatcaccacagctatgcttctcttttcttttaaaataaaccctaaactaatccacttataagattttctttgtggctatgaacaaaccccatgcagctccatcatggggctg

SEQ ID NO: 8606 - DNA, 120 bp, synthetic construct
  misc_feature 1..120: note = Artificially Synthesized Probe
  source 1..120: mol_type = other DNA
aacaccaatctaaatgggacctgtccccctaaaaccctgcactgacggagcatactccaaagcctatgtgtttctagtgggaggattaaccatgatcaaaacaaggttagcagagaaacc

SEQ ID NO: 8607 - DNA, 120 bp, synthetic construct
  misc_feature 1..120: note = Artificially Synthesized Probe
  source 1..120: mol_type = other DNA
agaaagaaaataaaaccagaaaaggtaatgagtcaattatgtacgtggttaaattcctactaagaaaggcagggagggggagggacgttcccatgggagaggcagcaagtcttcctctgg

SEQ ID NO: 8608 - DNA, 120 bp, synthetic construct
  misc_feature 1..120: note = Artificially Synthesized Probe
  source 1..120: mol_type = other DNA
aaaaaaaaaaaagaaaacacaattcttcacgaatgaagagacaaagctaggcatgagggctgcagggcgggcaaggcccatcccatcctccttactggccgccctgcttcctcctgaaag

SEQ ID NO: 8609 - DNA, 120 bp, synthetic construct
  misc_feature 1..120: note = Artificially Synthesized Probe
  source 1..120: mol_type = other DNA
tagtacctcacttgctcattaaactcagatttgaaaacatttatttttaggggtgaaacattttcacccaggcagcccactgtgacttaaacaaccaaaaacagctctcagttgggtgtg

SEQ ID NO: 8610 - DNA, 120 bp, synthetic construct
  misc_feature 1..120: note = Artificially Synthesized Probe
  source 1..120: mol_type = other DNA
aggtaactaggattaggtgagggcgtgaggatgaaatctttatgaatgggatccaggtctttacaagagtcctcagagagctcacctcctctccccacctgtgaagacacagggagaaga

SEQ ID NO: 8611 - DNA, 120 bp, synthetic construct
  misc_feature 1..120: note = Artificially Synthesized Probe
  source 1..120: mol_type = other DNA
gcaccgctcatgcagtaaattaaaatcttactgatatcattatggggattgtgttacatttatagatcaatttaggagaaactgatacttttaaaatatcaaggctttttgccacttccc

SEQ ID NO: 8612 - DNA, 120 bp, synthetic construct
  misc_feature 1..120: note = Artificially Synthesized Probe
  source 1..120: mol_type = other DNA
cgttattgcttgtctgcacatcggcagcaagttaggcataataagaaactttacgagtgtggacgaaccaactcatccaaccagaatgcagcaaagactaacaagtttttgttttttttt

SEQ ID NO: 8613 - DNA, 120 bp, synthetic construct
  misc_feature 1..120: note = Artificially Synthesized Probe
  source 1..120: mol_type = other DNA
atgaaacatctggcatttgctttaaaatatggtgggggggagcaaatgagtaggtgcacagattaaacaattggtcataatttcctaactgttaaagctgacctatgggtacaggaaggt

SEQ ID NO: 8614 - DNA, 120 bp, synthetic construct
  misc_feature 1..120: note = Artificially Synthesized Probe
  source 1..120: mol_type = other DNA
ttcactgcaggtgggagttagaatggtgtatttctgcaggctaagtttgtggtatgcatcacaagctttaagaacatccatacctttaacccaatatctccatttcaagaagttatgcag

SEQ ID NO: 8615 - DNA, 120 bp, synthetic construct
  misc_feature 1..120: note = Artificially Synthesized Probe
  source 1..120: mol_type = other DNA
agccgctgtacccagccttaaaaaaatacatacaataacctctatacctggggaactatcaggaaggataaatactgctaaagattagaaacaaaaagtcattcctaaataatacatata

SEQ ID NO: 8616 - DNA, 120 bp, synthetic construct
  misc_feature 1..120: note = Artificially Synthesized Probe
  source 1..120: mol_type = other DNA
aagaataattaaacaagtagctaataaataaaaaattacccagtaatgaagaattctaggtcttcacagtatctccaagcacatctcaacgcctccgacagcacacctcagctgccagca

SEQ ID NO: 8617 - DNA, 120 bp, synthetic construct
  misc_feature 1..120: note = Artificially Synthesized Probe
  source 1..120: mol_type = other DNA
tggctatcttggcagcttctttcacctcctggaatttctctgcaaactgaacatgaagaatagttattaaggcttttattaacctcactcatggctggtattcagaacccacctttattt

SEQ ID NO: 8618 - DNA, 120 bp, synthetic construct
  misc_feature 1..120: note = Artificially Synthesized Probe
  source 1..120: mol_type = other DNA
ggacagtacaaataagtttgttcagtgaatgaacgagttttaggcttgcacagccctgtccactttaggaaaaaaaaatcatgtaaaagacttggttctggtcttcaaaggagctccaag

SEQ ID NO: 8619 - DNA, 120 bp, synthetic construct
  misc_feature 1..120: note = Artificially Synthesized Probe
  source 1..120: mol_type = other DNA
atgtgagacatggattaaaaggagatcattttgcaactttaagatttgactgccctgctggattttggacttgcatggggcctgtagcccctttgttttggtcaatttctcccatttgga

SEQ ID NO: 8620 - DNA, 120 bp, synthetic construct
  misc_feature 1..120: note = Artificially Synthesized Probe
  source 1..120: mol_type = other DNA
accagaagggaaacaacagccttgggaaaatatctatagctaagctagtacaacagaaaaagggctattttctttagtatggcaagagtttgtacaaactgaaaagtatgacaagcccag

SEQ ID NO: 8621 - DNA, 120 bp, synthetic construct
  misc_feature 1..120: note = Artificially Synthesized Probe
  source 1..120: mol_type = other DNA
ccaactagcagaagaaaactgccagtcatgagagccgcctagtaattgtcctttggtgaaaaatcgcctccctccaagtcttgcattttctaatatttcccccttattcttaaaaaaata

SEQ ID NO: 8622 - DNA, 120 bp, synthetic construct
  misc_feature 1..120: note = Artificially Synthesized Probe
  source 1..120: mol_type = other DNA
gtggagccccaatttatgagctcccctgccctgcaacaccatcatccaagataagaacaaaccacataatcttctgatatttttctgtctgtatatttgcattcattacctacatttctt

SEQ ID NO: 8623 - DNA, 120 bp, synthetic construct
  misc_feature 1..120: note = Artificially Synthesized Probe
  source 1..120: mol_type = other DNA
tcaaaatctgtttcttttcccgtagcttaacagagtctcaagtttttctggagcaggaaatttcctaggtgctagagaatgaaagctagtctaagccaatcatggaaatccgtttccctg

SEQ ID NO: 8624 - DNA, 120 bp, synthetic construct
  misc_feature 1..120: note = Artificially Synthesized Probe
  source 1..120: mol_type = other DNA
aggaaattgccctgtaataatactttttggactgtggttgggaaatagtccttataatggagcagttaagaccaaggcatctattttctttctggggggtagagagggaagtatgtataa

SEQ ID NO: 8625 - DNA, 120 bp, synthetic construct
  misc_feature 1..120: note = Artificially Synthesized Probe
  source 1..120: mol_type = other DNA
ccccagaatctcttcttcctcttctattcaccccagttttgccaatatttgtgcctcggtatttttaaaatttctccaactcttaacccttcatcagttctaccctggactaaaacaatc

SEQ ID NO: 8626 - DNA, 120 bp, synthetic construct
  misc_feature 1..120: note = Artificially Synthesized Probe
  source 1..120: mol_type = other DNA
caaagaggtttgagcaacagcaacatcaatgggtccaaatggaaccagagcctgaaaatactcatgttccatatgcatgctcttcagaggcctttacagcaaaacagaatatttcaaact

SEQ ID NO: 8627 - DNA, 120 bp, synthetic construct
  misc_feature 1..120: note = Artificially Synthesized Probe
  source 1..120: mol_type = other DNA
agtcagtcttaccttaaaccaaaatattctaaatacttacaaagggctcttctaccaccctaaaaggaaatgtagtctctaaaacaggctctcagcccctttaaactgctgagtaaggcc

SEQ ID NO: 8628 - DNA, 120 bp, synthetic construct
  misc_feature 1..120: note = Artificially Synthesized Probe
  source 1..120: mol_type = other DNA
actgcccaaacttctgtgacgttttggtgaaggtcatattcggtgtgattgtgctgtttatgatcacctgcagaaaaacagcccaaagagtgaaaatttaaatgttgaatgagacaaagt

SEQ ID NO: 8629 - DNA, 120 bp, synthetic construct
  misc_feature 1..120: note = Artificially Synthesized Probe
  source 1..120: mol_type = other DNA
caagttagcccctcagggaccagagcagtgtcaagaagggtagaggatgaatctgaggtggaagggtaagaagataatatctagcacatggtacttttattcattcaaacatttattgaa

SEQ ID NO: 8630 - DNA, 120 bp, synthetic construct
  misc_feature 1..120: note = Artificially Synthesized Probe
  source 1..120: mol_type = other DNA
gctaaaggacagaccttccagatacaaaccgttgccttaactaaagggatctagacagtaagtgacagctgtcagtagtaacagaagtatcattgctcttgctagatctacatttatcta

SEQ ID NO: 8631 - DNA, 120 bp, synthetic construct
  misc_feature 1..120: note = Artificially Synthesized Probe
  source 1..120: mol_type = other DNA
accccatacaggctatcccagaggcagtcaagctagaataacaatggtgataccccctgctatttccttaaaacttagtttctagggcactttttcacagtctttaacccccattttttt

SEQ ID NO: 8632 - DNA, 120 bp, synthetic construct
  misc_feature 1..120: note = Artificially Synthesized Probe
  source 1..120: mol_type = other DNA
gacaggagccaccatgctggccatgcacaatattttttacactcatcaattatttttccctgattcttggtactctctgattctatttgggtattttctattaatctgctttccaggtca

SEQ ID NO: 8633 - DNA, 120 bp, synthetic construct
  misc_feature 1..120: note = Artificially Synthesized Probe
  source 1..120: mol_type = other DNA
ctggtttagcgatatatacacatgtggcaaaactatgcagaaaagcaagggaatgcttaatacactcttaatagagtggtgatctcttgaggagtggatgggagagcatctaattaggga

SEQ ID NO: 8634 - DNA, 120 bp, synthetic construct
  misc_feature 1..120: note = Artificially Synthesized Probe
  source 1..120: mol_type = other DNA
aaatccagggagatgaagttggatgaacctgggagttttccataagaggctgtgactgagttacagcaataaaaagacatgttgcctgctccaagagtagttattaacaggtgcttttta

SEQ ID NO: 8635 - DNA, 120 bp, synthetic construct
  misc_feature 1..120: note = Artificially Synthesized Probe
  source 1..120: mol_type = other DNA
atgaaatcaagtgctgtgatggctcaattaaccaatgctctgaaaatggagtttctttataatggagttggccgttctgcctaaaaactcaccataaatcacatgcctattggcatgtgc

SEQ ID NO: 8636 - DNA, 120 bp, synthetic construct
  misc_feature 1..120: note = Artificially Synthesized Probe
  source 1..120: mol_type = other DNA
ctttccttctcaaagagcctgtgctctttggctgcccacagtttacacagaagctgaatctgatgtggcgtttgctcaaaatgagctgagtccattctacaccagccactgctttttttt

SEQ ID NO: 8637 - DNA, 120 bp, synthetic construct
  misc_feature 1..120: note = Artificially Synthesized Probe
  source 1..120: mol_type = other DNA
ttctacatatggctagccagttttcccagcaccatttattaaatagggaatcctttccccattgcttgtttttctcaggtttgtcaaagatcagatagttgtagatatgcggcgttattt

SEQ ID NO: 8638 - DNA, 120 bp, synthetic construct
  misc_feature 1..120: note = Artificially Synthesized Probe
  source 1..120: mol_type = other DNA
atgaagggttgttgaattttgtcaaaggctttttctgcatctattgagataatcatgtggtttttgtctttggctctgtttatatgctggattacatttattgatttgcgtatattgaac

SEQ ID NO: 8639 - DNA, 120 bp, synthetic construct
  misc_feature 1..120: note = Artificially Synthesized Probe
  source 1..120: mol_type = other DNA
tgtctttgttctcgttggtttcaaagaacatctttatttctgccttcatttcgttatgtacccagtagtcattcaggagcaggttgttcagtttccatgtagttgagcggctttgagtga

SEQ ID NO: 8640 - DNA, 120 bp, synthetic construct
  misc_feature 1..120: note = Artificially Synthesized Probe
  source 1..120: mol_type = other DNA
cctggtggtgacaaaatctctcaacatttgcttgtctataaagtattttatttctccttcacttatgaagcttagtttggctggatatgaaattctgggttgaaaattcttttctttaag

SEQ ID NO: 8641 - DNA, 120 bp, synthetic construct
  misc_feature 1..120: note = Artificially Synthesized Probe
  source 1..120: mol_type = other DNA
atgtcctttctggttgttagttttccttctaacagacaggaccctcagctgcaggtctgttggaataccctgccgtgtgaggtgtcagtgtgcccctgctggggggtgcctcccagttag

SEQ ID NO: 8642 - DNA, 120 bp, synthetic construct
  misc_feature 1..120: note = Artificially Synthesized Probe
  source 1..120: mol_type = other DNA
aacgcatctgaccacctgtcatcatggttcagatcaacatttgggatcaaaggcctaaaacaaagtggggctgacccagtgtggtagaacacaatgaggacatcaggaagtgttcatact

SEQ ID NO: 8643 - DNA, 120 bp, synthetic construct
  misc_feature 1..120: note = Artificially Synthesized Probe
  source 1..120: mol_type = other DNA
cctgaatgccaactgtagtaattaaacaactgaggtccaccctactccccacttcctggggccttctgttccctcatgggatgcttccttttgcagaaggaggctctgtcatggatctct

SEQ ID NO: 8644 - DNA, 120 bp, synthetic construct
  misc_feature 1..120: note = Artificially Synthesized Probe
  source 1..120: mol_type = other DNA
tatatccttggataactcaactgacaaaagtacaaacccatcgaaggatggcagatgaactggcagaatctatagataaaagaaagcaggtcagcttgattcaccactgctgtcagaaca

SEQ ID NO: 8645 - DNA, 120 bp, synthetic construct
  misc_feature 1..120: note = Artificially Synthesized Probe
  source 1..120: mol_type = other DNA
aaatactccaaaaccacttaataaaattcaactcctatgcctaataacaccaaaacccgactagatacaatacccaatgctggcaagggtgcaacaacagacactctcatacaggctgga

SEQ ID NO: 8646 - DNA, 120 bp, synthetic construct
  misc_feature 1..120: note = Artificially Synthesized Probe
  source 1..120: mol_type = other DNA
aaagcaaagagagaagaaaaaaagagacaccagtgagtagtttttgcaaaccacattccacttagctgttatcccgagactgcagggcaattggtgtaatgaacaatttgcttaaaaggc

SEQ ID NO: 8647 - DNA, 120 bp, synthetic construct
  misc_feature 1..120: note = Artificially Synthesized Probe
  source 1..120: mol_type = other DNA
ctcaaagtgctgggatataatcccagcatgagccattatagggcatgaaccactgcacctggtaatatgatagaattattttttatctctgtatctcttcagtctacttctggaaccatt

SEQ ID NO: 8648 - DNA, 120 bp, synthetic construct
  misc_feature 1..120: note = Artificially Synthesized Probe
  source 1..120: mol_type = other DNA
gaaacttttcctagaaaaccaatttgccatttgagcctcatataagggctactgagtaacaccagcagcatcaaccatcaaccgtggttttgaagaaatgcagcaatcttctttatgcct

SEQ ID NO: 8649 - DNA, 120 bp, synthetic construct
  misc_feature 1..120: note = Artificially Synthesized Probe
  source 1..120: mol_type = other DNA
attcacattagatataatcagatgatctaaaaaagaaaaaaagaagtggcccctagagccagcatctctactccagaacaacactggtgactgaatgacacagggagactccagaaagtt

SEQ ID NO: 8650 - DNA, 120 bp, synthetic construct
  misc_feature 1..120: note = Artificially Synthesized Probe
  source 1..120: mol_type = other DNA
agtctaatgatatttcaaaaaaaggcaaaaaagaaaggcaaggagaagaaaagctcgtagctgacctttactgagtacttaccattctgctaggctcgctctccactttgaaactgcaac

SEQ ID NO: 8651 - DNA, 120 bp, synthetic construct
  misc_feature 1..120: note = Artificially Synthesized Probe
  source 1..120: mol_type = other DNA
cagaaaatcaaaggtcacaggatcacttcaggcaaactgaacaacaaatcttaacacctttatgggcaaaatccaaacagagacctcaccacaaaattcagaaaagcagaccctgacttt

SEQ ID NO: 8652 - DNA, 120 bp, synthetic construct
  misc_feature 1..120: note = Artificially Synthesized Probe
  source 1..120: mol_type = other DNA
gacattattttacagtattacaaagtcttgtaaggtaccctaattagtttgtatctgtcttgagtcttaaacccctccaaacaccatctactacaccaaccgacaggtcttcctctagtc

SEQ ID NO: 8653 - DNA, 120 bp, synthetic construct
  misc_feature 1..120: note = Artificially Synthesized Probe
  source 1..120: mol_type = other DNA
tacagtagcaaccaaaaggatacaatttcttggactctatttaggaagcatgcaagatctatgtttagaaaataaaagcaagccaggtacaattgtgtgcccctatagtcccagccactc

SEQ ID NO: 8654 - DNA, 120 bp, synthetic construct
  misc_feature 1..120: note = Artificially Synthesized Probe
  source 1..120: mol_type = other DNA
tgctgacaggctttattaatgacactaccttatttcctagagtgtctgacagtttttaaggagctttgaacatacattctcctattggccctcctgagatgtgagtttgactaagttctg

SEQ ID NO: 8655 - DNA, 120 bp, synthetic construct
  misc_feature 1..120: note = Artificially Synthesized Probe
  source 1..120: mol_type = other DNA
ttagccacaacacaggtgtattcttgctctgacaaagcagccactgcatggatggttactttctatccacagtatgctgtctatagaaggaatcttgtctcaggatttcaacatatattt

SEQ ID NO: 8656 - DNA, 120 bp, synthetic construct
  misc_feature 1..120: note = Artificially Synthesized Probe
  source 1..120: mol_type = other DNA
gtaaattgttccatagtaaaataaatttagaaaatgctgagcaaaggagtggcacaatcagaactacaatttagagggatcactgtggcacttctattgaagatgggctgaagggggaag

SEQ ID NO: 8657 - DNA, 120 bp, synthetic construct
  misc_feature 1..120: note = Artificially Synthesized Probe
  source 1..120: mol_type = other DNA
agagacctctgtggaaatgagtgccagggcaggaaaacctgaactacaattggggaattgctgaagactcagtgtggggtaggtctcaagagttaaaaactccagagggatccaatcata

SEQ ID NO: 8658 - DNA, 120 bp, synthetic construct
  misc_feature 1..120: note = Artificially Synthesized Probe
  source 1..120: mol_type = other DNA
tcattagtagacaggacagggctgaggaaagaacctttctcagtcttcaaggcagccttaaactgctttcggaaggctcagggattggaagttctgaaactttcaaaactaaaaagcaaa

SEQ ID NO: 8659 - DNA, 120 bp, synthetic construct
  misc_feature 1..120: note = Artificially Synthesized Probe
  source 1..120: mol_type = other DNA
aaaagcacacaccaacctataattttgtactctgagaaattattgtttaaaagtgcaggagaaataaggactctgagatatacaaaaatggatgcagtttgttgccaatagacctgcctt

SEQ ID NO: 8660 - DNA, 120 bp, synthetic construct
  misc_feature 1..120: note = Artificially Synthesized Probe
  source 1..120: mol_type = other DNA
tgtcaaaatacatgccaaaactgacagaactacaagaaaaaaattaatgaatccactactatagttggaaataccaacagccttcagttagagatggacagatccgaggctgggtgcggt

SEQ ID NO: 8661 - DNA, 120 bp, synthetic construct
  misc_feature 1..120: note = Artificially Synthesized Probe
  source 1..120: mol_type = other DNA
aaattagattgtggtgatggttccaaagtctctgattacagtagaaaaaaaatcaatgaatatgtatttatacattcattgtataatgaatgtatattatgtgaattgtatattatgtga

SEQ ID NO: 8662 - DNA, 120 bp, synthetic construct
  misc_feature 1..120: note = Artificially Synthesized Probe
  source 1..120: mol_type = other DNA
aaggtactatctttggatgaacacagggccaggaacacagtgggaaagccaggaaagagtactggaactcaaagaagttcaagatcattcaggttgattgatcattccaaaaaaccattt

SEQ ID NO: 8663 - DNA, 120 bp, synthetic construct
  misc_feature 1..120: note = Artificially Synthesized Probe
  source 1..120: mol_type = other DNA
aaaggctaacttgtttccctacctttactgagaaaggtaaagaaagtgacggacatctcaaatacacattaaaaagatgatactgccaggtgaggtgtcaaagcccccacattgtaaagt

SEQ ID NO: 8664 - DNA, 120 bp, synthetic construct
  misc_feature 1..120: note = Artificially Synthesized Probe
  source 1..120: mol_type = other DNA
ttcagggctaagtcccttcagtctgtgtgaggtagggacattaatataaccacctcaagggtttgttaagattaaatgtgataacatgtgcaaagtgcctttttgctattaatagcagac

SEQ ID NO: 8665 - DNA, 120 bp, synthetic construct
  misc_feature 1..120: note = Artificially Synthesized Probe
  source 1..120: mol_type = other DNA
tcacataaaaaatgaataatttttaaagttatttgtattgagatataatgtggacaccataaaatctacctttttaaagtccccaattcagtggctttttattcacagaattgcgtaacc

SEQ ID NO: 8666 - DNA, 120 bp, synthetic construct
  misc_feature 1..120: note = Artificially Synthesized Probe
  source 1..120: mol_type = other DNA
gggttgcagctgcccaaggagggaacctcacacactagttaacctatttcagggtcttttattaacaggaaaattttaaataatgctcttagaaatactgaaaacacagaaaactggggt

SEQ ID NO: 8667 - DNA, 120 bp, synthetic construct
  misc_feature 1..120: note = Artificially Synthesized Probe
  source 1..120: mol_type = other DNA
ggtgccatctcttttctggtcatttatttaaaacgtgtacagggctgtggaaaactggtgcttcctcaaaaagttaaatacagcatttccacgtggccctgcaattcttctaggtatata

SEQ ID NO: 8668 - DNA, 120 bp, synthetic construct
  misc_feature 1..120: note = Artificially Synthesized Probe
  source 1..120: mol_type = other DNA
actgtacacttacaaatgatttaggtggtacattttatgtgtgttttactaaacaacaacaaagtgtgctgggagcaactcctggtgaggtcggggatggcttcacagagataatgacag

SEQ ID NO: 8669 - DNA, 120 bp, synthetic construct
  misc_feature 1..120: note = Artificially Synthesized Probe
  source 1..120: mol_type = other DNA
tctttatgtattctgattgattctatacttcactgttacaaaataaagagaccacccagtgttgctgagtcccagcctagctacaactttctgtccccttccctaccaaatagaattagc

SEQ ID NO: 8670 - DNA, 120 bp, synthetic construct
  misc_feature 1..120: note = Artificially Synthesized Probe
  source 1..120: mol_type = other DNA
caccgtgcccggcccagagccctcattttacaatttttgtttttttctaactcacagttaacccactgaacaagaagtacccatttctgatttgcattttccctataaatcccattattg

SEQ ID NO: 8671 - DNA, 120 bp, synthetic construct
  misc_feature 1..120: note = Artificially Synthesized Probe
  source 1..120: mol_type = other DNA
caggcctatgcacacagtaggcccaaaatacttgctaaactagattatttggctttaaaattatatcacatgtgcccagcaaggcaaaactcatctctattatttcccacaatgtcaagg

SEQ ID NO: 8672 - DNA, 120 bp, synthetic construct
  misc_feature 1..120: note = Artificially Synthesized Probe
  source 1..120: mol_type = other DNA
tcatgaaagacacgcagactcattacatcaactgcctggcagatcacagatttccagaaggtgtcttaaagaagcgtttttttctaatttgtacaaagatgtcacttgtcctgggaagaa

SEQ ID NO: 8673 - DNA, 120 bp, synthetic construct
  misc_feature 1..120: note = Artificially Synthesized Probe
  source 1..120: mol_type = other DNA
caggcggtatctttcgtgcacttcatatttgaaacatgacatgcttgtgataatttttaatttttgtgatgttttcctattgccttctctatcgaggaaagaaacacagcccgtcttccc

SEQ ID NO: 8674 - DNA, 120 bp, synthetic construct
  misc_feature 1..120: note = Artificially Synthesized Probe
  source 1..120: mol_type = other DNA
ccccatctcaaagtccttaacttatcatatctgcaaagaccctttaacatatacggtaacgtaggttcagaaatgagcatctgatatatctatgggagacattttttagcctaccactct

SEQ ID NO: 8675 - DNA, 120 bp, synthetic construct
  misc_feature 1..120: note = Artificially Synthesized Probe
  source 1..120: mol_type = other DNA
ctctggtctcctctgtgctatatttctgacattgcctttcctctactagctttctatggtccagaaatttattgtaatctctcaactactgataattccctcccattcattttgctgtcc

SEQ ID NO: 8676 - DNA, 120 bp, synthetic construct
  misc_feature 1..120: note = Artificially Synthesized Probe
  source 1..120: mol_type = other DNA
acattcaatagaaagttagcccttgtgaacctcaaacgagtgagacacaagtgaagggagcctttttttatgcttgattcccttgtactacacagggccaactgcactccattcaaacca

SEQ ID NO: 8677 - DNA, 120 bp, synthetic construct
  misc_feature 1..120: note = Artificially Synthesized Probe
  source 1..120: mol_type = other DNA
agaaagagagaacaagaggtgatgggagcaagcactcagtaaagttccttgtacacttctttgggtttggaaagaaaaggtacggagtattggtaggtcttcagcacacagaagtaagca

SEQ ID NO: 8678 - DNA, 120 bp, synthetic construct
  misc_feature 1..120: note = Artificially Synthesized Probe
  source 1..120: mol_type = other DNA
atcatgctgggcactgacatacatctcacccaattttcccaacaaccttgagaaatcggcatctatactttgtttcacagaggaaaacagaaaggaaaaaaagattaagtaacttgtcca

SEQ ID NO: 8679 - DNA, 120 bp, synthetic construct
  misc_feature 1..120: note = Artificially Synthesized Probe
  source 1..120: mol_type = other DNA
ccatgatactccccctcatttctcaatgattttagctctagatcacagtccctctctcctacactaatcttgtcttgattctttgtgatttcaatacacacatagatggttcttccagct

SEQ ID NO: 8680 - DNA, 120 bp, synthetic construct
  misc_feature 1..120: note = Artificially Synthesized Probe
  source 1..120: mol_type = other DNA
tactcccagtcatcgacacctgcctctgttgtgtcccacaacacttaccaccttctaacatgccatgaaatttacttatttgttgttttcatttaatgcatgtctcattaaaatgtaagc

SEQ ID NO: 8681 - DNA, 120 bp, synthetic construct
  misc_feature 1..120: note = Artificially Synthesized Probe
  source 1..120: mol_type = other DNA
tttataatattcaattcccatgttccttgctatactgtaagctctacaaggacaggggcaagtactcagtaaatattagttaactgcgtgaatggaggagcaaagttaggatgtaagaag

SEQ ID NO: 8682 - DNA, 120 bp, synthetic construct
  misc_feature 1..120: note = Artificially Synthesized Probe
  source 1..120: mol_type = other DNA
agtcccgaaaaccacatcaccttccctctcacattcccaacagatgaatcctattacagccaggagagccccatctacaaaaaaacagctgtaacaactggcaaaaaaataaaaactaaa

SEQ ID NO: 8683 - DNA, 120 bp, synthetic construct
  misc_feature 1..120: note = Artificially Synthesized Probe
  source 1..120: mol_type = other DNA
cacgcccggcctaacacagcttttctgaggcacatctctgcttttggttttagacttcaagttgtactcttgaaataaaggctgtttttctcatggaactataaaagtctcacaaaatgt

SEQ ID NO: 8684 - DNA, 120 bp, synthetic construct
  misc_feature 1..120: note = Artificially Synthesized Probe
  source 1..120: mol_type = other DNA
gcattctaccacatgccaccttcatcctcttttatgacatttccagggttatgccaatttcaccaaatgcctaaaaggcagtatttgaagctgtaccaatttttgctatgaggacaactt

SEQ ID NO: 8685 - DNA, 120 bp, synthetic construct
  misc_feature 1..120: note = Artificially Synthesized Probe
  source 1..120: mol_type = other DNA
aagaaaaagagaggacactctcacaaagtcaaactcaattaaccagcagttctgtctcacaggagtcactttaaatttactgaatctgattctgttagtgccaaagaaagacaggagccc

SEQ ID NO: 8686 - DNA, 120 bp, synthetic construct
  misc_feature 1..120: note = Artificially Synthesized Probe
  source 1..120: mol_type = other DNA
cagctcaagttgtcccttctctaggctaagtatgcccaagtcctttaaacaggtggtgctaatctcctttggatcaaggacccctttgaaaatctgataaaaaaaaaaaaaactatggac

SEQ ID NO: 8687 - DNA, 120 bp, synthetic construct
  misc_feature 1..120: note = Artificially Synthesized Probe
  source 1..120: mol_type = other DNA
atcattctcacagaaacatgcccagacccctcctgctctgcattctctcctccaaatgtccttccatacatctatacttaggggacctctggtgcccagaaccaaacgcagggttctaga

SEQ ID NO: 8688 - DNA, 120 bp, synthetic construct
  misc_feature 1..120: note = Artificially Synthesized Probe
  source 1..120: mol_type = other DNA
gtttcactttaaattcatgttctctgacctcaaactgtcactctgcagtggccgacaggcctgtgtttctctggtagccttgccgcccactcccggaaaacaatttcacatcaccttctc

SEQ ID NO: 8689 - DNA, 120 bp, synthetic construct
  misc_feature 1..120: note = Artificially Synthesized Probe
  source 1..120: mol_type = other DNA
gtgtgctcttcttaaatctgaagaaggatcatgctgcagccctgctaaaacctttcacttttattgaatcatactgcccatcaaataaaaccgccagtccatgcctcagctcaatttcgt

SEQ ID NO: 8690 - DNA, 120 bp, synthetic construct
  misc_feature 1..120: note = Artificially Synthesized Probe
  source 1..120: mol_type = other DNA
agccaccatgcctggccagctctcctatttctattagacagagctggtctggaaggcaagggtgggggagtcacagattataacagattataacttcatattataattaaatgttttatg

SEQ ID NO: 8691 - DNA, 120 bp, synthetic construct
  misc_feature 1..120: note = Artificially Synthesized Probe
  source 1..120: mol_type = other DNA
cgctcccatggagcaagaaaatccacttctcacagaggttaataaacttacagatctcattactcaaagaggtcatgctggtgagaattttaatgcatttttcagaaagggtctggaaga

SEQ ID NO: 8692 - DNA, 120 bp, synthetic construct
  misc_feature 1..120: note = Artificially Synthesized Probe
  source 1..120: mol_type = other DNA
ttagaaggtcaaatccatcttagaggtgatggctcccaaatctgtatctctgactctatctgaactgttgagtgttagagctgaatttatacttgctatggatagcctggacaagtgaaa

SEQ ID NO: 8693 - DNA, 120 bp, synthetic construct
  misc_feature 1..120: note = Artificially Synthesized Probe
  source 1..120: mol_type = other DNA
tcaacaacaacaaaaaaaagaacatgaattttgctctcagatatgctcaagcttggtttccaactctgccatgtcctgactgacagctttggtaggctactgaatctcttaagcccagtc

SEQ ID NO: 8694 - DNA, 120 bp, synthetic construct
  misc_feature 1..120: note = Artificially Synthesized Probe
  source 1..120: mol_type = other DNA
aaaaaaatctaactctcacccccagtgagaagtctggaatcttccatatgttttcctcttttacagtattacatataaccctagaagctgcctcagatccattacagagcaaggcaaggt

SEQ ID NO: 8695 - DNA, 120 bp, synthetic construct
  misc_feature 1..120: note = Artificially Synthesized Probe
  source 1..120: mol_type = other DNA
caaagctctctccttcatgcctataccttcccaagcctttctccacattcaccttctactccacattcttttccatctccatgcctattattaatagctaatgtaaatcaacatgtgtgt

SEQ ID NO: 8696 - DNA, 120 bp, synthetic construct
  misc_feature 1..120: note = Artificially Synthesized Probe
  source 1..120: mol_type = other DNA
gcccaaagggccaacttcccacccaaagaagaaatgatggcagtggtaatgataatgatgataaacttggccatcatttactatttatgtgtccggcattgtgctaaatgctctatacac

SEQ ID NO: 8697 - DNA, 120 bp, synthetic construct
  misc_feature 1..120: note = Artificially Synthesized Probe
  source 1..120: mol_type = other DNA
gaggactctctctgtcaccagctcccacaggacacaagctaaaacaactcttcgtttttccatttatctaaaaactccaattaaaagctttcccaattagagatcccaaaaaggatccat

SEQ ID NO: 8698 - DNA, 120 bp, synthetic construct
  misc_feature 1..120: note = Artificially Synthesized Probe
  source 1..120: mol_type = other DNA
tttaatttcccttcatactaaaacaggaaatataatgtccttccttttgtatacatccctgccaactggctcactgggggaattctctttgaaggagggggtgtgatatacaccaaagaa

SEQ ID NO: 8699 - DNA, 120 bp, synthetic construct
  misc_feature 1..120: note = Artificially Synthesized Probe
  source 1..120: mol_type = other DNA
ggtagatgataaagggtaaagacaaaacaagggtagggccatcacactgagctagaaataaaggtaatggatgaagtctgataaatctgctaagggtcaccacacatttaactctaagtt

SEQ ID NO: 8700 - DNA, 120 bp, synthetic construct
  misc_feature 1..120: note = Artificially Synthesized Probe
  source 1..120: mol_type = other DNA
cctatttacacactcattcaatatctacttatttagtgcctactccattccaaattctgtgtattcttccagttcggatactaagagggatggctgtgtaaccatcagtgtaccacagca

SEQ ID NO: 8701 - DNA, 120 bp, synthetic construct
  misc_feature 1..120: note = Artificially Synthesized Probe
  source 1..120: mol_type = other DNA
gctatataaaagttaacccaaaaattatcacagcttccaggccagcatccaagcaaggctgcccacaacattcaagcattaactcaattaaaaattatttactggaggcctatttggtgc

SEQ ID NO: 8702 - DNA, 120 bp, synthetic construct
  misc_feature 1..120: note = Artificially Synthesized Probe
  source 1..120: mol_type = other DNA
tttaaaaaggggaatgacatgatctgatttatgattttaaaagctggtcacttaggcttctgtgtgaaaaatggactgcagacaacccagagtggatactggggggcctgttaggaaaga

SEQ ID NO: 8703 - DNA, 120 bp, synthetic construct
  misc_feature 1..120: note = Artificially Synthesized Probe
  source 1..120: mol_type = other DNA
atgtatcttctgaggtgttttcaggtgaagaagagcaaagaagtgaaacaggagagggatgtaggagggagggagatctcctttttaagatgagagcaactaaagctatgctatccaata

SEQ ID NO: 8704 - DNA, 120 bp, synthetic construct
  misc_feature 1..120: note = Artificially Synthesized Probe
  source 1..120: mol_type = other DNA
cttccccagcccttagctgcatctcaatttacgaccatggcttgtattttcacataaataatagaagacatggatctattaaaaatggcagaggtaggtaggagttacaaaccagccttt

SEQ ID NO: 8705 - DNA, 120 bp, synthetic construct
  misc_feature 1..120: note = Artificially Synthesized Probe
  source 1..120: mol_type = other DNA
actttatatactcagaagcattagtcacttcgacagagtatttcaacttccctcctgagcatctactcagttgtttcaaagactgaagcctcacctaggttccttatagacttccatcat

SEQ ID NO: 8706 - DNA, 120 bp, synthetic construct
  misc_feature 1..120: note = Artificially Synthesized Probe
  source 1..120: mol_type = other DNA
gccatcaacatcctgcctgatggacttaaagtcccattcacacctggcggggactttagggctacctttactttgcagataagggaaccgaggcctggggagggtaagtgatttgcccaa

SEQ ID NO: 8707 - DNA, 120 bp, synthetic construct
  misc_feature 1..120: note = Artificially Synthesized Probe
  source 1..120: mol_type = other DNA
catcaagcttggttttatccttagagcgaggggaattaggatggcaaaagtagaacttgaagaagagcaggctctcttcgtcgcctttctacctatcaggtcctgagtttctaccaaagg

SEQ ID NO: 8708 - DNA, 120 bp, synthetic construct
  misc_feature 1..120: note = Artificially Synthesized Probe
  source 1..120: mol_type = other DNA
cgtgcctggccgagtttttcatttttttaaactacaatccacagtaagaaatatattttacactacaacctgcaacctggtacatacttcagcacatacatactatgtctataggtatat

SEQ ID NO: 8709 - DNA, 120 bp, synthetic construct
  misc_feature 1..120: note = Artificially Synthesized Probe
  source 1..120: mol_type = other DNA
atcaaataatcacacaaatatataagctacgatctgtgtgaataggagacctaatttaggttgaggaggatggtcaggaatggcctgttgaagagacatttaaaaagaggcctgatggct

SEQ ID NO: 8710 - DNA, 120 bp, synthetic construct
  misc_feature 1..120: note = Artificially Synthesized Probe
  source 1..120: mol_type = other DNA
gagactggttaagaggctctagacaaaagataagggtggagatgaagggaagtggattacagattatagatattttagaggtagactcaataagacttggtggatgggatgtgtattagg

SEQ ID NO: 8711 - DNA, 120 bp, synthetic construct
  misc_feature 1..120: note = Artificially Synthesized Probe
  source 1..120: mol_type = other DNA
tataatcaacattttaaaatttagtacagtttgaggattctcaatctgcccccaccatggaaacagcttgtgtacttcctgccagataacactttgccaatctgtatccagagccctcca

SEQ ID NO: 8712 - DNA, 120 bp, synthetic construct
  misc_feature 1..120: note = Artificially Synthesized Probe
  source 1..120: mol_type = other DNA
tggggagtcaatcatcaaacaatccaacaaccttgaggagaggactttggacctcactggctgcctcccagcagaattcaattccaagaggcaaaaatagaaatgaccagatgaatagcc

SEQ ID NO: 8713 - DNA, 120 bp, synthetic construct
  misc_feature 1..120: note = Artificially Synthesized Probe
  source 1..120: mol_type = other DNA
aatcaaggtaaatagattcagggtggtggccaaaacataacactgcccactgtcagcatatagttatacttgtttcccattggcatgcacagagtggctgttggataataggtagttgaa

SEQ ID NO: 8714 - DNA, 120 bp, synthetic construct
  misc_feature 1..120: note = Artificially Synthesized Probe
  source 1..120: mol_type = other DNA
ggaaagtgagcctgtgaggatgacaaagtggccgttagtatccaaggggccattctgttctaatgtggatcaattccccttcagcatgatttcactgaattaaatatcaactttttaaaa

SEQ ID NO: 8715 - DNA, 120 bp, synthetic construct
  misc_feature 1..120: note = Artificially Synthesized Probe
  source 1..120: mol_type = other DNA
ctatgagggttgcctctgtgacagacccctccttttagaaatttgctttcaattacatatgacttattgttctcttggcacatgccatctctccatttgcataattctccaatctactga

SEQ ID NO: 8716 - DNA, 120 bp, synthetic construct
  misc_feature 1..120: note = Artificially Synthesized Probe
  source 1..120: mol_type = other DNA
tccatcaaaccacttctaaactactttttattaaaacaagaggggtaaagctaaccaagagaaaagggagaaaacataaacttagtctagctgggacccaacatcaggctagacttgacc

SEQ ID NO: 8717 - DNA, 120 bp, synthetic construct
  misc_feature 1..120: note = Artificially Synthesized Probe
  source 1..120: mol_type = other DNA
cattccgattcaatacttctgggatggggtgtgggaatatgcatgtttaataagcacctggagtgattcttacaaaaggcaaatttgggaaagaatgaactggagtgttccattagcaaa

SEQ ID NO: 8718 - DNA, 120 bp, synthetic construct
  misc_feature 1..120: note = Artificially Synthesized Probe
  source 1..120: mol_type = other DNA
atccctatttatcttcacttcagaaagtttacagaaagcagtgtttccatgggaagtcaacaagtgttatgcagcaggaaaaggttccgtgctccataggtttgggaaatactatgctaa

SEQ ID NO: 8719 - DNA, 120 bp, synthetic construct
  misc_feature 1..120: note = Artificially Synthesized Probe
  source 1..120: mol_type = other DNA
ctgtggtgagaattaaaggcacacattgggctattatcaagcagcagagtgcattggctcctgaagagaagtgggtcctcaaagcccttttttttttttttattttccagcagataaaag

SEQ ID NO: 8720 - DNA, 120 bp, synthetic construct
  misc_feature 1..120: note = Artificially Synthesized Probe
  source 1..120: mol_type = other DNA
aaaagtgaattttactaggagcctccagcagaaaaaggagtcacccagaattgcataaaacaaaggcgggaaaatgttaagatactaatagccaagaggtagaatagagaggttcctcct

SEQ ID NO: 8721 - DNA, 120 bp, synthetic construct
  misc_feature 1..120: note = Artificially Synthesized Probe
  source 1..120: mol_type = other DNA
tttaaaaaaaaagagctcttagtgttgagagatacatgctgaaatacatacagtttgctacaaaacaatccagtgggtgtggggaagtgggtcagggtataaatggagttagtgtggcca

SEQ ID NO: 8722 - DNA, 120 bp, synthetic construct
  misc_feature 1..120: note = Artificially Synthesized Probe
  source 1..120: mol_type = other DNA
gttccctatccagaggcatctttccagaaattaaaaattcctctttctttacccagatggtagtattctatacacactgttctgcagttggtcttacttcacttatctcagagatcaccc

SEQ ID NO: 8723 - DNA, 120 bp, synthetic construct
  misc_feature 1..120: note = Artificially Synthesized Probe
  source 1..120: mol_type = other DNA
gtgggtaggttcacatacacctactgaccaaggaacactcctcattcacttctgcattttagagatccaggaactaaagctacaataaatgtttacttaaagagacgaagagacatctaa

SEQ ID NO: 8724 - DNA, 120 bp, synthetic construct
  misc_feature 1..120: note = Artificially Synthesized Probe
  source 1..120: mol_type = other DNA
ccatacaactcagtaaatgacagcactgctcttcttctactgaataatctatttcaaggatgggcagtggagactctatagttgtgtttgctattattacctgtgccatagtagaatcct

SEQ ID NO: 8725 - DNA, 120 bp, synthetic construct
  misc_feature 1..120: note = Artificially Synthesized Probe
  source 1..120: mol_type = other DNA
agaagctgttgaggaggcagagctgctaagggtatcatttttttttctactttgacaccattttcaaataaattttagtaattgtgtcactatccagcctggatggatagccagcttcac

SEQ ID NO: 8726 - DNA, 120 bp, synthetic construct
  misc_feature 1..120: note = Artificially Synthesized Probe
  source 1..120: mol_type = other DNA
caaattatgttcttaaagttttacaatagaatgcaactttatgctggtgtgtctgttgcaggccatggccacgtcggccatggaaagcacccgagtggaaataaatagaaaattcttctc

SEQ ID NO: 8727 - DNA, 120 bp, synthetic construct
  misc_feature 1..120: note = Artificially Synthesized Probe
  source 1..120: mol_type = other DNA
ctggctttaaatctcatttctcctgcttgcttatcataactgcccgtcatctgtaagcctggattgtaagagagggataatatgtagccaggtaggttgttgtgagaatgagtaaatata

SEQ ID NO: 8728 - DNA, 120 bp, synthetic construct
  misc_feature 1..120: note = Artificially Synthesized Probe
  source 1..120: mol_type = other DNA
acgacaatgtctaattagaatgaatatgctctaatctgaggagagagacatatttccctaggtaagggtcacagttcatattccaaatatgactgggatgatattgcacaggggctccct

SEQ ID NO: 8729 - DNA, 120 bp, synthetic construct
  misc_feature 1..120: note = Artificially Synthesized Probe
  source 1..120: mol_type = other DNA
atttgcaacaccatagatggaacaggaggtcattacattaagtgaaataagccaggcacagaaagacaaacattgcatgttctcacttacttgtaggatctaaaaatcacaacaattgaa

SEQ ID NO: 8730 - DNA, 120 bp, synthetic construct
  misc_feature 1..120: note = Artificially Synthesized Probe
  source 1..120: mol_type = other DNA
taggattacaggcatgaggccacactattttatatactgcatatattaccatcataactatcttctggttgactctacaattagtacgattagatcttaagatttgtgtgtggttttttt

SEQ ID NO: 8731 - DNA, 120 bp, synthetic construct
  misc_feature 1..120: note = Artificially Synthesized Probe
  source 1..120: mol_type = other DNA
cacaattttcagagcctcaaatcagttttagagctggaggagaccttagaaattggaaagtctaagtccttcactcttatgttaataaacatctcttcactgcctgatgtgtgtcagcct

SEQ ID NO: 8732 - DNA, 120 bp, synthetic construct
  misc_feature 1..120: note = Artificially Synthesized Probe
  source 1..120: mol_type = other DNA
agagtggggagggcactgcaaacagaagggacagcatgtgtacaacatagtacgaagtcttccaataactttaaacagtttgatatgggtatgcatttagttcatttaggcagtgatatg

SEQ ID NO: 8733 - DNA, 120 bp, synthetic construct
  misc_feature 1..120: note = Artificially Synthesized Probe
  source 1..120: mol_type = other DNA
agagttgaatctcgatcagctgcacattccaaactaaggagcttggattgtatcctagaagaaattaggaatcactgaaaggtaaatggatccaggcctagatataatcaagctactctg

SEQ ID NO: 8734 - DNA, 120 bp, synthetic construct
  misc_feature 1..120: note = Artificially Synthesized Probe
  source 1..120: mol_type = other DNA
gagataaaagcatcaaatactgcacagatatgaaatatgccgacaattttagagtcttgaatttggccctgggacaacttttccctagtgaactttgccagggtggttttattagagtgg

SEQ ID NO: 8735 - DNA, 120 bp, synthetic construct
  misc_feature 1..120: note = Artificially Synthesized Probe
  source 1..120: mol_type = other DNA
aaagcagagctcttttgatgccagcattccccaggactttctgctggtgtgttttgcctgtagatcattgggtcaaactaaggtttaaagttatgagtaattgtgcactgctattgggaa

SEQ ID NO: 8736 - DNA, 120 bp, synthetic construct
  misc_feature 1..120: note = Artificially Synthesized Probe
  source 1..120: mol_type = other DNA
ttgaaaatttgaaaatctgctggaatacctagagttcttcacagaaactctcagaggcctagaggcccctaagtgtcacacacaaatttacaggaaagaaaataccagttgagtatccct

SEQ ID NO: 8737 - DNA, 120 bp, synthetic construct
  misc_feature 1..120: note = Artificially Synthesized Probe
  source 1..120: mol_type = other DNA
atgtatttgggctctgagttcatttttcccttaaagccactttaccttatggatattccttttcagccccaatttcccaggcttaaagaattggagcctttcctgatttctttcttttct

SEQ ID NO: 8738 - DNA, 120 bp, synthetic construct
  misc_feature 1..120: note = Artificially Synthesized Probe
  source 1..120: mol_type = other DNA
caccgcacccggccttttattcaattattgtaaccttggttgttacacctcttacctttactacccaacaccaagactatcctattccctcatccatactatcctatatacttttgctag

SEQ ID NO: 8739 - DNA, 120 bp, synthetic construct
  misc_feature 1..120: note = Artificially Synthesized Probe
  source 1..120: mol_type = other DNA
aatctgacatcaaagtttccaagttggttgtattaacaaaaacgggtgcatagcctgggaagtaatttgggagggaagaggccaagctttgtcgggatattaagtgtttatacatttgct

SEQ ID NO: 8740 - DNA, 120 bp, synthetic construct
  misc_feature 1..120: note = Artificially Synthesized Probe
  source 1..120: mol_type = other DNA
ccaacaacaacagtccgagggaaaaaaagtatgctcagcaggcctgcactccacctttatgcctgccccccaccccacctcccgacacacatcttgggaggacacacagcaaaacaaaga

SEQ ID NO: 8741 - DNA, 120 bp, synthetic construct
  misc_feature 1..120: note = Artificially Synthesized Probe
  source 1..120: mol_type = other DNA
gagacagaaagaattacggcgtgaataggcagtttcatgttgttgggagaacttagcagaaatcggtaccttggtcattacaaagaagcacgttcaaaggaaaaaaaagacaattgcaca

SEQ ID NO: 8742 - DNA, 120 bp, synthetic construct
  misc_feature 1..120: note = Artificially Synthesized Probe
  source 1..120: mol_type = other DNA
aaaagtttcttcagggtaattaaactataaagcaattgagaagtgcaaaagttgagcgcccccactcccaccaccctctcttcactaccccccataaaacagtaaaaggggaaaaaaagg

SEQ ID NO: 8743 - DNA, 120 bp, synthetic construct
  misc_feature 1..120: note = Artificially Synthesized Probe
  source 1..120: mol_type = other DNA
gaagaagggatgccagttcataaacagttttcggtgatttacttccctgcaaatgagttgtttcatattttgcactgtcttttcatgatcatttgcatccattagagaccccgcatccta

SEQ ID NO: 8744 - DNA, 120 bp, synthetic construct
  misc_feature 1..120: note = Artificially Synthesized Probe
  source 1..120: mol_type = other DNA
attactatccccctactacagttcctaaggcaccattcaagactgctgcccgcttctaatcttgtatccttacaatccatcctccccgcagacattatcaggacactttctttttctttt

SEQ ID NO: 8745 - DNA, 120 bp, synthetic construct
  misc_feature 1..120: note = Artificially Synthesized Probe
  source 1..120: mol_type = other DNA
ttaggctgggcaaggtggctcacgcctgtaatcccagcactctgggaggctgaggtgagtgaatcacccgaggtcaggagttcgagaccagcctggccaacatggtgaaaccccatctct

SEQ ID NO: 8746 - DNA, 120 bp, synthetic construct
  misc_feature 1..120: note = Artificially Synthesized Probe
  source 1..120: mol_type = other DNA
tcagccacaaaaaggaacgaagcactgacacacaccccacgcagatgaaccttgagcacatgctatgggaaagaagctgctcacaataggcctattttgtgattcctttttttttttttc

SEQ ID NO: 8747 - DNA, 120 bp, synthetic construct
  misc_feature 1..120: note = Artificially Synthesized Probe
  source 1..120: mol_type = other DNA
tgacatatgtcaataacactgctaaaaccaaaccaaaaaaccctccagtggtttctggtcacaaaagaacaaaatccagattcctgaataatagctcacaagaggaactggctcttgctt

SEQ ID NO: 8748 - DNA, 120 bp, synthetic construct
  misc_feature 1..120: note = Artificially Synthesized Probe
  source 1..120: mol_type = other DNA
gtttgaacttcctgcactgactatctctgaccgtgcttttattgtttatttgtttgtcatctgtctcctcctcccacatagaccctagaataaatgtcctttgccagcagggacttggtc

SEQ ID NO: 8749 - DNA, 120 bp, synthetic construct
  misc_feature 1..120: note = Artificially Synthesized Probe
  source 1..120: mol_type = other DNA
tgtagtcccagctacttgggaggctgaggcaggagaatggcgtaaacccgggaggcagagcttgcagtgagccgagatcgcgtcactgcaatctagcctgagcaacagagcgagactctg

SEQ ID NO: 8750 - DNA, 120 bp, synthetic construct
  misc_feature 1..120: note = Artificially Synthesized Probe
  source 1..120: mol_type = other DNA
ccccaatttaaatgtgcaatgccattcacccttgctgtcccaattccctgctttactttcttcctgggtgctctctaccatctagcatttatattttacttattttgtttattgctccac

SEQ ID NO: 8751 - DNA, 120 bp, synthetic construct
  misc_feature 1..120: note = Artificially Synthesized Probe
  source 1..120: mol_type = other DNA
ccggccctaatttcctgatttttaaggtaaggcaactaaagtccagagacagcactgaatctcccagagacacagagcaagccactggcagaaccgggaccatcacccaggcttcctgat

SEQ ID NO: 8752 - DNA, 120 bp, synthetic construct
  misc_feature 1..120: note = Artificially Synthesized Probe
  source 1..120: mol_type = other DNA
acgcccagcctagatttgtacctttatgatgacatttttccttcaggtggaagtgtcttggaacgaaatacatacaggacggcaaggctcccacagatggaagtaaagtgctttgagaaa

SEQ ID NO: 8753 - DNA, 120 bp, synthetic construct
  misc_feature 1..120: note = Artificially Synthesized Probe
  source 1..120: mol_type = other DNA
cccggtctattttattttatttgtttattggagacaaaatcttgctctgtttcccaggctggagtctcactctgtcgcccaacctccacctcccgggttcaagcgattctcctgcctcag

SEQ ID NO: 8754 - DNA, 120 bp, synthetic construct
  misc_feature 1..120: note = Artificially Synthesized Probe
  source 1..120: mol_type = other DNA
catagcgctaacgtagccccgggttccaacctgcatctgaccctaaccagatgcgtgatcttgggtaagtcacttctcctttctgaaatgaattgcaatctgtcacttgtttgagagttt

SEQ ID NO: 8755 - DNA, 120 bp, synthetic construct
  misc_feature 1..120: note = Artificially Synthesized Probe
  source 1..120: mol_type = other DNA
attggcacgatctcggcttactgcaacctccatctcccgggttcaagccattctcctgcctcagcctcctgagtagctgggattataggcgtgtaccaccatgccgggcccacctcaaca

SEQ ID NO: 8756 - DNA, 120 bp, synthetic construct
  misc_feature 1..120: note = Artificially Synthesized Probe
  source 1..120: mol_type = other DNA
cgcctgtcatgcccagctaatttttgtatatttagtaaagacagggttttgccacgttggccaggctggtctcgaactcctgaactcaggtgatccacctgcctcggcctcacaaagtgc

SEQ ID NO: 8757 - DNA, 120 bp, synthetic construct
  misc_feature 1..120: note = Artificially Synthesized Probe
  source 1..120: mol_type = other DNA
tatgttgaatttaatctcaaggaggtaagagctatgattgtctctgtattacagtaacacgggtcctaaacagaattggtcatctttgctgagtgtctaatgtgccaggcactgttctaa

SEQ ID NO: 8758 - DNA, 120 bp, synthetic construct
  misc_feature 1..120: note = Artificially Synthesized Probe
  source 1..120: mol_type = other DNA
tcaggagatcgagaccatcctggataacacggtgaaacctctactaaaaatacaaaatttagccgggcgtggtggcgggcgcctgtagtcccagctactcgggaggctgaggcaggagaa

SEQ ID NO: 8759 - DNA, 120 bp, synthetic construct
  misc_feature 1..120: note = Artificially Synthesized Probe
  source 1..120: mol_type = other DNA
ttttttgaggaaaacaaaaagatactgctgaggcacaggaaagttaagcgcatgtcccagaccacataggtgttccagttccagtctttgctcatttaaacagagtcatagagaggtaca

SEQ ID NO: 8760 - DNA, 120 bp, synthetic construct
  misc_feature 1..120: note = Artificially Synthesized Probe
  source 1..120: mol_type = other DNA
tttagcaaaactggactgcatgacagtgcttatatcatgcaccaggctctgttctagattctaacctcgttcatcctcacagcaacattatgcaaaagtactattatcatctccattctc

SEQ ID NO: 8761 - DNA, 120 bp, synthetic construct
  misc_feature 1..120: note = Artificially Synthesized Probe
  source 1..120: mol_type = other DNA
aaaaaaaaaaaaaaggaaatggtaattctaatttcctcctttgacaacccagctgtggttagccccatctggcagctgtggaaactgaggctcagtgagagagaggacacgggggaaggc

SEQ ID NO: 8762 - DNA, 120 bp, synthetic construct
  misc_feature 1..120: note = Artificially Synthesized Probe
  source 1..120: mol_type = other DNA
cctcagcctgcctgccctattgcctcaggggcagagaccctcctgggaagatagactgctgcctgcacattttgctgacagataactttcccgctggtgtaattaggattcagagtatct

SEQ ID NO: 8763 - DNA, 120 bp, synthetic construct
  misc_feature 1..120: note = Artificially Synthesized Probe
  source 1..120: mol_type = other DNA
gtttcacacagggaaatagacttatgttgcagcaatatggatttaagttagaccttagaaagaacttccagatgggattaaaagattggcaggcatttgagaaggggtacaggttttgtt

SEQ ID NO: 8764 - DNA, 120 bp, synthetic construct
  misc_feature 1..120: note = Artificially Synthesized Probe
  source 1..120: mol_type = other DNA
aaggtttgcatcctggctctgttacatacagtgtgacttgggaaaatcaccatatccctttgagcctcatttgtaaaacaggaatgagaatagtgtggtggggattaaaggagataagca

SEQ ID NO: 8765 - DNA, 120 bp, synthetic construct
  misc_feature 1..120: note = Artificially Synthesized Probe
  source 1..120: mol_type = other DNA
aacatcttgtcactttgattgctgtggccaactcaaacccccactcctggagcctgccctggcttatatgctaagcacaaaggccaatgtttactaactcaaggaagtgtgtcaacagca

SEQ ID NO: 8766 - DNA, 120 bp, synthetic construct
  misc_feature 1..120: note = Artificially Synthesized Probe
  source 1..120: mol_type = other DNA
gggtcacctgaggtcaggagtttgagaccagcctgaccaatatggtgaaacaccgtctctactaaaaatacaaaaattagctgggcatggtggcaggcacctgtagtcccatctacttgg

SEQ ID NO: 8767 - DNA, 120 bp, synthetic construct
  misc_feature 1..120: note = Artificially Synthesized Probe
  source 1..120: mol_type = other DNA
aaaaaatgctgaaacctgatgctgtctgctgtgagctgtttcagtgtcagcatgaattctgccaaactaaaaaaatgggcaaaattgctccactcaacacacaggactttaactctagga

SEQ ID NO: 8768 - DNA, 120 bp, synthetic construct
  misc_feature 1..120: note = Artificially Synthesized Probe
  source 1..120: mol_type = other DNA
tacatcacagggaccgtgatccttccacgcactccttcagactggactctcaaaactccccaccaaatgtttcactgcagttgatcgttgtgtctgactttctcaattcgttgcaatttg

SEQ ID NO: 8769 - DNA, 120 bp, synthetic construct
  misc_feature 1..120: note = Artificially Synthesized Probe
  source 1..120: mol_type = other DNA
cccggggctcttcataagctcggcccgagggcgagcagagaaagcgagtgtccctctcgcgccccaggccggtgtacccccgcactccgcgccccggcctagaagctctctctccccgct

SEQ ID NO: 8770 - DNA, 120 bp, synthetic construct
  misc_feature 1..120: note = Artificially Synthesized Probe
  source 1..120: mol_type = other DNA
tgagagtttatgccattcccttccccaagagagcagtctcaggggacttcggaggccttgagaagggaggatcgttaccccttgaactctgcctgacatccccacctaagatacccatct

SEQ ID NO: 8771 - DNA, 120 bp, synthetic construct
  misc_feature 1..120: note = Artificially Synthesized Probe
  source 1..120: mol_type = other DNA
aggaaggatgctttctctaacttgggctcctccaatctctggttgcaaagctggggttgggggagagaggaccacccaacctgccctgtacaagcatcagtaagactccaagtttcccag

SEQ ID NO: 8772 - DNA, 120 bp, synthetic construct
  misc_feature 1..120: note = Artificially Synthesized Probe
  source 1..120: mol_type = other DNA
ctcttcgcataccaaagacagaaattaagcctccaagagtggtaactgacctcggtcacacttggtgggtgtgggaaaggattcaaatgtaggtctgttctcttcttcatctatcatggt

SEQ ID NO: 8773 - DNA, 120 bp, synthetic construct
  misc_feature 1..120: note = Artificially Synthesized Probe
  source 1..120: mol_type = other DNA
cctgaaatcaagaaagcagaaccacactggggcctgggactgtcccagacctgacctgtgtgaatttgggaagcaacttagcattactaggccttagtttcctcttctgtaagccacatt

SEQ ID NO: 8774 - DNA, 120 bp, synthetic construct
  misc_feature 1..120: note = Artificially Synthesized Probe
  source 1..120: mol_type = other DNA
cctcgtcaacaacgcaggccacaatgaagtagttgctgatgcggagctgtctccagtggccactttccgtagctgcatggaggtgaatttctttggcgcgctcgagctgaccaagggcct

SEQ ID NO: 8775 - DNA, 120 bp, synthetic construct
  misc_feature 1..120: note = Artificially Synthesized Probe
  source 1..120: mol_type = other DNA
gcagatagtgcctctgcaaactaaggagtgactaggtgggttggggaccccctcaggattgtttctcggcaccagtgcctcagtgctgcaattgagggctaaatcccaagtgtctcttga

SEQ ID NO: 8776 - DNA, 120 bp, synthetic construct
  misc_feature 1..120: note = Artificially Synthesized Probe
  source 1..120: mol_type = other DNA
gaattgtctatgaccttgccaagtagatgcatatggacatggaatgaatggtgtctgctgtggttctaactccttatgccactattccagtctgtaagtatgcatgtgtgtgcagggaat

SEQ ID NO: 8777 - DNA, 120 bp, synthetic construct
  misc_feature 1..120: note = Artificially Synthesized Probe
  source 1..120: mol_type = other DNA
cagaggcaaactgcttcctcctctagcctatgaattccatgcagacagggactacatcattccaataaatgttgaattgcctgtgcctggcacagaacttggcaccaagtgcacactcaa

SEQ ID NO: 8778 - DNA, 120 bp, synthetic construct
  misc_feature 1..120: note = Artificially Synthesized Probe
  source 1..120: mol_type = other DNA
caaaaaaaaaaaaacgaagaaaatgtcccaaagctaaagtaccccaaggctggacctaatatctgacaaggcaggttgacaaggtgggcaggttacagaagactcaccaggggcagaaag

SEQ ID NO: 8779 - DNA, 120 bp, synthetic construct
  misc_feature 1..120: note = Artificially Synthesized Probe
  source 1..120: mol_type = other DNA
ggaggcagagctgagaacaggttgcaaagtctccgattcccccactgctcagggctggggggctgagcccttgcgcattaatccaccgctgctctggtttctgttaaacattgacctgca

SEQ ID NO: 8780 - DNA, 120 bp, synthetic construct
  misc_feature 1..120: note = Artificially Synthesized Probe
  source 1..120: mol_type = other DNA
ttcgtgtcttgtgctcagggagtgttctttgtccacgtggctgcatctgacattgatgggccctaggcactttactttcgtggatcttttcctccttaaaaaaaatattttaaaatatgg

SEQ ID NO: 8781 - DNA, 120 bp, synthetic construct
  misc_feature 1..120: note = Artificially Synthesized Probe
  source 1..120: mol_type = other DNA
gtcttgtgagcatgagatcctgtgtttgtgtgaccatgcatatgagctgtcagtgagcacatgcttgttcattcatttgtggtttcacttgttcaatatgtgaaaggaaaatatcttggg

SEQ ID NO: 8782 - DNA, 120 bp, synthetic construct
  misc_feature 1..120: note = Artificially Synthesized Probe
  source 1..120: mol_type = other DNA
ctaattgcctatctgtgcttggtaccagcaggagctaactttatggctcaaaccaataggacaatttgctgaggtctgggagcaccccctccagagaatccttgatttctcaattggttg

SEQ ID NO: 8783 - DNA, 120 bp, synthetic construct
  misc_feature 1..120: note = Artificially Synthesized Probe
  source 1..120: mol_type = other DNA
actgccctctagcctgggtgacagagcaagactctgctaaaaaaaaaaaaaaataagccgggtgcagtggctcacacataatcctagcactttgggagactgaggcaggaggatcatttg

SEQ ID NO: 8784 - DNA, 120 bp, synthetic construct
  misc_feature 1..120: note = Artificially Synthesized Probe
  source 1..120: mol_type = other DNA
tttcaccatgttagccaggatggtcttgatctcctgacctcgtgatccacctgcctcggcctccagaagtgctgagattacaggtgtgagccaccgtgcccggccaaaaacccaaaaact

SEQ ID NO: 8785 - DNA, 120 bp, synthetic construct
  misc_feature 1..120: note = Artificially Synthesized Probe
  source 1..120: mol_type = other DNA
tgaactcctgacctcgtgatctgcctgcctcggcctcccaaaatgctgggattacaggcgtgagccaccgtgcctggccaacagcttttaacaatttagtacagtcctatgaacaaaatt

SEQ ID NO: 8786 - DNA, 120 bp, synthetic construct
  misc_feature 1..120: note = Artificially Synthesized Probe
  source 1..120: mol_type = other DNA
cagggctttaaaaagtcttacctgagattcctcttatgggacaaaataaattattcttgctgcactgtatacaaatatttaggccaagtataataagcaaacaagtcataccatgatttg

SEQ ID NO: 8787 - DNA, 120 bp, synthetic construct
  misc_feature 1..120: note = Artificially Synthesized Probe
  source 1..120: mol_type = other DNA
aaccctgagtggacacagcacatgtttcagagagcacagggttgggggtaaggtcacagatcaacaggatcccaaggcagaagaatttttcttagtatagaacaaaatgaaaagtctccc

SEQ ID NO: 8788 - DNA, 120 bp, synthetic construct
  misc_feature 1..120: note = Artificially Synthesized Probe
  source 1..120: mol_type = other DNA
ggggggctgacccccccacctccctcccggacggggcggctggccgggcggggggctgatcccccctcccctcacggatggggtggctggccggccagaggggctcctcacttcccagta

SEQ ID NO: 8789 - DNA, 120 bp, synthetic construct
  misc_feature 1..120: note = Artificially Synthesized Probe
  source 1..120: mol_type = other DNA
tgagtacttaaaagagattagaagaaatttgaactggaagagagactctcctgtaaggagtttagtcatatggccacaaaggaatgaattttgccaacacattgagggtccttggaagca

SEQ ID NO: 8790 - DNA, 120 bp, synthetic construct
  misc_feature 1..120: note = Artificially Synthesized Probe
  source 1..120: mol_type = other DNA
tgacataacttgtagcaagaggctgctgatgacattgtaagaaattgtaccaaaatcttgaactgtgcaaagcagtttctccaacagcaatgtaattgtagctggagtttcagggcaaca

SEQ ID NO: 8791 - DNA, 120 bp, synthetic construct
  misc_feature 1..120: note = Artificially Synthesized Probe
  source 1..120: mol_type = other DNA
tttggtgaatcagcttctcgtgaggtccttcagatcagctgatgtcagttgtttcactggtacacaggaccaagaataaatatctcaaacggaaaacttaacgtttcctaatgttcaagt

SEQ ID NO: 8792 - DNA, 120 bp, synthetic construct
  misc_feature 1..120: note = Artificially Synthesized Probe
  source 1..120: mol_type = other DNA
ttcagtaagccctccaggggatgctgatgtatactaatatttcagaagcactgactttatacagatgctgtatatttgcaagtcatcactcttgctcattgatcttagcatcctctcaga

SEQ ID NO: 8793 - DNA, 120 bp, synthetic construct
  misc_feature 1..120: note = Artificially Synthesized Probe
  source 1..120: mol_type = other DNA
gactttttgattcagtcgatctgacatggggactgagagtttgacttttaataaattcccaggtgatagtactgctgctggcccagggaccatttttaagacccacttctttacggcatt

SEQ ID NO: 8794 - DNA, 120 bp, synthetic construct
  misc_feature 1..120: note = Artificially Synthesized Probe
  source 1..120: mol_type = other DNA
tgttttctctattctttttcaggctaagacaatgcatagcttttggttgatacaggtaaccctggttaccactaaagggtgatccccttcagataataaacccatttaactccagtctca

SEQ ID NO: 8795 - DNA, 120 bp, synthetic construct
  misc_feature 1..120: note = Artificially Synthesized Probe
  source 1..120: mol_type = other DNA
tttgctacaaagaaacaaaggcaaagagatgttaataatgtgtactgagacacacagccacattacgttaatagggcagtcatggatgctgatcccctatattcggttctttccttccat

SEQ ID NO: 8796 - DNA, 120 bp, synthetic construct
  misc_feature 1..120: note = Artificially Synthesized Probe
  source 1..120: mol_type = other DNA
aataagcttagagagcttaagcaaattattcatacaaagagtaagtggtgaagccaggactcaaacccatgtctgtttgattccacagccgataccatgactactaagctatactgtctc

SEQ ID NO: 8797 - DNA, 120 bp, synthetic construct
  misc_feature 1..120: note = Artificially Synthesized Probe
  source 1..120: mol_type = other DNA
aaacaattcgaatgtattattagtagaagattagttaaacaaattacagttttctcatttcagtggaatattgtgtagccactagaaaggatgaggtagagcggggcctggtgcggtggc

SEQ ID NO: 8798 - DNA, 120 bp, synthetic construct
  misc_feature 1..120: note = Artificially Synthesized Probe
  source 1..120: mol_type = other DNA
aacaaaaaagaatatagtataagaatttagataattttaccacaatttaaaaactagataaaatagacatgtgtataaacaaatataacctataaaaacagacctcactttgggaggcca

SEQ ID NO: 8799 - DNA, 120 bp, synthetic construct
  misc_feature 1..120: note = Artificially Synthesized Probe
  source 1..120: mol_type = other DNA
ttggaaatctcaatattgtaaagatattaattctccttctgatagacaggcccaagatggtcctcaataatccccacctctggggattcccagcctcgtgtagtcttctcccatatgata

SEQ ID NO: 8800 - DNA, 120 bp, synthetic construct
  misc_feature 1..120: note = Artificially Synthesized Probe
  source 1..120: mol_type = other DNA
gtaaagggccaagaatagctaagatactccagcagaacaacaatataagaggttactaagtctcaacataaagctggaataattgcttgctttaccagacatcaaaccttactctaagta

SEQ ID NO: 8801 - DNA, 120 bp, synthetic construct
  misc_feature 1..120: note = Artificially Synthesized Probe
  source 1..120: mol_type = other DNA
tggaggaatatttcgggctccagtttatagttaattgcaaaaactgttgcgataagattggacaatatggggcagtataggccatttgaatgcacaaaaccaagtgactgaagctccttt

SEQ ID NO: 8802 - DNA, 120 bp, synthetic construct
  misc_feature 1..120: note = Artificially Synthesized Probe
  source 1..120: mol_type = other DNA
agtgagatcctgtctcaatcccctctccacccccttctcttaaaatctatctcatctatatgctgtttataaaagacacatttaaattataaggtcacagaaaggttgaaagtatgacaa

SEQ ID NO: 8803 - DNA, 120 bp, synthetic construct
  misc_feature 1..120: note = Artificially Synthesized Probe
  source 1..120: mol_type = other DNA
caagagcagaaatcaagtaaccagaaagcaagcatacaatagagtcacaatggagacaaaagatgcattttggaaagaaacctctggtaagactaagaaacagagagaaggcacaataac

SEQ ID NO: 8804 - DNA, 120 bp, synthetic construct
  misc_feature 1..120: note = Artificially Synthesized Probe
  source 1..120: mol_type = other DNA
gaaaaacagaagagagttgatagaatctggacagtgagagtttggagtgataaccagataaaaagactccacagaaagttcctctccctgccagttcacaattctataattccagccatg

SEQ ID NO: 8805 - DNA, 120 bp, synthetic construct
  misc_feature 1..120: note = Artificially Synthesized Probe
  source 1..120: mol_type = other DNA
tggttttgatgatgcctgaagggatgaccctgaaactcacattgtagtacaagaactcatttgtcacctcgtttcggaagatcacctgcattcacggggagagagggaggaaggagggaa

SEQ ID NO: 8806 - DNA, 120 bp, synthetic construct
  misc_feature 1..120: note = Artificially Synthesized Probe
  source 1..120: mol_type = other DNA
cttgtgctgctcacctctttaagttcttttccctggtgactgataatgttcagcatcttctcgtgtttttattggtcattcacatagctgcttttatgcaatagggtctattcaagtggt

SEQ ID NO: 8807 - DNA, 120 bp, synthetic construct
  misc_feature 1..120: note = Artificially Synthesized Probe
  source 1..120: mol_type = other DNA
accgtgccgggcctaaagtgactgtttatatgtttggcccgaagtctgcttccttgctagttattttccacttgtcccttttatttttcatttttctgttgttactttcctgctttcgtt

SEQ ID NO: 8808 - DNA, 120 bp, synthetic construct
  misc_feature 1..120: note = Artificially Synthesized Probe
  source 1..120: mol_type = other DNA
tagtggataaagaatttttagatggactgtttcctttcctttcatcgctttacagatagcttccattatttcctaggtgaagccagaactctaggatagccattgttatcgctgtccctc

SEQ ID NO: 8809 - DNA, 120 bp, synthetic construct
  misc_feature 1..120: note = Artificially Synthesized Probe
  source 1..120: mol_type = other DNA
ttaattgataaagcagcagcaggatttgagcggactgactccgattttgaaagaagttatattgtgggtaaaatgctttcaaacagcatcacatgttacagagtaatttttcatgaaagg

SEQ ID NO: 8810 - DNA, 120 bp, synthetic construct
  misc_feature 1..120: note = Artificially Synthesized Probe
  source 1..120: mol_type = other DNA
taagtctttcttctggcttttctagtattttagctgggttctcaggattttaatgaggtattaatgcaatctctttcctttggctgggccagacctctaatgttccccagcactgattaa

SEQ ID NO: 8811 - DNA, 120 bp, synthetic construct
  misc_feature 1..120: note = Artificially Synthesized Probe
  source 1..120: mol_type = other DNA
cctactcttctctctgaatgagaaaccttctcttatttcccccattcaattcctccagaatgaggaaatgcttctcattgccttattttattcttccccttgctattttctatgttcagg

SEQ ID NO: 8812 - DNA, 120 bp, synthetic construct
  misc_feature 1..120: note = Artificially Synthesized Probe
  source 1..120: mol_type = other DNA
catcctctccagcccttggtaccatgaatcgactttctgtttctgtagattggcttattcttcaaatttcatacacccggagtcatacaatatgtgaatggcttctttcacctatatttc

SEQ ID NO: 8813 - DNA, 120 bp, synthetic construct
  misc_feature 1..120: note = Artificially Synthesized Probe
  source 1..120: mol_type = other DNA
ttgttttgaggttctcttaaaatcttgtctgtctgtgaatgctgatctgatgagatgtgattggagcatcctattcagttattgtagaaaaggagatctcacactgctggatgcgtcttg

SEQ ID NO: 8814 - DNA, 120 bp, synthetic construct
  misc_feature 1..120: note = Artificially Synthesized Probe
  source 1..120: mol_type = other DNA
ctgagtgagtggcctgtgtgttacaggcattaatccttgcaatatctgtaggaggtattaatacatatcactatcatgtccacatcactaaatacaggccaagagaaggaagataagatg

SEQ ID NO: 8815 - DNA, 120 bp, synthetic construct
  misc_feature 1..120: note = Artificially Synthesized Probe
  source 1..120: mol_type = other DNA
gccacacagcattctttactaggtacttattggacatgtagagacccaggattaatggaggataatggaggctctggaaagaaacataatacttttgaagacatcttggtgatatagttc

SEQ ID NO: 8816 - DNA, 120 bp, synthetic construct
  misc_feature 1..120: note = Artificially Synthesized Probe
  source 1..120: mol_type = other DNA
cccagccccaaagtgtcttttaacctcattcacatagtgccaccttcaactatgccaggaaaccaatgggggtggggggacctcagtctacctggtgcttgcggttctccaagttcatgg

SEQ ID NO: 8817 - DNA, 120 bp, synthetic construct
  misc_feature 1..120: note = Artificially Synthesized Probe
  source 1..120: mol_type = other DNA
gttgaaaaaggaggacttacgagtattttgagtagagtgacctgatcggatctatgctctaacagaactgctctagatgcttagaggtgacagaggaagagagattaactagaagacact

SEQ ID NO: 8818 - DNA, 120 bp, synthetic construct
  misc_feature 1..120: note = Artificially Synthesized Probe
  source 1..120: mol_type = other DNA
aaggaagtgtttgcaggaggaggaacgggtttatggtgtcaaatgctccctatagttaaagaaagaactggctattggattggtattggcataaagatggtcgaatagatcaatagatga

SEQ ID NO: 8819 - DNA, 120 bp, synthetic construct
  misc_feature 1..120: note = Artificially Synthesized Probe
  source 1..120: mol_type = other DNA
ctaggtaacacagctgatggttcagttaggttcccaggaacaaggctagcagacggatataccaaggccatttttttttaaaccatagaaaaggagaaaggtgttaacgctttaatcata

SEQ ID NO: 8820 - DNA, 120 bp, synthetic construct
  misc_feature 1..120: note = Artificially Synthesized Probe
  source 1..120: mol_type = other DNA
tgggttggtagcagtcttggtctcatagaactgtagttggattaaatgatgtgtgccatgtcaaggcaggaaacaggcatggactaaatatcttctgttatctcaactgtagtaatcata

SEQ ID NO: 8821 - DNA, 120 bp, synthetic construct
  misc_feature 1..120: note = Artificially Synthesized Probe
  source 1..120: mol_type = other DNA
ctttcctgaccctttcctaacttattttgtgtacttccttctttcttcctcctccctgatacaggaaatagtaatgggaaataacaaacagttagagctctggcacttctcaaggagtct

SEQ ID NO: 8822 - DNA, 120 bp, synthetic construct
  misc_feature 1..120: note = Artificially Synthesized Probe
  source 1..120: mol_type = other DNA
agcacagagtcatgcatgcacaaaggcttaaggagaaacacctgaaatgaacgaaaatagagaactgggctgtctacacaacggagatgtaaataaacaaatgacaatgaatgacatgga

SEQ ID NO: 8823 - DNA, 120 bp, synthetic construct
  misc_feature 1..120: note = Artificially Synthesized Probe
  source 1..120: mol_type = other DNA
tcccaccagtcatgagctcttggatgtctgagaacatgtgtaagtcacttgtgcatcttcccaaaatatccaatacataatgggtgctaaatgaacaagtgaaagaccaataggaaaatg

SEQ ID NO: 8824 - DNA, 120 bp, synthetic construct
  misc_feature 1..120: note = Artificially Synthesized Probe
  source 1..120: mol_type = other DNA
cctttgatacagtaaagtttggtattgaataagatctatgattcagtgagtctgatctggtgatttgcccctttctgttattaggaacatcatctcagtgggactcgctgacctacaaca

SEQ ID NO: 8825 - DNA, 120 bp, synthetic construct
  misc_feature 1..120: note = Artificially Synthesized Probe
  source 1..120: mol_type = other DNA
ttctcgatttcttgataatgcatctcatggttttctacacgagggttttgtaccctctcataagaaggaagtgcttccagaagtaattaggtaacaaggcacagtagggaggagtatatg

SEQ ID NO: 8826 - DNA, 120 bp, synthetic construct
  misc_feature 1..120: note = Artificially Synthesized Probe
  source 1..120: mol_type = other DNA
agctataggccaccatattggacaatgcaaaaatacaacattttcatcatgatggaaagttctctaaagtactgatagatagctttgagtaaacacaggtctttgggccagcccttggag

SEQ ID NO: 8827 - DNA, 120 bp, synthetic construct
  misc_feature 1..120: note = Artificially Synthesized Probe
  source 1..120: mol_type = other DNA
aggtgcaaatgcttcattttacaccttcctttgaagctcaggatggccatcagacatagttccagtcattgagatgtaaacagaagaggacaagagggtgttctatcttgaataaagagg

SEQ ID NO: 8828 - DNA, 120 bp, synthetic construct
  misc_feature 1..120: note = Artificially Synthesized Probe
  source 1..120: mol_type = other DNA
gccaaccagagtagaaagatcttgtaacatgttacgtttctgtttgctctaagaaatgtaagttctgaaaaagttctcaaaaggaataggtcccttctgaagccacaaaccgggcttttc

SEQ ID NO: 8829 - DNA, 120 bp, synthetic construct
  misc_feature 1..120: note = Artificially Synthesized Probe
  source 1..120: mol_type = other DNA
gtatatgtctgttaggcctagagctttcatagtgctattcaagtcttcttatttccttgctgaccttctgtctagttatatctattgtttaaaactaggtactgtaatctccaactatga

SEQ ID NO: 8830 - DNA, 120 bp, synthetic construct
  misc_feature 1..120: note = Artificially Synthesized Probe
  source 1..120: mol_type = other DNA
aataatgctgcaataaacatacgtgtgcgtgtgtctttatagcagcatgatttatagtcctttgggtatatacccagtaatgggatggctgggtcaaatggtattactaattctaggtcc

SEQ ID NO: 8831 - DNA, 120 bp, synthetic construct
  misc_feature 1..120: note = Artificially Synthesized Probe
  source 1..120: mol_type = other DNA
cctccagctttgttcttttggcttaggattgccttggcgatgcgggctcttttttggttccatatgaactttaaagtagttttttccaattctgtgaagaaagtcattggtagcttgatg

SEQ ID NO: 8832 - DNA, 120 bp, synthetic construct
  misc_feature 1..120: note = Artificially Synthesized Probe
  source 1..120: mol_type = other DNA
aggatattggtctaaaattctcttttttggttgtgtctctgcccggctttggtatcagaatgatgctggcctcataaaatgagttagggaggattccctctttttctattgattggaaca

SEQ ID NO: 8833 - DNA, 120 bp, synthetic construct
  misc_feature 1..120: note = Artificially Synthesized Probe
  source 1..120: mol_type = other DNA
aataggtgtggtgtggtgctgaaaaaaatgtatattctgttgatttggggtggagagttctgtagatgtgtattaggtccgcttggtgcagagctgagttcaattcctgggtatccttgt

SEQ ID NO: 8834 - DNA, 120 bp, synthetic construct
  misc_feature 1..120: note = Artificially Synthesized Probe
  source 1..120: mol_type = other DNA
tgaatatgtcatcacactgtcttcaggcctccgaagtttctaatgagaaaccagccattaatccttctgccttccagatgatctgtctttgtatttcaacagtttggtaatgatgtgtct

SEQ ID NO: 8835 - DNA, 120 bp, synthetic construct
  misc_feature 1..120: note = Artificially Synthesized Probe
  source 1..120: mol_type = other DNA
gaggtatacacatcttacacatgcatggctgtctagattccagggaatatgctgaagcttttcagagccccccatgaatatcttcttcccagtctctccttttaaatttttaaatgaact

SEQ ID NO: 8836 - DNA, 120 bp, synthetic construct
  misc_feature 1..120: note = Artificially Synthesized Probe
  source 1..120: mol_type = other DNA
atttattttagtgggtgaatgtattacaatataattgcttttcaatccacacttactccccaggcacctaaccattgttgaagcctttgtactagacattgtgaggctgtgtccaacaca

SEQ ID NO: 8837 - DNA, 120 bp, synthetic construct
  misc_feature 1..120: note = Artificially Synthesized Probe
  source 1..120: mol_type = other DNA
cacattcatagtgtagccctcggccttgacatttaatgtcacagggtggactttcttttccacattgcagatcaaattaaagttcacatctccttcctgctttggtgtgaagaaaatatc

SEQ ID NO: 8838 - DNA, 120 bp, synthetic construct
  misc_feature 1..120: note = Artificially Synthesized Probe
  source 1..120: mol_type = other DNA
atgcttcacattactaatcatcagagaaatgcaagtcaaaaccacaatgagataacatctcacaccagtcagaatggctatgattaagaaataaaaaacaacagatcctggcgaggctgc

SEQ ID NO: 8839 - DNA, 120 bp, synthetic construct
  misc_feature 1..120: note = Artificially Synthesized Probe
  source 1..120: mol_type = other DNA
catagaaggaaaacaagcacatatgtgttgtatgaaaggagagaaggttagcacttcccttgacaatgatggaagaggccctcaggcctgacaacacacatacagaaaataagcacatgt

SEQ ID NO: 8840 - DNA, 120 bp, synthetic construct
  misc_feature 1..120: note = Artificially Synthesized Probe
  source 1..120: mol_type = other DNA
ggtgaatagttcaactaactgtggtgcatccctactatggaatggtagccagtcataaaaaggaagaaactctcaaaactacctggatgtatgttggagaattatgagtgaaaaaaacca

SEQ ID NO: 8841 - DNA, 120 bp, synthetic construct
  misc_feature 1..120: note = Artificially Synthesized Probe
  source 1..120: mol_type = other DNA
gccaccatgcctggcctgaaaattaaatgtttaattgaaaaagagacttgccaggcaagcctgaacattgcactgtggattcacatatacagtgaatatagcaaggaaaagaatacaaag

SEQ ID NO: 8842 - DNA, 120 bp, synthetic construct
  misc_feature 1..120: note = Artificially Synthesized Probe
  source 1..120: mol_type = other DNA
ctttagacccaagaattgtaatgccttcctgaatttgttaatgggggcttcactctccttggttgacccccttaactgcccatgtatctgtaaataattcttgcatcgaattctttgaaa

SEQ ID NO: 8843 - DNA, 120 bp, synthetic construct
  misc_feature 1..120: note = Artificially Synthesized Probe
  source 1..120: mol_type = other DNA
ccataattccccctcccacctaattatgtgtatcggtaaaatacacatccagcagttaacactgctttcctttggagtggaaagagaaagatgagacaggatgaatgtggagagattaaa

SEQ ID NO: 8844 - DNA, 120 bp, synthetic construct
  misc_feature 1..120: note = Artificially Synthesized Probe
  source 1..120: mol_type = other DNA
agatacttggtggaaattagattgagcagtaaatattttgtggctttttaaaaactgattgagaccctctgatatgcttctggaagggaccaggagaggtttcttatgcaaggctgctcc

SEQ ID NO: 8845 - DNA, 120 bp, synthetic construct
  misc_feature 1..120: note = Artificially Synthesized Probe
  source 1..120: mol_type = other DNA
tctgtctcttttttgagctaacctgagtgagtctctttgcaatcaatcaaccaggactgaatgaaagaataacggcatttggccaaaaaagaaccacacaggttaacatgcatggtctat

SEQ ID NO: 8846 - DNA, 120 bp, synthetic construct
  misc_feature 1..120: note = Artificially Synthesized Probe
  source 1..120: mol_type = other DNA
taatttttgtttcacggatttatttctgtcttcaagattctctgcaactggctggacatggggctcacagatccgttttggccagcaagtctgtatttctttaattctgctccatatcat

SEQ ID NO: 8847 - DNA, 120 bp, synthetic construct
  misc_feature 1..120: note = Artificially Synthesized Probe
  source 1..120: mol_type = other DNA
tattttcctcagtggcaaaactaaggagacagaattcagctttcttaacgtaacagttctctaaagtcaaacctctaaaactcaggtcaaaccccaggatatcgagcctgcttataggaa

SEQ ID NO: 8848 - DNA, 120 bp, synthetic construct
  misc_feature 1..120: note = Artificially Synthesized Probe
  source 1..120: mol_type = other DNA
catcaatgttgagaaaatattcctgctgcaaaatgagcacagtcttaccctctggtctctctcataggcatttagtgggatatggaaagtgacctggaaatcctaaaaaagtatcctgag

SEQ ID NO: 8849 - DNA, 120 bp, synthetic construct
  misc_feature 1..120: note = Artificially Synthesized Probe
  source 1..120: mol_type = other DNA
ccatagggttttcaaatttgtttccttttggttcaagcgggtgggtcaagaagatgtttgtgccctagaataatgggctgtgaacatatttttttgagaatcattgttctaaagtagggg

SEQ ID NO: 8850 - DNA, 120 bp, synthetic construct
  misc_feature 1..120: note = Artificially Synthesized Probe
  source 1..120: mol_type = other DNA
ataaaaaatatttatcacttaaaagtcttttgcattcttccaacaccctgtgcagcgagctctcagcatgcatggcagtaatcctaaacccccaccatgagagaggaaacaaaatctatt

SEQ ID NO: 8851 - DNA, 120 bp, synthetic construct
  misc_feature 1..120: note = Artificially Synthesized Probe
  source 1..120: mol_type = other DNA
acaagaaaaagaaaatgatgatgaaataaatccacacgcccttcctggttttaggggaatagtaagagttaggagtttgggtgaggagtaggtctacagtgggacgtagagattagattt

SEQ ID NO: 8852 - DNA, 120 bp, synthetic construct
  misc_feature 1..120: note = Artificially Synthesized Probe
  source 1..120: mol_type = other DNA
tgtgggtgaagggttaacataaccttttctccttctcaaagatgaatttgactctgaaatagctttctaggtctgttcccctggagacttgataagggaggaatgtcagttgtattatta

SEQ ID NO: 8853 - DNA, 120 bp, synthetic construct
  misc_feature 1..120: note = Artificially Synthesized Probe
  source 1..120: mol_type = other DNA
gtcctggtggatcactagggaacagacaggctaaatgaaaaagggatctagtaagattagtcatctagatgaaaaatatgaaattggatccttgcttcacaacatacataaaatccaggt

SEQ ID NO: 8854 - DNA, 120 bp, synthetic construct
  misc_feature 1..120: note = Artificially Synthesized Probe
  source 1..120: mol_type = other DNA
gctcgtaatgagaccatttcccattcattcaaatgataaaaatcaagaagtctgacaatgccaagtgtcggagaggacatggatcaataagctctctgctgtaggagtataaattggtac

SEQ ID NO: 8855 - DNA, 120 bp, synthetic construct
  misc_feature 1..120: note = Artificially Synthesized Probe
  source 1..120: mol_type = other DNA
tgatggcaggcagcatgtgtagaagtttagtttgtcacttttggagtcaaggtcaagtagaatgggaaccttttctttttactgtgaaaaaaggaaatgatgagggacttgagaccagta

SEQ ID NO: 8856 - DNA, 120 bp, synthetic construct
  misc_feature 1..120: note = Artificially Synthesized Probe
  source 1..120: mol_type = other DNA
aatatgatctatacaaattatggacagaggaatacagtacactagcagttctccaaaggtgttctggtgaccttgggatccccaagaccttttcaggggataaatgaggtcaagactatt

SEQ ID NO: 8857 - DNA, 120 bp, synthetic construct
  misc_feature 1..120: note = Artificially Synthesized Probe
  source 1..120: mol_type = other DNA
attgaggttgggaacctccactgtgcccagcctctctgcctcctttgattaaggctttggtaataaaaataatgcacaaaagcagattaccctattatattatactgtgtttgtttcttc

SEQ ID NO: 8858 - DNA, 120 bp, synthetic construct
  misc_feature 1..120: note = Artificially Synthesized Probe
  source 1..120: mol_type = other DNA
aaaagcaaccactggccagaggcaacgatcttctagaacgttatcctaggccttgttcaatgtcaagctttagtcagcaattcaaaaaaaaaatgtgtgttgtggagatgctaaaagaag

SEQ ID NO: 8859 - DNA, 120 bp, synthetic construct
  misc_feature 1..120: note = Artificially Synthesized Probe
  source 1..120: mol_type = other DNA
gctgccttaaggaggcatagtgcttcactcacatgcagtccttccatccttggatggctatatttgagaaacctagaatctctgagtaacaagatttctatcctcaaggaatctatctat

SEQ ID NO: 8860 - DNA, 120 bp, synthetic construct
  misc_feature 1..120: note = Artificially Synthesized Probe
  source 1..120: mol_type = other DNA
ctgaaacaccaggtatatgaggagtgttgatttcaacccatgttgtgtagaccacctaacggtacattccaggactttaattaagcttctaggtaaactatgggactctgtttataactc

SEQ ID NO: 8861 - DNA, 120 bp, synthetic construct
  misc_feature 1..120: note = Artificially Synthesized Probe
  source 1..120: mol_type = other DNA
gtggaaaacgacatcaaattcagctgtatctccaggagaaacaaccaaggaggctgtgtgagctttctttgctgcaaagagaagagagaagatatgatttagaactagtttcaagaaatg

SEQ ID NO: 8862 - DNA, 120 bp, synthetic construct
  misc_feature 1..120: note = Artificially Synthesized Probe
  source 1..120: mol_type = other DNA
agacatcagcaggcattgttagaagacagtaatgctggcaccatcatgaaaaagattgaataatacaaaatatgaggcatggagaaggcagaaatagtgatatcacacgggaagcttctg

SEQ ID NO: 8863 - DNA, 120 bp, synthetic construct
  misc_feature 1..120: note = Artificially Synthesized Probe
  source 1..120: mol_type = other DNA
ggtaatccagaaaatctcaaaccctaacactggcttaaagtgatcctgaatttctagtgcccccaagtgttgggcagaagcaaatgaaaattgcctctgaagaaaaatatgatccttagt

SEQ ID NO: 8864 - DNA, 120 bp, synthetic construct
  misc_feature 1..120: note = Artificially Synthesized Probe
  source 1..120: mol_type = other DNA
ttggggacccctctcttaaaacattttaggcttatagctgacaactcagcagttaacaacggaaaccggaatacagtggaataatatctcccatttgctgaaagaaaacaactgccaaac

SEQ ID NO: 8865 - DNA, 120 bp, synthetic construct
  misc_feature 1..120: note = Artificially Synthesized Probe
  source 1..120: mol_type = other DNA
caagttgctccattactgtatcctttcatttttatcttccttgctcttctacctatacctatgctctcatgaagctgggtgcttactatctcctgtagtagtgtgcacgttttgttttgt

SEQ ID NO: 8866 - DNA, 120 bp, synthetic construct
  misc_feature 1..120: note = Artificially Synthesized Probe
  source 1..120: mol_type = other DNA
tggtttcttactttccttgaggacaaatgtcatgccagattcccctctgcatgtccctgacacataggttaatgtatgtggatcaacagagaagtcctcatacattaggcatggcagagg

SEQ ID NO: 8867 - DNA, 120 bp, synthetic construct
  misc_feature 1..120: note = Artificially Synthesized Probe
  source 1..120: mol_type = other DNA
ttaaaaggatttttcattctcatgggaagtaggtgggattcaagactgactattccctcttgttcttaaactgagggcactcaggtttctctttgctttttccaaaggatagccttcaag

SEQ ID NO: 8868 - DNA, 120 bp, synthetic construct
  misc_feature 1..120: note = Artificially Synthesized Probe
  source 1..120: mol_type = other DNA
ctcaaaaaaaaaaaaaaaactcagagaataatgactgggagtcaccagggcctgaaggaagtcataaaacggattatgtagtctccccaaccatacctctctgcattgacattccccagg

SEQ ID NO: 8869 - DNA, 120 bp, synthetic construct
  misc_feature 1..120: note = Artificially Synthesized Probe
  source 1..120: mol_type = other DNA
gataataatacaaagtcggaagagttgttgtgagggcaaaaggaggcagtaaatataaatcacttagcacagtgcttgtcacatgggaagggctaaaacatgctcatcatttcaccttat

SEQ ID NO: 8870 - DNA, 120 bp, synthetic construct
  misc_feature 1..120: note = Artificially Synthesized Probe
  source 1..120: mol_type = other DNA
agagcaagttctaggaccctgaaggaagcatcccagccatgtctgccagaaatctttggaaaaacttgcaagaaagaaggtagaagtgttacagatgaaggtcttttatttatgtatttg

SEQ ID NO: 8871 - DNA, 120 bp, synthetic construct
  misc_feature 1..120: note = Artificially Synthesized Probe
  source 1..120: mol_type = other DNA
gctctctcagtgcttccttctatgcaaattcatttagaccaatcatgtttgaactaagggtttaaaggaacagatagactccacatcatatagcacttattcagctgggcatcttgaagc

SEQ ID NO: 8872 - DNA, 120 bp, synthetic construct
  misc_feature 1..120: note = Artificially Synthesized Probe
  source 1..120: mol_type = other DNA
agtcagagaaagaggtcttggaaatcaaggattcagaagcacctcagtttcttgtgatgtaagatccaggctctgaccattaaaataagttgccaatgtagaggagaggataagttcatt

SEQ ID NO: 8873 - DNA, 120 bp, synthetic construct
  misc_feature 1..120: note = Artificially Synthesized Probe
  source 1..120: mol_type = other DNA
agctacccggaacagcaagacttcgttcttcaatttttctagagtctatccatgtacatgcacctcagttatagtacacgcacctcaattatagtatttaccatcttgcttaacaactgc

SEQ ID NO: 8874 - DNA, 120 bp, synthetic construct
  misc_feature 1..120: note = Artificially Synthesized Probe
  source 1..120: mol_type = other DNA
tgtaatcacaagggtccttagaaatggaagagagttagaaggagatatgactatggaggaggttggagtaatgtgatgtgagaaggattcgatcctctgttgctggctttgaggatgata

SEQ ID NO: 8875 - DNA, 120 bp, synthetic construct
  misc_feature 1..120: note = Artificially Synthesized Probe
  source 1..120: mol_type = other DNA
tatgatgagtgattttcaactgaaacctggacattttgggtgttatgctatgagacttgggatctgatttaaatcttctgtttgggctggctttcttttggcactgccctggcaggggaa

SEQ ID NO: 8876 - DNA, 120 bp, synthetic construct
  misc_feature 1..120: note = Artificially Synthesized Probe
  source 1..120: mol_type = other DNA
gtgacatttcagtataattatttcatattcctgccatgatggattcaaatcctgttatcctagggaggtatttggtgtcaagagctaattgggagttggccttactgggtatctgtaaga

SEQ ID NO: 8877 - DNA, 120 bp, synthetic construct
  misc_feature 1..120: note = Artificially Synthesized Probe
  source 1..120: mol_type = other DNA
taaatcagaagtgcctcaggaatcggtaaaaaccatccttaatttgcccgaaaaagagtatggcagcccagtagaagccaaaagcactcaaaagacaaattgttttgggtgaattgattg

SEQ ID NO: 8878 - DNA, 120 bp, synthetic construct
  misc_feature 1..120: note = Artificially Synthesized Probe
  source 1..120: mol_type = other DNA
atggaatgagttaagtaaatatttgtcttacgctttcttttgatgaatggggctctcccctgtcagcttataaagggcgaacttgaagtcagtaacaccttgattttctatggtgaaggt

SEQ ID NO: 8879 - DNA, 120 bp, synthetic construct
  misc_feature 1..120: note = Artificially Synthesized Probe
  source 1..120: mol_type = other DNA
ggtttttctgttggggtcagtgaaccctttttgggttggactgagatcatggaatttatattaggtgttgaaatccctacagagtccacggaaaagctgaaagacaagaataagaagtca

SEQ ID NO: 8880 - DNA, 120 bp, synthetic construct
  misc_feature 1..120: note = Artificially Synthesized Probe
  source 1..120: mol_type = other DNA
taaaagaaaactcaccaacaggcaagattccacttagcactaattccaaactgacaggggaaaagtctctttgtcatctgtgaattcttggggaaggagaactttccatggaatgaaaag

SEQ ID NO: 8881 - DNA, 120 bp, synthetic construct
  misc_feature 1..120: note = Artificially Synthesized Probe
  source 1..120: mol_type = other DNA
gagagtgggaagcaggggaagtgcctgttgaaattcacatggaaaacgcatggtgacagtttaagagaatttgttttctgaaagtactgtggctagaaaagcctcttataattgaatctg

SEQ ID NO: 8882 - DNA, 120 bp, synthetic construct
  misc_feature 1..120: note = Artificially Synthesized Probe
  source 1..120: mol_type = other DNA
gatggaattaattcactgacctacaaatacagagattaatttggaatatcttggtcagctcaatataatcacaagggggcttaagagcaaaagaggaaggcagggtgggagaaccagaga

SEQ ID NO: 8883 - DNA, 120 bp, synthetic construct
  misc_feature 1..120: note = Artificially Synthesized Probe
  source 1..120: mol_type = other DNA
atttgtgctcctcttaatactctggggaatgctggtacaaagaatacaagaatggggaaaagggactgacttttttattgttgctacattactgaagtttgggcttggggtagacattac

SEQ ID NO: 8884 - DNA, 120 bp, synthetic construct
  misc_feature 1..120: note = Artificially Synthesized Probe
  source 1..120: mol_type = other DNA
aaactcaagttttaattcagaatttccatcttctctttcattagatgcttgccaatgtttcacagagcaaactggaccgacttgagtttcgccttctttctctgactgcttgccctctga

SEQ ID NO: 8885 - DNA, 120 bp, synthetic construct
  misc_feature 1..120: note = Artificially Synthesized Probe
  source 1..120: mol_type = other DNA
ttctacacattcatggagtgaatgaatctatcaatatctgttttcagccctttcagtgaagggctgtcattgataagggataagagagattagatccactgagtggccccaaaaggtaga

SEQ ID NO: 8886 - DNA, 120 bp, synthetic construct
  misc_feature 1..120: note = Artificially Synthesized Probe
  source 1..120: mol_type = other DNA
ttagtcacccagtatatgctaatttgttgtagtagccttggggaactaagacagatgttaagtcaggtgagatcctgccctgatgcagttcatataagaaagtaaagaaagaagcaggat

SEQ ID NO: 8887 - DNA, 120 bp, synthetic construct
  misc_feature 1..120: note = Artificially Synthesized Probe
  source 1..120: mol_type = other DNA
gggtggagggtgacatttccccagataggaatccgataggtgactgggtttaggagtgtgaaatcaggactctgatgcttacctaggtatagcaacaccatttgttcatttgttcattca

SEQ ID NO: 8888 - DNA, 120 bp, synthetic construct
  misc_feature 1..120: note = Artificially Synthesized Probe
  source 1..120: mol_type = other DNA
acaggcaggagcgtgacattgcggagaagaactaccctggattcctgtctgcagagacaaaaggaaagttgcaatttcatttcaaattttgtagtttcatgtgttttttttttaactttt

SEQ ID NO: 8889 - DNA, 120 bp, synthetic construct
  misc_feature 1..120: note = Artificially Synthesized Probe
  source 1..120: mol_type = other DNA
gtctcgaaacaaaaaaaatccctgaagcttagagaggttaattgatggccccgaagtcacagatttagtggcaagacttgggctataactatatttatccagcttaaggtttgctaagct

SEQ ID NO: 8890 - DNA, 120 bp, synthetic construct
  misc_feature 1..120: note = Artificially Synthesized Probe
  source 1..120: mol_type = other DNA
cagaaacacagacatacgcatattttggtagttgatcttaggggggtccttggccctgctgaagttcatccactgaacccaagttaacaatctgttaattaaataggtttactaaccatc

SEQ ID NO: 8891 - DNA, 120 bp, synthetic construct
  misc_feature 1..120: note = Artificially Synthesized Probe
  source 1..120: mol_type = other DNA
taggaagtgagatcacacatctaaagctctcaggacagctgtggatagcaaatgcccagtgaatgttagctatgattattgcaaagaatcctgagaaatatgtagatctatccttacacc

SEQ ID NO: 8892 - DNA, 120 bp, synthetic construct
  misc_feature 1..120: note = Artificially Synthesized Probe
  source 1..120: mol_type = other DNA
aaagaaaagaatgagtgaataatacacagttgtactggaacttattttggattaccatagtcactgtccttcccacatcagtgtcatctcgcccaacatcctggttaattccaatgctgc

SEQ ID NO: 8893 - DNA, 120 bp, synthetic construct
  misc_feature 1..120: note = Artificially Synthesized Probe
  source 1..120: mol_type = other DNA
tctcctactttccacaaaaactgtttttcataccccctctatttcctcaagattttaaactttcgccactcccctcacttgcaatggatgaccacacatcatttgtcaaggagaaaaaga

SEQ ID NO: 8894 - DNA, 120 bp, synthetic construct
  misc_feature 1..120: note = Artificially Synthesized Probe
  source 1..120: mol_type = other DNA
tacttatctcttgattttccacaaagtagtggcccaaagtagtacgtctccgtgctcataacatacttcttaaagatgacctcatttgtcttcatgtccatcttccgctgaggaaatacc

SEQ ID NO: 8895 - DNA, 120 bp, synthetic construct
  misc_feature 1..120: note = Artificially Synthesized Probe
  source 1..120: mol_type = other DNA
ccttgttcaaagtgccatggaggaaaatgaaaacacatctgtcaaccttttcttttaaaatgaaacacacttactttgggtcttggcaaatgtatgggtaagtgcagatgcctcggcagt

SEQ ID NO: 8896 - DNA, 120 bp, synthetic construct
  misc_feature 1..120: note = Artificially Synthesized Probe
  source 1..120: mol_type = other DNA
aaactttaagagttgaaggcctggtacagtaataactagttttaacagttgccactttttctcctgagccatttgaagataccttgcagacatgatgactccttgcctctaaatacacct

SEQ ID NO: 8897 - DNA, 120 bp, synthetic construct
  misc_feature 1..120: note = Artificially Synthesized Probe
  source 1..120: mol_type = other DNA
ccttcttatggctgagtagtattcctttgtgtatatatataccacagtttctttatccacttgttgactgatgggcatttgggatggttccaccattttgcaattgtgaattgtgctgct

SEQ ID NO: 8898 - DNA, 120 bp, synthetic construct
  misc_feature 1..120: note = Artificially Synthesized Probe
  source 1..120: mol_type = other DNA
tggctgtaagtatttgggtttctttctgggttctctattctgttccattggtctatatgcctatttttatatcagtaacatgctgttttggtgactatggccttacagtatagtttgaaa

SEQ ID NO: 8899 - DNA, 120 bp, synthetic construct
  misc_feature 1..120: note = Artificially Synthesized Probe
  source 1..120: mol_type = other DNA
ttgacttgcatatgttaaaccatccctgaatccctggtatgaaacccacttgatcattgtggattaactttttgatatgctgttggatttgattagctaaatgttaaggattttggttag

SEQ ID NO: 8900 - DNA, 120 bp, synthetic construct
  misc_feature 1..120: note = Artificially Synthesized Probe
  source 1..120: mol_type = other DNA
attttcatgtatttgcatggctttgaaggttccttctggagttgatttccagttttattccactgtggtctgagagagtgcttgatataatttcaattttcttaaatttattgaggctca

SEQ ID NO: 8901 - DNA, 120 bp, synthetic construct
  misc_feature 1..120: note = Artificially Synthesized Probe
  source 1..120: mol_type = other DNA
atacaaaattcttggctgatacttcttttgtttgaggagtctgaagatagggccccaatcccttctatcttgtagggtttctgctgagaaatctgctgttaatctgataggttttccttt

SEQ ID NO: 8902 - DNA, 120 bp, synthetic construct
  misc_feature 1..120: note = Artificially Synthesized Probe
  source 1..120: mol_type = other DNA
tctgggtctagccacccagcaagtctaccaggctctgggcttgtacgggggttgtctgcacagagtcctgtgatgtgaaacatctatgggtctctcagtcatggacaccagcacctcttc

SEQ ID NO: 8903 - DNA, 120 bp, synthetic construct
  misc_feature 1..120: note = Artificially Synthesized Probe
  source 1..120: mol_type = other DNA
gatctgttatgtttctttagtatctttcaatctagaccctcctgccccctctcccaatcacactgcctttttagagagaccagatttgtgttcttacaaaatactccatagtctgaattc

SEQ ID NO: 8904 - DNA, 120 bp, synthetic construct
  misc_feature 1..120: note = Artificially Synthesized Probe
  source 1..120: mol_type = other DNA
ggtgaagttacgagctctctttgctgatgtgcatggtttatagaaggctgtgtgcagagattcaaattgtggaccacccttctcctctgggaataaaaaaaccttctataattttaaata

SEQ ID NO: 8905 - DNA, 120 bp, synthetic construct
  misc_feature 1..120: note = Artificially Synthesized Probe
  source 1..120: mol_type = other DNA
gatgtctaggatctaaaggaaaggcccattgtgaatttcctgtgcaaaaccctatgcctctcttaccatagcctttgttatactttatggcaattgtttaattgtctgcctttgcaactg

SEQ ID NO: 8906 - DNA, 120 bp, synthetic construct
  misc_feature 1..120: note = Artificially Synthesized Probe
  source 1..120: mol_type = other DNA
ttgtggcaattgttgaattaccagagccagggagttcttcaagcagcagtctaacctatgatttggaaggtggagagtacaaaacaaggcaagaagatgttcttgttatagtcctttttt

SEQ ID NO: 8907 - DNA, 120 bp, synthetic construct
  misc_feature 1..120: note = Artificially Synthesized Probe
  source 1..120: mol_type = other DNA
ctagatgtgtgacatttcctatgaattttctcttgccaagtagaaaaggtcctttagtcattattgtcttaattccaagggggcattagagatgcatgcagttgaggggatatgggtttc

SEQ ID NO: 8908 - DNA, 120 bp, synthetic construct
  misc_feature 1..120: note = Artificially Synthesized Probe
  source 1..120: mol_type = other DNA
atcatcttgggggttttaatctaaatctaaaaatctattccatggtccttctctgtttgagatctggctgggtcctggcattgtgcattttggaaaaggtgcagagtgactttgatgtgt

SEQ ID NO: 8909 - DNA, 120 bp, synthetic construct
  misc_feature 1..120: note = Artificially Synthesized Probe
  source 1..120: mol_type = other DNA
tggacaattttaacaacatgattaatggacttgggcaaatagatgcagaaagaaaatacacacactattcaaacacacgtggaacatttacagaaaccagtcaccgatgaggccacacag

SEQ ID NO: 8910 - DNA, 120 bp, synthetic construct
  misc_feature 1..120: note = Artificially Synthesized Probe
  source 1..120: mol_type = other DNA
tataacttttcataaattgcaaaagaaaaacgattgaaaattaataagataagcatcacttcaagaagttagaaaaagaacggaataataacacaaataaagtagaaagaaggggccagg

SEQ ID NO: 8911 - DNA, 120 bp, synthetic construct
  misc_feature 1..120: note = Artificially Synthesized Probe
  source 1..120: mol_type = other DNA
aaaatcacttgataaaattccacacccacaagtagaaaatctttacaaaacgttttgaaaacctatgtgtctgaaagcactggagagccacaaaggcagtcatgagttgcaggctaagat

SEQ ID NO: 8912 - DNA, 120 bp, synthetic construct
  misc_feature 1..120: note = Artificially Synthesized Probe
  source 1..120: mol_type = other DNA
tagtgctcctagcctagctgactgccagcatcaaacagtgattctctctggagggagacaacatcttccagagcctcaaaacgtttttttctgttcaatatcttgcccttgataaaaacc

SEQ ID NO: 8913 - DNA, 120 bp, synthetic construct
  misc_feature 1..120: note = Artificially Synthesized Probe
  source 1..120: mol_type = other DNA
ataataaaaaaaaaatacttggcatctaaagagacaaaaccatgtgaccataaagcaagagcaaaagacagacgggagaccagactgctggggatctacgtatggcactataagacaagg

SEQ ID NO: 8914 - DNA, 120 bp, synthetic construct
  misc_feature 1..120: note = Artificially Synthesized Probe
  source 1..120: mol_type = other DNA
gcaaatcatagtaaattactgaatgaagactcgacatcttaaaggtgttgagaccttaaaaacaaagagaaacatcttaaaggcagttagagtcagaatgaggtaggaggcggggctcag

SEQ ID NO: 8915 - DNA, 120 bp, synthetic construct
  misc_feature 1..120: note = Artificially Synthesized Probe
  source 1..120: mol_type = other DNA
aaaacagggtcaatgggtccatgtggttaaatgaggttaaattattctaagactcttgcatcttcaacagaaacacttgaaggtgatggctgaggaaaataagactctttctagtctatt

SEQ ID NO: 8916 - DNA, 120 bp, synthetic construct
  misc_feature 1..120: note = Artificially Synthesized Probe
  source 1..120: mol_type = other DNA
caaattcacagcttcacagattagtctttgagtttccagactgacaggtgtatttctcacttcctttcctgtctcccattatagctggttctgtgatgtttttttcttttccaacatccc

SEQ ID NO: 8917 - DNA, 120 bp, synthetic construct
  misc_feature 1..120: note = Artificially Synthesized Probe
  source 1..120: mol_type = other DNA
ggggcaaactggaagcaatttgtaattaaggtctaaagaatggaactgacatcttagtcactgaccactgcagatgcaaaagaccaaaacttgatccaaccaagcttaattgtctgttaa

SEQ ID NO: 8918 - DNA, 120 bp, synthetic construct
  misc_feature 1..120: note = Artificially Synthesized Probe
  source 1..120: mol_type = other DNA
attgagtcttctatttcttgcagtttaaagattcctgacaatatatccacttgagactgtgcttttgctaacgttagtgttggctgctacgcaactgcttacagccttgctactcagagt

SEQ ID NO: 8919 - DNA, 120 bp, synthetic construct
  misc_feature 1..120: note = Artificially Synthesized Probe
  source 1..120: mol_type = other DNA
taagtgatcaaaacagacaaaagcctcagccttcatgaggcttatattttgcaggggcaggtaggcagacaaaatcacataaaaatctatggtatgtgagatggtgatgagtgctaagaa

SEQ ID NO: 8920 - DNA, 120 bp, synthetic construct
  misc_feature 1..120: note = Artificially Synthesized Probe
  source 1..120: mol_type = other DNA
aggtagatggtgatgggatctattcacagttcccagcagggagtgtcacatagcaggaattcagcacacagtagctattagttgttaaaacattggtttagctctttttcatgtggcttc

SEQ ID NO: 8921 - DNA, 120 bp, synthetic construct
  misc_feature 1..120: note = Artificially Synthesized Probe
  source 1..120: mol_type = other DNA
tgaagaaaacttttttttttttcattttaaaggtgggtgattcttgagaacatcttcaaagcctgtgagaagagctgaagccagagcagagaggaaaacaggtgtgctgacggtcgaaga

SEQ ID NO: 8922 - DNA, 120 bp, synthetic construct
  misc_feature 1..120: note = Artificially Synthesized Probe
  source 1..120: mol_type = other DNA
agggatcagtcctggtaattttttcttagggacccccttttgttctcagcctgagatgtcatagatttccttcaggtcagtatcaggcatcccaaatctgtgcctagttctgtatgctta

SEQ ID NO: 8923 - DNA, 120 bp, synthetic construct
  misc_feature 1..120: note = Artificially Synthesized Probe
  source 1..120: mol_type = other DNA
gtgagaaaaaggctgaaaataagcttgatattagcacttaaaaaaagcaactttcaaagattgttctggtattagtgcagatgaggcccgcctcccatagctgagcatgtttgctgttca

SEQ ID NO: 8924 - DNA, 120 bp, synthetic construct
  misc_feature 1..120: note = Artificially Synthesized Probe
  source 1..120: mol_type = other DNA
ctgcactttgagaatcaaatttgcattttccaagtccaccatgagatgaatgcctgaaagcaacagccctggtgaaaaacgagtttcctctaaaatctcaaagcaaggctttctgtaact

SEQ ID NO: 8925 - DNA, 120 bp, synthetic construct
  misc_feature 1..120: note = Artificially Synthesized Probe
  source 1..120: mol_type = other DNA
tgctgaatcccccgatcgaatgtgagtttctcctcctcagtcagggcatcatattcttcctcatccatgttttggagacgctccttctctttctcaagagctcccttgtgcttgcgttct

SEQ ID NO: 8926 - DNA, 120 bp, synthetic construct
  misc_feature 1..120: note = Artificially Synthesized Probe
  source 1..120: mol_type = other DNA
gtgggctcttctcccctaaatcatctgcatttgaaatgtcctaaggtagcatactgtcatactactattacattaaaatctcatgtttgttaacatgtatgaacatgccaggcactgggg

SEQ ID NO: 8927 - DNA, 120 bp, synthetic construct
  misc_feature 1..120: note = Artificially Synthesized Probe
  source 1..120: mol_type = other DNA
gccgttgtagagattaaataagcgatcatgtaaagtgctttccccagtgcctggcatgttcatagatgttcgacaaacatgagattttagtgtaataatagtgtgaccgtataccatctt

SEQ ID NO: 8928 - DNA, 120 bp, synthetic construct
  misc_feature 1..120: note = Artificially Synthesized Probe
  source 1..120: mol_type = other DNA
tttggaaaatgtattagcaccgtgagttttatgagaaatgcacagttggcttaaacaaaaccaacaaggaaatcagttgcctgagtcaggatgggacccgtaatggctgtaattgcagaa

SEQ ID NO: 8929 - DNA, 120 bp, synthetic construct
  misc_feature 1..120: note = Artificially Synthesized Probe
  source 1..120: mol_type = other DNA
tattctgtctgtagaaataaatgaacaaacaaaaatgttaaagggccgatctgggaagatccatgaggtacacaaaaatgagatggaaagggaaagatgctcccaagcacagagtcacag

SEQ ID NO: 8930 - DNA, 120 bp, synthetic construct
  misc_feature 1..120: note = Artificially Synthesized Probe
  source 1..120: mol_type = other DNA
agaatggctccacattgtaatttttaacaacatcactctctttctggtcattaaaaaaacttttgtgtagtcttctgctctctggtccttgaagaaggtgaatggcttcaggctgtagac

SEQ ID NO: 8931 - DNA, 120 bp, synthetic construct
  misc_feature 1..120: note = Artificially Synthesized Probe
  source 1..120: mol_type = other DNA
ccttccttcacaaatcaatacaatttcagaaagtgatgagtgctaggaaggaaataaccaggtaagggaataaggaatcataacagggctggggaaagactatgtagagaggatgctcat

SEQ ID NO: 8932 - DNA, 120 bp, synthetic construct
  misc_feature 1..120: note = Artificially Synthesized Probe
  source 1..120: mol_type = other DNA
tggatataaacattttgagatgcctctaagcccttcgagagagattgaaaggatacatgaacctgcactcgggaagaaattagagctggcaatagaatttcgagagtcataagcatgtta

SEQ ID NO: 8933 - DNA, 120 bp, synthetic construct
  misc_feature 1..120: note = Artificially Synthesized Probe
  source 1..120: mol_type = other DNA
aaatattttggaggctaggagagtgatgagagcaataaagcagtcatcttgaatagatgcagagctgagccagaccaaagggcccattggagacctgtggtcttaaatttaaattaagat

SEQ ID NO: 8934 - DNA, 120 bp, synthetic construct
  misc_feature 1..120: note = Artificially Synthesized Probe
  source 1..120: mol_type = other DNA
agggatgaagcccacttgatcatggtggataagctttctgatgtgctgctggattcggtttgccagtattttattgaggatttttgcatcaatgttcatcaaggatattggtctaaaatt

SEQ ID NO: 8935 - DNA, 120 bp, synthetic construct
  misc_feature 1..120: note = Artificially Synthesized Probe
  source 1..120: mol_type = other DNA
attcaggacataggcatgggcaaggacttcatatctaaaacaccaaaagcaatggcaacaaaagccaaaattgacaaatgggatctaattaaactaaagagcttctgcacagcaaaagaa

SEQ ID NO: 8936 - DNA, 120 bp, synthetic construct
  misc_feature 1..120: note = Artificially Synthesized Probe
  source 1..120: mol_type = other DNA
gtaatatacttacacattttttcccatttgcaacatgactgaaatatcagtcattggaaaactcatgctttatgagagcttcaagaagaccaatcgccatctccctgggtaagtgctttc

SEQ ID NO: 8937 - DNA, 120 bp, synthetic construct
  misc_feature 1..120: note = Artificially Synthesized Probe
  source 1..120: mol_type = other DNA
cctctcccttgaagacctttgcctctgctccatcctcttacctgatctaacatgtgggcctcctctcctacaagaacctacatcattaattttattttttatgtactttttttgagatgg

SEQ ID NO: 8938 - DNA, 120 bp, synthetic construct
  misc_feature 1..120: note = Artificially Synthesized Probe
  source 1..120: mol_type = other DNA
agagagagagaaacttcacaactatgaagttatagtttccagtcttggttgggccatgatcattcccaactatttattccttgtccatcaccaatttctgcttctatactggaagcagtg

SEQ ID NO: 8939 - DNA, 120 bp, synthetic construct
  misc_feature 1..120: note = Artificially Synthesized Probe
  source 1..120: mol_type = other DNA
ctttattgcaaatgtttgcaaatgtggttatctccttcatcagactcttagtgcagggattctgctttctttatttgcactttgccagtgcctacagcataaaagatgcttgctgagcac

SEQ ID NO: 8940 - DNA, 120 bp, synthetic construct
  misc_feature 1..120: note = Artificially Synthesized Probe
  source 1..120: mol_type = other DNA
tctatttgggcttctggcagtctctaattctgttcatttcttgattcaatgaatcctttatgaatctttattatgtgtcaactatgccaggcattcttccaggtgctgggactacagtgg

SEQ ID NO: 8941 - DNA, 120 bp, synthetic construct
  misc_feature 1..120: note = Artificially Synthesized Probe
  source 1..120: mol_type = other DNA
tttgtctgcagcttcactatcgcttcctttacatgatagtcaagggctaccttcctattgtgattttctgatcatttttccatagtgtgaaactgtcccaatagctcttttccttgaaca

SEQ ID NO: 8942 - DNA, 120 bp, synthetic construct
  misc_feature 1..120: note = Artificially Synthesized Probe
  source 1..120: mol_type = other DNA
tcaaagaagctggtatttctgttgcaaaattattttcctctgctctgagtgaccgcatgtctgcttcccccaccaggtgtcagacttccaaaggtgtgggctgtgtcttattcattgtcc

SEQ ID NO: 8943 - DNA, 120 bp, synthetic construct
  misc_feature 1..120: note = Artificially Synthesized Probe
  source 1..120: mol_type = other DNA
aaaaatccatcatccactcattcagggatagtaccgttagcctatggtcgctaagtacacatgtaactgtatttcttataaaaaaagaaataggtgatgtggtaggctgaataatggctc

SEQ ID NO: 8944 - DNA, 120 bp, synthetic construct
  misc_feature 1..120: note = Artificially Synthesized Probe
  source 1..120: mol_type = other DNA
caggctggagtgcaatggcacgatcttggctcactgcaacctctgcctcccgggttcaaatgattctcctgcctcagcctcctaagtagctgggattacaggcgcctgctaccacgcccg

SEQ ID NO: 8945 - DNA, 120 bp, synthetic construct
  misc_feature 1..120: note = Artificially Synthesized Probe
  source 1..120: mol_type = other DNA
ttcatgaagattctgtgaaagctgtaaggttccataaaaatgtcaggcttgttattactgtagttcacactctaataggcttttcacctgcagatgagaagtgactgagcctccactaga

SEQ ID NO: 8946 - DNA, 120 bp, synthetic construct
  misc_feature 1..120: note = Artificially Synthesized Probe
  source 1..120: mol_type = other DNA
ttaattttcccaaaggcacacagctattaatgtatattcactaccctatgcagttcctcaaataaagtcattagtatttgccatgaccacacagctgatgttgccactctggaagccgca

SEQ ID NO: 8947 - DNA, 120 bp, synthetic construct
  misc_feature 1..120: note = Artificially Synthesized Probe
  source 1..120: mol_type = other DNA
atgggaaaagtttgccaaaccttgatttatcaaatgcattggcctagaggaacgtctagaaaaaagcaagctgcaggatcatatgtgtattaattgtagagtagtgtgcagccagataca

SEQ ID NO: 8948 - DNA, 120 bp, synthetic construct
  misc_feature 1..120: note = Artificially Synthesized Probe
  source 1..120: mol_type = other DNA
tataatgaccagcaaatggcccccatgaacccagtttcactgaatctaattttctgaatatggttccaacatcttgcaaaacttggggaaaataaatgccagaaaatggggccataatgc

SEQ ID NO: 8949 - DNA, 120 bp, synthetic construct
  misc_feature 1..120: note = Artificially Synthesized Probe
  source 1..120: mol_type = other DNA
tttgaaactaagcttggggttatattgtacatactgatgtgtagcctgctttcccttttaatttatcatgaccatttcctgtgtcattgttagggacagctatcctttcgttggcccaac

SEQ ID NO: 8950 - DNA, 120 bp, synthetic construct
  misc_feature 1..120: note = Artificially Synthesized Probe
  source 1..120: mol_type = other DNA
attttctgatttttttttccccggcacttttttcactaatttttttttcccaccactttagctcagtgcttgcaacacagtgggtccttgtgatgggcttaatggtgtcctttcccaatt

SEQ ID NO: 8951 - DNA, 120 bp, synthetic construct
  misc_feature 1..120: note = Artificially Synthesized Probe
  source 1..120: mol_type = other DNA
agctgtttttaggtcatactaccccaattgggccctagtgacagcagaatgtgttccagcctctgcatccataaaatggggataacgcgacccattttgtaagggttagaaataaaatac

SEQ ID NO: 8952 - DNA, 120 bp, synthetic construct
  misc_feature 1..120: note = Artificially Synthesized Probe
  source 1..120: mol_type = other DNA
cagaagtagggctgagctctgagcctgtggggatacatgatctttattttgctccatttcagcctgggcatttcacctgtggaaatatgttttcttcttgttttaaaactaatatacact

SEQ ID NO: 8953 - DNA, 120 bp, synthetic construct
  misc_feature 1..120: note = Artificially Synthesized Probe
  source 1..120: mol_type = other DNA
ctcataaattcctaatgaaaagactctccccaaaggggcagattcccattctgagaaaaacttctgggagcagactgcaaactaagcaggctatcaacactggaagtaaagaagacagaa

SEQ ID NO: 8954 - DNA, 120 bp, synthetic construct
  misc_feature 1..120: note = Artificially Synthesized Probe
  source 1..120: mol_type = other DNA
aaggggagaaggaaaaagagattactagctaattttaatattgctcacaagagggaattaagaggccgtttcaaagagcacggcactaaggttattagacaaaggtgtagctcaaggtag

SEQ ID NO: 8955 - DNA, 120 bp, synthetic construct
  misc_feature 1..120: note = Artificially Synthesized Probe
  source 1..120: mol_type = other DNA
ggaacctagactattacctgcatctggcagtaagaaggcagtgcccccttctccttgcccaagtcatttcagaaaaggccagttaaaacaaaatttaaataaggtccagagtctcataac

SEQ ID NO: 8956 - DNA, 120 bp, synthetic construct
  misc_feature 1..120: note = Artificially Synthesized Probe
  source 1..120: mol_type = other DNA
agccctggaaggagagtagaaagagcatgaggctgaaaaaggtacttgaataatgcctgaaaaatttccaagttggaaagaagataaagatcaacagattcaagaaactcagcaaatccc

SEQ ID NO: 8957 - DNA, 120 bp, synthetic construct
  misc_feature 1..120: note = Artificially Synthesized Probe
  source 1..120: mol_type = other DNA
gggaagtaggtcagaaaaggctatagggaagtaatcactaaattgacaaggaagaattcaaggggaaaaagatgggaacgtgtagaaaaacagtttggtttgacctctgctcaccttttc

SEQ ID NO: 8958 - DNA, 120 bp, synthetic construct
  misc_feature 1..120: note = Artificially Synthesized Probe
  source 1..120: mol_type = other DNA
atcataactactcacatgttttctcaaaatggtacccaaatctacattgcatcccatagttcctagtctgatttcactggggaacctattaaacatgcagatcctcagattccatcccta

SEQ ID NO: 8959 - DNA, 120 bp, synthetic construct
  misc_feature 1..120: note = Artificially Synthesized Probe
  source 1..120: mol_type = other DNA
tctctggttcgaggattttattaattttattatgttcctggtcagaagtagctttgagttgattatgttcacaaaagaaacatttatgaggctccgggaggccatctactgggacgtact

SEQ ID NO: 8960 - DNA, 120 bp, synthetic construct
  misc_feature 1..120: note = Artificially Synthesized Probe
  source 1..120: mol_type = other DNA
agaaatgggctggatttcgaagatccgtgtctttggctttaattcagcgcgtagtttctgtcttaagtacttcggcatgtgtttctccagctggtttataaatattagagaattagatca

SEQ ID NO: 8961 - DNA, 120 bp, synthetic construct
  misc_feature 1..120: note = Artificially Synthesized Probe
  source 1..120: mol_type = other DNA
attggccccctgtgggtcaaatctcacttcaaatatttccgtttcacaatgaggtagattctttacacgatctagctcagtactgaatcctggaccaagacaaaaaaaaatttcttcatg

SEQ ID NO: 8962 - DNA, 120 bp, synthetic construct
  misc_feature 1..120: note = Artificially Synthesized Probe
  source 1..120: mol_type = other DNA
tgaagcaagaaggaagagcaagtcagcaaattctttaggaacatgcattctcaacagggacaataccacccctaaagaggcaaaaattagttcttggagggtggtggaaaatatcttaaa

SEQ ID NO: 8963 - DNA, 120 bp, synthetic construct
  misc_feature 1..120: note = Artificially Synthesized Probe
  source 1..120: mol_type = other DNA
gttggagggagattttgtttttaattttatttcctcaagaagcacgaggaatcttggtggtaatggaatagttctggatcttaattgcggtggtgggttcacaaatctacatgtgataaa

SEQ ID NO: 8964 - DNA, 120 bp, synthetic construct
  misc_feature 1..120: note = Artificially Synthesized Probe
  source 1..120: mol_type = other DNA
aaactaaaatttagatgacagcagcaccattctccccccaccctcattgtgggaggatttaacaagataacagtacaggttaacagtatggcacaggcttagtataagagtccaataaat

SEQ ID NO: 8965 - DNA, 120 bp, synthetic construct
  misc_feature 1..120: note = Artificially Synthesized Probe
  source 1..120: mol_type = other DNA
atgaagtccaaaaaccttaatagatcagccatctgatacctcacctcctgggctcatcttgcctctcctagcttcctgattctttgccttatctctgtctttctcttttctgtacctcag

SEQ ID NO: 8966 - DNA, 120 bp, synthetic construct
  misc_feature 1..120: note = Artificially Synthesized Probe
  source 1..120: mol_type = other DNA
gtgatgtgagagttgaatctgtattagagacctcactgagttcaatgagattgtgctttagtgaaggactggctagttctccagaacttgaagttagttacatttgaagacactcatagg

SEQ ID NO: 8967 - DNA, 120 bp, synthetic construct
  misc_feature 1..120: note = Artificially Synthesized Probe
  source 1..120: mol_type = other DNA
atatatatatatatgcaagttttcagggagcagacaattagaattcagtggatgattatgaacaggagagttagtaacttcagggaatggggtaacaggaaaggctgggtgggaggactt

SEQ ID NO: 8968 - DNA, 120 bp, synthetic construct
  misc_feature 1..120: note = Artificially Synthesized Probe
  source 1..120: mol_type = other DNA
actcaggtcaccaatttggcaattgcagaataacgtggaagagaaccacagggcatttccaagcaaataaagtaagtagccagcaatcttccaataagcaaagctaaaatgcttgttttg

SEQ ID NO: 8969 - DNA, 120 bp, synthetic construct
  misc_feature 1..120: note = Artificially Synthesized Probe
  source 1..120: mol_type = other DNA
caattaccctgacaaaggaatatatggcattggaagcaagttctgctattccttcaaaaacagataatcacttcagtttatgacccattcaggaaatagaagagagagaaatgcccattt

SEQ ID NO: 8970 - DNA, 120 bp, synthetic construct
  misc_feature 1..120: note = Artificially Synthesized Probe
  source 1..120: mol_type = other DNA
gggaattcaaagaagagcattcaaagggaacaagaaggcaattgaaggtagacagaacacacagtccatgatgaacacttaatagtcatgagatcttctgtgtcaacacagaaacgaaag

SEQ ID NO: 8971 - DNA, 120 bp, synthetic construct
  misc_feature 1..120: note = Artificially Synthesized Probe
  source 1..120: mol_type = other DNA
aggggagttgacctaacagatattaagatgtatttctaaagccatagcagctaaaatagtacagtattaatgtagggacaaacagagcaatgaagaataaagagaccagcagtaaaccca

SEQ ID NO: 8972 - DNA, 120 bp, synthetic construct
  misc_feature 1..120: note = Artificially Synthesized Probe
  source 1..120: mol_type = other DNA
cttagttcttctaagaaccgattcagtttaggtatggctgtggggctgagcatttcaccttcctgggtctcagttttttcactacaggaacttgtaatagagaatcttaaagtaagcttt

SEQ ID NO: 8973 - DNA, 120 bp, synthetic construct
  misc_feature 1..120: note = Artificially Synthesized Probe
  source 1..120: mol_type = other DNA
aaggcaagagaattctatttggtcagcatcatggagatggtctcagtaggtgctgggtgaatcagattttaggcacaatctttgatctataaacacacatgcatgcacacaattcagtaa

SEQ ID NO: 8974 - DNA, 120 bp, synthetic construct
  misc_feature 1..120: note = Artificially Synthesized Probe
  source 1..120: mol_type = other DNA
atggtaatgctattgaaagaaatgcagaagttggaacaggctcctggattgaaagggaagaagtgaccttgagcatctaacatgctgagtttcaggagacgataagaaaagcaagtgtaa

SEQ ID NO: 8975 - DNA, 120 bp, synthetic construct
  misc_feature 1..120: note = Artificially Synthesized Probe
  source 1..120: mol_type = other DNA
tttaagtttctaatgtggggcagctgctcagttagaaagtaaagttagtgtctgataaggtcaggaatcacacggtgtcacttacttcttctatcccaatggaaagcatctcattctgtt

SEQ ID NO: 8976 - DNA, 120 bp, synthetic construct
  misc_feature 1..120: note = Artificially Synthesized Probe
  source 1..120: mol_type = other DNA
ttgtacatgatacaaatttaaaatattcaaaaggatatatggtaaaaagataaaaaaagacttctatccctacagttctccggttctcccctcctgaggtacccactgtccagtttccta

SEQ ID NO: 8977 - DNA, 120 bp, synthetic construct
  misc_feature 1..120: note = Artificially Synthesized Probe
  source 1..120: mol_type = other DNA
tcagacggtctcctattggtggaattaagttgtttccaatatttcttgcttttacaaacaaagctgcagtgtacaaggatggttacatgctttatgcaagtgcagaggtgtatctggagg

SEQ ID NO: 8978 - DNA, 120 bp, synthetic construct
  misc_feature 1..120: note = Artificially Synthesized Probe
  source 1..120: mol_type = other DNA
tacatctgagatcacactggaagctttcgtttttcttagttctttttcttcaggcctggcatcttcatccacaaggacagtcctaggaagtttaatgaaatgcagagattcactcattgg

SEQ ID NO: 8979 - DNA, 120 bp, synthetic construct
  misc_feature 1..120: note = Artificially Synthesized Probe
  source 1..120: mol_type = other DNA
tccgtgtaaagaaaagaaaagctactacaaataatctatgttggctttgcacttacttaacaaaatcatttaaatccatctcgggggactctactgtaactaggattgctggtgggctgg

SEQ ID NO: 8980 - DNA, 120 bp, synthetic construct
  misc_feature 1..120: note = Artificially Synthesized Probe
  source 1..120: mol_type = other DNA
gtccactctaaccatgtcctagagtatcatttcctaaatttcagggatcctagagtatcatttcctaaatttcagggatcccactaccatcttcgtgatttgtaagcacacagtttgatg

SEQ ID NO: 8981 - DNA, 120 bp, synthetic construct
  misc_feature 1..120: note = Artificially Synthesized Probe
  source 1..120: mol_type = other DNA
gaaaaatcaacacaatggaaaaaaatcaatgtaattattttcttgcctggtgaaggctctgagctgagctctggttgctcttttaagaagggaaaacactgggctggcatgatcttggct

SEQ ID NO: 8982 - DNA, 120 bp, synthetic construct
  misc_feature 1..120: note = Artificially Synthesized Probe
  source 1..120: mol_type = other DNA
gattactttcctggtatgctgacccaaacaggagtagattcagttatttttaaaagggagtgcatagcaaacaagaacaatcgatactgttccaattccagagctccccgtatcagaatc

SEQ ID NO: 8983 - DNA, 120 bp, synthetic construct
  misc_feature 1..120: note = Artificially Synthesized Probe
  source 1..120: mol_type = other DNA
aatgtccaataatgaatgtgagctgctcttgtgtggggttggtgaggattaccatcatttttggaattcaaatgagggaggtactaactcttcttggatgcatacagaagtcttcatgga

SEQ ID NO: 8984 - DNA, 120 bp, synthetic construct
  misc_feature 1..120: note = Artificially Synthesized Probe
  source 1..120: mol_type = other DNA
acatctacctaatctttaagcattagcttagatgttactttcaccggaacatcttccctgacccccaggtccaggttcaggggtcatctccatgcttctacatcccacactgtaatttac

SEQ ID NO: 8985 - DNA, 120 bp, synthetic construct
  misc_feature 1..120: note = Artificially Synthesized Probe
  source 1..120: mol_type = other DNA
tgagaacatccagcacttcaaaggtctgagtgtgcgctagtggcctctgtgaattaatttcattgctgagattattttctcctgcagttccaatctcatatttccattgttcctaattta

SEQ ID NO: 8986 - DNA, 120 bp, synthetic construct
  misc_feature 1..120: note = Artificially Synthesized Probe
  source 1..120: mol_type = other DNA
agtggtaaagcaactgtatcaagtaagagccccaattaagtaactgcagctgaccttatcatcactattccctaccaggaactatgaagcacttgataagcactgcctaatttaatcttc

SEQ ID NO: 8987 - DNA, 120 bp, synthetic construct
  misc_feature 1..120: note = Artificially Synthesized Probe
  source 1..120: mol_type = other DNA
tagaagctggcttagctcacattgaatctctggaagtctgatgccctccactgatactggaaacatcgggaaaatgccttaaaaagaaagaagctataataaggtgactagagttctata

SEQ ID NO: 8988 - DNA, 120 bp, synthetic construct
  misc_feature 1..120: note = Artificially Synthesized Probe
  source 1..120: mol_type = other DNA
ctttttttctgtacagtcactctctgcatccgtgggtaccgcatccagtgattcaaccaaccaggaatcaaaaacttctgagaaaagaaaaatgacaaaacccaacaacacaacaataaa

SEQ ID NO: 8989 - DNA, 120 bp, synthetic construct
  misc_feature 1..120: note = Artificially Synthesized Probe
  source 1..120: mol_type = other DNA
gcaggtggtttgtatgccaaaactgctctctgttggtgcctcgtctttgtactcttttaatggtatctcttgatgcagaaagttctcaaattcaacatagagattacggatagtttcact

SEQ ID NO: 8990 - DNA, 120 bp, synthetic construct
  misc_feature 1..120: note = Artificially Synthesized Probe
  source 1..120: mol_type = other DNA
tggctagtcttatccctcttctatataaagtttaggatcaacctgtcaggattctgattggaagtacatttaaactatagatcactctggggaaaaatgacatctttactgaactgagcc

SEQ ID NO: 8991 - DNA, 120 bp, synthetic construct
  misc_feature 1..120: note = Artificially Synthesized Probe
  source 1..120: mol_type = other DNA
tgatttttaaaggaaatgactttaacatgtcttcatattttaaaaagttatccttgatcaggttaaggaattttcacatgaatagttggttctactgaaatttttcctggatttattgag

SEQ ID NO: 8992 - DNA, 120 bp, synthetic construct
  misc_feature 1..120: note = Artificially Synthesized Probe
  source 1..120: mol_type = other DNA
gtgtagaaatttcaacattgctttgtgacttaatgtaattcttaaatagtaattaggcatcagctaactcagccctagctacagatgtgagggttccttggaggaagcccaggaactaat

SEQ ID NO: 8993 - DNA, 120 bp, synthetic construct
  misc_feature 1..120: note = Artificially Synthesized Probe
  source 1..120: mol_type = other DNA
ctcaatgacagtgaaccaaactgtaggaatgatgtctagaagaaaaaacaattccacccctatgacatggggctgaacttgaatttccaaacctgttaatataaggacagagtcagaggt

SEQ ID NO: 8994 - DNA, 120 bp, synthetic construct
  misc_feature 1..120: note = Artificially Synthesized Probe
  source 1..120: mol_type = other DNA
tccatgtttgtctttgggggctcatcaattccatgcacagcagtaagtcttatttatctttgtagtccccatcacacatagcacaatattcaggtagagtgttcagagaaggttcgttta

SEQ ID NO: 8995 - DNA, 120 bp, synthetic construct
  misc_feature 1..120: note = Artificially Synthesized Probe
  source 1..120: mol_type = other DNA
tgggtactcaatcatagttactgctattggtcaagattacggcagcttcctttcattgctcccaatagctccatgttgaagatttggccatatacatctgtctacaggaaatatttccta

SEQ ID NO: 8996 - DNA, 120 bp, synthetic construct
  misc_feature 1..120: note = Artificially Synthesized Probe
  source 1..120: mol_type = other DNA
gcttctaatgatatggtcattaatagaggatccatttttaaagagagtaaagggagcacaagaactcaatgccagtaatgttagaggctctgaataggttggataagggacagcctcaag

SEQ ID NO: 8997 - DNA, 120 bp, synthetic construct
  misc_feature 1..120: note = Artificially Synthesized Probe
  source 1..120: mol_type = other DNA
tccaaacttttccctgggaagtgaaaaagaaaaacgcaaatacttgagctcacagcgttctgagaggtacaaagctggtgaggaagacaggatgtttatggaagggacaaaagcttagat

SEQ ID NO: 8998 - DNA, 120 bp, synthetic construct
  misc_feature 1..120: note = Artificially Synthesized Probe
  source 1..120: mol_type = other DNA
tcacttagcagcatttggtacaaaggaagagacccttagagaacctaaaaacagccaccaatttgggagtgcttggcatgtctcagggacatatgcatgttaagatacacttcatttaat

SEQ ID NO: 8999 - DNA, 120 bp, synthetic construct
  misc_feature 1..120: note = Artificially Synthesized Probe
  source 1..120: mol_type = other DNA
caatggctgccttttcctcttaccgaggacttatttagcatgcttgtccattttacttctttctttgttcttagatgtgacatgagggccaacttggggaaaaaaatgtgagctcaaaca

SEQ ID NO: 9000 - DNA, 120 bp, synthetic construct
  misc_feature 1..120: note = Artificially Synthesized Probe
  source 1..120: mol_type = other DNA
atgggaatgaggttttcagaaggcagaataggtagaagttggtggtggatttgatagggtgggtggggttagagagaggaagaaatcctaatgcctcccaggagagcagtgatgtcattt

SEQ ID NO: 9001 - DNA, 120 bp, synthetic construct
  misc_feature 1..120: note = Artificially Synthesized Probe
  source 1..120: mol_type = other DNA
ctaagcgttacctttctgcaaaaacctttgtcaccttcttgattacaaatcccaccactgcctccaagaaagagcgttaattccttctggaatatcaggtctctcacacacttctgccaa

SEQ ID NO: 9002 - DNA, 120 bp, synthetic construct
  misc_feature 1..120: note = Artificially Synthesized Probe
  source 1..120: mol_type = other DNA
ccactagcctgaggacaagggtcacgtcttgttcacttttatagtgctgattcctcaatatgtggctcacaataatcacttatcaaatgttttctgactgactctctgattgagtaaatg

SEQ ID NO: 9003 - DNA, 120 bp, synthetic construct
  misc_feature 1..120: note = Artificially Synthesized Probe
  source 1..120: mol_type = other DNA
aatgaaccagaacagaaacccattgaaatatgtaaaacaggcaacatggagctcagtgctacacatactcaatgtagggtcctactcagtctgtgctttgagtttgaaatgtttttcaag

SEQ ID NO: 9004 - DNA, 120 bp, synthetic construct
  misc_feature 1..120: note = Artificially Synthesized Probe
  source 1..120: mol_type = other DNA
cactgcactccagcctgggcgacaagagcgaaactctgtctcaaaaaaaaaaaaaaaaaaagtgtttggcagttcccctctcacttgctgtctctcctgctatcatgaaagatatgcctt

SEQ ID NO: 9005 - DNA, 120 bp, synthetic construct
  misc_feature 1..120: note = Artificially Synthesized Probe
  source 1..120: mol_type = other DNA
tggtcaaaatggaaaatattcatgaatggccagtacatggaatacagaaaaccccatgaaaagcctgaaagagaaaacaaatgaaaagcagagttctgtgagagttctgtgctgggggta

SEQ ID NO: 9006 - DNA, 120 bp, synthetic construct
  misc_feature 1..120: note = Artificially Synthesized Probe
  source 1..120: mol_type = other DNA
tctgttttcagtgcacctcatctttccactgggcttaaacgattctggtatttaactgtgcatttaatgacatgattagatggtttcggttgataaagccactcacctgattcaacagtc

SEQ ID NO: 9007 - DNA, 120 bp, synthetic construct
  misc_feature 1..120: note = Artificially Synthesized Probe
  source 1..120: mol_type = other DNA
gttcacgggcagggtggaaatgttctttatggccaagggctggtaatcaggtttcaggatactgttaggtttctgcaaaaacagaaaaagaggaaacaaatcaacttatggtaaatacag

SEQ ID NO: 9008 - DNA, 120 bp, synthetic construct
  misc_feature 1..120: note = Artificially Synthesized Probe
  source 1..120: mol_type = other DNA
cagatttaatttttcaactagagaaggcatcagaaatgaatctcgagttgagagtttctggccagactggatttttctcattctgatgttggggcccacattatttcttgtattccctag

SEQ ID NO: 9009 - DNA, 120 bp, synthetic construct
  misc_feature 1..120: note = Artificially Synthesized Probe
  source 1..120: mol_type = other DNA
aatgtgctgctggaacttcatgaagaaaagtggctgctagtttcaattgaccttttcaatcccacagagatgtggtttcatctccgtggcttatgaatggtacgatagttataaagtaga

SEQ ID NO: 9010 - DNA, 120 bp, synthetic construct
  misc_feature 1..120: note = Artificially Synthesized Probe
  source 1..120: mol_type = other DNA
tcatggagcttgttggcttcgggtttagcttgggtttcagtgacgggaagctaaactaacaatgtccaccttccccactcatctattaagccaagccatggatattttattttattttat

SEQ ID NO: 9011 - DNA, 120 bp, synthetic construct
  misc_feature 1..120: note = Artificially Synthesized Probe
  source 1..120: mol_type = other DNA
ttaaagtcagccagcttagctttggttatgtttgtctggttcactagatttccagtaccagctcaatccccaactcagaacagacattccttacatgtcttgaatggtaattaattctgg

SEQ ID NO: 9012 - DNA, 120 bp, synthetic construct
  misc_feature 1..120: note = Artificially Synthesized Probe
  source 1..120: mol_type = other DNA
ttagttgaatgtgtactggcctctgaagcttaaaaaacatgggctgagtaatgggtggaaaaggatgcccattaattcagctttcaaaatgaaaatgtaaacatgctgaccctagtcgaa

SEQ ID NO: 9013 - DNA, 120 bp, synthetic construct
  misc_feature 1..120: note = Artificially Synthesized Probe
  source 1..120: mol_type = other DNA
ttaagctgagtttagtcccccagcagctcagaattaatgccttcaaaaatatggacaactcttgataaccacattataaatatgctcttccaacagctgtcagtgtcttgagataagggc

SEQ ID NO: 9014 - DNA, 120 bp, synthetic construct
  misc_feature 1..120: note = Artificially Synthesized Probe
  source 1..120: mol_type = other DNA
ccccgaaagcaacggatgctactatggtaactcaggattgtacacaatccttgagaaaccatatccttcctcagataaatgtcaagggactttcctaagaaatagatacagtagagattt

SEQ ID NO: 9015 - DNA, 120 bp, synthetic construct
  misc_feature 1..120: note = Artificially Synthesized Probe
  source 1..120: mol_type = other DNA
ctgaaggagaagcgagtttcaagctgtgctgagaaaattactagtgactgagtggaatgtcccataacaatgggctcaatttgaaggaagctttgaagaaaaaccatgcatattctctaa

SEQ ID NO: 9016 - DNA, 120 bp, synthetic construct
  misc_feature 1..120: note = Artificially Synthesized Probe
  source 1..120: mol_type = other DNA
gggttgtagtttacccagccctgcttttgacaattcttctggagactgcaggcatagtgattttatgtcaaaaagtttaggcagagggcaaattagcaactaaagctacagtttgctttt

SEQ ID NO: 9017 - DNA, 120 bp, synthetic construct
  misc_feature 1..120: note = Artificially Synthesized Probe
  source 1..120: mol_type = other DNA
cccacctcagcctcccaaagtaaagtgctgggatcataggcataaaccactgctcccagcccaaaccttatatatgtgtgtgtatacatatatatgtgtgtgtgtatatgtatatgtgtg

SEQ ID NO: 9018 - DNA, 120 bp, synthetic construct
  misc_feature 1..120: note = Artificially Synthesized Probe
  source 1..120: mol_type = other DNA
agtagccagtttgagaaaagaatgcatttcctacaaaccatattcttctcggatgtagagggacacggattagagaatgcaaccaagttatggctagaaaatgtcttcttgttgctgaca

SEQ ID NO: 9019 - DNA, 120 bp, synthetic construct
  misc_feature 1..120: note = Artificially Synthesized Probe
  source 1..120: mol_type = other DNA
tcttggctttttgttctatagatgtcaaagccctctacacttcaaatgggtggcattgtggaattcaacatcagagacaaacattattttttgaattaaagcagctggatgtttgttggt

SEQ ID NO: 9020 - DNA, 120 bp, synthetic construct
  misc_feature 1..120: note = Artificially Synthesized Probe
  source 1..120: mol_type = other DNA
cagagtgaaactacttcaggggaatctaaagaacaagagcaaaggatgttgaaacccttggaatgtctgacaaatgcaccacacacattttcttttccctccaaatatgaaattgggctt

SEQ ID NO: 9021 - DNA, 120 bp, synthetic construct
  misc_feature 1..120: note = Artificially Synthesized Probe
  source 1..120: mol_type = other DNA
tatgatatacttcttctagcaaaaggagaaaaaagagaaatgtaaaaacacatgtagctctatgggggctcaggtacaatggactggaaacctcctgacaaacttaggtcagagttgcac

SEQ ID NO: 9022 - DNA, 120 bp, synthetic construct
  misc_feature 1..120: note = Artificially Synthesized Probe
  source 1..120: mol_type = other DNA
cattttcagttggcatacacaatcaaagcaatacatggaaatggatttctcatgcttgagtaaccagacgttctcctttcttataactgttttccctacttgctgttttgaaattctagg

SEQ ID NO: 9023 - DNA, 120 bp, synthetic construct
  misc_feature 1..120: note = Artificially Synthesized Probe
  source 1..120: mol_type = other DNA
aagttctgggcaagaagatctcactttgttgacccttcttcccaaattgatggcctgttagcatcctacatagctttgctcatttatgagactcagcttacaacgaaaacataaatcaat

SEQ ID NO: 9024 - DNA, 120 bp, synthetic construct
  misc_feature 1..120: note = Artificially Synthesized Probe
  source 1..120: mol_type = other DNA
tgacatacaattatcagctcaaaacagaaaacaaagatggatgctaaggaagcatttaacatacaagactcttgccagaaaaggagcggctatggggttgtgacaggcagaattctaagt

SEQ ID NO: 9025 - DNA, 120 bp, synthetic construct
  misc_feature 1..120: note = Artificially Synthesized Probe
  source 1..120: mol_type = other DNA
tcatatatctaaggataacatttgccttttatttgacaatacggcagcagcacacttatgcagtgctcagctcccaaggtaaagcagccagagctttataggtttccttattgtgtgttt

SEQ ID NO: 9026 - DNA, 120 bp, synthetic construct
  misc_feature 1..120: note = Artificially Synthesized Probe
  source 1..120: mol_type = other DNA
aagataaaataaaagggtgctaagcatctagcacctcgtctatcatagattacatgctcagtcagtggtgatcattactaatgttattttccaaacttcccatccagttctccttcctgc

SEQ ID NO: 9027 - DNA, 120 bp, synthetic construct
  misc_feature 1..120: note = Artificially Synthesized Probe
  source 1..120: mol_type = other DNA
acacaactttacatacaagttccagagctcagggatcccagttttttctgtttgatccatacgtggactcactttttatatctggggaatccatgattttgtgtgaatctcggtaggagg

SEQ ID NO: 9028 - DNA, 120 bp, synthetic construct
  misc_feature 1..120: note = Artificially Synthesized Probe
  source 1..120: mol_type = other DNA
tcaacactgctagggggtaggacataaactgtacaagttctctgggacagaattcacaagatgtatcgagacttttagttacatacatgtcatttgacccagcaacggcatttctagaaa

SEQ ID NO: 9029 - DNA, 120 bp, synthetic construct
  misc_feature 1..120: note = Artificially Synthesized Probe
  source 1..120: mol_type = other DNA
catttttcccattgcacgaatccttacctgtcaacacagtccaccactgtcagttcttttagcctttgctttttggatttgcctctatattgctaagtactctactgctacttcttaagt

SEQ ID NO: 9030 - DNA, 120 bp, synthetic construct
  misc_feature 1..120: note = Artificially Synthesized Probe
  source 1..120: mol_type = other DNA
gggcctgtttccatccaccgtgcagcatatttgatgaaccttctccgtaaattcctttcctctgttctgaaaacattccttcaattatttcttgggtaactttttcatctgcatttaaga

SEQ ID NO: 9031 - DNA, 120 bp, synthetic construct
  misc_feature 1..120: note = Artificially Synthesized Probe
  source 1..120: mol_type = other DNA
gcatctttacaagaatgtgcctagatgtggttttgtggttttatcttgcctggttttcataatgcattttgatagcttggtctcagcctttatctattcttcctcatctcgcctcttctc

SEQ ID NO: 9032 - DNA, 120 bp, synthetic construct
  misc_feature 1..120: note = Artificially Synthesized Probe
  source 1..120: mol_type = other DNA
tccagcttttctccttgttcttagagggaaatagtttggaatgacagattaaatagaaaggccttgaaccctgatgtgctaagagtcccttttggtcaagcaattgttctactgcttgat

SEQ ID NO: 9033 - DNA, 120 bp, synthetic construct
  misc_feature 1..120: note = Artificially Synthesized Probe
  source 1..120: mol_type = other DNA
aacaacatcctcacttttgatggtacagtatactatctcagtactcatacactgaataactgcttgttgaatgactacatatgtaaggcaactgtgcatggcacatgatcatgtctgccc

SEQ ID NO: 9034 - DNA, 120 bp, synthetic construct
  misc_feature 1..120: note = Artificially Synthesized Probe
  source 1..120: mol_type = other DNA
cttgcaaggaatgcaggagaccaaggtattttccttttgtcttctgaacagcccttagtgacaaggaaaccaaactccctcctttaattttggcttcatattattctcagatgaatcata

SEQ ID NO: 9035 - DNA, 120 bp, synthetic construct
  misc_feature 1..120: note = Artificially Synthesized Probe
  source 1..120: mol_type = other DNA
ttgtgagtagtgctgcagtaagaatgtgggtgcagccatctctacaacactgatctccttccctgtggataagtacccagtagtgggattgctggatcataggatagttctatttttagt

SEQ ID NO: 9036 - DNA, 120 bp, synthetic construct
  misc_feature 1..120: note = Artificially Synthesized Probe
  source 1..120: mol_type = other DNA
agcccaaatttgattctggattagtggtcactgtctaggctgaaggcaaatgtaaaaatgctagaaaagaaggtgtgagcactgagaaggagaaagaaacatcctccatatcagattgat

SEQ ID NO: 9037 - DNA, 120 bp, synthetic construct
  misc_feature 1..120: note = Artificially Synthesized Probe
  source 1..120: mol_type = other DNA
caccaacaattaatgccagaggtcaatcttcaaagagttgaaagaaaagagaaaaaccatcaaatagaatcatatgctcagctaaactaagcatcgtaaactacagatctctagcattag

SEQ ID NO: 9038 - DNA, 120 bp, synthetic construct
  misc_feature 1..120: note = Artificially Synthesized Probe
  source 1..120: mol_type = other DNA
tttcagcacgtgttaatgataacaaataagaaaggattagaactttcttaatgtgacataggcgtttaccaaaaacctataagagatgttatgcttaaaatgaaacatttggccgggcgc

SEQ ID NO: 9039 - DNA, 120 bp, synthetic construct
  misc_feature 1..120: note = Artificially Synthesized Probe
  source 1..120: mol_type = other DNA
cagaaagctcagaaacccacctaggcacatattaagtctgaagtataacagaggaagcaatatcaatgcatgaaaaaaggaaagagtatgcaagaactggtgataggacgaatggctttc

SEQ ID NO: 9040 - DNA, 120 bp, synthetic construct
  misc_feature 1..120: note = Artificially Synthesized Probe
  source 1..120: mol_type = other DNA
gactggcaagaacttgagttggaccatactaagttttagccactacataaatagatacctcaaacactcctggaagggcacattgatataatcactttggagagtaatttggcaacatct

SEQ ID NO: 9041 - DNA, 120 bp, synthetic construct
  misc_feature 1..120: note = Artificially Synthesized Probe
  source 1..120: mol_type = other DNA
attcatgcacatttctttcctttttccttatgcctttttcctcatcatttccctccacagatgtaacaatttagagggcagagctaatctactcattgaagcctgagaaacagcccattc

SEQ ID NO: 9042 - DNA, 120 bp, synthetic construct
  misc_feature 1..120: note = Artificially Synthesized Probe
  source 1..120: mol_type = other DNA
gaaaagagaaggaatctgaaagtcagaccactggggccagaaccaggcctgccacttacaagttgtggcaattaacttaacctatttctacctagttaaaatgggaataataacagtatt

SEQ ID NO: 9043 - DNA, 120 bp, synthetic construct
  misc_feature 1..120: note = Artificially Synthesized Probe
  source 1..120: mol_type = other DNA
gttggtggaggctgatattccaggtgcaggcattccaaagcaaaggagagtctactgttccaggtcacagaacattcttccttgtactaatcaactttttttacactgaaaataaattgt

SEQ ID NO: 9044 - DNA, 120 bp, synthetic construct
  misc_feature 1..120: note = Artificially Synthesized Probe
  source 1..120: mol_type = other DNA
tatgaaacaatattctttacatgagatccacacagtgctagagcacgattggagttgtgtgaaaacctctattaaaaagaccagtgaccatatgtgaatgtggctgccttcataatgagt

SEQ ID NO: 9045 - DNA, 120 bp, synthetic construct
  misc_feature 1..120: note = Artificially Synthesized Probe
  source 1..120: mol_type = other DNA
aaatgatgagttcatgtcctttgtagggacatggatgaaattggaaatcatcattctcagtaaactatcgcaagaacaaaaaaccaaacagcacatattctcactcataggtgggaattg

SEQ ID NO: 9046 - DNA, 120 bp, synthetic construct
  misc_feature 1..120: note = Artificially Synthesized Probe
  source 1..120: mol_type = other DNA
ttatagttttaggttttacatgtaagtctttcatccatcttatttttgcatatggtgtgaggaaggggtctagtttcaatctcctgcatatgactagccagttatgcaaatgccatttat

SEQ ID NO: 9047 - DNA, 120 bp, synthetic construct
  misc_feature 1..120: note = Artificially Synthesized Probe
  source 1..120: mol_type = other DNA
aagaactggggatgggaatgacgtggtttaatacaacaacataaccatgcaaatctctgcttctggtgatcattttcaaagacatgttgcaaaaatagggccattgcctataagccaaag

SEQ ID NO: 9048 - DNA, 120 bp, synthetic construct
  misc_feature 1..120: note = Artificially Synthesized Probe
  source 1..120: mol_type = other DNA
ctggtggcatgttttggggttggcctgccttggtgatgctgttttataagttaagtggcttatttacggcatcttatatggaagagataaaagcaaaatcctagtgttttacgctgtcta

SEQ ID NO: 9049 - DNA, 120 bp, synthetic construct
  misc_feature 1..120: note = Artificially Synthesized Probe
  source 1..120: mol_type = other DNA
ctgggggagagaaaaccagaggggtaaggacagcacagcatggaacaaatagcgtatttgcttattttgaagtgttttcctgagtccgtagaggtgttttagaaatgtcttattattcaa

SEQ ID NO: 9050 - DNA, 120 bp, synthetic construct
  misc_feature 1..120: note = Artificially Synthesized Probe
  source 1..120: mol_type = other DNA
gccgcagtgctccgccgagccttatgacagcctgaggtcggactgatctctttacctaggttttggtatcttgtttattatggattttttggaattaattttgatttcttacaatatgta

SEQ ID NO: 9051 - DNA, 120 bp, synthetic construct
  misc_feature 1..120: note = Artificially Synthesized Probe
  source 1..120: mol_type = other DNA
gctttctggtccaacaaatctacttataaatattgcattacttactgatgccattcaactcacagccatggacataatgaaaactcctagctcatttcccatgcatggttagttcacagg

SEQ ID NO: 9052 - DNA, 120 bp, synthetic construct
  misc_feature 1..120: note = Artificially Synthesized Probe
  source 1..120: mol_type = other DNA
ccattggtctattattaggtgacttggattttatttgccgtctgtgactctcaatgtctatcctaccctttgccattgcttcagtatagtgcaatggtgaagagtaccagcttttgaatt

SEQ ID NO: 9053 - DNA, 120 bp, synthetic construct
  misc_feature 1..120: note = Artificially Synthesized Probe
  source 1..120: mol_type = other DNA
caaaggaaaaaataggtcttgaaggaatactaagtaggtcacagtgggaaccctaatttaagttgtttctgcactgctatttatcttcatccaagcccaagacacgtgaaatagtgtcag

SEQ ID NO: 9054 - DNA, 120 bp, synthetic construct
  misc_feature 1..120: note = Artificially Synthesized Probe
  source 1..120: mol_type = other DNA
tatggatatatagcattttacatttttagttgacaagttacattgtggggtcagggcatgctgagtgttttcaaaggccagggtagaaaccaaatggctgttagtacaatggctttgctc

SEQ ID NO: 9055 - DNA, 120 bp, synthetic construct
  misc_feature 1..120: note = Artificially Synthesized Probe
  source 1..120: mol_type = other DNA
aggcttttctatctataaattatgcatctggtactaattaaaatgttttcagttgcagagggaatcactggatgcaaatttgagtccacacagacctggctgaagtgcagatcaggaggg

SEQ ID NO: 9056 - DNA, 120 bp, synthetic construct
  misc_feature 1..120: note = Artificially Synthesized Probe
  source 1..120: mol_type = other DNA
aaggccatccccagggatacgcagtttgtaagtcatggggatcaaagaggtattattgagggaacatatcaaggtatgaggaaaccctggaaaacaaaatatgatgtgagaaataaaagc

SEQ ID NO: 9057 - DNA, 120 bp, synthetic construct
  misc_feature 1..120: note = Artificially Synthesized Probe
  source 1..120: mol_type = other DNA
tctcttagacaaagctgctttgtcatcgtatccagctttgttccgtgagactcctctcttaagagatgtggacctttcttgcttggcaagcaatacactaagctctgattttctttcttt

SEQ ID NO: 9058 - DNA, 120 bp, synthetic construct
  misc_feature 1..120: note = Artificially Synthesized Probe
  source 1..120: mol_type = other DNA
ggaaagtgggtattataaagagtcacgtggtcttccaaaccattgcccagactgcttccttaaagccagaactttttcacagaataaagccaattatgacctcctagttacaacaatttc

SEQ ID NO: 9059 - DNA, 120 bp, synthetic construct
  misc_feature 1..120: note = Artificially Synthesized Probe
  source 1..120: mol_type = other DNA
tcctgataccatatccagaaacattgtacaagtgggatgtgagtctctggaatatatgtggattaggcccagctcacaaagttcagaatatgtgcttgtaactgtaaattctttggatgg

SEQ ID NO: 9060 - DNA, 120 bp, synthetic construct
  misc_feature 1..120: note = Artificially Synthesized Probe
  source 1..120: mol_type = other DNA
gtttcttatcttaaggttatacaattttgatacaccctgtgatgtctcccttactgttattgacaagttgttttgggcatgctttgctcacacctactatgatctcttctgccaaccctt

SEQ ID NO: 9061 - DNA, 120 bp, synthetic construct
  misc_feature 1..120: note = Artificially Synthesized Probe
  source 1..120: mol_type = other DNA
tggaatgatcagtttcacttttgcatcaggaactatacgcatccctattagtctttcattcctgagctaataacaagcttatgctcatctgtctcattaacgcctccctacttgcatatg

SEQ ID NO: 9062 - DNA, 120 bp, synthetic construct
  misc_feature 1..120: note = Artificially Synthesized Probe
  source 1..120: mol_type = other DNA
agtttccatgtctcaggtttgggaaatcttgggggtcatggttctgcagtgtcttctggcctcttgcatagctgctatatcatcaaatggttcaataagatattacaaaacaaaagaaaa

SEQ ID NO: 9063 - DNA, 120 bp, synthetic construct
  misc_feature 1..120: note = Artificially Synthesized Probe
  source 1..120: mol_type = other DNA
gcaaaaggccaggcaaccatacctcaatggctatgaagggagaagagagattaacttcacactgtccaacggaaatacaatgcaaaacacaaataggtgacattaattttaacaacatag

SEQ ID NO: 9064 - DNA, 120 bp, synthetic construct
  misc_feature 1..120: note = Artificially Synthesized Probe
  source 1..120: mol_type = other DNA
tctttgccttttatgaagcagcccatgcctccactgatctgaaatttcacattgagcatgtgtaaattcccctgtagtcatggctttgtttctattagtctatttgcctatgctttaaag

SEQ ID NO: 9065 - DNA, 120 bp, synthetic construct
  misc_feature 1..120: note = Artificially Synthesized Probe
  source 1..120: mol_type = other DNA
atagctttctacatttttctgtgatgtgagatacatccatttcttcaccatttggtagaactcacttgtaaagctgtttgacctagtgtcttttcttcaggggtagatatttgacttctt

SEQ ID NO: 9066 - DNA, 120 bp, synthetic construct
  misc_feature 1..120: note = Artificially Synthesized Probe
  source 1..120: mol_type = other DNA
tgctacctatgatggagttacagaattgaaagagcatccagttgcacactataaggacagatgtttttcttcagtttagaaattctcagccgccatctcttcaaatattgctctttggcc

SEQ ID NO: 9067 - DNA, 120 bp, synthetic construct
  misc_feature 1..120: note = Artificially Synthesized Probe
  source 1..120: mol_type = other DNA
caaagactatcattgatactagtaatccctgtccatgctttcatataaactgttccaattccactcttaccactgtgacattcctaccactatgacattcactcactgtgatgttggcca

SEQ ID NO: 9068 - DNA, 120 bp, synthetic construct
  misc_feature 1..120: note = Artificially Synthesized Probe
  source 1..120: mol_type = other DNA
ttgttgtaagcctgggaggaatggccacagcaaagactcactgcaacaagtttcaggtctaactttctcatgagcatttattatatctcatgctaacgatctgaagtgattttaaaggga

SEQ ID NO: 9069 - DNA, 120 bp, synthetic construct
  misc_feature 1..120: note = Artificially Synthesized Probe
  source 1..120: mol_type = other DNA
ccatagtcaggtttgttgaaggaaactagaaatgaacatccaaaatcaagaagtggcatgtgaattttggtaaatggaaatgtccagaagatagaacaagaggcttaccctgcacagagc

SEQ ID NO: 9070 - DNA, 120 bp, synthetic construct
  misc_feature 1..120: note = Artificially Synthesized Probe
  source 1..120: mol_type = other DNA
tatggtaactcagtgtttacatgtttgaggtgctgataaatcattttctaaagtggctgccatgtcttacattcctaattaccagtgtatgggagttctcattcctccaccttttcacca

SEQ ID NO: 9071 - DNA, 120 bp, synthetic construct
  misc_feature 1..120: note = Artificially Synthesized Probe
  source 1..120: mol_type = other DNA
cagtatcccctttgaagcacaaacttttttacattctgatgaagtctaatttatttattttttctttggttgcttgtgcttagatgctgattatctgaaaactattgcttatttggtttt

SEQ ID NO: 9072 - DNA, 120 bp, synthetic construct
  misc_feature 1..120: note = Artificially Synthesized Probe
  source 1..120: mol_type = other DNA
gtttgttttttggttggaatatattacaggtctattcagattttctatttcttcttgagtcagttttggtagttcgtgtctttctaggaatttgttcatatcatctacattatctaattt

SEQ ID NO: 9073 - DNA, 120 bp, synthetic construct
  misc_feature 1..120: note = Artificially Synthesized Probe
  source 1..120: mol_type = other DNA
tttattcctaaaaggggtagctatgtatgttgatggtaagacacagtattattaggcctgaacttaaaatggggaatggccaggtgaaattgggatgggctttcttattaaacttgaggg

SEQ ID NO: 9074 - DNA, 120 bp, synthetic construct
  misc_feature 1..120: note = Artificially Synthesized Probe
  source 1..120: mol_type = other DNA
aacagaagtttatttctgttgctgtcagaagggttggtgattgcagggttatttttttctgagggtctctcgcttcagcttctctttattttttcacatggcccttttctatgtgtatgt

SEQ ID NO: 9075 - DNA, 120 bp, synthetic construct
  misc_feature 1..120: note = Artificially Synthesized Probe
  source 1..120: mol_type = other DNA
aaaacttctgttagtttctacattcattataaatgtaccttacctaatggtcagtttcacaggctcaggtgacccattgacattgaccaggaactcttcttcaaagtttcccaggatggt

SEQ ID NO: 9076 - DNA, 120 bp, synthetic construct
  misc_feature 1..120: note = Artificially Synthesized Probe
  source 1..120: mol_type = other DNA
ttcccagaagaagtcagatgcagacagaggtcaggagagtaagtctggagcaaaggttacagacattatttttagttagagattattgtcatccctgaccttgaggaagagagtaattct

SEQ ID NO: 9077 - DNA, 120 bp, synthetic construct
  misc_feature 1..120: note = Artificially Synthesized Probe
  source 1..120: mol_type = other DNA
ataaataattgctgcttgctattttattcatctttttatgtttctttcgcatctccctcattctaaggtccctggtagcaggaaccaggcttcacccttcattgcgtttaaagagaccac

SEQ ID NO: 9078 - DNA, 120 bp, synthetic construct
  misc_feature 1..120: note = Artificially Synthesized Probe
  source 1..120: mol_type = other DNA
tcaagtaggtaatgcaataaattgaaagagagatgcaatgaagcatcagcattaaatacgcagacagtgcaaaatattcccataagaagcaccttaccgtgtccttctctgccactgcac

SEQ ID NO: 9079 - DNA, 120 bp, synthetic construct
  misc_feature 1..120: note = Artificially Synthesized Probe
  source 1..120: mol_type = other DNA
tttactgtgcagacagctaatggaatatgaatgtaagtgaaatgtgctaccatctataaaaatatcatatacgttcccccatgccctttccccttccacaatcttgtagaccacgtggta

SEQ ID NO: 9080 - DNA, 120 bp, synthetic construct
  misc_feature 1..120: note = Artificially Synthesized Probe
  source 1..120: mol_type = other DNA
aaacaatgaggataaaaccagtgaaactatggctttgatgctttttagctttcactaaagtgaaggagggctaatgaagataaaaaagttgttcccctcatgatggccaggcaggaggag

SEQ ID NO: 9081 - DNA, 120 bp, synthetic construct
  misc_feature 1..120: note = Artificially Synthesized Probe
  source 1..120: mol_type = other DNA
gcaccgagggaactgcaatttaactaacgctgaagattcatcctatatgggagccaatcataatcctgaatgccaaaatcctgactggcgaaattgtgaaaaaccaaaatcccaaagata

SEQ ID NO: 9082 - DNA, 120 bp, synthetic construct
  misc_feature 1..120: note = Artificially Synthesized Probe
  source 1..120: mol_type = other DNA
acaaagaaaagtaattctaaatcagagaagggtgaccattgattgatgcttctcataaaatgagagccaacctggggctccaagggacattattcacattgatcttccttagatttcgga

SEQ ID NO: 9083 - DNA, 120 bp, synthetic construct
  misc_feature 1..120: note = Artificially Synthesized Probe
  source 1..120: mol_type = other DNA
atggtccactgttgggaggcaaatatgtttaaaactcttattggacatttaagtggcttccaacctttcattacaatttgtagtgtaattactattatcgaacatgtatccgtgaacaat

SEQ ID NO: 9084 - DNA, 120 bp, synthetic construct
  misc_feature 1..120: note = Artificially Synthesized Probe
  source 1..120: mol_type = other DNA
tactctaaagtctgggggattagattactagggcctttcctcctgggacataccacggacttttgttttcttctttaaccttacttatctttttggcctctctgcagtttttaccaaaaa

SEQ ID NO: 9085 - DNA, 120 bp, synthetic construct
  misc_feature 1..120: note = Artificially Synthesized Probe
  source 1..120: mol_type = other DNA
atgactgatttattcaaagggttcccctgctccatccgatccctggaaaagagggtcctctaaagatcaggtgttagttgtggcaatactctaaactatagataaaactttctttctttt

SEQ ID NO: 9086 - DNA, 120 bp, synthetic construct
  misc_feature 1..120: note = Artificially Synthesized Probe
  source 1..120: mol_type = other DNA
ggtcacattacaaatgctacttttccacaagattttctaagcagatatttttcttgtcttggcaaaaggcagcaagagatacaagcatggaggaactagtaaactttaagggcagactcc

SEQ ID NO: 9087 - DNA, 120 bp, synthetic construct
  misc_feature 1..120: note = Artificially Synthesized Probe
  source 1..120: mol_type = other DNA
gaaaaggaagattcaatgtcatcgagagtgtccattttctcccaacagatttatatctataaattcaatgtactgctaaacaaaacgccagcaggtagaatttggtggagtgtggtgggt

SEQ ID NO: 9088 - DNA, 120 bp, synthetic construct
  misc_feature 1..120: note = Artificially Synthesized Probe
  source 1..120: mol_type = other DNA
aaaactcttgttcactaaaatcaccttaatgagagtgaacggacaagacacaaactaggagaagatatttgcaggacatatcaagccagttacatcccaaatacatcaaaagcccctatg

SEQ ID NO: 9089 - DNA, 120 bp, synthetic construct
  misc_feature 1..120: note = Artificially Synthesized Probe
  source 1..120: mol_type = other DNA
taactgactacacaaaattttaaatggatagttacctctctgcaggaaacagaaggacacagatattctaaaatatggtagagtcccatttcttaacgtgggtgacaggttcacagttgt

SEQ ID NO: 9090 - DNA, 120 bp, synthetic construct
  misc_feature 1..120: note = Artificially Synthesized Probe
  source 1..120: mol_type = other DNA
tgtggtacaggacagggaccaggactgtcacaacctagaattcaaatcttggattaagaagccccacagataaactcacctaaattctctaagctttagccttctcatctgtaaaataaa

SEQ ID NO: 9091 - DNA, 120 bp, synthetic construct
  misc_feature 1..120: note = Artificially Synthesized Probe
  source 1..120: mol_type = other DNA
aaataacaggttctagaaataaaaagggaactcagctagcatagtaaactagtgagatgacccaaagaaggcccagagatgtgtagagtagatacagaacttatggtttagtgggtccag

SEQ ID NO: 9092 - DNA, 120 bp, synthetic construct
  misc_feature 1..120: note = Artificially Synthesized Probe
  source 1..120: mol_type = other DNA
aaaattttcccttttatgactcacagaaagcaaatggacaatgaggtttcatcttaattgggtctctgaaggaagtgggagcatctggaatcatttccaccatgctgcttttctgcattt

SEQ ID NO: 9093 - DNA, 120 bp, synthetic construct
  misc_feature 1..120: note = Artificially Synthesized Probe
  source 1..120: mol_type = other DNA
tcttcatgtattttcacaaagtatttccctgacttgcatgcccagcctttgtttatgtttttacgtgcttcacaaatacttcaagggtcactttctctggaaagctttccttgacatccc

SEQ ID NO: 9094 - DNA, 120 bp, synthetic construct
  misc_feature 1..120: note = Artificially Synthesized Probe
  source 1..120: mol_type = other DNA
agcccaccaacatggcacatgtatacatatgtaacaaacctgcacgttgtgcacatgtaccctagcacttaaagcataataaaaaacaagtaaaattaaattaaaaaaaaaaaagcttaa

SEQ ID NO: 9095 - DNA, 120 bp, synthetic construct
  misc_feature 1..120: note = Artificially Synthesized Probe
  source 1..120: mol_type = other DNA
gggaggctgcagtgagaggagtatgattgggaaggaacacactgaggcttctaggggctgaaaatattctattattgatcttggtggcaataacatagtgcttgccttataattatttgt

SEQ ID NO: 9096 - DNA, 120 bp, synthetic construct
  misc_feature 1..120: note = Artificially Synthesized Probe
  source 1..120: mol_type = other DNA
ccagattctgggggtcaggacctggacatctttgggaggccacttctgtgcttaccactaaatgtattatgtaatttctgaatctgcattctattcaataatgacacaaggttaaaaatt

SEQ ID NO: 9097 - DNA, 120 bp, synthetic construct
  misc_feature 1..120: note = Artificially Synthesized Probe
  source 1..120: mol_type = other DNA
cctagtccattctgcattcattctggggacgtctggagaattctgcattcacatgcaagggagaggtcaaatcaaaacaggattcacttagtcatttttttccagttatttgcttattca

SEQ ID NO: 9098 - DNA, 120 bp, synthetic construct
  misc_feature 1..120: note = Artificially Synthesized Probe
  source 1..120: mol_type = other DNA
gaaaaaaactgagctgagtctcttgcaaagcaattggcaaatgctaaagttcagtgcttcaccttgaccacaaagaagaaaactttccaagtttttgagtaacacctgcttgtacctctg

SEQ ID NO: 9099 - DNA, 120 bp, synthetic construct
  misc_feature 1..120: note = Artificially Synthesized Probe
  source 1..120: mol_type = other DNA
cagtgttctgaggagaaatgattttgaacctgggatcctatagtcagctaaactgtcaagtgagtatgaaggcaaaataaggtattttcgggcattcaaggatcaaagtttccacttcca

SEQ ID NO: 9100 - DNA, 120 bp, synthetic construct
  misc_feature 1..120: note = Artificially Synthesized Probe
  source 1..120: mol_type = other DNA
gaagttaataaatccaccaaaagcaacataagcatagagctggcaagggaaaccaccatcacaagaaacagccaaaagaagtttttggaagtagcagtggtgacacagactaacatttag

SEQ ID NO: 9101 - DNA, 120 bp, synthetic construct
  misc_feature 1..120: note = Artificially Synthesized Probe
  source 1..120: mol_type = other DNA
ctgggataaaccaagatagcatctcccaggcttcttcactgcaaagttagttttctccccttcataaaaagtattttgaggaaagatgttttgagactattccatgtcctactttcaccc

SEQ ID NO: 9102 - DNA, 120 bp, synthetic construct
  misc_feature 1..120: note = Artificially Synthesized Probe
  source 1..120: mol_type = other DNA
aatggactaatacagtttccatttcctccacatgccaccataattgtaaagcactttaaagtttgatctgttataggaagaagtgagaggggcatagcttggctccataattcccctaat

SEQ ID NO: 9103 - DNA, 120 bp, synthetic construct
  misc_feature 1..120: note = Artificially Synthesized Probe
  source 1..120: mol_type = other DNA
gcagtcaaggaaatcaacacatctatctcctcacatagttaacttgtgtgtgcgtggtgagaggacctggtctgtctactctcttagcaagtacccaacatatcatacattattattaac

SEQ ID NO: 9104 - DNA, 120 bp, synthetic construct
  misc_feature 1..120: note = Artificially Synthesized Probe
  source 1..120: mol_type = other DNA
agcaatggcccaaggtagaacaatagcttggtcaaaccctgcttctactccagtgtggcatttctccctttaattggaactaccaaaaagtcataatcaggaaaccaagttttaaaatgg

SEQ ID NO: 9105 - DNA, 120 bp, synthetic construct
  misc_feature 1..120: note = Artificially Synthesized Probe
  source 1..120: mol_type = other DNA
tactgggaatgcattgggcagacagtgaatagtcactcaatgtacattttaaaatgtcgtatacatcctagtttcctttagatctcacatccccagatcagcctgtgagaatgaaggctc

SEQ ID NO: 9106 - DNA, 120 bp, synthetic construct
  misc_feature 1..120: note = Artificially Synthesized Probe
  source 1..120: mol_type = other DNA
aatgctttcaaaagtatgatcccagcaatccagggtccatgtgcagaagagggtaacacacttcagtttctcttagaacactcttggactgccatcatcaaagaggtctgattagcacaa

SEQ ID NO: 9107 - DNA, 120 bp, synthetic construct
  misc_feature 1..120: note = Artificially Synthesized Probe
  source 1..120: mol_type = other DNA
caagcctaaagctaattcccatattgcgatttttgcccaaattattaaatatctctggacacggagtttcatgcttccttctggaacaagaataaacaaccaagtgactcgatggccaca

SEQ ID NO: 9108 - DNA, 120 bp, synthetic construct
  misc_feature 1..120: note = Artificially Synthesized Probe
  source 1..120: mol_type = other DNA
aacccactgcaattataaaaagagtcaggcctcaacttcttcacaatatcataaaaaaggccagaagaagttgaaaaatactacaactcaagcaggcttcgtgagacctggtgttcctgt

SEQ ID NO: 9109 - DNA, 120 bp, synthetic construct
  misc_feature 1..120: note = Artificially Synthesized Probe
  source 1..120: mol_type = other DNA
ataaaagtttctaagagagggctctaagatttcaccttctgtcagaggaagcttcacaaaaggagtattctatcttgatctcacctccaacccaaatacagtgaaaagtgcacagaggtt

SEQ ID NO: 9110 - DNA, 120 bp, synthetic construct
  misc_feature 1..120: note = Artificially Synthesized Probe
  source 1..120: mol_type = other DNA
actgttttttatctttgaatctctccctctcagggtacccaagagacccaagcagagaaaataacagaatgagactgtcaacattctgtaaagccagagtccatccaatacaaataggat

SEQ ID NO: 9111 - DNA, 120 bp, synthetic construct
  misc_feature 1..120: note = Artificially Synthesized Probe
  source 1..120: mol_type = other DNA
atcatcgcctcttggcaacttagggacagggtctaatctcttgatcttgaatctccttgctttaaattgaaagagcctctgaaacaggaacaatgcttccataaaatacttgatatgcag

SEQ ID NO: 9112 - DNA, 120 bp, synthetic construct
  misc_feature 1..120: note = Artificially Synthesized Probe
  source 1..120: mol_type = other DNA
tcagtgaagatctccacagcacactcacaaatcttgcttccagtcctgaatcccctcccacaaattttagtcctgcatttgccaaattttttggatatctatagtcatctcaaattcaac

SEQ ID NO: 9113 - DNA, 120 bp, synthetic construct
  misc_feature 1..120: note = Artificially Synthesized Probe
  source 1..120: mol_type = other DNA
ctaatggtctgtttttgtaattttcccaattggaaacattctccaacattgcttgaagtcaagtgttcatgtagggaaagaaggttggagatgcgtgtcgaggctgaaacttctgtcatg

SEQ ID NO: 9114 - DNA, 120 bp, synthetic construct
  misc_feature 1..120: note = Artificially Synthesized Probe
  source 1..120: mol_type = other DNA
tacatacatctccttcattgaactgtgggttatggaaggaaacataaggagaagctcattggaggtaattccagtgttcctacttctgaaatagaaatgggcaggacttacctatggatt

SEQ ID NO: 9115 - DNA, 120 bp, synthetic construct
  misc_feature 1..120: note = Artificially Synthesized Probe
  source 1..120: mol_type = other DNA
cccagaaaactgtgtcccagaggatgtctccaagggaaaagctccctcttggagattaacaacacacattagcatattaaagactttccaaagtcttataaccaagaaacctttcaaaca

SEQ ID NO: 9116 - DNA, 120 bp, synthetic construct
  misc_feature 1..120: note = Artificially Synthesized Probe
  source 1..120: mol_type = other DNA
gccaaacagggatggatttctaaacactgaccccagctgttaggccttgagcaaatcacaaaatttctgtcttaatatcctcatctgttgaatgggattctaatgggatcttgtattgta

SEQ ID NO: 9117 - DNA, 120 bp, synthetic construct
  misc_feature 1..120: note = Artificially Synthesized Probe
  source 1..120: mol_type = other DNA
ttccttttaaatttgcttagctttaattctttcttagctgttagttacctggagcatagaacctggggccggcagggactaggtttgcatactaattctgtgatctgtttactagctctg

SEQ ID NO: 9118 - DNA, 120 bp, synthetic construct
  misc_feature 1..120: note = Artificially Synthesized Probe
  source 1..120: mol_type = other DNA
aataacatatgtgttcagggtgctttgatcacacactgcaaaaagaagtcaaagaaatgggctcggtgtgttctggttccaaggaagaaagcatcttgtgcttgatttttattgccaggt

SEQ ID NO: 9119 - DNA, 120 bp, synthetic construct
  misc_feature 1..120: note = Artificially Synthesized Probe
  source 1..120: mol_type = other DNA
ttaaaccagaaaacaagtcatttaagaaattaaatgttaattaattctcaggctgaggcactaagattttgacctggttgcctttgcctaacatgcctgcattggcatgagcctgtggat

SEQ ID NO: 9120 - DNA, 120 bp, synthetic construct
  misc_feature 1..120: note = Artificially Synthesized Probe
  source 1..120: mol_type = other DNA
catgtgactctaaacagttagcaactctgtgatcaatgttacaaatgaagaactagagatcctctccctgtttggcagtaccacgtaaatcttcggatttttgtataaaccctagggaag

SEQ ID NO: 9121 - DNA, 120 bp, synthetic construct
  misc_feature 1..120: note = Artificially Synthesized Probe
  source 1..120: mol_type = other DNA
gtgtatctgttgaagctattagcattattgaagcgatcttagagcaactttcagcccctggagatgaatgccacaggacatgctttaagctatgttaaaatgctagaaaaacagtggaca

SEQ ID NO: 9122 - DNA, 120 bp, synthetic construct
  misc_feature 1..120: note = Artificially Synthesized Probe
  source 1..120: mol_type = other DNA
cagaagaaataatagaaagagcaagggagatagtaaaagaaaatgatgcaagagaaagggaagaataaaagacaatattaaagagataggggtgtgagtgtcaggggaggtgaagtgggg

SEQ ID NO: 9123 - DNA, 120 bp, synthetic construct
  misc_feature 1..120: note = Artificially Synthesized Probe
  source 1..120: mol_type = other DNA
cactgggggggttcttcctggtttccacggacctaagacttttatttttatcacatacgaacttggttttaaacaaagtttgaagcttcccagggctaatctttaatgaaaatggaaagg

SEQ ID NO: 9124 - DNA, 120 bp, synthetic construct
  misc_feature 1..120: note = Artificially Synthesized Probe
  source 1..120: mol_type = other DNA
taccttccacaggaaatgggcaatgatattactgcgattgtgaatggttatagttcgctgattggccagagatatgtaggttttctcgatggtcaaggaattcttatccagccttatatt

SEQ ID NO: 9125 - DNA, 120 bp, synthetic construct
  misc_feature 1..120: note = Artificially Synthesized Probe
  source 1..120: mol_type = other DNA
cccctgactttattcaggatgcaccaattaccttgattcttagtatataagtgagttttcaagaagacacaaacctataaactatatttgatttgatctctgcaatgtcacagcaggtgc

SEQ ID NO: 9126 - DNA, 120 bp, synthetic construct
  misc_feature 1..120: note = Artificially Synthesized Probe
  source 1..120: mol_type = other DNA
ataccatgctggaattgcctatgtcttgcaaataacttcaaaccttgaatttgataattattgactggttagacacttggtgaaagaaactcaattttttggggggggaaaggtacttgc

SEQ ID NO: 9127 - DNA, 120 bp, synthetic construct
  misc_feature 1..120: note = Artificially Synthesized Probe
  source 1..120: mol_type = other DNA
cagccattattgcttaaaatattttctactccattcttcctcctccacttttgagactccagttacatgtatgttgaccttctgactgtgtcccacttggctgttctattttttccccat

SEQ ID NO: 9128 - DNA, 120 bp, synthetic construct
  misc_feature 1..120: note = Artificially Synthesized Probe
  source 1..120: mol_type = other DNA
tagcatggtagcagtgcatgaagagacagatcagtggaatagaatgaagtcaaaacagacccaaatgcacactggaatttagtatattataaaggcagtatctcaaatcattggtataaa

SEQ ID NO: 9129 - DNA, 120 bp, synthetic construct
  misc_feature 1..120: note = Artificially Synthesized Probe
  source 1..120: mol_type = other DNA
gtaggaatagcattaaaatgcacccagtaaagctcctctgaggagcaagatatgggaattagatcagaaaagggtaacaaagtggcttcaggtctgtaatcggtttgattatccaaaaaa

SEQ ID NO: 9130 - DNA, 120 bp, synthetic construct
  misc_feature 1..120: note = Artificially Synthesized Probe
  source 1..120: mol_type = other DNA
tgatggaaagtttttcatcacttggtgacaacagggtcaaattcactacggtagtgcattactgaaccgaacttctttggaagtgctctttgttcaggaaacttaagcaacttgatggct

SEQ ID NO: 9131 - DNA, 120 bp, synthetic construct
  misc_feature 1..120: note = Artificially Synthesized Probe
  source 1..120: mol_type = other DNA
ctatttcctgagtatgccaatggttaatgtcacttctaaggtgagaagagtaacctcatcaggcattgaagaagaaaccccctacactactatttctggtactcattctagtaaccaaag

SEQ ID NO: 9132 - DNA, 120 bp, synthetic construct
  misc_feature 1..120: note = Artificially Synthesized Probe
  source 1..120: mol_type = other DNA
cagcagttcatttcatgtaaggaaaaatgctataagacagtttacctctgcaatcttcagaatatgactttattcattcaccaaaggtaacatcagaacctcaggaggtagaaaccaact

SEQ ID NO: 9133 - DNA, 120 bp, synthetic construct
  misc_feature 1..120: note = Artificially Synthesized Probe
  source 1..120: mol_type = other DNA
tctgtgaccttgggtgagccacttaatttcttagggctttagtttctctatctgtaaaatctaagggttagatgaggttatcagtgaagtcgtcactcaagttttgattctatcgagcta

SEQ ID NO: 9134 - DNA, 120 bp, synthetic construct
  misc_feature 1..120: note = Artificially Synthesized Probe
  source 1..120: mol_type = other DNA
cccttttgaagcgtacagggaacatttaccaaaatggaacatattttgggtcataatgtaagtctcaactaatttcaaggcctgaaatcgtatagaacttgctttctgtcactggtagga

SEQ ID NO: 9135 - DNA, 120 bp, synthetic construct
  misc_feature 1..120: note = Artificially Synthesized Probe
  source 1..120: mol_type = other DNA
tagcaaacgtcatactaaatgatgaaatactgagcacttctcttctgagactgagaacaagagaaagatatttgctgtcattacttccaatgcacagcatactaatgtctagcctgtgga

SEQ ID NO: 9136 - DNA, 120 bp, synthetic construct
  misc_feature 1..120: note = Artificially Synthesized Probe
  source 1..120: mol_type = other DNA
aaactacaagtcaacaacaaaatgataaactaccccataaagaatgggcaaaagacttaaacatgtacttcagaaaaaaagacatcaaaatgggcaaaagcacatgaaaagacactcaac

SEQ ID NO: 9137 - DNA, 120 bp, synthetic construct
  misc_feature 1..120: note = Artificially Synthesized Probe
  source 1..120: mol_type = other DNA
cggatttctgctttaaagattgcattatgtgccgaggacagcagataaagttcagggcctgcccagagttggaatttcaaatccaaaaatcacaaaacacaaaaagacataagataccct

SEQ ID NO: 9138 - DNA, 120 bp, synthetic construct
  misc_feature 1..120: note = Artificially Synthesized Probe
  source 1..120: mol_type = other DNA
tgtaaaatgacacaactatcttggaaaactgatgccccaatgtgttatgagctgtgctttcagccttctaccctttggttatatgggtcaaacattcccccttttcttaagctagtttct

SEQ ID NO: 9139 - DNA, 120 bp, synthetic construct
  misc_feature 1..120: note = Artificially Synthesized Probe
  source 1..120: mol_type = other DNA
ctggggacaccagttagggggatttctgactccacatcatttctactggaggcattcatttttttttttttatcttgtggatcttagcttactcgaatgcagccaaaataaccatttcct

SEQ ID NO: 9140 - DNA, 120 bp, synthetic construct
  misc_feature 1..120: note = Artificially Synthesized Probe
  source 1..120: mol_type = other DNA
tgtcattttcaaaagaacagtgccttcaaagggataaaaatcgagttttgtgagagttcacaggagagagggcatcatagtggaaaaatatatctgagccccaaaaggaaagggatagca

SEQ ID NO: 9141 - DNA, 120 bp, synthetic construct
  misc_feature 1..120: note = Artificially Synthesized Probe
  source 1..120: mol_type = other DNA
tagcactgggtggcatctgagagtattactacaggacctcaggtgctccctactgtgagcaattggttattttctctggtactttctacttgatctcctctcttttctttttttaagttt

SEQ ID NO: 9142 - DNA, 120 bp, synthetic construct
  misc_feature 1..120: note = Artificially Synthesized Probe
  source 1..120: mol_type = other DNA
caatcaagttcaaactcctaggcatttcaggtcccacacaatctgctcccagtaggtttttgcattttcattacacacatacatctgtccaaatatcctatacacctgtcatgttccaag

SEQ ID NO: 9143 - DNA, 120 bp, synthetic construct
  misc_feature 1..120: note = Artificially Synthesized Probe
  source 1..120: mol_type = other DNA
taataatttttacagaaaaagtgatactagtatcccatctgtacgacctccaggaatccaagttccacggagtggtaagggttactttgcctttgtgctaatcgttgggtttaggttaca

SEQ ID NO: 9144 - DNA, 120 bp, synthetic construct
  misc_feature 1..120: note = Artificially Synthesized Probe
  source 1..120: mol_type = other DNA
caatttcctgtgggacattatttctagctgtatattgacactaaaagtgggaggaccatgggcttttgactccaaattctcagactatatccactgctctaccatgtctattaacaacca

SEQ ID NO: 9145 - DNA, 120 bp, synthetic construct
  misc_feature 1..120: note = Artificially Synthesized Probe
  source 1..120: mol_type = other DNA
tgcttcacatttacatgaatctaaaatatacgaaattgccattttggcatggtttttttcaaattcagccaaacagcgcaggaagatatgttcccgcacttgcatatccaccttaggtag

SEQ ID NO: 9146 - DNA, 120 bp, synthetic construct
  misc_feature 1..120: note = Artificially Synthesized Probe
  source 1..120: mol_type = other DNA
tccatcaaaatatgtgaggtttgccatgagacgacaaacaaggcctgtagagaatttatgaccaatgtctggagacactgagttccaaaagaacttttcctttgcctttagtggttgatt

SEQ ID NO: 9147 - DNA, 120 bp, synthetic construct
  misc_feature 1..120: note = Artificially Synthesized Probe
  source 1..120: mol_type = other DNA
taaatgcataaatgagcatgcacaaaaataagaaaaactcataccattccaaaacaaagaggaacctaagaaccacagcagtaagccactgagctaatgataggtctgccctgggttccc

SEQ ID NO: 9148 - DNA, 120 bp, synthetic construct
  misc_feature 1..120: note = Artificially Synthesized Probe
  source 1..120: mol_type = other DNA
gctttatactgtcccatggtgtctacactgtggttagtccacaaatactcagattaaaatccagctctatcacttactagctctgtgctcttcaggaaatgatgtgacctctctatccct

SEQ ID NO: 9149 - DNA, 120 bp, synthetic construct
  misc_feature 1..120: note = Artificially Synthesized Probe
  source 1..120: mol_type = other DNA
catcagtgaggtctcccagctttgcaactgaagactgtaacaagcaattccaccccccaatgttatggtagcaaattacttgagctgactagatttagctataatcaatcaaagacaaga

SEQ ID NO: 9150 - DNA, 120 bp, synthetic construct
  misc_feature 1..120: note = Artificially Synthesized Probe
  source 1..120: mol_type = other DNA
gccaggcccatttctcctgtagatccaagaagattcacaacagttccctcaggtcctccttccaaaccctagttctccttcaagcccatgtattagaatgatgtttcttttttttttttt

SEQ ID NO: 9151 - DNA, 120 bp, synthetic construct
  misc_feature 1..120: note = Artificially Synthesized Probe
  source 1..120: mol_type = other DNA
ttccttttggtaaccatgtgataaacggtagtaagtggtggaggttttaaaaaaagctctttttgggctttggacatagaataagaatgggaccatctggcatacaaattggcatacagg

SEQ ID NO: 9152 - DNA, 120 bp, synthetic construct
  misc_feature 1..120: note = Artificially Synthesized Probe
  source 1..120: mol_type = other DNA
tctggctttagaaccctgaaatgaggcatcctttcatgctctgtttctcaatttcttgatacaatccataggatctaccttcaaaatatatccaaactgtaatcactcttcaccacctcc

SEQ ID NO: 9153 - DNA, 120 bp, synthetic construct
  misc_feature 1..120: note = Artificially Synthesized Probe
  source 1..120: mol_type = other DNA
taatttcagaaagtgatgagggctttgaagaaaataaagcacaggaaagtgataatatcggatggggttgatttaggttagaataactaaagaggtcttcctgaggaggtgaccttcgga

SEQ ID NO: 9154 - DNA, 120 bp, synthetic construct
  misc_feature 1..120: note = Artificially Synthesized Probe
  source 1..120: mol_type = other DNA
tttccagatggtaatgccagactcaaaacttatgctatctagacatgaggaagcacaaattgcactaagcacacttgatcttagaaaaccccacataattcaacaatgcaacagcctagt

SEQ ID NO: 9155 - DNA, 120 bp, synthetic construct
  misc_feature 1..120: note = Artificially Synthesized Probe
  source 1..120: mol_type = other DNA
aaaaaaaaaaaagtatacatccttactcctcctacttctcatcaccttcactgtcaccaccctcatccaaacttccttatcttttacctgaactactatagtagcctctgccccctgtat

SEQ ID NO: 9156 - DNA, 120 bp, synthetic construct
  misc_feature 1..120: note = Artificially Synthesized Probe
  source 1..120: mol_type = other DNA
ggctcatgcctgtaatcctagtactttgggaggctaagatgggcagatcacttgagctcaggagttcgagaccagcctggacaacgtggagaaaccccatctctaccaaaaataaaattt

SEQ ID NO: 9157 - DNA, 120 bp, synthetic construct
  misc_feature 1..120: note = Artificially Synthesized Probe
  source 1..120: mol_type = other DNA
ttttgtcaattacaaataattatttttttaaattgtggttctcttaccaatgaggaaagagaaaatgaatgtcaaggggaggctactagcggtgatgcctcacgtggccctgcttcagcc

SEQ ID NO: 9158 - DNA, 120 bp, synthetic construct
  misc_feature 1..120: note = Artificially Synthesized Probe
  source 1..120: mol_type = other DNA
tatttgcacggcttaaattagttatcttaagttagcccaaatgtcacctcaacaggagagccttcccttgactttcctatcagagaagtcttccttgaccttacttttgaaagaaagcag

SEQ ID NO: 9159 - DNA, 120 bp, synthetic construct
  misc_feature 1..120: note = Artificially Synthesized Probe
  source 1..120: mol_type = other DNA
agtgacaaactggaaaaaccattttgacaacaaattagacattttcttaaaccataactgagccacccagttgcaccactgcatgctttcttcaaagcttgctgccttttccgtatgaca

SEQ ID NO: 9160 - DNA, 120 bp, synthetic construct
  misc_feature 1..120: note = Artificially Synthesized Probe
  source 1..120: mol_type = other DNA
tggggaaatgatgtctctaaggaagactttccaacagtgaaagcgaatgtagataactgactacgccatcatcagtgctagctagccagcaaaatgagaaaacaactctgtcttttgaaa

SEQ ID NO: 9161 - DNA, 120 bp, synthetic construct
  misc_feature 1..120: note = Artificially Synthesized Probe
  source 1..120: mol_type = other DNA
taacaaaccacattaaattctctatccttgctctccagaaaagtagtaacaacagcaatagtagagggaatactggtaatgatattgacagcagccgataggtactagcggtggagaagc

SEQ ID NO: 9162 - DNA, 120 bp, synthetic construct
  misc_feature 1..120: note = Artificially Synthesized Probe
  source 1..120: mol_type = other DNA
cactatcaatgacaacaatattaccaccaactacactaccatactactaataccaataccatctacacacaccagcaccatcacccaccactacccaccaacactactaatagtaacaac

SEQ ID NO: 9163 - DNA, 120 bp, synthetic construct
  misc_feature 1..120: note = Artificially Synthesized Probe
  source 1..120: mol_type = other DNA
aaaagtgactatcttcaagggctctttaatcagctaaaacctcacccacataatggagttaagctggatttcccaacatttgagcatttgagaactgctctgagagaagtcacacttcct

SEQ ID NO: 9164 - DNA, 120 bp, synthetic construct
  misc_feature 1..120: note = Artificially Synthesized Probe
  source 1..120: mol_type = other DNA
ccactgatgaccatttcttgtttaaggtcagagaggatgctttggactgtaccactttagtaggctaaaaatacctcagcaagagtcaaaaagtaatatagaaagggaaaagagagtcag

SEQ ID NO: 9165 - DNA, 120 bp, synthetic construct
  misc_feature 1..120: note = Artificially Synthesized Probe
  source 1..120: mol_type = other DNA
agacagtgagagaagccttcaaaactgactgtagacaaactttgaaggctatcttctacagaaagaagaagacagaaaaaaaggaaagggacctacattttttagaagtgaaaagaaggc

SEQ ID NO: 9166 - DNA, 120 bp, synthetic construct
  misc_feature 1..120: note = Artificially Synthesized Probe
  source 1..120: mol_type = other DNA
gttcctcaaaatcagtggaacttcatagacttcacagggagtgtagttctgaaatataatttctgatggaaagggctggaataatgcctgatccaggtcaattcctgaaaacttcagttg

SEQ ID NO: 9167 - DNA, 120 bp, synthetic construct
  misc_feature 1..120: note = Artificially Synthesized Probe
  source 1..120: mol_type = other DNA
ccaatgatgccctgtgagttcacggttgcgccctggggcaccttggcacacagtttgaaaactgcagctgtaagtatccatcttaataagttagaataaatagcaaaataaatccaaata

SEQ ID NO: 9168 - DNA, 120 bp, synthetic construct
  misc_feature 1..120: note = Artificially Synthesized Probe
  source 1..120: mol_type = other DNA
ggaaatgcaaaggaccaagaatagacaagatacattcgaagaacaagataggaggatttgctatatcaggtagcacaacatgataattatattattacatatcatatactgttacttacc

SEQ ID NO: 9169 - DNA, 120 bp, synthetic construct
  misc_feature 1..120: note = Artificially Synthesized Probe
  source 1..120: mol_type = other DNA
gtgaggaaggcaggactagatggtacaggaccttggaggttttggcactgagtttagattttattatatgagtaatgggaagtcactggatggttttaaacatggaagtaacatgttctg

SEQ ID NO: 9170 - DNA, 120 bp, synthetic construct
  misc_feature 1..120: note = Artificially Synthesized Probe
  source 1..120: mol_type = other DNA
tggtggaggaagtggtgagaagcgggatgattaaagaggtctgttgaaccaggtctggtctggtaaaaaatgaagcataaaagaaatatatacataactcaaagtaagggacacagagga

SEQ ID NO: 9171 - DNA, 120 bp, synthetic construct
  misc_feature 1..120: note = Artificially Synthesized Probe
  source 1..120: mol_type = other DNA
tcaaagactcattcttcatgaggaacataacattgaaaaactctcaggaattttcagaggaaaattctgaggaactctttgagaagaggttaatctccccagcagcccaactattggagg

SEQ ID NO: 9172 - DNA, 120 bp, synthetic construct
  misc_feature 1..120: note = Artificially Synthesized Probe
  source 1..120: mol_type = other DNA
cctgagagaaaaaagtcaagaaattgcacaggaacatgtccaaagagcttaacatttatgctcagaagaggcatctgtgcataaaactctcagtttgtaaagtcactcaagggcttcaaa

SEQ ID NO: 9173 - DNA, 120 bp, synthetic construct
  misc_feature 1..120: note = Artificially Synthesized Probe
  source 1..120: mol_type = other DNA
aaacaaaaattactcttgccaatcggtaggtagtaaataattaggttgaatcctatgaaattctgatatttgactgtttttgaactaaacaaatgacagtttgtcatggtgctacctaat

SEQ ID NO: 9174 - DNA, 120 bp, synthetic construct
  misc_feature 1..120: note = Artificially Synthesized Probe
  source 1..120: mol_type = other DNA
ctcttaggagaatcgacccttcaaacagaataaatacaaggttacagggcttcacagctggacagagattcgaaatagcatgagataagacaggcaaaggaaagttctgggaaaagtttt

SEQ ID NO: 9175 - DNA, 120 bp, synthetic construct
  misc_feature 1..120: note = Artificially Synthesized Probe
  source 1..120: mol_type = other DNA
gttccagtggaaagttcaaacaacacaaggcccagactgcgtaagaactattattatagccccacccttaaccacaataaaagccaaaccagtatcttttccctattctcaagttattta

SEQ ID NO: 9176 - DNA, 120 bp, synthetic construct
  misc_feature 1..120: note = Artificially Synthesized Probe
  source 1..120: mol_type = other DNA
cataaaccagtaacagtggttacctacagaaggagtaaaggaacagggtagaggagataggaatgaaagagagatttctctgaatgtacctcactatacagtgttgattttgaaccatgt

SEQ ID NO: 9177 - DNA, 120 bp, synthetic construct
  misc_feature 1..120: note = Artificially Synthesized Probe
  source 1..120: mol_type = other DNA
atgattttctctttttaaataatctgcccactgaaaaagcccataagcaatgaaagtccggtggcaatgacagcgcagagacctggattgtagtattcaaacaccatttaccactaacag

SEQ ID NO: 9178 - DNA, 120 bp, synthetic construct
  misc_feature 1..120: note = Artificially Synthesized Probe
  source 1..120: mol_type = other DNA
ttatgtagtgttattgacagaaatctaagcctccgacctaccagcccaattgcaggagatagagggaaagaggaacatgtatgttctgtaagaatacaattaatctaaatccaggatgtg

SEQ ID NO: 9179 - DNA, 120 bp, synthetic construct
  misc_feature 1..120: note = Artificially Synthesized Probe
  source 1..120: mol_type = other DNA
ccccagctctgctttctcctatattccctctgtgaatgaattatcattcacacaattgcccatatcccaagtgtaggcatcacctatgacttctctttcctcaaattaaccatataacac

SEQ ID NO: 9180 - DNA, 120 bp, synthetic construct
  misc_feature 1..120: note = Artificially Synthesized Probe
  source 1..120: mol_type = other DNA
ctctagtgcactcgaggagtgccataactctgtcctttgcatatgcccctctaattaaatgcatcaaatacagtgcattgtaattatttgcttacaagcctgtttctaactccagaatgt

SEQ ID NO: 9181 - DNA, 120 bp, synthetic construct
  misc_feature 1..120: note = Artificially Synthesized Probe
  source 1..120: mol_type = other DNA
ttttttctgccatcttctattcccaagcccctcccttctttgcagaaaagccagcaaaaatttttttgctcccagttaaatctttgaacaagttaaaatcctttctacccaatacacaac

SEQ ID NO: 9182 - DNA, 120 bp, synthetic construct
  misc_feature 1..120: note = Artificially Synthesized Probe
  source 1..120: mol_type = other DNA
aggaattctatgcaattaactttgctttctggaagtaaatgtgaatgcataaaactgttcacatgtcttcaactttggcttctgctacagtgagggcaagggctactatactctggaatg

SEQ ID NO: 9183 - DNA, 120 bp, synthetic construct
  misc_feature 1..120: note = Artificially Synthesized Probe
  source 1..120: mol_type = other DNA
atgaactgcttctccatgggaaagtatcaggtactggaaacttgttcaaactgtagaagtttccaggtcagacacaggcaaagaaaaaaatcaaatagccaactaaggaccatgtaggaa

SEQ ID NO: 9184 - DNA, 120 bp, synthetic construct
  misc_feature 1..120: note = Artificially Synthesized Probe
  source 1..120: mol_type = other DNA
ctcagtgatacggttactagcatatggtaataagcacctagaaatccaacagaattttgaccttgactctgcatatctgccaacattcaggcttggttcacatctctaagtgaaaagcat

SEQ ID NO: 9185 - DNA, 120 bp, synthetic construct
  misc_feature 1..120: note = Artificially Synthesized Probe
  source 1..120: mol_type = other DNA
ctatgaacatttttgcaaatgtctttccatgcacaaaggtaatcagagtctatatctaggaaagaaactgctagatcatagagtatgtgcaggataggctctctgtgtggtcttggactg

SEQ ID NO: 9186 - DNA, 120 bp, synthetic construct
  misc_feature 1..120: note = Artificially Synthesized Probe
  source 1..120: mol_type = other DNA
tagaagccctttgtcagttaaatgtttttacaaatatcttttcccactctacagcttgtttttgcatttcaaatggcttcatgggcctacttccagtttatccctactcctttgaagcag

SEQ ID NO: 9187 - DNA, 120 bp, synthetic construct
  misc_feature 1..120: note = Artificially Synthesized Probe
  source 1..120: mol_type = other DNA
aaaagtctactgagagcatggcttaggtttctgaaattaacctggatcatccattcatgccacctaatccaagacttgtacagctgaagtcttgccatcttgattgcttcattttaggta

SEQ ID NO: 9188 - DNA, 120 bp, synthetic construct
  misc_feature 1..120: note = Artificially Synthesized Probe
  source 1..120: mol_type = other DNA
tcctcacagcaatgcacttttcacataagatataaatatgtaactaaatttttatgtcttccttccctaccagagagcaagcttcaggaggtcagagatctcaaccagcttgttcattgc

SEQ ID NO: 9189 - DNA, 120 bp, synthetic construct
  misc_feature 1..120: note = Artificially Synthesized Probe
  source 1..120: mol_type = other DNA
aggagcacaaagtgagaacaccttttgttactacagccatcacacatgacgaatgttcatttggagaatttgcttcaactattacagacacatgcatggtatgtgcatgtgtatacacac

SEQ ID NO: 9190 - DNA, 120 bp, synthetic construct
  misc_feature 1..120: note = Artificially Synthesized Probe
  source 1..120: mol_type = other DNA
atagatggatggaaggaggtaagaaagatgaatacaagtgaatcatagcagacattgagagcagttccaaactttgagaccctgatgtctgtggttcatcttttgatcctgtgaaccatc

SEQ ID NO: 9191 - DNA, 120 bp, synthetic construct
  misc_feature 1..120: note = Artificially Synthesized Probe
  source 1..120: mol_type = other DNA
attcttttaataaagccagctatacacagaagagcaaacttggatttactcattgacacttccatggctccaactgaaatcaatagagaaagggaccagtgctttcatcaatctccacca

SEQ ID NO: 9192 - DNA, 120 bp, synthetic construct
  misc_feature 1..120: note = Artificially Synthesized Probe
  source 1..120: mol_type = other DNA
ctgtcaagatagtaaatgattaccagaccaaacaataaaagaaatcaagcaccacagaagtaagcaaagccctagaacaccatagtcacttttgcccttagggcatttgctgatccagaa

SEQ ID NO: 9193 - DNA, 120 bp, synthetic construct
  misc_feature 1..120: note = Artificially Synthesized Probe
  source 1..120: mol_type = other DNA
atccaacaaaagaaagcagacacagagacagtaataggaggaggctcctctaagacccagaagactagaatcgaagccagtcaatcaaacttgccttataccataatcaaacattcaaag

SEQ ID NO: 9194 - DNA, 120 bp, synthetic construct
  misc_feature 1..120: note = Artificially Synthesized Probe
  source 1..120: mol_type = other DNA
taatcatgagccctccaaggttgaaatgaaggaaaaaatgttaaaggcagctagagataaaggacaggtcacctacaaaggggaaacccatcagactaacagcatatttctcagcagaaa

SEQ ID NO: 9195 - DNA, 120 bp, synthetic construct
  misc_feature 1..120: note = Artificially Synthesized Probe
  source 1..120: mol_type = other DNA
tcttttcatcaccacatggtacatattctaaaattgaccatgcaatctgacataaaacaatcctcagcaaacacacaaaaaaacgaaatcatactgaccacattctcagacaacagcaca

SEQ ID NO: 9196 - DNA, 120 bp, synthetic construct
  misc_feature 1..120: note = Artificially Synthesized Probe
  source 1..120: mol_type = other DNA
cttgataagcatagatgaaaaatcctcagcaaaatactagcaaactgaatccagtagcacatcaaaaaactaatccaccaccatctagtaggctttatccccatgatgcaaggttggttc

SEQ ID NO: 9197 - DNA, 120 bp, synthetic construct
  misc_feature 1..120: note = Artificially Synthesized Probe
  source 1..120: mol_type = other DNA
ctgaaaagagaactaccattcaacctagcaatcccactactgagtatggtcccaaaggaatacaaatcattctaccataaagacacatgcacacgtatgttcactgcagcactaatcaca

SEQ ID NO: 9198 - DNA, 120 bp, synthetic construct
  misc_feature 1..120: note = Artificially Synthesized Probe
  source 1..120: mol_type = other DNA
tagactgggacccaaaattaaagctggccactccattaccatctctagcaagtcataaaacctgtcctggtgctgagcagaaaaagagaataaaaagaaagaggaaaaatacccaaaaag

SEQ ID NO: 9199 - DNA, 120 bp, synthetic construct
  misc_feature 1..120: note = Artificially Synthesized Probe
  source 1..120: mol_type = other DNA
aggagataccagctaatgtatataagggataagtgtcatgatatctcccttacctaagtcataaacttactttcaaatgattcaagaaagagaaagagaaccacgagcaaatgtggcaga

SEQ ID NO: 9200 - DNA, 120 bp, synthetic construct
  misc_feature 1..120: note = Artificially Synthesized Probe
  source 1..120: mol_type = other DNA
aattcaccttggcagactctcaataaagaaaaatctaaaggatgcaattcaggcaaaacgaaagtgatcccaaatggaaaaatctaagaggcaagaagaaatggcgggggaaacatggtc

SEQ ID NO: 9201 - DNA, 120 bp, synthetic construct
  misc_feature 1..120: note = Artificially Synthesized Probe
  source 1..120: mol_type = other DNA
agaataacaaagattatattgaagaagaacaaattaaattattggaggatttttgtacccaacctcacatcctttaggcccaccaatagcttcccacagtgtaagttggaagcaccctct

SEQ ID NO: 9202 - DNA, 120 bp, synthetic construct
  misc_feature 1..120: note = Artificially Synthesized Probe
  source 1..120: mol_type = other DNA
caatcaaataacatagaggccaacttgcagggttctcccattggccaaagacaggataaaactaattagtcacctttagaggtcactagagtaccaattcactattctgaagaagcaagg

SEQ ID NO: 9203 - DNA, 120 bp, synthetic construct
  misc_feature 1..120: note = Artificially Synthesized Probe
  source 1..120: mol_type = other DNA
tccatcatctagtaaacttaaagatacgtatgttctatgacccagcagttttaccctggtagacagtccagagaaatgtatgcacatgctacagagatatgagtaagactgttcatagca

SEQ ID NO: 9204 - DNA, 120 bp, synthetic construct
  misc_feature 1..120: note = Artificially Synthesized Probe
  source 1..120: mol_type = other DNA
cacaggtttggcacaggaactgatagcagtaggtaccttttggacaggttcctgtaagtctccagttaaatgatgctttctatccagcaaacttgcattgactgttaatttaacctacat

SEQ ID NO: 9205 - DNA, 120 bp, synthetic construct
  misc_feature 1..120: note = Artificially Synthesized Probe
  source 1..120: mol_type = other DNA
cccttgaggaatttcatgcactagccaagctcctagaatttagcaagctgtattagattcaacacacccagtggttgttagcgactgttccaaagatccactctaaaacatattctatta

SEQ ID NO: 9206 - DNA, 120 bp, synthetic construct
  misc_feature 1..120: note = Artificially Synthesized Probe
  source 1..120: mol_type = other DNA
taccaggcatattccaaagcattgcaagactacttttggcttcataaacacaaatttctgctttcctggttttgaaatatgcttcccacactgtcattattttaaaagccatgagtactg

SEQ ID NO: 9207 - DNA, 120 bp, synthetic construct
  misc_feature 1..120: note = Artificially Synthesized Probe
  source 1..120: mol_type = other DNA
gggctgacacatccagggtcaaaaatctgttacacagatcccgaatgtgtaccaattaaaacatggtttcaatactaacaggctatgagtttctttcaaacctgatgagcgttttcatgt

SEQ ID NO: 9208 - DNA, 120 bp, synthetic construct
  misc_feature 1..120: note = Artificially Synthesized Probe
  source 1..120: mol_type = other DNA
caggggacgattccttggcacctaacagagagaaaggtataaagaaaaaaaaaaaaaccctgaaaggttagaatcacagccaactctcttagagatgtacagcccaaattcatatcacct

SEQ ID NO: 9209 - DNA, 120 bp, synthetic construct
  misc_feature 1..120: note = Artificially Synthesized Probe
  source 1..120: mol_type = other DNA
ggctgcccacagcacaccaaaaggataacacatcatgatcaagtgggtttcatcccaggaatgcagggatggtttaatatacacaagtcaataaatgtgatatatcacataaacaaaatt

SEQ ID NO: 9210 - DNA, 120 bp, synthetic construct
  misc_feature 1..120: note = Artificially Synthesized Probe
  source 1..120: mol_type = other DNA
atggtactggtataaaaatgggcacatagaccaatagaacagaacagagtacccaaaaataaagccaaataattacagccaactgatatttgacaaagcatataaagacataaattggag

SEQ ID NO: 9211 - DNA, 120 bp, synthetic construct
  misc_feature 1..120: note = Artificially Synthesized Probe
  source 1..120: mol_type = other DNA
accacttgtacctcaaaaatgattgaaatataaaattatttaaaaagaggctgctcaatttgcaaattgttctttgctctgaaatgattgatgaatcattctttaattaaattaaactct

SEQ ID NO: 9212 - DNA, 120 bp, synthetic construct
  misc_feature 1..120: note = Artificially Synthesized Probe
  source 1..120: mol_type = other DNA
cttttaacaatggactagaagaactaaaatttcagaagggaaatggcctctcatcaatgagttgaagttactggtcatgtttttctctggggacatttgctaattctaggcacagggaga

SEQ ID NO: 9213 - DNA, 120 bp, synthetic construct
  misc_feature 1..120: note = Artificially Synthesized Probe
  source 1..120: mol_type = other DNA
ttgacaaaggtgccaaggtaagtggagggaggagagtctctttaacaaatggggttggaacattcagccttatgaaaaaaaaacacctcaactcttgcctgacgtcatacataaaaatta

SEQ ID NO: 9214 - DNA, 120 bp, synthetic construct
  misc_feature 1..120: note = Artificially Synthesized Probe
  source 1..120: mol_type = other DNA
atatatatatgaatgatatgggcaaaagatacaaacagaaacttcaccaagttcaccaaacttcttcaccaaagatataataacaagtaagcatgttattcaacatcattaatcaccagg

SEQ ID NO: 9215 - DNA, 120 bp, synthetic construct
  misc_feature 1..120: note = Artificially Synthesized Probe
  source 1..120: mol_type = other DNA
ggctagccatatgtagaaagctgaaactggatcccttccttacaccttatacaaaaattaattcaagatggattaaagacttacatgttagacctaaaaccataaaaaccctagaagaaa

SEQ ID NO: 9216 - DNA, 120 bp, synthetic construct
  misc_feature 1..120: note = Artificially Synthesized Probe
  source 1..120: mol_type = other DNA
ggcagtttcttgtaaaattaatacttaccatataacctatcaatcctactcccaggtatttatcaaaataataacatatgtccatacaaatacctgtatgggaatatttataacagtttt

SEQ ID NO: 9217 - DNA, 120 bp, synthetic construct
  misc_feature 1..120: note = Artificially Synthesized Probe
  source 1..120: mol_type = other DNA
tacagaactttatattttcaaaactcttggaactgtacacctaaaagaggtgaattttaccattttccccggtaagacgggaaatgattcgtccaaggcctggggctaattccaagttgg

SEQ ID NO: 9218 - DNA, 120 bp, synthetic construct
  misc_feature 1..120: note = Artificially Synthesized Probe
  source 1..120: mol_type = other DNA
tgaagtcacctgtgagttcccttctcactttctgggagagcctgggtgccagtctggaaggtgaaggtgtaatttcttactgggctatagggagaactgctctgggctagtggatagccg

SEQ ID NO: 9219 - DNA, 120 bp, synthetic construct
  misc_feature 1..120: note = Artificially Synthesized Probe
  source 1..120: mol_type = other DNA
gtttcggtttctcaacagtttccttttcctggcatttgtcaaatcgggatttggccggggccagatgagggcggaacaaattcctgaggatcaaattactttaggagagggaggaaagag

SEQ ID NO: 9220 - DNA, 120 bp, synthetic construct
  misc_feature 1..120: note = Artificially Synthesized Probe
  source 1..120: mol_type = other DNA
ccaggcagccggattatcccattaccttcagtgtggtgcccaggcagccggattatcccattaccttcagtgtggtgcccaggcagctggattatcccataaccctcactgtggtgccca

SEQ ID NO: 9221 - DNA, 120 bp, synthetic construct
  misc_feature 1..120: note = Artificially Synthesized Probe
  source 1..120: mol_type = other DNA
cctgagctctgcagcctgtaagctgtatgtaatttccactttatttttaataatcaagttaagtcctgaactatttcagccataaatattgggctattgtctgatcttagagttagaggc

SEQ ID NO: 9222 - DNA, 120 bp, synthetic construct
  misc_feature 1..120: note = Artificially Synthesized Probe
  source 1..120: mol_type = other DNA
taacgtctttagtgctggttttttgggttttttttccagtggaactgttttacaaatctgagggccaccattccaggtatggctagcctcccgttggaaaatttttaccatctttcttca

SEQ ID NO: 9223 - DNA, 120 bp, synthetic construct
  misc_feature 1..120: note = Artificially Synthesized Probe
  source 1..120: mol_type = other DNA
ccttagtacgaaactgcttccatcagtaaaatattcaatgtccaggtccccgaggggccaatctgttaaatctttccagcttgagaacactttatctaccacgtccacacagcaatgaag

SEQ ID NO: 9224 - DNA, 120 bp, synthetic construct
  misc_feature 1..120: note = Artificially Synthesized Probe
  source 1..120: mol_type = other DNA
tgctttcttagaagtttctgtttcctgctgtttggaaattcgtgaattgtgtgaggtctgaggaggggggtaacacatttctgaacgtgaagttatacattgagggtgggtagaagcact

SEQ ID NO: 9225 - DNA, 120 bp, synthetic construct
  misc_feature 1..120: note = Artificially Synthesized Probe
  source 1..120: mol_type = other DNA
aaggacaatgtgctgagaagtttcccctgaaaaaatcagaaacaaaactcacctcaggagaggcccctgcaccctccaagaggaagtgggagtcacgtgaggctcgtcttgattggggtt

SEQ ID NO: 9226 - DNA, 120 bp, synthetic construct
  misc_feature 1..120: note = Artificially Synthesized Probe
  source 1..120: mol_type = other DNA
aaatagattattaaaacaaatatcacccatttacttttgcttttttagaaacattggtactggaagatttagcattgggtgtgcagggcccaccctcttcgctcatgtcactggcccctt

SEQ ID NO: 9227 - DNA, 120 bp, synthetic construct
  misc_feature 1..120: note = Artificially Synthesized Probe
  source 1..120: mol_type = other DNA
ttttttttttttttcctgagacggagtctcgctctgtcgtccagactggagtgcagtggcgcaatctcagctcactgcaagctatgcctcccaggttcacaccattctcctgcctcagcc

SEQ ID NO: 9228 - DNA, 120 bp, synthetic construct
  misc_feature 1..120: note = Artificially Synthesized Probe
  source 1..120: mol_type = other DNA
tgacaataaattaagccaagtggctaatttataaataaaatctcaggttgcatgactggcggaagggtcagacacacaggtccccgctggcaacacaattcaggtctcgcgtgaggaggc

SEQ ID NO: 9229 - DNA, 120 bp, synthetic construct
  misc_feature 1..120: note = Artificially Synthesized Probe
  source 1..120: mol_type = other DNA
gatgggattggaggatggctgacaacaggataggggaggttaactgctgggaggatggtagaggaccctcttcttcaggaaaacatgagtcagtccctgcagtaggagcatgagatagcc

SEQ ID NO: 9230 - DNA, 120 bp, synthetic construct
  misc_feature 1..120: note = Artificially Synthesized Probe
  source 1..120: mol_type = other DNA
catctaaggcctgagactcccccagggaggatgaggaggcagagtcccaggtgaggggctgggaccttctgtctttgacattcttagggcacttcagggagagacttggcagggcagaaa

SEQ ID NO: 9231 - DNA, 120 bp, synthetic construct
  misc_feature 1..120: note = Artificially Synthesized Probe
  source 1..120: mol_type = other DNA
atctataaagctattatccgtatatccacccctccatcagtaacactcctacccactcacccaaccattcatcctccattcatctattaatgtaaggctatcacttaaatatccacccat

SEQ ID NO: 9232 - DNA, 120 bp, synthetic construct
  misc_feature 1..120: note = Artificially Synthesized Probe
  source 1..120: mol_type = other DNA
tgtctatgctttgggtcctagttgggcttaggaagggatgggagacttggccaggcagggagcaggggctgcctgggaggggtctgtggagttggtgcctgatctgtgcacagtggaaac

SEQ ID NO: 9233 - DNA, 120 bp, synthetic construct
  misc_feature 1..120: note = Artificially Synthesized Probe
  source 1..120: mol_type = other DNA
tgacaacagacacattgacatgggtgggtttacccgccaagcggtcgatggtcttctgtgtgaaggccagcggcagggcctcgtggcccaccatgcaggagaaggtgtcccccttcttcc

SEQ ID NO: 9234 - DNA, 120 bp, synthetic construct
  misc_feature 1..120: note = Artificially Synthesized Probe
  source 1..120: mol_type = other DNA
cagtcgggggtggcagcatgagggagatggggtaggtggagttgagggagatggggtaggtggagttgagggaactggagtggagagatggcctgagctggtcagcacatacttccccat

SEQ ID NO: 9235 - DNA, 120 bp, synthetic construct
  misc_feature 1..120: note = Artificially Synthesized Probe
  source 1..120: mol_type = other DNA
cgctcctggctctcccggtgtccctccacctctctccccgatgctcctgggcctcctctgtcctcaggccccaccaaggctgagtcttgcccgcctgggacctggtcaccagccttctct

SEQ ID NO: 9236 - DNA, 120 bp, synthetic construct
  misc_feature 1..120: note = Artificially Synthesized Probe
  source 1..120: mol_type = other DNA
gggtctgggcggccctggacaccccgcagagggtggccctaggccccctgtccgatcatgttcctgtagtcggggatgatggtctgcttcaggtccaccaccgaggagaagatccacttc

SEQ ID NO: 9237 - DNA, 120 bp, synthetic construct
  misc_feature 1..120: note = Artificially Synthesized Probe
  source 1..120: mol_type = other DNA
gcgtggagaacagtgtccgggacaggtggggacagcatgggggacagtatcagggacaggtggggagagtgtgggggacagtgttggactggtaggtacagcccgggggacagcatcggg

SEQ ID NO: 9238 - DNA, 120 bp, synthetic construct
  misc_feature 1..120: note = Artificially Synthesized Probe
  source 1..120: mol_type = other DNA
gggacagcatgggggacagtgttgaggacaggtggggacaacgtggggtacagtgtcggagatgggtggggacagcatggaggaaagtgtcgggtttaggtaagaacaacgtggaggaga

SEQ ID NO: 9239 - DNA, 120 bp, synthetic construct
  misc_feature 1..120: note = Artificially Synthesized Probe
  source 1..120: mol_type = other DNA
gtctgagcaggtcagcatgtggagaagctgccgagcggctcgtgggccttgaggtgccgcgtggggctcgtgggggcctgtgtccgaggagtgttcacgtgtgcgaggaccttgctctgg

SEQ ID NO: 9240 - DNA, 120 bp, synthetic construct
  misc_feature 1..120: note = Artificially Synthesized Probe
  source 1..120: mol_type = other DNA
acctgctcttgtccacggtgagcttgctgtagaggaagaaggagccgtcggagtccagcacgggaggcgtggtcttgtagttgttctccggctgcccattgctctcccactccacggcga

SEQ ID NO: 9241 - DNA, 120 bp, synthetic construct
  misc_feature 1..120: note = Artificially Synthesized Probe
  source 1..120: mol_type = other DNA
acctgggcacggtgggcatgtgtgagttttgtcacaagatttgggctctgcagagagaagattgggagttactggaatctgggaggagagaaggtgtccgagctgagggagtggagagtt

SEQ ID NO: 9242 - DNA, 120 bp, synthetic construct
  misc_feature 1..120: note = Artificially Synthesized Probe
  source 1..120: mol_type = other DNA
gacgccagcctctgtgatgagttctggctgtgtccacgctcctggctctcccggtgtccctccacctctctccccgatgctcctgggcctcctctgtcctcaggccccaccaaggctgag

SEQ ID NO: 9243 - DNA, 120 bp, synthetic construct
  misc_feature 1..120: note = Artificially Synthesized Probe
  source 1..120: mol_type = other DNA
ggcgtgtcagggtcagagggcgactgcgaggccagagagccatggggttgagggcggtgaggtcgggggcaggtgtggcctgggtgatggctgagcatggcccacggctcctgtgtgggg

SEQ ID NO: 9244 - DNA, 120 bp, synthetic construct
  misc_feature 1..120: note = Artificially Synthesized Probe
  source 1..120: mol_type = other DNA
agtgtgtgacagcatgggggacaatgtcaaggacagctggggacaacgtgcggccaaccttgaagaaggtgatggtggcactgtagcacacgcttagcaggaagagtgtgatgaagatgg

SEQ ID NO: 9245 - DNA, 120 bp, synthetic construct
  misc_feature 1..120: note = Artificially Synthesized Probe
  source 1..120: mol_type = other DNA
gtttgttgaacgggtctgggctgagtgtgtgtgtgggcatctggaccagtccctccacagggcccgagagtgcatgtccccggagtcggttgtgtccccatgcgggtgcgaggctgggca

SEQ ID NO: 9246 - DNA, 120 bp, synthetic construct
  misc_feature 1..120: note = Artificially Synthesized Probe
  source 1..120: mol_type = other DNA
ctggggtagaagcctttgaccaggcaggtcaggctgacctggttcttggtcatctcctcccgggatgggggcagggtgtacacctgtggttctcggggctgccctgtagggacagaggtt

SEQ ID NO: 9247 - DNA, 120 bp, synthetic construct
  misc_feature 1..120: note = Artificially Synthesized Probe
  source 1..120: mol_type = other DNA
ctcgacacaacatttgcgctctgcagagagaagattgggagttactcggatctgggaggagagaaggtgtccgagctgagggagtggacagtttggcctttggggtcggcttaggtcagg

SEQ ID NO: 9248 - DNA, 120 bp, synthetic construct
  misc_feature 1..120: note = Artificially Synthesized Probe
  source 1..120: mol_type = other DNA
ttgagttcctctctctggtctccgatgttcttctgttgggatcatttcacctacaggcaacagagacagtgtgaaatgctttccccgtggtcgggaagggagccggggcagagatgaccc

SEQ ID NO: 9249 - DNA, 120 bp, synthetic construct
  misc_feature 1..120: note = Artificially Synthesized Probe
  source 1..120: mol_type = other DNA
tggtatttgcaggggcagacttgctctagctcatctcctgaggcctcctgctaagaggagcagctgcccagggcagccactctgccctctgggcccatatgcttagtcactgcctgctct

SEQ ID NO: 9250 - DNA, 120 bp, synthetic construct
  misc_feature 1..120: note = Artificially Synthesized Probe
  source 1..120: mol_type = other DNA
gccccagtaggccagagcatcgtgcactcaggaccagtatcttttgaatggatctttttatttctaattttataagatgcaacatctcaccccgttgacacggttagtttgcatgcacac

SEQ ID NO: 9251 - DNA, 120 bp, synthetic construct
  misc_feature 1..120: note = Artificially Synthesized Probe
  source 1..120: mol_type = other DNA
cggagatgttggtgtgggttttcacagcttcgccattctggcgggtccaggagatggtcacgctgtcataggtggtcaggtctgtgaccaggcaggtcaacttggtggacttggtgagga

SEQ ID NO: 9252 - DNA, 120 bp, synthetic construct
  misc_feature 1..120: note = Artificially Synthesized Probe
  source 1..120: mol_type = other DNA
atgacgtccttggaaggcagcagcacctgtgaggtggctgcgtacttgccccctctcaggactgatgggaagccccgggtgctgctgatgtcagagttgttcttgtatttccaggagaaa

SEQ ID NO: 9253 - DNA, 120 bp, synthetic construct
  misc_feature 1..120: note = Artificially Synthesized Probe
  source 1..120: mol_type = other DNA
gacacctgcaaacagagagacattggtcagaaactgtcacacacatccaccgtttctctcactcatatccacacacactaaatctctctacttttccatgattcaccttctaaaatagca

SEQ ID NO: 9254 - DNA, 120 bp, synthetic construct
  misc_feature 1..120: note = Artificially Synthesized Probe
  source 1..120: mol_type = other DNA
acttctccctctaacactctcccctgttgaagctctttgtgacgggcgagctcaggccctgatgggtgacttcgcaggcgtagactttgtgtttctcgtagtctgctttgctcagcgtca

SEQ ID NO: 9255 - DNA, 120 bp, synthetic construct
  misc_feature 1..120: note = Artificially Synthesized Probe
  source 1..120: mol_type = other DNA
tggcacctgagattggaaatagaaacacaaatattcatactattgatcatattataggaagacttccctgaataaccaggcagtactgagcacactgggctgagtaaattcctagtgttc

SEQ ID NO: 9256 - DNA, 120 bp, synthetic construct
  misc_feature 1..120: note = Artificially Synthesized Probe
  source 1..120: mol_type = other DNA
atgggggagggtgagagggacaaaagtttgccacaaagtttggaccaaccaaacacattggtttctttacaaaataaaaaaccagttgtatttttcttctctcccattcaagagcagtgg

SEQ ID NO: 9257 - DNA, 120 bp, synthetic construct
  misc_feature 1..120: note = Artificially Synthesized Probe
  source 1..120: mol_type = other DNA
aagttaagctcttagtctctattatatatatatggtaacagtagaatatcatgtactaatatatactgatattatatgttataaaacatatagaaataggaaaatttaaaggatgagact

SEQ ID NO: 9258 - DNA, 120 bp, synthetic construct
  misc_feature 1..120: note = Artificially Synthesized Probe
  source 1..120: mol_type = other DNA
aatatttgctaattatgatgtcttcccagtattgcttgcgatactgcacggcaaaaaataagcagatccacatgaaagtgagaattcatttagaatgatgatgaaaatccatatttcaaa

SEQ ID NO: 9259 - DNA, 120 bp, synthetic construct
  misc_feature 1..120: note = Artificially Synthesized Probe
  source 1..120: mol_type = other DNA
acctggctaatttttgtatttttaatagagacggggtttcaccatgttggccaggctggtctcgaactcctgaacttaggtgatccccgccggcgcgcccccccccccccccgccatccc

SEQ ID NO: 9260 - DNA, 120 bp, synthetic construct
  misc_feature 1..120: note = Artificially Synthesized Probe
  source 1..120: mol_type = other DNA
tcatttgttcattgatggacatttaggttgattacatattttggctattgtgaatagtgctgcagtaaacgtgagggtgcccatatctctttgataaactgatttcctttcctttggata

SEQ ID NO: 9261 - DNA, 120 bp, synthetic construct
  misc_feature 1..120: note = Artificially Synthesized Probe
  source 1..120: mol_type = other DNA
aaaatcttttcccagaccaatgccctgaagcacttcccgtatgttttcttgtttttttttttttgagacagtctcactctcagctgagacaggtgcgatctcgggtcactgcagcctcta

SEQ ID NO: 9262 - DNA, 120 bp, synthetic construct
  misc_feature 1..120: note = Artificially Synthesized Probe
  source 1..120: mol_type = other DNA
ccttcagttctcctgtagcaagtgcctgacgttgtatatgtgctaggtgccccaaatcatccactctgccagtccacaaatatttatcgaatgtctattatgtgtacattggtaattaaa

SEQ ID NO: 9263 - DNA, 120 bp, synthetic construct
  misc_feature 1..120: note = Artificially Synthesized Probe
  source 1..120: mol_type = other DNA
aagaaatgccttgatccatagtgtgcagcagttctcatggagtagctactcccaccagggctgacttcaagccaccagtagtttaatagcccgctccggcctgattcctgagtagttaac

SEQ ID NO: 9264 - DNA, 120 bp, synthetic construct
  misc_feature 1..120: note = Artificially Synthesized Probe
  source 1..120: mol_type = other DNA
agaagaaggaatgttgtagttatcacaatagaagttacatgaaaaagcccctaagcatgggtatcctcagtcagagaagtggcctgataatcagaggcatcatttactgagaacctgcta

SEQ ID NO: 9265 - DNA, 120 bp, synthetic construct
  misc_feature 1..120: note = Artificially Synthesized Probe
  source 1..120: mol_type = other DNA
gcacaaaccacttcccagtaccgtttagataggctgatattttcaatgagacctttgttaaatacaaaggaagaggaggaggagataaccgagtgctcccacctggcagcatgttttggg

SEQ ID NO: 9266 - DNA, 120 bp, synthetic construct
  misc_feature 1..120: note = Artificially Synthesized Probe
  source 1..120: mol_type = other DNA
acctcctttctgaagcattcatttcagggggtggggtctgagaaggaggaggaggtttttactaattgcccccatgtccacagtggcctggttggatgcttgccatgataacgggacact

SEQ ID NO: 9267 - DNA, 120 bp, synthetic construct
  misc_feature 1..120: note = Artificially Synthesized Probe
  source 1..120: mol_type = other DNA
aaaaataaagtaagccatccttcttaccttacatgtgtttgagttccactgctagtgaagaacaaactccctggggtttcagaaccggtgatcgtagcctgcttctgttttaattgaatt

SEQ ID NO: 9268 - DNA, 120 bp, synthetic construct
  misc_feature 1..120: note = Artificially Synthesized Probe
  source 1..120: mol_type = other DNA
cagatttttcagtatcttggtttagtctcagtcattctaaggtaacgaaccataagttacagtctctttggctaaaccattgcttggaatagtgtccatggaaatgttgcagggtggatg

SEQ ID NO: 9269 - DNA, 120 bp, synthetic construct
  misc_feature 1..120: note = Artificially Synthesized Probe
  source 1..120: mol_type = other DNA
tcaaaaaaaaaaaaaaaataccgaggtgatactgctacaacaggaattggctttcattgaattatggaaaactgtggaacttaagccatagcagatatcgtcaggcagagctgctgtgga

SEQ ID NO: 9270 - DNA, 120 bp, synthetic construct
  misc_feature 1..120: note = Artificially Synthesized Probe
  source 1..120: mol_type = other DNA
aaaaagaaaaaatagcaacaggttttacaattgttgagagaggtcagctcttgttcagagagcgcctcagaatctaggccaaagatcagggttctactagacaaagagaatgagaaggat

SEQ ID NO: 9271 - DNA, 120 bp, synthetic construct
  misc_feature 1..120: note = Artificially Synthesized Probe
  source 1..120: mol_type = other DNA
cccattcagtaccatgtctgttgctcacttacaagatttatgattcttttcagtttgcatcttcataaactgagaaaacagaaattggcctaacagggcctctaggacatccttcaagtg

SEQ ID NO: 9272 - DNA, 120 bp, synthetic construct
  misc_feature 1..120: note = Artificially Synthesized Probe
  source 1..120: mol_type = other DNA
ctcgatagaggttaaagcccatgaagatggacaagtctataatttaacaaagagaagagaaaacagcctgttactctgcagaaagtaactctttggcatgtgcactgaaggaattacctg

SEQ ID NO: 9273 - DNA, 120 bp, synthetic construct
  misc_feature 1..120: note = Artificially Synthesized Probe
  source 1..120: mol_type = other DNA
gagagagaaagaaatgaggctggagaggttgggtgagaggtggagtggtaaggagacagcccaaagggcaggtgctacgtggctgtcgatcagggtgtacatgtgaccttggagcaccag

SEQ ID NO: 9274 - DNA, 120 bp, synthetic construct
  misc_feature 1..120: note = Artificially Synthesized Probe
  source 1..120: mol_type = other DNA
taacacagttatcacagtgacttttcttttgtcagcaaaaaaagccttctttcctcctatatttccagttccaaggtggtatgtgaccgttctctgctgtcatgctgtcgctgacattta

SEQ ID NO: 9275 - DNA, 120 bp, synthetic construct
  misc_feature 1..120: note = Artificially Synthesized Probe
  source 1..120: mol_type = other DNA
aaggactgggcaagttccaaaacaaatgcttcctccctgggcatgttagggccacgttaggcctttggtgccagtgccactgctctccttattaggagggattttattctagagatggga

SEQ ID NO: 9276 - DNA, 120 bp, synthetic construct
  misc_feature 1..120: note = Artificially Synthesized Probe
  source 1..120: mol_type = other DNA
ttattcctgttcagtggccattcccagacacacttcaggtgctgttctcactgttcctccaggcccttgtgcctcttaaaaaaaaatttttttttccactttggaaagctgagacaggag

SEQ ID NO: 9277 - DNA, 120 bp, synthetic construct
  misc_feature 1..120: note = Artificially Synthesized Probe
  source 1..120: mol_type = other DNA
gaactcaacagcacttcgattttctccttatttttctaacctttgacagtcacccattactaactgcagctgtgtagagataaagccatgttgtagtcaagtggagacttctcagagggc

SEQ ID NO: 9278 - DNA, 120 bp, synthetic construct
  misc_feature 1..120: note = Artificially Synthesized Probe
  source 1..120: mol_type = other DNA
acaaggagtcagccagacagatgctgaactcaaataggtttcccttccttcctgattaactcatcaggtgaattatgatgtatagggaataacagatttcctttcccattataaagctcc

SEQ ID NO: 9279 - DNA, 120 bp, synthetic construct
  misc_feature 1..120: note = Artificially Synthesized Probe
  source 1..120: mol_type = other DNA
tcttcctgactgctgcttttgacagaggagaagcaagaaggaaaggaaggggaaaagtcaagcaatgacatatttaaggttaagatccaaatagtctgacacagaaaattcccatcttgc

SEQ ID NO: 9280 - DNA, 120 bp, synthetic construct
  misc_feature 1..120: note = Artificially Synthesized Probe
  source 1..120: mol_type = other DNA
ggcatgagccacagcacctggccaaaagtctttaaattattggcacaagtgccgggcgcagtggctcacgcctgcaatcccagcactttggggggctgatgcgggtggatcacaaggtca

SEQ ID NO: 9281 - DNA, 120 bp, synthetic construct
  misc_feature 1..120: note = Artificially Synthesized Probe
  source 1..120: mol_type = other DNA
aggaaattaaaataagtaaggacctagtttttttttaaaatcaaatgtccacacatcatgaacagctccaggtccaatactggctcctttgcttattagcagtgtgaccgtgggcacgtt

SEQ ID NO: 9282 - DNA, 120 bp, synthetic construct
  misc_feature 1..120: note = Artificially Synthesized Probe
  source 1..120: mol_type = other DNA
taaatttctttttgcaaggatctggtgactgagccggagttcatctaacatagctcttttgtattttggaacatttcctgagcatattttgttccagtttgttccaagtgctggcctcac

SEQ ID NO: 9283 - DNA, 120 bp, synthetic construct
  misc_feature 1..120: note = Artificially Synthesized Probe
  source 1..120: mol_type = other DNA
actgtctagcattgtggatcttctgactggttccattgcatgcatccatctgactgaagtgtggattatagcaaaagatcatttgcacataaagctttttggaaagcataagtaaccagg

SEQ ID NO: 9284 - DNA, 120 bp, synthetic construct
  misc_feature 1..120: note = Artificially Synthesized Probe
  source 1..120: mol_type = other DNA
tcaccatattgttcccagaatctggaattcaaccctgaactcatcctaaagtcatatccatgtctgccaggtctttcttccaaagtcaattccagtagaagctctggttgtcttcttcag

SEQ ID NO: 9285 - DNA, 120 bp, synthetic construct
  misc_feature 1..120: note = Artificially Synthesized Probe
  source 1..120: mol_type = other DNA
agttgacaaccaaccatctttgtacccttctaacctctatctcagccttttggaccatttctctttccacctgttctctatggaatgtagctcaaacaaaaatgttctgaagggaactta

SEQ ID NO: 9286 - DNA, 120 bp, synthetic construct
  misc_feature 1..120: note = Artificially Synthesized Probe
  source 1..120: mol_type = other DNA
atgtggtgcttctcacagctcttctctgtaatgggaacatgaaaaattacctggtacagttttatgctttgtggtgtggcttttaatttttataaacatgtcttactgctattgccaggg

SEQ ID NO: 9287 - DNA, 120 bp, synthetic construct
  misc_feature 1..120: note = Artificially Synthesized Probe
  source 1..120: mol_type = other DNA
tttcacctcatctggacattaattggacctaagctgatctactctgtcacttaggaaggaaatgaaaagtaaggaacagtatgatatgttggaaccacatggtcgaaggctggacttaaa

SEQ ID NO: 9288 - DNA, 120 bp, synthetic construct
  misc_feature 1..120: note = Artificially Synthesized Probe
  source 1..120: mol_type = other DNA
gagaatgagaatggtggtggcggcgacggcatacagagggttcattgttaaacctctgaatgttactgcttttgactttttaagttttaaacaagaaacaggtcataccattaactatcc

SEQ ID NO: 9289 - DNA, 120 bp, synthetic construct
  misc_feature 1..120: note = Artificially Synthesized Probe
  source 1..120: mol_type = other DNA
actatttatttcatttctttcttttatagtgcagtgaactagatgtctgtcaaagttattcaccctctcttgagggtaaaatcatgtccttcttgccatctgagctgcaggcgggtgcct

SEQ ID NO: 9290 - DNA, 120 bp, synthetic construct
  misc_feature 1..120: note = Artificially Synthesized Probe
  source 1..120: mol_type = other DNA
tggcctgggaggaaaggagcacactctgcatatttgtgtgtatttgcatttccttgcctgtgctttgattctctgggaatgctgtttgatttgaaacaaaattgagcaaaaaagttgttg

SEQ ID NO: 9291 - DNA, 120 bp, synthetic construct
  misc_feature 1..120: note = Artificially Synthesized Probe
  source 1..120: mol_type = other DNA
atcctcgtagaaggacattgtgttcttataaccctcagctttctccttccttttgttttagttaatacacaaaattattgacctaggatatgccaaggagctggatcagggcagtctttg

SEQ ID NO: 9292 - DNA, 120 bp, synthetic construct
  misc_feature 1..120: note = Artificially Synthesized Probe
  source 1..120: mol_type = other DNA
gcttagggtttagcaggaaagcaagcattactgtgatgcttacacagataactaagaaattacagttgtggtgagtgttacaaagcaagagtgcagggtgttgcaagaatatatattggg

SEQ ID NO: 9293 - DNA, 120 bp, synthetic construct
  misc_feature 1..120: note = Artificially Synthesized Probe
  source 1..120: mol_type = other DNA
attttcctttaacatttgtagcctctcttcccatttctacacagtgcccacgactgtgtcctgccttaagctagttttcaataagcgcctgaaatgctgcaaccctttttttttttttcc

SEQ ID NO: 9294 - DNA, 120 bp, synthetic construct
  misc_feature 1..120: note = Artificially Synthesized Probe
  source 1..120: mol_type = other DNA
gtgctccaaggacctgttaatagatagagtagctgttaagtcttcatgtggattctgagccttcacatctttaaatacaatgctgtgtcagtgtcatctgctctgtgttcagaagtaaga

SEQ ID NO: 9295 - DNA, 120 bp, synthetic construct
  misc_feature 1..120: note = Artificially Synthesized Probe
  source 1..120: mol_type = other DNA
tacttacttcaagttttattttttttggaaccgtaataagttcatgtggctcaaatttccagaagaataagggagtatgcagtgaagtcataccagcctcccaggccctcatttacctcc

SEQ ID NO: 9296 - DNA, 120 bp, synthetic construct
  misc_feature 1..120: note = Artificially Synthesized Probe
  source 1..120: mol_type = other DNA
tgccaacactggctattgtcaccttctggaagtaatgaaaacaaaacatgaatgttttcagaggacaagtgtctacatcttgagagtatttgtttataagaataaagtgggccaggcgtg

SEQ ID NO: 9297 - DNA, 120 bp, synthetic construct
  misc_feature 1..120: note = Artificially Synthesized Probe
  source 1..120: mol_type = other DNA
gagccaccgcgcccggctgtagtggttttaactaaaggaattattgcatttcttcaggtcacttgttgagcatgtctcttatttatgacaagatgagttaaaatccattagaactagaag

SEQ ID NO: 9298 - DNA, 120 bp, synthetic construct
  misc_feature 1..120: note = Artificially Synthesized Probe
  source 1..120: mol_type = other DNA
ggacaaatcatttgatcatcatttcctttagtccaaattgggggactaaaaataatgtctgccacatgggcctgtcacggcaataagtgaataaatgatctgtgtcagagtacttggtta

SEQ ID NO: 9299 - DNA, 120 bp, synthetic construct
  misc_feature 1..120: note = Artificially Synthesized Probe
  source 1..120: mol_type = other DNA
ttgttagcgaagacttgaatggaacggtgaagttttcaagctctttaccctaccccaataatcttaacaggtaaggcacagcggcattacacgaatacatatctttcttgctttttttag

SEQ ID NO: 9300 - DNA, 120 bp, synthetic construct
  misc_feature 1..120: note = Artificially Synthesized Probe
  source 1..120: mol_type = other DNA
ggtagggaattataccttatttctctttccacccctcatgtggcccaattctgtgtcacagtcaacaaataaatctttgtcatttgaatggcattacaatccagtctcagagccagaatc

SEQ ID NO: 9301 - DNA, 120 bp, synthetic construct
  misc_feature 1..120: note = Artificially Synthesized Probe
  source 1..120: mol_type = other DNA
tgggggtattttagaattcaggagagaggtgtgaacacctgaataattgattggaaatgtttatactgtttctgataaacccattttcattttcaatcaccgtctactggctgccgtctg

SEQ ID NO: 9302 - DNA, 120 bp, synthetic construct
  misc_feature 1..120: note = Artificially Synthesized Probe
  source 1..120: mol_type = other DNA
aaaaaaaaaggatgctgcactttcttgagtcaactgaaagtatttatgatggcctctgtgtacagaactgggttaggcacctgtgttaactatagctgtgtaagacatgacctctgctca

SEQ ID NO: 9303 - DNA, 120 bp, synthetic construct
  misc_feature 1..120: note = Artificially Synthesized Probe
  source 1..120: mol_type = other DNA
atggccctatatacatatgtgtccaatggttcgtaaagtgttccttcaaatcaacagctacttattgaccactggtacatgctgttggtacaaatacatgtatgtgacagtaaccaggca

SEQ ID NO: 9304 - DNA, 120 bp, synthetic construct
  misc_feature 1..120: note = Artificially Synthesized Probe
  source 1..120: mol_type = other DNA
aggcattgctgagggctaggaaattgtccttgggttataagtggctgctataataatagtgatgatgataataattatagcagggacctcccttgacatttgagggggttttgttattgt

SEQ ID NO: 9305 - DNA, 120 bp, synthetic construct
  misc_feature 1..120: note = Artificially Synthesized Probe
  source 1..120: mol_type = other DNA
atcagatgtcaccaaaaaaagttaattatgaaggcaaaggaaatacatgtgacttaatgaacctcacacaaactgaaggttgaagtcaggctccggggctttttcctggacttatcctct

SEQ ID NO: 9306 - DNA, 120 bp, synthetic construct
  misc_feature 1..120: note = Artificially Synthesized Probe
  source 1..120: mol_type = other DNA
tctgttcagtgacaagaaaaacagtcttaagtcacgaagttgtaaggatgaattcagataatgcatttgagacgcaggccataatctgtaaaggctgtaaaatgcaagcagcctctaccc

SEQ ID NO: 9307 - DNA, 120 bp, synthetic construct
  misc_feature 1..120: note = Artificially Synthesized Probe
  source 1..120: mol_type = other DNA
tgtaaaaattagccatatttgacctcaagtctagacagaacttctttgtatattttagagaggagcaagcaagggagctgtacaggagactaagggaaaaacctcgaggtaagtggggtt

SEQ ID NO: 9308 - DNA, 120 bp, synthetic construct
  misc_feature 1..120: note = Artificially Synthesized Probe
  source 1..120: mol_type = other DNA
acaagaacacttgtcattggatttgagtcccacccaagtagtccagggtgatgtcatctcaggttctctaaagacgctttctccaagtacggtcacactcacaggctccaggagttggga

SEQ ID NO: 9309 - DNA, 120 bp, synthetic construct
  misc_feature 1..120: note = Artificially Synthesized Probe
  source 1..120: mol_type = other DNA
gagaaaacaggatgacgaggtagagaggatctgaagaggagagggaggtgcaggtatgcgcaggtgatagcctgatgtgccatctacatccattgagcatttactgaatgctaactatat

SEQ ID NO: 9310 - DNA, 120 bp, synthetic construct
  misc_feature 1..120: note = Artificially Synthesized Probe
  source 1..120: mol_type = other DNA
tttcttctcagccaggtcatagaggatgcaagccacaggaattcccatagcctttgtgtgtgtgtctgtcttctacctggaaaacagtaagaatactttcctgttcttttcttgtaaaag

SEQ ID NO: 9311 - DNA, 120 bp, synthetic construct
  misc_feature 1..120: note = Artificially Synthesized Probe
  source 1..120: mol_type = other DNA
acaaaagtgatacatgtttggctctcatagtcccttgaaacttactaactagtttctttgtccaaggcttggatgactaactgcttaatgagaacattggaaatgctggtcaggcacatg

SEQ ID NO: 9312 - DNA, 120 bp, synthetic construct
  misc_feature 1..120: note = Artificially Synthesized Probe
  source 1..120: mol_type = other DNA
tatctcaatacagtctgctttgaagaatcttgttcttgtccttgggagtttgtagcctcttttggtgtttatgtgaccttggatacttaattttctcttggctgtatggcacgcgcttgt

SEQ ID NO: 9313 - DNA, 120 bp, synthetic construct
  misc_feature 1..120: note = Artificially Synthesized Probe
  source 1..120: mol_type = other DNA
tttttttttttttttaaataaaaattatttccccaacctctcatgagctcctggagtatagtagctagaccgggagcctgttccattcccttctggggcaggcactgagcctttaggcta

SEQ ID NO: 9314 - DNA, 120 bp, synthetic construct
  misc_feature 1..120: note = Artificially Synthesized Probe
  source 1..120: mol_type = other DNA
aactaataatgaccactttctaataatttgatcattttctttagtgaagaactggtggctgaagcacataacctctgcaccctgctagaaaatgccatacaggacactgtgagggaacaa

SEQ ID NO: 9315 - DNA, 120 bp, synthetic construct
  misc_feature 1..120: note = Artificially Synthesized Probe
  source 1..120: mol_type = other DNA
tgagagaatcctgcatcatttgcttagatctttacatggcctttacctgctaatcacttgctaacctcccctaactttaagcttttggaagaattacaagggataccactgtgaattgca

SEQ ID NO: 9316 - DNA, 120 bp, synthetic construct
  misc_feature 1..120: note = Artificially Synthesized Probe
  source 1..120: mol_type = other DNA
gccactgtgcctggctgggttttagtatatttctcaattgtcctgatttcctcctgaagaggaaaaataacctgaaatgtgttggtggctgttgtttttttaacatgtctgttgactttc

SEQ ID NO: 9317 - DNA, 120 bp, synthetic construct
  misc_feature 1..120: note = Artificially Synthesized Probe
  source 1..120: mol_type = other DNA
gccggggagtccctgtctctcacagcatctagcagtattattaaatggattcattttaaaaatagctcctatattttgtaacatgtctcaaacactcatactgggttccacaatccactg

SEQ ID NO: 9318 - DNA, 120 bp, synthetic construct
  misc_feature 1..120: note = Artificially Synthesized Probe
  source 1..120: mol_type = other DNA
gagtgtggcggagaaatggggaacaatgcgagtgagcaacttcaggaagtcattgtgaaagaaagctgggaagagctccgcggccaagttagcaggacactctaacaagtgactgcgcgg

SEQ ID NO: 9319 - DNA, 120 bp, synthetic construct
  misc_feature 1..120: note = Artificially Synthesized Probe
  source 1..120: mol_type = other DNA
atatttgaaatgtattttaaatatttgtcaagcatcgctgctgatgcctaaggaacctcgtgagggcttgtttttccttctaatttggaggcatctaatgaccgaaaaccgtagcgattc

SEQ ID NO: 9320 - DNA, 120 bp, synthetic construct
  misc_feature 1..120: note = Artificially Synthesized Probe
  source 1..120: mol_type = other DNA
ggaaggagtttagaaactctccagtacttgtttaattcatcagtgttctaattagagtggtacctcttggaaaactacacacccccctaatgcagaaacatcatagcaataatcacccac

SEQ ID NO: 9321 - DNA, 120 bp, synthetic construct
  misc_feature 1..120: note = Artificially Synthesized Probe
  source 1..120: mol_type = other DNA
gcagctcctgtcctggctgtgaacattgttctctctctggtgtctctatgttcataactacagagacttcagctctattccatttcatatttgtgctgaataatcattccattttatggg

SEQ ID NO: 9322 - DNA, 120 bp, synthetic construct
  misc_feature 1..120: note = Artificially Synthesized Probe
  source 1..120: mol_type = other DNA
actgccaaattgtttcagttgacgtttttccctctcatgtttgactataataaataggtagttgccagtggagccttcagccaaccacctggtaataaactgttaaaaatggtgcaaacc

SEQ ID NO: 9323 - DNA, 120 bp, synthetic construct
  misc_feature 1..120: note = Artificially Synthesized Probe
  source 1..120: mol_type = other DNA
ttcccttccttcccctctttctttctataattggtggggggtttgcacagactgccaaaacactaagaactgtgtaaagtgtttttgaatggccttacacatattgaagtagatttttat

SEQ ID NO: 9324 - DNA, 120 bp, synthetic construct
  misc_feature 1..120: note = Artificially Synthesized Probe
  source 1..120: mol_type = other DNA
ccacatttcgctctcttatggacaggagcattttctgtcaggttataaataaagacatgcccattttttgtacccccacaaatgaggaagttgtaagctctctgaggttttactgatgag

SEQ ID NO: 9325 - DNA, 120 bp, synthetic construct
  misc_feature 1..120: note = Artificially Synthesized Probe
  source 1..120: mol_type = other DNA
aaatttccaattagtaggaaaccaagtggcctaccttagtttgaagacacccatcaggatgtctgcaccttttcatcctctctggaggaaagactaaatacccattattgtatataggtc

SEQ ID NO: 9326 - DNA, 120 bp, synthetic construct
  misc_feature 1..120: note = Artificially Synthesized Probe
  source 1..120: mol_type = other DNA
tgaactccagccctgggcttcttgcagcaacaaacgtgaacacagaggactgtctccaactccactttctctatttttaaaacaactttttgaatacagtatctgccatcttttcttata

SEQ ID NO: 9327 - DNA, 120 bp, synthetic construct
  misc_feature 1..120: note = Artificially Synthesized Probe
  source 1..120: mol_type = other DNA
tgatgaaatttgcctttagtgcagagtattacaaagatcatgtttagtttctagcagtatataagtagcatccatccttatctgtcatgcatttggagtgtgcgacccctgcactgggct

SEQ ID NO: 9328 - DNA, 120 bp, synthetic construct
  misc_feature 1..120: note = Artificially Synthesized Probe
  source 1..120: mol_type = other DNA
gcttgtagaattactgtgtgctaccaacagacaggctaattttgagtgaccctcagtactttgtacagttaatttggcacgctgtgtacttagtggctttttaacagctataaatttggg

SEQ ID NO: 9329 - DNA, 120 bp, synthetic construct
  misc_feature 1..120: note = Artificially Synthesized Probe
  source 1..120: mol_type = other DNA
tgtcacgttggccctgcacttatctctgcatctatttccccttgtgcaagattcagaactgcatgctccaaaaaaacaataaaagcattcatgttcataagaattgcacaggtaaaaggt

SEQ ID NO: 9330 - DNA, 120 bp, synthetic construct
  misc_feature 1..120: note = Artificially Synthesized Probe
  source 1..120: mol_type = other DNA
cttttagcctttctctggaagcaaagccacttttacgagaaagtcactgctttttcatctcaagagatgcaagtttggagtttggggaagttttcaggtgcccgtcaagtcatcctttat

SEQ ID NO: 9331 - DNA, 120 bp, synthetic construct
  misc_feature 1..120: note = Artificially Synthesized Probe
  source 1..120: mol_type = other DNA
tgcttctttatcattgttttgacagtttcagaagaatcgtggcttttccccttttttacagtaaaggtacctgagactcttgacgtattgctttttggaaatgcttgtgctggtcacatg

SEQ ID NO: 9332 - DNA, 120 bp, synthetic construct
  misc_feature 1..120: note = Artificially Synthesized Probe
  source 1..120: mol_type = other DNA
cattcttcagcaaattgcttcgttttttgattgctgattgtacgcgtgtcaccaagctgactcaaggttcatcgatgcatgctcagtaaattagaaagaacataactatggatcagccaa

SEQ ID NO: 9333 - DNA, 120 bp, synthetic construct
  misc_feature 1..120: note = Artificially Synthesized Probe
  source 1..120: mol_type = other DNA
agagagaagcttgaaaaacataattgttgggcacagtcatgactgtttgttcattaagcatggacacaacattgctcccctttgccatatatcttttcaagccgtattggatatagctct

SEQ ID NO: 9334 - DNA, 120 bp, synthetic construct
  misc_feature 1..120: note = Artificially Synthesized Probe
  source 1..120: mol_type = other DNA
ctccaccactcctcagccgctctattcatgtttcagattttggacttaaactctcccaggtgcaaagaacaaacaaaaggctagcttatttttcttttagagtgaggcttcgtatttatt

SEQ ID NO: 9335 - DNA, 120 bp, synthetic construct
  misc_feature 1..120: note = Artificially Synthesized Probe
  source 1..120: mol_type = other DNA
ggtttgctgactgtgactagaagtgattagggtgtcaaaaaacccaagcatgttaaaaatttccagaggccaaaaagatgctttcattgttctgctcttcttttccttgtcgctttcact

SEQ ID NO: 9336 - DNA, 120 bp, synthetic construct
  misc_feature 1..120: note = Artificially Synthesized Probe
  source 1..120: mol_type = other DNA
aaagcactgggttatttgttccttgagatttatcctaaatgtgggctataccctggtttacagtgtctcacagatgtgtagtagtagacactccataagtgtttactgacttgaatccac

SEQ ID NO: 9337 - DNA, 120 bp, synthetic construct
  misc_feature 1..120: note = Artificially Synthesized Probe
  source 1..120: mol_type = other DNA
ggtgtgatccccacttggaccctagagtggaagcttctccactactttatagagttgagattctatattttgagcttgtatttacccagagaattatatcctcttgggcaattgtgtata

SEQ ID NO: 9338 - DNA, 120 bp, synthetic construct
  misc_feature 1..120: note = Artificially Synthesized Probe
  source 1..120: mol_type = other DNA
atatatctcacttcactaccatccagttctgactctttactagatgcccctgtacataccaagactgattttttattctcccttctccccatgtggtttcttctgcatagagagttccta

SEQ ID NO: 9339 - DNA, 120 bp, synthetic construct
  misc_feature 1..120: note = Artificially Synthesized Probe
  source 1..120: mol_type = other DNA
agtcctgggagtttgaacaccattgctctaggaagtcatcttatacaaaaataagagttgtgaggtggttcatatacctcctgcgttctcctatttggagtttttccccatttatgaaag

SEQ ID NO: 9340 - DNA, 120 bp, synthetic construct
  misc_feature 1..120: note = Artificially Synthesized Probe
  source 1..120: mol_type = other DNA
gttgctgttttgttagacttcttcaggaccttcatctaaaatggtcttccacacgtagctatactgcataagttcacatcatctgtttcttgcatgtgggttgtgtctcaactcaagttt

SEQ ID NO: 9341 - DNA, 120 bp, synthetic construct
  misc_feature 1..120: note = Artificially Synthesized Probe
  source 1..120: mol_type = other DNA
gtatttcttcccttttgcacatctatgttctctcatttgtattgtgtggggagaagtgactttttttataaaaagaaaaaggtatatgcatcccagcagagaagcactggctccacccag

SEQ ID NO: 9342 - DNA, 120 bp, synthetic construct
  misc_feature 1..120: note = Artificially Synthesized Probe
  source 1..120: mol_type = other DNA
agcacacatttacataccttttccataaaaaagtgtgtgtgaaaccatctgcaactccactggttaacttacacatgcgacagtttgtgtttggaaaacttcacccaccctctttatttc

SEQ ID NO: 9343 - DNA, 120 bp, synthetic construct
  misc_feature 1..120: note = Artificially Synthesized Probe
  source 1..120: mol_type = other DNA
aataaaaacatcaagtcaatagtagtacatagatatgataaaagtttgcaaaagtggcacaggaatagtcattgggtggtgatgttccctgatttttttagtccctgaagcacccagcgc

SEQ ID NO: 9344 - DNA, 120 bp, synthetic construct
  misc_feature 1..120: note = Artificially Synthesized Probe
  source 1..120: mol_type = other DNA
atttagaaaatatgatttcagaattgtgaaatttaaaaaccctagaaaacctctttgctttgcttgtaaatagcagttgatgcagccctgtggacaggcgggaacagccatgtgacgtgg

SEQ ID NO: 9345 - DNA, 120 bp, synthetic construct
  misc_feature 1..120: note = Artificially Synthesized Probe
  source 1..120: mol_type = other DNA
ttaaaaaaaatggtccaaagaataaacaaactgaaaacagccaaaagagaaaggaagaatttgttagaatagggcaagactaaaggacagagtaagggtgctggccgccacctgactcaa

SEQ ID NO: 9346 - DNA, 120 bp, synthetic construct
  misc_feature 1..120: note = Artificially Synthesized Probe
  source 1..120: mol_type = other DNA
cccgtattcagtaatccttgcatttttttcctcctcctttatacatacatttttgccagttactgacttctctcttgtacacatttccgtgtcctaaattaaccaagagtcctcagccac

SEQ ID NO: 9347 - DNA, 120 bp, synthetic construct
  misc_feature 1..120: note = Artificially Synthesized Probe
  source 1..120: mol_type = other DNA
tctttactcagccatgagttctaagactgcagtgggaattgtaagaggattaccatattttaaattggctattctggtgccaaatctccccttcattttacagtttcaggcagaagacca

SEQ ID NO: 9348 - DNA, 120 bp, synthetic construct
  misc_feature 1..120: note = Artificially Synthesized Probe
  source 1..120: mol_type = other DNA
tcccggttggaaagcctcccctttttcaaatttcccaaacatgaaatatagtattacaaaatgatctgcccacctctaagcttttccatgtttgataagagaggccatcatgtaacaggt

SEQ ID NO: 9349 - DNA, 120 bp, synthetic construct
  misc_feature 1..120: note = Artificially Synthesized Probe
  source 1..120: mol_type = other DNA
catgggatgtgtggtgtgtatgggatatatggtgtgtggtgtgtatatgtttatgggatgtgtggtatgtatgtgtgatgtgtatgtgtatgggatatatgatgtgtatgggatgtgtgg

SEQ ID NO: 9350 - DNA, 120 bp, synthetic construct
  misc_feature 1..120: note = Artificially Synthesized Probe
  source 1..120: mol_type = other DNA
atcatcatcatctgcattttggcctgctccatgtctgacattcctgttaagcaggtggctttagggagaagcattgacacactgacccctacaaaaagcttacagttcctcagtgataaa

SEQ ID NO: 9351 - DNA, 120 bp, synthetic construct
  misc_feature 1..120: note = Artificially Synthesized Probe
  source 1..120: mol_type = other DNA
ggggtcacaggactaggggatggtatttacagggtagtctttttaggagaatgtttaaatgtgattgaagtccagtaagtgggagctagcagaatagaaaggattaaaatctaactagca

SEQ ID NO: 9352 - DNA, 120 bp, synthetic construct
  misc_feature 1..120: note = Artificially Synthesized Probe
  source 1..120: mol_type = other DNA
ttgttccatctgtgttgaaagaatagttagctctgtgtataaaacaaccaactgacatttcgttaactttccttctacatggggtttcagaaagaaatggggaaaaaaaggctggggggt

SEQ ID NO: 9353 - DNA, 120 bp, synthetic construct
  misc_feature 1..120: note = Artificially Synthesized Probe
  source 1..120: mol_type = other DNA
tttgagagctggtttatctgtgcaccactagcttaaatacacttttaatgtcctgacagctgaaatttgacagtgaaatttgaaaggaggaattcttttgggtagggttgtgtgtgtgtg

SEQ ID NO: 9354 - DNA, 120 bp, synthetic construct
  misc_feature 1..120: note = Artificially Synthesized Probe
  source 1..120: mol_type = other DNA
tattagcccatgcaatattctttaattcctgtgattaagttggtcttctgcaaagaaatttctgttgacttccttagattaaatgcagccctgagataggtgtgcaggtccaggaagtgg

SEQ ID NO: 9355 - DNA, 120 bp, synthetic construct
  misc_feature 1..120: note = Artificially Synthesized Probe
  source 1..120: mol_type = other DNA
ggtgcaagtaatccttagtgaaattattgttctgtagagaatgctgtgatctaagtgaagtgactttcatcctgagatgacaatggagttgtttttgtcactgtaaaggctgcatttact

SEQ ID NO: 9356 - DNA, 120 bp, synthetic construct
  misc_feature 1..120: note = Artificially Synthesized Probe
  source 1..120: mol_type = other DNA
atttcaagtgctcaggagtcacatgcagctaggggttacctattggacaggcaggcagatcttgagagctccaaagaactgtgtgtcattatattgtggaaaaaaaaaaaactttttaga

SEQ ID NO: 9357 - DNA, 120 bp, synthetic construct
  misc_feature 1..120: note = Artificially Synthesized Probe
  source 1..120: mol_type = other DNA
tcatgggtaccatttcatcaagattctgttacttaggtccaaggactagtgaccaaattgtttttcccaggagtaaacttttctacaagacatagagaaatgactgccagtgccatcagg

SEQ ID NO: 9358 - DNA, 120 bp, synthetic construct
  misc_feature 1..120: note = Artificially Synthesized Probe
  source 1..120: mol_type = other DNA
tcctgggtttaagcttcagttctctgccttaccagaatcgggatgtgtggggcaggcctacctcctctttcttcatctgcaaaatacattgaatgaaatcatattttttcctaagtatat

SEQ ID NO: 9359 - DNA, 120 bp, synthetic construct
  misc_feature 1..120: note = Artificially Synthesized Probe
  source 1..120: mol_type = other DNA
atataattaaaatattcttagaagtctggagtctgtgaaggtcacaccctctggtcttctcccagcccatagggtataaataatctgaattgacggcatccagggatctcagaaattatt

SEQ ID NO: 9360 - DNA, 120 bp, synthetic construct
  misc_feature 1..120: note = Artificially Synthesized Probe
  source 1..120: mol_type = other DNA
tcagttaaaatacttcatgaaaatatttagcttgatgcactgaaatccatcactgcttttgtgggatgcactgactgcagtctgactgttctcctagtggaaaggggagcaatagcttct

SEQ ID NO: 9361 - DNA, 120 bp, synthetic construct
  misc_feature 1..120: note = Artificially Synthesized Probe
  source 1..120: mol_type = other DNA
tcagtgtatttcatttcagcctgttaagatcttttggaaatactgtatgtgctagttacagggacagtgataaataagacagcattcctgtccttgagatgctatttccacagctccatg

SEQ ID NO: 9362 - DNA, 120 bp, synthetic construct
  misc_feature 1..120: note = Artificially Synthesized Probe
  source 1..120: mol_type = other DNA
aagaaaatcacaggttttcccgctgatatgccagggacatttccaagagaattccttttttgagagaaatctcctttgatatcccatcagtcagccatactgcataattgttagatagtg

SEQ ID NO: 9363 - DNA, 120 bp, synthetic construct
  misc_feature 1..120: note = Artificially Synthesized Probe
  source 1..120: mol_type = other DNA
ggttaatgaactgatcttcccatcgcacaactggtatgaacccacatcttctgattataaatcttttgctctttaactcttagtcattaccactgtctagtgtaggcctgtgtgttcatg

SEQ ID NO: 9364 - DNA, 120 bp, synthetic construct
  misc_feature 1..120: note = Artificially Synthesized Probe
  source 1..120: mol_type = other DNA
ttgggtctatgaaaaataaggctgaaacctatgagcaccctccatgcaaagtttcagtcaagactttggaaacaagacagtgtcttactcactttataaattcattcagaaagccgtagg

SEQ ID NO: 9365 - DNA, 120 bp, synthetic construct
  misc_feature 1..120: note = Artificially Synthesized Probe
  source 1..120: mol_type = other DNA
ggggccaaggacccagggagccaagtgtgtttctgttttctgtatttagcaatttaagacctgcgtttaaatactagctatgcattctagcaaaagaggtttatattttaacacagtaac

SEQ ID NO: 9366 - DNA, 120 bp, synthetic construct
  misc_feature 1..120: note = Artificially Synthesized Probe
  source 1..120: mol_type = other DNA
ttagttttcttattcattccttcagcacacatttctgttgcctccaatgcagcagagaaattgacttctacagtttccacaacagtccagatttcaactgtgtagtgctctttcagccag

SEQ ID NO: 9367 - DNA, 120 bp, synthetic construct
  misc_feature 1..120: note = Artificially Synthesized Probe
  source 1..120: mol_type = other DNA
actttgttttctgcaaatgaaatattgctcataagccaggtgatggctgtccacgcctcttttcccctgcttacccttgcttagatcttatggtagaatcttttcatagaagacacagaa

SEQ ID NO: 9368 - DNA, 120 bp, synthetic construct
  misc_feature 1..120: note = Artificially Synthesized Probe
  source 1..120: mol_type = other DNA
acaaacactcgcatttattaaaatgtatccatgatcccacaatccttttacatatttctctccaggagtatcacatttctgagggccctgtgcctgttttctgcaggaagttgctgttgt

SEQ ID NO: 9369 - DNA, 120 bp, synthetic construct
  misc_feature 1..120: note = Artificially Synthesized Probe
  source 1..120: mol_type = other DNA
gaagtttatctagaagggaagatactcaagcgtaggatttcagtgatgcatttggacagcatcagtactatgcttcagcgtcaaaaacgtcactttgggtaggaacaatacataatgcgt

SEQ ID NO: 9370 - DNA, 120 bp, synthetic construct
  misc_feature 1..120: note = Artificially Synthesized Probe
  source 1..120: mol_type = other DNA
ttctcattttccctcagtttcaggcttttctctccttgcctgttttcctcgcttaaaaaatgatgtgggggtccctaaacgcatctaccccgatagatttatgttttcttttccattagt

SEQ ID NO: 9371 - DNA, 120 bp, synthetic construct
  misc_feature 1..120: note = Artificially Synthesized Probe
  source 1..120: mol_type = other DNA
tgcattcctatatttcattatttgctcttgttcctcttctagggcttttacaatatagccaggaggatgtggaaacccagttacaagatgacacacaagcacagtgtcacaatcgctgtg

SEQ ID NO: 9372 - DNA, 120 bp, synthetic construct
  misc_feature 1..120: note = Artificially Synthesized Probe
  source 1..120: mol_type = other DNA
gcaacagctgtggaaccaggtaaatgacttgacttacatgttacacgctcttagttgttcgatttgtaaatgggaagagtgtgtgacccaaattagtcgtttccagatatttcctggtaa

SEQ ID NO: 9373 - DNA, 120 bp, synthetic construct
  misc_feature 1..120: note = Artificially Synthesized Probe
  source 1..120: mol_type = other DNA
taagtttacatgaaacgttaaacggcttaaagtagccacatctccttccttatgtcttctcacagccacttgtgagtttcttatcaagatacagaattatggccaagtgcggtagctcac

SEQ ID NO: 9374 - DNA, 120 bp, synthetic construct
  misc_feature 1..120: note = Artificially Synthesized Probe
  source 1..120: mol_type = other DNA
gtattacacaaataccccttccttaaagattagcaaccacttaaagacacaaagtgtgcaggactgtacccatggccgagagcggcgggattaagagggcaactgagttgttcttcccat

SEQ ID NO: 9375 - DNA, 120 bp, synthetic construct
  misc_feature 1..120: note = Artificially Synthesized Probe
  source 1..120: mol_type = other DNA
ggcccagtgatccagcacaaatctcccttattagaataaaatttggaatgacaaaattaaatttcatttttcacttatattgaggacctcacactcttcacccctgccacgatccctgac

SEQ ID NO: 9376 - DNA, 120 bp, synthetic construct
  misc_feature 1..120: note = Artificially Synthesized Probe
  source 1..120: mol_type = other DNA
aacaaaaacaaaaataggactggtgcctagttgtactacatgaagagagaaagggccagacattggtttttcctaatcttctgtcaagttctccaaatcatctgctctggaaggtagctc

SEQ ID NO: 9377 - DNA, 120 bp, synthetic construct
  misc_feature 1..120: note = Artificially Synthesized Probe
  source 1..120: mol_type = other DNA
ctattgcttatctgaataatattacctgctgagaagtttattcattgctcaccagttgtagggagattttgacacaggactggaggatttttttctcatcgtaacagtgcagacccatgg

SEQ ID NO: 9378 - DNA, 120 bp, synthetic construct
  misc_feature 1..120: note = Artificially Synthesized Probe
  source 1..120: mol_type = other DNA
atgaaatgctagatttggaggcattgccaaggtaccacaaaccatactcaaacaaggtcataatagactagtgatctcactgtggctaacaggttcatgtgatttaaagaatgacagcat

SEQ ID NO: 9379 - DNA, 120 bp, synthetic construct
  misc_feature 1..120: note = Artificially Synthesized Probe
  source 1..120: mol_type = other DNA
tgtatatttgcattaacacacaaacacacttatgtgtgtccctgtatgtgcagctgcagtaccttacacatcttccagtgcctctcaagcatcataaaaacagcttccacaaaacctcta

SEQ ID NO: 9380 - DNA, 120 bp, synthetic construct
  misc_feature 1..120: note = Artificially Synthesized Probe
  source 1..120: mol_type = other DNA
gcccatcaatgatagactggataaagaaaatgtggtacatataccccatggaatactatgcagccataagaaaaagaatgagatcatgccctttgcaggaacatggatggagctggaggc

SEQ ID NO: 9381 - DNA, 120 bp, synthetic construct
  misc_feature 1..120: note = Artificially Synthesized Probe
  source 1..120: mol_type = other DNA
aacagcaaaggttattgtaaaactggctgcttgcaggccaacaagcacatccatatggaggcaatcagtttatgctacctctgtctgtttgatgggattcataatattgactttatccat

SEQ ID NO: 9382 - DNA, 120 bp, synthetic construct
  misc_feature 1..120: note = Artificially Synthesized Probe
  source 1..120: mol_type = other DNA
tgactatactctctcctggtatcacaacccagctttctttttgccttctttattgcagttacatatggggctgatgactttagggatttccatgcaataattcccaaatctttctctcgt

SEQ ID NO: 9383 - DNA, 120 bp, synthetic construct
  misc_feature 1..120: note = Artificially Synthesized Probe
  source 1..120: mol_type = other DNA
gccaacgtactgttcctgcttggtgcccgcaggaccttctctgatctgagctgttaaaccaaaaacagatgtgaatttcatttttcttttttagatattgagctgataaatgataaatat

SEQ ID NO: 9384 - DNA, 120 bp, synthetic construct
  misc_feature 1..120: note = Artificially Synthesized Probe
  source 1..120: mol_type = other DNA
caccccctctactgtccttattccagtttgtgtccgtagttgctggaggaaagaaaatgcctattgctcttttttttattctctttatctgtttactcttctgcctttcttttctctccc

SEQ ID NO: 9385 - DNA, 120 bp, synthetic construct
  misc_feature 1..120: note = Artificially Synthesized Probe
  source 1..120: mol_type = other DNA
ttgacatttttctaagtaatggggtggggggttacaaaatatttataactatctttcctatcttcagggagatgtaccatttcactgaagcaataccacagctaagcagttccagctccg

SEQ ID NO: 9386 - DNA, 120 bp, synthetic construct
  misc_feature 1..120: note = Artificially Synthesized Probe
  source 1..120: mol_type = other DNA
ttttttctgtccacatctctgattgagcataccttcagggaaaaccccagaaacctttttcacacttacatgggaagccaagacactctcatcctgggcttgtgtttttaaaatctatat

SEQ ID NO: 9387 - DNA, 120 bp, synthetic construct
  misc_feature 1..120: note = Artificially Synthesized Probe
  source 1..120: mol_type = other DNA
gtgccttttcgactaggagtttgaaaacatccactcttcatatttattgtcacatttgttgaataataaaattgggctcttgtccattatgtctcagtcagtgaaagagcccagggtggg

SEQ ID NO: 9388 - DNA, 120 bp, synthetic construct
  misc_feature 1..120: note = Artificially Synthesized Probe
  source 1..120: mol_type = other DNA
aggtaaatgattaaaaataatcttagattaaggagtacacagatctttgcagcctcattgtgtttccagagcgggctagtgtagacactggtgaacaaggagggcctagagaattagctt

SEQ ID NO: 9389 - DNA, 120 bp, synthetic construct
  misc_feature 1..120: note = Artificially Synthesized Probe
  source 1..120: mol_type = other DNA
tctcagtgcttttaaatagtgcagctaagattccagaccaggtatttttatttcagtgtctggactgtagatctctaaatcgagaggaactccctgaataaaataagcttggagtgctgt

SEQ ID NO: 9390 - DNA, 120 bp, synthetic construct
  misc_feature 1..120: note = Artificially Synthesized Probe
  source 1..120: mol_type = other DNA
acccaccacccaacaaacacacaagcttctttccctttggaaaaaaaagctcttccagatacctacattcataaactatcccaattaacccttcagcaagtggaagaagtgtaagaaagg

SEQ ID NO: 9391 - DNA, 120 bp, synthetic construct
  misc_feature 1..120: note = Artificially Synthesized Probe
  source 1..120: mol_type = other DNA
gtgttgttttgttgagttttttttttgcaatgacactgagtggcctcctgtattgtttctttcagccagtaatgttaaagtagagactcagagtgatgaagagaatgggcgtgcctgtga

SEQ ID NO: 9392 - DNA, 120 bp, synthetic construct
  misc_feature 1..120: note = Artificially Synthesized Probe
  source 1..120: mol_type = other DNA
acacacttatttaactataggcaggaggtttcttatgaattgaagagaaacttttctttgcgtgggaagctgttctaaagttgggtaaaacacaatagatccaccacctctagcagccac

SEQ ID NO: 9393 - DNA, 120 bp, synthetic construct
  misc_feature 1..120: note = Artificially Synthesized Probe
  source 1..120: mol_type = other DNA
tccacttgcctaaatataaagggtcccaggtagatacagaaatacctggtttggccaaacttggtttgaataactagacatgctagaaaaggttttcattttcctgggatctgagtggaa

SEQ ID NO: 9394 - DNA, 120 bp, synthetic construct
  misc_feature 1..120: note = Artificially Synthesized Probe
  source 1..120: mol_type = other DNA
cctacgtcagttcttgcagttcaaacacattttttcactttcttctgaaatgccctcaaattctatgacatagtatccatgaagacttccctttttacccagtgaagttactagaggggg

SEQ ID NO: 9395 - DNA, 120 bp, synthetic construct
  misc_feature 1..120: note = Artificially Synthesized Probe
  source 1..120: mol_type = other DNA
ttttcctttttatccacttggagttaaatgcacacatttatgcacaagtgcacagaaggcccagaactgttcctaatagataattaaatgatctctctccagtggaaactctcctgggct

SEQ ID NO: 9396 - DNA, 120 bp, synthetic construct
  misc_feature 1..120: note = Artificially Synthesized Probe
  source 1..120: mol_type = other DNA
tctcaatgcaactctgacttgtatgtcctgccataggaaggtttgggacttttctttggaagatgggaggcttccttcacagtttcttaacttctcattttattcaatctttctccatct

SEQ ID NO: 9397 - DNA, 120 bp, synthetic construct
  misc_feature 1..120: note = Artificially Synthesized Probe
  source 1..120: mol_type = other DNA
atggtttccctaaaggattttgcgggaaatgttttcaccaagtgtactgctaagacccaaaacgttttcaagtacaattctttctgttgttaagtcccgctttggagtgttttacacagg

SEQ ID NO: 9398 - DNA, 120 bp, synthetic construct
  misc_feature 1..120: note = Artificially Synthesized Probe
  source 1..120: mol_type = other DNA
gtgtgttctttgtgaaatatctgcagcggcccaggccatctcttcccaaatgtgatgcgtgtatttgatggttgagggttttagaggctgctcattgtgtccatctctttatcacacatt

SEQ ID NO: 9399 - DNA, 120 bp, synthetic construct
  misc_feature 1..120: note = Artificially Synthesized Probe
  source 1..120: mol_type = other DNA
actcctagattactctgattgcaatggaatctctcatgcccatcagtccttaaaagcagagctgctctctttcctttcttgttgtggagttaggaacatgtagtggagtattttatgtta

SEQ ID NO: 9400 - DNA, 120 bp, synthetic construct
  misc_feature 1..120: note = Artificially Synthesized Probe
  source 1..120: mol_type = other DNA
ccttcctgcctcatggcttcctttggaagttgcaagcttagaatttctttcccaaagaatattggactatgcttcaagagacacttgagttcagttgcttacagtgaacatacttcttat

SEQ ID NO: 9401 - DNA, 120 bp, synthetic construct
  misc_feature 1..120: note = Artificially Synthesized Probe
  source 1..120: mol_type = other DNA
ttgtgcaataaaacgcttatttcattcaagcatatttgtccagcatggtttcttagagactgaagttacccagtttagcacctggaactgaattcactctggctgtgttagatgtagcac

SEQ ID NO: 9402 - DNA, 120 bp, synthetic construct
  misc_feature 1..120: note = Artificially Synthesized Probe
  source 1..120: mol_type = other DNA
ctgaccagagagagcttgattttaaaacccttcccacttccaatcgggagaaactcctaggatagcagtgaccttgaaagttttggggttgttttttggatgttggtgattttaaaacaa

SEQ ID NO: 9403 - DNA, 120 bp, synthetic construct
  misc_feature 1..120: note = Artificially Synthesized Probe
  source 1..120: mol_type = other DNA
aggcattgaaggtgagtggaagagaagaaactggatgttaaaataataataatgtaacagttattaattcacatggccagaccccagggcagaagactaatggacgagaggatgattatg

SEQ ID NO: 9404 - DNA, 120 bp, synthetic construct
  misc_feature 1..120: note = Artificially Synthesized Probe
  source 1..120: mol_type = other DNA
tcagtgtggcagcagacaaagccaggctcgcacttaattacattgaattatttctgtctggtatggcctcaaaaggtgcaaaatgatcataaatatctttcgacagtcacctttggtttt

SEQ ID NO: 9405 - DNA, 120 bp, synthetic construct
  misc_feature 1..120: note = Artificially Synthesized Probe
  source 1..120: mol_type = other DNA
aggtagagaggtctggatgccgtccatgggcctctgcccaaattagtgtatcatttcaacataaaactggcttgtaaattttactggaatctggtaaccatgtatcataaagtatctgga

SEQ ID NO: 9406 - DNA, 120 bp, synthetic construct
  misc_feature 1..120: note = Artificially Synthesized Probe
  source 1..120: mol_type = other DNA
acgcgactgaaccctttaaacataagcctttctaaactggcctctctgtctttgactttagtcattaaagaagaaactaatcacagtgaaatggcagaagacctgtgcaagataggatca

SEQ ID NO: 9407 - DNA, 120 bp, synthetic construct
  misc_feature 1..120: note = Artificially Synthesized Probe
  source 1..120: mol_type = other DNA
agtaaaagcttcatgaggctgagatgcactttggaagaggaatagagtttcagcacattctaggtgttggaggaatgggggaatctaggcagatgtttaaaatcaatgagaaaccagaat

SEQ ID NO: 9408 - DNA, 120 bp, synthetic construct
  misc_feature 1..120: note = Artificially Synthesized Probe
  source 1..120: mol_type = other DNA
ccctcttgcagcttcaaatagggctccattttgaccttttgattaattagaggtttgtcataggttgggggttgagaggagcaagggagagaaggattcagtgtacaaaaagaatgaaag

SEQ ID NO: 9409 - DNA, 120 bp, synthetic construct
  misc_feature 1..120: note = Artificially Synthesized Probe
  source 1..120: mol_type = other DNA
tctgaggctcagaaggggtgatggatgtgatggtgctcccaacactagaaagcatcttaagaatgtaagattttcatgatgactgttgctcagagtggctattatagttttgctttattg

SEQ ID NO: 9410 - DNA, 120 bp, synthetic construct
  misc_feature 1..120: note = Artificially Synthesized Probe
  source 1..120: mol_type = other DNA
atgagcattttgacagagtctatggtcttgggccactctttctttttctcccttgagaactttttagattttgctgatggcattgcttgttgaatgttgctgtggaaacatcaagtctag

SEQ ID NO: 9411 - DNA, 120 bp, synthetic construct
  misc_feature 1..120: note = Artificially Synthesized Probe
  source 1..120: mol_type = other DNA
gatatagcttgattgacatttcagccttcttcccactatatttttttttcctgtgagagctattgggttttctaaatcctgaaagaatgccaaagatggggttggaggagtttggtgagg

SEQ ID NO: 9412 - DNA, 120 bp, synthetic construct
  misc_feature 1..120: note = Artificially Synthesized Probe
  source 1..120: mol_type = other DNA
ctacaaagtccattcccctccttttcttgccttgatttggtagagggatagacttggatacaaactagaatggattcattcttctctggagttagtgtaacaagacatttagctgctcaa

SEQ ID NO: 9413 - DNA, 120 bp, synthetic construct
  misc_feature 1..120: note = Artificially Synthesized Probe
  source 1..120: mol_type = other DNA
tccagatgtgttgaaggatggaaatatacagagtagtggtaaaatataaaccgttcagacattccaaggatgggctcatgtgctttgactcattaatgtaccactgctgaaaacagaaca

SEQ ID NO: 9414 - DNA, 120 bp, synthetic construct
  misc_feature 1..120: note = Artificially Synthesized Probe
  source 1..120: mol_type = other DNA
ataattaaactaatctttggttcccctatttatgtattcatttatccaacaaaatctccttaagtgcttataatgggtaggtcctggctcggtgtcccctagacagacgcatgggccttc

SEQ ID NO: 9415 - DNA, 120 bp, synthetic construct
  misc_feature 1..120: note = Artificially Synthesized Probe
  source 1..120: mol_type = other DNA
tttttgttttttgtttgagttggttgattggggtttgatttgcttttgaaaagatttttatttttagaggcagggctgcattgggagcatccagaactgctaccttcctagatgtttccc

SEQ ID NO: 9416 - DNA, 120 bp, synthetic construct
  misc_feature 1..120: note = Artificially Synthesized Probe
  source 1..120: mol_type = other DNA
ttcctcagaaaccaaagctttatttcaaatctcttccttccctggctggttccatctagtaccagaggcctcttttcctgaagaaatccaatcctagccctcattttaattatgtacatc

SEQ ID NO: 9417 - DNA, 120 bp, synthetic construct
  misc_feature 1..120: note = Artificially Synthesized Probe
  source 1..120: mol_type = other DNA
actgacccaaatgaattctaaaccaatcaaatgtctgggaagccctccaagaaaaaaaatagaaaagcacttgaagaatattcccaatattcccggtcagcagtatcaaggctgacttgt

SEQ ID NO: 9418 - DNA, 120 bp, synthetic construct
  misc_feature 1..120: note = Artificially Synthesized Probe
  source 1..120: mol_type = other DNA
atgtggaaagcctggatctcagctccttgccccatatcccttctgtaatttgtacctaaagagtgtgattatcctaattcaagagtcactaaaactcatcacattatcattgcatatcag

SEQ ID NO: 9419 - DNA, 120 bp, synthetic construct
  misc_feature 1..120: note = Artificially Synthesized Probe
  source 1..120: mol_type = other DNA
atgtaccactggaggaatagagtatccttttgtacacattttgaaatgcttcttctgtagtgatagaacaaataaatgcaacgaatactctgtctgccctatcccgtgaagtccacactg

SEQ ID NO: 9420 - DNA, 120 bp, synthetic construct
  misc_feature 1..120: note = Artificially Synthesized Probe
  source 1..120: mol_type = other DNA
agaaaagttggaaagattacaggcaaaaaataagaacatatattaaattacatttgcaagtttcaaatatttgtaactcaacacaaaaacctctaaaagtatgttgggtgcaatggctca

SEQ ID NO: 9421 - DNA, 120 bp, synthetic construct
  misc_feature 1..120: note = Artificially Synthesized Probe
  source 1..120: mol_type = other DNA
gactttaaagcaaatccaaacagacaatttaactgttttggaaaatgtattcactgcagaaatgcccacaataagccatgctatctgatggtatggtaatgtgaaatggcatggtaacgt

SEQ ID NO: 9422 - DNA, 120 bp, synthetic construct
  misc_feature 1..120: note = Artificially Synthesized Probe
  source 1..120: mol_type = other DNA
tgatgagtcaccaaatctggggaaaagcaactgggattgactatgaggctgccttaattaatcttcgtcgtctcgttgcaaaggtataacctgaatttctttagctatcctttctgctaa

SEQ ID NO: 9423 - DNA, 120 bp, synthetic construct
  misc_feature 1..120: note = Artificially Synthesized Probe
  source 1..120: mol_type = other DNA
cttggtctaggctttttctacagcctttcaggagtacctgaaactcacactagaaaaggattagccatttatcattgtaagtctcacattaccattacctcttatccttacctctatctc

SEQ ID NO: 9424 - DNA, 120 bp, synthetic construct
  misc_feature 1..120: note = Artificially Synthesized Probe
  source 1..120: mol_type = other DNA
atgccaggctctgcaaagacctaagcctgccttggaaaattactgcaggtttgccctctcatagcacctcttccttgaatacaagttaagttgaatataaatacacttgatagcaattat

SEQ ID NO: 9425 - DNA, 120 bp, synthetic construct
  misc_feature 1..120: note = Artificially Synthesized Probe
  source 1..120: mol_type = other DNA
agccaaacaacagtgatatctactagcggtgcttccgtcacttctaatgagcaccatgggatctcaagcaaatggtcttacaatcagcaagagaatattcttttatggaaaatactatga

SEQ ID NO: 9426 - DNA, 120 bp, synthetic construct
  misc_feature 1..120: note = Artificially Synthesized Probe
  source 1..120: mol_type = other DNA
tagcagcaagtttattgcccttctctcaagggcatcattctgggaggttctgtagctattgacagaggctctcttttactttactcattactatatagaccacatatgcatagtacataa

SEQ ID NO: 9427 - DNA, 120 bp, synthetic construct
  misc_feature 1..120: note = Artificially Synthesized Probe
  source 1..120: mol_type = other DNA
aaatcaggaaatgcaaactctcaaactacctctaagtagaagaaaaacaaataaataaattctaacagagcaccggaagcccgtagatacacagagtagggcagagaaggcagaaaagac

SEQ ID NO: 9428 - DNA, 120 bp, synthetic construct
  misc_feature 1..120: note = Artificially Synthesized Probe
  source 1..120: mol_type = other DNA
taaacaagacaagccaactctatctacaaccagcaggtattcataaaagaaaatgcacagaaaggcacaactggcaaaataagaaattcagaaagcaggaaccctgatcacaaaacgaag

SEQ ID NO: 9429 - DNA, 120 bp, synthetic construct
  misc_feature 1..120: note = Artificially Synthesized Probe
  source 1..120: mol_type = other DNA
ccctcccccaaggaatctactagaggacgaacttcaaccaattaaaaaggtgcctgcaacacttcacaaaaggactgtgagcattttataatgttaaatgaagaactaggatcaaaaagc

SEQ ID NO: 9430 - DNA, 120 bp, synthetic construct
  misc_feature 1..120: note = Artificially Synthesized Probe
  source 1..120: mol_type = other DNA
tattaggtcatgagggctttgccttctaggttcatggcttataggttaagggtggggtgatgctgattaacaaacagaagcggctttgaaatgggtaataggtagaagacagaagaattc

SEQ ID NO: 9431 - DNA, 120 bp, synthetic construct
  misc_feature 1..120: note = Artificially Synthesized Probe
  source 1..120: mol_type = other DNA
atagaagtagctgcatggttacttttgaccatttatgctgagatttgcaagcaaagaagtaatttaaagacaaatgaataattaaaggggaagcagagtggccagatgcagtggctcaca

SEQ ID NO: 9432 - DNA, 120 bp, synthetic construct
  misc_feature 1..120: note = Artificially Synthesized Probe
  source 1..120: mol_type = other DNA
ccaaggtcaagtgaccctaggtgtggcttataccacatctctacaaggtataagttgtaaatgttagcagtatgatactaattctgcaagcttgcataaaggaagagctgtagaggcttt

SEQ ID NO: 9433 - DNA, 120 bp, synthetic construct
  misc_feature 1..120: note = Artificially Synthesized Probe
  source 1..120: mol_type = other DNA
ggaaacaaaccaaaagaaagcacgaagatgaaaataatagtgcagaaaagaaaaaaccagcttaaattaaaatcctggttctttgagaaaaaagaacaagaaaaaaagcacaaatagaca

SEQ ID NO: 9434 - DNA, 120 bp, synthetic construct
  misc_feature 1..120: note = Artificially Synthesized Probe
  source 1..120: mol_type = other DNA
caaagagagagatagaataatggtaaagagcttacccatgaacaggaatgcaaaaaagcttttccatattagaaagaaccattctcacagtctctggtgttctggaagagcccaactcag

SEQ ID NO: 9435 - DNA, 120 bp, synthetic construct
  misc_feature 1..120: note = Artificially Synthesized Probe
  source 1..120: mol_type = other DNA
agttttaatctgcagaatgccagtacctttaaattatcaagcctgaagaggcatttaaaatataccagcagacagtctcactcccctggagttaaataattgccacttgaagccgcttgc

SEQ ID NO: 9436 - DNA, 120 bp, synthetic construct
  misc_feature 1..120: note = Artificially Synthesized Probe
  source 1..120: mol_type = other DNA
tatgtctcattttcagtgattcccagctttaacgggctttttttccacccatttactttgtagtaattggtcctggggcatcagatcagaggaattctataaagaattttagaagcagta

SEQ ID NO: 9437 - DNA, 120 bp, synthetic construct
  misc_feature 1..120: note = Artificially Synthesized Probe
  source 1..120: mol_type = other DNA
taacaatggactgaaatggctaaactgtgggatacttaaaatgttaatttccagactaatcaagagaaagaggtcaccagaactgatatccttgactctcctcccatccaagtccagatc

SEQ ID NO: 9438 - DNA, 120 bp, synthetic construct
  misc_feature 1..120: note = Artificially Synthesized Probe
  source 1..120: mol_type = other DNA
gttcacccacaccccagtataatctctacattgctagaattatctgtcactttccacttcaaaacctctactggttcccaactaccttgaaacacaaactaaattttcttgcatggactg

SEQ ID NO: 9439 - DNA, 120 bp, synthetic construct
  misc_feature 1..120: note = Artificially Synthesized Probe
  source 1..120: mol_type = other DNA
gcccctgctacttgctggtttctaaatgtatttcttcactaacacctactaaagcattcccagctcaaatctcacctcttccacgaagcatttaagatcacatataaacttctatcccat

SEQ ID NO: 9440 - DNA, 120 bp, synthetic construct
  misc_feature 1..120: note = Artificially Synthesized Probe
  source 1..120: mol_type = other DNA
tgcactgcgttttctatcttttgaaggtcaaattctatgaatatagtagctatgtaaaaatattttttcatggccacgcacagcggctcactcctcccagcactaatttagcaggccaaa

SEQ ID NO: 9441 - DNA, 120 bp, synthetic construct
  misc_feature 1..120: note = Artificially Synthesized Probe
  source 1..120: mol_type = other DNA
catctatatgtaatcccaccagaagcggctactgattttaactctcatgggcaattccaccaggctttcttctagtaatatcatatacctactctgtgtcggcactatactaagttctta

SEQ ID NO: 9442 - DNA, 120 bp, synthetic construct
  misc_feature 1..120: note = Artificially Synthesized Probe
  source 1..120: mol_type = other DNA
aacagtgggaaaaagaatggtgaacggggcacttggcaccacaggacaagatcacattagtatttctttacctcctccatatctgataagtctgcataatacattttgctccacttttac

SEQ ID NO: 9443 - DNA, 120 bp, synthetic construct
  misc_feature 1..120: note = Artificially Synthesized Probe
  source 1..120: mol_type = other DNA
gtggagcctaatattccttccttgagcgtgagctatgcagatacttgtttctaaccaataaagcgtaagtgacagtatacaaaactttggagactagttcacaaaatgcccctctaattt

SEQ ID NO: 9444 - DNA, 120 bp, synthetic construct
  misc_feature 1..120: note = Artificially Synthesized Probe
  source 1..120: mol_type = other DNA
catggaagaccttggcaagaaccgtgtagtcaagctactctcatatgcagaaccccaagaaatggtgagataataaacatttcttgtacacagtaaataaaaatacctgtgagatggata

SEQ ID NO: 9445 - DNA, 120 bp, synthetic construct
  misc_feature 1..120: note = Artificially Synthesized Probe
  source 1..120: mol_type = other DNA
tagttcacaaaaacgtcttaattagaaacagactgtcatttcaggattcaccccctgccctagagtttttcccaagatttatgcctatacccagtaaaaaacatttctcacctaaattac

SEQ ID NO: 9446 - DNA, 120 bp, synthetic construct
  misc_feature 1..120: note = Artificially Synthesized Probe
  source 1..120: mol_type = other DNA
gtccttcatccttcaatagatgtttactgaatacctattgtatgctatacactgcaccatggggaggaaaatcaggtcctgttcacactttctaggaggggactcaatatcaatcaaaaa

SEQ ID NO: 9447 - DNA, 120 bp, synthetic construct
  misc_feature 1..120: note = Artificially Synthesized Probe
  source 1..120: mol_type = other DNA
aaaaaagagtcaagtttgggatataggtaggagtttgagagatcaggagtttaattagcggaagatgagaggcctctgtaaaatcaaaagatgtcagttaggcagctgaatcatggatcc

SEQ ID NO: 9448 - DNA, 120 bp, synthetic construct
  misc_feature 1..120: note = Artificially Synthesized Probe
  source 1..120: mol_type = other DNA
acacacagtatctttagatactacagtatactacacataagtatctttagatactatgtgtagtatatatactacacataagtatctttagatactaatgtgtagtatatatactacaca

SEQ ID NO: 9449 - DNA, 120 bp, synthetic construct
  misc_feature 1..120: note = Artificially Synthesized Probe
  source 1..120: mol_type = other DNA
gttatatatatataaatcacagtacatttattgatgggcagggtccgtagtttactcactttcattttcccaaagccataaacacctgaactgtttcctgctgtttctgtcctggtcaca

SEQ ID NO: 9450 - DNA, 120 bp, synthetic construct
  misc_feature 1..120: note = Artificially Synthesized Probe
  source 1..120: mol_type = other DNA
tctctctctctctcttgcttggtttctgtaatgaggaagttctccgcagctcagtttcctttccctcactgagcgcctgaaacaggaagtcagtcagttaagctggtggcagcagccgag

SEQ ID NO: 9451 - DNA, 120 bp, synthetic construct
  misc_feature 1..120: note = Artificially Synthesized Probe
  source 1..120: mol_type = other DNA
ctgttttgaatactgactcacagctgggacctgtcgtgctaagcatttgttagcccatttcatcctcaccacaacctaaagtgaaggtcctgttaaaagccccactttgcagatgagaaa

SEQ ID NO: 9452 - DNA, 120 bp, synthetic construct
  misc_feature 1..120: note = Artificially Synthesized Probe
  source 1..120: mol_type = other DNA
gtcaaaactgctgggatccaggccagttctcgtattccttcctctacctcttctctctgaacccttgtctgcactgagttctctcagagtcatgatgggtgtgcagtgtctgctccttag

SEQ ID NO: 9453 - DNA, 120 bp, synthetic construct
  misc_feature 1..120: note = Artificially Synthesized Probe
  source 1..120: mol_type = other DNA
ctttgtgctcaggaaagagaacaggatttgactatgtaaatggacttgagcgggggttggacatcaaaagacagggctacagttcagtgccacccatgtgacttaggagtgcacattctg

SEQ ID NO: 9454 - DNA, 120 bp, synthetic construct
  misc_feature 1..120: note = Artificially Synthesized Probe
  source 1..120: mol_type = other DNA
gcctaataacagcaggcaacttccaaagagctctgtgccaggcaccattctaggcttatattgactcatttgatgtccacgaagaccttcaaaggaggtcttattatctccactttacag

SEQ ID NO: 9455 - DNA, 120 bp, synthetic construct
  misc_feature 1..120: note = Artificially Synthesized Probe
  source 1..120: mol_type = other DNA
agtcctttcgggtccagagattaggctccagctttgatgctttgcatgtttgtctacctggtaggttaaattcataaattcatgaacacaatcagcacttcttgggtttttttttttttt

SEQ ID NO: 9456 - DNA, 120 bp, synthetic construct
  misc_feature 1..120: note = Artificially Synthesized Probe
  source 1..120: mol_type = other DNA
ttgcaaaatgctaaccttcctgtgtcaacccagcatcttcacaggtggaatgaggatgacaaggccaaagcccactcgttgggttattttttcaaattgaggtataattcatattccata

SEQ ID NO: 9457 - DNA, 120 bp, synthetic construct
  misc_feature 1..120: note = Artificially Synthesized Probe
  source 1..120: mol_type = other DNA
taaatgactttttgtctatggatttatcttttccggatgtttcataactggaaacatacaacatgtggactttggggccagcttctttcactgagcacaatgctgtcaagcttcatctgt

SEQ ID NO: 9458 - DNA, 120 bp, synthetic construct
  misc_feature 1..120: note = Artificially Synthesized Probe
  source 1..120: mol_type = other DNA
cgtctaaaaaaaaaaatcgtgctggcaattagtctttatgagctaaaagtgactagtgacatctcagaagcagaggagtacaggacccatctgtgaagaacattccatacagaggagaga

SEQ ID NO: 9459 - DNA, 120 bp, synthetic construct
  misc_feature 1..120: note = Artificially Synthesized Probe
  source 1..120: mol_type = other DNA
gcacagaaagtacaaagcaaaaagcagaaaagtaaccaccccatcactgagacactagaataaccattgttaattcactggtgtatcttcttcttctctctacctccctgtatgtatgta

SEQ ID NO: 9460 - DNA, 120 bp, synthetic construct
  misc_feature 1..120: note = Artificially Synthesized Probe
  source 1..120: mol_type = other DNA
ctgcacacagaaattcacttgtttcttcttgtacaaggcaggtgggttatgacagagactttggagctaatagacttgggctaaggattcagcaggtttttttttttttttcgagatggt

SEQ ID NO: 9461 - DNA, 120 bp, synthetic construct
  misc_feature 1..120: note = Artificially Synthesized Probe
  source 1..120: mol_type = other DNA
ccaaaacctcttactgaataacattcctttaccctttggggttcctcttttatcatattttaagtcatatatctttctttgtgtttgtactctgttccatgtatatctgcttttctttcc

SEQ ID NO: 9462 - DNA, 120 bp, synthetic construct
  misc_feature 1..120: note = Artificially Synthesized Probe
  source 1..120: mol_type = other DNA
tgggatagcctctgtcacctagttaccacttgataaaaggtaattgttgctgtttgtcatgtccaagaagaagcagtcttcttctagttttagaaagagttctgaaggactgagtattta

SEQ ID NO: 9463 - DNA, 120 bp, synthetic construct
  misc_feature 1..120: note = Artificially Synthesized Probe
  source 1..120: mol_type = other DNA
gtccagctcactcgcatttgtttctttccttgattctgtttgtcacaggtttgtccatttaatctcctacttttcaagtgacaggctcttaggttggttaatctcttctgctttttgttt

SEQ ID NO: 9464 - DNA, 120 bp, synthetic construct
  misc_feature 1..120: note = Artificially Synthesized Probe
  source 1..120: mol_type = other DNA
gaacgcagggtttccagcccccgttctcctaccccatcttgtccagaaatctgcagaaacacaagtcttaagaaaatgcaaaaacacagacaaaaacattagaaattagaaatgatacgt

SEQ ID NO: 9465 - DNA, 120 bp, synthetic construct
  misc_feature 1..120: note = Artificially Synthesized Probe
  source 1..120: mol_type = other DNA
ccactgcccctaaagagcagtgagcatgttttccaggttatgttccagggcagcaattgccaaacactatttagttgtagaatctttgctttaaacattttgcatgcaagatattgtgtg

SEQ ID NO: 9466 - DNA, 120 bp, synthetic construct
  misc_feature 1..120: note = Artificially Synthesized Probe
  source 1..120: mol_type = other DNA
taggacagggagcagaaggatggggactaaagccatggaagaaagacagaaaaatcaccttttctatgtgaagtgaagagacatgtggaagtgaaattactcaaaattctttttaagtac

SEQ ID NO: 9467 - DNA, 120 bp, synthetic construct
  misc_feature 1..120: note = Artificially Synthesized Probe
  source 1..120: mol_type = other DNA
tggcatctaaaaagatatgcatatataatcttgtgggtatgtttaaaatttctgaacttacttacaaacaggaataggaaatctaagaagaggggctcatgggagtggggaaggagatgt

SEQ ID NO: 9468 - DNA, 120 bp, synthetic construct
  misc_feature 1..120: note = Artificially Synthesized Probe
  source 1..120: mol_type = other DNA
ggttttaggaaagtgaaaagtaccttctcctcctcacattagagatgactgtgccaaaggaaggtagagcttctagaaagagaagagaatctgggattcctaggaccttcttgttagaaa

SEQ ID NO: 9469 - DNA, 120 bp, synthetic construct
  misc_feature 1..120: note = Artificially Synthesized Probe
  source 1..120: mol_type = other DNA
gtttacacttacagaattctgcccaatgaagatgataaattcactgttcaggtgagtcctttataaacctagaaatctgaacctgacttcagccgatactggcagagaaagggtgtaaac

SEQ ID NO: 9470 - DNA, 120 bp, synthetic construct
  misc_feature 1..120: note = Artificially Synthesized Probe
  source 1..120: mol_type = other DNA
ttggaggagtttgtttgaaaagaaagtggaagtgggaggggagaggcagggtacactcttcagtttcaaagcttgaagggaatgattcattttgtgctaactaggatgcagtagtagaca

SEQ ID NO: 9471 - DNA, 120 bp, synthetic construct
  misc_feature 1..120: note = Artificially Synthesized Probe
  source 1..120: mol_type = other DNA
catctgtgataggtggtttgctgagaggagtcggcaaactctcttaagttaaaagttggtcgatgcttttgatcttttttccctttgtggtttcttctcttccttcaaagtgaagaaaac

SEQ ID NO: 9472 - DNA, 120 bp, synthetic construct
  misc_feature 1..120: note = Artificially Synthesized Probe
  source 1..120: mol_type = other DNA
tattgatctctgcctattttaactcaagttcctcttttcatgttgaggcaaaacctcacagtcttttctgagcttagccacagtttctaaataactcattcctgacacctgagcctgttc

SEQ ID NO: 9473 - DNA, 120 bp, synthetic construct
  misc_feature 1..120: note = Artificially Synthesized Probe
  source 1..120: mol_type = other DNA
ctagaatgaaagcagactccattcccggctgggatctgggttcaagtccaatttggtcagcgatgtggccttgggcaaggactgccaagaaactgctggaaagtagagatcacacacata

SEQ ID NO: 9474 - DNA, 120 bp, synthetic construct
  misc_feature 1..120: note = Artificially Synthesized Probe
  source 1..120: mol_type = other DNA
ccacactcccaggttttcatgcaagtttagatgaagagttagaaaatatctatctcatagaccctttcattattctttcccgatttggaagaaaaaatccagtggtctgagccattccgg

SEQ ID NO: 9475 - DNA, 120 bp, synthetic construct
  misc_feature 1..120: note = Artificially Synthesized Probe
  source 1..120: mol_type = other DNA
aatgtagcgttatgaatagttccgagtacaaaatccaaggccaaacttgtgctggttcctatagaggcgacccatttttttctttttttctactttgaagccggtgggaattcttttcca

SEQ ID NO: 9476 - DNA, 120 bp, synthetic construct
  misc_feature 1..120: note = Artificially Synthesized Probe
  source 1..120: mol_type = other DNA
tcctggatgatgcccttgaatttgctgaacagaatgaagcaacctgggatctgccctcctctagattttctgttttgtgagttaattaatttctttttgctcaagttagttgagttaggg

SEQ ID NO: 9477 - DNA, 120 bp, synthetic construct
  misc_feature 1..120: note = Artificially Synthesized Probe
  source 1..120: mol_type = other DNA
aggcctcacttgatcaccccagaaaaatagtcaccccacccttcacctgttgctctttaaccccttaccctcctttcttttctttgtggcacttgtgactacctgattttatattatatt

SEQ ID NO: 9478 - DNA, 120 bp, synthetic construct
  misc_feature 1..120: note = Artificially Synthesized Probe
  source 1..120: mol_type = other DNA
gtttcttctctcaagcttctgtttcctcctcagaaacagtgggaggccagcagtacttctctcctgtggagattttgaggactaaaagagatggtttatgtaaacatgcagctcatgtct

SEQ ID NO: 9479 - DNA, 120 bp, synthetic construct
  misc_feature 1..120: note = Artificially Synthesized Probe
  source 1..120: mol_type = other DNA
atcactattcccatttttaaattcaaggaaacaaaggctcagatgagataacactgtttgcctgtttcataaaacttgtgacagaagagggatgtcattggagccatgctgtggctctgt

SEQ ID NO: 9480 - DNA, 120 bp, synthetic construct
  misc_feature 1..120: note = Artificially Synthesized Probe
  source 1..120: mol_type = other DNA
atcaggatgcccaacccatctcccccccatatttatgcccttcatgactggcaggaaaaaggatctgaaatcttgaaatggagaaatgtgttttccaaaatccaaacatctcacaaatat

SEQ ID NO: 9481 - DNA, 120 bp, synthetic construct
  misc_feature 1..120: note = Artificially Synthesized Probe
  source 1..120: mol_type = other DNA
ctccttatagcactcctgttttttcttcatagcccttatcgctgtctgcaaggggatttgtctccattgccactataacaaatttcagcaaacagaggggtttaaaacaacacaatttat

SEQ ID NO: 9482 - DNA, 120 bp, synthetic construct
  misc_feature 1..120: note = Artificially Synthesized Probe
  source 1..120: mol_type = other DNA
tcaagagttttacgaaaagaaaagaagcaagctggaaagaagagcgtctcagggatatgtaattaaggataaaaatatccctcataggctctgggcaatggggaaaatggagattgcttg

SEQ ID NO: 9483 - DNA, 120 bp, synthetic construct
  misc_feature 1..120: note = Artificially Synthesized Probe
  source 1..120: mol_type = other DNA
agggtctccttcacgtggtctgatgggccactgcattcctctcttgtctaatctttcttttctttttttggacagagaaggattacggcagattaatattgataatttctgctttttctc

SEQ ID NO: 9484 - DNA, 120 bp, synthetic construct
  misc_feature 1..120: note = Artificially Synthesized Probe
  source 1..120: mol_type = other DNA
cacaggccacatggggtcacagagcacttagaatacaccccctccccccccaaaaaagagaatgtcctatatctcatgataattttattgcacattgaaatcttaatattttggatatat

SEQ ID NO: 9485 - DNA, 120 bp, synthetic construct
  misc_feature 1..120: note = Artificially Synthesized Probe
  source 1..120: mol_type = other DNA
ctaggttagcattcaacctaaccatgatgaagagggaactgcttaaatacactgtggtccagccaatggaagactatgcagctgcttaaaaaattaaagtagagctgtgtgtaatgagtt

SEQ ID NO: 9486 - DNA, 120 bp, synthetic construct
  misc_feature 1..120: note = Artificially Synthesized Probe
  source 1..120: mol_type = other DNA
cttctcacccagtgtctcttggtcctcatgatgctcacacatctcaattctggacattaccagtgcctgtaattttcagcagacaatgagtgaaatatgtgatcgcaatattttattttg

SEQ ID NO: 9487 - DNA, 120 bp, synthetic construct
  misc_feature 1..120: note = Artificially Synthesized Probe
  source 1..120: mol_type = other DNA
ctcctcctgttccattgatagattaatctactcttgacccagctgcataggtttaatcgaggtggctttcttgtgtgtttccttatctggcagactaagttcccatttattattctcatt

SEQ ID NO: 9488 - DNA, 120 bp, synthetic construct
  misc_feature 1..120: note = Artificially Synthesized Probe
  source 1..120: mol_type = other DNA
tgtatatctctagatagttctggtcttctttaacgtgttccttgaatagagcagaaatcggcctcctataaaatccactcctggatcccggttctcccctcaggagatacatggaagcct

SEQ ID NO: 9489 - DNA, 120 bp, synthetic construct
  misc_feature 1..120: note = Artificially Synthesized Probe
  source 1..120: mol_type = other DNA
gtggcctcagccaggcccatctctctccctgtgctcttcaacaacaacaaaatcacaaatgaaccccataaaatgctttatggaaacctatagatatcagattaaagatcacaatctggt

SEQ ID NO: 9490 - DNA, 120 bp, synthetic construct
  misc_feature 1..120: note = Artificially Synthesized Probe
  source 1..120: mol_type = other DNA
actcatttacatcacccgcctgactgctgtaggccactgagctatgatattcatcagacgcaactaattacccaacttgtgaggccagcaaccacacactggtaaacaggtttagttgac

SEQ ID NO: 9491 - DNA, 120 bp, synthetic construct
  misc_feature 1..120: note = Artificially Synthesized Probe
  source 1..120: mol_type = other DNA
cgaggtctgcctgcctctaggactgtagacgtctttattagagactcctgtcacacctgttaggagtcagacagattaataatcacttctttttatttagagctcttttaatccccaaac

SEQ ID NO: 9492 - DNA, 120 bp, synthetic construct
  misc_feature 1..120: note = Artificially Synthesized Probe
  source 1..120: mol_type = other DNA
aaaaaatcggagatttcatctaggaatctggacttttaccttctgaaaaatttaaaattctagcacccaaggcctgtgttaccccatgatgctgtaactggagctaactggaagctgctg

SEQ ID NO: 9493 - DNA, 120 bp, synthetic construct
  misc_feature 1..120: note = Artificially Synthesized Probe
  source 1..120: mol_type = other DNA
aagttgctgggtcatagcatatgctcatatttaatttgcctaaattgtacctgattattctccacaatggctgtcctggtctatgttcctgggtttctctatccagcacagatgttgaga

SEQ ID NO: 9494 - DNA, 120 bp, synthetic construct
  misc_feature 1..120: note = Artificially Synthesized Probe
  source 1..120: mol_type = other DNA
gtactcaaaaaatattcatccttttcttcattcatttccaacactgaggtaaatgcacaatgcatttcatcttcaatgctgaggcttctttgcatgctcggtcacacttagggcaccctg

SEQ ID NO: 9495 - DNA, 120 bp, synthetic construct
  misc_feature 1..120: note = Artificially Synthesized Probe
  source 1..120: mol_type = other DNA
ttctttggtgaatccttccctgatccaccaggctgagtctcccggagcaccctcccaagctactgtcctctcttcacaagcctctgcacctggtcatattttcttagttgtttatggttc

SEQ ID NO: 9496 - DNA, 120 bp, synthetic construct
  misc_feature 1..120: note = Artificially Synthesized Probe
  source 1..120: mol_type = other DNA
tgaagtttcaataagaggaagaccccgggggaaagtttatttttcccaccacacttgtatctgtcagtgtttgctgcataacaaacagcctcaaatctcaatacttaatgacagcaaaca

SEQ ID NO: 9497 - DNA, 120 bp, synthetic construct
  misc_feature 1..120: note = Artificially Synthesized Probe
  source 1..120: mol_type = other DNA
tgattctgggaagtctgcccaaaacaaggcgagaggaatgtcgaagaacctagcttcaggaagttggggctggttggaatgaagtagttgggagaagatagaacccagctccactagtgc

SEQ ID NO: 9498 - DNA, 120 bp, synthetic construct
  misc_feature 1..120: note = Artificially Synthesized Probe
  source 1..120: mol_type = other DNA
catctgtaagctgaagatatcaaacccacctgcactattagataaaatataaattgcatcacatatgtgggcgcatctggcccactttcttccacatctgatgatcagtcaacatccatt

SEQ ID NO: 9499 - DNA, 120 bp, synthetic construct
  misc_feature 1..120: note = Artificially Synthesized Probe
  source 1..120: mol_type = other DNA
gtgactctggttctctgtaattgacctttttattattggcgtgggcattgttgcaactatttgggcatcgtaggtgtttccatggtatttgtagcttttgtacagaaaccttcagaagta

SEQ ID NO: 9500 - DNA, 120 bp, synthetic construct
  misc_feature 1..120: note = Artificially Synthesized Probe
  source 1..120: mol_type = other DNA
tgtgcatgcacgtgtgcacactcgtaccaattacatgagctaggttacataggctgattttcaacaaactattacagtgtttagctcaaaaagtggttatttaggccgggtgcagtggct

SEQ ID NO: 9501 - DNA, 120 bp, synthetic construct
  misc_feature 1..120: note = Artificially Synthesized Probe
  source 1..120: mol_type = other DNA
ggggtacaatggcgctctgctgttactgcagaacttaacactggacacttggttaagctggtggctgccaggttacaataaggattgtaaagttactagtttttgcttttaataacaatt

SEQ ID NO: 9502 - DNA, 120 bp, synthetic construct
  misc_feature 1..120: note = Artificially Synthesized Probe
  source 1..120: mol_type = other DNA
attttgatgtttgaattgtgctggatgcacctttcaactgttccttcagttggctcctggctcctgtatctgtttgacaaatcgccattattttagcattttcttgctttctggggcaac

SEQ ID NO: 9503 - DNA, 120 bp, synthetic construct
  misc_feature 1..120: note = Artificially Synthesized Probe
  source 1..120: mol_type = other DNA
ccaaggtctgctggccctggacacttcaaaggaagggaaaggaaaggaaccaataaaatgtttttaaaaaaagagaagggagggaagaggaagagctgattgttttgtttttgttttgtt

SEQ ID NO: 9504 - DNA, 120 bp, synthetic construct
  misc_feature 1..120: note = Artificially Synthesized Probe
  source 1..120: mol_type = other DNA
ttctttctcccccacttcttcacccacgtggggccctatgattcttaaatttgggggagaggaggtggttaaaggttgagaccatcctgagggcaggagagaagtacaggaaagcatttc

SEQ ID NO: 9505 - DNA, 120 bp, synthetic construct
  misc_feature 1..120: note = Artificially Synthesized Probe
  source 1..120: mol_type = other DNA
aaacagtgctaaagttaaaattacccactgggaaacttgagcctgtgcaatgactttcctggatggtgtgactttcctggatggtgttggaaagtcagagcccaggaactgtttctggaa

SEQ ID NO: 9506 - DNA, 120 bp, synthetic construct
  misc_feature 1..120: note = Artificially Synthesized Probe
  source 1..120: mol_type = other DNA
gtttgttttttctgcttgactcttggctgtgagcacaaattcatgcccattctgctgatcctaaaagctctgaagggagggctactctgagcctgagatgtcagatatatatgtagatat

SEQ ID NO: 9507 - DNA, 120 bp, synthetic construct
  misc_feature 1..120: note = Artificially Synthesized Probe
  source 1..120: mol_type = other DNA
tgttctccccaagttcccccgtttaatgagacatctgcctcctgccgggactctggatcgtgcacatgaaaaacgcacatgacaccttgttcacattttgccttttacagttgctgaaaa

SEQ ID NO: 9508 - DNA, 120 bp, synthetic construct
  misc_feature 1..120: note = Artificially Synthesized Probe
  source 1..120: mol_type = other DNA
ctgtagcttctatgatccccttcttgggctctgactctttctcttcctgttctagaatgtgctttgaacgtaagttctctgttttccttgtcaaagcttagggccaagagcaaagcctta

SEQ ID NO: 9509 - DNA, 120 bp, synthetic construct
  misc_feature 1..120: note = Artificially Synthesized Probe
  source 1..120: mol_type = other DNA
tgttattctgctcactttggtttttgaacctactcatgttactttttagaggcctggctgctgctgctcagatatttctggttcaataatgtttgaaagagattgcttaacacggggctt

SEQ ID NO: 9510 - DNA, 120 bp, synthetic construct
  misc_feature 1..120: note = Artificially Synthesized Probe
  source 1..120: mol_type = other DNA
gtcccattccctccagaaagaaggtagctggcagcccccagaggagcagtgagatccttgacttctaactccaaggatggcgccttctcaactaattttaaaatgacctgaaagttgctg

SEQ ID NO: 9511 - DNA, 120 bp, synthetic construct
  misc_feature 1..120: note = Artificially Synthesized Probe
  source 1..120: mol_type = other DNA
cagactggtctcgaactcctgacttcaagtgatgtgcccacctcagcctcccaaagtgctgggattaccggcacaagccactgcacccagacaaatttcttatttaaaaaaatccatatt

SEQ ID NO: 9512 - DNA, 120 bp, synthetic construct
  misc_feature 1..120: note = Artificially Synthesized Probe
  source 1..120: mol_type = other DNA
ggtcaggcagacatgggttaaaattcctcctccccagcttattagccaggtgaccttggggaaattacctgacctctctgaatcacagacttctctttaaagagacagtaaaataaggct

SEQ ID NO: 9513 - DNA, 120 bp, synthetic construct
  misc_feature 1..120: note = Artificially Synthesized Probe
  source 1..120: mol_type = other DNA
aaaaaaaaaaaaaaaattatacagtccctaaaaagtgtgtgagactaagggtgccctttacagcatagggacaaagaccaatagagcaacagtcagatggagaaagtcttgcagagaagg

SEQ ID NO: 9514 - DNA, 120 bp, synthetic construct
  misc_feature 1..120: note = Artificially Synthesized Probe
  source 1..120: mol_type = other DNA
taaaatacaagtttttttttttttttaaaggcttatttcctaaaagaaaaccatgagatacctaaccgggcccctcagttggccagggctcttcctgaattccagcaggtggagactacc

SEQ ID NO: 9515 - DNA, 120 bp, synthetic construct
  misc_feature 1..120: note = Artificially Synthesized Probe
  source 1..120: mol_type = other DNA
cgtacagaatgaaccttctcctaaaggcgatgggtgggctcccacctcccaggccaagttcaagtcatttgttgaatgtctctgagtgaagggaaccccctcgctttcttttatgtgttt

SEQ ID NO: 9516 - DNA, 120 bp, synthetic construct
  misc_feature 1..120: note = Artificially Synthesized Probe
  source 1..120: mol_type = other DNA
cggcccggcatagtgtgggcactcactggatatgtgctacattaattaataagttagtacctggtaatctccatgccttagtaaatataactttttgtttctttgtgagaaacgctccat

SEQ ID NO: 9517 - DNA, 120 bp, synthetic construct
  misc_feature 1..120: note = Artificially Synthesized Probe
  source 1..120: mol_type = other DNA
cgccctccattctcagggtcaaggaaaactgggaatccacattgtgttttaaaatcagtctatttcgcttgtcaagctgctttgcacatagaggactgccttttgattatttttctttaa

SEQ ID NO: 9518 - DNA, 120 bp, synthetic construct
  misc_feature 1..120: note = Artificially Synthesized Probe
  source 1..120: mol_type = other DNA
agtaaacagactcaggcagaaactggatttttatgatgtcaagacccagaataaatatagaagaacttaaatgtaaatgttctcttctcaatctaacaagtcaaatgggtaagccagtcc

SEQ ID NO: 9519 - DNA, 120 bp, synthetic construct
  misc_feature 1..120: note = Artificially Synthesized Probe
  source 1..120: mol_type = other DNA
ttagcatagtgtctggtatgctgtgctcaggaaatacttgctgtaattacaatttccatcattatgggaacaaacactcaagcgttacccagaacaaaaggtgctggaagatagaatgca

SEQ ID NO: 9520 - DNA, 120 bp, synthetic construct
  misc_feature 1..120: note = Artificially Synthesized Probe
  source 1..120: mol_type = other DNA
ctctgaggatgaggatttgttattgtggttgctgttcccattggtgatggtggctaaaagaaacaggcaagcatagtttgtttcttttttcttttctttaggcttccagaagagcatctt

SEQ ID NO: 9521 - DNA, 120 bp, synthetic construct
  misc_feature 1..120: note = Artificially Synthesized Probe
  source 1..120: mol_type = other DNA
aatattttaaatgccaaaagcttggaagagaaaaaaaacaaaaaaaattccagagcatctgaacaaagccacagggagccaaaacaatcccatcacaaatgaaaggtcaggccgggtgtg

SEQ ID NO: 9522 - DNA, 120 bp, synthetic construct
  misc_feature 1..120: note = Artificially Synthesized Probe
  source 1..120: mol_type = other DNA
ggggaaaacacatacagcactttctttttataaaacaccatttcacaatggctgataacaagctcttagttctgcttcagtggagattctgttcttccctgcttccttgtggagaaagaa

SEQ ID NO: 9523 - DNA, 120 bp, synthetic construct
  misc_feature 1..120: note = Artificially Synthesized Probe
  source 1..120: mol_type = other DNA
ttggggagaggctggtgtaacatgtaaaagctggtcaacaagtaaaagcacaggctgcccagagaggtggaattttaggtgaacagcaacttctttagtataagtatataccatgtaata

SEQ ID NO: 9524 - DNA, 120 bp, synthetic construct
  misc_feature 1..120: note = Artificially Synthesized Probe
  source 1..120: mol_type = other DNA
tccctagagccagacagaaacttttccagagagagagaataaggaaccagagactggaaatatttggtaactcctgaaatggagacacggaaaggattgcaagtggaatttaaaataaaa

SEQ ID NO: 9525 - DNA, 120 bp, synthetic construct
  misc_feature 1..120: note = Artificially Synthesized Probe
  source 1..120: mol_type = other DNA
aattcaaactccttgacagtataataaagattctgaagccatgtctccaagaaaaaggctactgacctggaaaagctaagcctagctcattcaagagcacaagtcatctttttcagaaag

SEQ ID NO: 9526 - DNA, 120 bp, synthetic construct
  misc_feature 1..120: note = Artificially Synthesized Probe
  source 1..120: mol_type = other DNA
tatgggtcatgtcctaatccccttgatgtttccaggacccagcaaagtacatgaaatgttgatttattcgatattcatgaacaaagatccaatgtgtaccaactatctgcaaggcactgt

SEQ ID NO: 9527 - DNA, 120 bp, synthetic construct
  misc_feature 1..120: note = Artificially Synthesized Probe
  source 1..120: mol_type = other DNA
catcccagcaaatataatttagtgacatgaaaaatggaggctttatctaggtcactccaaagatgagtcaacaaaaagaaagcactgtaattttgcagtagattaaaagataaacggaaa

SEQ ID NO: 9528 - DNA, 120 bp, synthetic construct
  misc_feature 1..120: note = Artificially Synthesized Probe
  source 1..120: mol_type = other DNA
aatgttatgtcccttaaaagagagagaaagaacagaagtacagtcattggagctattgggtaatcaggtctggacaatataatcagtactcacaggtttggcaataatgatcaagagccg

SEQ ID NO: 9529 - DNA, 120 bp, synthetic construct
  misc_feature 1..120: note = Artificially Synthesized Probe
  source 1..120: mol_type = other DNA
taagtgaaaagtagaactcaaaattgtctgccccactatgttaaaacaatagagaaagatgagctgggaacaaagagcgcataaagcccgaggattggagttgtcaatggatgtgacaat

SEQ ID NO: 9530 - DNA, 120 bp, synthetic construct
  misc_feature 1..120: note = Artificially Synthesized Probe
  source 1..120: mol_type = other DNA
cctgctcatggcctggcaggaggccaaggtcgtgttgcccattaagcaaatgtctgtgtaacaaaaggtgtcatcaataaagttttaacaagttttttaaaaaagcaaaagctgtatctc

SEQ ID NO: 9531 - DNA, 120 bp, synthetic construct
  misc_feature 1..120: note = Artificially Synthesized Probe
  source 1..120: mol_type = other DNA
tgtatgcaaatgtgaactgcaggcatccctcaagcccgcagttccatatgttggcagcttcttagggactacaagtacacaaagagtaacagaaaaaaacattgaaaatcacataaacag

SEQ ID NO: 9532 - DNA, 120 bp, synthetic construct
  misc_feature 1..120: note = Artificially Synthesized Probe
  source 1..120: mol_type = other DNA
aaacagaaaaggttgttcttgatttgtctttaggaattcagaaatcaagagggagttgaggctgccttgaggagaggaaagaacgttggtccatggatcagaaacacctgagttcaaatt

SEQ ID NO: 9533 - DNA, 120 bp, synthetic construct
  misc_feature 1..120: note = Artificially Synthesized Probe
  source 1..120: mol_type = other DNA
ttctaatactttttctttcaagcacgaacgccctgtttgtcagtaacttcatttatgttctctaagatcttgttatatctcccctcccaaaagtcacaaatccaaagagagagccggtgg

SEQ ID NO: 9534 - DNA, 120 bp, synthetic construct
  misc_feature 1..120: note = Artificially Synthesized Probe
  source 1..120: mol_type = other DNA
atggtgatggtggaggtggtcataattatggtgggagtggtaggggtggagattatggtagtgatgatgatagtggaggtcgtcatgattatggtaagagtgggaggggtggagatggtg

SEQ ID NO: 9535 - DNA, 120 bp, synthetic construct
  misc_feature 1..120: note = Artificially Synthesized Probe
  source 1..120: mol_type = other DNA
tctacatttccacacctggcagcatgtctaacatagaatagatgctttgtaaatgtttcttctgtgaataagtgcatgagaccatgtacttggcatcaggtagacaggatacatgtcttc

SEQ ID NO: 9536 - DNA, 120 bp, synthetic construct
  misc_feature 1..120: note = Artificially Synthesized Probe
  source 1..120: mol_type = other DNA
cacccagagacaactgggaaatccccttcggagggaagctacaagggaggagtgtctcattgggccaggcaccatgtaaactttgtccttctcaaaatggcagagatgagtgacatcaga

SEQ ID NO: 9537 - DNA, 120 bp, synthetic construct
  misc_feature 1..120: note = Artificially Synthesized Probe
  source 1..120: mol_type = other DNA
ttactaaaatcctttctggaagtaggtgacacatcagattaatgagtgttgtcaaagtcatcagtgaatgaaccatttccagcaattcgtctgtttccgccagcaaacctgttggcagaa

SEQ ID NO: 9538 - DNA, 120 bp, synthetic construct
  misc_feature 1..120: note = Artificially Synthesized Probe
  source 1..120: mol_type = other DNA
cattgagtagccgatagagactcaaatacatctgtcaatacagatgaatgatcagatggatgatccagctatgaaaagcgctacaaagaaaacaaaacagggcaaaggggtagaggttaa

SEQ ID NO: 9539 - DNA, 120 bp, synthetic construct
  misc_feature 1..120: note = Artificially Synthesized Probe
  source 1..120: mol_type = other DNA
ctcaaattccttcagctgaaaatattcaacatgcttaggatgccatattttgcaatagtgcatcctgaaccccactgatagcacagtggggtgcaagtagcccagtcttgagtcccaggt

SEQ ID NO: 9540 - DNA, 120 bp, synthetic construct
  misc_feature 1..120: note = Artificially Synthesized Probe
  source 1..120: mol_type = other DNA
tggataagaggagatggaaacgttaagatgagtgaagactgtcagagcacctgattactaaaaaacttaagattgaaagaaacacctcccagggttctcagaagtgctgtgaacttttgt

SEQ ID NO: 9541 - DNA, 120 bp, synthetic construct
  misc_feature 1..120: note = Artificially Synthesized Probe
  source 1..120: mol_type = other DNA
ttgttgctgagaagttggtattctcctttgtggaaacagatcagggatgggtgaaagagctaaactagagatcactggccctaagaaaatccagctctagttaagaatgggctatgcatg

SEQ ID NO: 9542 - DNA, 120 bp, synthetic construct
  misc_feature 1..120: note = Artificially Synthesized Probe
  source 1..120: mol_type = other DNA
ggagcttccttaccctattttaatcaccatgttcatgaatagctttggcatcatggtcttctacacataggaacagccagttgctgtatgttcaaatcataaaatattcatgctccgagc

SEQ ID NO: 9543 - DNA, 120 bp, synthetic construct
  misc_feature 1..120: note = Artificially Synthesized Probe
  source 1..120: mol_type = other DNA
gagagcaacaatattctgaaagccggaaaggagatggatagcgagagtcacttgtaggaaccaaaaaacgaaaccctaagcaggtggaagaaaaaacagagacactgactcacacaaaac

SEQ ID NO: 9544 - DNA, 120 bp, synthetic construct
  misc_feature 1..120: note = Artificially Synthesized Probe
  source 1..120: mol_type = other DNA
ccccacctcactgttggacacagacagccaaggatcaccagacactggagggaagctggggacaggaaacaggggacacaaagacaaaacacttggagggatcaaattctttttgttttt

SEQ ID NO: 9545 - DNA, 120 bp, synthetic construct
  misc_feature 1..120: note = Artificially Synthesized Probe
  source 1..120: mol_type = other DNA
gaagagtggaaagatacagtttagaaaagctccgaaaaggcaaaacaaaaggacaaagtgatggaaaataggagaggcaagatttttacaatttaaaagaccagatcagggctgggtgca

SEQ ID NO: 9546 - DNA, 120 bp, synthetic construct
  misc_feature 1..120: note = Artificially Synthesized Probe
  source 1..120: mol_type = other DNA
tgatcatattcccagctgtgatttattacattgaaaggatatagagcaaaatcagctgagggaaaagacacatgcataggatgaagtctggaagaaaccaggcacgagcttctaagagtc

SEQ ID NO: 9547 - DNA, 120 bp, synthetic construct
  misc_feature 1..120: note = Artificially Synthesized Probe
  source 1..120: mol_type = other DNA
tccagagaagacccagaagctctgggaaaggctccctcaggacaaaggaactgatgaaagtagttggtcacatggaaaagagagttataaactggggaagaattagaaacaataaaaaaa

SEQ ID NO: 9548 - DNA, 120 bp, synthetic construct
  misc_feature 1..120: note = Artificially Synthesized Probe
  source 1..120: mol_type = other DNA
tcttttctcttaagtcctgcagctcattaagtcacagaaatttctgaataagttggtgatcttggtggaaacagagaaggagaagatcctgcggaaggaatatgtttttgctgactccaa

SEQ ID NO: 9549 - DNA, 120 bp, synthetic construct
  misc_feature 1..120: note = Artificially Synthesized Probe
  source 1..120: mol_type = other DNA
gtgggttctttgtgacctgacccctcatctcagaaatttgaaccagggccaaaacctatcatcgtgaacctcattcattgttctctgccatgcagctcgtgtgaggcagtaaaaatggat

SEQ ID NO: 9550 - DNA, 120 bp, synthetic construct
  misc_feature 1..120: note = Artificially Synthesized Probe
  source 1..120: mol_type = other DNA
gctggtgtcttcagggaggacttactgagatttgcaattataaggttgaatcatgtaaaatttctgtctttgcaggttgaaacagtcaaacactggtcatgtcatatgttacaccctgaa

SEQ ID NO: 9551 - DNA, 120 bp, synthetic construct
  misc_feature 1..120: note = Artificially Synthesized Probe
  source 1..120: mol_type = other DNA
ttgtcaactagcttttcatgcttaaaaatatatattgtggccacctgtccttgttggcaagatagttctggatcacacttgttaaacactgtgatattctagtttatggatggtctagaa

SEQ ID NO: 9552 - DNA, 120 bp, synthetic construct
  misc_feature 1..120: note = Artificially Synthesized Probe
  source 1..120: mol_type = other DNA
aattagatagaagacatccagataaacttattctaaaaactaccagtttatctgaaattggaatttcactgggtgtcgtgtgtcccctacccttgtcctgagaggagtctgggaggaaga

SEQ ID NO: 9553 - DNA, 120 bp, synthetic construct
  misc_feature 1..120: note = Artificially Synthesized Probe
  source 1..120: mol_type = other DNA
gtaaggcaagaagctcatctctttgaggaacaaagtttgctcatccttcaagggcattgtagggagaaccgttcaaaatttcttgattgagcttcttcaactcagttttgaaatgggaat

SEQ ID NO: 9554 - DNA, 120 bp, synthetic construct
  misc_feature 1..120: note = Artificially Synthesized Probe
  source 1..120: mol_type = other DNA
ctgtattcagaaataaatgggatctgtggggtattgctgaaaaccactgagtcctctatcttcccacccttggtcagccccggttctcatctttaggatgttttgtctcgcctatcaagc

SEQ ID NO: 9555 - DNA, 120 bp, synthetic construct
  misc_feature 1..120: note = Artificially Synthesized Probe
  source 1..120: mol_type = other DNA
tatgagtgtgtgtctatatgtgtgtgaatctatgcatgtgtttgagtgtgtctatgtgagtctatgtatgtgagtccgtgtatgagtgtaccacccatatctatgtgtgtgagtgtctgt

SEQ ID NO: 9556 - DNA, 120 bp, synthetic construct
  misc_feature 1..120: note = Artificially Synthesized Probe
  source 1..120: mol_type = other DNA
gagtcaggaacaggacagagtcccagagataacaggaaatagaagaattgctgcaatcgaacgtgcaaagctctctcaacttttctgctgacaaaccgcaaactgcccgcgtccaccccc

SEQ ID NO: 9557 - DNA, 120 bp, synthetic construct
  misc_feature 1..120: note = Artificially Synthesized Probe
  source 1..120: mol_type = other DNA
ttgtctcaaattagaaaaaaaaatacaaacactcgggcagggactcttattattcccatttgcagatgaagaaacagagtctatggagatgatccataacttgcccaaggccccgggata

SEQ ID NO: 9558 - DNA, 120 bp, synthetic construct
  misc_feature 1..120: note = Artificially Synthesized Probe
  source 1..120: mol_type = other DNA
ttagatattttacagtctgtgtttcttaccaaggccacaattccaatgtgtattttacactcacaacctgtctcattttgtaccagccacatttcaggtgtttgatagtcacatgtggcc

SEQ ID NO: 9559 - DNA, 120 bp, synthetic construct
  misc_feature 1..120: note = Artificially Synthesized Probe
  source 1..120: mol_type = other DNA
atcaaaggcaactgcagcaccatagtgacctcacgtgtggaggaattttgtctgaaggtcagaaaagatatttccttgtgtcattagcctgatggaccgctaactagcactgtttctaaa

SEQ ID NO: 9560 - DNA, 120 bp, synthetic construct
  misc_feature 1..120: note = Artificially Synthesized Probe
  source 1..120: mol_type = other DNA
cgaaaccaaaactatatgaacattctccggttcctggccctgggcgacaagaagctgagtccctttaacatcactcaccgcttcacgcacctcttctggtttggggatcttaactaccgt

SEQ ID NO: 9561 - DNA, 120 bp, synthetic construct
  misc_feature 1..120: note = Artificially Synthesized Probe
  source 1..120: mol_type = other DNA
gttacagagtaaatgggaagccacacttgtgcactgctttgagctgggaaaataacccttgtgatttaccttctgtccagatactctaagatgctgagaggactttaaagtattatttcc

SEQ ID NO: 9562 - DNA, 120 bp, synthetic construct
  misc_feature 1..120: note = Artificially Synthesized Probe
  source 1..120: mol_type = other DNA
gggaaaaaacagtgaaaatgaaagaaagggggaaatcaggatatattgcgagacctgattgccattgataaaaactggaaaatcacaaggcggagctggcttgaaggggaaaaaaataga

SEQ ID NO: 9563 - DNA, 120 bp, synthetic construct
  misc_feature 1..120: note = Artificially Synthesized Probe
  source 1..120: mol_type = other DNA
gtgagtcagtgagtgagtggtgaatgagtgcgaaggcctaggacattactatgcactgctgtagaccttacaaacactgtacacttaggctaccctacatttattttttaaattttcttt

SEQ ID NO: 9564 - DNA, 120 bp, synthetic construct
  misc_feature 1..120: note = Artificially Synthesized Probe
  source 1..120: mol_type = other DNA
ataattttgtaggacctctgtcctatatgcagtccattactgtggtacatgactatttgtggagccccacgggtaattctcagaggcagctgatgccgagaactgcaatgttaagaagta

SEQ ID NO: 9565 - DNA, 120 bp, synthetic construct
  misc_feature 1..120: note = Artificially Synthesized Probe
  source 1..120: mol_type = other DNA
tacgttcatataaattaatcaatggagatgttagtcacactaatgctcacctttaggaggctctggtattgacaaggaaggcttatgagggaagctttaggatgatggcggttttctgta

SEQ ID NO: 9566 - DNA, 120 bp, synthetic construct
  misc_feature 1..120: note = Artificially Synthesized Probe
  source 1..120: mol_type = other DNA
ctctttcaggatgagttcctttatgtttgtagacagagaagaaagagctagaacatgaggggataaggatattgataaaagagggttgttattgccagtttaccttgtctatcccaccta

SEQ ID NO: 9567 - DNA, 120 bp, synthetic construct
  misc_feature 1..120: note = Artificially Synthesized Probe
  source 1..120: mol_type = other DNA
attaaaaaaataataataagaggcattttttaaagcctatgactttgatttgcagatgaagtacaacttgccttcctggtgtgaccgagtcctctggaagtcttatcccctggtgcacgt

SEQ ID NO: 9568 - DNA, 120 bp, synthetic construct
  misc_feature 1..120: note = Artificially Synthesized Probe
  source 1..120: mol_type = other DNA
gaccctcaaagttgaaggtgcactgaaggagttcttaattgcctgaatgcttattctgaaaagctactgattagttcccattacttacgaagtgagaccttaaaaatccacagaacagag

SEQ ID NO: 9569 - DNA, 120 bp, synthetic construct
  misc_feature 1..120: note = Artificially Synthesized Probe
  source 1..120: mol_type = other DNA
caattcttgtctcaaccatctgtctgcttcagccagcctctgccgagagtcaggagatagtggaggcttgtagaattaccacttactgttttgcacctaaacttggcattcaaaactgct

SEQ ID NO: 9570 - DNA, 120 bp, synthetic construct
  misc_feature 1..120: note = Artificially Synthesized Probe
  source 1..120: mol_type = other DNA
taagggcacactgtagtgccattgctattatgttcagtacatatctgaaatattctgagaatgcttaaaaaaaaaaaccctgctcgtcaacccattaaattctccctggaacacccctcc

SEQ ID NO: 9571 - DNA, 120 bp, synthetic construct
  misc_feature 1..120: note = Artificially Synthesized Probe
  source 1..120: mol_type = other DNA
tggttggttgaagggtggagtgtttatctttttcttgctgatttgtaaatgctttctaaaaaggatgccaagtctgttttatcaccttcttggtctcctttgctggcggtttttcctttg

SEQ ID NO: 9572 - DNA, 120 bp, synthetic construct
  misc_feature 1..120: note = Artificially Synthesized Probe
  source 1..120: mol_type = other DNA
agtacaatgattagaccagaaaaatctccatggttcacactccctaatcaattcaaaaagtcttaggtctttaggaaaaatgagcacaggcttcttctgtccatggaggaggcagtgtcc

SEQ ID NO: 9573 - DNA, 120 bp, synthetic construct
  misc_feature 1..120: note = Artificially Synthesized Probe
  source 1..120: mol_type = other DNA
agtgagtctatttagagaaaatatgaagtaaagagtagcacaggtgcgtggtaggcagagatggtaaaaatcgttaagatgggatgcaaatgactgagttttgggaaacaccacagtaaa

SEQ ID NO: 9574 - DNA, 120 bp, synthetic construct
  misc_feature 1..120: note = Artificially Synthesized Probe
  source 1..120: mol_type = other DNA
tcattatctgaactcagaaacagcattgatctgggtattgagcaaccgagccattgtacaaagtctttttgctggaactagctgggagcctgaaatagtgggggtattgcctgaggtcac

SEQ ID NO: 9575 - DNA, 120 bp, synthetic construct
  misc_feature 1..120: note = Artificially Synthesized Probe
  source 1..120: mol_type = other DNA
aagctccagttcacccagcagggtcaaagcggttcgaaaaatgatgaggatttttgtgcgggtgtttttaataaactatcaagacagttccatacatttctatggaaacagcatattagg

SEQ ID NO: 9576 - DNA, 120 bp, synthetic construct
  misc_feature 1..120: note = Artificially Synthesized Probe
  source 1..120: mol_type = other DNA
actttacagcagtgggtatgtggccttattattcctaaatggtttcagttcccctaaaggatcacagaagggatctagaggtcagctcgtctaaccacatgattttgcaaagaaggaaac

SEQ ID NO: 9577 - DNA, 120 bp, synthetic construct
  misc_feature 1..120: note = Artificially Synthesized Probe
  source 1..120: mol_type = other DNA
tgttcatttgtttttctactgaaactgcttttgtggagctaaattgacagtggagatgttgggtgtcctcgagtacaagcttattatgagcttattagttgttcatgctgggtgggaagt

SEQ ID NO: 9578 - DNA, 120 bp, synthetic construct
  misc_feature 1..120: note = Artificially Synthesized Probe
  source 1..120: mol_type = other DNA
tagcttagagcctgacatcacctcatgccaggagccaagtgataattggtgcagctgtagaaccctggagtacccagagctccactgcagtttccagtcatctgttctggaacttttttt

SEQ ID NO: 9579 - DNA, 120 bp, synthetic construct
  misc_feature 1..120: note = Artificially Synthesized Probe
  source 1..120: mol_type = other DNA
cttttggtgtctggaaaggaagggagggaatcgcctagaacaaagtatcacctttttatttggcccttctgtatgggagtcatcgtgagaaacagccccacatctgaaaaagtcataact

SEQ ID NO: 9580 - DNA, 120 bp, synthetic construct
  misc_feature 1..120: note = Artificially Synthesized Probe
  source 1..120: mol_type = other DNA
ttccatgtattgagccttccctatgtgtgagatctgtgccaggcactttccagtatcatgtgatataaccttgacaagaccttactgttctccaatgagtaaacagaggctcagaaagat

SEQ ID NO: 9581 - DNA, 120 bp, synthetic construct
  misc_feature 1..120: note = Artificially Synthesized Probe
  source 1..120: mol_type = other DNA
tgagccagaatagaagtagtgacagtaaaaaaggagagaagcggatgacattgagaggaatggagtagaaaactgtctgggcctgggattggggaaagggtctgtattagtctgttctca

SEQ ID NO: 9582 - DNA, 120 bp, synthetic construct
  misc_feature 1..120: note = Artificially Synthesized Probe
  source 1..120: mol_type = other DNA
catacttacatcacagaaacatcattttatactctgcttccctcacctggtattagatgaaacacattttccatgattctcctgccccatctttgtgactgttccttttgatggctgcat

SEQ ID NO: 9583 - DNA, 120 bp, synthetic construct
  misc_feature 1..120: note = Artificially Synthesized Probe
  source 1..120: mol_type = other DNA
ggaaagtggaactattttccatttattaaaattaaccagctgcaattctttttgtgtgaaacgtctgtctgtattatctgttcatgcatctgctggagagggtaccctcttgcctgggga

SEQ ID NO: 9584 - DNA, 120 bp, synthetic construct
  misc_feature 1..120: note = Artificially Synthesized Probe
  source 1..120: mol_type = other DNA
tttctctcagcaaagctgtcgaatatgctctctgctgcggcctcagagcagaaatccagcactggaaaagatctcagacaatctggcccaaccctcactcaactcaaaaatgtcccaaca

SEQ ID NO: 9585 - DNA, 120 bp, synthetic construct
  misc_feature 1..120: note = Artificially Synthesized Probe
  source 1..120: mol_type = other DNA
ggcctgtttattttaatctgacaaaacatacttgcctgttttgtttcttgctgagaccagtaagttggaaatgtcacatgaaatggcaactctggatcccaactctcctctctgtggatc

SEQ ID NO: 9586 - DNA, 120 bp, synthetic construct
  misc_feature 1..120: note = Artificially Synthesized Probe
  source 1..120: mol_type = other DNA
ggttgatgtgactgtgacaaagctggggaaattctaatgtgacggaaagttcagtttgactcagctaacatttgttgagtccctgtgatgtgtccagttctagagaaatcaaggcaaatt

SEQ ID NO: 9587 - DNA, 120 bp, synthetic construct
  misc_feature 1..120: note = Artificially Synthesized Probe
  source 1..120: mol_type = other DNA
tcccatcagcaaatgcatcctggctctgaagtgtctactgtgttccagaatcaggatcagtgtagggaaacaaattcttttccattttgactagcatgagaacgagcatttatttctgaa

SEQ ID NO: 9588 - DNA, 120 bp, synthetic construct
  misc_feature 1..120: note = Artificially Synthesized Probe
  source 1..120: mol_type = other DNA
cagcaggcccctgacatgtatgtggagtcttccatgtcctaacctgttagtgcaactcgattgctttttaaagggtaaaaatttgtaaagatattgccaagaaaaggaacctcctataaa

SEQ ID NO: 9589 - DNA, 120 bp, synthetic construct
  misc_feature 1..120: note = Artificially Synthesized Probe
  source 1..120: mol_type = other DNA
tcccagctactcaagaggctgaggcaggagaatcgcttgaacccaggaggcagaggttgcagtgagccaagattgcaccactgcaccccagcctgggcgacagaacgagactccataaaa

SEQ ID NO: 9590 - DNA, 120 bp, synthetic construct
  misc_feature 1..120: note = Artificially Synthesized Probe
  source 1..120: mol_type = other DNA
aacgatttaagatgggcaagatagcttgagcactgtcttcccttgaggctctttgctggcttatcataacctcaggggttcactctcagcctctcttcctctaacactggttttttcttc

SEQ ID NO: 9591 - DNA, 120 bp, synthetic construct
  misc_feature 1..120: note = Artificially Synthesized Probe
  source 1..120: mol_type = other DNA
ggaaatggagctctaagcaaccagaaagaaaaaggagcatgattatttgtgtaagtgaatgcttttcagctcccaaagcgaatggatcttggtgcataacaacgagcacacagcttggtg

SEQ ID NO: 9592 - DNA, 120 bp, synthetic construct
  misc_feature 1..120: note = Artificially Synthesized Probe
  source 1..120: mol_type = other DNA
cttctcagtgcacatcccatcagtaacaggcgcaacagcctcaacagctcagtgggttcccagcgatccacaatttcttcacgatagcttccttttctgtagaaagcagaacccagaaca

SEQ ID NO: 9593 - DNA, 120 bp, synthetic construct
  misc_feature 1..120: note = Artificially Synthesized Probe
  source 1..120: mol_type = other DNA
aacaggttttatagtggaaaaggtcccaggccagaactgaggctgtctttgaggacaacgtatgatgaacacagtactgtttcctcttcctttttttcacttgaggtgaaattcacttaa

SEQ ID NO: 9594 - DNA, 120 bp, synthetic construct
  misc_feature 1..120: note = Artificially Synthesized Probe
  source 1..120: mol_type = other DNA
aaaacaatttggtgccattcagtaaatttgcaatgttacatgtctctatctagttcagaaacatttgtatcaccccaaagaaagacccagagccattaagcagccatgctcccatgtctt

SEQ ID NO: 9595 - DNA, 120 bp, synthetic construct
  misc_feature 1..120: note = Artificially Synthesized Probe
  source 1..120: mol_type = other DNA
ctgcagcagttgttaaaaggaagaaaggcggggctgtggataaacttagtctagtgtcagtcccagaggaagaagattccataaagaaaaggagcctaaatcatttatatctcattgtta

SEQ ID NO: 9596 - DNA, 120 bp, synthetic construct
  misc_feature 1..120: note = Artificially Synthesized Probe
  source 1..120: mol_type = other DNA
catttctaaaaaacaatttttttaaataagcaggtaaagtacttagagcagtgagtgctggctcttctcagctacacgttaaaggaagcctggcctagcccacagcatgcagggacctgg

SEQ ID NO: 9597 - DNA, 120 bp, synthetic construct
  misc_feature 1..120: note = Artificially Synthesized Probe
  source 1..120: mol_type = other DNA
tccaggctcttgaaatagtgcagccttttcttcctatctctgtggctttcagctctgcttccttggttattaggagaatagatgggtgatgtctttccttatgttgctttttcaacatag

SEQ ID NO: 9598 - DNA, 120 bp, synthetic construct
  misc_feature 1..120: note = Artificially Synthesized Probe
  source 1..120: mol_type = other DNA
ccactaatgtcattccgcggctggagttaaagaagcaaacggtctacgtcaccaagaccatgagacggtttcaaaaatggtctacgtcaccaagaccatgagatggtttcacacaatagg

SEQ ID NO: 9599 - DNA, 120 bp, synthetic construct
  misc_feature 1..120: note = Artificially Synthesized Probe
  source 1..120: mol_type = other DNA
ttcaagaaacggagcagatggtgctggagttctgactctgtagtgcttgctgcctctgaatctccttcgaaatccgtcttttaattcctagtaagtacagttctctatcaaatttgccag

SEQ ID NO: 9600 - DNA, 120 bp, synthetic construct
  misc_feature 1..120: note = Artificially Synthesized Probe
  source 1..120: mol_type = other DNA
caccgtgtatgagggcgtcctctgcttggaggtgctgtcgtacgtgtccttcccgatgtcaaacttgtatgatgggaggaagtggatgtccggctcctggaagcccttgaagatggaccc

SEQ ID NO: 9601 - DNA, 120 bp, synthetic construct
  misc_feature 1..120: note = Artificially Synthesized Probe
  source 1..120: mol_type = other DNA
ctcccggatgagctggtcgtgctgcagcagcgccggcacgtccaccaccaggccctggcacaggagggcgtccacgactgtgcgcccgccactcaggcggaagttgaagtctccaaacca

SEQ ID NO: 9602 - DNA, 120 bp, synthetic construct
  misc_feature 1..120: note = Artificially Synthesized Probe
  source 1..120: mol_type = other DNA
ggcaccaagcaacttacaggtgaagtgggacgtgatgaagaggaaggaagtgccaaaaaaggtgaagctgatgcccaaggcccccttggtcttgatctgagacacgatgcgtgtggtcac

SEQ ID NO: 9603 - DNA, 120 bp, synthetic construct
  misc_feature 1..120: note = Artificially Synthesized Probe
  source 1..120: mol_type = other DNA
cccttctactctcgcacgccaacagtttgttaccaaaatcaaatctcattgattttaaactctccgagttgccactggaaaaaaatctgacccatgcctcccacccaggcgtggaggctg

SEQ ID NO: 9604 - DNA, 120 bp, synthetic construct
  misc_feature 1..120: note = Artificially Synthesized Probe
  source 1..120: mol_type = other DNA
ctggccccaggatgaggcacagagctgccccgtccccctcacccgcctttgtccagcaccaccccacccttccccgcccagcaccacccacagccactcaccttctggccctgcatgttc

SEQ ID NO: 9605 - DNA, 120 bp, synthetic construct
  misc_feature 1..120: note = Artificially Synthesized Probe
  source 1..120: mol_type = other DNA
aggggatgtggacacaaggggtgcagccgtgtgcccgagacgcttgatttacagacactgaaatctgaattttacaattttcttgtactatgaaacatcattagaatggttttgactttt

SEQ ID NO: 9606 - DNA, 120 bp, synthetic construct
  misc_feature 1..120: note = Artificially Synthesized Probe
  source 1..120: mol_type = other DNA
actcagaatgggttttactgtgtggaacggcagagaaagaaaaaagagcgaggttccaatgtatgtccctaatagactcactggcacacagacgccctttggtccccactgtctgtgtct

SEQ ID NO: 9607 - DNA, 120 bp, synthetic construct
  misc_feature 1..120: note = Artificially Synthesized Probe
  source 1..120: mol_type = other DNA
ccactcccagagccccagaaccttggaatgggaccttattcggaaacggggtctttgcaaacgtgtttaattaaggatctcgagataagaccaccctggatttagggtaggcagtaaatt

SEQ ID NO: 9608 - DNA, 120 bp, synthetic construct
  misc_feature 1..120: note = Artificially Synthesized Probe
  source 1..120: mol_type = other DNA
aaacaaaaacaaccaaaggggcggatcgtatacattgacgacatttcccaagactaaacaagaaaaagcgccagatacgtaattgtatgcaggatgccatcctgtctaccttaacacaac

SEQ ID NO: 9609 - DNA, 120 bp, synthetic construct
  misc_feature 1..120: note = Artificially Synthesized Probe
  source 1..120: mol_type = other DNA
cgcgctgggccggcggagcgccgggaagctgtccttggagcgtcctcccttccggcggctgcggggccggctcggagggccgcagattctccgccttggacggcatggacggtctctccc

SEQ ID NO: 9610 - DNA, 120 bp, synthetic construct
  misc_feature 1..120: note = Artificially Synthesized Probe
  source 1..120: mol_type = other DNA
tgaaactcagctggaacggaaacgacagaggacatgctaccccatgctgcatgtgcacgaatccacacacatcccactgagtaacccaccaaacactcatgcatgcagataaaaagtgag

SEQ ID NO: 9611 - DNA, 120 bp, synthetic construct
  misc_feature 1..120: note = Artificially Synthesized Probe
  source 1..120: mol_type = other DNA
aaaaaaaaaaaaaagcgagcacttattaagcacctactgtacgccaggcacctggttaatcctctcatccactcaactcatgtccacactcacatccccagctgcgtgggtccccatatg

SEQ ID NO: 9612 - DNA, 120 bp, synthetic construct
  misc_feature 1..120: note = Artificially Synthesized Probe
  source 1..120: mol_type = other DNA
gaaaaaaaaaaggacttatgaaaatttagagggttgtttaccctctacccaatctgcagtttacaattgacaccagtggttctcaaaccagggtgattttgtttccaggggatacttgtc

SEQ ID NO: 9613 - DNA, 120 bp, synthetic construct
  misc_feature 1..120: note = Artificially Synthesized Probe
  source 1..120: mol_type = other DNA
ccacatccagcaaggtaagtattttaatgcaatacttttaaaataaaatttaaaatatttgtaaaaaggccaggcacagcggctcacgcttgtaatcccaacactttgggaggctgaggc

SEQ ID NO: 9614 - DNA, 120 bp, synthetic construct
  misc_feature 1..120: note = Artificially Synthesized Probe
  source 1..120: mol_type = other DNA
acagcactctggtttgggtgacagagcgaggctatgtctcaaaataaataaataaaaataaaataataaaataaagtaacataattgtgaaaagcaatacttttcaaaagcaatactttt

SEQ ID NO: 9615 - DNA, 120 bp, synthetic construct
  misc_feature 1..120: note = Artificially Synthesized Probe
  source 1..120: mol_type = other DNA
caccacgcctggctaacggctctggggactttcacacgcgcgttcacacacactccagtgcggacccacgatctgtgcacgcagccggcaggtgagccctgggcacatgcatgcaaacct

SEQ ID NO: 9616 - DNA, 120 bp, synthetic construct
  misc_feature 1..120: note = Artificially Synthesized Probe
  source 1..120: mol_type = other DNA
ttttcattcccaacctcacctcgcatataaattaatattctgaagaacatgctggaagattttctgaagtgacacccctctctgtgtaccatgtatataaaatcggcattccctgttccc

SEQ ID NO: 9617 - DNA, 120 bp, synthetic construct
  misc_feature 1..120: note = Artificially Synthesized Probe
  source 1..120: mol_type = other DNA
ggacaaccgtgtctttctaggaccaaagttttattgttacaaagtcaacatttcctaatgtcaaaggaggtttgcaacccaatagctgtttgctcttttcactgtggcagtagagtcaaa

SEQ ID NO: 9618 - DNA, 120 bp, synthetic construct
  misc_feature 1..120: note = Artificially Synthesized Probe
  source 1..120: mol_type = other DNA
tcagaccggttccaggtagaattctgaaatctcaaagatgtccatgattgaatcacatcttaacaatacactgaggtagactgtgctgaaaaaagaaaatcactatcccccattcacctg

SEQ ID NO: 9619 - DNA, 120 bp, synthetic construct
  misc_feature 1..120: note = Artificially Synthesized Probe
  source 1..120: mol_type = other DNA
caactcatgtccccactccccgccaaccccggggaatagtcaataacttatgaggctaataccagagactttaaaaattaaatatggtacaaatatattctcaaaactctgtcatctcag

SEQ ID NO: 9620 - DNA, 120 bp, synthetic construct
  misc_feature 1..120: note = Artificially Synthesized Probe
  source 1..120: mol_type = other DNA
ttcacagttaaatcctctgcaggactagttaaattggtaaccaaacgagtccaccttaagatgaacagaaatgtataggaacgatctctgaactccattggacatggtagagtcgtgaga

SEQ ID NO: 9621 - DNA, 120 bp, synthetic construct
  misc_feature 1..120: note = Artificially Synthesized Probe
  source 1..120: mol_type = other DNA
catcagatgctggctgtgtgtgtggacaattgtcaaggcagaaatagcattgctagaggtgctgagagatggtgttttctttttgcttttcttcttcttattttggacacagcgtctcat

SEQ ID NO: 9622 - DNA, 120 bp, synthetic construct
  misc_feature 1..120: note = Artificially Synthesized Probe
  source 1..120: mol_type = other DNA
ggtctccagttcccttctcccaagataactaccgctataggtgttttgtgcaaccttccaaagatacaatatgcaagaaaatcatatgatttgtgaacacaagcaggcaggtaaagacat

SEQ ID NO: 9623 - DNA, 120 bp, synthetic construct
  misc_feature 1..120: note = Artificially Synthesized Probe
  source 1..120: mol_type = other DNA
gccacttaataaaacaattcatgctgcagttcataaatgctgtgaaaggaaaatcaatttggggctcccaaatcactaaactcaaggaaaaagtccagctaggaactgcttggacaaacc

SEQ ID NO: 9624 - DNA, 120 bp, synthetic construct
  misc_feature 1..120: note = Artificially Synthesized Probe
  source 1..120: mol_type = other DNA
aagaatggattctgagggtacgcatggggaagtgaagggggaagatgggctactgtttaaagggagggaaaagaaggtaccaaatcacaaagaagctacatttttctttttttttttctt

SEQ ID NO: 9625 - DNA, 120 bp, synthetic construct
  misc_feature 1..120: note = Artificially Synthesized Probe
  source 1..120: mol_type = other DNA
cctacaaacatatcttttaaagaagtgaatgggtaagtgagtttatcaatacatgcaattaaatgacagctggtggggggtccccatccaaaatcttgcccagccaggcacagtggctca

SEQ ID NO: 9626 - DNA, 120 bp, synthetic construct
  misc_feature 1..120: note = Artificially Synthesized Probe
  source 1..120: mol_type = other DNA
gcccctttatattatcagaaaagacttaacggctcattatagacaacttccttctgaaatcaaacctggcctgggtcgttatgttttcaaagcagaaagccagacgaacctccaattttg

SEQ ID NO: 9627 - DNA, 120 bp, synthetic construct
  misc_feature 1..120: note = Artificially Synthesized Probe
  source 1..120: mol_type = other DNA
ctctaagtctttgctcaaatacacccctgtccaaccctcctttcctccctttcttcatgtttccatagcatttgctcctaatgtataaagggtttggagtcagctgggggtggtggctta

SEQ ID NO: 9628 - DNA, 120 bp, synthetic construct
  misc_feature 1..120: note = Artificially Synthesized Probe
  source 1..120: mol_type = other DNA
gttacaaaggtgccaggaaaaagcaagaaatggaagagtctaaaaagcaatggaagattgtggaaaatgatggaagattccggaaagtggtggaagattccagaaaatgatggaagattc

SEQ ID NO: 9629 - DNA, 120 bp, synthetic construct
  misc_feature 1..120: note = Artificially Synthesized Probe
  source 1..120: mol_type = other DNA
ccatccttcttgtctgatttcagacccttgctatggaatgatgctacttcccacctgagactactgtttctgcaaagtgccaaggggatggaagacaggttgtaataggttggggaaaaa

SEQ ID NO: 9630 - DNA, 120 bp, synthetic construct
  misc_feature 1..120: note = Artificially Synthesized Probe
  source 1..120: mol_type = other DNA
tgcagtctagggcagggatgggggacctttatgttttgaatggaagcccatcagacaggtatgtaagtgcatcaacatgggagcactcatccctccctgggtggttttttttttgttttg

SEQ ID NO: 9631 - DNA, 120 bp, synthetic construct
  misc_feature 1..120: note = Artificially Synthesized Probe
  source 1..120: mol_type = other DNA
ttatgtctacagcttgaatttagacatcctgggaatatttacattacagaaactggcaaatgctataactcaggactggatttgttgttctgttgtttgtccaggcttgagaaagtgatg

SEQ ID NO: 9632 - DNA, 120 bp, synthetic construct
  misc_feature 1..120: note = Artificially Synthesized Probe
  source 1..120: mol_type = other DNA
acatcctatatcagcaaaattcataataaacttaaatatgcctatacctatatcaaggcatgttttcccccagagaaccaactgttcccagcacaccactgaactcactgaactcacctc

SEQ ID NO: 9633 - DNA, 120 bp, synthetic construct
  misc_feature 1..120: note = Artificially Synthesized Probe
  source 1..120: mol_type = other DNA
ccaacgtgcccggccaaattcttaataattttaaagcaaggagttctgcattttcattgttcactgggtcttgcaaattacatagctagtcccgatcccagcatgacttttgacagatgt

SEQ ID NO: 9634 - DNA, 120 bp, synthetic construct
  misc_feature 1..120: note = Artificially Synthesized Probe
  source 1..120: mol_type = other DNA
caccttgctcccacttcaccttccaccatgattgaaagtttcttgaggcttcctcagaagctgagcagatgccagcatcatggttcctgtactgcctgcagaactgggagccaattaaac

SEQ ID NO: 9635 - DNA, 120 bp, synthetic construct
  misc_feature 1..120: note = Artificially Synthesized Probe
  source 1..120: mol_type = other DNA
cctcccaaagtgctgggattacaggtgtgagccaccgtgcccagccacaatttacttatataatgaactgcacaggtacctctgaaacttttttttttttttttaagtgcaggatcaggc

SEQ ID NO: 9636 - DNA, 120 bp, synthetic construct
  misc_feature 1..120: note = Artificially Synthesized Probe
  source 1..120: mol_type = other DNA
agcgactttgagaattgcagaattttataaccatagtgctatggataaagatatatgcagaggttatcattatcggtaagagccagacttcctaagccagaagctgagcattaaaccctg

SEQ ID NO: 9637 - DNA, 120 bp, synthetic construct
  misc_feature 1..120: note = Artificially Synthesized Probe
  source 1..120: mol_type = other DNA
gtcaccattcatctacagagcagtggattcctagaacgtattcctcccatctgaaactttgcaccctttggttcacgtctctccttgtttttcctttaatcattttaaaatgcaaaagtg

SEQ ID NO: 9638 - DNA, 120 bp, synthetic construct
  misc_feature 1..120: note = Artificially Synthesized Probe
  source 1..120: mol_type = other DNA
cctgcaactcccagcctctgtcacatcagaaccaaatggataaatgtgcttaatgtctaaggacaaataaaaaagctctttctttgccacggtgctgcctttcgatttttttttttttaa

SEQ ID NO: 9639 - DNA, 120 bp, synthetic construct
  misc_feature 1..120: note = Artificially Synthesized Probe
  source 1..120: mol_type = other DNA
aaaaaatttttttaacgggagatactgaaaatgcaattaaatagctagaggtggctttgtttatgaaactagcaaaagaaaaaaaaaataccttccaccagctgggcacggtggttcacg

SEQ ID NO: 9640 - DNA, 120 bp, synthetic construct
  misc_feature 1..120: note = Artificially Synthesized Probe
  source 1..120: mol_type = other DNA
ccctagagagaagcagagatgggggagaaaatgaaaggagaatgtgaggttacagtcaccttcttaagaaccttttcatagacacatttctgttattgccaacaatgtccttaattacct

SEQ ID NO: 9641 - DNA, 120 bp, synthetic construct
  misc_feature 1..120: note = Artificially Synthesized Probe
  source 1..120: mol_type = other DNA
aaaaaaaaaaaaaaagatgcaaccgacccaaaggaatcctggatccagccatgtgagaagctcttcagttgttcaactctgggagctaagaagcttttcctctatcataagctagtctgg

SEQ ID NO: 9642 - DNA, 120 bp, synthetic construct
  misc_feature 1..120: note = Artificially Synthesized Probe
  source 1..120: mol_type = other DNA
ttcaatggctcttcatccaccaattctatggatgcaccgtcttccatgtgtccattctccaatggatggacatcttagtggtttgcatattttgctactgatgaaaatcttatgcataga

SEQ ID NO: 9643 - DNA, 120 bp, synthetic construct
  misc_feature 1..120: note = Artificially Synthesized Probe
  source 1..120: mol_type = other DNA
tcataattccaaaggctattgtggacagagacatcaaaaggcagaggaaagtaactcatgaatatggattagaggcatatgcacgtttctgccaattaaaaactagctgagctctgtatg

SEQ ID NO: 9644 - DNA, 120 bp, synthetic construct
  misc_feature 1..120: note = Artificially Synthesized Probe
  source 1..120: mol_type = other DNA
agcaacttaaactctggaagcctcagtacccagctcactgggataatgtgaggacgtattgtacttcctcagtcccaagaggtatattatttttgcattttggcatttctgaaattggaa

SEQ ID NO: 9645 - DNA, 120 bp, synthetic construct
  misc_feature 1..120: note = Artificially Synthesized Probe
  source 1..120: mol_type = other DNA
actaagaaaagtaacaagctggtagattggcatttctgacccatcttcctgcgaagtcaggtatcaaggctttaagtactaatagcacagtacctgatgagagaagcactggaatcaaaa

SEQ ID NO: 9646 - DNA, 120 bp, synthetic construct
  misc_feature 1..120: note = Artificially Synthesized Probe
  source 1..120: mol_type = other DNA
tccgtctcaaacaaaaatgaaggccaataaggtaaaatacagatatgcactgcttagagggtggagaatctgtccttggtcagccttgatgtcccacccatgacactcggaccccggagc

SEQ ID NO: 9647 - DNA, 120 bp, synthetic construct
  misc_feature 1..120: note = Artificially Synthesized Probe
  source 1..120: mol_type = other DNA
tagggcacctgtataatttgagtgattaagctgcaattcttagaaaaggaatcacatcactcaggtcaggaagattaactccaagaaacatctatgcaattggcacacttctccccatcc

SEQ ID NO: 9648 - DNA, 120 bp, synthetic construct
  misc_feature 1..120: note = Artificially Synthesized Probe
  source 1..120: mol_type = other DNA
gaggaaaatattactaggttcagggagataagaaactctttaagcttcttaatacctacagctaaatggttgtccagaaactctatattgacttgtggttgcaccagcaggccatgagac

SEQ ID NO: 9649 - DNA, 120 bp, synthetic construct
  misc_feature 1..120: note = Artificially Synthesized Probe
  source 1..120: mol_type = other DNA
aataaatattttgggttttgcaagccaaatgacctctgtcacaactactctgtcattgtagcttaaagcagccctacatgatgtgtaaacaagtgggtggggttgcattccaataagagt

SEQ ID NO: 9650 - DNA, 120 bp, synthetic construct
  misc_feature 1..120: note = Artificially Synthesized Probe
  source 1..120: mol_type = other DNA
atgaactgggataacttttatagatttctgtgccctaaaatagtttttctattataggaaatagttgctctctcacaatttgaaagaacgtgtctataaaactctctgggccaagggact

SEQ ID NO: 9651 - DNA, 120 bp, synthetic construct
  misc_feature 1..120: note = Artificially Synthesized Probe
  source 1..120: mol_type = other DNA
atggaaaagaaaacagctccaccacttatcaagccaaagatatgtccgtattagcaagattcagataatttctatacaggcacaaatgggtctcgtgaaaataaccaagacgttggtgct

SEQ ID NO: 9652 - DNA, 120 bp, synthetic construct
  misc_feature 1..120: note = Artificially Synthesized Probe
  source 1..120: mol_type = other DNA
tattactactttagggggaagacacactactggcatcagatgagtggaagccagggatgcttctcagtgttgttggacagtgccctagaataatctgaccccaaatattatttattatta

SEQ ID NO: 9653 - DNA, 120 bp, synthetic construct
  misc_feature 1..120: note = Artificially Synthesized Probe
  source 1..120: mol_type = other DNA
tacatttttagacccttcttggctacagttagtattgcaaatggccactagagggcagatcaggccacacaggtgcctgggaaaaaataaataaataaacactctgctaaaggaagaaaa

SEQ ID NO: 9654 - DNA, 120 bp, synthetic construct
  misc_feature 1..120: note = Artificially Synthesized Probe
  source 1..120: mol_type = other DNA
ctcccatgattctatgttttagcaagagtgtgttagtgaaggtttctccccacattcatgcccagatttcatttcagagtgaaggcattggatttctgaattggtgaagcatctgctctc

SEQ ID NO: 9655 - DNA, 120 bp, synthetic construct
  misc_feature 1..120: note = Artificially Synthesized Probe
  source 1..120: mol_type = other DNA
ctagccaacattttgtttgtaacaggtgaaacagtaaccactttgaagccttggctgtccccctgaacattcttttggactcagggtcataggggaaacatgcaacaaaaaaagaaaaag

SEQ ID NO: 9656 - DNA, 120 bp, synthetic construct
  misc_feature 1..120: note = Artificially Synthesized Probe
  source 1..120: mol_type = other DNA
taagaaaggcaaatgctgagttttgtccatttttccccttttgtgcgattatttgctcttcctgataaaattcccctcgaaatttcgaaactgcaagatctcttcctccacccaggaaag

SEQ ID NO: 9657 - DNA, 120 bp, synthetic construct
  misc_feature 1..120: note = Artificially Synthesized Probe
  source 1..120: mol_type = other DNA
cacacgcaccacacacacacacagtgaagggggccttctcagagaggctgagctgagacagagcctagatttgagctccgctttggaaaaaagccagacactatggttcacgcctgtggt

SEQ ID NO: 9658 - DNA, 120 bp, synthetic construct
  misc_feature 1..120: note = Artificially Synthesized Probe
  source 1..120: mol_type = other DNA
gtagagatggggtttcattgtgttagccaggatggtctcgatctcctgacctcgtgatctgcccgccttggcctcccaaagtgctgggattacaggcgtgagccactgcacccggcccac

SEQ ID NO: 9659 - DNA, 120 bp, synthetic construct
  misc_feature 1..120: note = Artificially Synthesized Probe
  source 1..120: mol_type = other DNA
tcagcaaaggaaagcaccatccacatatcgtggtgtaaagcaattcagacatagcagaaacccagcagaaaggccccaggacaggaattttcttggcacattaaaaaacgtctggccagg

SEQ ID NO: 9660 - DNA, 120 bp, synthetic construct
  misc_feature 1..120: note = Artificially Synthesized Probe
  source 1..120: mol_type = other DNA
ccagagaatgatccaacgccagacagaaaaaacaccaagacagagaaaccctgacctaaaggcatgagaggagatagaggaaggaacttttcaaacatgcatagaaaagggaatttaaaa

SEQ ID NO: 9661 - DNA, 120 bp, synthetic construct
  misc_feature 1..120: note = Artificially Synthesized Probe
  source 1..120: mol_type = other DNA
caaaggaaattccattttctctcctccccttaatgcctcgaggatagacaataagctctaaatcgtgtatcaagtaccttcctgtgaatggtgagtatccactcggaaacccaagtattt

SEQ ID NO: 9662 - DNA, 120 bp, synthetic construct
  misc_feature 1..120: note = Artificially Synthesized Probe
  source 1..120: mol_type = other DNA
aactccagcctgggtgacagagcgagactccgtctcaaaaaaataaaaagaaaagaaaagaaaaatgagcataatgaagtctctagaatcagattcacagagacagaaaggaggatggtg

SEQ ID NO: 9663 - DNA, 120 bp, synthetic construct
  misc_feature 1..120: note = Artificially Synthesized Probe
  source 1..120: mol_type = other DNA
accatgtttaaatggtcccttggtaattacagatttagactttcggaattaaaaaaaaaaaaaaggaagcttcgagtgacattactggtggcagctctcacgggtggttctggttacttg

SEQ ID NO: 9664 - DNA, 120 bp, synthetic construct
  misc_feature 1..120: note = Artificially Synthesized Probe
  source 1..120: mol_type = other DNA
tattttaaataattagccaggtatagtgtctcaggcctgtagtcctgtgtagtccagctactcaggaggctgaggcgggaagatcgtttgagcccaggagttcaagcctgcagtgagcta

SEQ ID NO: 9665 - DNA, 120 bp, synthetic construct
  misc_feature 1..120: note = Artificially Synthesized Probe
  source 1..120: mol_type = other DNA
atatgagataaccaattcttgctgccttcgatccttacaactaaaggatctcagtggggccaaaatccttccctgactttgtcaataaccattagttgtgtttctagctttgcacagaag

SEQ ID NO: 9666 - DNA, 120 bp, synthetic construct
  misc_feature 1..120: note = Artificially Synthesized Probe
  source 1..120: mol_type = other DNA
aggttgcagtgagcagagatcatgccactgcactccagcctgggcaacagagtaagaccctgtctcaaaaaaaaaaaaaaaataggccgggtgtggtggctcatgcctgtaatcccagca

SEQ ID NO: 9667 - DNA, 120 bp, synthetic construct
  misc_feature 1..120: note = Artificially Synthesized Probe
  source 1..120: mol_type = other DNA
ctgggagctagaagtttctgaaaactgtaagtcttttggtgtcactaaaagatacaggatgaatgagcggggattaactgaagaagatagggttgatttataaagtttgaattcgaggcc

SEQ ID NO: 9668 - DNA, 120 bp, synthetic construct
  misc_feature 1..120: note = Artificially Synthesized Probe
  source 1..120: mol_type = other DNA
aaaaaaaaaaaagcttgaatttgagcctacaggacggggtttctcacccttagtactattggcttttaggactggataattctttgtcatgaaggagggtgcatcctgtgtgttgcagga

SEQ ID NO: 9669 - DNA, 120 bp, synthetic construct
  misc_feature 1..120: note = Artificially Synthesized Probe
  source 1..120: mol_type = other DNA
aggctgaagctgggaggcggctaactatggggttttgttctgtgttgtgaatatttgacaatttttcataataggatgaaaaatataaatattcccatcaagtggcttgttgctactgcc

SEQ ID NO: 9670 - DNA, 120 bp, synthetic construct
  misc_feature 1..120: note = Artificially Synthesized Probe
  source 1..120: mol_type = other DNA
caacaatctaatgccacaagaaaaaataactcgggaacagccaaagagaaaggaactgtcaaccctgacatctcaatgaaaaaacacagcttgggcatcccttattcaaaacacttgaga

SEQ ID NO: 9671 - DNA, 120 bp, synthetic construct
  misc_feature 1..120: note = Artificially Synthesized Probe
  source 1..120: mol_type = other DNA
atagataagcaatacatttgataacatccacttagtagactgagctcctgactactaaggatgtctgatgagacatacacaggcaaggcaaaatagaatattgccccaggaaactggcca

SEQ ID NO: 9672 - DNA, 120 bp, synthetic construct
  misc_feature 1..120: note = Artificially Synthesized Probe
  source 1..120: mol_type = other DNA
tttaagtaactcattttcacctggaaaagttaaaacaaaaggcaaaaatgagctatttcagtgtagtttcagaccaaagcctgggacccccacacttcctggagggaccgtgagaaggca

SEQ ID NO: 9673 - DNA, 120 bp, synthetic construct
  misc_feature 1..120: note = Artificially Synthesized Probe
  source 1..120: mol_type = other DNA
aatacattttctgcactcctaacttcaacttggcagtcacttcccaggagatgcagactgacataggtattttactcaactttgaagtcttcagcatcagcctgatacacatataagaag

SEQ ID NO: 9674 - DNA, 120 bp, synthetic construct
  misc_feature 1..120: note = Artificially Synthesized Probe
  source 1..120: mol_type = other DNA
ttgtccaaggcatagaaggagtagttcctatggaaaaaacacacacatctagtcattcaacggctggtcttctacaactccaagatggtgtggccatgctcggagttgatcttgttcagt

SEQ ID NO: 9675 - DNA, 120 bp, synthetic construct
  misc_feature 1..120: note = Artificially Synthesized Probe
  source 1..120: mol_type = other DNA
agacctcctgcctatgagtcaatcttgatctagctagtttgagtttctgctgttttgctaatagagtttctaggacctcaaggagaaggttggaatatactggaatatactgagatggag

SEQ ID NO: 9676 - DNA, 120 bp, synthetic construct
  misc_feature 1..120: note = Artificially Synthesized Probe
  source 1..120: mol_type = other DNA
tctatagacatatttcaatcttctcatgattctccatggtgagaagataaccctcaggctgcaaatgactggacatacccagctcaaaactcatcatgcttagaacacaatctgaagtcc

SEQ ID NO: 9677 - DNA, 120 bp, synthetic construct
  misc_feature 1..120: note = Artificially Synthesized Probe
  source 1..120: mol_type = other DNA
acagaccacaacctgaccttacaatatctgtcgatttacttatgcgcaaaaatccatcaaggtaaggactttcccttactcactgtgagtattcagtacatgttcgctaaagaaataaac

SEQ ID NO: 9678 - DNA, 120 bp, synthetic construct
  misc_feature 1..120: note = Artificially Synthesized Probe
  source 1..120: mol_type = other DNA
aaaaataaaaataaatgtaaatgcagattcctgatgccccaactcccaaagtagaaaatgagaatctcaaggttagtaaggccaagactgagctgttcatttcaggttttgaggcagact

SEQ ID NO: 9679 - DNA, 120 bp, synthetic construct
  misc_feature 1..120: note = Artificially Synthesized Probe
  source 1..120: mol_type = other DNA
tcaagatcagcctgggaagacagcacactatgcagggtctcaagtgatggcataagtccatcatgctacggcaaggtcttctgacctcagcattgttcacatttggggccaagtaattct

SEQ ID NO: 9680 - DNA, 120 bp, synthetic construct
  misc_feature 1..120: note = Artificially Synthesized Probe
  source 1..120: mol_type = other DNA
cggatcacttcaggccaggagttcgagaccagcctggccaacatggtgaaaccccgtctctactaaaaatacaaaaattaaccaggtgtggtggtgcccacctgtaatcccagctactgg

SEQ ID NO: 9681 - DNA, 120 bp, synthetic construct
  misc_feature 1..120: note = Artificially Synthesized Probe
  source 1..120: mol_type = other DNA
ggaaaataaagatgaaggagactgatcaggtacatcgcttaagcttcttgatacagctatacctgaaccaactccctgaactttttggttatgggtaccaacaaactcctttaatcttgg

SEQ ID NO: 9682 - DNA, 120 bp, synthetic construct
  misc_feature 1..120: note = Artificially Synthesized Probe
  source 1..120: mol_type = other DNA
aagggtcattttttattggtggcatccttgttgctgctgctgttgttctcacactcctgggtattcaactcttcagagtgatttttgtgactgtaggatcataaagtatgtatctggtct

SEQ ID NO: 9683 - DNA, 120 bp, synthetic construct
  misc_feature 1..120: note = Artificially Synthesized Probe
  source 1..120: mol_type = other DNA
tcagaacggtgttgcaagtacacccaggtagtggcagaacagctgaggcagaaacaaaatactgaccaaatgtttgacttcttttattgcctctattcttattatgtggcaggcaatgct

SEQ ID NO: 9684 - DNA, 120 bp, synthetic construct
  misc_feature 1..120: note = Artificially Synthesized Probe
  source 1..120: mol_type = other DNA
agacaaaaatatcagctagtgacaaatcgaagagttaaaactaaatgatgtgacagagagtgcacggatgattgactcagacgggaaggatttgccaaggaggtgacttttaagctgcca

SEQ ID NO: 9685 - DNA, 120 bp, synthetic construct
  misc_feature 1..120: note = Artificially Synthesized Probe
  source 1..120: mol_type = other DNA
gtagacaaatttgagacctcagcttaataggaagaagtgagagaggccaagaagaatcaaggattttaggtaattctccccttcccagtggataccccatacgcattgaaaatttattca

SEQ ID NO: 9686 - DNA, 120 bp, synthetic construct
  misc_feature 1..120: note = Artificially Synthesized Probe
  source 1..120: mol_type = other DNA
gcggtcaatttctcagggtttctgttttagcatctcccgcatcatcagtgagaaaatcaaaggaggttgctatatttctcaggccattgttaaggtgagggaaaaatgccttttatttaa

SEQ ID NO: 9687 - DNA, 120 bp, synthetic construct
  misc_feature 1..120: note = Artificially Synthesized Probe
  source 1..120: mol_type = other DNA
aacataaaacctcaatacaaaaaccaggaaacagatttttgcaactcagttacggccccaaaatagctcatggaagaagctcacagtacgaacagaaagtctgcgatgtgcgtaggaaat

SEQ ID NO: 9688 - DNA, 120 bp, synthetic construct
  misc_feature 1..120: note = Artificially Synthesized Probe
  source 1..120: mol_type = other DNA
aaaaggtagtcaactcccactcccaagcccaggaccaaaacagggtgcaaaagtagcatctgagagcagagacctcactcatagccaattaaccctgggtttgcacacagttttaacaag

SEQ ID NO: 9689 - DNA, 120 bp, synthetic construct
  misc_feature 1..120: note = Artificially Synthesized Probe
  source 1..120: mol_type = other DNA
ttatgtaatttttatgaatatctatgtttaacaaatggctcacaaattgcctgaaaatttcaccactggctccagcaagccaactccagcatgctgctgcaccccacatgtgaagtagat

SEQ ID NO: 9690 - DNA, 120 bp, synthetic construct
  misc_feature 1..120: note = Artificially Synthesized Probe
  source 1..120: mol_type = other DNA
atttctgcgatgacggaaatgttctctatctgggccatccaacatagtagccacttctcccctgtggcttctgaatgtgcttagtgcaactaggaaatccaattttttttttaattgtgg

SEQ ID NO: 9691 - DNA, 120 bp, synthetic construct
  misc_feature 1..120: note = Artificially Synthesized Probe
  source 1..120: mol_type = other DNA
gggtacttgtgatattttgtcatatggataaaatgtgtaacgatttcttttttgggtgtgtgatggggtctggctctgtcacttaggttctggggtacagtgacacagtgacagttcact

SEQ ID NO: 9692 - DNA, 120 bp, synthetic construct
  misc_feature 1..120: note = Artificially Synthesized Probe
  source 1..120: mol_type = other DNA
tacacagatcttccctgacttccccagcagaagtcgcccttcctgctccattcataagctaacacattatctcattacattttccttatggcatggatcactcttgaaaattatcttggg

SEQ ID NO: 9693 - DNA, 120 bp, synthetic construct
  misc_feature 1..120: note = Artificially Synthesized Probe
  source 1..120: mol_type = other DNA
ttatcataattatcaacatcattaacactgatctgtctgtgggaacctgagggctgaaattcaattgaaggaagcaatatacaaggcagacaacaatgatccaggacccacggagttcca

SEQ ID NO: 9694 - DNA, 120 bp, synthetic construct
  misc_feature 1..120: note = Artificially Synthesized Probe
  source 1..120: mol_type = other DNA
cctcacagctaacactgccttcttatttcagtgactatacatgttttggctttataatcctgctgttccctcactaatgggttaaataaacatgctgacctgtgttctttggtggttttt

SEQ ID NO: 9695 - DNA, 120 bp, synthetic construct
  misc_feature 1..120: note = Artificially Synthesized Probe
  source 1..120: mol_type = other DNA
ctgagtgggagtcctctaaactggtgctggacgtttccacatactcttgctccccatactggttcctctgaactcggattgttagacagaatgtgaaaagctccacatgaaaatcacaag

SEQ ID NO: 9696 - DNA, 120 bp, synthetic construct
  misc_feature 1..120: note = Artificially Synthesized Probe
  source 1..120: mol_type = other DNA
aagaaaagaaaagaaaaaaatcacaggcagcccaggctggggaaagggcatgacacagatgaactagccacaaaacagcagcttcttctggtgagagagaccgcaaagtgaagacattat

SEQ ID NO: 9697 - DNA, 120 bp, synthetic construct
  misc_feature 1..120: note = Artificially Synthesized Probe
  source 1..120: mol_type = other DNA
caaacaaaaaaattaggggcaggaggggggaggacacatgggacatatgtccctctgaaagggacacaaaaaagtgccctattttatttttattttttactatgtatgtgtactatcctg

SEQ ID NO: 9698 - DNA, 120 bp, synthetic construct
  misc_feature 1..120: note = Artificially Synthesized Probe
  source 1..120: mol_type = other DNA
caatgcccagccaggaaatacatttttcaaaagcctctgctagacagtaaacaatgttattgatcagttacatgattctactcccaaatattctaataatgacaggcatcggtgagagct

SEQ ID NO: 9699 - DNA, 120 bp, synthetic construct
  misc_feature 1..120: note = Artificially Synthesized Probe
  source 1..120: mol_type = other DNA
attgcccacaatagtgggacaaggcaacaacacgtacttcccattatgaggcaatgaaaaagacaaaatatttgtgtagctttctttccatatattactaaccctagcttgaggtcattc

SEQ ID NO: 9700 - DNA, 120 bp, synthetic construct
  misc_feature 1..120: note = Artificially Synthesized Probe
  source 1..120: mol_type = other DNA
atcttgcaatttttccgtaagcttgaaacgacatcaaaacaaaaagcgaccaatttgtccaaagcaaggttaaaagccagagaaataggagacgcagcgctgcattgttaaatgacttgc

SEQ ID NO: 9701 - DNA, 120 bp, synthetic construct
  misc_feature 1..120: note = Artificially Synthesized Probe
  source 1..120: mol_type = other DNA
aaagtaatttattttgtttccattcaaggcctttctctcccacactggccccagaccctgacctcagaggttcgagtccccggagccaaattcctctagttggaatctagtaaatgattt

SEQ ID NO: 9702 - DNA, 120 bp, synthetic construct
  misc_feature 1..120: note = Artificially Synthesized Probe
  source 1..120: mol_type = other DNA
tcgtggctgcagaccccgcaggtcgagtctgccacggatggaactttggaaaaagctagggaaaaggagaaaccgagcttgcaagggctcatcaagcatccaccggggtggcttaggctg

SEQ ID NO: 9703 - DNA, 120 bp, synthetic construct
  misc_feature 1..120: note = Artificially Synthesized Probe
  source 1..120: mol_type = other DNA
ctttaaagtgtgtaatctgtttgcagcacacacggtccaatccatcaatgaggtcatattaactcaattattcaagcaatcatcaccattagaattggagaaaccgaggcatagaggggc

SEQ ID NO: 9704 - DNA, 120 bp, synthetic construct
  misc_feature 1..120: note = Artificially Synthesized Probe
  source 1..120: mol_type = other DNA
aggaacagtacatgcaaatgtgtgaatcactcgggctatgttcagagaactataaacagttcagagttgatgaagggcaaagtacaggatgagaggaatagaagattagaccagagagga

SEQ ID NO: 9705 - DNA, 120 bp, synthetic construct
  misc_feature 1..120: note = Artificially Synthesized Probe
  source 1..120: mol_type = other DNA
tccggcttgctccagaaagctactcatggcaaggtgcaaaaacccctgtttgttgggggcattttggaagtttttattctcattcatgtaggcaatacacattttatgcaattaagtaca

SEQ ID NO: 9706 - DNA, 120 bp, synthetic construct
  misc_feature 1..120: note = Artificially Synthesized Probe
  source 1..120: mol_type = other DNA
gggttgtggccaccctactgagcagcatctctctaaaagatccagctttttgattttgtcagttctatttgttttctaatcagttcgtctgtgcttattatttccaatattcatcatctc

SEQ ID NO: 9707 - DNA, 120 bp, synthetic construct
  misc_feature 1..120: note = Artificially Synthesized Probe
  source 1..120: mol_type = other DNA
aaaccatgcaaaagctctccctctctccctgaaaacgcctcgcgccttgaattctttgcttatttttctctgttcaaatttagccacacgttgaagttttctgtgtcatttttggaaata

SEQ ID NO: 9708 - DNA, 120 bp, synthetic construct
  misc_feature 1..120: note = Artificially Synthesized Probe
  source 1..120: mol_type = other DNA
ctattagaaaaacatgtgaagttctctgattgggggaaagatccatttcctgctcatgttgatttcaacaaaagaaaggaataagtttccctctggatcctcagacttcactggctaatc

SEQ ID NO: 9709 - DNA, 120 bp, synthetic construct
  misc_feature 1..120: note = Artificially Synthesized Probe
  source 1..120: mol_type = other DNA
atttcgttacaaattgtgaccatgctccaatcaagttcacagggggctgaaacgcccgggttgttaatttcctcagaaggttattctataaaagccaaagtgttactttcttgcattgag

SEQ ID NO: 9710 - DNA, 120 bp, synthetic construct
  misc_feature 1..120: note = Artificially Synthesized Probe
  source 1..120: mol_type = other DNA
atgtgcagacgggaaccatcgaagtaccttgggctgacttgaatactggaggggatgacgcacaaaatagcactcacaacttcctttatttcatgggaagagagggttggatggattaaa

SEQ ID NO: 9711 - DNA, 120 bp, synthetic construct
  misc_feature 1..120: note = Artificially Synthesized Probe
  source 1..120: mol_type = other DNA
aaatccccaattttcctctcagaaatcaagatttaatagcctcctaaggaaaccataatttgagggccattgggagcattactctctgaggcctgtgattatagaatgccgagaatgatt

SEQ ID NO: 9712 - DNA, 120 bp, synthetic construct
  misc_feature 1..120: note = Artificially Synthesized Probe
  source 1..120: mol_type = other DNA
tggttctcacatagaaatcccccccttgaacttccttcctatctgtttcctcagcctatcttccctctggccgtgtattattcacaaagagttctacaggatacaaagataaaatttaat

SEQ ID NO: 9713 - DNA, 120 bp, synthetic construct
  misc_feature 1..120: note = Artificially Synthesized Probe
  source 1..120: mol_type = other DNA
ctcacctctctccaggcagcctgcagaagccagatatttatttgaaacctccagcttctgctcctcatgtgtatgcaaacgttgagctcaactccataaaagtcatgttttgttttgttt

SEQ ID NO: 9714 - DNA, 120 bp, synthetic construct
  misc_feature 1..120: note = Artificially Synthesized Probe
  source 1..120: mol_type = other DNA
cctctccataaacaaattaacaggagaaactcagccccactaaaacacacacaaatttaggaaattgacaaaaacctaagagctgagaaaatatgggttctggagtctcagtgtttggca

SEQ ID NO: 9715 - DNA, 120 bp, synthetic construct
  misc_feature 1..120: note = Artificially Synthesized Probe
  source 1..120: mol_type = other DNA
tgtgttttccaaaggagccggtatttgaaaaggacgtgcattccaccaagcattcttaacgacctgggcctttggggtcaggtaagttccagattttattattagtaacaaattaaattg

SEQ ID NO: 9716 - DNA, 120 bp, synthetic construct
  misc_feature 1..120: note = Artificially Synthesized Probe
  source 1..120: mol_type = other DNA
ggcgcttcaatagcgacaagacatcgtggaccttgacctcatggtgcttccagtctagcaggcaggcaggcagaatcagagagaaaatttttctttaaatttatttttgggtttttttga

SEQ ID NO: 9717 - DNA, 120 bp, synthetic construct
  misc_feature 1..120: note = Artificially Synthesized Probe
  source 1..120: mol_type = other DNA
ccataaagtatgcaaagaattattatgcagcattcacttcccctttgcttctctcccccaaggaatgctcaagataaattctctcttgcaggtcctttatttatcaagccaaacagcatc

SEQ ID NO: 9718 - DNA, 120 bp, synthetic construct
  misc_feature 1..120: note = Artificially Synthesized Probe
  source 1..120: mol_type = other DNA
atgccttttaaggatggctatgtgatgaaggtgttttctctttgtgattaaacgccttactcatctgaagggggaaattccatttaagaagtgaaccaggtatgagaagagacattttcc

SEQ ID NO: 9719 - DNA, 120 bp, synthetic construct
  misc_feature 1..120: note = Artificially Synthesized Probe
  source 1..120: mol_type = other DNA
cggttccacttcaggatgactcgaaagacagaaaaagactcaaagcaaaatgcctaaagcttggaaacgccagcagcccctgaaaactaccgagcttccttttcctgtatttatttattt

SEQ ID NO: 9720 - DNA, 120 bp, synthetic construct
  misc_feature 1..120: note = Artificially Synthesized Probe
  source 1..120: mol_type = other DNA
ctccttttctgataacatccttcatttctgcttccttctgcttccttctctgaacatattcgaatcacaaagccccagctctgttgggaaattccgacgggaattgaaacaggttcctaa

SEQ ID NO: 9721 - DNA, 120 bp, synthetic construct
  misc_feature 1..120: note = Artificially Synthesized Probe
  source 1..120: mol_type = other DNA
tctctgggggaagggagaggcatcattcaaccgaccacattcaccctttctggtattttcctctcccagccacagaatgtttcggtagcagtcatcgagtgatatcttttttcttttttt

SEQ ID NO: 9722 - DNA, 120 bp, synthetic construct
  misc_feature 1..120: note = Artificially Synthesized Probe
  source 1..120: mol_type = other DNA
gtaaaaacaaaacagaaaagatgcaagggtgacacagaaagttctcatgtacccatcactcagtaaagagataaattccccaggaatggaacagaatgtggcacccaagaatctgctgct

SEQ ID NO: 9723 - DNA, 120 bp, synthetic construct
  misc_feature 1..120: note = Artificially Synthesized Probe
  source 1..120: mol_type = other DNA
ggtaactgacttgttggtggcagcaaagaagaaggcatgaaccattcgctcttctgtgcagcagtcactctgtgtgtggttttcagacatatttaaagtggatttaaaaaacaaacaaac

SEQ ID NO: 9724 - DNA, 120 bp, synthetic construct
  misc_feature 1..120: note = Artificially Synthesized Probe
  source 1..120: mol_type = other DNA
aagcaaaatatgattctaacccatgcaaaatctggttctatctccaggaatgctgagtaggcaaatctgaatgcctcctctccagagatgagtaatcttgtgtttgcctccttttcaagt

SEQ ID NO: 9725 - DNA, 120 bp, synthetic construct
  misc_feature 1..120: note = Artificially Synthesized Probe
  source 1..120: mol_type = other DNA
gatcacttgaggtgaggagtttgagactaacctggccaacgtggcgagaccccgtttctaccaaaaacacaaaaattaaccggctgtggtgttgcgcacctgtaatcccagctactcggg

SEQ ID NO: 9726 - DNA, 120 bp, synthetic construct
  misc_feature 1..120: note = Artificially Synthesized Probe
  source 1..120: mol_type = other DNA
tagcaattttttcatttttctgcacagcaccatttgggaaaggctaagtcagagtctggggtgggttgaaagctagaagacactctgagcctatgtcctcggtaaaaaaaaaaaaaaaaa

SEQ ID NO: 9727 - DNA, 120 bp, synthetic construct
  misc_feature 1..120: note = Artificially Synthesized Probe
  source 1..120: mol_type = other DNA
accatgtgccactcactacactttacatgtcacaagcattaattacctcatttgattttcacccaaaccaagaaatggaagtatctagagaaagaagcccagcataaagacacaagggag

SEQ ID NO: 9728 - DNA, 120 bp, synthetic construct
  misc_feature 1..120: note = Artificially Synthesized Probe
  source 1..120: mol_type = other DNA
tatggatattcccaggtgcttcaaagccctcaacctgatggatattactctattaaacccaaaatttcccatcttccctcctctaagccaccagaatagactggaacaaaaaaaaatttt

SEQ ID NO: 9729 - DNA, 120 bp, synthetic construct
  misc_feature 1..120: note = Artificially Synthesized Probe
  source 1..120: mol_type = other DNA
gaggttgtggccacatgctgtgtaacacttagagtttcctatgcacccagcactattccaattattaaccatttatttcccccaacaatcctagatgttcccattttacagaggagaaga

SEQ ID NO: 9730 - DNA, 120 bp, synthetic construct
  misc_feature 1..120: note = Artificially Synthesized Probe
  source 1..120: mol_type = other DNA
ccaccacatcaaagccaagatgacaacgtctctgagtttgacacaaggttagggggaagtctcatttttcaaatggctggctgtaacactaaaaaaggaaaattaaaaatgtctgaggat

SEQ ID NO: 9731 - DNA, 120 bp, synthetic construct
  misc_feature 1..120: note = Artificially Synthesized Probe
  source 1..120: mol_type = other DNA
tgtggaattccttcctcttaacactaagcatcaggcattccatgacttttgctcttgggatggcaaacatgaatgtttctagaacactgagttttccagcatataccttttctggttatt

SEQ ID NO: 9732 - DNA, 120 bp, synthetic construct
  misc_feature 1..120: note = Artificially Synthesized Probe
  source 1..120: mol_type = other DNA
atcgacacttggccagaagcaacaaaataacattccactctgctggaaaattgaggcgggggcttaaaggcttattttaacagcttaacagcttagcaaaataaatctgctgtcattata

SEQ ID NO: 9733 - DNA, 120 bp, synthetic construct
  misc_feature 1..120: note = Artificially Synthesized Probe
  source 1..120: mol_type = other DNA
atggatgggcagatgagcaagggagtgatagatataaagccagcaatctaagaacaatgcttacaagaagtagacaaactgtgtctgaagcaaaatcacaaaacatttctaagaacagga

SEQ ID NO: 9734 - DNA, 120 bp, synthetic construct
  misc_feature 1..120: note = Artificially Synthesized Probe
  source 1..120: mol_type = other DNA
tctgcaaattaggaatcctaacagtgtccacctggtgaggtcactgaggcgatgacaggataaaccacaccaagtgtctagctcatagcatggtactccacctttcagaaatattacctt

SEQ ID NO: 9735 - DNA, 120 bp, synthetic construct
  misc_feature 1..120: note = Artificially Synthesized Probe
  source 1..120: mol_type = other DNA
ttctggcagctcagcaaagaggggggaagaattaatttcggatcctgaatttgcatctgcaaatgctgttttcgttcaaacgctttgtgttgtcttgtttttggtggtgttttttgtttt

SEQ ID NO: 9736 - DNA, 120 bp, synthetic construct
  misc_feature 1..120: note = Artificially Synthesized Probe
  source 1..120: mol_type = other DNA
ttcttcaataaaaccaaactaaacaataataatcaacaatggtgatagtaatcattgtaacacctcattcccgggggtactgggaattcactggaaagggctgggatgaggcaatgtcct

SEQ ID NO: 9737 - DNA, 120 bp, synthetic construct
  misc_feature 1..120: note = Artificially Synthesized Probe
  source 1..120: mol_type = other DNA
agctgcaatataactacaatgctagcaacaatgtaactaccatgtttatcattcccgtatcctcttctctgatcctcacaacgagcttgtgatacatgttgggtttggttttggtgttga

SEQ ID NO: 9738 - DNA, 120 bp, synthetic construct
  misc_feature 1..120: note = Artificially Synthesized Probe
  source 1..120: mol_type = other DNA
tagtagagatggggtttcactatgttgggcaggctggtctcaaactcctgacctcaagtgatgatccgcccacctcaggctcccaaagggctgggattacaggcatcagtcactgcatct

SEQ ID NO: 9739 - DNA, 120 bp, synthetic construct
  misc_feature 1..120: note = Artificially Synthesized Probe
  source 1..120: mol_type = other DNA
aaaaaatttctggaaatagacttttcacagatggttgtgagggccagtattcaatcatcacttgcaatcagtcagccctgacttctcctttggcacttatctgcttaactacaaactcag

SEQ ID NO: 9740 - DNA, 120 bp, synthetic construct
  misc_feature 1..120: note = Artificially Synthesized Probe
  source 1..120: mol_type = other DNA
ccactccttatacacacttctactacacaactcatccattctgctccaggatataacctcaagagatatgaaggcattggtccacataaaagactcctacacaattgtgtataacaggtt

SEQ ID NO: 9741 - DNA, 120 bp, synthetic construct
  misc_feature 1..120: note = Artificially Synthesized Probe
  source 1..120: mol_type = other DNA
gggaaaggataggaagtgagtgagggataaaagactacaaattgggttcagtgtatactgctcgggtgatggatccaccaaaacttacaaatcaccacgaaataatttactcatataacc

SEQ ID NO: 9742 - DNA, 120 bp, synthetic construct
  misc_feature 1..120: note = Artificially Synthesized Probe
  source 1..120: mol_type = other DNA
atggaaagaaaatcctcctagaacagacttgacctggccaaacaagccctgaaatcatttgaagagaccaggattgaatgtagaatcataaagtaaatccataactgtttccctcccaca

SEQ ID NO: 9743 - DNA, 120 bp, synthetic construct
  misc_feature 1..120: note = Artificially Synthesized Probe
  source 1..120: mol_type = other DNA
atgcttattagtctaactgggtttctatctggccacaatttcaagtgagaaaagcaaagcaaagcacaattgaaatgctgggtaaagaaatgcaatgacagcagcaaagcatttccgaca

SEQ ID NO: 9744 - DNA, 120 bp, synthetic construct
  misc_feature 1..120: note = Artificially Synthesized Probe
  source 1..120: mol_type = other DNA
cacgtgtggccagtcagaactgaaatgtgctttacgtgcaaaatacacaatggcttcctaagggatagtactacttagcttcccaatatatgcagatatttagaatactcaaaagtgtat

SEQ ID NO: 9745 - DNA, 120 bp, synthetic construct
  misc_feature 1..120: note = Artificially Synthesized Probe
  source 1..120: mol_type = other DNA
cagggctggaagtttatgtaccaaacctaagagagttgttacctctgggaagaagggaggagaatatagcaagggaagatgacaaagagaactccaactgtatcttacattttattactt

SEQ ID NO: 9746 - DNA, 120 bp, synthetic construct
  misc_feature 1..120: note = Artificially Synthesized Probe
  source 1..120: mol_type = other DNA
ggagtttgaggctgtggtgtactatggctgtttctgaatagccactgtactgggcaacatggtacacatctttttaaacattctttctaaaaacagcaaatttcattttatgtgtgactt

SEQ ID NO: 9747 - DNA, 120 bp, synthetic construct
  misc_feature 1..120: note = Artificially Synthesized Probe
  source 1..120: mol_type = other DNA
aaggagcacagactccagatggcagactaaaaaaacattattagatttccaatgaaaacttttgctgtagtggttctaacgtgacacagccctacaaaaataaagatgaatcacggccca

SEQ ID NO: 9748 - DNA, 120 bp, synthetic construct
  misc_feature 1..120: note = Artificially Synthesized Probe
  source 1..120: mol_type = other DNA
ctcatgaacacagatggcaagaattcagaaaacgaaacaaagcaaacctagcaaatcgaattcaacgttatgctgaaagaataattcatcacaaccaagtaggttttaccacaggaaagc

SEQ ID NO: 9749 - DNA, 120 bp, synthetic construct
  misc_feature 1..120: note = Artificially Synthesized Probe
  source 1..120: mol_type = other DNA
gccaccgcgcccagccctcaatgggttttatatgagagtgagaggagggaaatatttagttcaaccagaaaaggaaacactcttctaaaaggtgtaatagggaaaaaactagatttgcca

SEQ ID NO: 9750 - DNA, 120 bp, synthetic construct
  misc_feature 1..120: note = Artificially Synthesized Probe
  source 1..120: mol_type = other DNA
taagaggtttttaaaaaaatgttttatgagccccactgtttcccactccagggttctttggcagatggcaaacagggccacaaattcttcctcttccatcaacaggtaaagactatattc

SEQ ID NO: 9751 - DNA, 120 bp, synthetic construct
  misc_feature 1..120: note = Artificially Synthesized Probe
  source 1..120: mol_type = other DNA
cagagtggtttgctacacaggaaaagctagctgatacaagctccatgattaaacttgaatataaattccaaggtctgtgtttcagagtggtttgctacacagcaaaagctagctgattca

SEQ ID NO: 9752 - DNA, 120 bp, synthetic construct
  misc_feature 1..120: note = Artificially Synthesized Probe
  source 1..120: mol_type = other DNA
attttaatgaatttctacttaaattgccacatgtggctgtggctggcagagctaccttagtggacagcgtcattctagaatttcactaagttggttctatatcactaccaaaagcaggac

SEQ ID NO: 9753 - DNA, 120 bp, synthetic construct
  misc_feature 1..120: note = Artificially Synthesized Probe
  source 1..120: mol_type = other DNA
tgagttactgcgcccatgtcccccagtatcttttgaagccatcctttcaaaactaaaagtctgtgaagaattacactttcctctgaactacattgacaaatttaagaccatcctctaact

SEQ ID NO: 9754 - DNA, 120 bp, synthetic construct
  misc_feature 1..120: note = Artificially Synthesized Probe
  source 1..120: mol_type = other DNA
ataaaataactgggcatggtgacaggggcctgtagtcccaactactctggaggctgaggtgggaggatggcttgagaccaggagttccagactgctgttagctatgatcatgctactgca

SEQ ID NO: 9755 - DNA, 120 bp, synthetic construct
  misc_feature 1..120: note = Artificially Synthesized Probe
  source 1..120: mol_type = other DNA
aaaaagaaaaaaaatcaaagaacacaccaccactcagagccatgtgcaaacgaacagcatcaagcatggtcgcctttgaaaacagctgactgcagagagtgctgaaatggtacttgttaa

SEQ ID NO: 9756 - DNA, 120 bp, synthetic construct
  misc_feature 1..120: note = Artificially Synthesized Probe
  source 1..120: mol_type = other DNA
gttctggcaaagtactatttctcaaccagagttagggattatatgagtgttgacgttagagtgaaccattaggctattcatttgtttggtgtggcttttctgaacctgtggtttttttat

SEQ ID NO: 9757 - DNA, 120 bp, synthetic construct
  misc_feature 1..120: note = Artificially Synthesized Probe
  source 1..120: mol_type = other DNA
ccaaaaaaaaaaaatagaagaagccacaggaccctctaccccaaaccctctaggtaggtacttgacaatggtgggcttcacctaccacatgccctacagtgtaattttttatttatttat

SEQ ID NO: 9758 - DNA, 120 bp, synthetic construct
  misc_feature 1..120: note = Artificially Synthesized Probe
  source 1..120: mol_type = other DNA
caggatgataggtaaccagggagcagaggagagcaatgctttcaacactttcttgtttgcttcccactcttgacatcatttatgtttaaaaatgagcaaacgggccgagtgtggtggctc

SEQ ID NO: 9759 - DNA, 120 bp, synthetic construct
  misc_feature 1..120: note = Artificially Synthesized Probe
  source 1..120: mol_type = other DNA
tgttcagtcacaaagaacagattttaattctgacaaagggtcgggtgacatgggaagtaaccggtcagtgagtatcaggtaggaggaaggaaaagaaaaacttgtcaggccagtcaccaa

SEQ ID NO: 9760 - DNA, 120 bp, synthetic construct
  misc_feature 1..120: note = Artificially Synthesized Probe
  source 1..120: mol_type = other DNA
tcaacccccggaagaggagccgggagcccagaaacatactctctagggtacttgttctttcctgctctacaaaatccaatcatctccaaagtgaaaagtttgtttaaaaaatttcaatca

SEQ ID NO: 9761 - DNA, 120 bp, synthetic construct
  misc_feature 1..120: note = Artificially Synthesized Probe
  source 1..120: mol_type = other DNA
accttatctttttctttttgttggatccccgtgtgcaggcgttacactttcctgtcttctgtatggacgacagtgacatcgccacaagggaatttatcaatattccctgttatctagaga

SEQ ID NO: 9762 - DNA, 120 bp, synthetic construct
  misc_feature 1..120: note = Artificially Synthesized Probe
  source 1..120: mol_type = other DNA
gaagtaccagcaaagggcagctgggctgtatggcctcaggccgtggtgctcccaagtcccactgaaacagcctctatccctgaatgctgaatgtccagctcatatatagacagagtctca

SEQ ID NO: 9763 - DNA, 120 bp, synthetic construct
  misc_feature 1..120: note = Artificially Synthesized Probe
  source 1..120: mol_type = other DNA
ctttctttttacagtttcctgcatttcaccaacttcccgcaatgacatctataagacacaaaggtaaagagcttggattctgagccagaatccccagcttcaaatcccatctccactact

SEQ ID NO: 9764 - DNA, 120 bp, synthetic construct
  misc_feature 1..120: note = Artificially Synthesized Probe
  source 1..120: mol_type = other DNA
aaaaatcaaaccctccaagagcatgcatttaaactcgtgcatttaaatacgtgatatttaatgtggtaggcacaataccacactttgagagactttgactcggagctgtaatctcagacc

SEQ ID NO: 9765 - DNA, 120 bp, synthetic construct
  misc_feature 1..120: note = Artificially Synthesized Probe
  source 1..120: mol_type = other DNA
ctgaactaatgtagatctccctctaactctccccctcttctgagtgtacttggtttgatcgtgaacatctgcatttgccactagactggccgctctgaggaggcaaaggctggctccctt

SEQ ID NO: 9766 - DNA, 120 bp, synthetic construct
  misc_feature 1..120: note = Artificially Synthesized Probe
  source 1..120: mol_type = other DNA
aaaggacaaaccagcaccttcatcctaaatgttgatgcattcccctgatgcttccagaagctgccaagtgtggaagacaaaaatagcaactacggatgttcacagaagtatctgaaaaga

SEQ ID NO: 9767 - DNA, 120 bp, synthetic construct
  misc_feature 1..120: note = Artificially Synthesized Probe
  source 1..120: mol_type = other DNA
ccacgtgaacgtgcttaatgccactgaaaactgtggacttaaaatggttaagatggggccaggcgcggtggcactcacctgtaatcccagcactttgcgaggctgaggtgggtgtattgc

SEQ ID NO: 9768 - DNA, 120 bp, synthetic construct
  misc_feature 1..120: note = Artificially Synthesized Probe
  source 1..120: mol_type = other DNA
caaggcgggcagatcacctgaggtcgggagttcgagaccagcctggccaacatggagaaatcccatctctactaaaaatacaaaattagctgggtgtggtggcgcatgcctgtaatccta

SEQ ID NO: 9769 - DNA, 120 bp, synthetic construct
  misc_feature 1..120: note = Artificially Synthesized Probe
  source 1..120: mol_type = other DNA
acctccatcgcatgttccctagttcttcccagggaaatgtgaaaagaagtccatgaaacaacaaacaagtaatgtgtgaatgtggaattgcctccttgagcatgaaaacatgataaaact

SEQ ID NO: 9770 - DNA, 120 bp, synthetic construct
  misc_feature 1..120: note = Artificially Synthesized Probe
  source 1..120: mol_type = other DNA
catgggtagaagaagactttctaagtgtaaagtacagaagtggcacactgaaatccagctctgaactccataaacattttaagcttctccagcaaaacacttcccagagcatttaaacca

SEQ ID NO: 9771 - DNA, 120 bp, synthetic construct
  misc_feature 1..120: note = Artificially Synthesized Probe
  source 1..120: mol_type = other DNA
atcagataagaactaaactatttttttaaaaaaaccgaatctacagttttccactccttttcctctcccaagcaagaagaacattcactgactagcacaggcggtggcaaactgctgccc

SEQ ID NO: 9772 - DNA, 120 bp, synthetic construct
  misc_feature 1..120: note = Artificially Synthesized Probe
  source 1..120: mol_type = other DNA
agccagccgggatgagtagctttctctgtaaagtacccatgcctaagtaattactttcaaaacgccaagaaaataattcttttggcaagccctgttaaaatccttaaaatcaccacctct

SEQ ID NO: 9773 - DNA, 120 bp, synthetic construct
  misc_feature 1..120: note = Artificially Synthesized Probe
  source 1..120: mol_type = other DNA
caacacacacaccacagtcctcagcacctagaatataaggctcagtatacaacccctgcttattttgttccaaaacactaaaccttccaccaatatctttgaggaaaacagattgttcta

SEQ ID NO: 9774 - DNA, 120 bp, synthetic construct
  misc_feature 1..120: note = Artificially Synthesized Probe
  source 1..120: mol_type = other DNA
gtctgaggctcccagtcagtcacatcaacagcttccacatccagagatgtcaaagaaccccgcgtgccattggtgcctcccagcaagttctgtccccatcccatagatgagaaaactgaa

SEQ ID NO: 9775 - DNA, 120 bp, synthetic construct
  misc_feature 1..120: note = Artificially Synthesized Probe
  source 1..120: mol_type = other DNA
aaatacaaaaaaattagccaggcgtggtggcgggcacccgtagtggcaactatttgggaggccgaggcaggagaatggcatgaacccgggaggcggagcttgcagtgagccgagatcaca

SEQ ID NO: 9776 - DNA, 120 bp, synthetic construct
  misc_feature 1..120: note = Artificially Synthesized Probe
  source 1..120: mol_type = other DNA
agctacacgggagactgaggcaggaggatcgcttgagcctaggaggtcaggactgcagtgatctgtgtttgtacccctgcactccagcctgggcaacagagcaatatcttgtctcaaaag

SEQ ID NO: 9777 - DNA, 120 bp, synthetic construct
  misc_feature 1..120: note = Artificially Synthesized Probe
  source 1..120: mol_type = other DNA
agtagctagagggtacagggtttctttgaagatgatgcaaatattctaaaactgactgtggtcacagttgcacaactgtaaatgtcctcaaaaccacctaactgcacacttaaaatgggt

SEQ ID NO: 9778 - DNA, 120 bp, synthetic construct
  misc_feature 1..120: note = Artificially Synthesized Probe
  source 1..120: mol_type = other DNA
caggaggctgaggcaggagaatcgcttgaacccaggagatggaagttgcagtgaactgagatcatcccgtcgcactccagcctaagtaacaaagcaagactccatctcaaaataaataaa

SEQ ID NO: 9779 - DNA, 120 bp, synthetic construct
  misc_feature 1..120: note = Artificially Synthesized Probe
  source 1..120: mol_type = other DNA
aaaaaaaaaaaaattgatttgtctatgtagattttataaagagtatcatcgaaaatgtaggtttgatgtagaagaggcaagccccaaaattgagccttaccccgggagggtttttggctt

SEQ ID NO: 9780 - DNA, 120 bp, synthetic construct
  misc_feature 1..120: note = Artificially Synthesized Probe
  source 1..120: mol_type = other DNA
tttctctccatcatgaaaacagcaggggagatgggttgggagcagggcagagaaagaactttctagaagattctgaaatcctttacaatgctaagagttttctacttcctgttttcaatc

SEQ ID NO: 9781 - DNA, 120 bp, synthetic construct
  misc_feature 1..120: note = Artificially Synthesized Probe
  source 1..120: mol_type = other DNA
tttaaatgatgacaacagcataatgaaacctacaaagaagagatgagaactggggtctctggctgtgtatacctgttctgtctcccatctgagccagatggaatccattcccagatttat

SEQ ID NO: 9782 - DNA, 120 bp, synthetic construct
  misc_feature 1..120: note = Artificially Synthesized Probe
  source 1..120: mol_type = other DNA
gaaatgagaacagaagaatgcagatggaaacagtgaaccagtgaagacaaaggatgaaggaagaaaacaagtgtaatctgtaggacagaactgaaagaggactgtgatgaaaccctcatc

SEQ ID NO: 9783 - DNA, 120 bp, synthetic construct
  misc_feature 1..120: note = Artificially Synthesized Probe
  source 1..120: mol_type = other DNA
ggcgtatgcctgtaatcgcagcactttgggagcctgaggtgggaggatcacctgaggtcaggagttcaagaccagcctggccaacatggggaaacctcatctctactaaaaatacaaaaa

SEQ ID NO: 9784 - DNA, 120 bp, synthetic construct
  misc_feature 1..120: note = Artificially Synthesized Probe
  source 1..120: mol_type = other DNA
attgggaagatgggggaacaggtacggatgctggtggacgcagtgacaacaggtgatattgcaggaaaggtagcacggagacaactgagagaagaaaatgatagaaagagaggctcacgc

SEQ ID NO: 9785 - DNA, 120 bp, synthetic construct
  misc_feature 1..120: note = Artificially Synthesized Probe
  source 1..120: mol_type = other DNA
tgaactctggaatgtctgactcctctagtctatgacatagttttgtaatcctaacaatatcaaacatcaaaccacaggattagaagggggcttccgtgctatttcaggagtcctgaaatt

SEQ ID NO: 9786 - DNA, 120 bp, synthetic construct
  misc_feature 1..120: note = Artificially Synthesized Probe
  source 1..120: mol_type = other DNA
ccacattcccacaaaggcaaaggaaataagaatctcatgatagcatcctgcctttcctgaacatacatcaggggcttttatataaacctgatgagatatcctacttctaaggaactggaa

SEQ ID NO: 9787 - DNA, 120 bp, synthetic construct
  misc_feature 1..120: note = Artificially Synthesized Probe
  source 1..120: mol_type = other DNA
gcgggcgcctgtagtccctgctactcaggaggctgaggcaggagaatggcatgaacccggaaggcgaagcttgcagtaagctgagatcacgccactgcactccagcctgggcgacagagt

SEQ ID NO: 9788 - DNA, 120 bp, synthetic construct
  misc_feature 1..120: note = Artificially Synthesized Probe
  source 1..120: mol_type = other DNA
cgggtatgagccacagattcaccagttttaaaccacttgcagccgattcttgttattggtggtagtttggctctgtgaaattcccctgaatgttgaactagtgaatactgaaccattgtt

SEQ ID NO: 9789 - DNA, 120 bp, synthetic construct
  misc_feature 1..120: note = Artificially Synthesized Probe
  source 1..120: mol_type = other DNA
agttttaatcctcagtgtgcagattgtatgaatctgacgcataagggctgaagcaagaaggtggaatgccctcttacttgacctcacatttgagactcgtacttatgagtgtcctaaaat

SEQ ID NO: 9790 - DNA, 120 bp, synthetic construct
  misc_feature 1..120: note = Artificially Synthesized Probe
  source 1..120: mol_type = other DNA
tggaggtggtttagtgataaaggggtgaattgagggagtttggacaacaacgagactgttctctatcctaattgtggcaatagccatacaactctacacatggcttaaaaatcataaaat

SEQ ID NO: 9791 - DNA, 120 bp, synthetic construct
  misc_feature 1..120: note = Artificially Synthesized Probe
  source 1..120: mol_type = other DNA
attacccgtcactatttaattaaaaactgtaaataccatgcagctgcaaaatatcaaccaggccaccccaagaagtattctttttttgtttgagacagagagaggatctcactgttgccc

SEQ ID NO: 9792 - DNA, 120 bp, synthetic construct
  misc_feature 1..120: note = Artificially Synthesized Probe
  source 1..120: mol_type = other DNA
tatattcagtgcagcaaatgacacacgtttctttaacatctcttgcggtgtaaagagaaagacatagcgtttcatttcactcacttcattcgagttgtaccagggactgcacaagctatt

SEQ ID NO: 9793 - DNA, 120 bp, synthetic construct
  misc_feature 1..120: note = Artificially Synthesized Probe
  source 1..120: mol_type = other DNA
aaaaaaaaaaagtgagctgagagaagattaaaggaaacactgaccctctgggaagagagagccaacatcttagcccaggtagaaggagaagagaacagtaaaacagaagaacttaggcac

SEQ ID NO: 9794 - DNA, 120 bp, synthetic construct
  misc_feature 1..120: note = Artificially Synthesized Probe
  source 1..120: mol_type = other DNA
cgaggattattgaacaaagagaggagaaagagcaagagcccagatgggtaaatgtctcagacagggaaaaggttaactcctgcagagacgtgcctggcaatgtctggagacattagtggt

SEQ ID NO: 9795 - DNA, 120 bp, synthetic construct
  misc_feature 1..120: note = Artificially Synthesized Probe
  source 1..120: mol_type = other DNA
aaaaaaaaaaaagccatattggttgacattagagattaatgatctgaaaagttctttgcccctccccaagccttcaagaggcatcacagcccatttatttgacaggattttgttcaccat

SEQ ID NO: 9796 - DNA, 120 bp, synthetic construct
  misc_feature 1..120: note = Artificially Synthesized Probe
  source 1..120: mol_type = other DNA
ataaacccctgcccatatggaagccataaatgtgcaaagaaatggtaaatccatttactgaccctgaaagcccaggcacagatccacaattaattaccaaagctacaaggaacagaagaa

SEQ ID NO: 9797 - DNA, 120 bp, synthetic construct
  misc_feature 1..120: note = Artificially Synthesized Probe
  source 1..120: mol_type = other DNA
cgtttccccatcaatacatttaagagcttcaattccttccctccctgaccccttcctcatcacgactgatttccttttatggagaaatctgaaacagtaacccaacagatatttttaaag

SEQ ID NO: 9798 - DNA, 120 bp, synthetic construct
  misc_feature 1..120: note = Artificially Synthesized Probe
  source 1..120: mol_type = other DNA
gcggcgcccagtagcagcgcggccaccgccaccagcagcggcgcggccgccgccccccgccggcccccggtggccatggctgcgggagcgcggggtctcctcggatcagagcgcgcggcg

SEQ ID NO: 9799 - DNA, 120 bp, synthetic construct
  misc_feature 1..120: note = Artificially Synthesized Probe
  source 1..120: mol_type = other DNA
cccaacctcactctcaatacaaaagggacagcaccgaaagaacaagggaggccggaatggtggcattattcaatcaaatatacagagtgcttcctttaatatgtacacatttacaaaaat

SEQ ID NO: 9800 - DNA, 120 bp, synthetic construct
  misc_feature 1..120: note = Artificially Synthesized Probe
  source 1..120: mol_type = other DNA
agacaccctttgctctctcctttcatacagcgagtgccacgcacggaaactttacaaaaatagcaactatccgagaatactccattgttttcagcctgacagttactgaataatttatac

SEQ ID NO: 9801 - DNA, 120 bp, synthetic construct
  misc_feature 1..120: note = Artificially Synthesized Probe
  source 1..120: mol_type = other DNA
tcggccggctctgtgcccaatgcctgagttgcctgcctggtgccttcccaggggcccacctcccgcgcttacctgtggaagagccgcccgtaacaaccgtctccaccttgacctcggtga

SEQ ID NO: 9802 - DNA, 120 bp, synthetic construct
  misc_feature 1..120: note = Artificially Synthesized Probe
  source 1..120: mol_type = other DNA
aaaacactgcacgtccttcctgtgcctggccatggcctccaccagccacactgtgccatggccacacccactgctctgcacacccacccaccatgttccagaacattccctcccctctcc

SEQ ID NO: 9803 - DNA, 120 bp, synthetic construct
  misc_feature 1..120: note = Artificially Synthesized Probe
  source 1..120: mol_type = other DNA
acagcaggcaaaggtggctcctaggccagggcaaaactgcccacggagctacagcccaagagctggggccaggcagccatggcgccgtcagtccaggccctcagggcagctggacaaaca

SEQ ID NO: 9804 - DNA, 120 bp, synthetic construct
  misc_feature 1..120: note = Artificially Synthesized Probe
  source 1..120: mol_type = other DNA
cagtcacggcggccatccaggcagcggcagctgttgcagtcttccacccaggagcttccgtgtgggaacggagtgccccgggaccagcaggatctcccgaacccgatcactgtggggaga

SEQ ID NO: 9805 - DNA, 120 bp, synthetic construct
  misc_feature 1..120: note = Artificially Synthesized Probe
  source 1..120: mol_type = other DNA
cgtcaacacagatgccaccattgtagctgcagagcagagggtgggcatcaggtggccccccgtggtatgccaagtcccacccacccctgctgtggcccccagggtgccactcaccaaggc

SEQ ID NO: 9806 - DNA, 120 bp, synthetic construct
  misc_feature 1..120: note = Artificially Synthesized Probe
  source 1..120: mol_type = other DNA
tgaccaggtcgtagcagcggccgcggctgtggcagggatcgggaaggcagtcgttgggatctgggggcgaggacgccggtcagcgggcggggggtcaccggcgctcagggagggcttccc

SEQ ID NO: 9807 - DNA, 120 bp, synthetic construct
  misc_feature 1..120: note = Artificially Synthesized Probe
  source 1..120: mol_type = other DNA
acaggccaggcctctgtccatacgaaggtagatccctggggacccccaggcccctccgccctgggcctaacagtgccagccagagcccaagacccctgcccacctgagactgcccaggcc

SEQ ID NO: 9808 - DNA, 120 bp, synthetic construct
  misc_feature 1..120: note = Artificially Synthesized Probe
  source 1..120: mol_type = other DNA
cccaggccaccaggaaacccatcacaacaagcaatggccacagggggccaagcctggtgacctgtgacagccccgcctgcccacctggcacccagtggagagctgagcctgggacgcctt

SEQ ID NO: 9809 - DNA, 120 bp, synthetic construct
  misc_feature 1..120: note = Artificially Synthesized Probe
  source 1..120: mol_type = other DNA
gatgcaatcacagtaatagccgccaatcaggtttttgcaagaaaaagcgttaaggcatggcttcccttcacactcattggcgtctgtgaaagagacaaggtgggagccgtggggctcggg

SEQ ID NO: 9810 - DNA, 120 bp, synthetic construct
  misc_feature 1..120: note = Artificially Synthesized Probe
  source 1..120: mol_type = other DNA
ccaggcacagtcacccacgccacacccagggccggcgggcggcctcaggcctttgaactggagcagccccagccaggcaggggttgcagccctgccggccagccccactgtcacgggcat

SEQ ID NO: 9811 - DNA, 120 bp, synthetic construct
  misc_feature 1..120: note = Artificially Synthesized Probe
  source 1..120: mol_type = other DNA
actttatttttgtaaaaggaaagaaccacggcccttcctgagccgccctcaagccacacagccagcaccgaaggcctatcagcccagttcagctgccacaaatggggaaactgaggccgg

SEQ ID NO: 9812 - DNA, 120 bp, synthetic construct
  misc_feature 1..120: note = Artificially Synthesized Probe
  source 1..120: mol_type = other DNA
tccacccgctcgcgcccctctctcgggctccccagcttgctcacgcacagtgagcgccacggctcgaagcccgtgcccaccccagaccctgggccccagcccctctggttgccctgctga

SEQ ID NO: 9813 - DNA, 120 bp, synthetic construct
  misc_feature 1..120: note = Artificially Synthesized Probe
  source 1..120: mol_type = other DNA
tctctcctcactgtcctcacatggctgccgccatcagacacatcccatgctcagacacgcacctactgcactaaggagcctcccgagctcagggcccggctctcacagctgtgtgcccaa

SEQ ID NO: 9814 - DNA, 120 bp, synthetic construct
  misc_feature 1..120: note = Artificially Synthesized Probe
  source 1..120: mol_type = other DNA
tgtgacttgctcccagaagtgccaaacaccactaccgtccccaccttaagacaagcctcccctcaggcccccaagacaggcataggtcccgtgacccgctgtctaagcctcactttaagt

SEQ ID NO: 9815 - DNA, 120 bp, synthetic construct
  misc_feature 1..120: note = Artificially Synthesized Probe
  source 1..120: mol_type = other DNA
acaaagccagagacacactcaagggtgtcccctccactaagtcactgccatgggccccaaaagagcacacccaagaggagaacaacataggcaaagccaggactggggaagagagtgcat

SEQ ID NO: 9816 - DNA, 120 bp, synthetic construct
  misc_feature 1..120: note = Artificially Synthesized Probe
  source 1..120: mol_type = other DNA
caacaggccggagctcaggtcctgcaggcatacagcacacaggcaaacccacacctacctccaccctcacacagaacaggtggcaggaggggcccttgcggtacagttggggaaactgag

SEQ ID NO: 9817 - DNA, 120 bp, synthetic construct
  misc_feature 1..120: note = Artificially Synthesized Probe
  source 1..120: mol_type = other DNA
atggaagtggggggccatccccaacccgctcctagaaccctccctagccacgtcgagctgacaacagaccctcaatcccacctcttaagctccccttaaacccgttttcccacatccgcc

SEQ ID NO: 9818 - DNA, 120 bp, synthetic construct
  misc_feature 1..120: note = Artificially Synthesized Probe
  source 1..120: mol_type = other DNA
ttccttcgttcacatcaagtgtacagcaggcatgcctctgccaccaaggacggcaacctatagccagcggggctcggggaaagcaacagggggcaggggctgttgttccaataaggccag

SEQ ID NO: 9819 - DNA, 120 bp, synthetic construct
  misc_feature 1..120: note = Artificially Synthesized Probe
  source 1..120: mol_type = other DNA
tgaggtctgttgttgggggtctgagtgaggactgggacccaccaggctttaacagtcactgtagccgctggacaggaaccagcaggaccaggaagcagcaatagtgaggtcagaggatgg

SEQ ID NO: 9820 - DNA, 120 bp, synthetic construct
  misc_feature 1..120: note = Artificially Synthesized Probe
  source 1..120: mol_type = other DNA
ttgcctcctccccagcccgaaccctcaaggctaagtctaaacccctcctcctgtccccaggcaggggcaacagcagtggcacaagccagaggacaggcagacaagacaatagatgttcca

SEQ ID NO: 9821 - DNA, 120 bp, synthetic construct
  misc_feature 1..120: note = Artificially Synthesized Probe
  source 1..120: mol_type = other DNA
agctccaagcacagatacatttcctgaaacctgagcttctgagaggcccaggcctctgccaccattgtcacccgaggcagggaagaaggggtgggggcaaacaccatccccagggctctg

SEQ ID NO: 9822 - DNA, 120 bp, synthetic construct
  misc_feature 1..120: note = Artificially Synthesized Probe
  source 1..120: mol_type = other DNA
cataccaaagctttgaaccagacccccaatgtacaaggcggacatgccctgagttctccccagggctctgggccccagggccatggcaggaggaacagaccgatgcccacccaacacagg

SEQ ID NO: 9823 - DNA, 120 bp, synthetic construct
  misc_feature 1..120: note = Artificially Synthesized Probe
  source 1..120: mol_type = other DNA
ccagcatgacactactcctccccaaacctccatcaccacctgccatgcctacagagcacccggggtgcgtgcacacacgcagctgggagaatgtggcctcaccctgccagctacaagcca

SEQ ID NO: 9824 - DNA, 120 bp, synthetic construct
  misc_feature 1..120: note = Artificially Synthesized Probe
  source 1..120: mol_type = other DNA
cattcctccaagacctccctgcccccacacccactgctgccaactcgagcagaaaacacatcctcaggtagcgatgtggggccacgctggctcaggcccaggtgcagatgacaggctgcg

SEQ ID NO: 9825 - DNA, 120 bp, synthetic construct
  misc_feature 1..120: note = Artificially Synthesized Probe
  source 1..120: mol_type = other DNA
agcttctgcccctccagaataacaaaaccaaaaaaacccacaaacagggcagtgccacagaaggtcactgcaccaggatccactatctctgtctctgaacgatcttgggtcaccatcggg

SEQ ID NO: 9826 - DNA, 120 bp, synthetic construct
  misc_feature 1..120: note = Artificially Synthesized Probe
  source 1..120: mol_type = other DNA
gaaccacggcggccccaggcagtgcccgcccggcccctaggggcggcccggtgtgccccgtccgcgacccccgccgcccccgccgccccgctcacctgcacccagagcgccagcagcagc

SEQ ID NO: 9827 - DNA, 120 bp, synthetic construct
  misc_feature 1..120: note = Artificially Synthesized Probe
  source 1..120: mol_type = other DNA
aaccattaagcagttgtctactatttttatacgattacaaaatggccaaaaaaaaagagtcttctcccccctccccctttttggtgatgtgatcatacaggagacaggcacaaggttaac

SEQ ID NO: 9828 - DNA, 120 bp, synthetic construct
  misc_feature 1..120: note = Artificially Synthesized Probe
  source 1..120: mol_type = other DNA
ttcactaaaaactgtgaaaatttccggcatatgatgtttgaatatcaaacgcagagatttctgaagctttaatgccaatagttagtgagtctgtttagatggctgtctcccgctcatctg

SEQ ID NO: 9829 - DNA, 120 bp, synthetic construct
  misc_feature 1..120: note = Artificially Synthesized Probe
  source 1..120: mol_type = other DNA
agaaaaaagcatggctgaacaatgccaggtgagtccatagcaaagtgcctagtgaattcaggaggttagggagattcgtgtagactttgaaaactgtagtcaaagaaaaaaaagtaaaag

SEQ ID NO: 9830 - DNA, 120 bp, synthetic construct
  misc_feature 1..120: note = Artificially Synthesized Probe
  source 1..120: mol_type = other DNA
tttagggtgtgtgcactcatatgtatgtgtgcatgtgtacacacgtgttcttctaacagaagaaccaggccattacctcttcattctcctcatcaggactccccttcagagactgaagat

SEQ ID NO: 9831 - DNA, 120 bp, synthetic construct
  misc_feature 1..120: note = Artificially Synthesized Probe
  source 1..120: mol_type = other DNA
gtttaaaaggaaggtacaattttacagacatcaaatcattcatctaagagttaaagcaggatcaccaataaccaagcatctgggtccttgggttgaagctgagtaatgaccatagcagct

SEQ ID NO: 9832 - DNA, 120 bp, synthetic construct
  misc_feature 1..120: note = Artificially Synthesized Probe
  source 1..120: mol_type = other DNA
gataccctttattcatcctatcatcttaggacattctcagagaatgttaaaagtcagcacttcctgggccagagtttcagtcactgtcatttataacttcagatgaccacaatgcccttt

SEQ ID NO: 9833 - DNA, 120 bp, synthetic construct
  misc_feature 1..120: note = Artificially Synthesized Probe
  source 1..120: mol_type = other DNA
gcaatatcacagccagcaacaaatcagatctttagaagtgtctggttggttggttttgttttttaaagctgctgaggtgattctgatgcagctactggcttttgggaagcactgacaaaa

SEQ ID NO: 9834 - DNA, 120 bp, synthetic construct
  misc_feature 1..120: note = Artificially Synthesized Probe
  source 1..120: mol_type = other DNA
gataaaatttgtgggttacgggggtaaagaaagtcgaagagcaaagagaccatttggaaaagattgatttgtaacagcaaagagagaacaatgtgaattcctacctgatcacaggagcct

SEQ ID NO: 9835 - DNA, 120 bp, synthetic construct
  misc_feature 1..120: note = Artificially Synthesized Probe
  source 1..120: mol_type = other DNA
tagtcacagatcaccttaagagtttgtccctgcatcaagctttctatggatggctcagcataaatccatctctgctatgaaaaacaactcaagaaaaacaacagaaggtcaagtaccatg

SEQ ID NO: 9836 - DNA, 120 bp, synthetic construct
  misc_feature 1..120: note = Artificially Synthesized Probe
  source 1..120: mol_type = other DNA
gagagcatccaagacaagcagaagcagtcactgtgagctgaattttttatcggtcaactgcctctcccaaccccaacatgcatgcaaactacaaatttgagaatataaaaggaatgaaaa

SEQ ID NO: 9837 - DNA, 120 bp, synthetic construct
  misc_feature 1..120: note = Artificially Synthesized Probe
  source 1..120: mol_type = other DNA
ccaaataagaactacataccattctctctttccttcctctgtggctccgccaattcccatcatgagattatcggggatttttagctgactggttaatgttcaatatcacaaatcaacatc

SEQ ID NO: 9838 - DNA, 120 bp, synthetic construct
  misc_feature 1..120: note = Artificially Synthesized Probe
  source 1..120: mol_type = other DNA
ctctggtgctgatgtacaacttttagattttccttttcatgttttcaatattctgacatttcaccaccatggatagcggtgtgagtctgttttcaagcttctgcaaagctttccagggat

SEQ ID NO: 9839 - DNA, 120 bp, synthetic construct
  misc_feature 1..120: note = Artificially Synthesized Probe
  source 1..120: mol_type = other DNA
ctgaacccattattatctgccaggcactgtgtgtttatcatcatgcgtgtgccacttaatctttgtaacagttccatgaggcaaacacaattatgcttattttaaagatagggaacaggt

SEQ ID NO: 9840 - DNA, 120 bp, synthetic construct
  misc_feature 1..120: note = Artificially Synthesized Probe
  source 1..120: mol_type = other DNA
aaatctgaaaatgaagccaggaaaaaaaaaagggacagggatatgagagacctggttatagtgaaaacagcaatgactagaaacaagtaggcctggattcaggtcctggttctatctcga

SEQ ID NO: 9841 - DNA, 120 bp, synthetic construct
  misc_feature 1..120: note = Artificially Synthesized Probe
  source 1..120: mol_type = other DNA
cagagatccattcagctagaggtctcctacattccatacccacataggtaaactgctattttcagagaagagggtgctgatccttatcaggtaaataacaggaaaataagacgaattact

SEQ ID NO: 9842 - DNA, 120 bp, synthetic construct
  misc_feature 1..120: note = Artificially Synthesized Probe
  source 1..120: mol_type = other DNA
cttctgatttccaaatggactgcattctgaatgtggcagttgtttgggtcaaagcaaaattattccaacaggaataatattagacatggtaatcaggtcttcaggtcaaccaactgaggt

SEQ ID NO: 9843 - DNA, 120 bp, synthetic construct
  misc_feature 1..120: note = Artificially Synthesized Probe
  source 1..120: mol_type = other DNA
aaggaacttgaaatatagtaaaaggaaggacaggcatcagataatctgggtctgaactgtgaaggcattcaaacccattagccatttagttttagataagccacaaccttaccaagcctg

SEQ ID NO: 9844 - DNA, 120 bp, synthetic construct
  misc_feature 1..120: note = Artificially Synthesized Probe
  source 1..120: mol_type = other DNA
ggggttttggtaacaaaagccaaaaatcccggtatctactggatttaggtggccagaaatgcaatcatttgaagaacagatgcagaacaggggattatagttatctaatgtttgatcaac

SEQ ID NO: 9845 - DNA, 120 bp, synthetic construct
  misc_feature 1..120: note = Artificially Synthesized Probe
  source 1..120: mol_type = other DNA
aggaaattcctaccttctgtaggctgggcacagatcatgagattacgtgaaaattcaatgaaaccaatccagattatgaaagcgctggcttccatctagaatagtggtttcaaaatgtct

SEQ ID NO: 9846 - DNA, 120 bp, synthetic construct
  misc_feature 1..120: note = Artificially Synthesized Probe
  source 1..120: mol_type = other DNA
gagggaaatctcttagttgcaatcttttagtggtaccctctggtttggtagatctgttgcagtctttttggagaattctaagagaagacttggttgataggagttcctgagttatctcta

SEQ ID NO: 9847 - DNA, 120 bp, synthetic construct
  misc_feature 1..120: note = Artificially Synthesized Probe
  source 1..120: mol_type = other DNA
cccagatccctcctagctacttgaagagttagaaggaaatctcatattaagttgcaaccttttagtggcaccttctggtttggtggatctgttacagtctttttgcaaaattctaagaga

SEQ ID NO: 9848 - DNA, 120 bp, synthetic construct
  misc_feature 1..120: note = Artificially Synthesized Probe
  source 1..120: mol_type = other DNA
ctttcaggtggtctcaagccaggtggcaagcttccctgaagcttgtaacttaaaagtaacttattaactactctttaacctggcctaaaatccactgttacaaagctcatacctaagtaa

SEQ ID NO: 9849 - DNA, 120 bp, synthetic construct
  misc_feature 1..120: note = Artificially Synthesized Probe
  source 1..120: mol_type = other DNA
agactagaaaccaacccatgacatcaactagctctccatatgggacatttaacaacactacattttatggctagagtgtatcacttaagtcaaagtcaatattgggaggccaaggcgggt

SEQ ID NO: 9850 - DNA, 120 bp, synthetic construct
  misc_feature 1..120: note = Artificially Synthesized Probe
  source 1..120: mol_type = other DNA
aagggtagaaattctacttataacttgacaaaagggtaatgtgcacacatgtaacttaaacagtaatctcacttttaaattaaaaactgtaaagtactaatagaacccgaggagtatata

SEQ ID NO: 9851 - DNA, 120 bp, synthetic construct
  misc_feature 1..120: note = Artificially Synthesized Probe
  source 1..120: mol_type = other DNA
accacctcaactacactcaatctagtccaagtcactatcttttctcaaatgggtttcttcaagcctcctaactgatcctcctcctactggttcttacttccaaatcaatcaacacagtaa

SEQ ID NO: 9852 - DNA, 120 bp, synthetic construct
  misc_feature 1..120: note = Artificially Synthesized Probe
  source 1..120: mol_type = other DNA
agacttgaggggggaggggagacaaggcaaaggggatttaaacaaataatctaaaagatacaactgaaagaatgtaaggaaccattccccaaaatttctgataagcaaaaatacagggga

SEQ ID NO: 9853 - DNA, 120 bp, synthetic construct
  misc_feature 1..120: note = Artificially Synthesized Probe
  source 1..120: mol_type = other DNA
cgccacttactagctgtgtggccttaagacaagttactgtgtcttcatctttactaacaggagagtacctgatagagttgttttaaagataaataactcacaacagtatctggctctcga

SEQ ID NO: 9854 - DNA, 120 bp, synthetic construct
  misc_feature 1..120: note = Artificially Synthesized Probe
  source 1..120: mol_type = other DNA
aagcctgaagagagcttcccctaccaaagatcagataacgttagcatcataaagaaaagactacaatggcttgaaatacctcaaatatgtttcaatcaatgactcacagccccttcatga

SEQ ID NO: 9855 - DNA, 120 bp, synthetic construct
  misc_feature 1..120: note = Artificially Synthesized Probe
  source 1..120: mol_type = other DNA
aactcctcacctgacctaacaaatgacaaggaatttacctgccagcaaaacaaagcctctttaaaggaagatggcacaatccacatgctacaagcagggaaaattattaattggattttc

SEQ ID NO: 9856 - DNA, 120 bp, synthetic construct
  misc_feature 1..120: note = Artificially Synthesized Probe
  source 1..120: mol_type = other DNA
acttgaaatgtcaaattatcaataaaaagaggacagggaactaagcatgacacacttccaagtaccaccctcccaaagaaaaagctgaagttgtgaatggtaggaggctacaaagctaag

SEQ ID NO: 9857 - DNA, 120 bp, synthetic construct
  misc_feature 1..120: note = Artificially Synthesized Probe
  source 1..120: mol_type = other DNA
actcatccactgttaacatgtggaaagattttcaaaggtttggcaactctatcacaatcaagcatatcccacaactggctcttgaagatccatcagagtgaagaaacaaaacgtgtaagc

SEQ ID NO: 9858 - DNA, 120 bp, synthetic construct
  misc_feature 1..120: note = Artificially Synthesized Probe
  source 1..120: mol_type = other DNA
tcacttaggcactgggccaggaaaagaacataatggcatataagaactttccactggagtgcttcttcattcacttagataattactaacatccaccatactagacccctaaagtgatga

SEQ ID NO: 9859 - DNA, 120 bp, synthetic construct
  misc_feature 1..120: note = Artificially Synthesized Probe
  source 1..120: mol_type = other DNA
tacagcagatttacctcccccaaaatagcttacaacacttctctgctcaaaaatttaaaacttatagactgaaacccaaatcatcagtttgggcattcaaggcttcctatttatttactg

SEQ ID NO: 9860 - DNA, 120 bp, synthetic construct
  misc_feature 1..120: note = Artificially Synthesized Probe
  source 1..120: mol_type = other DNA
aatttacctgttaacttctttgctgtcattagaaagtaagctccatgaagataagggctttgttttccttaccaatgcaacctggctgccctgaataatacggtgggcattcaaaaatgc

SEQ ID NO: 9861 - DNA, 120 bp, synthetic construct
  misc_feature 1..120: note = Artificially Synthesized Probe
  source 1..120: mol_type = other DNA
tagtggctctcttaagaaaaattcccattctctgctctcttttacagcaacattctttgaaaatgttatctacaatggttccctcaattccttctgtggccttgtctcctgaaaccactc

SEQ ID NO: 9862 - DNA, 120 bp, synthetic construct
  misc_feature 1..120: note = Artificially Synthesized Probe
  source 1..120: mol_type = other DNA
taacaataacagccactttgtacgaggaacttatcaaccagacatcccaataagcatgttacatatatttcattgaaccctcaaacaaccctatgagatctctgaggctttggagaggag

SEQ ID NO: 9863 - DNA, 120 bp, synthetic construct
  misc_feature 1..120: note = Artificially Synthesized Probe
  source 1..120: mol_type = other DNA
actattctccttcaaagtgttaagggcagtacttaaactttcagtctctcccatttctattaaaaagctcaagacagtggttttcaaaactagctgcagagtcaccgaggagctttgtgt

SEQ ID NO: 9864 - DNA, 120 bp, synthetic construct
  misc_feature 1..120: note = Artificially Synthesized Probe
  source 1..120: mol_type = other DNA
tccgcttctttaaaccagggtcagtcctggctaaagagaactaagagctccaaaacacctttacaagtctactaagtgtaggaagtagaagagctaaaacttacgtgttaataactccat

SEQ ID NO: 9865 - DNA, 120 bp, synthetic construct
  misc_feature 1..120: note = Artificially Synthesized Probe
  source 1..120: mol_type = other DNA
agagaggttgacagagagaaggagaatattatattagcttttgctttggggggaagagggatgaggaatccaaatgtacagactaaaagtaagtacctattgacaggaaaatgacctcaa

SEQ ID NO: 9866 - DNA, 120 bp, synthetic construct
  misc_feature 1..120: note = Artificially Synthesized Probe
  source 1..120: mol_type = other DNA
cacctaacctgtctccttacacttgaactgactctggggcacgctgaagttctctttcctataaaagctttcaaggtaaatattcctataaatgcttcctacaaatgctttcaaggtaaa

SEQ ID NO: 9867 - DNA, 120 bp, synthetic construct
  misc_feature 1..120: note = Artificially Synthesized Probe
  source 1..120: mol_type = other DNA
tgctatcaaaaattacagtaaatctggcatagacacattgccttaagctctatgcagatttcccttggaaagcaacacggtattaagcagcaagagctataaggatattcctatcttctg

SEQ ID NO: 9868 - DNA, 120 bp, synthetic construct
  misc_feature 1..120: note = Artificially Synthesized Probe
  source 1..120: mol_type = other DNA
ttcagcccccaaatcaaaattgaagtcaacaggcaacacattattaacatggaaatgttgtcaagaacatagaggtatacagaggtcaagagcataaacatcagaaagggactgtggctg

SEQ ID NO: 9869 - DNA, 120 bp, synthetic construct
  misc_feature 1..120: note = Artificially Synthesized Probe
  source 1..120: mol_type = other DNA
tttacgggggtcgttttttctagggtctaagaaccaatgtctactagatttgtttcaccaaaaagtagagagggttaaggggtaaaaacagagagccacacacttaaaagcacacaataa

SEQ ID NO: 9870 - DNA, 120 bp, synthetic construct
  misc_feature 1..120: note = Artificially Synthesized Probe
  source 1..120: mol_type = other DNA
acccttgtcaggccaatgaactactcactgtccctagagactgcaaaacttcaaagaaaggaagagtattcctacttacaccaatggaatgaagatgtatcttggactgtgtaaaaagaa

SEQ ID NO: 9871 - DNA, 120 bp, synthetic construct
  misc_feature 1..120: note = Artificially Synthesized Probe
  source 1..120: mol_type = other DNA
gagtaaataaatgaggggggaagacacctcttcctaacagaattccatttaatgcaggtaggaagtagaacaaccaccctttagtaaacaacacagcaataattgctgtaggaaaaagtc

SEQ ID NO: 9872 - DNA, 120 bp, synthetic construct
  misc_feature 1..120: note = Artificially Synthesized Probe
  source 1..120: mol_type = other DNA
acaagtcaaaatcatgaaccccctgtggtgtagagaagggtacagtatcttctgtggcattcctgtaaaacaatgcgtaacctctaataatgagaaaacaccaatttgtggaacgctata

SEQ ID NO: 9873 - DNA, 120 bp, synthetic construct
  misc_feature 1..120: note = Artificially Synthesized Probe
  source 1..120: mol_type = other DNA
ccagcactcccattttatgcttgttggaagaacaagaagcactcaagaaaagatagatacctggttctacttagtctttcagacacaaagtgcagtctggaacaatgacaattagctttt

SEQ ID NO: 9874 - DNA, 120 bp, synthetic construct
  misc_feature 1..120: note = Artificially Synthesized Probe
  source 1..120: mol_type = other DNA
cgtacctggagaccttggctaaatctctaattctcacaggtttagggaattccatggggtttctaagtatcatatcttcaaatacaagcagttttgccctaccttttccaatttccatgc

SEQ ID NO: 9875 - DNA, 120 bp, synthetic construct
  misc_feature 1..120: note = Artificially Synthesized Probe
  source 1..120: mol_type = other DNA
cattctttaactctttaagtgtgagcctttattggtttcaatcaaagccctcaggtttttgccaagtctagttggaattcgaactccaaattctgccttccctgcattaggcaatgatga

SEQ ID NO: 9876 - DNA, 120 bp, synthetic construct
  misc_feature 1..120: note = Artificially Synthesized Probe
  source 1..120: mol_type = other DNA
gcagatatatactggttctgtcaataaacaatcatcctgtttggaaataaagcaaaaagactatgtatccttgcagtgtaccactgggacattacctaacaagcccacccaggaaacatc

SEQ ID NO: 9877 - DNA, 120 bp, synthetic construct
  misc_feature 1..120: note = Artificially Synthesized Probe
  source 1..120: mol_type = other DNA
acacctacctccatttggggaaaaaattaacaaaatggaaaacaggctggttacatgtgggtatgaaaacctacagttgccctctgtcccgggcaacctaatttttttttttaagcaaaa

SEQ ID NO: 9878 - DNA, 120 bp, synthetic construct
  misc_feature 1..120: note = Artificially Synthesized Probe
  source 1..120: mol_type = other DNA
acaatgaggattagtaacacaatggaggactgttatgccctgtccttcagaagtgctgaggtaagagaaaacatgactacagggagattactcaaaaaagtttggaatccctaaattcta

SEQ ID NO: 9879 - DNA, 120 bp, synthetic construct
  misc_feature 1..120: note = Artificially Synthesized Probe
  source 1..120: mol_type = other DNA
tgttttgagaattggagctgcttttaatcctatggtcagctacacagctgcaggatgggccctagattccctattcaggaattcagatcttaaaacaccaaaagtgataaaagtagatac

SEQ ID NO: 9880 - DNA, 120 bp, synthetic construct
  misc_feature 1..120: note = Artificially Synthesized Probe
  source 1..120: mol_type = other DNA
atgaatcccaccatgtataccagaagaggtgacaaaaataaggctatgacactatataaccgaaagactgggatgcaagtgatcagggttcccaatctctttctctggtctaaaaaatag

SEQ ID NO: 9881 - DNA, 120 bp, synthetic construct
  misc_feature 1..120: note = Artificially Synthesized Probe
  source 1..120: mol_type = other DNA
aaaaaagaagtatgtatctctttttctcttgaagcaaaagaagcactgcctccctattctggaatatgactacacttagcccgtatcaaaaatgaattggagggtcccggaatggcggct

SEQ ID NO: 9882 - DNA, 120 bp, synthetic construct
  misc_feature 1..120: note = Artificially Synthesized Probe
  source 1..120: mol_type = other DNA
atttttatattttatcagtccaaattgccgttcgtccttccaaagagattttcaacaagtcccacctccttccaagaaaatgtcccgggttaatgagttcctacttgctttatccacact

SEQ ID NO: 9883 - DNA, 120 bp, synthetic construct
  misc_feature 1..120: note = Artificially Synthesized Probe
  source 1..120: mol_type = other DNA
agagtataataaaacttggtagggaccatctattcatcgacataattttatagacccacagaggatgtaggtcaaagcttatgtctctacaggccaatacatggcagaactggggcaaaa

SEQ ID NO: 9884 - DNA, 120 bp, synthetic construct
  misc_feature 1..120: note = Artificially Synthesized Probe
  source 1..120: mol_type = other DNA
gctcaagtgttacactgaagcaaccaacaatcatccatacactgtccattgcccccaagatatgtaagttcactatggcattcaaaaccaaacactggatcctctaatttaatactgtac

SEQ ID NO: 9885 - DNA, 120 bp, synthetic construct
  misc_feature 1..120: note = Artificially Synthesized Probe
  source 1..120: mol_type = other DNA
acagttacatgcagccttaatacctcctaagtgactcctctgtggatgaaccctctctcaactgtatttgcaatacagctaacaggcaatttcacatacttccttacatcactctatcag

SEQ ID NO: 9886 - DNA, 120 bp, synthetic construct
  misc_feature 1..120: note = Artificially Synthesized Probe
  source 1..120: mol_type = other DNA
ttaaaagagtacaacagcatgcagaagtagtacagaggagttcctagaagttatattctttctccagagagcaatattattcccaaaagggactctactcacttcacagcttggaaggta

SEQ ID NO: 9887 - DNA, 120 bp, synthetic construct
  misc_feature 1..120: note = Artificially Synthesized Probe
  source 1..120: mol_type = other DNA
aatctacacagatgcaaagagaaagatggtcatatgaagatggaggcagcaactgcagtgatgtagctacaggccaagaacaccaaggactagcacaatatcagaagctggaaaaagaca

SEQ ID NO: 9888 - DNA, 120 bp, synthetic construct
  misc_feature 1..120: note = Artificially Synthesized Probe
  source 1..120: mol_type = other DNA
taatcgttattttagagagtacttctactcattaaaagaagtgaactgtgaaacagcctccagcaggtccttctgttggcactgtcacaggcaatgaaagctccgtgtgtgttgttggcc

SEQ ID NO: 9889 - DNA, 120 bp, synthetic construct
  misc_feature 1..120: note = Artificially Synthesized Probe
  source 1..120: mol_type = other DNA
gaaagtttctgaaaattgctctgtcattacttctgagtgatgagctgaagaataaagcatgaaccaaatgaggtgagtatcttcttatacacagctagtgagactataaactgacactgc

SEQ ID NO: 9890 - DNA, 120 bp, synthetic construct
  misc_feature 1..120: note = Artificially Synthesized Probe
  source 1..120: mol_type = other DNA
aaacagacactgaagaggtgtctctgatagagaaagactgtgtttttctcctcagtacaggcatatccagtcacctcctagttattcttagtcatcattccagttcaagttctacaaatc

SEQ ID NO: 9891 - DNA, 120 bp, synthetic construct
  misc_feature 1..120: note = Artificially Synthesized Probe
  source 1..120: mol_type = other DNA
gccacatcaggttcttaaattaaaccactatatcaggtcattaaaccatttactttgcaatagttaagaagagggttatgggggttacgaggtgggaggggatgtgagaaaagcgatatt

SEQ ID NO: 9892 - DNA, 120 bp, synthetic construct
  misc_feature 1..120: note = Artificially Synthesized Probe
  source 1..120: mol_type = other DNA
agaaacagatctaaaagttcacatggaataaaggaccaacagcaagaaatttgcaagaaggcatgatgcaaatacacattaccagacagccagatttgctgcaaaactatagagagcctc

SEQ ID NO: 9893 - DNA, 120 bp, synthetic construct
  misc_feature 1..120: note = Artificially Synthesized Probe
  source 1..120: mol_type = other DNA
ttaagatgctgtttgaaatctggatgggaaaacgcacagtctcataaagccaacaggtggtgagaaatggaaaagagcaattaatatattgctggtaacagttaaaattggaaccaccat

SEQ ID NO: 9894 - DNA, 120 bp, synthetic construct
  misc_feature 1..120: note = Artificially Synthesized Probe
  source 1..120: mol_type = other DNA
cgagccactatgcccagccatgaaattctgtttctgagaacataaactacacattcctctgcataaggaaacaggttcactggaggagagtctgtaatagataaaaactaattatattct

SEQ ID NO: 9895 - DNA, 120 bp, synthetic construct
  misc_feature 1..120: note = Artificially Synthesized Probe
  source 1..120: mol_type = other DNA
ttgaacaacaaaaatgccccctacccacaaagagacaaaactagttaaccctcgtattttattcccacctttccttacttttcaaggcttaccacctttctatcctgcaaaatcttttgg

SEQ ID NO: 9896 - DNA, 120 bp, synthetic construct
  misc_feature 1..120: note = Artificially Synthesized Probe
  source 1..120: mol_type = other DNA
tgagaggtgtacagttaacaagtctggataagatatgaagatgttaccatactccagtggcagagcagagcaccactaaacagtaacacaagaataagagcttcacatcttttgttcctt

SEQ ID NO: 9897 - DNA, 120 bp, synthetic construct
  misc_feature 1..120: note = Artificially Synthesized Probe
  source 1..120: mol_type = other DNA
cacagttagactattaccacagagaattgagaatgctctgttgactctaagaacatagatctttcctgtgtttgtttcacactgcttttgagctaggtagtgagtacctgtgaatggttt

SEQ ID NO: 9898 - DNA, 120 bp, synthetic construct
  misc_feature 1..120: note = Artificially Synthesized Probe
  source 1..120: mol_type = other DNA
aaataaaactgagatcatcccagagcgtacaattgccagattaacagttttcagggtaagagttagggtcactgtggggcaggaatgagaaatcttgaaattgctgagtcacatgaaaaa

SEQ ID NO: 9899 - DNA, 120 bp, synthetic construct
  misc_feature 1..120: note = Artificially Synthesized Probe
  source 1..120: mol_type = other DNA
gaaaaaactcggatacatacttcgtcttaacccattctcatctgtcacatgacctaggttgtgtcagctttctacagatatctgtagtaatgtggaacaaatgtaccagagccaatactt

SEQ ID NO: 9900 - DNA, 120 bp, synthetic construct
  misc_feature 1..120: note = Artificially Synthesized Probe
  source 1..120: mol_type = other DNA
aatggatacaggtaggcagggccaggtcacacagaacctggcaatccatgttaatcttataaaacaatataagcaatcctcatctttcctcatgctcttttatttatctcagaccctgtt

SEQ ID NO: 9901 - DNA, 120 bp, synthetic construct
  misc_feature 1..120: note = Artificially Synthesized Probe
  source 1..120: mol_type = other DNA
aatttccaaccagaaaatacccagaagcatcttctaacactaaaacccacgtctctccaggaaagtttttccttgtgcatcgtacctcacaattcactctttgtcctcttcaagcttagt

SEQ ID NO: 9902 - DNA, 120 bp, synthetic construct
  misc_feature 1..120: note = Artificially Synthesized Probe
  source 1..120: mol_type = other DNA
ccgcacatggcctactgtgtcttctttagagaataagactgttatgtttcaagaataaagcaaatgacaaatagtgaaaggctctcagttattcaaagtactgccattccagagcagctc

SEQ ID NO: 9903 - DNA, 120 bp, synthetic construct
  misc_feature 1..120: note = Artificially Synthesized Probe
  source 1..120: mol_type = other DNA
acagaaaaacatcttctttctcactttgaaaatacggtttattggaaaagagtatggtgtctggagtcagtgaacactgagttccaaatcctggccccaccacttagctagctattatca

SEQ ID NO: 9904 - DNA, 120 bp, synthetic construct
  misc_feature 1..120: note = Artificially Synthesized Probe
  source 1..120: mol_type = other DNA
gggggatggatcaggaggtctgctaataataggaagccagaggaaacgttattgccccatttctctatttctttttacggcaaatactcattattctaatttgtctcttctcactgtttc

SEQ ID NO: 9905 - DNA, 120 bp, synthetic construct
  misc_feature 1..120: note = Artificially Synthesized Probe
  source 1..120: mol_type = other DNA
gtactttggttgaatctttctagatgagtccaagagcctctaaatgggcttctagctctcacccttgaccactttcaggatattatcatgaacatagcagccagcctaatattgtataaa

SEQ ID NO: 9906 - DNA, 120 bp, synthetic construct
  misc_feature 1..120: note = Artificially Synthesized Probe
  source 1..120: mol_type = other DNA
tgagccactgcacccagtctaatcccaaccatacacaacttgaatggaaacttgctgagggtactatagatgttccagagtaaaaacgtttccgcttttacacatggtaaaatacaaaat

SEQ ID NO: 9907 - DNA, 120 bp, synthetic construct
  misc_feature 1..120: note = Artificially Synthesized Probe
  source 1..120: mol_type = other DNA
actgcttcaatgggagattattctgcagtagtgccttaactgtagaacagtgatgatgataaactcatcctaaatttaggactactgacaggaacaagtgaccacagtaactgttcatct

SEQ ID NO: 9908 - DNA, 120 bp, synthetic construct
  misc_feature 1..120: note = Artificially Synthesized Probe
  source 1..120: mol_type = other DNA
aggttggggtgggaggtggggaaagcaggtcaagcatggaatagagcatgaataaaaatgcacagtcagaaaagtaaaaagctatgtcctagatacaaagcagtagtaataggtagaaat

SEQ ID NO: 9909 - DNA, 120 bp, synthetic construct
  misc_feature 1..120: note = Artificially Synthesized Probe
  source 1..120: mol_type = other DNA
gctctctgatccacttttcaagattcgatcccacagaaacgagagcaccaatacaataatgtttactatcaaggtaactgaaagcaactgtatttcccaaaggagaatggctgagtatat

SEQ ID NO: 9910 - DNA, 120 bp, synthetic construct
  misc_feature 1..120: note = Artificially Synthesized Probe
  source 1..120: mol_type = other DNA
gccagagatgccgctaaccatactacaacacaggacagtttcctacaagaaaatgtcagtagagctgacactaagaaaccttgctgtatatgaaccactgataagaataaaatcttagct

SEQ ID NO: 9911 - DNA, 120 bp, synthetic construct
  misc_feature 1..120: note = Artificially Synthesized Probe
  source 1..120: mol_type = other DNA
aatgagtaaaatgagcccaaaatggggcccaaaggattaaatgatttgcccagagtcataagccaagtcagactgtcaaaccgttaaagcaaactgataagaaaaagatgctcagggcca

SEQ ID NO: 9912 - DNA, 120 bp, synthetic construct
  misc_feature 1..120: note = Artificially Synthesized Probe
  source 1..120: mol_type = other DNA
tctgagtggggaggtaactagttccccagcagaagccttaatcccattaaggtttatcagacaagtgtataacagaaatgttcatttcttctcagaaggaggttatgaattatatcacac

SEQ ID NO: 9913 - DNA, 120 bp, synthetic construct
  misc_feature 1..120: note = Artificially Synthesized Probe
  source 1..120: mol_type = other DNA
ttcagagttggaaactacggtggaaacgtttccatttatggcacattttctgattggttttataactcatgttactaactatagaatcatagacgagaagaatccccggaaccaagcctc

SEQ ID NO: 9914 - DNA, 120 bp, synthetic construct
  misc_feature 1..120: note = Artificially Synthesized Probe
  source 1..120: mol_type = other DNA
ggtcaacagaatatggtggatgtggtactagatgactttccaggacaggttataaatgggtatgcagcttcaactgagcacagagacttcatgttaagagatattataaccctgagaatt

SEQ ID NO: 9915 - DNA, 120 bp, synthetic construct
  misc_feature 1..120: note = Artificially Synthesized Probe
  source 1..120: mol_type = other DNA
ctcttagataaaagagcactaactgagggtcatgttcccgacgttagttttatttgcttgtagttgggttttcttcggccttcacaagtgtgtcaaaaaaaattcagtaagttgccagca

SEQ ID NO: 9916 - DNA, 120 bp, synthetic construct
  misc_feature 1..120: note = Artificially Synthesized Probe
  source 1..120: mol_type = other DNA
agcttttgctgaatgcttcctttgttccgggcattgtgctacaacattacatgacttttcatcatttcatcattataacaactctatgaaacggtgcctactatccccatactacagatg

SEQ ID NO: 9917 - DNA, 120 bp, synthetic construct
  misc_feature 1..120: note = Artificially Synthesized Probe
  source 1..120: mol_type = other DNA
atcttaaactgttgaggtatatcaacatagacaaaatctgaatgccaaagtgagtttcactctaggatcaggttatctggcagctcctgaaacaggacagtttcaggaaccctgtacaaa

SEQ ID NO: 9918 - DNA, 120 bp, synthetic construct
  misc_feature 1..120: note = Artificially Synthesized Probe
  source 1..120: mol_type = other DNA
tatccagaattgaaccttaattctcacactttaccaccaccactggaacccaagacaccattctctcactaggttattatagtagccccctaactcttttttttttttttgcttctgtcc

SEQ ID NO: 9919 - DNA, 120 bp, synthetic construct
  misc_feature 1..120: note = Artificially Synthesized Probe
  source 1..120: mol_type = other DNA
actatagtaagttggggaccatctgtcaaggttcctaaaggtgacatacaggtgctagcaactacagtctaaaaaaataaagccccaattctcaacaaatcagtaactgattctggaaac

SEQ ID NO: 9920 - DNA, 120 bp, synthetic construct
  misc_feature 1..120: note = Artificially Synthesized Probe
  source 1..120: mol_type = other DNA
atctgtgatcagtgatctctgacactgccattgtaatttctggaggtaccacgaaccgcacccataaaagatggaaaacttaactgataaaaatgtgtgttctcactactccactgaatg

SEQ ID NO: 9921 - DNA, 120 bp, synthetic construct
  misc_feature 1..120: note = Artificially Synthesized Probe
  source 1..120: mol_type = other DNA
gaccattctgaaaatctaaggcccttaagaattacactacatcagccaggtgcagtggctcatgcctgtaatcccagcactctgggaggccaaggagggagaactgcttgagcccagtag

SEQ ID NO: 9922 - DNA, 120 bp, synthetic construct
  misc_feature 1..120: note = Artificially Synthesized Probe
  source 1..120: mol_type = other DNA
atgtgactgaactgcaatctcgtgataaaactgaaacagatgcaaagttaagttgactctgactctcatggataactgagaggttcaagacacaggtcgaaaaagtaactgcagatgagg

SEQ ID NO: 9923 - DNA, 120 bp, synthetic construct
  misc_feature 1..120: note = Artificially Synthesized Probe
  source 1..120: mol_type = other DNA
ttcaacactattacatattagagactgagcaatctggacaaagtcacacagcttatcagtaccagtaggaattcaaactcaggtctgactcaacagtctgcattcttaaatatacctcaa

SEQ ID NO: 9924 - DNA, 120 bp, synthetic construct
  misc_feature 1..120: note = Artificially Synthesized Probe
  source 1..120: mol_type = other DNA
aatttacaactggctctctcatcagactggcagactgggtctaatccaaggtcagatgacatgggggattatggaagccaataacaatcatatttaaataaatgtcctttacagaacatc

SEQ ID NO: 9925 - DNA, 120 bp, synthetic construct
  misc_feature 1..120: note = Artificially Synthesized Probe
  source 1..120: mol_type = other DNA
gagaccaaaggagagttcaatgataggccctctcacagaaccttgtgccttaccatacttgtcagttacaattttattcactcgattcaagcattttttggatgcctcatatgtttcaag

SEQ ID NO: 9926 - DNA, 120 bp, synthetic construct
  misc_feature 1..120: note = Artificially Synthesized Probe
  source 1..120: mol_type = other DNA
atagaatgtagagatgaaaagaaaaaaaaatctattcatctctgcatcccctcagagaatgtacctgaccaccatgaaagcaagggccatgtttgtcctattcaggtccttgaacaaagg

SEQ ID NO: 9927 - DNA, 120 bp, synthetic construct
  misc_feature 1..120: note = Artificially Synthesized Probe
  source 1..120: mol_type = other DNA
ccagataaattaaatcaaaatttaatcgggggtgggtcctgggattttccctttaagtgtttcccacgtgatctgaatgtgcagcccaagttgagaatcaccaatttacagcaataaagt

SEQ ID NO: 9928 - DNA, 120 bp, synthetic construct
  misc_feature 1..120: note = Artificially Synthesized Probe
  source 1..120: mol_type = other DNA
catgaagaagactgccacagtctttttcaattacactttgaaaccctctgtcctggttttcaagcacaagctgatcttcacctcattatagatactcaaactgccacccgtcttattttt

SEQ ID NO: 9929 - DNA, 120 bp, synthetic construct
  misc_feature 1..120: note = Artificially Synthesized Probe
  source 1..120: mol_type = other DNA
ctgcctattatcattactgttagaaacagtaaaatcctagtgttggcaggggcctttcaataatccaattttccagtcgaatagttctcagggtgtagttaccatcagcatcatttggga

SEQ ID NO: 9930 - DNA, 120 bp, synthetic construct
  misc_feature 1..120: note = Artificially Synthesized Probe
  source 1..120: mol_type = other DNA
cagctgggccccaattaacagaagaaaaactgaggttcaggtgtgagatggatggagtaatttgtcaaaggcggctcaatttttaatgggcaaaattaacattcaaatccaagttgtatg

SEQ ID NO: 9931 - DNA, 120 bp, synthetic construct
  misc_feature 1..120: note = Artificially Synthesized Probe
  source 1..120: mol_type = other DNA
atattggttcaaggagagatgatggtggctgtggagatgagtgaaatcaacagatccaagatatattttagagagtattgtagaagactaggaatgggagtgaccagacaggaatgaaga

SEQ ID NO: 9932 - DNA, 120 bp, synthetic construct
  misc_feature 1..120: note = Artificially Synthesized Probe
  source 1..120: mol_type = other DNA
cctgatagtctcttctggaagtcggtatcacttgtgcttaatttctactcttttgtgccctctatacagcctctactacaaatcttttttgaagaagcacagggagaaataacttgggga

SEQ ID NO: 9933 - DNA, 120 bp, synthetic construct
  misc_feature 1..120: note = Artificially Synthesized Probe
  source 1..120: mol_type = other DNA
agtttaaaaaaatcattcaacacccacataaattctgatatgcactaggctgaacagctgttaaccactgagaagctgggcactgcatcctctccctgggtcaaaactctatatgctaat

SEQ ID NO: 9934 - DNA, 120 bp, synthetic construct
  misc_feature 1..120: note = Artificially Synthesized Probe
  source 1..120: mol_type = other DNA
cagctggagtacagtataacacagaaacagcaagtgcactaagagcatcaaatccttccccccaaaattgtttatctcttccagactcctattcacacttattcccctgacttaatttta

SEQ ID NO: 9935 - DNA, 120 bp, synthetic construct
  misc_feature 1..120: note = Artificially Synthesized Probe
  source 1..120: mol_type = other DNA
ttcataagaatgactcatccttcaaaggaaaaattcagatgaaaaggtgtctgcactatgtagtgtgttaaaatttgttctcaagcctctccagctaccctcaggagtgaacagtggcaa

SEQ ID NO: 9936 - DNA, 120 bp, synthetic construct
  misc_feature 1..120: note = Artificially Synthesized Probe
  source 1..120: mol_type = other DNA
tacaggacacacataaatttcacctctaaccaggaatcctgtgatagaattcattaaacctattctcactcaactacccccagtggcttatgaatcaatcctaaaggcatcagacacaag

SEQ ID NO: 9937 - DNA, 120 bp, synthetic construct
  misc_feature 1..120: note = Artificially Synthesized Probe
  source 1..120: mol_type = other DNA
tacataaaagcataataccaaaaataggcactaactgattgttagtttccgtccctctcctacaacagcaccctgactttggaaactaaccctccacgaactgaaagcattctcagaata

SEQ ID NO: 9938 - DNA, 120 bp, synthetic construct
  misc_feature 1..120: note = Artificially Synthesized Probe
  source 1..120: mol_type = other DNA
ttgtttatctggttctttgaactgaaaatccttttatattcccacctgtgagtgtacacaacaaggtgaagcaaatgcattaaacccagtaggtctcaggacaggaagcatttacactca

SEQ ID NO: 9939 - DNA, 120 bp, synthetic construct
  misc_feature 1..120: note = Artificially Synthesized Probe
  source 1..120: mol_type = other DNA
aagttaacctgtatgtcttatgcaacttccaaagtcccaaagaaagtaatacaaaattaagtggttttgagatactagtcagctttttcggaaagagggttagagaggacttacttcctt

SEQ ID NO: 9940 - DNA, 120 bp, synthetic construct
  misc_feature 1..120: note = Artificially Synthesized Probe
  source 1..120: mol_type = other DNA
aaatataatacctcccagtgaaataaagggaaaagcagaagtcaggtgagaatatttacatatatgtacccattcagcagttctgtagaagtcattatcttctttgggaggccgaggcag

SEQ ID NO: 9941 - DNA, 120 bp, synthetic construct
  misc_feature 1..120: note = Artificially Synthesized Probe
  source 1..120: mol_type = other DNA
tccaaatcacatgtttcctatgctaccccaaacaaagggagtattttctacagtggcattacaacagaccaagtaacagcagaggtaaaacaagtttcacatgtctgtggctctttgttt

SEQ ID NO: 9942 - DNA, 120 bp, synthetic construct
  misc_feature 1..120: note = Artificially Synthesized Probe
  source 1..120: mol_type = other DNA
caccaggagttggatattctaaactgggtttctgattcttaacagtgagaatgaagtcaagctccttatttggtggttagaggagaggatttggccagaaataattcttttaggattgac

SEQ ID NO: 9943 - DNA, 120 bp, synthetic construct
  misc_feature 1..120: note = Artificially Synthesized Probe
  source 1..120: mol_type = other DNA
ttttctgaagcctctttactcattcttttgttctctactctagcagctaaagacatctcctaaagaaacaactagtgtgcctccatacaacccctcagtaagcactcagtattgagacta

SEQ ID NO: 9944 - DNA, 120 bp, synthetic construct
  misc_feature 1..120: note = Artificially Synthesized Probe
  source 1..120: mol_type = other DNA
aaaaaaaaaaaaagaagttgacaggcctaaaaggtttcacatttagatgtttctttttttggaaaaggtgaagatctggctgggcacagtggtgcacatccttaggtagttccagctaca

SEQ ID NO: 9945 - DNA, 120 bp, synthetic construct
  misc_feature 1..120: note = Artificially Synthesized Probe
  source 1..120: mol_type = other DNA
gttctgggccctggttttcccaatggtaaaacagaggaggtagggacacaaacgtcctacttcatagaaaagttataagactttaaaggcgatggtttataaaaagtaattagcacacag

SEQ ID NO: 9946 - DNA, 120 bp, synthetic construct
  misc_feature 1..120: note = Artificially Synthesized Probe
  source 1..120: mol_type = other DNA
tttttctactagggctatcacaattctggccttcatttcatttgacaggaaggcatgggtttataccctaaccagaacaacaatgaacaggatttctgcctccactcctctaatccaggg

SEQ ID NO: 9947 - DNA, 120 bp, synthetic construct
  misc_feature 1..120: note = Artificially Synthesized Probe
  source 1..120: mol_type = other DNA
ccttggcctgatactcaaaggcttcctccatgagtataatcttcattaaccttggtcatttcctttttctcatactagattccaaattgtattccatgattgtggctgcttatactgctc

SEQ ID NO: 9948 - DNA, 120 bp, synthetic construct
  misc_feature 1..120: note = Artificially Synthesized Probe
  source 1..120: mol_type = other DNA
tttaagaatgagttataactgagtttctaccaaattaaaacaacgatgcttacaacagcttacagggctcctgatctcaccttctaccactcattctatacctggatcagcatgcatgct

SEQ ID NO: 9949 - DNA, 120 bp, synthetic construct
  misc_feature 1..120: note = Artificially Synthesized Probe
  source 1..120: mol_type = other DNA
ttctcatctgtggtacaaccacaggacttctaaaaaattacccaggtgattctagtgtatagcaaaagttgagaaccatgcaatttgaacacaacaaatgttaactgggtgagagtcctc

SEQ ID NO: 9950 - DNA, 120 bp, synthetic construct
  misc_feature 1..120: note = Artificially Synthesized Probe
  source 1..120: mol_type = other DNA
atggagatacctgctgacacagaagcaccaggtcatgagcacatctgacataaaacattacaaacttaaagcagtattttttaaaatctaaagggcttagggaagacagccatgctccta

SEQ ID NO: 9951 - DNA, 120 bp, synthetic construct
  misc_feature 1..120: note = Artificially Synthesized Probe
  source 1..120: mol_type = other DNA
cttcactcaactatacccccctctaaatcagatgcagcattttgaaatcgacctcactcccttaaccacacttaatttttggagtagaggttaatgaacacaccaggataaaacgatgtc

SEQ ID NO: 9952 - DNA, 120 bp, synthetic construct
  misc_feature 1..120: note = Artificially Synthesized Probe
  source 1..120: mol_type = other DNA
taaaatagtaagtgaaataactatactaaaaggcattcctggcattcagaaaagttgatggtagcatcctttccccctcaaagataggtacaggaggccctaatccaatagttctcagcc

SEQ ID NO: 9953 - DNA, 120 bp, synthetic construct
  misc_feature 1..120: note = Artificially Synthesized Probe
  source 1..120: mol_type = other DNA
tgtgatagctattactcaaatgacaaaagctgggggaaataccttgtaaatatcagaaaaaaacttctcctcctaagtagtttaaaaatatgcagataggcgggcacagtggctcacact

SEQ ID NO: 9954 - DNA, 120 bp, synthetic construct
  misc_feature 1..120: note = Artificially Synthesized Probe
  source 1..120: mol_type = other DNA
aggaaccaagttttcaattcttcttaagtgttttcatcattcctgatctaaccaccagagaagtgtttccttgccctttggtggcaaggttaatcttggtgataaatgatcctgaaaggc

SEQ ID NO: 9955 - DNA, 120 bp, synthetic construct
  misc_feature 1..120: note = Artificially Synthesized Probe
  source 1..120: mol_type = other DNA
ttcactacgcacagggtgtgcccaaagaatacttgctggaaaaatatgctgggagagtgccaatttaaaaagaaaaacattttcgcccagttggaaatctagagaaagaatagttgtagc

SEQ ID NO: 9956 - DNA, 120 bp, synthetic construct
  misc_feature 1..120: note = Artificially Synthesized Probe
  source 1..120: mol_type = other DNA
tacaggcctttgtcttcagtctctcactacaacacccacccctttccaggtccactcagaaccttacgctcagatttttttttcactgcaataagtgaacacaacaaaaaattacagtta

SEQ ID NO: 9957 - DNA, 120 bp, synthetic construct
  misc_feature 1..120: note = Artificially Synthesized Probe
  source 1..120: mol_type = other DNA
agagctgtctaaaggagttacagcaaacagcaaagctatgtgccttcaggttgctccatttctcaaaatagaatcttttttctgccctctctctatcagttccaggagttatcttctatt

SEQ ID NO: 9958 - DNA, 120 bp, synthetic construct
  misc_feature 1..120: note = Artificially Synthesized Probe
  source 1..120: mol_type = other DNA
tataactaaagagctaaaaacaattcaacaaatgtgggctattatttctctaccagaatgtctcaactctgttgtctgcttaggcaaagttggttaaaaacgttgttcccagcagggcac

SEQ ID NO: 9959 - DNA, 120 bp, synthetic construct
  misc_feature 1..120: note = Artificially Synthesized Probe
  source 1..120: mol_type = other DNA
ccccatttcccccgcccccaaaacaattttctctacaattcctcttacctgagttctgaatataatctacatgattactacaatgctactaaataggctgctagagcaaaccacaacatt

SEQ ID NO: 9960 - DNA, 120 bp, synthetic construct
  misc_feature 1..120: note = Artificially Synthesized Probe
  source 1..120: mol_type = other DNA
tcagaagactcaccatcacatccccatcacatgctgcctagatatatccaatatgcaccctcagatcactctgaactttgttcctgtagcacccacaacaatcataaatatatcatctat

SEQ ID NO: 9961 - DNA, 120 bp, synthetic construct
  misc_feature 1..120: note = Artificially Synthesized Probe
  source 1..120: mol_type = other DNA
tgtcttctctgtgtgccctgtgctttctgcctatactgacctctcagtaggtcacaatcaaaagaaaactgtctatcaaaatctttgccaaccttcaaggttcatttctaacatcactaa

SEQ ID NO: 9962 - DNA, 120 bp, synthetic construct
  misc_feature 1..120: note = Artificially Synthesized Probe
  source 1..120: mol_type = other DNA
acattagtcctatagctagtttttagcagaagaagggtttagctgagaagacttgggtatcctggctgatgttcctcccaacccaccactttatgaaatgataaagagtagaaaaatgat

SEQ ID NO: 9963 - DNA, 120 bp, synthetic construct
  misc_feature 1..120: note = Artificially Synthesized Probe
  source 1..120: mol_type = other DNA
acattccaaagtatctaaaaagcaaaacctataaacacactagtaattcattttaccatgaggtcttcataaactccaagaggataaaattccccaggaggggctaggcacagtggctct

SEQ ID NO: 9964 - DNA, 120 bp, synthetic construct
  misc_feature 1..120: note = Artificially Synthesized Probe
  source 1..120: mol_type = other DNA
cctagtgaacaattacagcacccaggtaataaaaacagactaaaagcttagacaaacatacaattattcttggctgcacatctttctccctgaggtctttataaagaaggcattgcagaa

SEQ ID NO: 9965 - DNA, 120 bp, synthetic construct
  misc_feature 1..120: note = Artificially Synthesized Probe
  source 1..120: mol_type = other DNA
tatccacttgtaatttaagcaacatcatttaaaaacagctcattccaacagtctcctctactaaatattttcatcagggctgcctagacgaaacctagcccaccactctatcttgggcaa

SEQ ID NO: 9966 - DNA, 120 bp, synthetic construct
  misc_feature 1..120: note = Artificially Synthesized Probe
  source 1..120: mol_type = other DNA
gatcccaaaatgtttcctaaaagccatcctttggctgttcttatacacttcacacccttccaaaccataaaccattatgtgagaagaatgctcagaactaagtagtgaatgaatggcctt

SEQ ID NO: 9967 - DNA, 120 bp, synthetic construct
  misc_feature 1..120: note = Artificially Synthesized Probe
  source 1..120: mol_type = other DNA
ggagtgacaggaatgaaacgtctctgtctccaccatgccaatttggagtgccacccataaaaagcttatgtaaaattttctcaaaccaacagatttagaaaaaccagtaagatgaggtgg

SEQ ID NO: 9968 - DNA, 120 bp, synthetic construct
  misc_feature 1..120: note = Artificially Synthesized Probe
  source 1..120: mol_type = other DNA
tgaactactgtcagtgacatctgaatcaaatgcctgttcactgcacctcaagttggctatgccactagctgtaaatctctccaattcttctgaaattgaattgcttttcagaaagttgct

SEQ ID NO: 9969 - DNA, 120 bp, synthetic construct
  misc_feature 1..120: note = Artificially Synthesized Probe
  source 1..120: mol_type = other DNA
agaatgtgttgaacttttagtcaatttcttagccaacccatttacaggtgcttgtggcagagctgtctgaccactcgtattcatggttctaagattttctaaggaaaactccaaaactgg

SEQ ID NO: 9970 - DNA, 120 bp, synthetic construct
  misc_feature 1..120: note = Artificially Synthesized Probe
  source 1..120: mol_type = other DNA
attgcccaaatatctctctttccctttaccccaaaacttctctaagaatagtataaataactgtctctgcactcttcactcttccataatctggatttcaccccctactgctctggcaaa

SEQ ID NO: 9971 - DNA, 120 bp, synthetic construct
  misc_feature 1..120: note = Artificially Synthesized Probe
  source 1..120: mol_type = other DNA
tatgcataaagcactctgctgctttatgaattctcaggaaaaagcacagtacaactgagttgcaaaatgaactagagctttgttcatggaacacgatttttacttggcagaactactgac

SEQ ID NO: 9972 - DNA, 120 bp, synthetic construct
  misc_feature 1..120: note = Artificially Synthesized Probe
  source 1..120: mol_type = other DNA
tgccccaaatgagggcaatctccaatttaatcaaaaatgcttatctttggagcaataccaacacaggatggtaggccctacaggaccacagtaagcttctttatagtatgacaatttgaa

SEQ ID NO: 9973 - DNA, 120 bp, synthetic construct
  misc_feature 1..120: note = Artificially Synthesized Probe
  source 1..120: mol_type = other DNA
ccccttttgaatgtcaatatgtagttgatatgagcaatgcaaggaggcatattatcagtgccagatgattaatacaacatgtgaagagtaattgtaccctactgcctgacagcactacag

SEQ ID NO: 9974 - DNA, 120 bp, synthetic construct
  misc_feature 1..120: note = Artificially Synthesized Probe
  source 1..120: mol_type = other DNA
aagtaagggggtgggggaggagagagagtgcagagaacaggaaaaagtgaccactttttccgaaaaaattcccattcctaattcctaaatcttgagatttctataccaaagaaataccat

SEQ ID NO: 9975 - DNA, 120 bp, synthetic construct
  misc_feature 1..120: note = Artificially Synthesized Probe
  source 1..120: mol_type = other DNA
aacaatgattcctatcccacttgacccctacaaaattcaaaaagcttcaatctttgacaatgtaaagcagggaaagactgtcaaatttaagcagttcttagagaagctcagggctaaagg

SEQ ID NO: 9976 - DNA, 120 bp, synthetic construct
  misc_feature 1..120: note = Artificially Synthesized Probe
  source 1..120: mol_type = other DNA
acctctagggtcccttcctatgttaattctattattctaaattgcaccatcggtccaaggacaaacttctacctaacacaagtggcacttgggaagcaaaaatatacttctaggatagag

SEQ ID NO: 9977 - DNA, 120 bp, synthetic construct
  misc_feature 1..120: note = Artificially Synthesized Probe
  source 1..120: mol_type = other DNA
atattttaatagaggaaatagtagaatgaaggtggaaaggcagtttgaagccagatccttaacggacagcctttaatagccttaattcagacttaaagacagtagaggggccaggcacag

SEQ ID NO: 9978 - DNA, 120 bp, synthetic construct
  misc_feature 1..120: note = Artificially Synthesized Probe
  source 1..120: mol_type = other DNA
atgggagtgaaacatcagactgtgctttagagagatcagttgggtaggatggattgaaagtaagtaaaaaggcatctatagatggcaaagaccaataaaaaagctaccacaataatccag

SEQ ID NO: 9979 - DNA, 120 bp, synthetic construct
  misc_feature 1..120: note = Artificially Synthesized Probe
  source 1..120: mol_type = other DNA
cagaactccccacagattcccaactccgtatctttgcctatgttgctacctctacctggaaggtccttcttctactttttttttttgtccccaaacttactaatttttcaatacatagca

SEQ ID NO: 9980 - DNA, 120 bp, synthetic construct
  misc_feature 1..120: note = Artificially Synthesized Probe
  source 1..120: mol_type = other DNA
ccaataaatattaaaatgcctagagtattcaaagcaccacagtaagtacatacaaggatgacaagcagcagtaaagagagacactactgtgtgatttgggggatggaggcaatcctcata

SEQ ID NO: 9981 - DNA, 120 bp, synthetic construct
  misc_feature 1..120: note = Artificially Synthesized Probe
  source 1..120: mol_type = other DNA
aaaaacaaaaagaaagaaatgagtagaattcagcattgcctatacaactacttcaagcatcccatattcaaaacccattccctgccccaacaccaaatccaaaacttcctcctgctcctc

SEQ ID NO: 9982 - DNA, 120 bp, synthetic construct
  misc_feature 1..120: note = Artificially Synthesized Probe
  source 1..120: mol_type = other DNA
cctccctctaggctcttacctgcacccccatgacaccctggctattgctcatggtacaatataaactcacaattttgtcttgtctctttcttccccagagtatgtacttttttttttttt

SEQ ID NO: 9983 - DNA, 120 bp, synthetic construct
  misc_feature 1..120: note = Artificially Synthesized Probe
  source 1..120: mol_type = other DNA
ccactctttagctgacaaaagacagaggaaaaaaaaatcatactttttatcatatctctttccaacaagccctaatggttggtgtaagtgctcctgaacaatcctaaaatcagcgacttc

SEQ ID NO: 9984 - DNA, 120 bp, synthetic construct
  misc_feature 1..120: note = Artificially Synthesized Probe
  source 1..120: mol_type = other DNA
tcacaccctctggtggaggtgctaacaaacagtcacaaaggccaaataacaagcagcaagaggaaagtctagatatgagttcttagcaatttttggtttaacatcctaacaacaaaattg

SEQ ID NO: 9985 - DNA, 120 bp, synthetic construct
  misc_feature 1..120: note = Artificially Synthesized Probe
  source 1..120: mol_type = other DNA
taaaaggcacatggcttaaaaaagaaacaaataataatagttaccccctgccatactagtcatctcctatgacccacaatcctcccctcaatctgcaagtgacacccaaggatatcactt

SEQ ID NO: 9986 - DNA, 120 bp, synthetic construct
  misc_feature 1..120: note = Artificially Synthesized Probe
  source 1..120: mol_type = other DNA
aatacgcttcccaagacatagactaatcaaatcactcaaggcaggaacatttaaaatgaagaaagagtacaacgaaagctgctttaaaactctaaataagacaagcaaggggccaggccc

SEQ ID NO: 9987 - DNA, 120 bp, synthetic construct
  misc_feature 1..120: note = Artificially Synthesized Probe
  source 1..120: mol_type = other DNA
attgcttgcctgatataacaaggtaactaagctttactcgcaaaggggcctaatcagaacctctcaatactaaaataccttctcaaacaaccacaacacccctatgtttacagagtacac

SEQ ID NO: 9988 - DNA, 120 bp, synthetic construct
  misc_feature 1..120: note = Artificially Synthesized Probe
  source 1..120: mol_type = other DNA
gaactacacatcacactgcacatatcacatgacatgatgtaactgttagcaaagaaaatggtccaaaccattgacaatgtacatggtaaatcaggatcaatgcatactcaagaaccacat

SEQ ID NO: 9989 - DNA, 120 bp, synthetic construct
  misc_feature 1..120: note = Artificially Synthesized Probe
  source 1..120: mol_type = other DNA
ttaaagtggcgccatcatgtcaccccttctcccctaaagcaatcagtaagcaatagttaagtagcacgtttctctataaatccacattgggattccaacattggaaaacgaggattttta

SEQ ID NO: 9990 - DNA, 120 bp, synthetic construct
  misc_feature 1..120: note = Artificially Synthesized Probe
  source 1..120: mol_type = other DNA
tttaaagttccgggggatttttctaccctgccctgcctttctagttacaactaacaaagagagagagaaatgggagccacagggagagcgaggagaaggagaaagggcagcaggaggagg

SEQ ID NO: 9991 - DNA, 120 bp, synthetic construct
  misc_feature 1..120: note = Artificially Synthesized Probe
  source 1..120: mol_type = other DNA
tgtagttttcgtgaagaaacacgcgtcttgttttgggtgtcatggcttggcagatccgccaaaacaggcaaatggcattacacaatgagtatttatgcttcctgccgccaccaaaaggaa

SEQ ID NO: 9992 - DNA, 120 bp, synthetic construct
  misc_feature 1..120: note = Artificially Synthesized Probe
  source 1..120: mol_type = other DNA
tgcacctaggtttctgcgaatttccatttgtactcctaaaatcacactctcaagcatagtcatagttctcaaataccaaaggcaggcagtttggagtcatagggtcaaattacacaaaga

SEQ ID NO: 9993 - DNA, 120 bp, synthetic construct
  misc_feature 1..120: note = Artificially Synthesized Probe
  source 1..120: mol_type = other DNA
atgagccaccacacaaaaatcttatgaagagaaacaaattttcttaaatttccccccaaaaaatagtggatgtccaaaaggctgattgaaaacacctacatacaaaataaaacaaacaaa

SEQ ID NO: 9994 - DNA, 120 bp, synthetic construct
  misc_feature 1..120: note = Artificially Synthesized Probe
  source 1..120: mol_type = other DNA
accaacatcaaagggaatagagagttggtccttggtgatagcattaagccactgtatcaaccaatcctgacaatttgtatgacttctggatttccagccacattacaacaatgtaacaat

SEQ ID NO: 9995 - DNA, 120 bp, synthetic construct
  misc_feature 1..120: note = Artificially Synthesized Probe
  source 1..120: mol_type = other DNA
ccaaaaaggcactctctaccttccctgccacagaccttctaaacaagccagaaattcctaaacagaataatctcacaaattcagtacctcgtatgtccaaactaatctcaaaaggacaat

SEQ ID NO: 9996 - DNA, 120 bp, synthetic construct
  misc_feature 1..120: note = Artificially Synthesized Probe
  source 1..120: mol_type = other DNA
taagtcaaaaaatttaggatgtagaaggaatatgttcagccgccacattttattagtgtgaaaatgaggccaacagaaagaagccagttaagagattgccaaagcgtcaaagctggaatc

SEQ ID NO: 9997 - DNA, 120 bp, synthetic construct
  misc_feature 1..120: note = Artificially Synthesized Probe
  source 1..120: mol_type = other DNA
tatcactgaaagaaacaagtcaggttctctcaggccatcagctattgttaaaatctaacacccaagattgttggtcttctccacagtggtggatttaatagcagctaccagcactcattt

SEQ ID NO: 9998 - DNA, 120 bp, synthetic construct
  misc_feature 1..120: note = Artificially Synthesized Probe
  source 1..120: mol_type = other DNA
ttttctttttacgtcagttgctgattctaagttatgatgcaacttgtaaaatcttgttctgatggcatggcaaacctagggactttggaagatggcagacctgtttcctccaatgaagca

SEQ ID NO: 9999 - DNA, 120 bp, synthetic construct
  misc_feature 1..120: note = Artificially Synthesized Probe
  source 1..120: mol_type = other DNA
taccaaaaacacaaaaaattagccaggcatggtggcatgcacctgtagtcccagctacacaggaagccaaggtgggagaatcacttgagcctggaaggtggaggctacagtgagcagaga

SEQ ID NO: 10000 - DNA, 120 bp, synthetic construct
  misc_feature 1..120: note = Artificially Synthesized Probe
  source 1..120: mol_type = other DNA
cttccaggcagaagataaaacctgaaatctaacgtataaattgtcatgggtacaatattataaaagagaccataagttaccgagaacatgactggaattcaggaaatgctaaaggtcctg

SEQ ID NO: 10001 - DNA, 120 bp, synthetic construct
  misc_feature 1..120: note = Artificially Synthesized Probe
  source 1..120: mol_type = other DNA
gcataaccaaaatgaaataacaaagtaagtaccccaaataaaactaggagaaaaaatccagggaaccaagcaggcagtaaggatctaaagttctatacttggaacctctaccctgaatgt

SEQ ID NO: 10002 - DNA, 120 bp, synthetic construct
  misc_feature 1..120: note = Artificially Synthesized Probe
  source 1..120: mol_type = other DNA
ttaggcaattagaatttacaattgctaaatgaatgttcaaagttcaaccaaaattagtccaagatgaagccaagaacacatctcaactcattcaataaagccattattactctgatgcca

SEQ ID NO: 10003 - DNA, 120 bp, synthetic construct
  misc_feature 1..120: note = Artificially Synthesized Probe
  source 1..120: mol_type = other DNA
agcactttggtagactgaagtgggtgggctgcttgagcgcagaagttcaggatcagactaggcaacatggcaagaactcatctctacaaaaatacaaaaatgagctagatgtggtggcat

SEQ ID NO: 10004 - DNA, 120 bp, synthetic construct
  misc_feature 1..120: note = Artificially Synthesized Probe
  source 1..120: mol_type = other DNA
aaagctaatcttcatttcatttggtggcctgacatcaaaaccacatgcaacaaaggaaaaaacaagtaaatttggcttcatcagaattataacattttgtacattaaaggacaccatcaa

SEQ ID NO: 10005 - DNA, 120 bp, synthetic construct
  misc_feature 1..120: note = Artificially Synthesized Probe
  source 1..120: mol_type = other DNA
aatcttgttaaagataaatacacgagatgctaaagaaataatctacttcttcaagtcatgctatcaatttgcaccaaaattttcatttcctatgtgtaggtgttgagggtcttgtaccca

SEQ ID NO: 10006 - DNA, 120 bp, synthetic construct
  misc_feature 1..120: note = Artificially Synthesized Probe
  source 1..120: mol_type = other DNA
aaaaaaaaagatatgtagtactcctaacattcagcacctcagaacctgatcttagagacaggatcttcaggccaggtggcttcccttcctctccgcgtcagtctgtcccacctcagctca

SEQ ID NO: 10007 - DNA, 120 bp, synthetic construct
  misc_feature 1..120: note = Artificially Synthesized Probe
  source 1..120: mol_type = other DNA
gaccagccccttctctgtgttttaaaggcatttaagtataaattattaaactgcaggacagaacatattagctgacggtcatatgagtgaccttctctaaatgccaggaggatagaatcc

SEQ ID NO: 10008 - DNA, 120 bp, synthetic construct
  misc_feature 1..120: note = Artificially Synthesized Probe
  source 1..120: mol_type = other DNA
cttcaactcaagctttctaaccatcagacctaactaaaaaggtggttcttaccttggattacctctaagagcccactgagatatgagtgttaaaaaattacatgcgaggaaatggcaggt

SEQ ID NO: 10009 - DNA, 120 bp, synthetic construct
  misc_feature 1..120: note = Artificially Synthesized Probe
  source 1..120: mol_type = other DNA
tgctcggataaatgtaggtatattaggtccattcaggtcctacaggatagaagtgctatcagacgtgaggccctaaatttctgaggttaacatcttaacagataacaatgtttcacctga

SEQ ID NO: 10010 - DNA, 120 bp, synthetic construct
  misc_feature 1..120: note = Artificially Synthesized Probe
  source 1..120: mol_type = other DNA
aatgcacactccactagcagtttcagagattgtcccctcaccaccttcgacagcacagtcaactgtaaatctgataggttaaaaaaagagtatgtcatttaatctgcattcctttgatta

SEQ ID NO: 10011 - DNA, 120 bp, synthetic construct
  misc_feature 1..120: note = Artificially Synthesized Probe
  source 1..120: mol_type = other DNA
tccctgccaaatatactacctggcacatataaacatcacagacctaaatattcatttccctatactttaactatgtgaaaacactctaaattaccaaatgacactgggtggtcagcaaac

SEQ ID NO: 10012 - DNA, 120 bp, synthetic construct
  misc_feature 1..120: note = Artificially Synthesized Probe
  source 1..120: mol_type = other DNA
aaaaagaaacaaaaacagcaagcagtgaggataaaagacaagagcaagtcctcactctcaaagaacctagacactagctgggttcaaagtggagcaaactagcaatcagtacaatagaag

SEQ ID NO: 10013 - DNA, 120 bp, synthetic construct
  misc_feature 1..120: note = Artificially Synthesized Probe
  source 1..120: mol_type = other DNA
aataaaatgcccataggacatccaagtagagatgtccaggaagcaactgtgtatatgggattggagatcagaaaactagtcagagctggaaaaacacacatttgcaaatcatcggcatat

SEQ ID NO: 10014 - DNA, 120 bp, synthetic construct
  misc_feature 1..120: note = Artificially Synthesized Probe
  source 1..120: mol_type = other DNA
tgcaccaaaattttcatttcctatgtgtaggtgtcgagggtctagtacccatgataaatgatatacacctgttctgggctgaattgtgttccccaaaagagatatgtagtactccagggg

SEQ ID NO: 10015 - DNA, 120 bp, synthetic construct
  misc_feature 1..120: note = Artificially Synthesized Probe
  source 1..120: mol_type = other DNA
tctaaaaaaacaaaagaaatacacacagggagaactctacataaggactggagttatgctgccaccagaagctagaagagaggcttgaaacagatcctgtcccagttgcttcagagaaag

SEQ ID NO: 10016 - DNA, 120 bp, synthetic construct
  misc_feature 1..120: note = Artificially Synthesized Probe
  source 1..120: mol_type = other DNA
ctgaaccaaacactgccctatgtcctttacagatataatacaaaagtcctctgaagtaagtgttattatttccagtatgaaggaggaacctgaatctcagagagattaagaaaatcgccc

SEQ ID NO: 10017 - DNA, 120 bp, synthetic construct
  misc_feature 1..120: note = Artificially Synthesized Probe
  source 1..120: mol_type = other DNA
agaaatatacatctataaattcaaaattcttgaagatcccaagagaacacatgtcctagattatgggcccttttgcgtgtgtatcccctcaaccactgttcaagaactattctctcggct

SEQ ID NO: 10018 - DNA, 120 bp, synthetic construct
  misc_feature 1..120: note = Artificially Synthesized Probe
  source 1..120: mol_type = other DNA
atgcaatgagaagtctccttcctactctgtcctctacctgaacaattcctagacctaacaggtaaccagtgccaccattttcttatttattcttctaaaggtttgtgttgttgctgttgt

SEQ ID NO: 10019 - DNA, 120 bp, synthetic construct
  misc_feature 1..120: note = Artificially Synthesized Probe
  source 1..120: mol_type = other DNA
accaatgaaaaagagaataaagttccctctccccacttttattttccagcccacaaactcaatgctatcctccccgcaaaaaggacctttttttctgaccagacgaacactgtaattttt

SEQ ID NO: 10020 - DNA, 120 bp, synthetic construct
  misc_feature 1..120: note = Artificially Synthesized Probe
  source 1..120: mol_type = other DNA
tatttttagtcacaagaaaatcaaagaagccacctacttaagtcttaagctctgccctttgcttagtcctaatggagagttctttggccatctatgtacaagagattagaggagccaaag

SEQ ID NO: 10021 - DNA, 120 bp, synthetic construct
  misc_feature 1..120: note = Artificially Synthesized Probe
  source 1..120: mol_type = other DNA
agacaatgcaaatagtttaagctacctgggcagggattttgaagtactatttgcctcatcgcactaaaaaagtatagaaaatacagtcccctttagaaaagggcaaatgtgtgtctccat

SEQ ID NO: 10022 - DNA, 120 bp, synthetic construct
  misc_feature 1..120: note = Artificially Synthesized Probe
  source 1..120: mol_type = other DNA
gaaaagtacccctttttaaataaaaataaaaaataaacacctctggagtggatgtgttcttgctatgcgtttgtcactgaggcttcgaagacttggcatcactttccttaccgctcaccg

SEQ ID NO: 10023 - DNA, 120 bp, synthetic construct
  misc_feature 1..120: note = Artificially Synthesized Probe
  source 1..120: mol_type = other DNA
ggaataatctaaatatgggtgttgggtaagctattgttcccatctaatggtgaggttgtgtgacacctctttgaattgctaatgtcctgcaagtaccaaccttgccgagtttttctgacc

SEQ ID NO: 10024 - DNA, 120 bp, synthetic construct
  misc_feature 1..120: note = Artificially Synthesized Probe
  source 1..120: mol_type = other DNA
tccctcacccacatcccacattttaattcaaattcccctgttatgacctctcctaggaccctgaactttttcttcctgagatgtctccatggtaattatgtaggtatttgtgtaattgtt

SEQ ID NO: 10025 - DNA, 120 bp, synthetic construct
  misc_feature 1..120: note = Artificially Synthesized Probe
  source 1..120: mol_type = other DNA
tttattctccgtagaccttgatttacacctcagtagaatttaacattgtttagtaggctttaagtgaatgccactgtgggaggagttttcggggaatagacgaatagagtacaatacagc

SEQ ID NO: 10026 - DNA, 120 bp, synthetic construct
  misc_feature 1..120: note = Artificially Synthesized Probe
  source 1..120: mol_type = other DNA
gaaggagggaggtgcagtaatcttatcactcacaaaaggccacatatcaaagtaccagtgccagccacatgctgaactcttctaccagaggaattctattaaatatatcctttttcttta

SEQ ID NO: 10027 - DNA, 120 bp, synthetic construct
  misc_feature 1..120: note = Artificially Synthesized Probe
  source 1..120: mol_type = other DNA
cctctctccctataacagtgctcaggcctcccagatgttttccaagccactttacttcttttgctaagcatatatctatttatatcacatttcctaactcctacacactttgccaatact

SEQ ID NO: 10028 - DNA, 120 bp, synthetic construct
  misc_feature 1..120: note = Artificially Synthesized Probe
  source 1..120: mol_type = other DNA
tgtatatataatatagttaaatccttagatctgaagtaaacacttcagtccatatagaaaaattcttatcaacatacagaactttttttttttagacctttagtaagatctcaacttatt

SEQ ID NO: 10029 - DNA, 120 bp, synthetic construct
  misc_feature 1..120: note = Artificially Synthesized Probe
  source 1..120: mol_type = other DNA
gtttttttcttgtaaatttgtttgagttcattgtagattctggatattagccctttgttggatgagtaggttgcaaaaattttctcccattctgtaggttgcctgttcactctgatgcta

SEQ ID NO: 10030 - DNA, 120 bp, synthetic construct
  misc_feature 1..120: note = Artificially Synthesized Probe
  source 1..120: mol_type = other DNA
ttgattttgtatcctgagactttgctgaagttgcttatcagcttgaggagattttgggctgagatgatggggttttctaaatatacaatcatgtcatctgcaaacagggacaatttgact

SEQ ID NO: 10031 - DNA, 120 bp, synthetic construct
  misc_feature 1..120: note = Artificially Synthesized Probe
  source 1..120: mol_type = other DNA
ggtgatatcccctttatcattttttattgcgtctatttgattcttctctcttttcttctttattagtcttcctagcggtctatcaattttgttgatcttttcaaaaaaccagctcctgga

SEQ ID NO: 10032 - DNA, 120 bp, synthetic construct
  misc_feature 1..120: note = Artificially Synthesized Probe
  source 1..120: mol_type = other DNA
ttttccatttgcttggtagatcttcctccatcccttattttgagcctatgtgtgtctctgcatgtgagatgggtttcctgaatacagcacgctgatgggtcttgactttttatccaattt

SEQ ID NO: 10033 - DNA, 120 bp, synthetic construct
  misc_feature 1..120: note = Artificially Synthesized Probe
  source 1..120: mol_type = other DNA
gttttcagctccatcaggtcctttaaggacttctctgcattggttattctagttatccattcgtctaattttttttcaaagcttttaacttctttgccattggttcgaatttcctcctgt

SEQ ID NO: 10034 - DNA, 120 bp, synthetic construct
  misc_feature 1..120: note = Artificially Synthesized Probe
  source 1..120: mol_type = other DNA
atcttggctcctcccccctgatacggaacattttcatcaaccccaggaagatccctattcccccttcccagtcaaacctcccaccagaaacaacttttgatctgatttctttctcttttt

SEQ ID NO: 10035 - DNA, 120 bp, synthetic construct
  misc_feature 1..120: note = Artificially Synthesized Probe
  source 1..120: mol_type = other DNA
cactgcacctggtccttaactttttactaaactgtcaaatatttatacaacttttcagactctcaccagcattgtatgtggttaataacttttcaatgatcaaatatttttgctcaacat

SEQ ID NO: 10036 - DNA, 120 bp, synthetic construct
  misc_feature 1..120: note = Artificially Synthesized Probe
  source 1..120: mol_type = other DNA
ggtgaaacctggtctctcctaaaaatacaaacaaattagccaggcatggtggcacacgcctgtagtcctagctactcgggaggctgaagaagaattgcttgaacccaggatgcggaggtt

SEQ ID NO: 10037 - DNA, 120 bp, synthetic construct
  misc_feature 1..120: note = Artificially Synthesized Probe
  source 1..120: mol_type = other DNA
agagggggagggaggaaataaaggtagaataaaagaaataaagacagcagtagaaaataattaaatggaaaaaacaataaaatagagaccaatacagttaaagtgttgctctttgaaagc

SEQ ID NO: 10038 - DNA, 120 bp, synthetic construct
  misc_feature 1..120: note = Artificially Synthesized Probe
  source 1..120: mol_type = other DNA
gccactgcacccagccaaggtagttttttaaatctcacttataaactgcaaatttacctcaggaattcaaggacgatctcatgttaacatatatattttataacttggtaatttgatcca

SEQ ID NO: 10039 - DNA, 120 bp, synthetic construct
  misc_feature 1..120: note = Artificially Synthesized Probe
  source 1..120: mol_type = other DNA
cgatagtttgctgagaatgatggtttccagtttcatccatgtccctacaaaggacatgaactcatcattttttatggctgcatagtattccatggtgtatatgtgccacattttcttaat

SEQ ID NO: 10040 - DNA, 120 bp, synthetic construct
  misc_feature 1..120: note = Artificially Synthesized Probe
  source 1..120: mol_type = other DNA
taagaacccagtgtatagatttaatagcatattgcacacagtttaagataattactaaccagaacacatgctagaagactacttagggccgcaacacccactgactccctgagtcagcta

SEQ ID NO: 10041 - DNA, 120 bp, synthetic construct
  misc_feature 1..120: note = Artificially Synthesized Probe
  source 1..120: mol_type = other DNA
tttgtatgcacctaataatatggcctcagtgtatgatacagaaccacaatgagaaacagacaaaatccacttttctatggtggaacattttaccatacctatctcagtaactgagcccca

SEQ ID NO: 10042 - DNA, 120 bp, synthetic construct
  misc_feature 1..120: note = Artificially Synthesized Probe
  source 1..120: mol_type = other DNA
attactaggtatgccagaaaacaagattaagtgactataaaccaatgtgggaggtttgtgaggaactgctaaaaatctgtttttcactcacctctctatcaggaaggctgtcatgaggca

SEQ ID NO: 10043 - DNA, 120 bp, synthetic construct
  misc_feature 1..120: note = Artificially Synthesized Probe
  source 1..120: mol_type = other DNA
attgcatcactgtttgtaatcgtgaaaaaatgaaaactgaacctgtccatcaacatgatagtagatactgtgatatattcctgcaaaagaatactatgtgggccaggctcggtgacttgc

SEQ ID NO: 10044 - DNA, 120 bp, synthetic construct
  misc_feature 1..120: note = Artificially Synthesized Probe
  source 1..120: mol_type = other DNA
attaatacatgtattatgggtatgatcaattcctgcacccccagtcctttgctagcatataagttcagtgaaggcagggactttattctctattctatccccattgattgactcacgtca

SEQ ID NO: 10045 - DNA, 120 bp, synthetic construct
  misc_feature 1..120: note = Artificially Synthesized Probe
  source 1..120: mol_type = other DNA
gccctttctgaaccttgttgctcaatgtttccttggcttaatgacataggttaccctgctatccttccagtaaaatacacccccttcatttttaaaactaacagagctaagtctctttgt

SEQ ID NO: 10046 - DNA, 120 bp, synthetic construct
  misc_feature 1..120: note = Artificially Synthesized Probe
  source 1..120: mol_type = other DNA
tagagaagctctgctgaagacagtttgacatgaatgaggctatgaagacagaattccaaggtagggaggggacaaggagagaaagggtttgatgaattaatgtatgatttgaacagagtt

SEQ ID NO: 10047 - DNA, 120 bp, synthetic construct
  misc_feature 1..120: note = Artificially Synthesized Probe
  source 1..120: mol_type = other DNA
ctaatacagccttttgttttgttctccatatatttcaccttgtatagtttctgctgttacattaccaagttcactaatcctttttctgcaattctaatcagctgttaagctcatccagta

SEQ ID NO: 10048 - DNA, 120 bp, synthetic construct
  misc_feature 1..120: note = Artificially Synthesized Probe
  source 1..120: mol_type = other DNA
gttttcttcctttaaagaatgccgggttttattttgtcaggcagataagttacttgcagatcaactctatccttttgaggtttgttttaaaccttgtcagggtttcgccaacagggtttg

SEQ ID NO: 10049 - DNA, 120 bp, synthetic construct
  misc_feature 1..120: note = Artificially Synthesized Probe
  source 1..120: mol_type = other DNA
ttgttccttcttcctgtactaaagtccaaaaaggacttccacacagagatctagcatgattgtagggctcaccttaattgtttttcttccctcttgtatctcagttctgtgatgcctatt

SEQ ID NO: 10050 - DNA, 120 bp, synthetic construct
  misc_feature 1..120: note = Artificially Synthesized Probe
  source 1..120: mol_type = other DNA
taaataaagtatacaggatgatgtgcgtacttacatgcaagtagcatggcatttcacataaggatccccaactttggtatcagtgggaaccatagaaccagtttccagtagatgctaagg

SEQ ID NO: 10051 - DNA, 120 bp, synthetic construct
  misc_feature 1..120: note = Artificially Synthesized Probe
  source 1..120: mol_type = other DNA
ttgagaaatgggtggaaggtgaggaaatgaggaagaggatagctagtcctttcagaaagcttgccctgaatgggagaaaggtgattcagttcaacacttacgagaacttttttttttttg

SEQ ID NO: 10052 - DNA, 120 bp, synthetic construct
  misc_feature 1..120: note = Artificially Synthesized Probe
  source 1..120: mol_type = other DNA
ctggatcttgattgggtgaatggatttggggagtggtcaaaattagattgttgaaagacaggaaaacattgacctgggagttagttagaatattggcttctgatcctgatttgccatcac

SEQ ID NO: 10053 - DNA, 120 bp, synthetic construct
  misc_feature 1..120: note = Artificially Synthesized Probe
  source 1..120: mol_type = other DNA
tcttctagaaaaggttggctacacatgttgttgctaattcctcacctccggattgtacttaagcctattttaatctcagcatgaactacccgcctcagaatcttttgggttaccctttaa

SEQ ID NO: 10054 - DNA, 120 bp, synthetic construct
  misc_feature 1..120: note = Artificially Synthesized Probe
  source 1..120: mol_type = other DNA
acttctttgttaagccccagaccaatgatccagaagataaaatatgggtaggacaatggatcaactgattacttgacatatctactggggtgttgcaagtatctgcattgtgtgtgtgtg

SEQ ID NO: 10055 - DNA, 120 bp, synthetic construct
  misc_feature 1..120: note = Artificially Synthesized Probe
  source 1..120: mol_type = other DNA
ttaaaatagtgccactcttttaatgggatccttttaatgcctttccattacacttgggataaaccctccaaatcttgacaagacctacaaagcactgcaataaagcccaacctctgcctc

SEQ ID NO: 10056 - DNA, 120 bp, synthetic construct
  misc_feature 1..120: note = Artificially Synthesized Probe
  source 1..120: mol_type = other DNA
tcccttctacttctccctgtccctggcctcctcccaccatcagtatgtatttcccttccctcattctctcaacacggagagaaattctatcataattttcattaaatcaattttcagtat

SEQ ID NO: 10057 - DNA, 120 bp, synthetic construct
  misc_feature 1..120: note = Artificially Synthesized Probe
  source 1..120: mol_type = other DNA
ttttggaaacaaagtatctatgaaacttctcctctcaccttgattggtgatttggctcaggttaatactctaggttgggactgatttcatctcaatggagaaggcattgctccattactt

SEQ ID NO: 10058 - DNA, 120 bp, synthetic construct
  misc_feature 1..120: note = Artificially Synthesized Probe
  source 1..120: mol_type = other DNA
cccaggtatgttttttattgatggttgaatgttcctttttcactgtatcctgttcttgcaagatgtcatgctttctttcgtctctctgaggaggttttcctttccttcctgcctgccttt

SEQ ID NO: 10059 - DNA, 120 bp, synthetic construct
  misc_feature 1..120: note = Artificially Synthesized Probe
  source 1..120: mol_type = other DNA
aattagaatttttgtgttttagaggaggcttgtctcacaaagacagtttttctgtaggataatcaggtaccagggcccttttcattgggggatgccaaatgtcagttatgtgtaggtctt

SEQ ID NO: 10060 - DNA, 120 bp, synthetic construct
  misc_feature 1..120: note = Artificially Synthesized Probe
  source 1..120: mol_type = other DNA
tggcttctttccctgtaggtgttggttttctctatttttggttttctttgcttttggctttctttgctttaagtcagctggtgtttatccatttgcttcccctgtgtcaatttccttcct

SEQ ID NO: 10061 - DNA, 120 bp, synthetic construct
  misc_feature 1..120: note = Artificially Synthesized Probe
  source 1..120: mol_type = other DNA
ggctttgggagggagcagagataagtgatatcaagaacactttttatttagatatttattgagtgcctactgggtacaaagaatcctactagttgctcttgcagaggttggtttcagaga

SEQ ID NO: 10062 - DNA, 120 bp, synthetic construct
  misc_feature 1..120: note = Artificially Synthesized Probe
  source 1..120: mol_type = other DNA
gctccttaagagcaagaactctggcaagtttcttttctgactagcaaattgatcttgcttttgcagagcttctcagtctttagtgtgcacattaaacacctgggaggttttgaaaattca

SEQ ID NO: 10063 - DNA, 120 bp, synthetic construct
  misc_feature 1..120: note = Artificially Synthesized Probe
  source 1..120: mol_type = other DNA
tcagtcaaaggtctgagtagaataaaagactgaccctcccacatgtaagagggaattcctactttctgactgtctttaaactgggacagcgttttgttttttttttctgcatttggactc

SEQ ID NO: 10064 - DNA, 120 bp, synthetic construct
  misc_feature 1..120: note = Artificially Synthesized Probe
  source 1..120: mol_type = other DNA
acaaactctaaataaccataaagctaagctgaattttaaataactcttacgttttaagtgctctgttccgctcatatacaaggaagattaaccccttcaattctgaccactgctacagcc

SEQ ID NO: 10065 - DNA, 120 bp, synthetic construct
  misc_feature 1..120: note = Artificially Synthesized Probe
  source 1..120: mol_type = other DNA
aactcttttcaagcattggattatgtgatttttggacaacgtaattatgagagaaggccttctatttggaagcaataactagattctggttctggaaggagaaccccaaaaaagcggctg

SEQ ID NO: 10066 - DNA, 120 bp, synthetic construct
  misc_feature 1..120: note = Artificially Synthesized Probe
  source 1..120: mol_type = other DNA
tagaataaaggctactttagatatcccttacctaacaaagcttaacaacaagctctgatatgaagaaactgatttgcaagtaactaaactgtagagggacgagacgcggacaaaacccct

SEQ ID NO: 10067 - DNA, 120 bp, synthetic construct
  misc_feature 1..120: note = Artificially Synthesized Probe
  source 1..120: mol_type = other DNA
ggcctgcaaccgtatgatatgattgagaatgtagatgggggtttgctactaagaatataagtttttaagagctacacacttgaatttcagggagtctgcggaaagagctacagttatctt

SEQ ID NO: 10068 - DNA, 120 bp, synthetic construct
  misc_feature 1..120: note = Artificially Synthesized Probe
  source 1..120: mol_type = other DNA
tctcttgcctcctggaagcatcataaggcgtcttggccacagagttgaaacagatcatctttgtctgtcggccgctgggtttgttttcacgtgcggatcggattttcgtggtcactactc

SEQ ID NO: 10069 - DNA, 120 bp, synthetic construct
  misc_feature 1..120: note = Artificially Synthesized Probe
  source 1..120: mol_type = other DNA
tgcgcgttggagggtcccgatgggggccggaatcagctggggccattctggggcgctttctctcggctctgggctcgcgactgggagacctcgggtgaggtctctgttgccccggaggtg

SEQ ID NO: 10070 - DNA, 120 bp, synthetic construct
  misc_feature 1..120: note = Artificially Synthesized Probe
  source 1..120: mol_type = other DNA
gcttccacatctgtggattccaaaagacacagagagaatcttcttgggagtaaaagcgaaaataacaacaccgcaagacagaatcgtaggaagaagaaccaacagaggatgacaactctt

SEQ ID NO: 10071 - DNA, 120 bp, synthetic construct
  misc_feature 1..120: note = Artificially Synthesized Probe
  source 1..120: mol_type = other DNA
ctcttctgcagaaagataatcgttatagcctgagaatcggggaatggggattcgggtgttaagccttttctgagaattaccctccgtgttgtgcagagaaataagtaaatttgctgtgtt

SEQ ID NO: 10072 - DNA, 120 bp, synthetic construct
  misc_feature 1..120: note = Artificially Synthesized Probe
  source 1..120: mol_type = other DNA
tctcttgtgagttttgcaagccacccgagattctctcttgaattgctgtcaagaaatagagaccggcgttgtctctggccctcgctggggaagcttttctgaggttttgtttttttaatt

SEQ ID NO: 10073 - DNA, 120 bp, synthetic construct
  misc_feature 1..120: note = Artificially Synthesized Probe
  source 1..120: mol_type = other DNA
taaaagtattttgacttaaggaacgtagcagttgttagcatttatgtatgaaatccaggagttcctttcttcagataaacagcaggtttctttgagatgtgctccgcttgtgtcacccag

SEQ ID NO: 10074 - DNA, 120 bp, synthetic construct
  misc_feature 1..120: note = Artificially Synthesized Probe
  source 1..120: mol_type = other DNA
acttctcttgcctcctggaagcatcataaggcgtcttggccacagagttgaaacagatcatctttgtctgtcggccgctgggtttgttttcacgtgcggatcggattttcgtggtcacta

SEQ ID NO: 10075 - DNA, 120 bp, synthetic construct
  misc_feature 1..120: note = Artificially Synthesized Probe
  source 1..120: mol_type = other DNA
gctcagggccctcgggcatcgggaggggagcggtgcgcgttggagggtcccgatgggggccggaatcagctggggccattctggggcgctttctctcggctctgggctcgcgactgggag

SEQ ID NO: 10076 - DNA, 120 bp, synthetic construct
  misc_feature 1..120: note = Artificially Synthesized Probe
  source 1..120: mol_type = other DNA
ttgctcggattgtttccttgtgtttgtgttttgagatgcgtttgcttgtgtcatgtttgttttccattttggcaggggaaaggttttccaggaagaaaggttgttgccagtggatttggt

SEQ ID NO: 10077 - DNA, 120 bp, synthetic construct
  misc_feature 1..120: note = Artificially Synthesized Probe
  source 1..120: mol_type = other DNA
tctgctgcccttgctgggttttgccttgcggcttaggtctttctatttctctctctatccctcactgtcggtaacgcctaagaaccaagtttacttaatggtgtgtgtgtgtgtgtgcgc

SEQ ID NO: 10078 - DNA, 120 bp, synthetic construct
  misc_feature 1..120: note = Artificially Synthesized Probe
  source 1..120: mol_type = other DNA
ccaacagcaacaaaacattttgcgtagtcggagttatcagtgtcaactggtggattgagagtttgtgtctaagaagtccttccttatgcactggatgatttcaaaagaaaggagaaaaga

SEQ ID NO: 10079 - DNA, 120 bp, synthetic construct; identical to SEQ ID NO: 6886
  misc_feature 1..120: note = Artificially Synthesized Probe
  source 1..120: mol_type = other DNA

SEQ ID NO: 10080 - DNA, 120 bp, synthetic construct
  misc_feature 1..120: note = Artificially Synthesized Probe
  source 1..120: mol_type = other DNA
cttcaccgtctttctgattccagtctccgccaggatgtctgcggtcatgggcaaggcggagagtttctgcaaatatttctctagctttttcggctccgtcttagtggccagacgcacctg

SEQ ID NO: 10081 - DNA, 120 bp, synthetic construct
  misc_feature 1..120: note = Artificially Synthesized Probe
  source 1..120: mol_type = other DNA
aaaagcgaaaataacaacaccgcaagacagaatcgtaggaagaagaaccaacagaggatgacaactctttacctggcattgacgttgtgtgaggggacttggaaacattggtagaaaagt

SEQ ID NO: 10082 - DNA, 120 bp, synthetic construct
  misc_feature 1..120: note = Artificially Synthesized Probe
  source 1..120: mol_type = other DNA
ctgaatgaggtttatcttgtaaataggtgggaagagaattgagctgtcctgggtcagtgtagtaatgttacagcaggatccttaggttgatgctgaattctatctggggtagatttatat

SEQ ID NO: 10083 - DNA, 120 bp, synthetic construct
  misc_feature 1..120: note = Artificially Synthesized Probe
  source 1..120: mol_type = other DNA
ttctgctgcccttgctgggttttgccttgcggcttaggtctttctatttctctctctatccctcactgtcggtaacgcctaagaaccaagtttacttaatggtgtgtgtgtgtgtgtgcg

SEQ ID NO: 10084 - DNA, 120 bp, synthetic construct
  misc_feature 1..120: note = Artificially Synthesized Probe
  source 1..120: mol_type = other DNA
gtggattgagagtttgtgtctaagaagtccttccttatgcactggatgatttcaaaagaaaggagaaaagacaaaagggaatctcacatcttgtacctgatttatgattgcaactagggc

SEQ ID NO: 10085 - DNA, 120 bp, synthetic construct
  misc_feature 1..120: note = Artificially Synthesized Probe
  source 1..120: mol_type = other DNA
cctgtggcttttcttccttgaagtcctggaggcaatgaatcctccataattcatctgtctctcgagcgagtgcggcattgtctttctctgtgcggtacagctgatcgggcgtccaccctt

SEQ ID NO: 10086 - DNA, 120 bp, synthetic construct
  misc_feature 1..120: note = Artificially Synthesized Probe
  source 1..120: mol_type = other DNA
gcttcaccgtctttctgattccagtctccgccaggatgtctgcggtcatgggcaaggcggagagtttctgcaaatatttctctagctttttcggctccgtcttagtggccagacgcacct

SEQ ID NO: 10087 - DNA, 120 bp, synthetic construct
  misc_feature 1..120: note = Artificially Synthesized Probe
  source 1..120: mol_type = other DNA
tgaggggacttggaaacattggtagaaaagtgggattaagggagaaagaggaaaaaggcgtattttactcctcaacctcggctccatcagcatcaagacccttctggaagcagtgtcttt

SEQ ID NO: 10088 - DNA, 120 bp, synthetic construct
  misc_feature 1..120: note = Artificially Synthesized Probe
  source 1..120: mol_type = other DNA
ttttttgagttttatatggttactggcagtgtcacatcccttttcccagaaagaatgctttcttgtcttcctgaaatgcagtatccctttgtctccatcctggcttttttcctgtgtgtg

SEQ ID NO: 10089 - DNA, 120 bp, synthetic construct
  misc_feature 1..120: note = Artificially Synthesized Probe
  source 1..120: mol_type = other DNA
gtgtttttaaaaattatcagtgaacatccaaaatagaattgttcccaatgcgttcatatcttctgaattctgaggtgttctccaagctgggaggtagtggctgggtgtgggaggcaaaat

SEQ ID NO: 10090 - DNA, 120 bp, synthetic construct
  misc_feature 1..120: note = Artificially Synthesized Probe
  source 1..120: mol_type = other DNA
gtgcccttggattcgtttgctttcctttgtttatctccaagtgcagtggtggcagattttccagtctttttcttttgcttccgcaactgatcgtaggtgaggtatttttcacatgacaga

SEQ ID NO: 10091 - DNA, 120 bp, synthetic construct
  misc_feature 1..120: note = Artificially Synthesized Probe
  source 1..120: mol_type = other DNA
atgatttctccctgatcaaagtaggggagtgccaatctccctgggcacacaaggggcgtttttcctggcgagacgatttgtgccccttgctgtggctcacaacggctttcccctggggtt

SEQ ID NO: 10092 - DNA, 120 bp, synthetic construct
  misc_feature 1..120: note = Artificially Synthesized Probe
  source 1..120: mol_type = other DNA
ccgttgaccttccatgttcgcaggttccacatctgtgaattccaaaaaacacagactgaatcttcttgggagtaaaacagaaaataacacagcaagacaaaatcatagaaagaagaacca

SEQ ID NO: 10093 - DNA, 120 bp, synthetic construct
  misc_feature 1..120: note = Artificially Synthesized Probe
  source 1..120: mol_type = other DNA
gtcttttctggatctgtagacacttcttttgatatttctagcatttttttgggttgtacagcatttgaaagttaggaagtttcctggcagagccaggagatagtcaggaaacaaacaaga

SEQ ID NO: 10094 - DNA, 120 bp, synthetic construct
  misc_feature 1..120: note = Artificially Synthesized Probe
  source 1..120: mol_type = other DNA
acagtgcccgaccatgaaaagccatttttgatgcagcctcattaccagacagagttctaaaggactcagccaatccccattatagacatcgactcttttgcaaactgtgattctaataaa

SEQ ID NO: 10095 - DNA, 120 bp, synthetic construct
  misc_feature 1..120: note = Artificially Synthesized Probe
  source 1..120: mol_type = other DNA
actgcaaagagaaatgtctgctgtaaatgaatatgtgaagattctgaacacagaaatgcctgtattactcttctgttcagtaagtctactcctgtagtcacactgatagagcaaggctgg

SEQ ID NO: 10096 - DNA, 120 bp, synthetic construct
  misc_feature 1..120: note = Artificially Synthesized Probe
  source 1..120: mol_type = other DNA
accaattactatccctaatattggcatagcacccccacagttttcaaagcactttccaggctttatttcatgtgatgtacaggacactgtgttagaacctctaatatggagggatatgga

SEQ ID NO: 10097 - DNA, 120 bp, synthetic construct
  misc_feature 1..120: note = Artificially Synthesized Probe
  source 1..120: mol_type = other DNA
aaattgaacaaagtatagagaattcccacgtacctctctgcatgctcaccttcccccactgtcaacatcccaaaatacagtggtatgttgttaaatcgatgaacctacactggcatgatt

SEQ ID NO: 10098 - DNA, 120 bp, synthetic construct
  misc_feature 1..120: note = Artificially Synthesized Probe
  source 1..120: mol_type = other DNA
aagggttgcaattgttgggtcagagtaattgctgagtaagagtatggttagtctttactttaaaaaaacctgccaaagtgcctttcaaagtgtttgtactgttttgcatcccaccagcaa

SEQ ID NO: 10099 - DNA, 120 bp, synthetic construct
  misc_feature 1..120: note = Artificially Synthesized Probe
  source 1..120: mol_type = other DNA
gagaacatgagaatttctagcttgacaatggctaggcagtgaatggaaaatgacctacaccaaagaaattgtgtaattttagaaccctagggttaaaaatgagatcgtaggctgggcgcg

SEQ ID NO: 10100 - DNA, 120 bp, synthetic construct
  misc_feature 1..120: note = Artificially Synthesized Probe
  source 1..120: mol_type = other DNA
ggatagaggctccaagagggaagcaagaggtgagtgagtagaaaggacacaaaatcttatgtatttgatggcatgggaagtgatatgagatgtgttagtgttttgattattaacaatacg

SEQ ID NO: 10101 - DNA, 120 bp, synthetic construct
  misc_feature 1..120: note = Artificially Synthesized Probe
  source 1..120: mol_type = other DNA
ccggtgtggtggctcacgcctgtaatcccagcactttgaaaggacaaagtaagaagattgcttgaggccaggaatttgagaacaacttagccaacattgtgagactctcatctctacaaa

SEQ ID NO: 10102 - DNA, 120 bp, synthetic construct
  misc_feature 1..120: note = Artificially Synthesized Probe
  source 1..120: mol_type = other DNA
tttcctaaatgtagcacattaacactgtgaataagtgcacggattcatccagtttgagcaaagaccttatcatacaggagttgtccttttatggcctctgctattctcagtggctattct

SEQ ID NO: 10103 - DNA, 120 bp, synthetic construct
  misc_feature 1..120: note = Artificially Synthesized Probe
  source 1..120: mol_type = other DNA
gagcagaaagtacagagttctgtatgccccttcccttttccagtttcctctcccagtgacatctgtattgatgtggtttattactaccgttgatgagccaatacattattaactgaagtc

SEQ ID NO: 10104 - DNA, 120 bp, synthetic construct
  misc_feature 1..120: note = Artificially Synthesized Probe
  source 1..120: mol_type = other DNA
aattacagtaagggctgctgctactgtgctggatgatataagagtaagagagctgctccacaaagtgtttgaagggcactatctactttatattcgcttttcttttcaaatttcagccag

SEQ ID NO: 10105 - DNA, 120 bp, synthetic construct
  misc_feature 1..120: note = Artificially Synthesized Probe
  source 1..120: mol_type = other DNA
gggtagcatatgagaaagtgctaagtgttcaatctatgacagggctgtggggcttgttgtcatagggacggcttccaggatatgcgtataaacttagaagccagactctttttttttttt

SEQ ID NO: 10106 - DNA, 120 bp, synthetic construct
  misc_feature 1..120: note = Artificially Synthesized Probe
  source 1..120: mol_type = other DNA
gcacttggagcagtagttatacagaatattaataggtgttaaagagttttgtggtcaggtaagcttggcagatattgggttaaattaaactaggtccctcatttcaggacttctcagacc

SEQ ID NO: 10107 - DNA, 120 bp, synthetic construct
  misc_feature 1..120: note = Artificially Synthesized Probe
  source 1..120: mol_type = other DNA
gtgtcaataaaagagatctgccttaacgaagttctacaaattcagcagaggatagattactgtggattaaaataaacaatcagggaaagctttgtagagagggtgacgtgagctggactt

SEQ ID NO: 10108 - DNA, 120 bp, synthetic construct
  misc_feature 1..120: note = Artificially Synthesized Probe
  source 1..120: mol_type = other DNA
gagaagaggagggctactaaaaaagaaagttttctctttctactttcctggatctagattcaaatgaaacagaaagaactctaacctgcagcagaaatctgaatctggggtccttggatg

SEQ ID NO: 10109 - DNA, 120 bp, synthetic construct
  misc_feature 1..120: note = Artificially Synthesized Probe
  source 1..120: mol_type = other DNA
cctgttagccattattcttttcacctcagttaatttcttctttttattctgtgaaactgccaggtatatcgatacagcaaatgctttggagcaagaaactaaactggggttacgacggtt

SEQ ID NO: 10110 - DNA, 120 bp, synthetic construct
  misc_feature 1..120: note = Artificially Synthesized Probe
  source 1..120: mol_type = other DNA
catgatctcacttccagatggctagttcccatctagcatgatacccaaattctcctatgatattggacacgttatttttattttaactagcagagtatgacttcagtgttccctgccaga

SEQ ID NO: 10111 - DNA, 120 bp, synthetic construct
  misc_feature 1..120: note = Artificially Synthesized Probe
  source 1..120: mol_type = other DNA
agtgagttcctggcacacagtgagcacccaagatataatattttccctcttttcatcatttagttaatttcaagcactcccagatcagatgtcctgacctgtctgaagatcaacaatgag

SEQ ID NO: 10112 - DNA, 120 bp, synthetic construct
  misc_feature 1..120: note = Artificially Synthesized Probe
  source 1..120: mol_type = other DNA
cacatttgacagtgtgggggctcctcagctcctctctgagtagatgtttgtatgtggcaagtgtaaaagttgaatagcaaatggttagaatcaggaggaataactaggaaagtaatgaat

SEQ ID NO: 10113 - DNA, 120 bp, synthetic construct
  misc_feature 1..120: note = Artificially Synthesized Probe
  source 1..120: mol_type = other DNA
attgcattgctttgtacattagtgctcttgtattttggtcttgttaaagcagatcttggggatcagttgcatccaatgggaaatcaaagtgggaatatagaatccctgtttcctgccagc

SEQ ID NO: 10114 - DNA, 120 bp, synthetic construct
  misc_feature 1..120: note = Artificially Synthesized Probe
  source 1..120: mol_type = other DNA
tgaatgggaggactcctttctctctcacacctttctcctggtctaatgctccttttaaggaaggtggaaggaacaatggaagaatgcttgtaaagtaatgtattcttaagaactaaagct

SEQ ID NO: 10115 - DNA, 120 bp, synthetic construct
  misc_feature 1..120: note = Artificially Synthesized Probe
  source 1..120: mol_type = other DNA
tcaatggctcctgactcaggaggctcatgtccagaaccttcttagttaggactaaacatcccaggtttcaaaggaaagaggaccaatggaaactgagaaaaggaattaaaaaaattaatg

SEQ ID NO: 10116 - DNA, 120 bp, synthetic construct
  misc_feature 1..120: note = Artificially Synthesized Probe
  source 1..120: mol_type = other DNA
atttttgtcaaacaggaaagttaagatgtgatttttgaaggttggctgtgaggtaaatggagaagagcgtcagaaaatgggttcttctttggaatctcctttctgaatgaatgggctggc

SEQ ID NO: 10117 - DNA, 120 bp, synthetic construct
  misc_feature 1..120: note = Artificially Synthesized Probe
  source 1..120: mol_type = other DNA
caacacctcccttggaaaaatgtctccttgttcaccttcactgcttctattgtgttttcagtcacctttgcctagcttttttgtggcataagtttctcttgtgaatgcctcacattgaaa

SEQ ID NO: 10118 - DNA, 120 bp, synthetic construct
  misc_feature 1..120: note = Artificially Synthesized Probe
  source 1..120: mol_type = other DNA
attattatttttttttttggtgcatccttgctttttccttcctacctctaggggggacagggtgatattggaaggatcatgggttgggagagagattaagtgggtttaaatcctggcctt

SEQ ID NO: 10119 - DNA, 120 bp, synthetic construct
  misc_feature 1..120: note = Artificially Synthesized Probe
  source 1..120: mol_type = other DNA
tgtgtcttggtttaatgaaactgagttattaagaagagtcttctcttatgttctcatggcataaataaccattcctccctttcagggccaaatcattgacttccaagggctgctcacaga

SEQ ID NO: 10120 - DNA, 120 bp, synthetic construct
  misc_feature 1..120: note = Artificially Synthesized Probe
  source 1..120: mol_type = other DNA
tttaaaaagtcagagcctagaaatagagacgtcgggagtctgatgatatcatcattgaaaatctccatgaaaaacacaattagcaggaaagactaccatccagactacggacttttccag

SEQ ID NO: 10121 - DNA, 120 bp, synthetic construct
  misc_feature 1..120: note = Artificially Synthesized Probe
  source 1..120: mol_type = other DNA
agagctcaccacctcatgaggtagtcctgttgagttctgactgttaactttggattgatacaaggagaaactgtcagttgggaaattaaacattaccttgtggaactcaactctagaaga

SEQ ID NO: 10122 - DNA, 120 bp, synthetic construct
  misc_feature 1..120: note = Artificially Synthesized Probe
  source 1..120: mol_type = other DNA
aaatgaacctcctatggtggagggaactggatgggtggggagcaggagtagcacaaacatctcaccagcatttaaaaaatgtatttatatttttggtccatgtgcatatattacttatta

SEQ ID NO: 10123 - DNA, 120 bp, synthetic construct
  misc_feature 1..120: note = Artificially Synthesized Probe
  source 1..120: mol_type = other DNA
gagatcaaggagcaagagcaaggccaggcactggctaggaactatgtttcacagtaaaacctaatgtaagttgaaggcatattctgtagcttctttaattatggttataaatcagcatgg

SEQ ID NO: 10124 - DNA, 120 bp, synthetic construct
  misc_feature 1..120: note = Artificially Synthesized Probe
  source 1..120: mol_type = other DNA
cagtcctgctcacatggtggcagtgggttcccagaaagaggcaagaaagggaaagttctaattcacaagcatctttcatgcctcttatatttttttgctagtcttatattttcaagtctt

SEQ ID NO: 10125 - DNA, 120 bp, synthetic construct
  misc_feature 1..120: note = Artificially Synthesized Probe
  source 1..120: mol_type = other DNA
gtcctgttcagcgttggtgtctcttaatgcgtttgcccctgaatattcccaacttccaaaacaagtttcaccgtagctctgtactttattcgaataaacctttactaattggttctagta

SEQ ID NO: 10126 - DNA, 120 bp, synthetic construct
  misc_feature 1..120: note = Artificially Synthesized Probe
  source 1..120: mol_type = other DNA
acgtgtggatgttaattgtgcccccatcagcaaaacatgatctcccttcctttgggaatttgatcaacagctctttttttattcatgcaatttaggcatgaaagctgggggaaaaaaatc

SEQ ID NO: 10127 - DNA, 120 bp, synthetic construct
  misc_feature 1..120: note = Artificially Synthesized Probe
  source 1..120: mol_type = other DNA
gttacccattcaagatggtaatttgtggaaatctacattgatatcttctatttctttgttcttcatcttgcatctaactcagtgccagttccgaagatggggcttgaatttagctgcacc

SEQ ID NO: 10128 - DNA, 120 bp, synthetic construct
  misc_feature 1..120: note = Artificially Synthesized Probe
  source 1..120: mol_type = other DNA
cgagcacaagacactgctaggtacacgaaggaaggtgacatactcttgagacaggacttacctagacagaagaggaaactcaggaagtttataatattcctaacaaagattgaagttaca

SEQ ID NO: 10129 - DNA, 120 bp, synthetic construct
  misc_feature 1..120: note = Artificially Synthesized Probe
  source 1..120: mol_type = other DNA
gcataagccaccatgcctagcatctccctgcctttctaaatacaagtaggaacatactatgtgttcccttttgtacctggcttttcccccaacttaatatatataacttggatattgttc

SEQ ID NO: 10130 - DNA, 120 bp, synthetic construct
  misc_feature 1..120: note = Artificially Synthesized Probe
  source 1..120: mol_type = other DNA
ttaacttcctccaggttcctctgaaaattttagactaatgcttccagaaacacttacccatgattctgtatattccctatgagtggaaagagcaatgcagaggacagtatgaatgcctag

SEQ ID NO: 10131 - DNA, 120 bp, synthetic construct
  misc_feature 1..120: note = Artificially Synthesized Probe
  source 1..120: mol_type = other DNA
tgttacccatgatgggaacccaatccttcccctgaaatcctttcttctgagaataacctcccattgttcccaaagattaagggaagaattatcaaatgattatacatattccaaggctct

SEQ ID NO: 10132 - DNA, 120 bp, synthetic construct
  misc_feature 1..120: note = Artificially Synthesized Probe
  source 1..120: mol_type = other DNA
tgtggcatcaggttatggctcagcagggctgactttaaatatgttacatatattatctctaaagattgtcactgaatatcctcagcaggcaggaacacttctcagactgtaataagcctt

SEQ ID NO: 10133 - DNA, 120 bp, synthetic construct
  misc_feature 1..120: note = Artificially Synthesized Probe
  source 1..120: mol_type = other DNA
tgtgtgctatgtaagtgaaagggattatcctcaattatgtcatttttaaagaggtaaataatgctgcaggtagacacagttgggctgcatttaatctaccagtgggactgtggacccttt

SEQ ID NO: 10134 - DNA, 120 bp, synthetic construct
  misc_feature 1..120: note = Artificially Synthesized Probe
  source 1..120: mol_type = other DNA
aggtccccaatccttgctgtctgtaccacgaaagatctgccttaacagaggaaacacaggccagggtgaccattaacaatatttaaaatggacatttcaagattaaagccaaattacata

SEQ ID NO: 10135 - DNA, 120 bp, synthetic construct
  misc_feature 1..120: note = Artificially Synthesized Probe
  source 1..120: mol_type = other DNA
tgtgccctggggagacctacatattttctggaagaatagaggaccttctacccccagtgaatacctaagaatttgttgagaaacttattgtgctgtttcgattttcctaagcccaaataa

SEQ ID NO: 10136 - DNA, 120 bp, synthetic construct
  misc_feature 1..120: note = Artificially Synthesized Probe
  source 1..120: mol_type = other DNA
agagggattgtcttgcaggatgtccacactttctggattaggctcattgtgtcctcatggtagtagggttgttcttactcctgtaattagactaaaggttagatagattatattcaggat

SEQ ID NO: 10137 - DNA, 120 bp, synthetic construct
  misc_feature 1..120: note = Artificially Synthesized Probe
  source 1..120: mol_type = other DNA
tgagtagaattattgggtcatacggccactctacgtttgattagttgaggaacagcccaactgttttacaaagatgttgcaccatttcacatgaagcaaattcacacttcacaagcaaag

SEQ ID NO: 10138 - DNA, 120 bp, synthetic construct
  misc_feature 1..120: note = Artificially Synthesized Probe
  source 1..120: mol_type = other DNA
ggatgactcagctccattttgtacattttgctcctagaatcagccacttattcatgaagcccttgtgcctttagtgggaaatgatgttaatattcagagattacagtctcacaattaggc

SEQ ID NO: 10139 - DNA, 120 bp, synthetic construct
  misc_feature 1..120: note = Artificially Synthesized Probe
  source 1..120: mol_type = other DNA
ataataatttatcccaccagccacctaatgataggcatttgggttaatcctattaacccaaattaaaaagaatgctgccgtgagcagcagtgtggagaccacactttgtgtatttgctag

SEQ ID NO: 10140 - DNA, 120 bp, synthetic construct
  misc_feature 1..120: note = Artificially Synthesized Probe
  source 1..120: mol_type = other DNA
ttgatgtgccttgattgttgagtattcacaaactcaagcctaagggtcaggaaacaaaatactgaacaggcccattaaggcaaatgtcatctttaaatacctatttaactctctgggagt

SEQ ID NO: 10141 - DNA, 120 bp, synthetic construct
  misc_feature 1..120: note = Artificially Synthesized Probe
  source 1..120: mol_type = other DNA
tcctattcataattgcagccccggccccagctccctatgctgcattcttgctttgtgtttcttcctgtgctgttaccagaagtgatactaatttggaattaatggcgattaagctttaca

SEQ ID NO: 10142 - DNA, 120 bp, synthetic construct
  misc_feature 1..120: note = Artificially Synthesized Probe
  source 1..120: mol_type = other DNA
acaccctgtctcttaaaaaaaaatgctattgtgctttgtgactctctatgaaaaataagataaagcagtactttccacacttatctgaccccactcctttcctcaaggagtatctcacaa

SEQ ID NO: 10143 - DNA, 120 bp, synthetic construct
  misc_feature 1..120: note = Artificially Synthesized Probe
  source 1..120: mol_type = other DNA
tactaagcagtaaccttgctcttgcttcgttcacaccttactgtttgatctcatcagacaaaaacaactttcaacctggttattctggcattaccttttcttcttcacagggtgtaggtt

SEQ ID NO: 10144 - DNA, 120 bp, synthetic construct
  misc_feature 1..120: note = Artificially Synthesized Probe
  source 1..120: mol_type = other DNA
aaaactccattgtatgtgtgtaccataatttatttgacttttctttttcttgagcgtttttaatctggtgccagcctgttgaacaccttttcccactaccatgactcagtgccctgctgg

SEQ ID NO: 10145 - DNA, 120 bp, synthetic construct
  misc_feature 1..120: note = Artificially Synthesized Probe
  source 1..120: mol_type = other DNA
ttactgtgtcagtctttaaatcacttttagctaatttccctgttcagaattttttggaccatgccaataagaggagatctgtggtcctaacttatcagtgaacactttctcccaccccaa

SEQ ID NO: 10146 - DNA, 120 bp, synthetic construct
  misc_feature 1..120: note = Artificially Synthesized Probe
  source 1..120: mol_type = other DNA
gggtctctgtggaggccacatctgtcagctgattttcaaaagtactgcccagccacatgggttcaatgaatcatcccctaaactcattgtttccattattttcactaaagattaaaatat

SEQ ID NO: 10147 - DNA, 120 bp, synthetic construct
  misc_feature 1..120: note = Artificially Synthesized Probe
  source 1..120: mol_type = other DNA
tataaacatgactcgacttttgatagacaaagtgaaagttccacataaggaaaatggcctgagtagaaactcagaactaggatggcaaaaagtggattctgagaatggcaagcagaccag

SEQ ID NO: 10148 - DNA, 120 bp, synthetic construct
  misc_feature 1..120: note = Artificially Synthesized Probe
  source 1..120: mol_type = other DNA
cagttttgaggtaaatctcttgctttagggcattagctaatcaatacagacatctgtagtgagggattgttttccacatcatctacaagactccattttcctagggcattctggagggtt

SEQ ID NO: 10149 - DNA, 120 bp, synthetic construct
  misc_feature 1..120: note = Artificially Synthesized Probe
  source 1..120: mol_type = other DNA
tcttgaatcccttatagtcctttggtgtggtttactctcctcctttggagagaatcctccaatgctttcctgataaagagtacatgggaggtaatttttttttaggcctcacatgttgaa

SEQ ID NO: 10150 - DNA, 120 bp, synthetic construct
  misc_feature 1..120: note = Artificially Synthesized Probe
  source 1..120: mol_type = other DNA
caccatgcctggccttgtgtgtctttcttgtcctactctgtgagagatttctccagctttatcttctaaattttccattgtgtttttaatttcttctatcatattttgtattctcgttac

SEQ ID NO: 10151 - DNA, 120 bp, synthetic construct
  misc_feature 1..120: note = Artificially Synthesized Probe
  source 1..120: mol_type = other DNA
ccctcacctctaaaggtagaagaagatactgccaagtctcttggggattctgtgactcagattatttcttgactttctttactgctgatttagaaagcagcttctcagttctactaagtt

SEQ ID NO: 10152 - DNA, 120 bp, synthetic construct
  misc_feature 1..120: note = Artificially Synthesized Probe
  source 1..120: mol_type = other DNA
tggctgtatattattgctgagtatgaacaaggaagaaaccatctgaagcaaagatgagcacatcctcaattggagtgctaggcaaagttctgctgtgaagcgtgtttttttcttcttttc

SEQ ID NO: 10153 - DNA, 120 bp, synthetic construct
  misc_feature 1..120: note = Artificially Synthesized Probe
  source 1..120: mol_type = other DNA
gtaaccaaatagcctcagctgatgagggaaagctctgctttacataatagtgctatgtaatttcataataactccaaataatgtatttggaatgaaaaatccaggccaggcgtggtggtt

SEQ ID NO: 10154 - DNA, 120 bp, synthetic construct
  misc_feature 1..120: note = Artificially Synthesized Probe
  source 1..120: mol_type = other DNA
tcaaaaagggtctagggcaagcaggctggcctagattaaaaagaggtttaagagacagaaccatacatgatgcatatgtgttcactggattttgtcagaaaatgatggaaggtattttgg

SEQ ID NO: 10155 - DNA, 120 bp, synthetic construct
  misc_feature 1..120: note = Artificially Synthesized Probe
  source 1..120: mol_type = other DNA
agtgaggggtcattcactccagaaggactgagaattttggaagaattaatgtacttagagtgcccaacttattgtcagcaataatttactcactggcaagatcggactgaataattcatg

SEQ ID NO: 10156 - DNA, 120 bp, synthetic construct
  misc_feature 1..120: note = Artificially Synthesized Probe
  source 1..120: mol_type = other DNA
caaagaatgactgtgatgattacataacagaaaaactccaggtacatgtctattatgcccattatcactggtgtccattcccagggtgttgcagaaatgttgcctgcttttggtgaacat

SEQ ID NO: 10157 - DNA, 120 bp, synthetic construct
  misc_feature 1..120: note = Artificially Synthesized Probe
  source 1..120: mol_type = other DNA
ttatgcattattttgaaagaaggtctattagcgtttcaagagcattgatcaccaagaggtcgattgttgtgctgttactgttgtgttcttatcctagaaagcagcgacttacccaggatc

SEQ ID NO: 10158 - DNA, 120 bp, synthetic construct
  misc_feature 1..120: note = Artificially Synthesized Probe
  source 1..120: mol_type = other DNA
ttataaacaactagacgcatctctctcagaaacccacaatccgaggcatctactttcaacccttgataaattttgaaggcttctactaagtaatgccacttcttttcccccactagaact

SEQ ID NO: 10159 - DNA, 120 bp, synthetic construct
  misc_feature 1..120: note = Artificially Synthesized Probe
  source 1..120: mol_type = other DNA
tagtccatttgcttgtggccactaccatcatttctaattttataaaatctcaactgctgttgtgaatttgctgcagtgggaaagttggtgctgtatgtatacccaaaagtgactgggtaa

SEQ ID NO: 10160 - DNA, 120 bp, synthetic construct
  misc_feature 1..120: note = Artificially Synthesized Probe
  source 1..120: mol_type = other DNA
aaatatggtaacaagtgtctgaaaatatgtggctcaatttgtctcccggttacttttccctctccccctttaaaatgtagaggaaggagaagaagagataagaggtttgtgagtgaagac

SEQ ID NO: 10161 - DNA, 120 bp, synthetic construct
  misc_feature 1..120: note = Artificially Synthesized Probe
  source 1..120: mol_type = other DNA
ttccccttggtatgcattctgaagggggcatttttttctcctccatctcagccctgtacaaagcaagttctttctagattgaggtgtgtatgtgtgtctatgtatatgagtgtatgtgcc

SEQ ID NO: 10162 - DNA, 120 bp, synthetic construct
  misc_feature 1..120: note = Artificially Synthesized Probe
  source 1..120: mol_type = other DNA
ccactgacagtctatcacaaaagaacgtgattttagagaaacagtgaaacagtgtcattaatccacccctcaccccttacaacagccaaaaagaaatccagtggtatccatcacaataaa

SEQ ID NO: 10163 - DNA, 120 bp, synthetic construct
  misc_feature 1..120: note = Artificially Synthesized Probe
  source 1..120: mol_type = other DNA
gaatgagcttctttaatatgcattgctgcatattgtggcgtatggggttgcatgtgtgcattttggtttacctaaatggtatcaggtcatccaactcattcagtctccttctttttcctc

SEQ ID NO: 10164 - DNA, 120 bp, synthetic construct
  misc_feature 1..120: note = Artificially Synthesized Probe
  source 1..120: mol_type = other DNA
ttaggagcttaaagtagctgagtagaacatggcctggagtagaacatggcctcggggggactgttgtaactacaggtgaaggatgtatttgggaagacagtttatggccagaatcgctat

SEQ ID NO: 10165 - DNA, 120 bp, synthetic construct
  misc_feature 1..120: note = Artificially Synthesized Probe
  source 1..120: mol_type = other DNA
ctgggcacgcaaccacacaggagctgcccatgaatgtttatcgaatagatgccaccagaacttaataccttttgaccagtggggcttgactctttataacctgcttactccaatgaacag

SEQ ID NO: 10166 - DNA, 120 bp, synthetic construct
  misc_feature 1..120: note = Artificially Synthesized Probe
  source 1..120: mol_type = other DNA
attcaggtccttgttcttgtacaaaactagcatttagccccattctaaccatcggggtaggcaggaattgtttggtaacagatccaaactcaacgctcaaccatttctttttaaatgacc

SEQ ID NO: 10167 - DNA, 120 bp, synthetic construct
  misc_feature 1..120: note = Artificially Synthesized Probe
  source 1..120: mol_type = other DNA
agaaaataatggttcctggatctcacccctagagattttaatgtctttggtctgggttcctgcctgactcagagactttttagaaacctcccaaatgatcctaatttgtagccaagattg

SEQ ID NO: 10168 - DNA, 120 bp, synthetic construct
  misc_feature 1..120: note = Artificially Synthesized Probe
  source 1..120: mol_type = other DNA
gtcatctgttagcaattgactcacatattattagtatagaaaagagcaattcccaggaccttgtacagaggaagcaggctcaaaacagctgaggaataggccacttttatcagatagcat

SEQ ID NO: 10169 - DNA, 120 bp, synthetic construct
  misc_feature 1..120: note = Artificially Synthesized Probe
  source 1..120: mol_type = other DNA
cctctcattcttttgttattattagcaaattcccccagttcctgatcattctttcttaagcctttagtgactgggtaaggttcttgtggctgactccaagctttcttctaaaaggaatag

SEQ ID NO: 10170 - DNA, 120 bp, synthetic construct
  misc_feature 1..120: note = Artificially Synthesized Probe
  source 1..120: mol_type = other DNA
ttcctcacctgaacagtgagaatgatggaatctaccctgagtatatatcccaggtctttgtgcagcatggaatcagcccccagccttcctagctcttgctttattttattttattttaga

SEQ ID NO: 10171 - DNA, 120 bp, synthetic construct
  misc_feature 1..120: note = Artificially Synthesized Probe
  source 1..120: mol_type = other DNA
gtgtgcgcgtgtgtgtgtgtgtaacccaccttatttctaaaaaaaaattttggcagtcagtgactattaatagtagagcacaaactcttaacctttttttcctcccgctttcccagagtc

SEQ ID NO: 10172 - DNA, 120 bp, synthetic construct
  misc_feature 1..120: note = Artificially Synthesized Probe
  source 1..120: mol_type = other DNA
gggcaaagcattatgcaatagattgggcacatgcgcacgtctctgctacttagtcaactttcttctaaagtttcccacttttcccattaccacaatcaagatcagatatcagtaatattc

SEQ ID NO: 10173 - DNA, 120 bp, synthetic construct
  misc_feature 1..120: note = Artificially Synthesized Probe
  source 1..120: mol_type = other DNA
caaaccatgcaatgatgcaggtgacttcccagcaaatttcatagcgttgctcaccagcttggcaggcaagaggagaaggggcagtccccaaaagacaatcccatgaaccttctagggaat

SEQ ID NO: 10174 - DNA, 120 bp, synthetic construct
  misc_feature 1..120: note = Artificially Synthesized Probe
  source 1..120: mol_type = other DNA
tgtgagtcagcgtgcccagactgaaatctatttattctatggaaaggatcagagctgtagaaaaatccttatgcatgtaaaagttctttgtgtttttacttgcaataactagaatctaaa

SEQ ID NO: 10175 - DNA, 120 bp, synthetic construct
  misc_feature 1..120: note = Artificially Synthesized Probe
  source 1..120: mol_type = other DNA
atgctgtacatatgcaggatcctcctgcctacatctccaaatggataatggattgaagcaaaatgtttgtcccaccaaacattgatgtgtaacccttttagtaacaattcatagaccagg

SEQ ID NO: 10176 - DNA, 120 bp, synthetic construct
  misc_feature 1..120: note = Artificially Synthesized Probe
  source 1..120: mol_type = other DNA
ctcatcctttcttaggaaaatctcaagtcttaacttgaaagttgaatgtcctgcttttgttcctaactctgctcacaggatagtggaagaagaaaggctcagcctgttaccagaaagaac

SEQ ID NO: 10177 - DNA, 120 bp, synthetic construct
  misc_feature 1..120: note = Artificially Synthesized Probe
  source 1..120: mol_type = other DNA
gccactgaacgggatccaggactttttcaaatctcagatccccagcaaaggtatgacaatgggcaccctgaccagctctgagcctctaagcatagggtctatttgtttaattttgaattc

SEQ ID NO: 10178 - DNA, 120 bp, synthetic construct
  misc_feature 1..120: note = Artificially Synthesized Probe
  source 1..120: mol_type = other DNA
atcattttagagcaatggttattaatttttttcagattcttcttgggaattagagaaaaacttatggctctcctccaccatcctgcccccacctaccccaatgcacacatgtgcaacatt

SEQ ID NO: 10179 - DNA, 120 bp, synthetic construct
  misc_feature 1..120: note = Artificially Synthesized Probe
  source 1..120: mol_type = other DNA
tggatggatgtgggttggcatggtcctctatgggcattaaatgaataaatggatatagcagagggagtatccagcatgactcaaagaaggatgagaggaaacatattcaaataaaatctt

SEQ ID NO: 10180 - DNA, 120 bp, synthetic construct
  misc_feature 1..120: note = Artificially Synthesized Probe
  source 1..120: mol_type = other DNA
ctaggaaggtaagcaggaggaataagtgtgaatgacagtatctaaattaaaatctgttgccacgaaagaagatcagaccttttctcctctgatttgtccttctagaagtcacaagatgcc

SEQ ID NO: 10181 - DNA, 120 bp, synthetic construct
  misc_feature 1..120: note = Artificially Synthesized Probe
  source 1..120: mol_type = other DNA
cccaagatggcagacaggaaccaagtacttgcttaaagtcaggaactagggtggggccccgaaagaaagacagtgcctcactgctgcctagggaccaaggttttagaaaaataaggttga

SEQ ID NO: 10182 - DNA, 120 bp, synthetic construct
  misc_feature 1..120: note = Artificially Synthesized Probe
  source 1..120: mol_type = other DNA
ccaaggcaactagggtctggagcagaccctgagcaaaccacagcagccctgcggaagagtgacctgactgataaaagaaaaacaaacaaacaaacagaaagcaccaccgacaacatcaac

SEQ ID NO: 10183 - DNA, 120 bp, synthetic construct
  misc_feature 1..120: note = Artificially Synthesized Probe
  source 1..120: mol_type = other DNA
agagattttcagaatttcatagatgaaaacaattcacatttgctaaaatgtatcctattaatactaacggttgtacttcagccataagaaaagaggacagaagggaatgtgtgaaagtca

SEQ ID NO: 10184 - DNA, 120 bp, synthetic construct
  misc_feature 1..120: note = Artificially Synthesized Probe
  source 1..120: mol_type = other DNA
aattcccttaaggggaactgagttgtagggagccatttaacacacttctctcagcaactggtagatctgccctccccaacatagtaagcatatagaatatttgagtgatgaaattaacaa

SEQ ID NO: 10185 - DNA, 120 bp, synthetic construct
  misc_feature 1..120: note = Artificially Synthesized Probe
  source 1..120: mol_type = other DNA
taagagatgtaaggaaaaggattaagagaagtgcagttagaggctgagaagtacagaagaaagtgaacagagcagaagtgatatttgaagagatagggactgagaattttccaaaaactg

SEQ ID NO: 10186 - DNA, 120 bp, synthetic construct
  misc_feature 1..120: note = Artificially Synthesized Probe
  source 1..120: mol_type = other DNA
tggtaaaacttgaggagaaatagatgaatccactattcaacactactttaacagaaacagacagatacagcatgctaaaaatcagtgcgaacatagttgaattcagcagcaccatcaatc

SEQ ID NO: 10187 - DNA, 120 bp, synthetic construct
  misc_feature 1..120: note = Artificially Synthesized Probe
  source 1..120: mol_type = other DNA
caataattaatagacttccaaaaagaaagcaccaagctaacctggtttccctggtaaattctatctaacacttttaaaataagtgatattaattctctgtagtctctttcagaaaataga

SEQ ID NO: 10188 - DNA, 120 bp, synthetic construct
  misc_feature 1..120: note = Artificially Synthesized Probe
  source 1..120: mol_type = other DNA
ttaaaaatacaaatttaaaagcacaatatcatttacaatagtaccaaagaaagaaggaaagacattaattctcaggtagaaatctacaaaaacatatacaggatctatatgcagaaaact

SEQ ID NO: 10189 - DNA, 120 bp, synthetic construct
  misc_feature 1..120: note = Artificially Synthesized Probe
  source 1..120: mol_type = other DNA
aaaacaagaaagcaagtaatgcaattttaaagtgggctaaagatctgaagagacagatcaccaaggaagattcatagaatggcagatagaaagatgcccatcataatttacggctgggca

SEQ ID NO: 10190 - DNA, 120 bp, synthetic construct
  misc_feature 1..120: note = Artificially Synthesized Probe
  source 1..120: mol_type = other DNA
aaactgtagagactcgaaagtgatcagtgagttccagggttaaggtggagggtagagggtgaataggtgaactgcaggtaatttttagggcagtaagattattgtaatgtaaaattttag

SEQ ID NO: 10191 - DNA, 120 bp, synthetic construct
  misc_feature 1..120: note = Artificially Synthesized Probe
  source 1..120: mol_type = other DNA
gcatatatacatgatatagtataaacatgtgtgtttcttgctctgtccctgaaacagcctgaaagaaatgacatcccagtaacagcaaacgtgcacagcaccgtatcttggtttctaata

SEQ ID NO: 10192 - DNA, 120 bp, synthetic construct
  misc_feature 1..120: note = Artificially Synthesized Probe
  source 1..120: mol_type = other DNA
agcaaactgctcactactacacaaaaaaagcaaagattagtctcttgagtataaaattgagcagaagaagccagacacagcctgcaagctccaactccattcataaagagtttgcaaact

SEQ ID NO: 10193 - DNA, 120 bp, synthetic construct
  misc_feature 1..120: note = Artificially Synthesized Probe
  source 1..120: mol_type = other DNA
taatcctggcactttgggaggccgaggcgggcagagcacgaggtcaggagtttgagaccagcctggccaacatggtgaaaccctgtccctactaaaaatacaaaaattagccaggcgtgg

SEQ ID NO: 10194 - DNA, 120 bp, synthetic construct
  misc_feature 1..120: note = Artificially Synthesized Probe
  source 1..120: mol_type = other DNA
ttagtctttgaagccgttggcttcttttaaaagtggttctaactcgaagactaatgacctttgcatttcaccagccccaccttgttaatctcatatctttcaagacatgtacactttggg

SEQ ID NO: 10195 - DNA, 120 bp, synthetic construct
  misc_feature 1..120: note = Artificially Synthesized Probe
  source 1..120: mol_type = other DNA
aaagtttccttgaagataaattacatttgctgacaggactctttagaaccactgagaacagtcagatattggaggtcaatgaggaaacaaccccactgctgattcactccatagcatgca

SEQ ID NO: 10196 - DNA, 120 bp, synthetic construct
  misc_feature 1..120: note = Artificially Synthesized Probe
  source 1..120: mol_type = other DNA
agggagggtgggcagtgaggcaaatggtaacattattgtgaggttctgattaacgctcagtaaattggcattttacataaaataaagcaaacacgtgaaaagaggaagtatggggaaaag

SEQ ID NO: 10197 - DNA, 120 bp, synthetic construct
  misc_feature 1..120: note = Artificially Synthesized Probe
  source 1..120: mol_type = other DNA
aagaaaggggtggttcactgaagcaaatgctgctaaaatgtctgataagatgaggatgtcaaagtaggtgaagcttttccaggtgaaaaagagacgtagccatcattgttgctgaattct

SEQ ID NO: 10198 - DNA, 120 bp, synthetic construct
  misc_feature 1..120: note = Artificially Synthesized Probe
  source 1..120: mol_type = other DNA
tcaaaataattgaacacatggatatagagagtagaaggatagttatcagaggctgggaaagctattcgggggctggtgggtgggtggggagagatggggatggttaatgcatgcaaaaaa

SEQ ID NO: 10199 - DNA, 120 bp, synthetic construct
  misc_feature 1..120: note = Artificially Synthesized Probe
  source 1..120: mol_type = other DNA
ctgccagaggatctttcaaaatgactaatcttactattcttctcctctacaaagcttcagaggcttccagtctggactccttaacaacacataaaaaattcctcttctgttcttcctctg

SEQ ID NO: 10200 - DNA, 120 bp, synthetic construct
  misc_feature 1..120: note = Artificially Synthesized Probe
  source 1..120: mol_type = other DNA
tctaacttataaggtttcagttggaaaacctaagatgggtagaggaaaagattcccctgcaacacacttatattatgaaaccaaactggataccaagcaaggaggatcgggcatctaaca

SEQ ID NO: 10201 - DNA, 120 bp, synthetic construct
  misc_feature 1..120: note = Artificially Synthesized Probe
  source 1..120: mol_type = other DNA
gaggttacaggcaaaataagaaatcatggaggttatacattggtttaacctagaaaggtggaacatcttgaagtgggcccacaggtcataggtgaggcaaagctttgtctaaaactgtgg

SEQ ID NO: 10202 - DNA, 120 bp, synthetic construct
  misc_feature 1..120: note = Artificially Synthesized Probe
  source 1..120: mol_type = other DNA
tctcagcagagaggggagctgaaggtaggtagtctcaatgtgtggctgagtctctccagtttttatgggctcagaatgtgggaggtgtcagctatccatagccttggaaaaggcaacact

SEQ ID NO: 10203 - DNA, 120 bp, synthetic construct
  misc_feature 1..120: note = Artificially Synthesized Probe
  source 1..120: mol_type = other DNA
accctcaacttctccttaatttcctaggcagtataagggtaagtacaagtaaaaagaaattgaattttccctggtgccaaaaggcaaagagaagtccctccctcccttttcttagagtat

SEQ ID NO: 10204 - DNA, 120 bp, synthetic construct
  misc_feature 1..120: note = Artificially Synthesized Probe
  source 1..120: mol_type = other DNA
ttctttctcagattgaagtattctggtgcactcagcctttggacagaaaggagtggagattctcattacatatgggtgcttgccttagttgttttaaatttatgtgcaaccaggctgttt

SEQ ID NO: 10205 - DNA, 120 bp, synthetic construct
  misc_feature 1..120: note = Artificially Synthesized Probe
  source 1..120: mol_type = other DNA
cacatgatgacagcccatccctgctggcattgctcactttgataatttagggaaggtgacagtcaccgtatctttcatagtaaacgtgcattttccttctcaaaattagtaaatactgta

SEQ ID NO: 10206 - DNA, 120 bp, synthetic construct
  misc_feature 1..120: note = Artificially Synthesized Probe
  source 1..120: mol_type = other DNA
cctggggaatggtacttagataccaagttcaaggcatgaggtgtgcccattgctattacaatgttatgacttctaggctctttgactgaaattaattacagacacacacatacatacgtg

SEQ ID NO: 10207 - DNA, 120 bp, synthetic construct
  misc_feature 1..120: note = Artificially Synthesized Probe
  source 1..120: mol_type = other DNA
ccccctctgtgggttgtctgtttactctgctgattgtttcttttgttgtgcagaagctatttagtttaattaggtcccatatatttatctttgtctttgttacatttgcttttgggttct

SEQ ID NO: 10208 - DNA, 120 bp, synthetic construct
  misc_feature 1..120: note = Artificially Synthesized Probe
  source 1..120: mol_type = other DNA
aggtatacaatcatatcactggtgaacagcagtttgacttcctctttattgatttagatgccctttatttctttttcttgtcttactgctctgtctaggacttccagtactatgttgaat

SEQ ID NO: 10209 - DNA, 120 bp, synthetic construct
  misc_feature 1..120: note = Artificially Synthesized Probe
  source 1..120: mol_type = other DNA
tttctaattgagcttatttggatcttctctctccttttcttggttaatctcgctaatggtctatcaattttgtttatcttttcaaagaatcatcttttttgtttcacttatctttttgtt

SEQ ID NO: 10210 - DNA, 120 bp, synthetic construct
  misc_feature 1..120: note = Artificially Synthesized Probe
  source 1..120: mol_type = other DNA
ttgatgatccatctagtgctgtcagtggagtattgaaatcccccactattatcatgttgccatctatctaatttcttaggtctggtaataattgttttagaaatttgagagctccagtgt

SEQ ID NO: 10211 - DNA, 120 bp, synthetic construct
  misc_feature 1..120: note = Artificially Synthesized Probe
  source 1..120: mol_type = other DNA
gtctctagcaaggccagggaagttttcctcaattgttccctcaaataagttccacacttttagatttctctttttactcaagaacaccaattattcttaggtttggcagtttaacataat

SEQ ID NO: 10212 - DNA, 120 bp, synthetic construct
  misc_feature 1..120: note = Artificially Synthesized Probe
  source 1..120: mol_type = other DNA
attcaagacctctggttagccaggatgttgcaggcagtggaattagctgttgttttctctttccttgaagcagggttattccgtcatgagttgttgtaatgtcctgagctgcttggcctc

SEQ ID NO: 10213 - DNA, 120 bp, synthetic construct
  misc_feature 1..120: note = Artificially Synthesized Probe
  source 1..120: mol_type = other DNA
ttggccacagctttgcactcctatctgtagcagttcccttttgccctccggattctgttcaagagaatttgcacccagttgaaattattacaaagctcacttggaagcttctttcaccct

SEQ ID NO: 10214 - DNA, 120 bp, synthetic construct
  misc_feature 1..120: note = Artificially Synthesized Probe
  source 1..120: mol_type = other DNA
tatgtgactctaccataattcactcaaattcatttcaaccagtttcccattggtggacacctgaaaaactcctatctctcgatatttggttagttgcctcaactgcatgccaacttctgc

SEQ ID NO: 10215 - DNA, 120 bp, synthetic construct
  misc_feature 1..120: note = Artificially Synthesized Probe
  source 1..120: mol_type = other DNA
gttgtctgataaagagtatgatatcatccctattggttttaggacctagaaatagatttgcaggaccctaagggcaggatagaggtggatgagaaggtttatagtttttgggtccaagag

SEQ ID NO: 10216 - DNA, 120 bp, synthetic construct
  misc_feature 1..120: note = Artificially Synthesized Probe
  source 1..120: mol_type = other DNA
taatgacacatgatcagaggtcacaacactctttttaagtcacagcagtttcccttaagcatggctttagagtctctgagctcaccatgacttctattagagatagcataagcctacagt

SEQ ID NO: 10217 - DNA, 120 bp, synthetic construct
  misc_feature 1..120: note = Artificially Synthesized Probe
  source 1..120: mol_type = other DNA
tgccatcagccatgggtgagtttctcatcattcaaagtttccttcttttttagaaaccacctgttttactctaaacaaagtagattcttatgaaaggtaggctgtttgggggtccagaat

SEQ ID NO: 10218 - DNA, 120 bp, synthetic construct
  misc_feature 1..120: note = Artificially Synthesized Probe
  source 1..120: mol_type = other DNA
aaatccaaaccccaataagaaaccacttcatactctccagggtggccagaatacaaaaggctgagaacaagtattgggaggatgtggagagatcagaacactcctacgctgctggtggca

SEQ ID NO: 10219 - DNA, 120 bp, synthetic construct
  misc_feature 1..120: note = Artificially Synthesized Probe
  source 1..120: mol_type = other DNA
gagtcatcccacctcccaggacaagcaaaggtcctgcctccaagtcattgcaacttatatgacacagcaaggcaatatagactctgggggaaaaagttttttaactacagtatttttaaa

SEQ ID NO: 10220 - DNA, 120 bp, synthetic construct
  misc_feature 1..120: note = Artificially Synthesized Probe
  source 1..120: mol_type = other DNA
aaatatttattgagtgactatttcattccaagcattctgctaggtgctgagaaatcagaaacaaatacattgaactcattggcaaactagctggggagatgggcagggaagccaactgtt

SEQ ID NO: 10221 - DNA, 120 bp, synthetic construct
  misc_feature 1..120: note = Artificially Synthesized Probe
  source 1..120: mol_type = other DNA
tactctggcttttagaatgctttctagagcaagtagcatgcataacgacaccactacctggaattatacactgtctttcttcagaggcacacaaagagcttaacacattaccttagttct

SEQ ID NO: 10222 - DNA, 120 bp, synthetic construct
  misc_feature 1..120: note = Artificially Synthesized Probe
  source 1..120: mol_type = other DNA
atgcaaaatgcaatacagctagagtcccttcttcaccctttttattgatatgttcacccaagtgttctcacacatagaagcaggtggttttctttactacagtagtatagtttggagtgt

SEQ ID NO: 10223 - DNA, 120 bp, synthetic construct
  misc_feature 1..120: note = Artificially Synthesized Probe
  source 1..120: mol_type = other DNA
accctccactctcaagtagccactgtgtctgtcaatcatccttcttgataaactcaaagtcaaacgagtccagatcttacctacatctgcaaaatcaatttttcctataaaggaacgtaa

SEQ ID NO: 10224 - DNA, 120 bp, synthetic construct
  misc_feature 1..120: note = Artificially Synthesized Probe
  source 1..120: mol_type = other DNA
ttgtctgacagcctctcttcttttccctttgcttggaatgctctcttcccagttaccaaagatactcaggctctctccccaatttccttcaggcccttgctccaaaagctccttccgggt

SEQ ID NO: 10225 - DNA, 120 bp, synthetic construct
  misc_feature 1..120: note = Artificially Synthesized Probe
  source 1..120: mol_type = other DNA
ccatgagccaaatgcatttctgtctgttacaaattatgtacggtgtggttttctgtgatgaacacagtgctgtaccagggccctcttgccaagacagccagcttataggagcctgcatgt

SEQ ID NO: 10226 - DNA, 120 bp, synthetic construct
  misc_feature 1..120: note = Artificially Synthesized Probe
  source 1..120: mol_type = other DNA
ggctggctcctgtttgcagggtgctgccctgccctgtgacttcaggaaattcgcttctctgctctacgtctcagtacccctgtgtagagtagagctaattttgccttcctcctagataaa

SEQ ID NO: 10227 - DNA, 120 bp, synthetic construct
  misc_feature 1..120: note = Artificially Synthesized Probe
  source 1..120: mol_type = other DNA
tgaatctaggtctgtgtgcctgtaaaccactgtcacctgtcccaggaggctgatgatgtgggggtgactcaccaacagttgccttaattccagccagaaaaaccagtgtgacaaaccagc

SEQ ID NO: 10228 - DNA, 120 bp, synthetic construct
  misc_feature 1..120: note = Artificially Synthesized Probe
  source 1..120: mol_type = other DNA
cactccacccatccatcacccaacattccatccatccatccatccatgcacccgtcacccattcatccattaatctgttcatccacccactcaaccatatacccacccatccacccagcc

SEQ ID NO: 10229 - DNA, 120 bp, synthetic construct
  misc_feature 1..120: note = Artificially Synthesized Probe
  source 1..120: mol_type = other DNA
agtacaggctgagggcctgaattcctttgtgacagtgggagaattaccacattaactacttctctggaatagtaacaacaatagttccaaccttgtggaattgtgaggattatgtgagat

SEQ ID NO: 10230 - DNA, 120 bp, synthetic construct
  misc_feature 1..120: note = Artificially Synthesized Probe
  source 1..120: mol_type = other DNA
atgaggaaggcccaggagacaaaggttccagcgcaagtagtttcctgggaggtgatcccaggaaataaggaaatgaggtgagaaagagaaggaagtgataaagggcatgtcgttgataca

SEQ ID NO: 10231 - DNA, 120 bp, synthetic construct
  misc_feature 1..120: note = Artificially Synthesized Probe
  source 1..120: mol_type = other DNA
ggccatgggttagcttggtggacagaggccaggtgagtctctggtggggaagtttggcctggaaaggggattgggcgtaagaggtcatcatcttcttcccagattatgagacataggaat

SEQ ID NO: 10232 - DNA, 120 bp, synthetic construct
  misc_feature 1..120: note = Artificially Synthesized Probe
  source 1..120: mol_type = other DNA
atggggataataatcacagtgtgatggaagggattaaatgaatcagtttattaaagctcttagaagagcacgtggcaggtagtaagcacttgatagatactgagtgctgtgttcgtgcct

SEQ ID NO: 10233 - DNA, 120 bp, synthetic construct
  misc_feature 1..120: note = Artificially Synthesized Probe
  source 1..120: mol_type = other DNA
agtttctctgatttcatgtcttgtctgatttcactgtatgcaccccattgagcaagagccaaaaaggcctgtgtgtccctggtggaggatattgtcctatatttcttaaattgcgacctt

SEQ ID NO: 10234 - DNA, 120 bp, synthetic construct
  misc_feature 1..120: note = Artificially Synthesized Probe
  source 1..120: mol_type = other DNA
agtaaggaaaggcatccctgcagagcttgggggcccatggtgggggacggcgctagaggtggtttaaaactcaactctcctgcttaatggctgtgtggcctgggggaagtcacttaactt

SEQ ID NO: 10235 - DNA, 120 bp, synthetic construct
  misc_feature 1..120: note = Artificially Synthesized Probe
  source 1..120: mol_type = other DNA
cagtaggctggcctggagccaggtgctgcctgcagtgagctgagggtggtgctgggaacaggtgacacccctgagcactgcccaggtgccagggtagcagccttgcaatcttccttagag

SEQ ID NO: 10236 - DNA, 120 bp, synthetic construct
  misc_feature 1..120: note = Artificially Synthesized Probe
  source 1..120: mol_type = other DNA
aaaaaaagaaaatgtgctacccttagggagtggtggtctcagggtggggttgatggttgagtgcccccagctacgttattgttattgctgccgccattgtgcccttagaaagggcagtgc

SEQ ID NO: 10237 - DNA, 120 bp, synthetic construct
  misc_feature 1..120: note = Artificially Synthesized Probe
  source 1..120: mol_type = other DNA
ttcgtcaagaagaatggccagtgcaacattgcgttcgccaacatggacgagaagtcacagcgctacctggctgacatgttcaccacctgtgtggacatccgctggcgctacatgctgctc

SEQ ID NO: 10238 - DNA, 120 bp, synthetic construct
  misc_feature 1..120: note = Artificially Synthesized Probe
  source 1..120: mol_type = other DNA
ggtcgctcaggggccctgggtttgagcagaacgggcccagtgccctgggttgcagactcagtagcgttttagtcgttttatgtttctttgcaaaggcctcagaaggttggccggagaggg

SEQ ID NO: 10239 - DNA, 120 bp, synthetic construct
  misc_feature 1..120: note = Artificially Synthesized Probe
  source 1..120: mol_type = other DNA
gaaaaagctaggcgtccactttccgcagccatgctcaaacagagtgagaggagacggtcctggagctacaggccctggaacacgacggagaatgagggcagccaacaccgcaggagcatt

SEQ ID NO: 10240 - DNA, 120 bp, synthetic construct
  misc_feature 1..120: note = Artificially Synthesized Probe
  source 1..120: mol_type = other DNA
cccccccacccccaatcgccgcatacagctaacaaaacggcgatggatgtcaaaagtggtggaaagagaactcagcagatcagtaagtaagtgaatttgacttagtcgtagaaatctcca

SEQ ID NO: 10241 - DNA, 120 bp, synthetic construct
  misc_feature 1..120: note = Artificially Synthesized Probe
  source 1..120: mol_type = other DNA
aaactcagtcctgtccatctccaaactccatgcctttcccacacccaagcacagtctctttcaagttttagttcttttgcatgcattgctgaatttgtacagttagtgtaacagttattt

SEQ ID NO: 10242 - DNA, 120 bp, synthetic construct
  misc_feature 1..120: note = Artificially Synthesized Probe
  source 1..120: mol_type = other DNA
gcaggaaagcagaagagtaaatccacatgctgatgatatgatacaacacttgagagtcaaatttctattcatctaaacatctttaaaggctagtgcatgaaggcactggagctagtacac

SEQ ID NO: 10243 - DNA, 120 bp, synthetic construct
  misc_feature 1..120: note = Artificially Synthesized Probe
  source 1..120: mol_type = other DNA
agtgattcaggcagtagagtctgtctttagtgggatagtcagagaagcccttttggagaagatgacattgagataaagtttgaaagatgaaaagagactcatctaaatgcacctgactca

SEQ ID NO: 10244 - DNA, 120 bp, synthetic construct
  misc_feature 1..120: note = Artificially Synthesized Probe
  source 1..120: mol_type = other DNA
caagcgtttatttagctcatgaatttaaaagtcagcgtatactctgatttcagctagaaggttcttctctttcatgaggctcttgttactcattcacatgcctgatggtcaactggcatg

SEQ ID NO: 10245 - DNA, 120 bp, synthetic construct
  misc_feature 1..120: note = Artificially Synthesized Probe
  source 1..120: mol_type = other DNA
aaacagaaatgattctttttctactgaggaaaagaaagaacctataaaacatacgagaaggtcagctgttccctcatgggagaacttctgagagtccagataaacaggcccacgcctaaa

SEQ ID NO: 10246 - DNA, 120 bp, synthetic construct
  misc_feature 1..120: note = Artificially Synthesized Probe
  source 1..120: mol_type = other DNA
tatctggcacagaaagtaatagagttctacctccttcagaagtagcacaggagctatagacggggtaaaggctcttaggcattgttactactttttatcttatggattcccaattttgga

SEQ ID NO: 10247 - DNA, 120 bp, synthetic construct
  misc_feature 1..120: note = Artificially Synthesized Probe
  source 1..120: mol_type = other DNA
ggtggatatgaccgcttgctgctactgaatctactgtgcagactataattcaaaagaggaattccaaatatacttgttgcaataatagcatgagtaagtacagcctttgaagctggatcc

SEQ ID NO: 10248 - DNA, 120 bp, synthetic construct
  misc_feature 1..120: note = Artificially Synthesized Probe
  source 1..120: mol_type = other DNA
aaagaagtttggcttaagggtgaagcaaagccagtgtgcagaatgatcaaaagttgaaaataagcagtttatcttaattattttcttcctcagtgtcttcctactctctcccatccccgc

SEQ ID NO: 10249 - DNA, 120 bp, synthetic construct
  misc_feature 1..120: note = Artificially Synthesized Probe
  source 1..120: mol_type = other DNA
tgggggaccctgggattgcatacatgatatatatataataatattattgcttacacaccctgtgccaggcactccttcaattcctataacaactctgtgaggtagataccacacatttca

SEQ ID NO: 10250 - DNA, 120 bp, synthetic construct
  misc_feature 1..120: note = Artificially Synthesized Probe
  source 1..120: mol_type = other DNA
ggatcagagggagtacatgaggcataaaaaacagtccccaaggaattttcacagggttttctctggtaactgataactagtcccatggtatctgcattttaaaacagaagcttgttaacc

SEQ ID NO: 10251 - DNA, 120 bp, synthetic construct
  misc_feature 1..120: note = Artificially Synthesized Probe
  source 1..120: mol_type = other DNA
tgagtgtttgcttggaagcaacccacagctcaccccaagacaagagaattagtattttataggacatgtggctggtagattccatgaacttcaaggcttcattgctctttttttaatcat

SEQ ID NO: 10252 - DNA, 120 bp, synthetic construct
  misc_feature 1..120: note = Artificially Synthesized Probe
  source 1..120: mol_type = other DNA
catttatccacaacatgctcatgtaactcttgaggtacaaagcagactctcaacttccagttaaacatgcttttaagtggaaggtcttagcctactttgttagatctgggcacatttgta

SEQ ID NO: 10253 - DNA, 120 bp, synthetic construct
  misc_feature 1..120: note = Artificially Synthesized Probe
  source 1..120: mol_type = other DNA
ctgctgtgctgcactaaataaaatgttatttgcttaaaatctctcttcttcaaacggggaagggtctcacccgccaggtataaaggttaatatatgcctcaaaagcattcagataaccac

SEQ ID NO: 10254 - DNA, 120 bp, synthetic construct
  misc_feature 1..120: note = Artificially Synthesized Probe
  source 1..120: mol_type = other DNA
aaattgagtgggaataaaaatacgaagggcaaaccgcaatcatgcatacaacatctgtgctatctacatgttatcaaaatccctgcaagccaggaggtggtgtaaagtagtaaagtcaga

SEQ ID NO: 10255 - DNA, 120 bp, synthetic construct
  misc_feature 1..120: note = Artificially Synthesized Probe
  source 1..120: mol_type = other DNA
ttttcttagaggatgtcccacattcacacttgtcatcttaaaggtgtcatttagcttgttccatctctcctgtttttcctataaactgcagatatcccagaggcttgcttagattcaggc

SEQ ID NO: 10256 - DNA, 120 bp, synthetic construct
  misc_feature 1..120: note = Artificially Synthesized Probe
  source 1..120: mol_type = other DNA
ctaaaattcatgtgaatgcatggggctccaagttgtccaaacaatccaaaaaaagaacaaagttgaagaacttgagctaatctgaagctgaggtggaaaaccacttgaacccaggagtat

SEQ ID NO: 10257 - DNA, 120 bp, synthetic construct
  misc_feature 1..120: note = Artificially Synthesized Probe
  source 1..120: mol_type = other DNA
gcccagaaacaaaccctcaaatatatggtgaagtgatttttgaaaagggtgctgccaacagcattcaatgaagtaataaataatcttttcaataaatgttgctggaaaaattgaatttcg

SEQ ID NO: 10258 - DNA, 120 bp, synthetic construct
  misc_feature 1..120: note = Artificially Synthesized Probe
  source 1..120: mol_type = other DNA
tctcagaaattcctcttgcattggaagtgacatgtacattggaagtggggctaaagatggtgttagtaacagaagcactggttgaaaatctattcaaggagcagtaagatgtccagattc

SEQ ID NO: 10259 - DNA, 120 bp, synthetic construct
  misc_feature 1..120: note = Artificially Synthesized Probe
  source 1..120: mol_type = other DNA
aaaagacattgacatggaaatgaggagggaagacaggaatcagaggactagtccagaaagaggaaaacagaaggggaggaagttaagaaagaagaagtttttctacaagtgaagaacaca

SEQ ID NO: 10260 - DNA, 120 bp, synthetic construct
  misc_feature 1..120: note = Artificially Synthesized Probe
  source 1..120: mol_type = other DNA
aacagtgaccaacacttaacatggtcataataagtgaaagaatagtgacaaccaaaaattggaaaagatggagggagaaaaacgggtggggagtgggagggaaggatacaacagtaataa

SEQ ID NO: 10261 - DNA, 120 bp, synthetic construct
  misc_feature 1..120: note = Artificially Synthesized Probe
  source 1..120: mol_type = other DNA
cagtttatcaggcataaatgtgggatgcagaggagaaaacaacgtgtatgtcaccactgcgctgtgtgaaaaatgtaatttgatgagatggggatgtccttagtacttggtaatttctaa

SEQ ID NO: 10262 - DNA, 120 bp, synthetic construct
  misc_feature 1..120: note = Artificially Synthesized Probe
  source 1..120: mol_type = other DNA
ctgtcccttgtccgtattttgggtcaggaaccactgctatgtgcttgtggctgctgctaactggcactattttggggtagcaattactacaactccaatggtaacttttttttttttttt

SEQ ID NO: 10263 - DNA, 120 bp, synthetic construct
  misc_feature 1..120: note = Artificially Synthesized Probe
  source 1..120: mol_type = other DNA
acagtgaaaaatcagactccacatcaaaacttagattttcagattctcttgaaaaactaaaagacctagaaacactatgcccacattccacccagtagtcatcagccaaccagtgcagag

SEQ ID NO: 10264 - DNA, 120 bp, synthetic construct
  misc_feature 1..120: note = Artificially Synthesized Probe
  source 1..120: mol_type = other DNA
atgcccgttcatccaagagggtaaggcagagctaaggccagaaagctggtaaatatcggctggactgaagttgcaactcgcagccttgctggaaacctggactaactctccgaagccaag

SEQ ID NO: 10265 - DNA, 120 bp, synthetic construct
  misc_feature 1..120: note = Artificially Synthesized Probe
  source 1..120: mol_type = other DNA
ggttctcgttggccaggctgttctccgtcctctggatctcgtggttgagctccttgctcagctccctgctcagctccttgttgggaagccgccgcttccggcgcatcttcaccttcttct

SEQ ID NO: 10266 - DNA, 120 bp, synthetic construct
  misc_feature 1..120: note = Artificially Synthesized Probe
  source 1..120: mol_type = other DNA
cagctttcaaggaagaagctggaagtaggagtacagttgaactgttcccacccaactgacctcccaccccacagacctggagatgtgcagccgcccattcaaatcatcctcggctctggg

SEQ ID NO: 10267 - DNA, 120 bp, synthetic construct
  misc_feature 1..120: note = Artificially Synthesized Probe
  source 1..120: mol_type = other DNA
gttcatcttctgctccttgagcagggagccgggcaggttggaggcgtacttaaagccagggccacgcttttgcttgtaggccaaaaagagagaatgaacagaccaactgtatacctttgg

SEQ ID NO: 10268 - DNA, 120 bp, synthetic construct
  misc_feature 1..120: note = Artificially Synthesized Probe
  source 1..120: mol_type = other DNA
cattcattgaaatacgtatcaggctactacctccacatgccagatactactcttaattgctggggatacagcaaggaacaagacagctcaaaatctctgccatccagagcttacatttta

SEQ ID NO: 10269 - DNA, 120 bp, synthetic construct
  misc_feature 1..120: note = Artificially Synthesized Probe
  source 1..120: mol_type = other DNA
acagtaaaaattactttatgaaaaccttaccctagagtacacatccttttcatgtgctttgtgacaataagaagtatgcgtaaagtgcctcggcacacaggtgacgcgtaccaaaggaaa

SEQ ID NO: 10270 - DNA, 120 bp, synthetic construct
  misc_feature 1..120: note = Artificially Synthesized Probe
  source 1..120: mol_type = other DNA
caggcgtaaaccaccgcacccggcaattccaagtcctttctaatgaatcagacataacagagatttacaaaaatataaaacaacgccattcttcttatttttcttttggaaaatgtaatt

SEQ ID NO: 10271 - DNA, 120 bp, synthetic construct
  misc_feature 1..120: note = Artificially Synthesized Probe
  source 1..120: mol_type = other DNA
cctttattatgctgctcagaggagcttcaagcaggctgggatatacacgccattggtaagtgaaaaagacttgattaaatggcgcaaatgtttgaattctaataaacaggacacagaagg

SEQ ID NO: 10272 - DNA, 120 bp, synthetic construct
  misc_feature 1..120: note = Artificially Synthesized Probe
  source 1..120: mol_type = other DNA
tgggagataataatgccaaagagaaaaagacagtcgcgggttcattactggcacacattgggttttaggtgacaccgttctaaaaaccaacagttgctatagacaagctcttttaaattc

SEQ ID NO: 10273 - DNA, 120 bp, synthetic construct
  misc_feature 1..120: note = Artificially Synthesized Probe
  source 1..120: mol_type = other DNA
acagtgagacgtcacctcatacaaattaggatggccactaaaaacaaactgaaagcccataacataacagatgttggtggggacacagagaaacaggaaccttcatcgggtgcggtggct

SEQ ID NO: 10274 - DNA, 120 bp, synthetic construct
  misc_feature 1..120: note = Artificially Synthesized Probe
  source 1..120: mol_type = other DNA
acatgatctcaaagagatatctgcacacccatattcactgcagcactattcacaacaggcaagaggtgaaagcaatccatatgtccatcaacagatgaatggataaagaaaagttgagcc

SEQ ID NO: 10275 - DNA, 120 bp, synthetic construct
  misc_feature 1..120: note = Artificially Synthesized Probe
  source 1..120: mol_type = other DNA
tacttaaaaatgattaatgtattttttttaccacaatttcaaaaaacaaaacacaagaaatatgcgtggaaggagatggctgaggtgtctgggcctgcggggcatcgacagccaaggagg

SEQ ID NO: 10276 - DNA, 120 bp, synthetic construct
  misc_feature 1..120: note = Artificially Synthesized Probe
  source 1..120: mol_type = other DNA
agacacgatgggggctctaaaccccattcctcagagtgtgatctttatttggagatgggggctttgcagagaccgtcaggttaaacgaggtaattcaggtgaacgctaatccagtatgac

SEQ ID NO: 10277 - DNA, 120 bp, synthetic construct
  misc_feature 1..120: note = Artificially Synthesized Probe
  source 1..120: mol_type = other DNA
ctcttcatttcagtgacttgtcatacttgaatccccaaacaaaaccccatacttttgggagcacacagacccagaagagctgttactattcatacactccaatggagaagaaggtccaca

SEQ ID NO: 10278 - DNA, 120 bp, synthetic construct
  misc_feature 1..120: note = Artificially Synthesized Probe
  source 1..120: mol_type = other DNA
tctcaaaaaacaaaaaaggaagaaatccatccttacaatgagggccggatgcccccaacatactcgcatagtcccactgcgattagcacctttcgggggccaagtccaccacacactaca

SEQ ID NO: 10279 - DNA, 120 bp, synthetic construct
  misc_feature 1..120: note = Artificially Synthesized Probe
  source 1..120: mol_type = other DNA
gaaatccaaaaacgtttctccctgtcatcacagcctacaatagcactttctgattctacccctccaaacgacaggtgccctgttaccagctcactcttcaaatacctggaacacaggcaa

SEQ ID NO: 10280 - DNA, 120 bp, synthetic construct
  misc_feature 1..120: note = Artificially Synthesized Probe
  source 1..120: mol_type = other DNA
atatcttggtattcctacacctcttctccatcagcaactcaagagcattgtcctttaagtgaatgctatcaaggtttattcattcatcccaccaatatttgagttcctctggtctaccag

SEQ ID NO: 10281 - DNA, 120 bp, synthetic construct
  misc_feature 1..120: note = Artificially Synthesized Probe
  source 1..120: mol_type = other DNA
aaaacaaaaactcaactgacttttctgcagaaatggacacactatcctaaaattcatgaaaatgcaaaagacctggaatggccaaaacaatcttaaaaaaatagggggatggggggtggg

SEQ ID NO: 10282 - DNA, 120 bp, synthetic construct
  misc_feature 1..120: note = Artificially Synthesized Probe
  source 1..120: mol_type = other DNA
aaatgatttttaataaggatgccaaggcaattcagttgggtaaagaatggtcttttcaacgtatggtgctgggacgaatagctatccacaagcaaaagaacaaagatagacccctacctc

SEQ ID NO: 10283 - DNA, 120 bp, synthetic construct
  misc_feature 1..120: note = Artificially Synthesized Probe
  source 1..120: mol_type = other DNA
tgtcccctagtctgaaaggcattacactctggaaaaagaaagacatgcaaccacataaatgcaatgcaacatcattatgatgacattaaaaactaacatctaggttgaggcaggagaatc

SEQ ID NO: 10284 - DNA, 120 bp, synthetic construct
  misc_feature 1..120: note = Artificially Synthesized Probe
  source 1..120: mol_type = other DNA
ccatcacagtaagttaaaggcttcacaacatgactgtattctggcaacagtgaggggagtggatatttttggggcagtgggcaagacaaaagacagggagatcagctgaagatgatgaag

SEQ ID NO: 10285 - DNA, 120 bp, synthetic construct
  misc_feature 1..120: note = Artificially Synthesized Probe
  source 1..120: mol_type = other DNA
gaaagcccaggggatgggaggacctctgaagaatctgaggaaagctaaagacctcttcctccaaaaatgtatataggcacaaagtaacaaaacttttgcatacattttcaagaaggatca

SEQ ID NO: 10286 - DNA, 120 bp, synthetic construct
  misc_feature 1..120: note = Artificially Synthesized Probe
  source 1..120: mol_type = other DNA
cgagaacttaaagtaaaataaaatagctataattggtaacaatggttctatgaccacataaatttctgagagattttcttctccataatttcctgattttttcaacaagctgtagccatt

SEQ ID NO: 10287 - DNA, 120 bp, synthetic construct
  misc_feature 1..120: note = Artificially Synthesized Probe
  source 1..120: mol_type = other DNA
gaacaagaattcttctaaaagccctcctttaggagacacctcttcaacttggaaagcaagctgaagaattttctgacacattttgtactagagaagcaaatgaagtctgtgggagaagtt

SEQ ID NO: 10288 - DNA, 120 bp, synthetic construct
  misc_feature 1..120: note = Artificially Synthesized Probe
  source 1..120: mol_type = other DNA
ctctcaggagtggcaggacccgaaaacatgtttttaagcccagagacacaataagtcttgcagtgtcaaagattgtatctacaggccatagggtatgaccaaatttaaaaaacaaacaaa

SEQ ID NO: 10289 - DNA, 120 bp, synthetic construct
  misc_feature 1..120: note = Artificially Synthesized Probe
  source 1..120: mol_type = other DNA
gtattattttgcagattatacttcgtaaaacctcaacttttttcgccttcttcctaaacacgaaccttcccggagtaaattcacgccgtaaacacacccagggctttgttttacacacag

SEQ ID NO: 10290 - DNA, 120 bp, synthetic construct
  misc_feature 1..120: note = Artificially Synthesized Probe
  source 1..120: mol_type = other DNA
gccgcacacaaagggagcccggcctgcggtgacacgggggcgggccgccgagggcggtccctcgcggccggagcgcggggactggggctgcgtgggggcgtgccccgcgccccgcccggc

SEQ ID NO: 10291 - DNA, 120 bp, synthetic construct
  misc_feature 1..120: note = Artificially Synthesized Probe
  source 1..120: mol_type = other DNA
actaaatatgcacacctgtacctgttcagtttctccatctatacaaggggaaggatttaccaagggatggataaccttctgtaaaaagatcagaggctttcccaagaataagccatgaaa

SEQ ID NO: 10292 - DNA, 120 bp, synthetic construct
  misc_feature 1..120: note = Artificially Synthesized Probe
  source 1..120: mol_type = other DNA
tctaaagaaagaggaggggctcataacatgccaatcatgcttccacttcattgtgattggtcaagcctacaggggtatagagtcacccaaataacataatacatcaagagaaatgtctag

SEQ ID NO: 10293 - DNA, 120 bp, synthetic construct
  misc_feature 1..120: note = Artificially Synthesized Probe
  source 1..120: mol_type = other DNA
caaatgaggctggtgacaaactcaggctgaagcagaagaaaattaagtgtcccttactacatgctattaattctgtattctcagttcaaatccaattccaaggtgggtaggtatggtttg

SEQ ID NO: 10294 - DNA, 120 bp, synthetic construct
  misc_feature 1..120: note = Artificially Synthesized Probe
  source 1..120: mol_type = other DNA
tgtgatgtggaaataaacaaaaacagatggaagccgagtcctcctccatcacaattgtcactcatgtctctgctttctctctgggtgtcgtgtacatttctgatctgcctatcagagagt

SEQ ID NO: 10295 - DNA, 120 bp, synthetic construct
  misc_feature 1..120: note = Artificially Synthesized Probe
  source 1..120: mol_type = other DNA
acctggataaaactgtaattcgaacagtgacagtaggacagaccaggggctgcagtgatttctcttaaggaaattcctaatgttacttaattgctttttatttttcccctggagagtcgt

SEQ ID NO: 10296 - DNA, 120 bp, synthetic construct
  misc_feature 1..120: note = Artificially Synthesized Probe
  source 1..120: mol_type = other DNA
gtggatcacctgagctcaggagtttgagaccagcctggccaacatggagaaaccctgtctctactaaaaatacaaaagtcagccaggcatgatggcacacgcctgtaatcccagctactt

SEQ ID NO: 10297 - DNA, 120 bp, synthetic construct
  misc_feature 1..120: note = Artificially Synthesized Probe
  source 1..120: mol_type = other DNA
atctcaaaaaaataaaaatttaggttaggtagatattacctcaacaaaaagcatatacagtcatgctcttgcagaaaaacgttttggtcaatgattgtggtcccacaagaatataatacc

SEQ ID NO: 10298 - DNA, 120 bp, synthetic construct
  misc_feature 1..120: note = Artificially Synthesized Probe
  source 1..120: mol_type = other DNA
aaaaaaaattttttttagaaagaaaatcttggagatgaggagaagactaacccccctgccccacaacccccacgtctttgaatagatgttattttctctccaagagttggggcatctccc

SEQ ID NO: 10299 - DNA, 120 bp, synthetic construct
  misc_feature 1..120: note = Artificially Synthesized Probe
  source 1..120: mol_type = other DNA
gtgactttaggtcctattcctgaaaggtaacacggttagaaactataggccctaaaccccgggatgtgttaaaactaactgaaacaaagagatagttcaatcacctcttaaatgagctgc

SEQ ID NO: 10300 - DNA, 120 bp, synthetic construct
  misc_feature 1..120: note = Artificially Synthesized Probe
  source 1..120: mol_type = other DNA
atcctccctccttagcctcctgaggagctaggactacaggtgcatgccaccatgcccagctaatttttttcttcttttctttttgtctttccttttttttttttttggagatggagtttt

SEQ ID NO: 10301 - DNA, 120 bp, synthetic construct
  misc_feature 1..120: note = Artificially Synthesized Probe
  source 1..120: mol_type = other DNA
tgtacagatcatttcgccactccggtagtaagcacaacaatacccaataggtaatgttttttgatcctcgccctctcctgcctacctccaccctcaagtagatccttttttttttttttt

SEQ ID NO: 10302 - DNA, 120 bp, synthetic construct
  misc_feature 1..120: note = Artificially Synthesized Probe
  source 1..120: mol_type = other DNA
gggattacactgtctttaaaagagtggttcacatgtgtcccagctacttggaaagctacttgggcccagaagttcgaggctgcagtcagcatcattgcactgaagcctgggcgacaaact

SEQ ID NO: 10303 - DNA, 120 bp, synthetic construct
  misc_feature 1..120: note = Artificially Synthesized Probe
  source 1..120: mol_type = other DNA
ggacaaatgcatagagtgggatattctatgggacatgtggctctttgttttctacaaatcatgtcctgagaaaagtctgtattaaaagagagaattaagaacaggttcaggccaggaacg

SEQ ID NO: 10304 - DNA, 120 bp, synthetic construct
  misc_feature 1..120: note = Artificially Synthesized Probe
  source 1..120: mol_type = other DNA
ctaaacccaaccttgtccctttttcaataggtcacctaaatttgagggacagattatctgacaacatcgtttggttgagcatacatccatcttcctaacaaagccaaattcgagaaagaa

SEQ ID NO: 10305 - DNA, 120 bp, synthetic construct
  misc_feature 1..120: note = Artificially Synthesized Probe
  source 1..120: mol_type = other DNA
acaggagttacataaagaacaagtgagtcacaaacaggactcagaagcatttggagtacaggtgaaagacaacaaagacatgaaactaattgaatacggcctcatctttcagaagctctg

SEQ ID NO: 10306 - DNA, 120 bp, synthetic construct
  misc_feature 1..120: note = Artificially Synthesized Probe
  source 1..120: mol_type = other DNA
ttaaaaatataaaaaaaacacacaccaaagacaagctccagtctcaagatgctagtggaggctccgttcacatatgtccagtcaaccaaaatgcagagtagaccggtattaggccctatg

SEQ ID NO: 10307 - DNA, 120 bp, synthetic construct
  misc_feature 1..120: note = Artificially Synthesized Probe
  source 1..120: mol_type = other DNA
aggatttctacatgggagaaatggggaaaagggcactccgagaaggaaggagtgtaagcaaagacagaggtggactggtccaaggaaatcatggaggaatttggttccccagcaatgaaa

SEQ ID NO: 10308 - DNA, 120 bp, synthetic construct
  misc_feature 1..120: note = Artificially Synthesized Probe
  source 1..120: mol_type = other DNA
tagaagcatccgattgtcctatcagtgctgcctcccaaatatatctgggatccaacctcttcgttgccacagtcactacgctaaactgatccactgttatgagaccttcagcaatagcct

SEQ ID NO: 10309 - DNA, 120 bp, synthetic construct
  misc_feature 1..120: note = Artificially Synthesized Probe
  source 1..120: mol_type = other DNA
ttttaccataattaataaaaatcacagaccgggtgcagtggctcactcttgtaatccccacactttgaaataccaaggcaggcagagcacatgaggtcaggaatttgagaccagcctggc

SEQ ID NO: 10310 - DNA, 120 bp, synthetic construct
  misc_feature 1..120: note = Artificially Synthesized Probe
  source 1..120: mol_type = other DNA
tttgccacccatatttttctctcaacgggatttttctgctgttgatgttgtctacaacattatttagaagcagcagaacattctctgtgggcattcgttgattggaggtttttatggacc

SEQ ID NO: 10311 - DNA, 120 bp, synthetic construct
  misc_feature 1..120: note = Artificially Synthesized Probe
  source 1..120: mol_type = other DNA
tggtgaaggaaggagtccacccacaggtgcatctgaccccaaaaatgcatccgagtagtgcagagaatgacctgggaagcttttatttattcatttgtatttatgtattggtttttgttt

SEQ ID NO: 10312 - DNA, 120 bp, synthetic construct
  misc_feature 1..120: note = Artificially Synthesized Probe
  source 1..120: mol_type = other DNA
agctttcagaaagtgcagatcccaggcccaccccaagcctactcaatgtgctacgtcaagtgcgggggccaggaagctgtattttttcacaagtcccccaggtgaagctgatgccaccag

SEQ ID NO: 10313 - DNA, 120 bp, synthetic construct
  misc_feature 1..120: note = Artificially Synthesized Probe
  source 1..120: mol_type = other DNA
cagaaatgacctcacagcacctaatcagttccagaaaagggctttgttctcctggaggcaaggtgggagatcaaagcatttcttgctaatcatcacttagcattaattacttgttaggta

SEQ ID NO: 10314 - DNA, 120 bp, synthetic construct
  misc_feature 1..120: note = Artificially Synthesized Probe
  source 1..120: mol_type = other DNA
agctgagctggtggtcatttattttcagggctcggtggtggacctggggtattcattcttcttctgcttcacaccattttgtggctctgaagttatttacttccttatttttaaaatatt

SEQ ID NO: 10315 - DNA, 120 bp, synthetic construct
  misc_feature 1..120: note = Artificially Synthesized Probe
  source 1..120: mol_type = other DNA
ggtgagccacataggtacttttgagtttttttgttgccacatttgaaaaggtaaaaagaaacaatgaaattcatcggaataatccattttgtttcaacaatatatcaaaaatatagtcat

SEQ ID NO: 10316 - DNA, 120 bp, synthetic construct
  misc_feature 1..120: note = Artificially Synthesized Probe
  source 1..120: mol_type = other DNA
tctcatttagttctgacaaccactgaagaaagtcttggtataacccatctttataatcaaggaaagtaaggctcaggacactatgtaacttgtccaaggaagtagtgaagctgcgtggag

SEQ ID NO: 10317 - DNA, 120 bp, synthetic construct
  misc_feature 1..120: note = Artificially Synthesized Probe
  source 1..120: mol_type = other DNA
tcgaccgattagacatttttatgttgagcatcaaccagttttacacactgagaaaaagttcctttcaaaagaggagaagacagcccatgaagcaattaaaggaaaagggaaaaggaaggg

SEQ ID NO: 10318 - DNA, 120 bp, synthetic construct
  misc_feature 1..120: note = Artificially Synthesized Probe
  source 1..120: mol_type = other DNA
tctaatgttcacaaatttaactacgtactcagcgaagcaaacaaaaccaacctccagaccttgatgccttcatagagccatgactccgtcctttagtcagcttgctacatgtaccctaac

SEQ ID NO: 10319 - DNA, 120 bp, synthetic construct
  misc_feature 1..120: note = Artificially Synthesized Probe
  source 1..120: mol_type = other DNA
tacagaagcactgagcaggaagagcagaagcgctcaggagacaaatgaaggtgaagattattttaattcacctttcctaattcacttcactagaaatgactccagcttacttccagttta

SEQ ID NO: 10320 - DNA, 120 bp, synthetic construct
  misc_feature 1..120: note = Artificially Synthesized Probe
  source 1..120: mol_type = other DNA
cccagccccggcacatacagcttccccaaagtcccatagtcaatgtcaatgatttgtaaatgctatttataaagtgtctttattcactgctatatcctcaaagcctcacataatgactaa

SEQ ID NO: 10321 - DNA, 120 bp, synthetic construct
  misc_feature 1..120: note = Artificially Synthesized Probe
  source 1..120: mol_type = other DNA
cccatttaaaaaggggcaaggctacccaactccagcttacctcctatggggatgaaaagcccaccagatctttaatttttcagaagaaatcaaagatgcagagttttatttgaaatctct

SEQ ID NO: 10322 - DNA, 120 bp, synthetic construct
  misc_feature 1..120: note = Artificially Synthesized Probe
  source 1..120: mol_type = other DNA
cagcgagatcccatctctacaaaaaaaatttaaaaattagctgggcatggtggtgtgcacctgtagtcctagcttcttggggagattgaggtgggaggattgcttgagcccaggagttcg

SEQ ID NO: 10323 - DNA, 120 bp, synthetic construct
  misc_feature 1..120: note = Artificially Synthesized Probe
  source 1..120: mol_type = other DNA
ttctctcaaagagataattagttaacaatggattcgggtcccactgcttcctaggctggggctttaataatcagaaactccctccatgccatgactaaaaatatcccactgtgaaaacaa

SEQ ID NO: 10324 - DNA, 120 bp, synthetic construct
  misc_feature 1..120: note = Artificially Synthesized Probe
  source 1..120: mol_type = other DNA
ggaaggattctcttctagagactttggagcgagcagagccccgctgactcttttatttctgacttctggccccccaggactattaaataacatacttggtattttttgttgttgtttttt

SEQ ID NO: 10325 - DNA, 120 bp, synthetic construct
  misc_feature 1..120: note = Artificially Synthesized Probe
  source 1..120: mol_type = other DNA
tttcattctatggtgtctgaaatttttggctctagtttgctgagctattaaaggccctgtgctaaagtgtcacctcacggagtcctcatgaccatgatgctgtattccaagtactccatt

SEQ ID NO: 10326 - DNA, 120 bp, synthetic construct
  misc_feature 1..120: note = Artificially Synthesized Probe
  source 1..120: mol_type = other DNA
ttagctgcaacctatgttcatggcttccttgttccttaaagtaattcagtgacacaggtccctgctgttatgcccatatcatagtgaggacactgcagtttcacccaagggtaagtgctt

SEQ ID NO: 10327 - DNA, 120 bp, synthetic construct
  misc_feature 1..120: note = Artificially Synthesized Probe
  source 1..120: mol_type = other DNA
ctagaataagtaaatccacgggacagaaagcagattcgcagtgaagagggtatgggacgtggcagctcttaggtatgggactgtccacagtgataaaaaggttctggaataagatagtgg

SEQ ID NO: 10328 - DNA, 120 bp, synthetic construct
  misc_feature 1..120: note = Artificially Synthesized Probe
  source 1..120: mol_type = other DNA
atttaaaaacaacaacaaaatcacacaaatgaaagaacaaatgggtttttagtataagccaaaacctagccatctagggactgagttgaattgggggctgtctccaatcaccagggcact

SEQ ID NO: 10329 - DNA, 120 bp, synthetic construct
  misc_feature 1..120: note = Artificially Synthesized Probe
  source 1..120: mol_type = other DNA
agcggtcccaattttcatggaaccctcaggaggcctgtccacctaatttacaagctcttcagcctgaaaagagcctcattagacaaggctaaactaaatatctctaaagacaggtaagtt

SEQ ID NO: 10330 - DNA, 120 bp, synthetic construct
  misc_feature 1..120: note = Artificially Synthesized Probe
  source 1..120: mol_type = other DNA
aaataaaagtactccaaagggttgttggaaggtttcaatgtgtttgtacaaggaaaacacacccaacagcaccaagtcattgagatgcctcatttcatattatcacgagctgcccgtgat

SEQ ID NO: 10331 - DNA, 120 bp, synthetic construct
  misc_feature 1..120: note = Artificially Synthesized Probe
  source 1..120: mol_type = other DNA
tatctttatcccaggcccaacacaaggtttcctaagtaaatacaatgaacaaatgaactaccaatcctgagtactttacagccaccgaagaagaaacttaaattcagtttccaaccccag

SEQ ID NO: 10332 - DNA, 120 bp, synthetic construct
  misc_feature 1..120: note = Artificially Synthesized Probe
  source 1..120: mol_type = other DNA
gtcttggggtagtctacggccaatgtggtggacttcacactttcctccgactcattagacaaagtccttttgaggaatcgcagggcaggtgctttgggcttcttcccgagggcctcctgg

SEQ ID NO: 10333 - DNA, 120 bp, synthetic construct
  misc_feature 1..120: note = Artificially Synthesized Probe
  source 1..120: mol_type = other DNA
ggggacgcaggttcagatccccaccctgctgcttcccggctgtgtgcacccacatgggttgccccgcctctctgaacactggcactttatttatttatataaagacagtcttgctcagtt

SEQ ID NO: 10334 - DNA, 120 bp, synthetic construct
  misc_feature 1..120: note = Artificially Synthesized Probe
  source 1..120: mol_type = other DNA
ctaaaaaccactggattctacaccctaaatggtgaattgtgtgatatgggaactatatcctaatagggctgcttaaaaaatataaggcaaaggaaacaccctcagaaagccgtggtgcgg

SEQ ID NO: 10335 - DNA, 120 bp, synthetic construct
  misc_feature 1..120: note = Artificially Synthesized Probe
  source 1..120: mol_type = other DNA
aaaaagaatctaaaaatcctagaggctgcaggaaaaattgtgcagaccctcaaggagacagaccagtctcatctttctatcccctggttaaaaaaaaaaagatgcagtgtctgagatgct

SEQ ID NO: 10336 - DNA, 120 bp, synthetic construct
  misc_feature 1..120: note = Artificially Synthesized Probe
  source 1..120: mol_type = other DNA
gcctgattctagctacaacagacataggttcctccttgtttctgaaaattcctgcacagattctgctgttcctccctcctgcttgaaaaccagaaatcaacttccaagccttatctattt

SEQ ID NO: 10337 - DNA, 120 bp, synthetic construct
  misc_feature 1..120: note = Artificially Synthesized Probe
  source 1..120: mol_type = other DNA
gctgtttatcatagaagaggaagtaaaggtggagacagctttgtgtactagaactgtcaaaaggcctgagccccgggagattccacggggggcagttcagggtctgtacagatgagatgt

SEQ ID NO: 10338 - DNA, 120 bp, synthetic construct
  misc_feature 1..120: note = Artificially Synthesized Probe
  source 1..120: mol_type = other DNA
tgccctgctctctgctgacaataaacaggtgacattccccatctgggacaaagacaactagaagcagacctccgttctccttttgccctaaaatgctattttgctgcatttctcaaagtg

SEQ ID NO: 10339 - DNA, 120 bp, synthetic construct
  misc_feature 1..120: note = Artificially Synthesized Probe
  source 1..120: mol_type = other DNA
gaaacaaaaatttgcaaagaattgacttacaaacaggttgtcgccttccacccttcgccttcaaaaggtttcagccacatgcctggggacattaaacatacggttgctcaacattatttg

SEQ ID NO: 10340 - DNA, 120 bp, synthetic construct
  misc_feature 1..120: note = Artificially Synthesized Probe
  source 1..120: mol_type = other DNA
acctaactgaagttaaaagaatgtagtgatgatcgagatgttgtcttaagtatcaaatgcacaacatatccactcgttgctgtcactcttccatcactcttcatagcttcaggatgaggg

SEQ ID NO: 10341 - DNA, 120 bp, synthetic construct
  misc_feature 1..120: note = Artificially Synthesized Probe
  source 1..120: mol_type = other DNA
ccagcctataaaacagtatttttaaatggccataaccttcttaagaaagctctcagggctgtaaagaatgaagctgtagtgagctaacaaagagccctggcatcttatctggttccagaa

SEQ ID NO: 10342 - DNA, 120 bp, synthetic construct
  misc_feature 1..120: note = Artificially Synthesized Probe
  source 1..120: mol_type = other DNA
cttgtgagacctctccttagatctatgcagagcaacacctcactggggcaaaaagccatctcagaagcaaatcccaagaagaaatggtgtggtctggctacagaatggaatattattcag

SEQ ID NO: 10343 - DNA, 120 bp, synthetic construct
  misc_feature 1..120: note = Artificially Synthesized Probe
  source 1..120: mol_type = other DNA
tcttatgtgcctagggacacgtgatcaagtcctagcacgagaaaggccatggcaagttcaggccacttgtccttttcaggggacacttgtggagcgaaggacacacatcagttacctaag

SEQ ID NO: 10344 - DNA, 120 bp, synthetic construct
  misc_feature 1..120: note = Artificially Synthesized Probe
  source 1..120: mol_type = other DNA
ctcaccatcccagaggggtcacaaaggatggctgggaaccatgacgcaggagtgacgtcttgccagagctgcaggacccaagcactttcctccgcccaagtccatcttcttgtcatcaaa

SEQ ID NO: 10345 - DNA, 120 bp, synthetic construct
  misc_feature 1..120: note = Artificially Synthesized Probe
  source 1..120: mol_type = other DNA
aaaaaaaagaagaaacgataatagagggcccaccttgtgccaggcacagtggtctaagggcttttcaggccttaactcattaattctcatgaaatcccgaaaaagtatatactatattca

SEQ ID NO: 10346 - DNA, 120 bp, synthetic construct
  misc_feature 1..120: note = Artificially Synthesized Probe
  source 1..120: mol_type = other DNA
tttagccagcacgctgcacagctgccgctgcatcaaaggttctgcacaggactgcaagtcccgggggaaaggctgggaaatacagaggggaggcaaaaggagaaacgcagagagaaataa

SEQ ID NO: 10347 - DNA, 120 bp, synthetic construct
  misc_feature 1..120: note = Artificially Synthesized Probe
  source 1..120: mol_type = other DNA
gaacttggtgagcaagtcctgaatccatataagcaattggcattggtatctgtggttgtctctgtcgatcacaagggctctggtagaggatggtgcccacatgcatccatctttcccagc

SEQ ID NO: 10348 - DNA, 120 bp, synthetic construct
  misc_feature 1..120: note = Artificially Synthesized Probe
  source 1..120: mol_type = other DNA
gacaccattaaggaatttcttctcagacttgctggagtgtaagaaatacctggggctaccatgatatttgggtcttcagtggttctttctagaatgcaaggatgggaaataactttaggc

SEQ ID NO: 10349 - DNA, 120 bp, synthetic construct
  misc_feature 1..120: note = Artificially Synthesized Probe
  source 1..120: mol_type = other DNA
aagctactggagttcaaagtaggtatatttaggaatatgtgttttcaaagtaggcacacctgggttcttgctctgacctggtcactgtgagatcttgggccttaggtattttctttattt

SEQ ID NO: 10350 - DNA, 120 bp, synthetic construct
  misc_feature 1..120: note = Artificially Synthesized Probe
  source 1..120: mol_type = other DNA
atcaggagattgagaccatcctggctaacacggtgaaaccccgtctctactaaaaatacaaaaaaagttagccgggcatggtggcaggcgcctgtagtcccagctactcaggaggctgaa

SEQ ID NO: 10351 - DNA, 120 bp, synthetic construct
  misc_feature 1..120: note = Artificially Synthesized Probe
  source 1..120: mol_type = other DNA
agctcaaacccctttctccaggtcattctactcctcagtcaccttcaacggtcttcctcttccaggcagctctcctaggttacctaggaataaagcctgaagaatagcaccatttaaaat

SEQ ID NO: 10352 - DNA, 120 bp, synthetic construct
  misc_feature 1..120: note = Artificially Synthesized Probe
  source 1..120: mol_type = other DNA
gccagaattcaattctctgcttcaatacagaaaaactcccatccagggagctgcaaaccctttctgggtttcccaagactctctcctcaaagccacaaatcaagtaccacgaatctcaga

SEQ ID NO: 10353 - DNA, 120 bp, synthetic construct
  misc_feature 1..120: note = Artificially Synthesized Probe
  source 1..120: mol_type = other DNA
tgatcttaacacccatctttagcaaaattataagttggcaactctgtatctgttcctaagttttttttcactggtccatgaaatcaatggctgggaaccgctgaactatgctgcaccctc

SEQ ID NO: 10354 - DNA, 120 bp, synthetic construct
  misc_feature 1..120: note = Artificially Synthesized Probe
  source 1..120: mol_type = other DNA
aactctcagaaacatcttggtggcctcaaaggatactcctatcctctggtccaagcttccacccagttgtagattgtctgcaagcaccttgagtcatccatatctactttctacttgtat

SEQ ID NO: 10355 - DNA, 120 bp, synthetic construct
  misc_feature 1..120: note = Artificially Synthesized Probe
  source 1..120: mol_type = other DNA
aaaaaagaaaaaaagcacaactcctatgtgtggcctgaccccctccctctacacagcaggactatcacctctctcatcctaggtagaatgcttccattaatgcaacctaagagataattc

SEQ ID NO: 10356 - DNA, 120 bp, synthetic construct
  misc_feature 1..120: note = Artificially Synthesized Probe
  source 1..120: mol_type = other DNA
agggaatttcctaagttgtaagataaaatagcccagtaaataaacccagcttgtgcatactttggaggaggaggaaaaacatctggaatcaagtgggttgacttcctcccagaatttctt

SEQ ID NO: 10357 - DNA, 120 bp, synthetic construct
  misc_feature 1..120: note = Artificially Synthesized Probe
  source 1..120: mol_type = other DNA
gacagaacacaagtcaagatctaaatcacaagacgtaagcaaaggacttcagaggtcctgaactggtgcccttttataaacgctgacgctggggaattttctttttttcttctttaaaaa

SEQ ID NO: 10358 - DNA, 120 bp, synthetic construct
  misc_feature 1..120: note = Artificially Synthesized Probe
  source 1..120: mol_type = other DNA
tacacttttacatgggtgaacggtctgtgaattatgtctcagtaaggctgttataaacaagtaaagaatttaagagaaattaaattgggggtggtggccatgcacagaggaagagaagga

SEQ ID NO: 10359 - DNA, 120 bp, synthetic construct
  misc_feature 1..120: note = Artificially Synthesized Probe
  source 1..120: mol_type = other DNA
ccctcacccaccccacccccacggaccacactggcctcttctctctaagcaccacttcaaaatattagtcttcatttccctaaaaccatctcttcgtcttggtttttttttttttttctt

SEQ ID NO: 10360 - DNA, 120 bp, synthetic construct
  misc_feature 1..120: note = Artificially Synthesized Probe
  source 1..120: mol_type = other DNA
ccgcccccggccgcccccagctcaggtggcttctgtgcagcaaggcaccctccaagttggcggcagatcatcgggagcccccgaaccgagcccttgggggttcccgcctgccacggccgg

SEQ ID NO: 10361 - DNA, 120 bp, synthetic construct
  misc_feature 1..120: note = Artificially Synthesized Probe
  source 1..120: mol_type = other DNA
ttagtgactgtgtaccctacatcatagcatggttgagagactcctttgagataaatacatattcaccgcatcatccaaactgtggtacctggattacttaatccaaacttcacaacaacc

SEQ ID NO: 10362 - DNA, 120 bp, synthetic construct
  misc_feature 1..120: note = Artificially Synthesized Probe
  source 1..120: mol_type = other DNA
tcacaccaggccccagaagcacttggtttggccagcagtttttttttttaacttttaaaggaatttctgagttatccacaagcctcatcagcccctaatgtgtttgtttgtttgtttgtc

SEQ ID NO: 10363 - DNA, 120 bp, synthetic construct
  misc_feature 1..120: note = Artificially Synthesized Probe
  source 1..120: mol_type = other DNA
tatctgacatattacacagggatgatcatttataatgccagcaaacacagctgatgagagagtaggtcttgaggttaagggtgaatgtgcaatgtagacataaaagccccatacggatgt

SEQ ID NO: 10364 - DNA, 120 bp, synthetic construct
  misc_feature 1..120: note = Artificially Synthesized Probe
  source 1..120: mol_type = other DNA
agggagggagagagggagggaaattttatttatcaagcagaatcctatagataaaagagaaaaaaaaagaaagccttgctggagtgagagagtagcagaagccccaaaatgtacacaaaa

SEQ ID NO: 10365 - DNA, 120 bp, synthetic construct
  misc_feature 1..120: note = Artificially Synthesized Probe
  source 1..120: mol_type = other DNA
tataaggaattttctaagacaaatggttctatacatccaatgcattcctgcagggtacagatgaagaaaaaggccattggcagagatgcaccttgtcttcagtattcattcagcccaatc

SEQ ID NO: 10366 - DNA, 120 bp, synthetic construct
  misc_feature 1..120: note = Artificially Synthesized Probe
  source 1..120: mol_type = other DNA
atttgtaactatctggatcacttgaggccaggagttcaagaccagcctgggtaacacagagacatccccctgctgccatctctacaaatttaaaaaaaaattttttaatttttaaaaaga

SEQ ID NO: 10367 - DNA, 120 bp, synthetic construct
  misc_feature 1..120: note = Artificially Synthesized Probe
  source 1..120: mol_type = other DNA
ccaacatggtgaaaccccgtctctactaaaaatataaacattagccgggtgtgttggtgcacacctgtagtcccagctgctcgggaggctgaggcaggagaatcgcttgatcccgggagg

SEQ ID NO: 10368 - DNA, 120 bp, synthetic construct
  misc_feature 1..120: note = Artificially Synthesized Probe
  source 1..120: mol_type = other DNA
aaggaatctttcaataaagtgcagaatatgctgagtatctcaggaaggcaaggtaggcattaattatgaaactgaaatctgtgtcacccagcgcagtctcttttgcattcctaaatctat

SEQ ID NO: 10369 - DNA, 120 bp, synthetic construct
  misc_feature 1..120: note = Artificially Synthesized Probe
  source 1..120: mol_type = other DNA
aatcaatcaatgagccatcatctgcctctaactaataatctctgagtcccacagccttttttcggggcccttttcacttctctcccatctcctctgtcttttttttttgccttttttttt

SEQ ID NO: 10370 - DNA, 120 bp, synthetic construct
  misc_feature 1..120: note = Artificially Synthesized Probe
  source 1..120: mol_type = other DNA
gcactttctccagagggtaggggcttgtagtcttgttcctgtttttacttccccatcccaggagctctgtcaattttgctgcgactgaatccaaacagaatggaattgaaaacaagccct

SEQ ID NO: 10371 - DNA, 120 bp, synthetic construct
  misc_feature 1..120: note = Artificially Synthesized Probe
  source 1..120: mol_type = other DNA
gactatgtttgggaaaggttattttgggtatgagcttcaaggtctcaacaccaaggaacaaaagaatgccaggtaggtatttccccattgctcaccaaaaccaaagcatccaatgtgggc

SEQ ID NO: 10372 - DNA, 120 bp, synthetic construct
  misc_feature 1..120: note = Artificially Synthesized Probe
  source 1..120: mol_type = other DNA
tcaatagtcccaacatgggaggaaggaagggcagggatgacaggacccacactttgtagaagggaaggagatgaaacagtcgctgggggtcgggcacggtagcttatacctctaatctaa

SEQ ID NO: 10373 - DNA, 120 bp, synthetic construct
  misc_feature 1..120: note = Artificially Synthesized Probe
  source 1..120: mol_type = other DNA
aaagaaagaaaaggaaataaacatataaacaagaaaatcccaagaagccagtgaccacctttcttcacagccacctcaacaggttacaggttaaaccagccaaaggccaccatatgatga

SEQ ID NO: 10374 - DNA, 120 bp, synthetic construct
  misc_feature 1..120: note = Artificially Synthesized Probe
  source 1..120: mol_type = other DNA
actgaacctgccctctaacaggcccgtggtcaatatttgttgaataaataaacatagcctttcatgtggtcggaactgaaaaataaaagtaactctgtgtaatcccagcacttagaaaag

SEQ ID NO: 10375 - DNA, 120 bp, synthetic construct
  misc_feature 1..120: note = Artificially Synthesized Probe
  source 1..120: mol_type = other DNA
accattaccatttactatgtgtgtcagcacaggcgggttctctacatatattatcttgtgttaggttcatcgtggtcacagctctgtgaagcagaacttcaattacacccatttaatgga

SEQ ID NO: 10376 - DNA, 120 bp, synthetic construct
  misc_feature 1..120: note = Artificially Synthesized Probe
  source 1..120: mol_type = other DNA
catcacagccagttaaatcgttgctggccagtcccagtgaacagactgcttaggaccctacaacatattcaagatgcaaatgggtgtggggttcttctggggaatgatgaaaaagttcta

SEQ ID NO: 10377 - DNA, 120 bp, synthetic construct
  misc_feature 1..120: note = Artificially Synthesized Probe
  source 1..120: mol_type = other DNA
gcacccggcctgtaacatactttaaattaacacttttatactctcatttaatcccaggtatatatacctctctcacatgcacacaggtattaatccacaagttatgattttcagtcttag

SEQ ID NO: 10378 - DNA, 120 bp, synthetic construct
  misc_feature 1..120: note = Artificially Synthesized Probe
  source 1..120: mol_type = other DNA
atttttcccccccaaatctcaaatctcatgttgaaacatgaatatctctcaaatatctccaatgttagaggtaggaattggtgtgtggtgtttgggacgtgagggtggatccttcacgaa

SEQ ID NO: 10379 - DNA, 120 bp, synthetic construct
  misc_feature 1..120: note = Artificially Synthesized Probe
  source 1..120: mol_type = other DNA
tgctccctctgtggctatgtgacacaccagctcaccctccccttccatcatgactggaagcttcctgaagtcctcaccagaagcagatgctggctccatgcttcctgtacagcctgcaga

SEQ ID NO: 10380 - DNA, 120 bp, synthetic construct
  misc_feature 1..120: note = Artificially Synthesized Probe
  source 1..120: mol_type = other DNA
ctcccccaaaatatatgttcagtccctaatatctgtgatacagggtctttgctgacgtgatcaagctagaatgagatcatatgggattagggtaggcctaataagacaagagaatttttt

SEQ ID NO: 10381 - DNA, 120 bp, synthetic construct
  misc_feature 1..120: note = Artificially Synthesized Probe
  source 1..120: mol_type = other DNA
atttctagaacagagactggtgcaggctaggagctcactctttgtcgcatgaggaatgagtgctgttatttacttttatgttctgtgtggcatctgacacacgacttcacagacaaatgg

SEQ ID NO: 10382 - DNA, 120 bp, synthetic construct
  misc_feature 1..120: note = Artificially Synthesized Probe
  source 1..120: mol_type = other DNA
gaaacacagacgtgacagaacactacccagagtggcacggtgatagcaacagaggggaccagggaggcaggagatgtagggagaatccagagagtgaaagagacttaaaatgcagctcaa

SEQ ID NO: 10383 - DNA, 120 bp, synthetic construct
  misc_feature 1..120: note = Artificially Synthesized Probe
  source 1..120: mol_type = other DNA
catttccagaactcagttgccttgtgtgtaaaggcaggaagaaactgactttatactttttctttccttcaccacagaaccccttcttcaaacagaagctttgatgacagccaaatacac

SEQ ID NO: 10384 - DNA, 120 bp, synthetic construct
  misc_feature 1..120: note = Artificially Synthesized Probe
  source 1..120: mol_type = other DNA
ttggaagcattgtgttctcccaatcactgaaagtcaaacctacatgtgactctgatgtgccaagcactatctgagcaactcaaaaataatttgtctacaggcctcagtttttcccatttg

SEQ ID NO: 10385 - DNA, 120 bp, synthetic construct
  misc_feature 1..120: note = Artificially Synthesized Probe
  source 1..120: mol_type = other DNA
gactctgtctcaaaaaaaaagtctggggacaagtcagccagctttgatttccaaggggtgagaacttagtttttctccaaaacacagtccatcaagggcaagatccacagctcctgacta

SEQ ID NO: 10386 - DNA, 120 bp, synthetic construct
  misc_feature 1..120: note = Artificially Synthesized Probe
  source 1..120: mol_type = other DNA
ttcgagaccagcctggccaatatggtgaaaccccatctccactaaaaatacaaaaattagccgggcgtggcggcggctgcccgtaatcctggctactcgggaggctgaggcacgagaact

SEQ ID NO: 10387 - DNA, 120 bp, synthetic construct
  misc_feature 1..120: note = Artificially Synthesized Probe
  source 1..120: mol_type = other DNA
acaaaaaccctacaaatcaacggaacaatatgcgatgttcactgaatagaaaactccgtataataaaaacttcctgttgatccacaaaatcaacaagattccaatcaaaattacagccac

SEQ ID NO: 10388 - DNA, 120 bp, synthetic construct
  misc_feature 1..120: note = Artificially Synthesized Probe
  source 1..120: mol_type = other DNA
agtgtggcactggcttcataatagacacaccagccaggaactgacccacactaatggagtcacctcatttatgacaaaacaagatttcattgccaatggggaaaggactttttttttttt

SEQ ID NO: 10389 - DNA, 120 bp, synthetic construct
  misc_feature 1..120: note = Artificially Synthesized Probe
  source 1..120: mol_type = other DNA
gtgaaaatcttcatgaccttagagcaggcaaaattttcttaagccagatacaaaaagaattaatgcaacaagcagagctaaatagtctgtgttaaaattaagaacttctaggccaggcgt

SEQ ID NO: 10390 - DNA, 120 bp, synthetic construct
  misc_feature 1..120: note = Artificially Synthesized Probe
  source 1..120: mol_type = other DNA
gactggtgtccttataagaagagtttaggggctgggcactgtggctcacgcatgcaattgcagcacttcgcgatggcgaggcgggaggatcacttgagcccaggagtctgagaacagcct

SEQ ID NO: 10391 - DNA, 120 bp, synthetic construct
  misc_feature 1..120: note = Artificially Synthesized Probe
  source 1..120: mol_type = other DNA
aattgtatatacacaaagctgagcaaaagaagccaaaaactaaagaagacatcctccacgatttcactggcataaaatgtgaaaacaggcgaaactcatccaaggggctagaagtcaggt

SEQ ID NO: 10392 - DNA, 120 bp, synthetic construct
  misc_feature 1..120: note = Artificially Synthesized Probe
  source 1..120: mol_type = other DNA
atagatgtccccggaggttacatgctgaacttacgacctaagtctatgaatttccttttgcttaggacagctagagttacatttgtcacttaggtcacttataacaaatgtgccctatca

SEQ ID NO: 10393 - DNA, 120 bp, synthetic construct
  misc_feature 1..120: note = Artificially Synthesized Probe
  source 1..120: mol_type = other DNA
tttaacatgcttttgggtcaattattctggctggatcatctgacacatctgacacactggccggctgctttcatcctccacacagacacaccagagttggcttctataaaacttcaatca

SEQ ID NO: 10394 - DNA, 120 bp, synthetic construct
  misc_feature 1..120: note = Artificially Synthesized Probe
  source 1..120: mol_type = other DNA
ttctcctgcctcagcctcccgagtagctgggattacaggaatgtgccaccacacgtggtgaatttttgtatttttagcagagacggggtttcatcatgttggccaggctggtcttgactt

SEQ ID NO: 10395 - DNA, 120 bp, synthetic construct
  misc_feature 1..120: note = Artificially Synthesized Probe
  source 1..120: mol_type = other DNA
aattaaataaaaatgtttcaaacccaacccaagaaaataatcagatcacagagatactcccttcaccccactttaaagctccccagtggcttcccaacacactagaagtcaaacccaaat

SEQ ID NO: 10396 - DNA, 120 bp, synthetic construct
  misc_feature 1..120: note = Artificially Synthesized Probe
  source 1..120: mol_type = other DNA
ctcacctcggcctccagagtagctgggactacaggtatgcaccaccacgcccagctaattttttgtagagagagggtttcaccatgttgcccagtctgatctcaaattcttgggctcaag

SEQ ID NO: 10397 - DNA, 120 bp, synthetic construct
  misc_feature 1..120: note = Artificially Synthesized Probe
  source 1..120: mol_type = other DNA
ctgatacagcttcttaagactgcaaccctacctgttctccagaatgaaacggttgcagctcacacctgctcctgccttctcccgtggggactttgttttgagaggcagttaaaagtctaa

SEQ ID NO: 10398 - DNA, 120 bp, synthetic construct
  misc_feature 1..120: note = Artificially Synthesized Probe
  source 1..120: mol_type = other DNA
tgtactagttccagggatgtggtaatatgggctacaattcactattaattaacaatgatgcccaaggtttaaatcctactcacagggatggactcttgagcaagtctgggagcagatgct

SEQ ID NO: 10399 - DNA, 120 bp, synthetic construct
  misc_feature 1..120: note = Artificially Synthesized Probe
  source 1..120: mol_type = other DNA
aatttctttccttccccaattctgaaaccagtgaatctgacccaaccatacacccctgaatatgaaggtgatgggtcttgagataaattctcacgtcccccaaatcctcaggtaactaaa

SEQ ID NO: 10400 - DNA, 120 bp, synthetic construct
  misc_feature 1..120: note = Artificially Synthesized Probe
  source 1..120: mol_type = other DNA
gcacataggatccaccaaatgactcaactcagtaaaaatgggggaagaaaggagaggaattaaaattccacttatgtagagaaaatttaaatcagctgggactagcaccctgctctagga

SEQ ID NO: 10401 - DNA, 120 bp, synthetic construct
  misc_feature 1..120: note = Artificially Synthesized Probe
  source 1..120: mol_type = other DNA
catttcctcacttcaaactgccaggggacagggatctcccccagaagcctgaagggaagtcaccccctgaccccaattcttggcttcaacctatcaaggctgtagcgctagacagctccg

SEQ ID NO: 10402 - DNA, 120 bp, synthetic construct
  misc_feature 1..120: note = Artificially Synthesized Probe
  source 1..120: mol_type = other DNA
gagccgggaagccggaaccgggggccggcggcatttctaaagctggagccgcccccgagctaccggggaagctggaaagctgaaatggaagggctgagaccccagccgcccccgccgccc

SEQ ID NO: 10403 - DNA, 120 bp, synthetic construct
  misc_feature 1..120: note = Artificially Synthesized Probe
  source 1..120: mol_type = other DNA
ccctcttcctcttctttcatccacccctcccccaacattacctgtgtggccgactcaaattcaaagcattttgtatatataactgttttctttttttgcttttctgctgcatgtcttttt

SEQ ID NO: 10404 - DNA, 120 bp, synthetic construct
  misc_feature 1..120: note = Artificially Synthesized Probe
  source 1..120: mol_type = other DNA
gaggtggagttatgggcctgcagtagagatatgggcctgaagtggagacatgggcctggagtggagatatgggccaggagtggagatatgggcctagaggtcgatatctgggcctggagt

SEQ ID NO: 10405 - DNA, 120 bp, synthetic construct
  misc_feature 1..120: note = Artificially Synthesized Probe
  source 1..120: mol_type = other DNA
ttctaccagaagaggtgggaaaaccacagccatggccctgacattccaatcctctgatggggactcagttgtttattttcgttcaggcatcggctgatattccattctcaaaggacatgc

SEQ ID NO: 10406 - DNA, 120 bp, synthetic construct
  misc_feature 1..120: note = Artificially Synthesized Probe
  source 1..120: mol_type = other DNA
aagccctgcaggtgccttgattttacccacgacaaacagggtccgatttctgtctccagaattggaaggggttagtgtgctctctcctggtgccatgcttctgataattttctacagcag

SEQ ID NO: 10407 - DNA, 120 bp, synthetic construct
  misc_feature 1..120: note = Artificially Synthesized Probe
  source 1..120: mol_type = other DNA
gtgaaatcagaagagacagtcatcctgcagtgttggtcagatgtcatgtttgaacacttccttctgcacagagaggggatgtttaacgacactttgcgcctcattggagaacaccatgat

SEQ ID NO: 10408 - DNA, 120 bp, synthetic construct
  misc_feature 1..120: note = Artificially Synthesized Probe
  source 1..120: mol_type = other DNA
gctgtgtgaacttgtagtctccagactggattctgaggctcatattccaaataagcccacttatgagaggatcagtgagaggcacagagagaaatcagggacaccaaaaagcaaagacat

SEQ ID NO: 10409 - DNA, 120 bp, synthetic construct
  misc_feature 1..120: note = Artificially Synthesized Probe
  source 1..120: mol_type = other DNA
ttaaaaaaagtaacatcaagtcaaccaatccaaggagagtcagagagaataaaacaatccaaaaagagaaaacatatctagaggtggggaagtgaggtcagagacctagagagacagaga

SEQ ID NO: 10410 - DNA, 120 bp, synthetic construct
  misc_feature 1..120: note = Artificially Synthesized Probe
  source 1..120: mol_type = other DNA
tcccagaagcccatcctggcctctcacccacacagagatgtcatcaccagcaacccctacaccctttacttttctttgaagaaatatttattgaggataaatatacctatatagcttacc

SEQ ID NO: 10411 - DNA, 120 bp, synthetic construct
  misc_feature 1..120: note = Artificially Synthesized Probe
  source 1..120: mol_type = other DNA
gtactaatttacactcctcccaacagggtaccagggttctcctttctctaccaccttgccagcatttcttttgcctgtcttgcagctaaaagccattttattttatttcattttattttg

SEQ ID NO: 10412 - DNA, 120 bp, synthetic construct
  misc_feature 1..120: note = Artificially Synthesized Probe
  source 1..120: mol_type = other DNA
tcaaaagaaaaaataaaaaaccattggatgtaaatgcatggaatatatctgtgttattcattctgctccgttgttctatgtgcctttctttatgccaatgtcatgctattttgcttacta

SEQ ID NO: 10413 - DNA, 120 bp, synthetic construct
  misc_feature 1..120: note = Artificially Synthesized Probe
  source 1..120: mol_type = other DNA
tgcaatgtttgttctacctgcattcctaactggaggataaattcctggagacttgagagagggaagggaagggaacatctgatgagggcaaggtgttttagagaagttccacttgccaag

SEQ ID NO: 10414 - DNA, 120 bp, synthetic construct
  misc_feature 1..120: note = Artificially Synthesized Probe
  source 1..120: mol_type = other DNA
cccttgggacactgatattgcagatggttaaatgggagggcagaaaatgaacgcacaagtggatctataaatgaatggtccattgggaagcatctgtgcatgaaatctattttttgtttg

SEQ ID NO: 10415 - DNA, 120 bp, synthetic construct
  misc_feature 1..120: note = Artificially Synthesized Probe
  source 1..120: mol_type = other DNA
gcaattgccgccccactggtgaaatgtggtgctgatttagacactaaatgaatgaagtagatggatataagatatgtttgtgaggtagaatcattgactggaaaggcttactgggtttga

SEQ ID NO: 10416 - DNA, 120 bp, synthetic construct
  misc_feature 1..120: note = Artificially Synthesized Probe
  source 1..120: mol_type = other DNA
gatttcacttttgttttctttccttggagaatgcaagttgtttgattcaagaatgctgtggatgtagaaaccctaaagcacattcgctgtgaatcaatcccagtccagtcttcccagaga

SEQ ID NO: 10417 - DNA, 120 bp, synthetic construct
  misc_feature 1..120: note = Artificially Synthesized Probe
  source 1..120: mol_type = other DNA
gagagctataacagaaaaagcaggagaaagctgggtctcctgccatctgggtgcttgtcctaaagaggtgttttatgtggttacctgtcaatcaagaaatgcgagacaattcataaagag

SEQ ID NO: 10418 - DNA, 120 bp, synthetic construct
  misc_feature 1..120: note = Artificially Synthesized Probe
  source 1..120: mol_type = other DNA
atcttctacagatgctgcggtaatggaccaagagtctgcaggaaacagaacagcgaatagcgaggtaggtactcctcggcccgggctcgtggctactgttattcccaaagagtcctggaa

SEQ ID NO: 10419 - DNA, 120 bp, synthetic construct
  misc_feature 1..120: note = Artificially Synthesized Probe
  source 1..120: mol_type = other DNA
tggagatatgggcttagggtggagatctgggcctggggcggagatatgggactggattggagataggggcctagggtggagatctgagcctggattggcgatatgggcctagggtggaaa

SEQ ID NO: 10420 - DNA, 120 bp, synthetic construct
  misc_feature 1..120: note = Artificially Synthesized Probe
  source 1..120: mol_type = other DNA
tgagtaatcttacagtattaaaatctagtaggagtctctttactcagcacttgctcaaagttctcagctgaggcttttgttgtagggagacaccatgtctttgcgggatgggtccttcct

SEQ ID NO: 10421 - DNA, 120 bp, synthetic construct
  misc_feature 1..120: note = Artificially Synthesized Probe
  source 1..120: mol_type = other DNA
agatgccttgattttagcccaggaaaaatagggtccaatttctgtctccagtactggaaggtgtcagtgtggtctctcctgctgccatgcttctgataattttctacagcagcaacagga

SEQ ID NO: 10422 - DNA, 120 bp, synthetic construct
  misc_feature 1..120: note = Artificially Synthesized Probe
  source 1..120: mol_type = other DNA
ctggttcctctttcacccccacataaacagcaggaaatacattagtgtgaaatagatacaacaccccaagagatgaggctcagcccagtgggaagggaatcagaggctactagagacaga

SEQ ID NO: 10423 - DNA, 120 bp, synthetic construct
  misc_feature 1..120: note = Artificially Synthesized Probe
  source 1..120: mol_type = other DNA
ttgtggtctccagactggattctgtggctcacattccaaataaccccacatatgaaaggatcactgagaggcacagagaaaaatcaggaacaccaaaaagcaaagacataaacacacaga

SEQ ID NO: 10424 - DNA, 120 bp, synthetic construct
  misc_feature 1..120: note = Artificially Synthesized Probe
  source 1..120: mol_type = other DNA
gaataaaagaatccaaaaagggaaaacatatctagaggtggggaagcgaggtcagagacctagagagacagagaaggtggaagaaggaaatagacatgaagagagatggggtggagggtg

SEQ ID NO: 10425 - DNA, 120 bp, synthetic construct
  misc_feature 1..120: note = Artificially Synthesized Probe
  source 1..120: mol_type = other DNA
cccacacagggatgtcatcaccagcaacccctacaccctttacttttgtttgaagaaatatttattgaggataaatatacctatatagcttaccacctttaacattttttttttttttga

SEQ ID NO: 10426 - DNA, 120 bp, synthetic construct
  misc_feature 1..120: note = Artificially Synthesized Probe
  source 1..120: mol_type = other DNA
aatttacactcctaccaacagggtattagggttctcctttctctaccactttggcaggatttcctttgcctgtcttgcagctaaaagccattttattttatttcattttattttgagatg

SEQ ID NO: 10427 - DNA, 120 bp, synthetic construct
  misc_feature 1..120: note = Artificially Synthesized Probe
  source 1..120: mol_type = other DNA
agaaaaaagaaaaaaacattggaggtaaatgcatggattatatctgtgttcttcattctgctccattgttctacgtgcctttctttatgccaatgtgatgctgttttgcttactacagct

SEQ ID NO: 10428 - DNA, 120 bp, synthetic construct
  misc_feature 1..120: note = Artificially Synthesized Probe
  source 1..120: mol_type = other DNA
gatactccaacagcgaaagggatctgggcccaacctagggctcagtgaaatctcttaatctctcattttatggagctgagacctcctacaagctagaagaatgattgccaatctgacatc

SEQ ID NO: 10429 - DNA, 120 bp, synthetic construct
  misc_feature 1..120: note = Artificially Synthesized Probe
  source 1..120: mol_type = other DNA
ctgcccttgggacactgatattgcagatggttaaatgggagggcagaaaatgaatgcacaagtggatctataaatgaatgatccattgggaagcatctgtgcatgaaatctattttttgt

SEQ ID NO: 10430 - DNA, 120 bp, synthetic construct
  misc_feature 1..120: note = Artificially Synthesized Probe
  source 1..120: mol_type = other DNA
aatccctacatgattaatatgactgacatgaaaataagggaggctcagttgcataactggaatctaggagaccgtggaaaaggcaattgccaccccactggtgaaatgtggtgctgattt

SEQ ID NO: 10431 - DNA, 120 bp, synthetic construct
  misc_feature 1..120: note = Artificially Synthesized Probe
  source 1..120: mol_type = other DNA
ggcttcaacactatttcctggccatttgacataagagaattctacttagctttttttatcttgatttcacttttgtttccttttcttggagaatgcaagttgtttgattcaagaatgctg

SEQ ID NO: 10432 - DNA, 120 bp, synthetic construct
  misc_feature 1..120: note = Artificially Synthesized Probe
  source 1..120: mol_type = other DNA
ctatgagagctataactgagaaagcaggagaaagctgggtctccctccatctgggtgcttgtcctaaaggggtgttgtatgtggttacctgtcaatcaagaaatgtgagacaattcataa

SEQ ID NO: 10433 - DNA, 120 bp, synthetic construct
  misc_feature 1..120: note = Artificially Synthesized Probe
  source 1..120: mol_type = other DNA
ttgaatcactgcgttttcacacagagaaaaatcactcgcccttctcagaggcccaagacacccccaacagatatcatcgtgtacacggaacttccaaatgctgagccctgatccaaagtt

SEQ ID NO: 10434 - DNA, 120 bp, synthetic construct
  misc_feature 1..120: note = Artificially Synthesized Probe
  source 1..120: mol_type = other DNA
atatgggcctggaggtggagttatgggcctgcagtagagatatgggcctgaagtggagatatgggcctggagtggagatatgggcctagaggtggagttatgggcccggaggtggagtta

SEQ ID NO: 10435 - DNA, 120 bp, synthetic construct
  misc_feature 1..120: note = Artificially Synthesized Probe
  source 1..120: mol_type = other DNA
ttccaaatcctctgatgggggctcagttcatcaattggctgatattccattcacataggacttgccctccatgccgtgtctactttgtgttgttttatatgagtaattttgcagtattaa

SEQ ID NO: 10436 - DNA, 120 bp, synthetic construct
  misc_feature 1..120: note = Artificially Synthesized Probe
  source 1..120: mol_type = other DNA
gactgtatttggggtcaagggagattgaatacaggggaaatgggtgctgtggtgggaagaatcactgtccccaatgatggctacattgtaatccctggagcctgtgactatttatgttac

SEQ ID NO: 10437 - DNA, 120 bp, synthetic construct
  misc_feature 1..120: note = Artificially Synthesized Probe
  source 1..120: mol_type = other DNA
tgtctagacattgttctcattgtcactgggacacagagtgaatgatccaggacttggaacccccaggtggtcatgaggaagataagtgtgggattcttatggaaagagagtgacttggtg

SEQ ID NO: 10438 - DNA, 120 bp, synthetic construct
  misc_feature 1..120: note = Artificially Synthesized Probe
  source 1..120: mol_type = other DNA
gacataaacacacacaaaatgagccagaagaaggagattaagagattcacagacacataaaaagaaagaaaagagggcagaatggagagaatgatggaaaggaggagagaaaagccccaa

SEQ ID NO: 10439 - DNA, 120 bp, synthetic construct
  misc_feature 1..120: note = Artificially Synthesized Probe
  source 1..120: mol_type = other DNA
cactgcttgtttctgtcacaggtgagaaaagcccatatctctctcatgtcctatgatcctaaatccttagctaaggagcttcctgctgatgatggagaaaagcatggacagatgcagaga

SEQ ID NO: 10440 - DNA, 120 bp, synthetic construct
  misc_feature 1..120: note = Artificially Synthesized Probe
  source 1..120: mol_type = other DNA
cccttcccttcctggcctctggtgtccaccattgtattctccaccttcatgagatccaccttttatctcctgcatgtgggtgagaaatgggaatctttgtaatgacctccagttccatcc

SEQ ID NO: 10441 - DNA, 120 bp, synthetic construct
  misc_feature 1..120: note = Artificially Synthesized Probe
  source 1..120: mol_type = other DNA
cagctcactgcaacctccgcctcccgcgttcaactgattctcctgcctcagcctccaaagtagctgggattacaggcatgtgccaccacgcctagctaatttttgtatgtttagtagaga

SEQ ID NO: 10442 - DNA, 120 bp, synthetic construct
  misc_feature 1..120: note = Artificially Synthesized Probe
  source 1..120: mol_type = other DNA
tctaagtcaggtagtgtgatgctcctgttttctctttataccttcaagtctcaagacagtgggcatcgcacacaaaaattatggagaagaggatcccaagactcccagggtccaacatta

SEQ ID NO: 10443 - DNA, 120 bp, synthetic construct
  misc_feature 1..120: note = Artificially Synthesized Probe
  source 1..120: mol_type = other DNA
tctctgaactccagacactccaacagtgaaagggatctagggccaccaaagggctcagcgaagtctcttaacctttaatgtcctgcaggtgagacctcctacaagctagaagaatgattg

SEQ ID NO: 10444 - DNA, 120 bp, synthetic construct
  misc_feature 1..120: note = Artificially Synthesized Probe
  source 1..120: mol_type = other DNA
ctcttgggacactgatattgcagatggttaaatgggaggacagaaaatgagtgcacaagtggaccaataaatgaatgatccattgggaagcatctgtgcatgaaatctatttgtttgttc

SEQ ID NO: 10445 - DNA, 120 bp, synthetic construct
  misc_feature 1..120: note = Artificially Synthesized Probe
  source 1..120: mol_type = other DNA
taagtggatgaagcagatggatataagctatgtttgggaggtagaatcatttgcagggagggcttgctgggtttgagtttcctagttgtttaatccttgctaaattaatttctttctgag

SEQ ID NO: 10446 - DNA, 120 bp, synthetic construct
  misc_feature 1..120: note = Artificially Synthesized Probe
  source 1..120: mol_type = other DNA
agatcacaaagagtagcacatttcacacgggcttcaacactattttctggctgtttgacataagagaattctacttcgctttttttatattgatttcacttttgtttccttttcttggag

SEQ ID NO: 10447 - DNA, 120 bp, synthetic construct
  misc_feature 1..120: note = Artificially Synthesized Probe
  source 1..120: mol_type = other DNA
atctgggtgcttgtccgaaagagatgctgtaagtggttacctgtcaatcaagaaatgcaagacaattcatatagagaaactgctatgattagcttcttactggtgtctcctcttcttcca

SEQ ID NO: 10448 - DNA, 120 bp, synthetic construct
  misc_feature 1..120: note = Artificially Synthesized Probe
  source 1..120: mol_type = other DNA
ggaatctgaaggcgtgagtcttcatcttagggcatcgctcctcctcacgccacaaatctggtgcctctctcttgcttacaaatgtctaggtccccactgcctgctggaaagaaaacacac

SEQ ID NO: 10449 - DNA, 120 bp, synthetic construct
  misc_feature 1..120: note = Artificially Synthesized Probe
  source 1..120: mol_type = other DNA
gccctaggcgcctccctcttccaacatagctttgatttagaatgtttgccagaattatcttaaataactctcatattacgttacttccttttaggaaacaaacagggtagggcatggaaa

SEQ ID NO: 10450 - DNA, 120 bp, synthetic construct
  misc_feature 1..120: note = Artificially Synthesized Probe
  source 1..120: mol_type = other DNA
taacttctctccttcattctgaggattaacaaggctaatttggaaggcacttcacatgcaaggctcattaagttcactgtactttttggctgtaaaatagggcaactagctctgtgtaga

SEQ ID NO: 10451 - DNA, 120 bp, synthetic construct
  misc_feature 1..120: note = Artificially Synthesized Probe
  source 1..120: mol_type = other DNA
tttaggtttttttttttttccaaattctccacaaagaatctgaggtcaccgataaagcaaggttgcatatgaagtttcttctcaacatcggcacagagaggttgctgacgtagagcagag

SEQ ID NO: 10452 - DNA, 120 bp, synthetic construct
  misc_feature 1..120: note = Artificially Synthesized Probe
  source 1..120: mol_type = other DNA
atccacaactttctgtgttccactctccccatccatacgcttgagtctgaccttgttctctcctgctgtaagagaaacttatttctttttcttttataaggaaaaagaaagaaagaggca

SEQ ID NO: 10453 - DNA, 120 bp, synthetic construct
  misc_feature 1..120: note = Artificially Synthesized Probe
  source 1..120: mol_type = other DNA
aaaataagaaccctggatcagattggccaccagccacctgctcagaagtttacttatccttgcagactttgatactgtgacaagttgaaacccagaccacagctttctgcatttacctta

SEQ ID NO: 10454 - DNA, 120 bp, synthetic construct
  misc_feature 1..120: note = Artificially Synthesized Probe
  source 1..120: mol_type = other DNA
tagacaagaggatggagctttgcatggagagaaagctagtgacaaggctgggggaaggggccctgcaggggcttcatcctggaggggtctgagccagacaggaatgtgggtagatgtaca

SEQ ID NO: 10455 - DNA, 120 bp, synthetic construct
  misc_feature 1..120: note = Artificially Synthesized Probe
  source 1..120: mol_type = other DNA
tctctaattccagccacagcatttatttattgcatgtattccttccacagcaagagagagccctcgggatccccagagtgttagcttcacaaataaagtgcgactcagtgtattcgccca

SEQ ID NO: 10456 - DNA, 120 bp, synthetic construct
  misc_feature 1..120: note = Artificially Synthesized Probe
  source 1..120: mol_type = other DNA
tggtcatctacgtcatctgccgccacaagccgatgcggaccgtgaccaacttctacatcggtgagtgcgggcgctgcgccgcacctgctgccgtcccgggggctccgagggccgagcggc

SEQ ID NO: 10457 - DNA, 120 bp, synthetic construct
  misc_feature 1..120: note = Artificially Synthesized Probe
  source 1..120: mol_type = other DNA
ccggctgggtgctgggcgacttcatgtgcaagttcgtcaactacatccagcaggtgcgctccggagcaggaggggagagggcgcacttggggacgggcgggggtgcgctccgcagtggga

SEQ ID NO: 10458 - DNA, 120 bp, synthetic construct
  misc_feature 1..120: note = Artificially Synthesized Probe
  source 1..120: mol_type = other DNA
acgtgacggtgttcccgttgcgcgccctgcaccgccgcacgccccgcctggcgctggctgtcagcctcagcatctgggtaggtgagtacagctcaggggcctcacgggagaaggcggaca

SEQ ID NO: 10459 - DNA, 120 bp, synthetic construct
  misc_feature 1..120: note = Artificially Synthesized Probe
  source 1..120: mol_type = other DNA
ctccctcgggagcggggactgctggaacagcggctattcttctgttattagtatttttcttactgtccaagatcaactgtggaaatattttggtctcttgtgacgttcggtgcagtttcg

SEQ ID NO: 10460 - DNA, 120 bp, synthetic construct
  misc_feature 1..120: note = Artificially Synthesized Probe
  source 1..120: mol_type = other DNA
aggaatgtcacctagaaccggccagctttccgacctctccggtcaaggacgcattcctaagagacgaagggagaatgacagaagttaaaaacaaccaaacaaaagccaggttgaggcctc

SEQ ID NO: 10461 - DNA, 120 bp, synthetic construct
  misc_feature 1..120: note = Artificially Synthesized Probe
  source 1..120: mol_type = other DNA
ggcctcgtcttgtttgatctcggggaacctcggcagacggaaagctttgatgctttggtgcatggcagatagagaggaaacgtgtatcttcgtacatttaaagtttcctttccttttttt

SEQ ID NO: 10462 - DNA, 120 bp, synthetic construct
  misc_feature 1..120: note = Artificially Synthesized Probe
  source 1..120: mol_type = other DNA
aaagaaaaaaaaaactgcaaagagatcctctccgggttcgcggcaggttggcttcttgtcaccacctgctagccttgggacagtaacagatgacttccactcccgaatctgtggagggaa

SEQ ID NO: 10463 - DNA, 120 bp, synthetic construct
  misc_feature 1..120: note = Artificially Synthesized Probe
  source 1..120: mol_type = other DNA
taaaagccgaattgtcatgagcattccttgaatgtcttttactacacctcggtgtttgttgctatagactattgcatgtgcattacatgcctactgtaggcttctgatatgcatatccac

SEQ ID NO: 10464 - DNA, 120 bp, synthetic construct
  misc_feature 1..120: note = Artificially Synthesized Probe
  source 1..120: mol_type = other DNA
gtgagttctgtgagttgggtgcagtaagtcactcttgctttttgtttttttaatttgctacatctgtgaaagtacttggaaaaattgcatctcagcttggagaagctgagaactgtaggt

SEQ ID NO: 10465 - DNA, 120 bp, synthetic construct
  misc_feature 1..120: note = Artificially Synthesized Probe
  source 1..120: mol_type = other DNA
tgaaaatgacctgcccaggaaaaccacccctctgatttctgtctctgtccctgctccccctgtcctttgccagatgatccctgtgactggacaaagtagcatgttaccagcttttttgaa

SEQ ID NO: 10466 - DNA, 120 bp, synthetic construct
  misc_feature 1..120: note = Artificially Synthesized Probe
  source 1..120: mol_type = other DNA
aaactatgctgacctaatgatctctctgttgtctaaccagctctgtccaatataattttttgcaatggtggaaatgtttgttgtctgtccattagggtagccactggctgctcacacttg

SEQ ID NO: 10467 - DNA, 120 bp, synthetic construct
  misc_feature 1..120: note = Artificially Synthesized Probe
  source 1..120: mol_type = other DNA
cacagcttccaaatgttggaggtgactgaatgaagttttaccgtttatttggtttaccttggtagaagtactgacagaatgacctgcagtgattgaaacaagttgcttccatgtttccta

SEQ ID NO: 10468 - DNA, 120 bp, synthetic construct
  misc_feature 1..120: note = Artificially Synthesized Probe
  source 1..120: mol_type = other DNA
atctccgctcattgcaccctccgcctcccaggttcaagcgattgtcctgcctcagtctccggaatagttgagattacaggcacccaccaccacacccagctaatttttgtatttttagta

SEQ ID NO: 10469 - DNA, 120 bp, synthetic construct
  misc_feature 1..120: note = Artificially Synthesized Probe
  source 1..120: mol_type = other DNA
aatgacatgaattaaccccttgaataaggtgcttagcgtttcctttctctttaatatgtattttctcacctcacaggggagaagcctttcaactgcagctgggatggctgtgataaaaag

SEQ ID NO: 10470 - DNA, 120 bp, synthetic construct
  misc_feature 1..120: note = Artificially Synthesized Probe
  source 1..120: mol_type = other DNA
tctagtctgtaatagtcttggccatggctctgctgaaagcaagccattcagtttcttgtttgtacctaaaacaccaaaaaagaaacactcaaatccagctgctttgtcaattgtcagttc

SEQ ID NO: 10471 - DNA, 120 bp, synthetic construct
  misc_feature 1..120: note = Artificially Synthesized Probe
  source 1..120: mol_type = other DNA
tatgacatgcaaagtaatgtgagtcctgccagtattctggtggataaggtcttttgagtatttggttgcttgtcacaacattctccaagcagtgatatttctaaagaggagatacatgtt

SEQ ID NO: 10472 - DNA, 120 bp, synthetic construct
  misc_feature 1..120: note = Artificially Synthesized Probe
  source 1..120: mol_type = other DNA
acttagtacagtcccaatgtcatgtttgtatcattcactctcttgaggatgctggaatgcccaggaccagaaaaagaagggaattcacactgaaaattaacctagcaggtccaaagagaa

SEQ ID NO: 10473 - DNA, 120 bp, synthetic construct
  misc_feature 1..120: note = Artificially Synthesized Probe
  source 1..120: mol_type = other DNA
aaaaacaaatactgttgatgtctgattccttcttatcgggaaaggggccctgaggatataacttggagggactatatggtcagaggagaaagttcctcctatttcataatagctatcacc

SEQ ID NO: 10474 - DNA, 120 bp, synthetic construct
  misc_feature 1..120: note = Artificially Synthesized Probe
  source 1..120: mol_type = other DNA
aaattagtaaacattgctgtttacagaaatagaaatcatttctgtttccaaaggcctctcaccatcccagtcctggacatttccaagactgccacccctgacaccctctccaaggtccgc

SEQ ID NO: 10475 - DNA, 120 bp, synthetic construct
  misc_feature 1..120: note = Artificially Synthesized Probe
  source 1..120: mol_type = other DNA
cgtggagcttcccccgagttctcccaggagccctcgccagagctgccgcgcaagtccgcccagacgcttgcagccagcaggtggggcgcggcgccgcccgcgccggggctgggggcgggg

SEQ ID NO: 10476 - DNA, 120 bp, synthetic construct
  misc_feature 1..120: note = Artificially Synthesized Probe
  source 1..120: mol_type = other DNA
ggaacagatattcctgaattccttccgcaggatgtatttgggggtcaatttcatgggttcccagtccccagagttaactggcctggacggttttctctatccactcagtgaatttgcaga

SEQ ID NO: 10477 - DNA, 120 bp, synthetic construct
  misc_feature 1..120: note = Artificially Synthesized Probe
  source 1..120: mol_type = other DNA
gctggctgcttctcttgggcttgtggtctgtctgtttctgtttgtctgtctctcctttgtctcctttgtggcttgtttatctgtctcagtgtctctgcatctctttgtaaagtctttttt

SEQ ID NO: 10478 - DNA, 120 bp, synthetic construct
  misc_feature 1..120: note = Artificially Synthesized Probe
  source 1..120: mol_type = other DNA
atgtgtgtgtgtttctgcctccccatgtctgtttctgtttctctcttcctttgcttctctttattcctgtgtttatttctctgtttctctcagtttctctctctagttgtcactgtctcc

SEQ ID NO: 10479 - DNA, 120 bp, synthetic construct
  misc_feature 1..120: note = Artificially Synthesized Probe
  source 1..120: mol_type = other DNA
tctcaaatcctcattcacaaaaattcagggacaagaacttgccttagttcactagagactcagcactgggctgagatttcaagtcaggactctctgagtccttccgaagcaagattcccg

SEQ ID NO: 10480 - DNA, 120 bp, synthetic construct
  misc_feature 1..120: note = Artificially Synthesized Probe
  source 1..120: mol_type = other DNA
agaggagtctaggctcatagcagtaggatcgggtccttcggggtgaattaaagctcagggggtggagttgttgctgggagcaaggatcgggtcacttgtctgcgcagactgatgctcaaa

SEQ ID NO: 10481 - DNA, 120 bp, synthetic construct
  misc_feature 1..120: note = Artificially Synthesized Probe
  source 1..120: mol_type = other DNA
gatatcctcagagacagtctgagagttagacatggagatatagattcagagagacagagagacccctaactagagacagtgactcctaactagagacagtgagagatctgtctagagaga

SEQ ID NO: 10482 - DNA, 120 bp, synthetic construct
  misc_feature 1..120: note = Artificially Synthesized Probe
  source 1..120: mol_type = other DNA
atacatcatgccatatacaagttcagaactgcatcactgaatataccaacagtttacagtccacttgaattgtgcacacaaaacttcattttatacttagcctgtgaagtgtcagtacca

SEQ ID NO: 10483 - DNA, 120 bp, synthetic construct
  misc_feature 1..120: note = Artificially Synthesized Probe
  source 1..120: mol_type = other DNA
tagctctatccctaaggaagtcatttcagtacattccttgttcagtggtgtctactttatttaaaaacattttgaagttagagggcctgcccctttttaataaggccgtggccagcactc

SEQ ID NO: 10484 - DNA, 120 bp, synthetic construct
  misc_feature 1..120: note = Artificially Synthesized Probe
  source 1..120: mol_type = other DNA
tgaactgccagctaactctgttttccctccttcatttttcctcactcaagactgaaaggatgtctttctatttagaggtcaccaaattaacatctcagaccaatcaaggtaggtgggagt

SEQ ID NO: 10485 - DNA, 120 bp, synthetic construct
  misc_feature 1..120: note = Artificially Synthesized Probe
  source 1..120: mol_type = other DNA
ctattatggacagagtttttatcacaacaaagaattgggaaacaagtgagtaagtgacctgtgtgaggagggaactattcgcccaggatctgaacaacatggcagatgcaatctctcaca

SEQ ID NO: 10486 - DNA, 120 bp, synthetic construct
  misc_feature 1..120: note = Artificially Synthesized Probe
  source 1..120: mol_type = other DNA
atcatccttactgtggatattctattaggcacagatgacatttacatggcacgaatggaaagcatggaatcagtaggttgtgtgtgaagccaggctcattaatttacagttgtctatcaa

SEQ ID NO: 10487 - DNA, 120 bp, synthetic construct
  misc_feature 1..120: note = Artificially Synthesized Probe
  source 1..120: mol_type = other DNA
ctctgctgtaaatatcaggaatgttggaaacaaatgaagctcttggggaaggtaaatttttcactaatacaaaattctgaggctgggaaagaagtttgaacgggctgaaatggaagcagc

SEQ ID NO: 10488 - DNA, 120 bp, synthetic construct
  misc_feature 1..120: note = Artificially Synthesized Probe
  source 1..120: mol_type = other DNA
tccatctcagaaaagagaaatagatccctgcatgtatgaaaatctaacgtacagtagtaactggtattaaaattcagtttatagtcaagatttcgtggggttagaagaaaaaggccaggt

SEQ ID NO: 10489 - DNA, 120 bp, synthetic construct
  misc_feature 1..120: note = Artificially Synthesized Probe
  source 1..120: mol_type = other DNA
tcaaatacacactcatcagtaatgcaatggtttaactgcagttcatcaacactatggaacatcaggtaaccattcaaaagaatgaaatgaagctacgtcagttgatcgagagggacctct

SEQ ID NO: 10490 - DNA, 120 bp, synthetic construct
  misc_feature 1..120: note = Artificially Synthesized Probe
  source 1..120: mol_type = other DNA
gagcagaaagggctcgtagctaatctctaaaaatagacaagaaagattagcagataaagtagaggaagtctcagaaagaacagagagacaaggaaacaaagaacagaaggggagaaagga

SEQ ID NO: 10491 - DNA, 120 bp, synthetic construct
  misc_feature 1..120: note = Artificially Synthesized Probe
  source 1..120: mol_type = other DNA
aaaattggtgtacctttggaaaatattttcatttgtatttctctcaagtgcttgaaacagctctactgagcactccacaaatccagtgtgtgcaaattacaatgctacctgcctcccagg

SEQ ID NO: 10492 - DNA, 120 bp, synthetic construct
  misc_feature 1..120: note = Artificially Synthesized Probe
  source 1..120: mol_type = other DNA
gtcaaaggatggcccacgacagaaataactcatcagcgttttccccgataataaaatggtcttctagcttatgttaacactattggcctgcaggtagatctacttaaatatgagtatgca

SEQ ID NO: 10493 - DNA, 120 bp, synthetic construct
  misc_feature 1..120: note = Artificially Synthesized Probe
  source 1..120: mol_type = other DNA
actattgtgtagatatggttcagttagactcactgacaaacaggcttgtaatcttttaagcaaagaaatgtcaagagaggacagaaatcagtgctgctgcgatctactgccctctagtga

SEQ ID NO: 10494 - DNA, 120 bp, synthetic construct
  misc_feature 1..120: note = Artificially Synthesized Probe
  source 1..120: mol_type = other DNA
aatatctgatgttcctatacattgtcttatgacaatgtatacagtatgatttagatgtcattcctgccttctagaaactgactttaagaaaaagggggtccctgccaggtacggtggctc

SEQ ID NO: 10495 - DNA, 120 bp, synthetic construct
  misc_feature 1..120: note = Artificially Synthesized Probe
  source 1..120: mol_type = other DNA
atagaccctcctgaagactgcaaagtaacttaattcttgctcatgaattccctttggtttgtgcatggggcaaagcatagttttgtccttaaaaaacatgcattgtgctttaatggcgca

SEQ ID NO: 10496 - DNA, 120 bp, synthetic construct
  misc_feature 1..120: note = Artificially Synthesized Probe
  source 1..120: mol_type = other DNA
ccgcgtcctttcgaggccttttccacaaagccataattctggagaatattctgctcttacactttctgggacaatcccctttctaactatattaaaaccagaaaaagaaaaaacacacac

SEQ ID NO: 10497 - DNA, 120 bp, synthetic construct
  misc_feature 1..120: note = Artificially Synthesized Probe
  source 1..120: mol_type = other DNA
ttaatattagtgttctgtttactgaacttttaaaacataactctgcccacttctgtcaaataactaagttgaaagagtagcacgactcaaggctccctacaccctctcctcctctgccgg

SEQ ID NO: 10498 - DNA, 120 bp, synthetic construct
  misc_feature 1..120: note = Artificially Synthesized Probe
  source 1..120: mol_type = other DNA
ttccaagaataaccactttacaatgacaacaccactgtggtctgagtgctgcgctttctgcaataccatgactagaatccttatatccagaaagacctaaaggcaatcaacttttgttag

SEQ ID NO: 10499 - DNA, 120 bp, synthetic construct
  misc_feature 1..120: note = Artificially Synthesized Probe
  source 1..120: mol_type = other DNA
gtcaaaatcacagcacagaaaacagaacacccacacatggtaagttcaccaaggactatacgccagcatgttacctgtccgttgttaaaagataatcagtatctcaaagagtaagcttaa

SEQ ID NO: 10500 - DNA, 120 bp, synthetic construct
  misc_feature 1..120: note = Artificially Synthesized Probe
  source 1..120: mol_type = other DNA
ttccctccagctctgacacaacccgtaagaacagacaaaggtcttgctactgctgtattttgttgataaccaaaatatcacatcattggacttctagtttggtctctactgaaatgtctt

SEQ ID NO: 10501 - DNA, 120 bp, synthetic construct
  misc_feature 1..120: note = Artificially Synthesized Probe
  source 1..120: mol_type = other DNA
aatatttacattagtaaattggcgtagtgtaaagggaaataataaggttaagtgttgttcttacttttcccagcagtgctaggaagaattggaatgatgggggacggcaccggttctgga

SEQ ID NO: 10502 - DNA, 120 bp, synthetic construct
  misc_feature 1..120: note = Artificially Synthesized Probe
  source 1..120: mol_type = other DNA
ctctggatctaaagagttggctagcgatcatctactaagggaacttgattctccccaattagaatcttacagttaaagaactgacacaaagacatcaaaccccagacagttcttaaactc

SEQ ID NO: 10503 - DNA, 120 bp, synthetic construct
  misc_feature 1..120: note = Artificially Synthesized Probe
  source 1..120: mol_type = other DNA
gaggaagagaggcagggggtgttggaggattacttaaattattctgctgcaggagaccaaaaaatttaaattatatgctactgagcgaatatgcaatgaccttgctaaaacgtagttctg

SEQ ID NO: 10504 - DNA, 120 bp, synthetic construct
  misc_feature 1..120: note = Artificially Synthesized Probe
  source 1..120: mol_type = other DNA
aagagtagatgtaaactaaatacaaaaataagacaagctctatcaattctgacatgttacccaaagatgaagcaagacaacaccttggcagagaaacataccttgtagatcaactgagaa

SEQ ID NO: 10505 - DNA, 120 bp, synthetic construct
  misc_feature 1..120: note = Artificially Synthesized Probe
  source 1..120: mol_type = other DNA
acagcactgttagcaactgtctcccaccttctgtaacaaccacaaaggtgtagaacagaattcacaatgtgtttctttggattcagagtcacaacaaagtactgaggacagatttttttc

SEQ ID NO: 10506 - DNA, 120 bp, synthetic construct
  misc_feature 1..120: note = Artificially Synthesized Probe
  source 1..120: mol_type = other DNA
gatagagtggtgtcaatgctggttttccaaaaacaccatccttttcttcaaacgttattctcgagtatggaaatcagtaagctgcgaagcttgaggaaagagcagaactcattagtaagg

SEQ ID NO: 10507 - DNA, 120 bp, synthetic construct
  misc_feature 1..120: note = Artificially Synthesized Probe
  source 1..120: mol_type = other DNA
caggtgtgtggcgggagattctgcatgtgttacaaagctcccacctgatgtggatgctgcggatccccaaggactgcactctgagtggcaagaacctaaaaattaattatatatatatat

SEQ ID NO: 10508 - DNA, 120 bp, synthetic construct
  misc_feature 1..120: note = Artificially Synthesized Probe
  source 1..120: mol_type = other DNA
ggacagctttatgaatgcactggtaatggcactgcaccttctgaaagataaacaggcaagagctattaagcagaccaattcccatgactcaaactccagttttggaactatcttaatgaa

SEQ ID NO: 10509 - DNA, 120 bp, synthetic construct
  misc_feature 1..120: note = Artificially Synthesized Probe
  source 1..120: mol_type = other DNA
acagtcatcttctgaacaaatactgccctcaggtttttgattcaaaagagaagatgactttttatttttcaacaagtgtttcagaagttcattccctgagtctcctttggcagcaggggc

SEQ ID NO: 10510 - DNA, 120 bp, synthetic construct
  misc_feature 1..120: note = Artificially Synthesized Probe
  source 1..120: mol_type = other DNA
aagctctttgtctatctacctcctgcatgagttggatccgttgtctctcttgctgttctcgtaaacgttccttacgttcccgttcttgaaaactttcactaaagggattgttgtcatcaa

SEQ ID NO: 10511 - DNA, 120 bp, synthetic construct
  misc_feature 1..120: note = Artificially Synthesized Probe
  source 1..120: mol_type = other DNA
gccactgcgcccggcctgtacaacattttaagacaagatgaattaccagcacgaatatcacaccccccacccagattaaaaagactaaatttgttgaacactttcaatttaatggctaac

SEQ ID NO: 10512 - DNA, 120 bp, synthetic construct
  misc_feature 1..120: note = Artificially Synthesized Probe
  source 1..120: mol_type = other DNA
ctggccagtttactggttagaactgagaaattaccattggttggtgaagtagtaagaaagtacagaaagcacctacaacactatgtgggatatataaggtggtcatccatgtctttccca

SEQ ID NO: 10513 - DNA, 120 bp, synthetic construct
  misc_feature 1..120: note = Artificially Synthesized Probe
  source 1..120: mol_type = other DNA
ttttaagaccaaaacattaagaaataataataatatcaactccaagtaaacaaaaatactccctgggcccccaattcttattccaaactaaacccagtatctccccatgagctcggtcct

SEQ ID NO: 10514 - DNA, 120 bp, synthetic construct
  misc_feature 1..120: note = Artificially Synthesized Probe
  source 1..120: mol_type = other DNA
tctgctgcatttgaagcagctgttgggtctcctggagccactcttcatactgcttacgctgtgaatcatctgaggaaaaattaaaattcagttgtgttaattttctaaagagtccaacat

SEQ ID NO: 10515 - DNA, 120 bp, synthetic construct
  misc_feature 1..120: note = Artificially Synthesized Probe
  source 1..120: mol_type = other DNA
ctagtctactaaatttgaagggcattttttaagaacaggctttttcacaagatttcagaagttctgcttctggtagaatgagacctaccgcaaggaaagcctttctggtttctggaacca

SEQ ID NO: 10516 - DNA, 120 bp, synthetic construct
  misc_feature 1..120: note = Artificially Synthesized Probe
  source 1..120: mol_type = other DNA
agaacagcacacatagagtgcagacaagcaatccccagaaaacattaacttattagatttatacttactgacaaagcctggaccaaaatttggaggattaggcctagaaatctgatgtgt

SEQ ID NO: 10517 - DNA, 120 bp, synthetic construct
  misc_feature 1..120: note = Artificially Synthesized Probe
  source 1..120: mol_type = other DNA
aaagcataactggcagggcaaggaagaaaacaggacatacattatagtaggtagctccctttataaaaaaaaaatcactgacaaaaatactgcatgagttttacttccccagatactgct

SEQ ID NO: 10518 - DNA, 120 bp, synthetic construct
  misc_feature 1..120: note = Artificially Synthesized Probe
  source 1..120: mol_type = other DNA
aaactgtattaggtgcttaacagttttctcttccagagaagaacagtggcaatttcttcttcatcaaaacactaaagccctacctttcatgtactgggcagatgtgatcctcactgtaat

SEQ ID NO: 10519 - DNA, 120 bp, synthetic construct
  misc_feature 1..120: note = Artificially Synthesized Probe
  source 1..120: mol_type = other DNA
tactaagccatatacctgatacatgactaatgtatctaaccggcagatgcatgatgctaaaagagcatcagatgctgaaaggcctcaaattctgaggtccatatttaaaactaagtgctg

SEQ ID NO: 10520 - DNA, 120 bp, synthetic construct
  misc_feature 1..120: note = Artificially Synthesized Probe
  source 1..120: mol_type = other DNA
ctagactaaattgaggctctatgcttactttattgacagaggttctcatatagtaatacacgtaagactcattcatgacgcttgctaaaaatacagacacacaggcaaccatctccagat

SEQ ID NO: 10521 - DNA, 120 bp, synthetic construct
  misc_feature 1..120: note = Artificially Synthesized Probe
  source 1..120: mol_type = other DNA
ccacctacctgctcatcaccattggtggcatgcccagattgttttgtgccatcactttatttatacctttaagggccaccattttggctttcattataggatctgtaattgcatcaaaat

SEQ ID NO: 10522 - DNA, 120 bp, synthetic construct
  misc_feature 1..120: note = Artificially Synthesized Probe
  source 1..120: mol_type = other DNA
ccttccatgactgaaaacatatggcaacaatggttggaatgtaggaactaagaagacaattagtttctattaaacaattccataaataatagaattgagggaagtttgtaactcagtttt

SEQ ID NO: 10523 - DNA, 120 bp, synthetic construct
  misc_feature 1..120: note = Artificially Synthesized Probe
  source 1..120: mol_type = other DNA
tcttataagcatatcgcatgccactctaatacccatagtaatatacgttgagactcaagaaaactcctaccaatattagggaagaacggttctgatcgctgacgaatcatggcttgcatc

SEQ ID NO: 10524 - DNA, 120 bp, synthetic construct
  misc_feature 1..120: note = Artificially Synthesized Probe
  source 1..120: mol_type = other DNA
aagggtcatcagaatcaagtttttcctctagaccatcagaaggctgggtggttatctgtaaattatcagacgttgtttcagacggtacagatgttgacaaaggagcttctgaaaattcac

SEQ ID NO: 10525 - DNA, 120 bp, synthetic construct
  misc_feature 1..120: note = Artificially Synthesized Probe
  source 1..120: mol_type = other DNA
actggactttttcaggaagagtttcttttatctatatttagggaggttcgatggaggaagctgattcggggatgatgtttgaatgaagataggtcttcatacctattgagggacttacag

SEQ ID NO: 10526 - DNA, 120 bp, synthetic construct
  misc_feature 1..120: note = Artificially Synthesized Probe
  source 1..120: mol_type = other DNA
gttaaaaggtagaaatttggagagaggacaagtctcatcacatcgtaggaggctttgcctacgcagaatagctacattttgaggatgtcatatgataaactgcatcattaagggtgcaag

SEQ ID NO: 10527 - DNA, 120 bp, synthetic construct
  misc_feature 1..120: note = Artificially Synthesized Probe
  source 1..120: mol_type = other DNA
tcgacctgcaatcttcttctgctgttgctgctggagaatgatttcacgtaacttctgccgctaaatgggaagaaacaaaaatcactgggatttgtggtaattaatggctttttaaaggtt

SEQ ID NO: 10528 - DNA, 120 bp, synthetic construct
  misc_feature 1..120: note = Artificially Synthesized Probe
  source 1..120: mol_type = other DNA
ctatatggatcatttgactgattatgagaaaaattatctataggtcttggtgtcaaagcaggcctttcataagggtcaacagacaatcgccttgatgcctgtgacactgatccataagga

SEQ ID NO: 10529 - DNA, 120 bp, synthetic construct
  misc_feature 1..120: note = Artificially Synthesized Probe
  source 1..120: mol_type = other DNA
aaatctctgacaggggatggcctatttgctgttgtctcattcatttgaaggggcctagataccgatgataaaggtgtacagttttccactggtgcagcagaatttcttctggaaaaacta

SEQ ID NO: 10530 - DNA, 120 bp, synthetic construct
  misc_feature 1..120: note = Artificially Synthesized Probe
  source 1..120: mol_type = other DNA
tcaatacgagagctgggatcaatgctatcttgctgttgctgccttttcatggaatcatttgacatctgtactttattaatgcgtaaagcagctctgttatctctggctttttgctttgac

SEQ ID NO: 10531 - DNA, 120 bp, synthetic construct
  misc_feature 1..120: note = Artificially Synthesized Probe
  source 1..120: mol_type = other DNA
atatttctctttcaagatgcacaaagattctctatgaaacctaacaagaaaagaggtgactgtggaagacactgaggcatgccaatccagtctccaaatttagtacagttgtccctctgt

SEQ ID NO: 10532 - DNA, 120 bp, synthetic construct
  misc_feature 1..120: note = Artificially Synthesized Probe
  source 1..120: mol_type = other DNA
aaataccacatatggtgctctttcttgtgagcttgcttttctccacaatttggcaatttgcttcactctagtagtccaatctgcaacaaaagaacagagtataacactttctcagagcca

SEQ ID NO: 10533 - DNA, 120 bp, synthetic construct
  misc_feature 1..120: note = Artificially Synthesized Probe
  source 1..120: mol_type = other DNA
tacagctctgctgtaaggacaatttgtgctgacacaaaatgacaacatacccatgtacgttcataaacagcaaatgtaagcatggaaagaaagtggctgaagaatgggatactgccttca

SEQ ID NO: 10534 - DNA, 120 bp, synthetic construct
  misc_feature 1..120: note = Artificially Synthesized Probe
  source 1..120: mol_type = other DNA
ggtaaaacagaaataatatattcatggcttaccagggaattcttcctttaagttggggaaattaatattggtgtagagaactggggcaacagttgccatttcacccagagcctcctcttt

SEQ ID NO: 10535 - DNA, 120 bp, synthetic construct
  misc_feature 1..120: note = Artificially Synthesized Probe
  source 1..120: mol_type = other DNA
tcaactgaatgtggatagaaaacacagggaaacccatgcatagagaggaccaacttttcttgtatgccaagctccatagggccaacatttgacttctgtattctcagattttggttatac

SEQ ID NO: 10536 - DNA, 120 bp, synthetic construct
  misc_feature 1..120: note = Artificially Synthesized Probe
  source 1..120: mol_type = other DNA
ctttgtttaccttcaaaaagccctcccaattaaacttgatgatttgtggaaatacacaaggcctctgttaattgttgcaacacttagagccatactattacaggagatccacatcaccaa

SEQ ID NO: 10537 - DNA, 120 bp, synthetic construct
  misc_feature 1..120: note = Artificially Synthesized Probe
  source 1..120: mol_type = other DNA
gctattatttgttaagtactttatgctatgctaagcactgtcttaaaagctttacagcttcatgaaaacccactgaaataggttattatgttcagctccatttaagcaaagaggacccac

SEQ ID NO: 10538 - DNA, 120 bp, synthetic construct
  misc_feature 1..120: note = Artificially Synthesized Probe
  source 1..120: mol_type = other DNA
tctaccagcacacacactaagtcttcctctgtttcatgattatcctctgggcccctggtttatacatagtctaattcactttaatttccccctttcctcacaccttatatccattcagta

SEQ ID NO: 10539 - DNA, 120 bp, synthetic construct
  misc_feature 1..120: note = Artificially Synthesized Probe
  source 1..120: mol_type = other DNA
tttttaaaatatgcactttcagttcagaaaacataaagacaggtcatttttatatgttgaaaagagaaatactgaatagttcttaatcgttaaaacagcatatgggggctgggcgcggtg

SEQ ID NO: 10540 - DNA, 120 bp, synthetic construct
  misc_feature 1..120: note = Artificially Synthesized Probe
  source 1..120: mol_type = other DNA
atagattcccatacctgtaccaatttccctatctactcatacagaccttaatcctaggctatcaaatttcagctctacagaaaaggggagaaattggtagctagttgtaagtaggcagaa

SEQ ID NO: 10541 - DNA, 120 bp, synthetic construct
  misc_feature 1..120: note = Artificially Synthesized Probe
  source 1..120: mol_type = other DNA
tttactcaggtcttttagaaagcctagatgtagggcaaatattttaccatctgtgaccattttgtctagttcaggactgaggatcccatctagctgttcttcacttaatggtcgtgaact

SEQ ID NO: 10542 - DNA, 120 bp, synthetic construct
  misc_feature 1..120: note = Artificially Synthesized Probe
  source 1..120: mol_type = other DNA
actactgagaaagtcacccgaagtacagtacagctatactatgctttagccacacacaaaaagggaaaagcaaagtatggattagtgacaaattagcactactgataaacagcatgcacc

SEQ ID NO: 10543 - DNA, 120 bp, synthetic construct
  misc_feature 1..120: note = Artificially Synthesized Probe
  source 1..120: mol_type = other DNA
gtaggaaaagttaaaatatgaaagacaaacctgtcactctttagaaattccatatggagcacaagccagaaattccatatggagcacaagccaggtaccatctagtaactacttgcagct

SEQ ID NO: 10544 - DNA, 120 bp, synthetic construct
  misc_feature 1..120: note = Artificially Synthesized Probe
  source 1..120: mol_type = other DNA
gacgtattttgaaggcagacacaaacgtggatgaatgaaagggaaagaaaagtcaaggaggattctacgggtttgggcttaaccaagaaactattggaactcttgtttaggctagcttta

SEQ ID NO: 10545 - DNA, 120 bp, synthetic construct
  misc_feature 1..120: note = Artificially Synthesized Probe
  source 1..120: mol_type = other DNA
acagaattaaagtaggaggtaaaaaatatgtaagattgaacaaacaagaagcatgacctcactaccaacaatgaggcagactggacatgcacatgtgtccaacacggggtaagattgctt

SEQ ID NO: 10546 - DNA, 120 bp, synthetic construct
  misc_feature 1..120: note = Artificially Synthesized Probe
  source 1..120: mol_type = other DNA
attctacataccgtgagttccagattttgttggagccgaggatgaactaagtagtggatctaaggaaggatccaagaaacctgtgttcatgtttgttttatataaaagctgagctccatc

SEQ ID NO: 10547 - DNA, 120 bp, synthetic construct
  misc_feature 1..120: note = Artificially Synthesized Probe
  source 1..120: mol_type = other DNA
acagttccacccctttaccctgcttcaacccaggaactctgctttagtctatatcctatgatgtagtctatctggaaaaaggatcctccatacaggacaattttgcaatacaacatttaa

SEQ ID NO: 10548 - DNA, 120 bp, synthetic construct
  misc_feature 1..120: note = Artificially Synthesized Probe
  source 1..120: mol_type = other DNA
acacacgctgaaagttactgatgtgcaacaggggaacaagacggcccaggagactaagatcacagcagtaattgggaaattagacctaataattttaaagactcttttgccaaagtatta

SEQ ID NO: 10549 - DNA, 120 bp, synthetic construct
  misc_feature 1..120: note = Artificially Synthesized Probe
  source 1..120: mol_type = other DNA
gaggaacagatcagatgaatagttgtctacaatgaaatgaggatggcctctcaatgatagtctgttccagttcaattttaacacatgaagaaatagaggccaggaaggatgaataacacg

SEQ ID NO: 10550 - DNA, 120 bp, synthetic construct
  misc_feature 1..120: note = Artificially Synthesized Probe
  source 1..120: mol_type = other DNA
ctggtaactgctcactccagcctgaaacaacagtcacatttataaatatgtgacatttaaaatttctagacaaacccactgaaggtaattttataccttaccaacatacacacagtttca

SEQ ID NO: 10551 - DNA, 120 bp, synthetic construct
  misc_feature 1..120: note = Artificially Synthesized Probe
  source 1..120: mol_type = other DNA
tgacttgcataaagctcagggtcagtttaataagaaatacaccttcacacaaaccatcacttgccacctcctgctcaccaccaatagcaaaaaaaaaaaacaactcctggctggatgcag

SEQ ID NO: 10552 - DNA, 120 bp, synthetic construct
  misc_feature 1..120: note = Artificially Synthesized Probe
  source 1..120: mol_type = other DNA
tggttttcccttgcccagttcgacttctttgccgcaccataaatccaccaatacctatccaaaaaagaaattaggtaaactgataagtaatttctccctacatttccacagtacacagga

SEQ ID NO: 10553 - DNA, 120 bp, synthetic construct
  misc_feature 1..120: note = Artificially Synthesized Probe
  source 1..120: mol_type = other DNA
agcaatttactccgtgacctaatgggtccctcaattagagggttgacttccatgtgaggcagaggaaaagaaaaaaaaaacggtaaatacaagttcctggaagaaatctgcaatgtctaa

SEQ ID NO: 10554 - DNA, 120 bp, synthetic construct
  misc_feature 1..120: note = Artificially Synthesized Probe
  source 1..120: mol_type = other DNA
tgttccttccactcccttagtttcatcatccacagcttcccgctcaggactagattctgattttccatcacaatccataagttctccttctggaaaaaagtaaatgtatacacaaaactg

SEQ ID NO: 10555 - DNA, 120 bp, synthetic construct
  misc_feature 1..120: note = Artificially Synthesized Probe
  source 1..120: mol_type = other DNA
cagcttcatctcactcccaccagtgaactacactcagttctttgaatgtatcaagctctttcttccactatcttccccaatttctgccttctacctaacttatctttcaggatttattct

SEQ ID NO: 10556 - DNA, 120 bp, synthetic construct
  misc_feature 1..120: note = Artificially Synthesized Probe
  source 1..120: mol_type = other DNA
tggcagactaaattcatatgttaaaattacattctcctgaaaccctactaaaaaacacactgaaataatctatttttaaaagataaaatcaagctgtggcatggtggcatgccggtaatc

SEQ ID NO: 10557 - DNA, 120 bp, synthetic construct
  misc_feature 1..120: note = Artificially Synthesized Probe
  source 1..120: mol_type = other DNA
gatacggaaaccagagggttcaccaaatggtcagcacaaatcaccccactaaacttacaaatcgacaagcaccaccacatacagaaagctttctaatcaactacttaattccttttttaa

SEQ ID NO: 10558 - DNA, 120 bp, synthetic construct
  misc_feature 1..120: note = Artificially Synthesized Probe
  source 1..120: mol_type = other DNA
atatgtaatggtttgtggccaaggataacactggatctagtacaaaggccacctttcacctgaaacaatgcacacaaggacagtaaaaaccaagagagcacttttattgatgaggttcat

SEQ ID NO: 10559 - DNA, 120 bp, synthetic construct
  misc_feature 1..120: note = Artificially Synthesized Probe
  source 1..120: mol_type = other DNA
tctggaaagctataagaaaacactggttctttccaaggaagggatggtcaaaaggtaggctaacttaacactgttcactctttttaagacctctgtatttcttgtatcatgcacaggtat

SEQ ID NO: 10560 - DNA, 120 bp, synthetic construct
  misc_feature 1..120: note = Artificially Synthesized Probe
  source 1..120: mol_type = other DNA
tagaaggtatcacactacctgatttcaagttatattacaaagtgatagttaacaaaacagtatggtactggcataaaaacagacacatggatcaatggaactgaatacagagcccaaaaa

SEQ ID NO: 10561 - DNA, 120 bp, synthetic construct
  misc_feature 1..120: note = Artificially Synthesized Probe
  source 1..120: mol_type = other DNA
tccttaaaaaaaaaaaaactaccaccataagatccaacaatgcctctgttgggcatatattcaaaggtaataaaatcagcatctgagagagacatctgcactcccatattcatggcgaca

SEQ ID NO: 10562 - DNA, 120 bp, synthetic construct
  misc_feature 1..120: note = Artificially Synthesized Probe
  source 1..120: mol_type = other DNA
ggatttagcaaggaattcacctttgcaggcccacttacatacaacattataaatataccaggtgattcattgtactattcacagtaaaagactgaaagaaagccgagcgcggtggctcac

SEQ ID NO: 10563 - DNA, 120 bp, synthetic construct
  misc_feature 1..120: note = Artificially Synthesized Probe
  source 1..120: mol_type = other DNA
acagggtttctagatcccaggaggtgaatgagaaagaagtatgcttttattgcataaggaatttgtttctgatacaccaaagtgatgatgtatgacttttcttaaggaagcggttattag

SEQ ID NO: 10564 - DNA, 120 bp, synthetic construct
  misc_feature 1..120: note = Artificially Synthesized Probe
  source 1..120: mol_type = other DNA
cactagcatcaaagaagttaaaaaatttgcctaaaaacacccagagtaggtttcatcattgcccactactttataatgttttcccaagggtactgagacattatcaaaacacgttagtga

SEQ ID NO: 10565 - DNA, 120 bp, synthetic construct
  misc_feature 1..120: note = Artificially Synthesized Probe
  source 1..120: mol_type = other DNA
aaatggaaattcttgttaaagctgatctgatcaattcctcctaagtatatggactacttctttgcaaactccaactgcccaaatcaaattacctgttcaattgtatctgaaaatcagtta

SEQ ID NO: 10566 - DNA, 120 bp, synthetic construct
  misc_feature 1..120: note = Artificially Synthesized Probe
  source 1..120: mol_type = other DNA
ataaactctatgcagagaattctacctgctttgtacactgatatgatttccaacatctgacatacagtagatattcaataaattctattgtctcaaagccagctgcagtggcgcatgcct

SEQ ID NO: 10567 - DNA, 120 bp, synthetic construct
  misc_feature 1..120: note = Artificially Synthesized Probe
  source 1..120: mol_type = other DNA
agcaagaccctgtctcccaactgaaaaaaaaaaaaagaattcagctagaaaaaccttatatttactttgatcaagaaaatgtttataaaccaatactttatgatgcacactggtgaatat

SEQ ID NO: 10568 - DNA, 120 bp, synthetic construct
  misc_feature 1..120: note = Artificially Synthesized Probe
  source 1..120: mol_type = other DNA
agaagcactgcaactaaatgcaatgctcagctaatccactatgagcttcttcgtagaaaagatcaaaaggcagggatctatttacgtaagagaagagagaatactccagaagctcatctg

SEQ ID NO: 10569 - DNA, 120 bp, synthetic construct
  misc_feature 1..120: note = Artificially Synthesized Probe
  source 1..120: mol_type = other DNA
gcatttcaaattttacctagctcttttacttttgtgacaatttgtgctacaagtgaagattcacagcagtctgaggaaggcactgaaacgaaaaaaaaaaatccaggtaattcttttcag

SEQ ID NO: 10570 - DNA, 120 bp, synthetic construct
  misc_feature 1..120: note = Artificially Synthesized Probe
  source 1..120: mol_type = other DNA
aaactgcaaatggcagtgctagcaggtatgtgctccaggtaatgcatctaacttgaagtagacatatctcacggaaagcgatgttgaatggtaatcgggaaattaagtaaaaagttgtct

SEQ ID NO: 10571 - DNA, 120 bp, synthetic construct
  misc_feature 1..120: note = Artificially Synthesized Probe
  source 1..120: mol_type = other DNA
gaaaagctattttccatttgtttttttttttgctacatttcaaagagaaaagctttaaaaagatgaaaaaatagcacaatacctatcacattgtctacattgcagaataagatcttcttc

SEQ ID NO: 10572 - DNA, 120 bp, synthetic construct
  misc_feature 1..120: note = Artificially Synthesized Probe
  source 1..120: mol_type = other DNA
cagaacacgttgtagacacaggaagactcaaaattcagctccctcattctcctttctaataaagttacttagagatatgcggaacagaatgaggatgtattataaagaataggaagactt

SEQ ID NO: 10573 - DNA, 120 bp, synthetic construct
  misc_feature 1..120: note = Artificially Synthesized Probe
  source 1..120: mol_type = other DNA
gcttattgatttttaagaatttgtcttagattaccaagttaatgtattatttgcccaaatgaaggaaatggcctaggggtaagatcagggtggcttatggcagtagccagcaaacatttc

SEQ ID NO: 10574 - DNA, 120 bp, synthetic construct
  misc_feature 1..120: note = Artificially Synthesized Probe
  source 1..120: mol_type = other DNA
ataatctaatacggatacacgcttcaactataatggagtaggtgggaccagcctgttctcccataagatagtagaaaatgggacaaagtgtatgatacaactgttttcagatattggaca

SEQ ID NO: 10575 - DNA, 120 bp, synthetic construct
  misc_feature 1..120: note = Artificially Synthesized Probe
  source 1..120: mol_type = other DNA
tcaatgagactgcagtattctatactgtccaaaacagtgtcatcgtgcaaaaggaaccatacataatttttaaaaacaggaattcaaattctagctctaccagtaactatgtgtttgata

SEQ ID NO: 10576 - DNA, 120 bp, synthetic construct
  misc_feature 1..120: note = Artificially Synthesized Probe
  source 1..120: mol_type = other DNA
tgatataatacagtgatgtttgaagggcaggggagaaaggtataaaaatcactcatggttcacaacctgttactgaaactgaggttagtatttatattacatggtatggcagtactagaa

SEQ ID NO: 10577 - DNA, 120 bp, synthetic construct
  misc_feature 1..120: note = Artificially Synthesized Probe
  source 1..120: mol_type = other DNA
aggtctagaataacaattccaaatattaatgctaagatactaccgtaaaatggagtcgtgacattttattattcacctaattctctctttagaggtagaattcctatagaccaagaagta

SEQ ID NO: 10578 - DNA, 120 bp, synthetic construct
  misc_feature 1..120: note = Artificially Synthesized Probe
  source 1..120: mol_type = other DNA
aatcaactaagtacccactggtttgttaataatttctagagtgattatgaaacaaaacaaagctctgaactagaagctgtagaagaagacaaggagggcattgccaaaatcataaaatac

SEQ ID NO: 10579 - DNA, 120 bp, synthetic construct
  misc_feature 1..120: note = Artificially Synthesized Probe
  source 1..120: mol_type = other DNA
caccgcacccagcctaaaggcagttttaatggatagtactaatgctttataagagcaatttatagtcatatgaaccctaatgactacaagtgttaataatgccaatattcatcattaggg

SEQ ID NO: 10580 - DNA, 120 bp, synthetic construct
  misc_feature 1..120: note = Artificially Synthesized Probe
  source 1..120: mol_type = other DNA
ctaccttgagggcaaaggtaatctttgagaaaatacgtgctattgttgcctgcatagataatagtgtgatttatccagaaggtgatagaaatttcattttcctagaccacagatatgagc

SEQ ID NO: 10581 - DNA, 120 bp, synthetic construct
  misc_feature 1..120: note = Artificially Synthesized Probe
  source 1..120: mol_type = other DNA
aaggaaaacacaacaaaaaccccccacaaagaaaatttcaggccaagatggtttcactaataaattaacgtataatataagaagatacatttccactactacacaacttttccagaaaac

SEQ ID NO: 10582 - DNA, 120 bp, synthetic construct
  misc_feature 1..120: note = Artificially Synthesized Probe
  source 1..120: mol_type = other DNA
gagggttggcatagaaagataaggagtcaaagaggaaggtaagaaaagagaaaggatgagaaagtaaatatacaagaaaacataaccagaggctcaaaaaaaaaagcaaagtaggacagt

SEQ ID NO: 10583 - DNA, 120 bp, synthetic construct
  misc_feature 1..120: note = Artificially Synthesized Probe
  source 1..120: mol_type = other DNA
agctagcaagtctggctgcagcgtcccggggttggaagcatattctgtactgctacatcagcgtgaaagttcatttttgctagtgttgtgtaacagtattcttcctctcattaaaattaa

SEQ ID NO: 10584 - DNA, 120 bp, synthetic construct
  misc_feature 1..120: note = Artificially Synthesized Probe
  source 1..120: mol_type = other DNA
tggtttccaagtcaaaaatttatggtgatactgtaagcataaaatagatacacatgaacaaaaggaacgggaggaatggcttttttccctttggatgtaacaaatacagccagctcccag

SEQ ID NO: 10585 - DNA, 120 bp, synthetic construct
  misc_feature 1..120: note = Artificially Synthesized Probe
  source 1..120: mol_type = other DNA
tcacttcaaggactggcagagccatcaaccaatgtcatgggggaaaaagccttgtcattttaaggtattaaccagacaatgaaatatgccacaattttggtatttcttctccatgagaac

SEQ ID NO: 10586 - DNA, 120 bp, synthetic construct
  misc_feature 1..120: note = Artificially Synthesized Probe
  source 1..120: mol_type = other DNA
cataaggaattctatattctatagctataaacaaccaaaaccagtaggccaaagaatgcaaggagaaacataagcaatcgataaatgcatacacgttaaactgtagagagctggtaacat

SEQ ID NO: 10587 - DNA, 120 bp, synthetic construct
  misc_feature 1..120: note = Artificially Synthesized Probe
  source 1..120: mol_type = other DNA
ctcttggggtaagagataggtaatggaataacagtattttgagaaaagccacacaagcaatagactggtttcatttttaagtcacaaactgaatccacacacattgaagtccagcaatcc

SEQ ID NO: 10588 - DNA, 120 bp, synthetic construct
  misc_feature 1..120: note = Artificially Synthesized Probe
  source 1..120: mol_type = other DNA
gtgaaccatcatctctcttaccacaccattagtgcctctcattgcatcaccacctaggacgttttattgtttgtaattttatttagtggtaggcagtgggggcaaaagatacctaaatta

SEQ ID NO: 10589 - DNA, 120 bp, synthetic construct
  misc_feature 1..120: note = Artificially Synthesized Probe
  source 1..120: mol_type = other DNA
gtaatgtatgggctcttcccctacaatccagttgcagcactttttacactgtaattaaagatcatgcccctttctgttcactgctatgttaagcaccctgttcagcacttattgaacttt

SEQ ID NO: 10590 - DNA, 120 bp, synthetic construct
  misc_feature 1..120: note = Artificially Synthesized Probe
  source 1..120: mol_type = other DNA
aaataccacaacaagcacaagtgaactaaaaggaaagtctggtacttctaatcggctgtgttgttagcttggtgttccaaaggggtaggtattttttaggtttaacactatggttctctg

SEQ ID NO: 10591 - DNA, 120 bp, synthetic construct
  misc_feature 1..120: note = Artificially Synthesized Probe
  source 1..120: mol_type = other DNA
gatcctagaagtgcattttaattggtctagggtagggccattagcttgatgttctaaaatctaccgagttgattacaatatgtggcagtgtcaataatcactttcttaaacccaggtcgc

SEQ ID NO: 10592 - DNA, 120 bp, synthetic construct
  misc_feature 1..120: note = Artificially Synthesized Probe
  source 1..120: mol_type = other DNA
tcaccaataattccggaactgctgtttttatatttctcaaaatgttttgtcttgcatcgtccaataaggcagccaccatcatatgtgaccactgagcacttctaatgcagctagccagaa

SEQ ID NO: 10593 - DNA, 120 bp, synthetic construct
  misc_feature 1..120: note = Artificially Synthesized Probe
  source 1..120: mol_type = other DNA
gctggagggagggaaaacacagcctacaaaatacttacaagagtagcagcaaatgatgaagtagtaacaagaggggcagaaaaatagaaagattatcatcggatttgggaatcaaagaca

SEQ ID NO: 10594 - DNA, 120 bp, synthetic construct
  misc_feature 1..120: note = Artificially Synthesized Probe
  source 1..120: mol_type = other DNA
tacctacagtatcttcattttgccatgcagttttacttaaatctcacttaaaaagaaatggaactcattcttaaagggtagaatgtacatgatgtaaagcagacaaaggaagatttatct

SEQ ID NO: 10595 - DNA, 120 bp, synthetic construct
  misc_feature 1..120: note = Artificially Synthesized Probe
  source 1..120: mol_type = other DNA
tttctttctgttccttttctccttgtagcctttctataaccaactgttcctcaggacataatgaaatactttcctcatgtggggacactaaggtttctagtggaagagtgacagattcca

SEQ ID NO: 10596 - DNA, 120 bp, synthetic construct
  misc_feature 1..120: note = Artificially Synthesized Probe
  source 1..120: mol_type = other DNA
tcactatatcgcccaggcctatacatgttctgatatcaaactgaaatctcatcttctttcccactttattgaaagactacaggtagggataaaagaaaactaccaagtaacagatctgaa

SEQ ID NO: 10597 - DNA, 120 bp, synthetic construct
  misc_feature 1..120: note = Artificially Synthesized Probe
  source 1..120: mol_type = other DNA
ttctgagggatgactcttctgttgctcttcagtgtggacttgaaccgctgtgagtaacacatttataaaatctctaaggagtcaaaatttctgtaacactgttccctcaacagtaatttg

SEQ ID NO: 10598 - DNA, 120 bp, synthetic construct
  misc_feature 1..120: note = Artificially Synthesized Probe
  source 1..120: mol_type = other DNA
ataattaacttaagaaggacattacaaaactacaacatgcttagagaaaaataacccacattataaagaacaaactaagcaaacccaaagactggggaacttccactgtcggcctgaaga

SEQ ID NO: 10599 - DNA, 120 bp, synthetic construct
  misc_feature 1..120: note = Artificially Synthesized Probe
  source 1..120: mol_type = other DNA
atattacaatgaagcatgtctttctgcaattctggatgataacacttcccacagaagggacataagttatcctgctgttggtaacaattgtcacatatcaggcaattgtggtgccactga

SEQ ID NO: 10600 - DNA, 120 bp, synthetic construct
  misc_feature 1..120: note = Artificially Synthesized Probe
  source 1..120: mol_type = other DNA
ctcaaaattcaaaaaaagaaacatatgctaggagcaggaagtaatttttgtggagtaagtctgctcaactctaaaacaatagcatggccagcctggtgtgatggttgatgccagtaatcc

SEQ ID NO: 10601 - DNA, 120 bp, synthetic construct
  misc_feature 1..120: note = Artificially Synthesized Probe
  source 1..120: mol_type = other DNA
taaaaccctgggtatccctgggtgtaaggttaatacattgtggggctctcattacccaccccaaattttgaatctaaaatatcaataaaagggaactttatctttctgtgctaccaggtt

SEQ ID NO: 10602 - DNA, 120 bp, synthetic construct
  misc_feature 1..120: note = Artificially Synthesized Probe
  source 1..120: mol_type = other DNA
cacaagcacagataagaaacctgtgaaatggataagttctgaaggggcccaacattaccagatactacaaaggctctataacaaaaacagtgtcgtactggtgaatgaatagacagatcg

SEQ ID NO: 10603 - DNA, 120 bp, synthetic construct
  misc_feature 1..120: note = Artificially Synthesized Probe
  source 1..120: mol_type = other DNA
actgcaaatcctagcagaaaatatgaactcctctataccctcagtgtagggaaaggctttctgaatatgactcaaaaatccagaagcaaaagaagattaataaatctaactccataagaa

SEQ ID NO: 10604 - DNA, 120 bp, synthetic construct
  misc_feature 1..120: note = Artificially Synthesized Probe
  source 1..120: mol_type = other DNA
acacacatgcacaaagctagggagtgtaaaatcatttataatgcaaaatatcgtaaactactgaaataccaaagcacaggccattggttgagtaacccatagcacagatacacaatggag

SEQ ID NO: 10605 - DNA, 120 bp, synthetic construct
  misc_feature 1..120: note = Artificially Synthesized Probe
  source 1..120: mol_type = other DNA
caagtaagtggtgagggcacaacaccagcgccagcttgaaggagcaactgacagcaagtatgggactatttcagccaaaaaataattaggtaatgagttgtaaatgattgaagataatag

SEQ ID NO: 10606 - DNA, 120 bp, synthetic construct
  misc_feature 1..120: note = Artificially Synthesized Probe
  source 1..120: mol_type = other DNA
ttcctactattaagaaatacatactgaaatggtggtaaaaaggcacaacgtatgtaattaaccctcaaatagtagggggttagggggaatagagacaaaaacacagacacacacacgcgc

SEQ ID NO: 10607 - DNA, 120 bp, synthetic construct
  misc_feature 1..120: note = Artificially Synthesized Probe
  source 1..120: mol_type = other DNA
aattctgtcactctcaaaagagaatagcagattacaaagagcaaattagaaagaagcacaccaaaggggagacagaacaagctgagaaagacacccagaattctctaccagttctcaaga

SEQ ID NO: 10608 - DNA, 120 bp, synthetic construct
  misc_feature 1..120: note = Artificially Synthesized Probe
  source 1..120: mol_type = other DNA
gtgaaaagataaccattcaactgttaaactaacaccctacgtggccatagtgtcaggcaaagcaaaatacctgcccttcctgatccctcaacaaaaaacacattacatagaataaagaac

SEQ ID NO: 10609 - DNA, 120 bp, synthetic construct
  misc_feature 1..120: note = Artificially Synthesized Probe
  source 1..120: mol_type = other DNA
ctgaaggggcagaagccaagtgaggtaggaagttagttaatgagctcatcggcattttttgtaatagctcaaaattttgaaggacccaaatgttcaccaacaggtgattcaatacacaaa

SEQ ID NO: 10610 - DNA, 120 bp, synthetic construct
  misc_feature 1..120: note = Artificially Synthesized Probe
  source 1..120: mol_type = other DNA
cagttcataaatacctcagtatctgttttgtctctgcagatagtaacagaggtaaccctgccataaggattacctcctaaatggtgatctttactcaatgctcacctatggttaacttgc

SEQ ID NO: 10611 - DNA, 120 bp, synthetic construct
  misc_feature 1..120: note = Artificially Synthesized Probe
  source 1..120: mol_type = other DNA
gttgggcataattcttgctggttacaacaaaaattctcagcctgtaaatgaagatactggtaacatccccaaattatcatgctcattagaatcatgggggtgcaagcggaaatcacagaa

SEQ ID NO: 10612 - DNA, 120 bp, synthetic construct
  misc_feature 1..120: note = Artificially Synthesized Probe
  source 1..120: mol_type = other DNA
gaccacaagtagtacaaaagaactgatctaagaggtctcccgggctgtcgcacactgcacagtttgcatcttccttcgctataattaacagtgaaacaatgaaattgttgtataagaatt

SEQ ID NO: 10613 - DNA, 120 bp, synthetic construct
  misc_feature 1..120: note = Artificially Synthesized Probe
  source 1..120: mol_type = other DNA
ccattttgaaggtttggtcaatcctatcaatttctctctgactcacacgttctttcttttccagtcaagcatcttgaaacagagtaaaaatatatttcttttatttgtaccggagtctgc

SEQ ID NO: 10614 - DNA, 120 bp, synthetic construct
  misc_feature 1..120: note = Artificially Synthesized Probe
  source 1..120: mol_type = other DNA
tttttaaaaacccgaaacatcatccatttttctcaagaatagataaaggcagaaaccttagtatcactgttcactctgaactcagccctgacccaacacatccagccagatcccaattct

SEQ ID NO: 10615 - DNA, 120 bp, synthetic construct
  misc_feature 1..120: note = Artificially Synthesized Probe
  source 1..120: mol_type = other DNA
tacagcacaactctgtgaatccttgaaggacaggggccttaacttttttaactttgtatccccaactgcctaacatgaatcaagtcttattgaacatattttaagtgaaggacttactgc

SEQ ID NO: 10616 - DNA, 120 bp, synthetic construct
  misc_feature 1..120: note = Artificially Synthesized Probe
  source 1..120: mol_type = other DNA
cacaataatttttaaaagcactacacaaagaaatgaggttggttccaaccctcccagtcagggagaagatgtgtgggaatactgaaacaaccttttggaggtcatgtacaagattatcga

SEQ ID NO: 10617 - DNA, 120 bp, synthetic construct
  misc_feature 1..120: note = Artificially Synthesized Probe
  source 1..120: mol_type = other DNA
tcactggcaggacactgtgctgagtgatttgtctataaaagagaatctctgggaagaaaaaataaatcatggatgtcatccaaagaggctagaccgtatcattggcaggtagataagaaa

SEQ ID NO: 10618 - DNA, 120 bp, synthetic construct
  misc_feature 1..120: note = Artificially Synthesized Probe
  source 1..120: mol_type = other DNA
tatctgcaatattctttaaattatatccttggtacttaatccaagattatgatcgtcttaacagatgggtcagaacgctgtgtagttagaatgcactgcttaagatccccaaggaggccg

SEQ ID NO: 10619 - DNA, 120 bp, synthetic construct
  misc_feature 1..120: note = Artificially Synthesized Probe
  source 1..120: mol_type = other DNA
ttatgccacccagaatataatccactctgataactgccagtttatgcacttgctgaagtaactcagtacataaatagtagccgtaacagttgcagtgcatgaagttcttctcttccagat

SEQ ID NO: 10620 - DNA, 120 bp, synthetic construct
  misc_feature 1..120: note = Artificially Synthesized Probe
  source 1..120: mol_type = other DNA
tttgatttttctgaggaaataactttttggatttaatttcaatgaaaccactgataacatttccctccccagcgatccctggcaacgatccctcagattttaaagattatgtattattac

SEQ ID NO: 10621 - DNA, 120 bp, synthetic construct
  misc_feature 1..120: note = Artificially Synthesized Probe
  source 1..120: mol_type = other DNA
cttaacaaaagatggaaatgtgggcgaaaaaaaattagtcatctggtatctttcccatttcaacctgcctccattatcttgcaagtggtaaaacgcacagaaataagccccaaacaagag

SEQ ID NO: 10622 - DNA, 120 bp, synthetic construct
  misc_feature 1..120: note = Artificially Synthesized Probe
  source 1..120: mol_type = other DNA
atcaaactcttcctcactgtcatcagtctactgcactgaatcaacataacaaagctaagtgactcctgagggctgaatcagaaagaagaaaagaaagagatacaaaaatttggctgggcc

SEQ ID NO: 10623 - DNA, 120 bp, synthetic construct
  misc_feature 1..120: note = Artificially Synthesized Probe
  source 1..120: mol_type = other DNA
tatacacagtctggaatgtatcttcctaaaccaagtaaaaagtacttgtaaaatcgtagacaatatcaaagaatggatttccacagggaacttctcaaatgtcaacactcttatacacta

SEQ ID NO: 10624 - DNA, 120 bp, synthetic construct
  misc_feature 1..120: note = Artificially Synthesized Probe
  source 1..120: mol_type = other DNA
aggaacctaaaaccgaaagagtcattatcactgttccacttatttctatatccttacaaaaatacccactcttgatctgtaacaatgtctccttaaactccctgaatggcagcttcaggt

SEQ ID NO: 10625 - DNA, 120 bp, synthetic construct
  misc_feature 1..120: note = Artificially Synthesized Probe
  source 1..120: mol_type = other DNA
ggctatgtgagatgcctgctcccccttctccttcaaccatgatttcaaactttttttttttaatttatatttatttttttgagacagagtttcactctgttgcccaggctggagtgcagt

SEQ ID NO: 10626 - DNA, 120 bp, synthetic construct
  misc_feature 1..120: note = Artificially Synthesized Probe
  source 1..120: mol_type = other DNA
aatctctgagacgtggcaaatgtggtcttcagaggaaaacatatagcttcaaacatgcaaaactataagactaaagaattaaaataaataatgcccaattcaaaaattaagccaataaga

SEQ ID NO: 10627 - DNA, 120 bp, synthetic construct
  misc_feature 1..120: note = Artificially Synthesized Probe
  source 1..120: mol_type = other DNA
agttttctccagctagtagcaaaagggaaattcatagcaagggaacatttcaatacactgttgctatctttgaagataaaaagagccacgaggaaaaaccaaagagtggcctctaggaac

SEQ ID NO: 10628 - DNA, 120 bp, synthetic construct
  misc_feature 1..120: note = Artificially Synthesized Probe
  source 1..120: mol_type = other DNA
tggcttggaaatgaggaggcagaatctcagatattttcctaaaaaaataggagaggcaagctttctgagtccacaaaagtgccctctacctattgggtcaaagaaaaagtaatctctcta

SEQ ID NO: 10629 - DNA, 120 bp, synthetic construct
  misc_feature 1..120: note = Artificially Synthesized Probe
  source 1..120: mol_type = other DNA
gactggaaggaacaatttggatttatctcacaaatatatacatgaaagatgacagaaaacagtacttagtagccaattatacaaagtacaaagccaattacacaaagtacaaacataggc

SEQ ID NO: 10630 - DNA, 120 bp, synthetic construct
  misc_feature 1..120: note = Artificially Synthesized Probe
  source 1..120: mol_type = other DNA
ttcctttttctttctcacatgaaattctatatcaaggttagtatcctacctggtatctctccaatagtgggttaagagtttgttttcttctcaagtaacctgtattatattaagatgata

SEQ ID NO: 10631 - DNA, 120 bp, synthetic construct
  misc_feature 1..120: note = Artificially Synthesized Probe
  source 1..120: mol_type = other DNA
agactcacttttccatattcaattaatttttgaccaaggggccaagataatccaagagagcaataaatagtcttttagaatgatgctggaactgctaaataatccgtatggaaaacaaag

SEQ ID NO: 10632 - DNA, 120 bp, synthetic construct
  misc_feature 1..120: note = Artificially Synthesized Probe
  source 1..120: mol_type = other DNA
tggttccattcatatattagtctagaaaaggcaaaactataggaaagcaacagatcggtgattggcaggagctggagtgggaggtaggcagtaacttcaaaaggtcatgagtgaatttat

SEQ ID NO: 10633 - DNA, 120 bp, synthetic construct
  misc_feature 1..120: note = Artificially Synthesized Probe
  source 1..120: mol_type = other DNA
cagaggaagaggagagagaaatgagacagaaaaagaataagaaataaaagtcaagcttttcacaaatttggtgaaaaatatcaacttacagtttcaagaagctcagcaacccccaagcag

SEQ ID NO: 10634 - DNA, 120 bp, synthetic construct
  misc_feature 1..120: note = Artificially Synthesized Probe
  source 1..120: mol_type = other DNA
ctgtcttttgtcaaaaaagcagggaagcggcaggctaccaagacaaaaaactcatagacaacaacaaaccagtttaagccaaatggtacaaataaaagcccaagccatataccttttgca

SEQ ID NO: 10635 - DNA, 120 bp, synthetic construct
  misc_feature 1..120: note = Artificially Synthesized Probe
  source 1..120: mol_type = other DNA
agaaacaaataccaagttgaaaactaaaaaatatgctaacaaaaataaaatacaaactaagctgaacaacaaaatgggagagattacccaacctaaacaagagaagaaaatgaactgatt

SEQ ID NO: 10636 - DNA, 120 bp, synthetic construct
  misc_feature 1..120: note = Artificially Synthesized Probe
  source 1..120: mol_type = other DNA
gaagcaaaaattgttacacgatgcaaaagctatggtgggtaaaactgttgatgcatttccaaaactgaaagcagttggcaccaagctgtattagaagttgtcacattctcaattggcact

SEQ ID NO: 10637 - DNA, 120 bp, synthetic construct
  misc_feature 1..120: note = Artificially Synthesized Probe
  source 1..120: mol_type = other DNA
attttatatatatatgtgtgtgtgtgtgtgtgtgtgtgtgtgtgtgtatgtgtatatatatatatatatatatatatatatatatatattttttttttttttttttttttttttttttgt

SEQ ID NO: 10638 - DNA, 120 bp, synthetic construct
  misc_feature 1..120: note = Artificially Synthesized Probe
  source 1..120: mol_type = other DNA
tgagggcattattattcagaaaaatttcaatctcattccgcagcgcaaaaaactgcaataaaactttaccactgccaagtcactaaattgctatgtagaatggcaattcagtatattctg

SEQ ID NO: 10639 - DNA, 120 bp, synthetic construct
  misc_feature 1..120: note = Artificially Synthesized Probe
  source 1..120: mol_type = other DNA
tacatataaagtccacttttctccttttcttgttttaacatgataggtgggtatgcactggtaatgagagaaataaataagatgccagggcaatatgtgtggcgcgcacacacacacaca

SEQ ID NO: 10640 - DNA, 120 bp, synthetic construct
  misc_feature 1..120: note = Artificially Synthesized Probe
  source 1..120: mol_type = other DNA
tcctatgcatccttcacaagatattttatgcagatgtaagttcatattattctccacccctcccctaaactttacattcaaggggtcctttacaataccaaagaataccacccacctcat

SEQ ID NO: 10641 - DNA, 120 bp, synthetic construct
  misc_feature 1..120: note = Artificially Synthesized Probe
  source 1..120: mol_type = other DNA
agccactatgcccagccacatcaatttttaagtagatatatgcctaacggcattccaaggtcaaataaatatctaggattatcttgctgtaccgacaccttgcacttaacattgtgatga

SEQ ID NO: 10642 - DNA, 120 bp, synthetic construct
  misc_feature 1..120: note = Artificially Synthesized Probe
  source 1..120: mol_type = other DNA
tactgaaattcctcatcttggtatgcaaagccaaggaaattttccattcctgtcccctagtattctctaccctacttattctccagtcattcttacgtatgtgccatttttccaaaatcc

SEQ ID NO: 10643 - DNA, 120 bp, synthetic construct
  misc_feature 1..120: note = Artificially Synthesized Probe
  source 1..120: mol_type = other DNA
tgctaggatgggacaagcatctggcaaggatttttccttaattaacataataataaaaaggttcctttttcctttctgcctctgaatgctatcctgagagtacaatgcttagaggtcctg

SEQ ID NO: 10644 - DNA, 120 bp, synthetic construct
  misc_feature 1..120: note = Artificially Synthesized Probe
  source 1..120: mol_type = other DNA
gaatatatgtgaacatatatatgctatgtgaacatcaggcaacaaaggactgtagagctttgagaaatgagaaacaaaagaggtgagccctacatatgccccagcacacaacgataagag

SEQ ID NO: 10645 - DNA, 120 bp, synthetic construct
  misc_feature 1..120: note = Artificially Synthesized Probe
  source 1..120: mol_type = other DNA
cagaacttaaatagatgttaaaattagcagaggaggacattcaactgtttttatacatgtatcccatataatcaaaaagttaaatagagacatgggagataaacaagaaaagccaaaatc

SEQ ID NO: 10646 - DNA, 120 bp, synthetic construct
  misc_feature 1..120: note = Artificially Synthesized Probe
  source 1..120: mol_type = other DNA
gtagacctctctaaatgtacactataatcttaaagcaactacaaaaataatttttaaaaacaggtaaaagtaataaaaagaggcaaactggaatcataataaataatgtaggctgggcac

SEQ ID NO: 10647 - DNA, 120 bp, synthetic construct
  misc_feature 1..120: note = Artificially Synthesized Probe
  source 1..120: mol_type = other DNA
tctttttatgagtctggaaatttcacacatgctaggcagagagtacacctacatgaccagcctagataaaaactgtgtttcttgggcagtcacatatgttgttgtattttcgttaagggg

SEQ ID NO: 10648 - DNA, 120 bp, synthetic construct
  misc_feature 1..120: note = Artificially Synthesized Probe
  source 1..120: mol_type = other DNA
ctaaaaaaaaaaaaaaaaagaaaagttggccgggtgtgatggatcacacctgtagtcccaacactttgggaggccgaagtgggcaaatcacaaggtcaggagttcgagaccagcctggcc

SEQ ID NO: 10649 - DNA, 120 bp, synthetic construct
  misc_feature 1..120: note = Artificially Synthesized Probe
  source 1..120: mol_type = other DNA
tactttccattggttggaggagagacttttactatacactgtttttcaacttttttagacaaattacatttagaagtttaaatttgcctatctacattcttaatgtgaattgccacctta

SEQ ID NO: 10650 - DNA, 120 bp, synthetic construct
  misc_feature 1..120: note = Artificially Synthesized Probe
  source 1..120: mol_type = other DNA
ctaaaaacaatctgaggtatgtttcagagaaaacaaaattgcttgacaaaaatgccatgttaacaaccgaggaaattactttaaatatattaattttaacacaggaataatatgtcaaac

SEQ ID NO: 10651 - DNA, 120 bp, synthetic construct
  misc_feature 1..120: note = Artificially Synthesized Probe
  source 1..120: mol_type = other DNA
taaatagttcaaaacatctgttttcaaaatgttcaacgccccaggacatgtttctttgaaaagtcactgcattctcaatgttgaaatgtcatctttatcttgaaggggcaggttaagtgt

SEQ ID NO: 10652 - DNA, 120 bp, synthetic construct
  misc_feature 1..120: note = Artificially Synthesized Probe
  source 1..120: mol_type = other DNA
acactctgtcagaggtgataagtacgaaaaagaaaacaaaaaagcagatattatgggaaggcatttgaaatctttgacagcaagcctagcaaaggcctcactgtaaagtcacgcttgaat

SEQ ID NO: 10653 - DNA, 120 bp, synthetic construct
  misc_feature 1..120: note = Artificially Synthesized Probe
  source 1..120: mol_type = other DNA
cctcttttatgtgaattttactattcctttttgggttctcctgcatctgggtaggtggtaattgcttatttggtctcccacatcctggttggtggcaattgcatagaagcatttaaaaca

SEQ ID NO: 10654 - DNA, 120 bp, synthetic construct
  misc_feature 1..120: note = Artificially Synthesized Probe
  source 1..120: mol_type = other DNA
agaaggaagaaggacaaaacaaacaaccgtacaaatggcgacacaaaactgacactcctgtgagttttgagtgattcaatctagtggagaggtaaagatttgacagagttaccactagat

SEQ ID NO: 10655 - DNA, 120 bp, synthetic construct
  misc_feature 1..120: note = Artificially Synthesized Probe
  source 1..120: mol_type = other DNA
atctattaaagcccatatagtttctaaggtcaaaatttccagttttaatattccattggaagggctgtctcacttctcccaaatatacttgttaaaaaccaaaggggccaggcacagtgg

SEQ ID NO: 10656 - DNA, 120 bp, synthetic construct
  misc_feature 1..120: note = Artificially Synthesized Probe
  source 1..120: mol_type = other DNA
gcaaagcagtatcacttcacagagtttgctgtctttatagatgggaggaagccgtttcatttgcatttgtttcaaaattacatgaaaatcacaggaaaagctctgaaaaatggcagacta

SEQ ID NO: 10657 - DNA, 120 bp, synthetic construct
  misc_feature 1..120: note = Artificially Synthesized Probe
  source 1..120: mol_type = other DNA
catcctgtatttgtgatagcagtaaagtggcccttctaaaaatgtggaccaaccactgagtgccagtatcaatatcaaactgagaaattcttagaaatacagaatctgtctgggtgcagt

SEQ ID NO: 10658 - DNA, 120 bp, synthetic construct
  misc_feature 1..120: note = Artificially Synthesized Probe
  source 1..120: mol_type = other DNA
cacatacacctctacttccctcatcccacagtgagagcacgtatcaatgattattaacacttcagcctttaaattatccatcacataacacttgaaccactatcagtcaatctgcagttc

SEQ ID NO: 10659 - DNA, 120 bp, synthetic construct
  misc_feature 1..120: note = Artificially Synthesized Probe
  source 1..120: mol_type = other DNA
atcaaatcagaaatgtttagtctgctgtatcttgactgaggactgccacaacagaggtggcagttaactgtgtaaagaaaggatattttccagggaaaatgaaaacccactacagagtgt

SEQ ID NO: 10660 - DNA, 120 bp, synthetic construct
  misc_feature 1..120: note = Artificially Synthesized Probe
  source 1..120: mol_type = other DNA
tcaggtcctaaccagcagcttaatcaaattcaaccttcaagttttgagactggtttgtatgtatataccatatcagtaagatatcaatgtcaacactaaggatgacagcagcccagctta

SEQ ID NO: 10661 - DNA, 120 bp, synthetic construct
  misc_feature 1..120: note = Artificially Synthesized Probe
  source 1..120: mol_type = other DNA
gcacttgagtgattacatcataaccctcaagaggcagtgttagctttgcaagctaaattaatttttacacattctcatcaactacagaaacttctactcccttaaccagcacagccaagt

SEQ ID NO: 10662 - DNA, 120 bp, synthetic construct
  misc_feature 1..120: note = Artificially Synthesized Probe
  source 1..120: mol_type = other DNA
ctcataggttccattgctgttgtcatcaatgtccttcttgttagaaggttggtttctccatggcaagataaatccaggcgttattctgaattgttttaagtctccttgtcctaaggaact

SEQ ID NO: 10663 - DNA, 120 bp, synthetic construct
  misc_feature 1..120: note = Artificially Synthesized Probe
  source 1..120: mol_type = other DNA
atataaacttaaatagttcctgggttgagtggtagtagatttttagggaagcagaagagctgaactggaagaaggaaagggatgattaggagcaaaggggattttttaggccagtgaaac

SEQ ID NO: 10664 - DNA, 120 bp, synthetic construct
  misc_feature 1..120: note = Artificially Synthesized Probe
  source 1..120: mol_type = other DNA
gtaagggaggtcaaacacctcagagtaatttattgttgacttttttttaatacgaggtcaagggaaatttctagcttttggtctggctgtagaaagctgcaaacaacattgtgcccaacc

SEQ ID NO: 10665 - DNA, 120 bp, synthetic construct
  misc_feature 1..120: note = Artificially Synthesized Probe
  source 1..120: mol_type = other DNA
cattacaataatgtaaaccaaaaccaccaattaaaaggcaaaaatcaccaattaaaagaccatttttgagattagattaaaattagatctaacaattgggtgcagctgggtgtggtggca

SEQ ID NO: 10666 - DNA, 120 bp, synthetic construct
  misc_feature 1..120: note = Artificially Synthesized Probe
  source 1..120: mol_type = other DNA
gttacacactaacaaaatgatgaatagtataatagatatcgatcataaccatatactcagaccaacatgaatctggtctcaaaatgaatctcgaatctgaaagagatggttaagcatctc

SEQ ID NO: 10667 - DNA, 120 bp, synthetic construct
  misc_feature 1..120: note = Artificially Synthesized Probe
  source 1..120: mol_type = other DNA
ttattatgtatgtgcaaatattccaaaatccaaaaaaaatccaaaatccaaaacacatctggtcccaaacattttgtttttgttttttttgagatggagtctcactccgttgtccaggct

SEQ ID NO: 10668 - DNA, 120 bp, synthetic construct
  misc_feature 1..120: note = Artificially Synthesized Probe
  source 1..120: mol_type = other DNA
gaatacatgatacatagcaagtgaccaacatcatgcaggcaacattctctgacaataatgcagtaaaactaaaaatgtataataaatggataacttaaaatcttctggccaggtgcagtg

SEQ ID NO: 10669 - DNA, 120 bp, synthetic construct
  misc_feature 1..120: note = Artificially Synthesized Probe
  source 1..120: mol_type = other DNA
caacatggtgaaaccccgtctctactaaaaatacgaaaataagccaggggtggtagtgaacacctgtagtcccaggtactcaagaggctgaggtgggtggacggctccagctcagaagac

SEQ ID NO: 10670 - DNA, 120 bp, synthetic construct
  misc_feature 1..120: note = Artificially Synthesized Probe
  source 1..120: mol_type = other DNA
ggtatatatccaaaggaactgaaatcaatgtcaaaaggatatctgcatgcccatgcttactacagcattacttacaatagccagatatggaatcaacctaagtatccatcaatagatgaa

SEQ ID NO: 10671 - DNA, 120 bp, synthetic construct
  misc_feature 1..120: note = Artificially Synthesized Probe
  source 1..120: mol_type = other DNA
gaactaaaagaaccagtagtagagtgatggtaaccagacactcggagaaggtaaggcaggaagaaggaaatagtaagttgttggtcaaaggatatgaagattgagataggaggaataggt

SEQ ID NO: 10672 - DNA, 120 bp, synthetic construct
  misc_feature 1..120: note = Artificially Synthesized Probe
  source 1..120: mol_type = other DNA
cagcatgtttaaaaaatgtcataatcaagtaatgtttattgaaagtaatcgagtaatgtttattgcaagtaatcaagtaatgcttactgccttctacagaagcttcttcttattgcattg

SEQ ID NO: 10673 - DNA, 120 bp, synthetic construct
  misc_feature 1..120: note = Artificially Synthesized Probe
  source 1..120: mol_type = other DNA
gtctgtttctgtggtaatacagcactgacttaatttattagtgtgttacaaaaagtcttagtatcaagtaaagcaatccttcctcttcttcatgggtcctttggcttatcctgtcttttg

SEQ ID NO: 10674 - DNA, 120 bp, synthetic construct
  misc_feature 1..120: note = Artificially Synthesized Probe
  source 1..120: mol_type = other DNA
gagtagcttttaactttcattctctgtacaagtattagatgaggactaacagtgacagtgtgctactcacaggtgacaaaaagataagtcagtcaggcatactgtgtccttaagatctgc

SEQ ID NO: 10675 - DNA, 120 bp, synthetic construct
  misc_feature 1..120: note = Artificially Synthesized Probe
  source 1..120: mol_type = other DNA
atatggtgggagctgctgttttcttttccatcctactcctttattttgaaaatgttcaaacctcccaaaaaatattggaggaggaggagaggactacagtataacaaacaccagtgtgtt

SEQ ID NO: 10676 - DNA, 120 bp, synthetic construct
  misc_feature 1..120: note = Artificially Synthesized Probe
  source 1..120: mol_type = other DNA
agggcacacacagaggttacagccattagaatgaatgagctttctttcccagggagtgaacagagacaaaaagtagacaagatatctgaggacttatccttaagaactccaaaattataa

SEQ ID NO: 10677 - DNA, 120 bp, synthetic construct
  misc_feature 1..120: note = Artificially Synthesized Probe
  source 1..120: mol_type = other DNA
ggggaggggtggtggggggggggagaaaaagaaagaaaaaaaataggttataatgtcctgtgtttccttttttaatgaatggggagaaggtaaggaacaaaactatcaacttaagtttac

SEQ ID NO: 10678 - DNA, 120 bp, synthetic construct
  misc_feature 1..120: note = Artificially Synthesized Probe
  source 1..120: mol_type = other DNA
taccgcaaaatgattatcaaaataatgtgaagcatggtatacttttccttgtgcccaaattatagctgactcagagaagtttcatcctagtaataaatgttaagaatcttggccaggcat

SEQ ID NO: 10679 - DNA, 120 bp, synthetic construct
  misc_feature 1..120: note = Artificially Synthesized Probe
  source 1..120: mol_type = other DNA
cttaaatgttctttctcaggaggcagcctaacagctgagaggatttccacacaccactacccctaacatcattcttcttgtttaataaaaattatatgtccactctgtctgtcatgctct

SEQ ID NO: 10680 - DNA, 120 bp, synthetic construct
  misc_feature 1..120: note = Artificially Synthesized Probe
  source 1..120: mol_type = other DNA
acacacacaaattattctcgtcaacaccaccaatagaccaacggcaaaagaattaacaatccagttagcacccacaagctttcttcaaacatcctaaaagttcacttcacaccaggatca

SEQ ID NO: 10681 - DNA, 120 bp, synthetic construct
  misc_feature 1..120: note = Artificially Synthesized Probe
  source 1..120: mol_type = other DNA
aaataaatacaatttgaatccccccccaaaaaaaaaggtattcagatcaagaatagctaaataactccaaagatgaacaaggcacataaacctgtagaacgtagacaaaggggccgggtg

SEQ ID NO: 10682 - DNA, 120 bp, synthetic construct
  misc_feature 1..120: note = Artificially Synthesized Probe
  source 1..120: mol_type = other DNA
tggaatgacccaaagggtattctgtgttgcctctctctagtatttttacagccaaagatagaaaagaatacagttctgctagagagactctctctgcctgcctattatattcaaagtact

SEQ ID NO: 10683 - DNA, 120 bp, synthetic construct
  misc_feature 1..120: note = Artificially Synthesized Probe
  source 1..120: mol_type = other DNA
gactatgttagatcttagtatctgtcaaagtcaaggcaggacaactgagtgtttatgtctctctctcttctcctaatcctagtcttcaaacaattgtcagagtttggcagcagaatgtga

SEQ ID NO: 10684 - DNA, 120 bp, synthetic construct
  misc_feature 1..120: note = Artificially Synthesized Probe
  source 1..120: mol_type = other DNA
cacatgtaagtagattcctaagagaacttgaagacaatgtgcacttcattaaatagcatcagctatgtgccaggcattatctctggggatgcaaagataaattagatctaaccctttccc

SEQ ID NO: 10685 - DNA, 120 bp, synthetic construct
  misc_feature 1..120: note = Artificially Synthesized Probe
  source 1..120: mol_type = other DNA
aagatagtcaagatccctacgtttaatggatctagatgaaagactgaaaataaaaataggacacaataatgatgatgctggtaagcacatggcatgatgggagttaaggggaagaggtgg

SEQ ID NO: 10686 - DNA, 120 bp, synthetic construct
  misc_feature 1..120: note = Artificially Synthesized Probe
  source 1..120: mol_type = other DNA
atgtaagcaacaagcacagtggtattggtggatacctaagtgtttgtcaccaacagaaatcacggatattttcttatcacatgcagttgttgcagatatcccaaaatatcattcaccctc

SEQ ID NO: 10687 - DNA, 120 bp, synthetic construct
  misc_feature 1..120: note = Artificially Synthesized Probe
  source 1..120: mol_type = other DNA
catgagccaccatcaccatgcccagcctaatcagctattaaatagaataactgacttcccttaactccagagaatggcaatacttttcatgcttgcttcctactaaaactacagaagaaa

SEQ ID NO: 10688 - DNA, 120 bp, synthetic construct
  misc_feature 1..120: note = Artificially Synthesized Probe
  source 1..120: mol_type = other DNA
cttctgaaatttaactttatttaggccttaaaaacaaaaatgaaccaatgaaactgtcttggaccctctagaccagcccaggtgtcacctgaatagcaataaatgactctggtggatgcc

SEQ ID NO: 10689 - DNA, 120 bp, synthetic construct
  misc_feature 1..120: note = Artificially Synthesized Probe
  source 1..120: mol_type = other DNA
caaataaccaaaaggcgctgaagtaaagtaacacgtgtatggctttggaactccaattccacctgtctcatcaagtgtactgacaaagcaaaagacccctatcttgtctatgtcaattaa

SEQ ID NO: 10690 - DNA, 120 bp, synthetic construct
  misc_feature 1..120: note = Artificially Synthesized Probe
  source 1..120: mol_type = other DNA
aactatttaactagagcctaacctacgagaagagaaataaactccagccagttctagcctaagagaactatctaactttagcccattctaggccattctgccccacctaaaagcagtgaa

SEQ ID NO: 10691 - DNA, 120 bp, synthetic construct
  misc_feature 1..120: note = Artificially Synthesized Probe
  source 1..120: mol_type = other DNA
caagaaatgttaaaagtccttcagagagaacaagaacggtacaggtcaaaaacttagacctatatcaagaaaggaagagcatctcagaaggggcaagtgaagataaaattttaaaaaaaa

SEQ ID NO: 10692 - DNA, 120 bp, synthetic construct
  misc_feature 1..120: note = Artificially Synthesized Probe
  source 1..120: mol_type = other DNA
gctcatcccagtaatcccaccactttaggaggctgaggccagcatttcaagaccagcctgggcaacacagcgagaacccgtccctccaaaaaaactattttttttttaattagccaggag

SEQ ID NO: 10693 - DNA, 120 bp, synthetic construct
  misc_feature 1..120: note = Artificially Synthesized Probe
  source 1..120: mol_type = other DNA
gaacccactattatcgttggaaagtttaacacccctctcagaaatagatctggcgtgcagaaaatcaacaaagacatagttgaatctgacaccgttaatcaactggaaataactgacatc

SEQ ID NO: 10694 - DNA, 120 bp, synthetic construct
  misc_feature 1..120: note = Artificially Synthesized Probe
  source 1..120: mol_type = other DNA
atttacaagaccatactgtatttactgataccataagtttatgtcacctgtttacaagactgtctacctgaaatagtgggcaacctcagctacagacttccatctatggtacacatcaag

SEQ ID NO: 10695 - DNA, 120 bp, synthetic construct
  misc_feature 1..120: note = Artificially Synthesized Probe
  source 1..120: mol_type = other DNA
ttatcagtgcatgcacatggttcaaccccaagctattaaagggccaactgtttcagaaaggagggaaaatctacactcagtaatatcaaaaatgaaaaatgggacatcactacagatccc

SEQ ID NO: 10696 - DNA, 120 bp, synthetic construct
  misc_feature 1..120: note = Artificially Synthesized Probe
  source 1..120: mol_type = other DNA
aaacttacatccacaacaaaaattgcacatagatgttgacagaagctttcttaactgccaaaaccagggtgcaaatagaaattccatcagtaggcaaatggataaactctggtccatcca

SEQ ID NO: 10697 - DNA, 120 bp, synthetic construct
  misc_feature 1..120: note = Artificially Synthesized Probe
  source 1..120: mol_type = other DNA
caaatgtaccactctagtataggatgttgatactgaaaaaggctatgcacgtgtcggggaaggggatttatgggagatttcagtaccttcctcacaattttgctacaaacctaaaattgc

SEQ ID NO: 10698 - DNA, 120 bp, synthetic construct
  misc_feature 1..120: note = Artificially Synthesized Probe
  source 1..120: mol_type = other DNA
acaaacatgtgagtaatgcactatgttgcgctgtgctatgacatcacgacagctatgacatcatgacagctatgacatattgaggtgacagaaatttctccgctccattataattttatg

SEQ ID NO: 10699 - DNA, 120 bp, synthetic construct
  misc_feature 1..120: note = Artificially Synthesized Probe
  source 1..120: mol_type = other DNA
cccccttgggtgcggctgtcttttatggtcgagctgtagggatgaaataagtcccagtctcccgtagcgctcccaggcttattaggaagaggatatccccgcctaataaatttttggtca

SEQ ID NO: 10700 - DNA, 120 bp, synthetic construct
  misc_feature 1..120: note = Artificially Synthesized Probe
  source 1..120: mol_type = other DNA
aagagcacagagctctgaaaggttttgagatgttatttaaaaggactcagaagccagctgacaaggggctcccatgagccaaactatgacaacttgaacactaggagaaaaatgtttaat

SEQ ID NO: 10701 - DNA, 120 bp, synthetic construct
  misc_feature 1..120: note = Artificially Synthesized Probe
  source 1..120: mol_type = other DNA
gccaggttaaaaaaaatagttttctgctcctattaaaacatttatctaaactgtatttgccttgacctctcataggagacagcatgagaagacagtccattcgtggggcttactactctc

SEQ ID NO: 10702 - DNA, 120 bp, synthetic construct
  misc_feature 1..120: note = Artificially Synthesized Probe
  source 1..120: mol_type = other DNA
gcagtggaggggtcaaagtaattgaatccaggatatactgggtaggtaaagccctccagtgggctggatgtctaaaatgtgaaaatgtgaaatgtgaatgtctaaaatgtgaatgtataa

SEQ ID NO: 10703 - DNA, 120 bp, synthetic construct
  misc_feature 1..120: note = Artificially Synthesized Probe
  source 1..120: mol_type = other DNA
cagaggagctggctttatccgcagtctttatcccattttaccaggacagaaacaacatacgggtagggatgcaagcaagaaaatagatttgatggtagatgaatatggaacttcttttct

SEQ ID NO: 10704 - DNA, 120 bp, synthetic construct
  misc_feature 1..120: note = Artificially Synthesized Probe
  source 1..120: mol_type = other DNA
ctgcatgagcccggcgggtggaggttgcagtgagccgagatcacaccactgtagtccagcctgggagagagagcaagactctgtctcaaaaataacaacaataggccaggcacagtggct

SEQ ID NO: 10705 - DNA, 120 bp, synthetic construct
  misc_feature 1..120: note = Artificially Synthesized Probe
  source 1..120: mol_type = other DNA
aactctagctaccttttgcagatgcacaacatacagcagcttatttaagggcacctaaaagtccaacagaccagaaactatttggtctagtttggcctagcctttcacaatattaattcc

SEQ ID NO: 10706 - DNA, 120 bp, synthetic construct
  misc_feature 1..120: note = Artificially Synthesized Probe
  source 1..120: mol_type = other DNA
taagtattcctcactctggttttgccccttttttaggtaaccttctgaagtctccctctgtctacagtagtggcttttaactacataatgggttcttcacaaagttcacataccaggttt

SEQ ID NO: 10707 - DNA, 120 bp, synthetic construct
  misc_feature 1..120: note = Artificially Synthesized Probe
  source 1..120: mol_type = other DNA
ggggggtggggggggggggacaatatgaaataaaagaataatatgaaaaaagaataaaacaaagaactatgttttaaacaataagaaatccatttaagtcttgttctcataaaaaagtta

SEQ ID NO: 10708 - DNA, 120 bp, synthetic construct
  misc_feature 1..120: note = Artificially Synthesized Probe
  source 1..120: mol_type = other DNA
cttcacagggggaaaggggaaagaaggcagaactaaataaaaagactacaaaacctgaaagatgaaaaagggtgaattagggagaaaacactctaaggtggatcttattgttcatggaca

SEQ ID NO: 10709 - DNA, 120 bp, synthetic construct
  misc_feature 1..120: note = Artificially Synthesized Probe
  source 1..120: mol_type = other DNA
ttttgtaaggagccactttagcacagaactgaagatgaagcaaaccatacagatatctgggagaaaagcattgcagtagaagtaacagcaaatgcaaaattcttgagatgagagcaagtg

SEQ ID NO: 10710 - DNA, 120 bp, synthetic construct
  misc_feature 1..120: note = Artificially Synthesized Probe
  source 1..120: mol_type = other DNA
tcatcggtgtccttattgctgctcattggcttctgccatgtgacttttctgactaatcaaacactatattctgaatgcaaagataatggtcatactcttcaaaaccctatcagttgccaa

SEQ ID NO: 10711 - DNA, 120 bp, synthetic construct
  misc_feature 1..120: note = Artificially Synthesized Probe
  source 1..120: mol_type = other DNA
agacacacctttaggagcagggctaaatgagccacagaacaaatgctattctagaccatccctaaaagagctgacaaataagtctcaacttatcctgagagtgactctgtatgaaaaaaa

SEQ ID NO: 10712 - DNA, 120 bp, synthetic construct
  misc_feature 1..120: note = Artificially Synthesized Probe
  source 1..120: mol_type = other DNA
gactgcaggcttcttgtctgaaactatgtaagccagaagacagtaaaaaacatatttaaagtactaaggagaaaattaaaggaaaaacccttctaaacactgaacaaaacatgcagcaaa

SEQ ID NO: 10713 - DNA, 120 bp, synthetic construct
  misc_feature 1..120: note = Artificially Synthesized Probe
  source 1..120: mol_type = other DNA
gtgcacaggtgtagggaacataaaatgatatgggccctggaaaacagtacggcagtttctcaagcagttaaaaatagaattgccatatgatccacaaattccacctctgggtatacacca

SEQ ID NO: 10714 - DNA, 120 bp, synthetic construct
  misc_feature 1..120: note = Artificially Synthesized Probe
  source 1..120: mol_type = other DNA
tcttgaagaaatctgtagtcagaactctgtgctgcatttttatccagagaaggaacaggaagagaagagtgtggtctcctagaaatctagcactggagaaacgaggaaaattcttccaag

SEQ ID NO: 10715 - DNA, 120 bp, synthetic construct
  misc_feature 1..120: note = Artificially Synthesized Probe
  source 1..120: mol_type = other DNA
gttaatggcaaaagggtcaaaggaaggcagtatccttggggtgctgctgaagttgaaaatggtgaacattgtgattttacaattctaagaaatatgctgataaaaacacacactcaggac

SEQ ID NO: 10716 - DNA, 120 bp, synthetic construct
  misc_feature 1..120: note = Artificially Synthesized Probe
  source 1..120: mol_type = other DNA
agaacattttactgttgtacaatcatgttctcgtggtttgattgtttacagcctattccaaaataaaaggactgtggaaggttaaaaaaaaaaaatagttaagggccaggagcagtggct

SEQ ID NO: 10717 - DNA, 120 bp, synthetic construct
  misc_feature 1..120: note = Artificially Synthesized Probe
  source 1..120: mol_type = other DNA
aggcccaggtgctttcactaactaatttctaaccaacactttaagatgatgtaacaccaactctacagaatcccttccagaaaaaggagggaacaacatttctccactcatttaatgagg

SEQ ID NO: 10718 - DNA, 120 bp, synthetic construct
  misc_feature 1..120: note = Artificially Synthesized Probe
  source 1..120: mol_type = other DNA
gtaataattttatcggaacatagccatgtatatttgtttacatacagtctacatctgctttcatgctacaatagcagatatcagcagttacaacagacagcatattgccagcaaagccta

SEQ ID NO: 10719 - DNA, 120 bp, synthetic construct
  misc_feature 1..120: note = Artificially Synthesized Probe
  source 1..120: mol_type = other DNA
gaattaagctctccaataagacacagattgaatggatttttgattgtttaagacggagtctcactctgtcgcccagactggactgcgatggtgtgatctcagctcaccgcaacctccacc

SEQ ID NO: 10720 - DNA, 120 bp, synthetic construct
  misc_feature 1..120: note = Artificially Synthesized Probe
  source 1..120: mol_type = other DNA
actgtctctttagctgtatactccatgaagactagaaatttgttctattcactgctgcacccccaacacctaacagcaccagatgaaacataagcactcaatatatgttttgttgaaaga

SEQ ID NO: 10721 - DNA, 120 bp, synthetic construct
  misc_feature 1..120: note = Artificially Synthesized Probe
  source 1..120: mol_type = other DNA
ttcagacacaattaatcaacctatagaatatgataaagtgctcaactttaccaagtaatcagggaaatcgaacaatgatatgaaaaatgaaaactactggtcaggcctggtagctcaagc

SEQ ID NO: 10722 - DNA, 120 bp, synthetic construct
  misc_feature 1..120: note = Artificially Synthesized Probe
  source 1..120: mol_type = other DNA
aactcctcgattaaaaaataatgtcaaacattaagaggaatatccattttgcttacagacatacctcattttatttcacgtcacagataataagttgtttgtttgtttggggacacagtc

SEQ ID NO: 10723 - DNA, 120 bp, synthetic construct
  misc_feature 1..120: note = Artificially Synthesized Probe
  source 1..120: mol_type = other DNA
attgttttggaacaccatgaaccacgcccacataagatggctaacatataatgtgtgttctgactgctccaccaattagccattccctatctctctttctccctcttttcagacctcccg

SEQ ID NO: 10724 - DNA, 120 bp, synthetic construct
  misc_feature 1..120: note = Artificially Synthesized Probe
  source 1..120: mol_type = other DNA
aacattcctttcaaaatattagcactcactaacaatggaccaggtcattcgagggctttgatggatatgttcagaaagaagaatgttactttcatgcctgccagtacgatacatctatcc

SEQ ID NO: 10725 - DNA, 120 bp, synthetic construct
  misc_feature 1..120: note = Artificially Synthesized Probe
  source 1..120: mol_type = other DNA
ttattgtaagaaactaccagaggcaccccaaccttcagcaatcactgctgggatcagtcagcagccaccaacatcctctatcagcaaaaaatcttacaatttactgaaagctcagatgat

SEQ ID NO: 10726 - DNA, 120 bp, synthetic construct
  misc_feature 1..120: note = Artificially Synthesized Probe
  source 1..120: mol_type = other DNA
attatttttttaaaaagcaaattctgcccccatcttttcattctttcagttgaaccactttttccaaaacactgtgcagatataaaaaatacgtagttaaggccagggtgcagtggctca

SEQ ID NO: 10727 - DNA, 120 bp, synthetic construct
  misc_feature 1..120: note = Artificially Synthesized Probe
  source 1..120: mol_type = other DNA
agctacttgggaggctgaggcaggagaatcacttgaacccaggaggcagaagttgcagtgagctgagatcacaccactacactacttcactccaggatgggcaacagagcgagactccat

SEQ ID NO: 10728 - DNA, 120 bp, synthetic construct
  misc_feature 1..120: note = Artificially Synthesized Probe
  source 1..120: mol_type = other DNA
gcgggcaggtggacagaaaagtaaaattcagccatgttcaaaagggaacaaataaaagcaccgaaaggtaagacagacctagtatatttatgacttgaatcccaagctacgaaactggaa

SEQ ID NO: 10729 - DNA, 120 bp, synthetic construct
  misc_feature 1..120: note = Artificially Synthesized Probe
  source 1..120: mol_type = other DNA
ccaactcttttttccactgctctccctcaggagtagccttttttagcaaaatgacttattctgagatacataaacaacctttccagatcagagacatcaaaagccattcaggcttcattg

SEQ ID NO: 10730 - DNA, 120 bp, synthetic construct
  misc_feature 1..120: note = Artificially Synthesized Probe
  source 1..120: mol_type = other DNA
tcctgtaatcaaacagtatttatcatcaactatgttggtgactctcactttgacataggctgaaccagaaatcctaggaaaaactgatgatagaaagctaaggggaaggacaggaagccg

SEQ ID NO: 10731 - DNA, 120 bp, synthetic construct
  misc_feature 1..120: note = Artificially Synthesized Probe
  source 1..120: mol_type = other DNA
tcctcagtgctgccccaagagttccacagtttgttccttacatcattcacttggataaaacctttcaatgtctctccatggccttcagagttaaatcaaaactattccttggaatgactt

SEQ ID NO: 10732 - DNA, 120 bp, synthetic construct
  misc_feature 1..120: note = Artificially Synthesized Probe
  source 1..120: mol_type = other DNA
gcctctggttctaactactcatttggaaatacagaaaatagagaaacatcggggataaacctggtattgaatctcaggaatcagcaaaatcctgactacaggaactctacagggcaaata

SEQ ID NO: 10733 - DNA, 120 bp, synthetic construct
  misc_feature 1..120: note = Artificially Synthesized Probe
  source 1..120: mol_type = other DNA
atatagttctcccaaaacagtgcttcatagaagttttcattatcatcccccttcccactttacagaaagaaacacggacctggagaggtgaaaagtgacttgcttaatgacttgaaaacc

SEQ ID NO: 10734 - DNA, 120 bp, synthetic construct
  misc_feature 1..120: note = Artificially Synthesized Probe
  source 1..120: mol_type = other DNA
aggaaactgaagtataaagaaagtcatggtcaattactcaatggtagatccagaacttgaaccagcactgtcttaatacagagctcgggatcttaagtgacttccaagatcacaagacca

SEQ ID NO: 10735 - DNA, 120 bp, synthetic construct
  misc_feature 1..120: note = Artificially Synthesized Probe
  source 1..120: mol_type = other DNA
aaatactttaaagctctatcatttacagtaatgcaaagtgatccaactctgaaattcccacataatcatgttatgcagtgaagctttctaggctggggggaaaaaatgtaacctcttcaa

SEQ ID NO: 10736 - DNA, 120 bp, synthetic construct
  misc_feature 1..120: note = Artificially Synthesized Probe
  source 1..120: mol_type = other DNA
tcctggcctcgtgatctgcccgcctcagcctcccaaagtgctgggattacaggcatgagccactgcgcccagccaactgtcactcttaatttttttaaattaaaagaaattaaatttctc

SEQ ID NO: 10737 - DNA, 120 bp, synthetic construct
  misc_feature 1..120: note = Artificially Synthesized Probe
  source 1..120: mol_type = other DNA
tccacaaaggaactaggaagtagaaactgaagaacactttgttaaacaagtccttggggattaaagaagtaatagctacgaagtatacaacagtgtgatgagtgaatccttctcatattg

SEQ ID NO: 10738 - DNA, 120 bp, synthetic construct
  misc_feature 1..120: note = Artificially Synthesized Probe
  source 1..120: mol_type = other DNA
attagacacctgctacacacacacacactgtgccagatgtataagatagagccatgacccaagaaatacagtcactattctcaaaaaacttagaatctctgccaggagcaacggctcacg

SEQ ID NO: 10739 - DNA, 120 bp, synthetic construct
  misc_feature 1..120: note = Artificially Synthesized Probe
  source 1..120: mol_type = other DNA
atatttttctttgcctgcagtgaattccctctcttggcaatgccttataagttaccatgcaaaaaaatataaatgtatctcatttatctgttctcccctaccccccacaaccctacctac

SEQ ID NO: 10740 - DNA, 120 bp, synthetic construct
  misc_feature 1..120: note = Artificially Synthesized Probe
  source 1..120: mol_type = other DNA
actcacacatgatagttttataaagataactacctggcattcaggttaaaatgacaactgcacccagaataggaaaaactataaattatgcattggactctgcgatcaccagcccctact

SEQ ID NO: 10741 - DNA, 120 bp, synthetic construct
  misc_feature 1..120: note = Artificially Synthesized Probe
  source 1..120: mol_type = other DNA
cttttcggctctgcctcaacatatgcagaattacttcaacatttctctgatgcctatcatgcttcaaatcatctgttaccctgctaatattatctaacatgcctgcttcttccttgatct

SEQ ID NO: 10742 - DNA, 120 bp, synthetic construct
  misc_feature 1..120: note = Artificially Synthesized Probe
  source 1..120: mol_type = other DNA
ttaatttagcaactatcgacaacaagctgagtataaaacagcaggaaaatgaaaaccatctaggtccgtgataatttaattgagccactgaattacacctggacttccagtcatgtgagg

SEQ ID NO: 10743 - DNA, 120 bp, synthetic construct
  misc_feature 1..120: note = Artificially Synthesized Probe
  source 1..120: mol_type = other DNA
ctgggatttgaacataggcagttctgaaaaccaaaacccaaagcattacaaacactatcacccataagcagagcattctcctaaactgaatgtgccttttcctgccatttattctgtgtt

SEQ ID NO: 10744 - DNA, 120 bp, synthetic construct
  misc_feature 1..120: note = Artificially Synthesized Probe
  source 1..120: mol_type = other DNA
ggggaatccaagccaacacctcacttttggagggcaactaatgaatatccatcaaaacttgaaacatatgtactgtcctcttcgatgagagaactttacatctaggaatttatcttccag

SEQ ID NO: 10745 - DNA, 120 bp, synthetic construct
  misc_feature 1..120: note = Artificially Synthesized Probe
  source 1..120: mol_type = other DNA
tagcacttctcagtatttgagactaattacgagaaatgcatttattttgtgtttctcaccgttgaaatattgttccataagggcaggagcttggtctctctggttcaccactgaatcctt

SEQ ID NO: 10746 - DNA, 120 bp, synthetic construct
  misc_feature 1..120: note = Artificially Synthesized Probe
  source 1..120: mol_type = other DNA
cgctcaccaccgcacccagccagtactcgcttttataaacacgcaaaacacctcctacaccacttaaagctgctattatatttctacaacctaacacattctgaaacactggataaataa

SEQ ID NO: 10747 - DNA, 120 bp, synthetic construct
  misc_feature 1..120: note = Artificially Synthesized Probe
  source 1..120: mol_type = other DNA
aaacaaacaaacagacaaaaatattggggaggattaattcagtaagtctaataatccaactaaaagcagctatagagaaaacaaagaaaagatcactagaggccgggcgtgggggttcac

SEQ ID NO: 10748 - DNA, 120 bp, synthetic construct
  misc_feature 1..120: note = Artificially Synthesized Probe
  source 1..120: mol_type = other DNA
gctctaataacagtagtagcactgtgcaaaaagagtaaggaaaagttcagcacaaaaacaaggcaacaggtctaaatacttctagcccaaactgaaggaaataggactaagggaaagcag

SEQ ID NO: 10749 - DNA, 120 bp, synthetic construct
  misc_feature 1..120: note = Artificially Synthesized Probe
  source 1..120: mol_type = other DNA
tgaaggaaagttctgatataaactgcagagataactagcagagaaattaaaagtgatttttaaaaaatctattggggaagcagatgtaaagaagccaaatcctcctttatcagagcagaa

SEQ ID NO: 10750 - DNA, 120 bp, synthetic construct
  misc_feature 1..120: note = Artificially Synthesized Probe
  source 1..120: mol_type = other DNA
cctcactactgataactggtagtgagttatcccaattgatggttcactgtcagttaccgatcaaattccttgttctatactctttactcccctttcactactgcacttaactggtcttaa

SEQ ID NO: 10751 - DNA, 120 bp, synthetic construct
  misc_feature 1..120: note = Artificially Synthesized Probe
  source 1..120: mol_type = other DNA
aagatactctgcctaaactttccctcataatgcaatgaataaaactttaatctttctcttcaggataaataatttctgaggctttagaaccaccttaaaaggtatctctaggccgggcgc

SEQ ID NO: 10752 - DNA, 120 bp, synthetic construct
  misc_feature 1..120: note = Artificially Synthesized Probe
  source 1..120: mol_type = other DNA
gaggcaccacaccccaccaaaaatgtatctttaacacctgttctctagattgatttaggttttactgatcttagaggtatatacaaccatcatttcaaactcaacagatctaaatttagt

SEQ ID NO: 10753 - DNA, 120 bp, synthetic construct
  misc_feature 1..120: note = Artificially Synthesized Probe
  source 1..120: mol_type = other DNA
agcttgatagcaagacaaaatagtttttaaaaaaattctaggaaaaatatggctgactaaactatgatgaaagatttgagatatcaaaaatgggctgggtgcagctggcgtatgcctata

SEQ ID NO: 10754 - DNA, 120 bp, synthetic construct
  misc_feature 1..120: note = Artificially Synthesized Probe
  source 1..120: mol_type = other DNA
gttttttttttctgttgttagaggtggaggtggtaatggtttctgttttggagggagaagaggtagtggtggtaatggtttcttcttgggaaggagtattaaggtttacagtgtttacca

SEQ ID NO: 10755 - DNA, 120 bp, synthetic construct
  misc_feature 1..120: note = Artificially Synthesized Probe
  source 1..120: mol_type = other DNA
ctacttataaactaggcactactgcttcaatatattaaaaaaattattctagaagatagtttatcgtactcagggttccccccacctatagctgcagaccaataccactcggtagcctgt

SEQ ID NO: 10756 - DNA, 120 bp, synthetic construct
  misc_feature 1..120: note = Artificially Synthesized Probe
  source 1..120: mol_type = other DNA
taggtaacagtctaatatgaatttaactgtgaacataatgaagttaattctacactatctaaaaaactgtttcacttaacatgcatctaattcatcaaactgggtgggtttctctctctt

SEQ ID NO: 10757 - DNA, 120 bp, synthetic construct
  misc_feature 1..120: note = Artificially Synthesized Probe
  source 1..120: mol_type = other DNA
aagtgaccagaggttttatttcttgggtttttttttaaatcatcatggaattaaacacacatgaagaaatctgttgaaacccctcaaacttgcaatgctatacccgaatcacagtgttct

SEQ ID NO: 10758 - DNA, 120 bp, synthetic construct
  misc_feature 1..120: note = Artificially Synthesized Probe
  source 1..120: mol_type = other DNA
aaactttttatccttaggatattttggggttctggccttttgttgtgccagatataataccacttgataagactttcagcttcatcccatcccatcctgcaacaatgttttcagtagggc

SEQ ID NO: 10759 - DNA, 120 bp, synthetic construct
  misc_feature 1..120: note = Artificially Synthesized Probe
  source 1..120: mol_type = other DNA
aatgtgtatcaaggatgtcctacttgggcctcactctcccaaacagagcctattttcttccatttaacaaaggaaaattctcatttaaacaagtctaatgaagatgttgcaacctggcca

SEQ ID NO: 10760 - DNA, 120 bp, synthetic construct
  misc_feature 1..120: note = Artificially Synthesized Probe
  source 1..120: mol_type = other DNA
taaaaggagttaagatttaagacataaccaaaaaccagcccctctacaaggcagttgactgtacagttcatgcttgtatacagatggacagactaagaacaaactctacacttctgagaa

SEQ ID NO: 10761 - DNA, 120 bp, synthetic construct
  misc_feature 1..120: note = Artificially Synthesized Probe
  source 1..120: mol_type = other DNA
gcctgtgatcccagctactcaggagactgaggcaggagaattgcttgaacccaggaggcagaggttgcagtgagctaatactgtgccactgcactccagcctgggcgacatagtgagact

SEQ ID NO: 10762 - DNA, 120 bp, synthetic construct
  misc_feature 1..120: note = Artificially Synthesized Probe
  source 1..120: mol_type = other DNA
ggattacaggtgatggcatccggccttcaatattttctggatgaaagagaggacttattactagtcctagattattatgaaaaacagcaatatcatgattaaaattttgttcctcctccc

SEQ ID NO: 10763 - DNA, 120 bp, synthetic construct
  misc_feature 1..120: note = Artificially Synthesized Probe
  source 1..120: mol_type = other DNA
aggtttgataaaactagacctatcacacattgctaatgacattacaaattgatgcaacctttttagggagtggcatttcaaaactttaataaaaataagagatcagggctgggcatggtg

SEQ ID NO: 10764 - DNA, 120 bp, synthetic construct
  misc_feature 1..120: note = Artificially Synthesized Probe
  source 1..120: mol_type = other DNA
gagccactgcacctggcctctagcggctttcttaacacatataccctctttaaatcttttaataatcctgtgacaaagatgttattatcatccctattttataggtaacaaacagataca

SEQ ID NO: 10765 - DNA, 120 bp, synthetic construct
  misc_feature 1..120: note = Artificially Synthesized Probe
  source 1..120: mol_type = other DNA
aaaaggctttatctacaaaaaggtcagccagagcattacacatagtaacaaaaggcagtagggtgagaagaggaaaaggggagacagctgtatggttacataaattatagtgtggttact

SEQ ID NO: 10766 - DNA, 120 bp, synthetic construct
  misc_feature 1..120: note = Artificially Synthesized Probe
  source 1..120: mol_type = other DNA
ctaaatgtacataagtagtatcacaaaaaaaaaaaaactgtgtatatgaaaaaagtttgaaagagaataggtcaggctgggtgtggtagctgatgtctataatttcggcactttgaaagg

SEQ ID NO: 10767 - DNA, 120 bp, synthetic construct
  misc_feature 1..120: note = Artificially Synthesized Probe
  source 1..120: mol_type = other DNA
cactgagttaccagaaattgaaggtagggatcttgccttattttggtctctccactgtataatacacagcagattctcagtatttgattttgcctaacatcctccttgggtgattaacag

SEQ ID NO: 10768 - DNA, 120 bp, synthetic construct
  misc_feature 1..120: note = Artificially Synthesized Probe
  source 1..120: mol_type = other DNA
gggcaaagggcatgaacagacacttctcaaaagaagacatatgtggccaacaagcatatgaaaaaatgctcaacatcacttatcattagagaaatgcaaatcaaaaccacaatgagatac

SEQ ID NO: 10769 - DNA, 120 bp, synthetic construct
  misc_feature 1..120: note = Artificially Synthesized Probe
  source 1..120: mol_type = other DNA
catttttaaaaagcacagcgttagcatataaatgggagcatgcttttactctcctcttcacccaaaatacatacttctactacttcctcaccatgctgaggtcaaaaactggaggcttag

SEQ ID NO: 10770 - DNA, 120 bp, synthetic construct
  misc_feature 1..120: note = Artificially Synthesized Probe
  source 1..120: mol_type = other DNA
gtagccatgtgaactctgtgatagttctagccaattatatgtaagagaaaacatacaatatttcttcaaaggaggaggctgtgtgcccttggactcctttctgtattttgcttcatggga

SEQ ID NO: 10771 - DNA, 120 bp, synthetic construct
  misc_feature 1..120: note = Artificially Synthesized Probe
  source 1..120: mol_type = other DNA
ttcttagcgtcccttaattcagaaaactatctgcttccagcaaaacagattaaaacaaccagcattttacttatttatgatttcgtaacctggactgagcttagctaggtggttcctctg

SEQ ID NO: 10772 - DNA, 120 bp, synthetic construct
  misc_feature 1..120: note = Artificially Synthesized Probe
  source 1..120: mol_type = other DNA
aaagtgagtcacagggctaggcgagatacaaagagagatgactatacaatagcatgaatacccataggcatgatttactatgggtctacaccaatacagtagactaccatctcctttatt

SEQ ID NO: 10773 - DNA, 120 bp, synthetic construct
  misc_feature 1..120: note = Artificially Synthesized Probe
  source 1..120: mol_type = other DNA
aaacatttcatagagatttctgctgacctagctttttaaaaatctttcttctatatattggggacatctgcgtacaaagaaaatctttgccaccccactatccccgcctccaataacaac

SEQ ID NO: 10774 - DNA, 120 bp, synthetic construct
  misc_feature 1..120: note = Artificially Synthesized Probe
  source 1..120: mol_type = other DNA
aaggtcaaacagctaatatgtagtacaacctagacttgaatccagaaggtctaggctctataatcagtgatgcccccagaatttggttttctcatttgtcaaatgatttaccatttctga

SEQ ID NO: 10775 - DNA, 120 bp, synthetic construct
  misc_feature 1..120: note = Artificially Synthesized Probe
  source 1..120: mol_type = other DNA
tgggcataaagcagagattgagacctgtagtcccctggtggtccgcagattaaacctagcctacaaagtataggcgcaaataccgttttagattctaattaatgaaaaacacttaaaatc

SEQ ID NO: 10776 - DNA, 120 bp, synthetic construct
  misc_feature 1..120: note = Artificially Synthesized Probe
  source 1..120: mol_type = other DNA
actcattttcttgtcattctacttggctaaatcccaccaatccttcaaggtctaattcaaatactacttcctccaaatctttgagcacccctctaggccacaataaatcttccagggttg

SEQ ID NO: 10777 - DNA, 120 bp, synthetic construct
  misc_feature 1..120: note = Artificially Synthesized Probe
  source 1..120: mol_type = other DNA
aacacaaactcacacgctgactgtaaagtttattccatggcagctaaaagttgtttggcccaaacatctcacagattaaaaactaaatcacaacctaacgagggtatctaacacgtcccc

SEQ ID NO: 10778 - DNA, 120 bp, synthetic construct
  misc_feature 1..120: note = Artificially Synthesized Probe
  source 1..120: mol_type = other DNA
tggtctgggaaactttgcagttttgcggaacagaggaatgagatgaagcagtgtggcttgtcacttggcagattaacaacaattctggcattatggaattaactgaaatagtacgaaaat

SEQ ID NO: 10779 - DNA, 120 bp, synthetic construct
  misc_feature 1..120: note = Artificially Synthesized Probe
  source 1..120: mol_type = other DNA
ctctaataatagcaattgccctctgaaaagaaagtggttcagggtataaagagtttactcaaaaaaggccaaggatagtgcttcagaaatcctatacctaccacctgctgcttctgtaca

SEQ ID NO: 10780 - DNA, 120 bp, synthetic construct
  misc_feature 1..120: note = Artificially Synthesized Probe
  source 1..120: mol_type = other DNA
acactggttacacataagtttcactttcagggtctttactgtccaactacagggtcttttctgcatggattcttatacagtatagagatacacaattcaaaaacctctttgctttccaat

SEQ ID NO: 10781 - DNA, 120 bp, synthetic construct
  misc_feature 1..120: note = Artificially Synthesized Probe
  source 1..120: mol_type = other DNA
ttgtatcacgaacaagctaatgtaataatgtacacacatcctgtacttgcttccctcacgattatcatagctaggtaacagctggcaataaaatatggaggcaagttgaaggccctgaat

SEQ ID NO: 10782 - DNA, 120 bp, synthetic construct
  misc_feature 1..120: note = Artificially Synthesized Probe
  source 1..120: mol_type = other DNA
gaagtcaaatggcttcctaatatatcatcaaaagaagaaaacacaggtttgggaccaggaaaagttccaggagcaagtcgctgacaaacaaaagctgcactcgcccggccgctttcttct

SEQ ID NO: 10783 - DNA, 120 bp, synthetic construct
  misc_feature 1..120: note = Artificially Synthesized Probe
  source 1..120: mol_type = other DNA
ggtgcgggcgggcggggcagccgggcgggcgggcggcgtgaggggcgccggcccccggggtctccgcccgcggcccctcccccgagccgcccgcggcaggaggagaaaggggcccggcgc

SEQ ID NO: 10784 - DNA, 120 bp, synthetic construct
  misc_feature 1..120: note = Artificially Synthesized Probe
  source 1..120: mol_type = other DNA
agtcaaaaccaaagtaacaaccagtttgtattgtaccgcataactgaagccactaagacggtgagtgaattgtgtttaaccttgaagtcacttgggatttgtactatcactaggagtcca

SEQ ID NO: 10785 - DNA, 120 bp, synthetic construct
  misc_feature 1..120: note = Artificially Synthesized Probe
  source 1..120: mol_type = other DNA
attctacggaattagacagaagtctgtatggctgaatgtactgggtttaacagcaacgttttagttagtttttgatattattgcaatgatgcactccagcaggagacaaatcctggcagg

SEQ ID NO: 10786 - DNA, 120 bp, synthetic construct
  misc_feature 1..120: note = Artificially Synthesized Probe
  source 1..120: mol_type = other DNA
tgaatgctttgctctcaagtcaaagatcaatattcctaactttaccggaacccactagaattatttgctgttgggtcagttggatgaaccctaagtatctttggctgcttttcaggttgg

SEQ ID NO: 10787 - DNA, 120 bp, synthetic construct
  misc_feature 1..120: note = Artificially Synthesized Probe
  source 1..120: mol_type = other DNA
gggagctgtgacctctcagaactggcactttctgctgtatatgggagataatattgacctcatcaggttgttggaggatgaaatcagatgaattatgcaaataactttgataacaatggc

SEQ ID NO: 10788 - DNA, 120 bp, synthetic construct
  misc_feature 1..120: note = Artificially Synthesized Probe
  source 1..120: mol_type = other DNA
tgccctttctattaagttaaactgaagtttatgtgaacagtattaactcactgaagttgagtggtagataagaggagtgtttagcaggctggttctagacctctgcgtccatcttggtta

SEQ ID NO: 10789 - DNA, 120 bp, synthetic construct
  misc_feature 1..120: note = Artificially Synthesized Probe
  source 1..120: mol_type = other DNA
ttttaaggaaagccacatttagcaacagtattaggtagactttcccatctgaaagattaagataaatgatctctttcttttctttttaggccactggagaatgcacggcaaccgtgggga

SEQ ID NO: 10790 - DNA, 120 bp, synthetic construct
  misc_feature 1..120: note = Artificially Synthesized Probe
  source 1..120: mol_type = other DNA
gaacgtatttcttctatctaactataattcagtacctattcaccaacctcttcatttcccccttctacccgcttaccccgctcagcctctggtatctgtcattctcttctcttctctatc

SEQ ID NO: 10791 - DNA, 120 bp, synthetic construct
  misc_feature 1..120: note = Artificially Synthesized Probe
  source 1..120: mol_type = other DNA
caggtgtgccactcactctgcagctacgttccctttttatggactttgcctctattgaccagtaggttagggctatctgttatgaacattacttgataatttaatacaaactctttttaa

SEQ ID NO: 10792 - DNA, 120 bp, synthetic construct
  misc_feature 1..120: note = Artificially Synthesized Probe
  source 1..120: mol_type = other DNA
aagtgagtcggatagtgcaatatgtaaagtgagaaaagatgtcgaatcagacccccttcctttgatgtttgattttaacaaatgggtaatcgtcattacaggctcttcctagagacagtg

SEQ ID NO: 10793 - DNA, 120 bp, synthetic construct
  misc_feature 1..120: note = Artificially Synthesized Probe
  source 1..120: mol_type = other DNA
tatgagtgattccctttggttagtaacattctctgcatttaataaaccttacaacttgctttcatgcgagcatgctttactcaattatgtccgtatagtgctatcagggtgggagaggcc

SEQ ID NO: 10794 - DNA, 120 bp, synthetic construct
  misc_feature 1..120: note = Artificially Synthesized Probe
  source 1..120: mol_type = other DNA
tttagatgacattcagcaattcatattcacatttacttgggaagactaaagctcacgtcactggtcaagctgccttacctaactggccaaagaatctgcacagctagcaataagtatttt

SEQ ID NO: 10795 - DNA, 120 bp, synthetic construct
  misc_feature 1..120: note = Artificially Synthesized Probe
  source 1..120: mol_type = other DNA
gatatgtgcccagggatgtttgcatttgagcagaagactgtgctttagccaaggaaatgctgcaagtcctttgatctagtaattctgcttctaattcatttatatgggaaatccagacca

SEQ ID NO: 10796 - DNA, 120 bp, synthetic construct
  misc_feature 1..120: note = Artificially Synthesized Probe
  source 1..120: mol_type = other DNA
acgtgtttatacatgaatttctatagcagcaaaattcataatagccagaaagtcaaaacaacccaagtgtctatcaataggtgaatggataaacaaaatgtgctattatatatacacaat

SEQ ID NO: 10797 - DNA, 120 bp, synthetic construct
  misc_feature 1..120: note = Artificially Synthesized Probe
  source 1..120: mol_type = other DNA
ggtgctgaggtgaaagaacataccctgtattgtttctgctttgtaaaatgtattggatctttttgtgacctggtgtaaaaacaattaaaaatatttgtatgatactggccgggcacggta

SEQ ID NO: 10798 - DNA, 120 bp, synthetic construct
  misc_feature 1..120: note = Artificially Synthesized Probe
  source 1..120: mol_type = other DNA
gtgaatgtacagataatgcatacatcgatattcagctacgaattgcttccttctcacagaactgtgacatttatccaggtaaggaataacacatgttggcaccgcaatagaggaatagtg

SEQ ID NO: 10799 - DNA, 120 bp, synthetic construct
  misc_feature 1..120: note = Artificially Synthesized Probe
  source 1..120: mol_type = other DNA
aaaaatgcaaaaattcaggaaaagtgtagcgttttgttggagttactcgcactttcctattgaaaatgtttccctaagtacactgtgctctgaggaggagaaaagaagagaggcaggaag

SEQ ID NO: 10800 - DNA, 120 bp, synthetic construct
  misc_feature 1..120: note = Artificially Synthesized Probe
  source 1..120: mol_type = other DNA
aatagcaaccatgatataattaataaaattcagggctagggccaggaagacttacgctatgtctttctggactcatctctcattataacatcacataatgtcttgggctcagccatatca

SEQ ID NO: 10801 - DNA, 120 bp, synthetic construct
  misc_feature 1..120: note = Artificially Synthesized Probe
  source 1..120: mol_type = other DNA
gatcatgtctggcatatcctcagaatagagtgttaagcagcaacttaaaagcatctttgtgcggagctcttgatatggggaatgtcttgtgttataatattcagtgaaaaaaaggaggca

SEQ ID NO: 10802 - DNA, 120 bp, synthetic construct
  misc_feature 1..120: note = Artificially Synthesized Probe
  source 1..120: mol_type = other DNA
gacacaaccaccctctctctctgatttcattgccatatgaccacgttaggtttacttgaaagggacgccaatctatgctattcatgcttttttcagctttaacttctcactttatatttc

SEQ ID NO: 10803 - DNA, 120 bp, synthetic construct
  misc_feature 1..120: note = Artificially Synthesized Probe
  source 1..120: mol_type = other DNA
tcttagtagttacagttttctctgtggattaatgaatcaacattctagtatgcatatgtgtctacattaaggatgtcagggggacacaaagaggtaacccatcagatagctgccaagtca

SEQ ID NO: 10804 - DNA, 120 bp, synthetic construct
  misc_feature 1..120: note = Artificially Synthesized Probe
  source 1..120: mol_type = other DNA
actgaggctgcttgattcctatgcctggccaatgccacgtatcatcaatttttgttttcatctttgcctgcatggaaggctaacaatgatgtctcattgcttttttaatgtgcatgtttt

SEQ ID NO: 10805 - DNA, 120 bp, synthetic construct
  misc_feature 1..120: note = Artificially Synthesized Probe
  source 1..120: mol_type = other DNA
acaggcaggagccactattcccggccaacacatttaaatactatgatttaatactaaataatttggttgagaaattgggccacaaaatatttaatggaagatagtgttgagtagtgatta

SEQ ID NO: 10806 - DNA, 120 bp, synthetic construct
  misc_feature 1..120: note = Artificially Synthesized Probe
  source 1..120: mol_type = other DNA
cgtttactttgtactaattaatttttcaggtggtggctggcaagaaatattttattgacttcgtggccagggaaaccacatgttccaaggaaagtaatgaagagttgaccgaaagctgtg

SEQ ID NO: 10807 - DNA, 120 bp, synthetic construct
  misc_feature 1..120: note = Artificially Synthesized Probe
  source 1..120: mol_type = other DNA
gaggtagtaacactttccctattgtcaaggatgagacactaaaaattagaaagactctgaggtcctgagtgaataatgacattatcaaatgcttcctctgtcccaggcactatactgaag

SEQ ID NO: 10808 - DNA, 120 bp, synthetic construct
  misc_feature 1..120: note = Artificially Synthesized Probe
  source 1..120: mol_type = other DNA
atgtcctaatgtgcttcagcacaacaaagtgatcatggatacatgctccctatatattcagttcataaagccacttagggccttttaggataaaagcagtgatggtggtaataacagtag

SEQ ID NO: 10809 - DNA, 120 bp, synthetic construct
  misc_feature 1..120: note = Artificially Synthesized Probe
  source 1..120: mol_type = other DNA
acataagcataagcatggtcatggccacggaaaacataaaaataaaggcaaaaagaatggaaagcacaatggttggaaaacagagcatttggcaagctcttctgaagacagtactacacc

SEQ ID NO: 10810 - DNA, 120 bp, synthetic construct
  misc_feature 1..120: note = Artificially Synthesized Probe
  source 1..120: mol_type = other DNA
aagtaacaagaaagaagacaggttggccaaagggaggaaaggggggacataaattaattgactttctattcccaaaatgggctagttatatcaaataaatactcccactgccctttctga

SEQ ID NO: 10811 - DNA, 120 bp, synthetic construct
  misc_feature 1..120: note = Artificially Synthesized Probe
  source 1..120: mol_type = other DNA
taaatagagaagaatgccattttatcactctgcctctgggtgaaataaagatcagtcttgatgttctaactctaattcacagtggtctcctttcagccctacccattctgcagcaaattc

SEQ ID NO: 10812 - DNA, 120 bp, synthetic construct
  misc_feature 1..120: note = Artificially Synthesized Probe
  source 1..120: mol_type = other DNA
ttacttcctagggaatttatgtggctgtgtgatgagaggttgcaagcccagttataggtactggagttcagaagattgttaggattctaatttggctagttttaaggtgccatcttatca

SEQ ID NO: 10813 - DNA, 120 bp, synthetic construct
  misc_feature 1..120: note = Artificially Synthesized Probe
  source 1..120: mol_type = other DNA
ttaaaaaataagcctgtgtgaaaagacccacctttgagcagttgcagcttgctatttgcttgagctaaaagagtttttgcttcattttgtagcatttcggctttccttctggcatcagct

SEQ ID NO: 10814 - DNA, 120 bp, synthetic construct
  misc_feature 1..120: note = Artificially Synthesized Probe
  source 1..120: mol_type = other DNA
tagggaaagttactcttacgtaatgcccgaaaagctacagtaacttccagaaaatttttgaatagtagggagttaaatactgaaattaggtcagtaaatgcaggtgcccccaggcctacg

SEQ ID NO: 10815 - DNA, 120 bp, synthetic construct
  misc_feature 1..120: note = Artificially Synthesized Probe
  source 1..120: mol_type = other DNA
atttacgtaccttcttaacatcttctgcactttgcttcacagtatatactactttttcaatatattctgcctccccggagttttgggcagctttccgcttaagttcttccacattcctct

SEQ ID NO: 10816 - DNA, 120 bp, synthetic construct
  misc_feature 1..120: note = Artificially Synthesized Probe
  source 1..120: mol_type = other DNA
agtgaattgtttctgataagctttcatgaacacagtttagttagaggttctctttgtttcttattgttactaacctaaaacacttcctgccccctagggcccctgaaaaacagaacccca

SEQ ID NO: 10817 - DNA, 120 bp, synthetic construct
  misc_feature 1..120: note = Artificially Synthesized Probe
  source 1..120: mol_type = other DNA
atcttcccaggttttaaacacatggaggattggcctgagaaggctgacaatgctgggtatgggagcatttaatttcaaagtatattctgagaacctgtatagggattagataactcatca

SEQ ID NO: 10818 - DNA, 120 bp, synthetic construct
  misc_feature 1..120: note = Artificially Synthesized Probe
  source 1..120: mol_type = other DNA
cgacctgggccttttctgcttcttccagagcttcctttaccatatctgcagtgactttaacatctgttgcacttttgctgagtaaaaaataatgagacagtatattgttgctgaacatga

SEQ ID NO: 10819 - DNA, 120 bp, synthetic construct
  misc_feature 1..120: note = Artificially Synthesized Probe
  source 1..120: mol_type = other DNA
agcagagtgaatctgaacattgtggaaaaccatagagggccagagcttaaagctgagacttaaaggcaatgaaatcttttaattgaggttggacgaatagctcagaaacttgtgaatgca

SEQ ID NO: 10820 - DNA, 120 bp, synthetic construct
  misc_feature 1..120: note = Artificially Synthesized Probe
  source 1..120: mol_type = other DNA
atttgcttgattagatttctcagctcctcattgctcttgtccattttttctttggtagcatttgtcttcaacagaatgtcttcagcactttgttttgcctcatctgccctcagttttgct

SEQ ID NO: 10821 - DNA, 120 bp, synthetic construct
  misc_feature 1..120: note = Artificially Synthesized Probe
  source 1..120: mol_type = other DNA
tcagttagcatttagaattgatttctccctttcagatcctttagtccacagctgaaagcaaacatacataacaaaaactgaggccatccactgagttaccatcttggagagctgttccac

SEQ ID NO: 10822 - DNA, 120 bp, synthetic construct
  misc_feature 1..120: note = Artificially Synthesized Probe
  source 1..120: mol_type = other DNA
attaccacccccgactgccatcacacatgcatagagtcctcctttcttacctaccaaaacctctcaaagatcaccacttggtcatggcatacaaatgcaaattgataaattataatacaa

SEQ ID NO: 10823 - DNA, 120 bp, synthetic construct
  misc_feature 1..120: note = Artificially Synthesized Probe
  source 1..120: mol_type = other DNA
tgaccaattttgtctatttcagagaaagtgatgagaggagggaggaagcatcactaagacaaagctgtaatgaagtttgaactcttctgcgcctatgtaccttccatctttaactttctc

SEQ ID NO: 10824 - DNA, 120 bp, synthetic construct
  misc_feature 1..120: note = Artificially Synthesized Probe
  source 1..120: mol_type = other DNA
tatgctgctgcttttaatctgtcttggttacagataccccattccaggatccagagacctcagcctaggagtttcagtcctgctgattcatttgcaaattattgtaataatgacaaaaga

SEQ ID NO: 10825 - DNA, 120 bp, synthetic construct
  misc_feature 1..120: note = Artificially Synthesized Probe
  source 1..120: mol_type = other DNA
ctggtttcaggcagcctgaagattatatgactagatgacttttctcaatcctttattcggatccactcaaatgactaatatagtagccctccatatttgtaggttccacatatgtggatt

SEQ ID NO: 10826 - DNA, 120 bp, synthetic construct
  misc_feature 1..120: note = Artificially Synthesized Probe
  source 1..120: mol_type = other DNA
aggctttcggcttctgtctgtagagaatccagttctttggctgtgctgttgctttgggaagttgtgtcagataatttcacttctacttgagccatcatttctgtaacatctttaatcagt

SEQ ID NO: 10827 - DNA, 120 bp, synthetic construct
  misc_feature 1..120: note = Artificially Synthesized Probe
  source 1..120: mol_type = other DNA
gtgctccaggtgggtgtgggtagggttgtatgtgtattgtaaagaaagtaatatttgagcagattttacctctgggtattactggttcacctaattgaatgtaattgtcttcttggcgat

SEQ ID NO: 10828 - DNA, 120 bp, synthetic construct
  misc_feature 1..120: note = Artificially Synthesized Probe
  source 1..120: mol_type = other DNA
agtctgcagtgaaaaaaccatagcatctagggaagcacagatgcctcatacccttttctatttttgtcctttagcacttaggtcttattgtgctgttttgggggttcctttttggcaaaa

SEQ ID NO: 10829 - DNA, 120 bp, synthetic construct
  misc_feature 1..120: note = Artificially Synthesized Probe
  source 1..120: mol_type = other DNA
acctcctgatggaagcaccatgccaggaaatctttgctgttaactcacaatattttttcagctttatgagtaattcctctggctcattaactacttactctgcttcctcaaagagattcc

SEQ ID NO: 10830 - DNA, 120 bp, synthetic construct
  misc_feature 1..120: note = Artificially Synthesized Probe
  source 1..120: mol_type = other DNA
gtggctgagattacttagcacagtggctgtgcccttgaaccctggcttagattcccaaatttcaggtgaccaaatcatttttatatcaacatctgacatttgaaagtatttatacagggt

SEQ ID NO: 10831 - DNA, 120 bp, synthetic construct
  misc_feature 1..120: note = Artificially Synthesized Probe
  source 1..120: mol_type = other DNA
cctgagatctgctataacatcaccatcctttcaacccagaggtgtgtgtttgtggcccattcatttggccctcaccacatcctgccttgtattgctagtttatctttttattgtctttgt

SEQ ID NO: 10832 - DNA, 120 bp, synthetic construct
  misc_feature 1..120: note = Artificially Synthesized Probe
  source 1..120: mol_type = other DNA
tttggggaatattctcgtaatgaatcaggaagctgtttaggcaaaccatggataactttaatggtgatccgtagaccatacgttctatgatgtgttccttgaaaaaactatcccatgatg

SEQ ID NO: 10833 - DNA, 120 bp, synthetic construct
  misc_feature 1..120: note = Artificially Synthesized Probe
  source 1..120: mol_type = other DNA
cctactcacccatctcccttagacttgacacaactgaggcagagttgcatatgcttatagtttgcttagacaattatttctttcccatagatgatgcaaaggtatacctttgttcagtcc

SEQ ID NO: 10834 - DNA, 120 bp, synthetic construct
  misc_feature 1..120: note = Artificially Synthesized Probe
  source 1..120: mol_type = other DNA
gattttaaagatactaaggtccagaggaaaacactagcaagtcaatgccacaatgggaaatagtctatgtacccatttatcacatagacctaacttgcctgcttcctttacatccttccc

SEQ ID NO: 10835 - DNA, 120 bp, synthetic construct
  misc_feature 1..120: note = Artificially Synthesized Probe
  source 1..120: mol_type = other DNA
ttaagaatacttatataatatgcctaaaagtgcttggcactcagcacgttctctgtagatggccactagagctaatcttttctgcaaacccttccctaatgactccatttcctactgatc

SEQ ID NO: 10836 - DNA, 120 bp, synthetic construct
  misc_feature 1..120: note = Artificially Synthesized Probe
  source 1..120: mol_type = other DNA
atcgaccaacagccccaacccgcctggacaataggaacattcaacaatctgtaagttggaggctcaactcatttgtcttttacataactacattctttttttccataaggagaatactta

SEQ ID NO: 10837 - DNA, 120 bp, synthetic construct
  misc_feature 1..120: note = Artificially Synthesized Probe
  source 1..120: mol_type = other DNA
aactttgaattgccaaagtatgcaatgaggtcagttgccttcaccccagattttaacactttggggaaaggggctttctggtcttccatgaaaaaaacaaaactaaagataaggttggag

SEQ ID NO: 10838 - DNA, 120 bp, synthetic construct
  misc_feature 1..120: note = Artificially Synthesized Probe
  source 1..120: mol_type = other DNA
tcggttgtttgcttttcctgatgaaaagtttcttacgtaatgagctgacctttcttctggatgaaaggaacaaagaagttggcgaacaatgatgccatgaatctcactctttgcagagtt

SEQ ID NO: 10839 - DNA, 120 bp, synthetic construct
  misc_feature 1..120: note = Artificially Synthesized Probe
  source 1..120: mol_type = other DNA
gggtttgcaccctgaaggaacacagtttctaggttcctgaccttctgtaggagatattgaatgagttgccaacttgaagatctgtattatttcttgctgtagttgtgtccaaaaaaagaa

SEQ ID NO: 10840 - DNA, 120 bp, synthetic construct
  misc_feature 1..120: note = Artificially Synthesized Probe
  source 1..120: mol_type = other DNA
ttaccccagggtgtgaggccgggagagtatgcacatccactcttgactacctatacttatgggcagggctagatttgttagattgttttttaaacaatcagtgttaatttattttgcaat

SEQ ID NO: 10841 - DNA, 120 bp, synthetic construct
  misc_feature 1..120: note = Artificially Synthesized Probe
  source 1..120: mol_type = other DNA
aggtaattacagacacactctgcaaaagaacatcacatttacttattgtcacactcccaaatacacaggcatgcggatgttagccacatctaaatgctaagatgttcccacttcacatct

SEQ ID NO: 10842 - DNA, 120 bp, synthetic construct
  misc_feature 1..120: note = Artificially Synthesized Probe
  source 1..120: mol_type = other DNA
atttatcatggggacagctacatggtttttctttcctgttatctctcccaggcactgagtcacatcttgagacctcactcctgccagaaaatgtggatgtaaagaaaaaaataaaaatga

SEQ ID NO: 10843 - DNA, 120 bp, synthetic construct
  misc_feature 1..120: note = Artificially Synthesized Probe
  source 1..120: mol_type = other DNA
gcacatgagactttagcttctgagcacatgggggtggagcatgttgggagcaaactaacaatgtaaagcatagcttcatgtagaaatcctaatccaaggattacatttttttaagacatg

SEQ ID NO: 10844 - DNA, 120 bp, synthetic construct
  misc_feature 1..120: note = Artificially Synthesized Probe
  source 1..120: mol_type = other DNA
agtgttccacagggtttctagatttccacgagcttactttcctgctttgtgttataacgttcttatcagagactcaatatgaattgactccactccatgtgccaaataggaaaagagcat

SEQ ID NO: 10845 - DNA, 120 bp, synthetic construct
  misc_feature 1..120: note = Artificially Synthesized Probe
  source 1..120: mol_type = other DNA
tctctttatgttttcatgtggaagatttactatgggaacagtggttctcaaactttagcttcaatcacaatcacctgaaacagatgactgggctcctcccaccgagtttctgattcagta

SEQ ID NO: 10846 - DNA, 120 bp, synthetic construct
  misc_feature 1..120: note = Artificially Synthesized Probe
  source 1..120: mol_type = other DNA
aattatgttacttttttatgtcctacaacataacatcttgaaggaactttggagacaatctcatccaacctagttattctacttatgaaaagctggatattccggccaggtgcggtggct

SEQ ID NO: 10847 - DNA, 120 bp, synthetic construct
  misc_feature 1..120: note = Artificially Synthesized Probe
  source 1..120: mol_type = other DNA
ctttacaaataaaatccaaagctggtcacagatatcaactatgccattctgacatgatgttcgttcaaatgcattctacagtgtgagtgctgattctgaatcagcattgtggcagctccc

SEQ ID NO: 10848 - DNA, 120 bp, synthetic construct
  misc_feature 1..120: note = Artificially Synthesized Probe
  source 1..120: mol_type = other DNA
ttaaaatgactaatcccatttggattagtttctcctttcgcctaaattaggcaggagcatttcacaactcttatcctccgccagaatctgctgagacagacagaatttctatacagccct

SEQ ID NO: 10849 - DNA, 120 bp, synthetic construct
  misc_feature 1..120: note = Artificially Synthesized Probe
  source 1..120: mol_type = other DNA
attattcagagttctggtttaaaacagtatcatccctatgatgagcggaagggaagaaaggggaggcagagttggcagatcaaaacagtttttctaggcaggaggtcattaatgttttct

SEQ ID NO: 10850 - DNA, 120 bp, synthetic construct
  misc_feature 1..120: note = Artificially Synthesized Probe
  source 1..120: mol_type = other DNA
agacattttatatttttagaaggaataaatcctttccatggggtggagtataagcaaagtaaccgtggaggcaagaaagaatgattctgcttacgctggcctcagcattacccctcaaca

SEQ ID NO: 10851 - DNA, 120 bp, synthetic construct
  misc_feature 1..120: note = Artificially Synthesized Probe
  source 1..120: mol_type = other DNA
gcctcttcccaatgtccctttcagtccactttaaagcagctcagataatgacaatcccctgcttgaaatgcttcaatagcttcctgtgaatattatagtccaaattcctttactaatcct

SEQ ID NO: 10852 - DNA, 120 bp, synthetic construct
  misc_feature 1..120: note = Artificially Synthesized Probe
  source 1..120: mol_type = other DNA
tccatatttcataactatatataatacccattagaagtactatttttctactgattctcccctccctcctccaccagtccactaagtggtttctttacctgtggctcgtagcgaattagg

SEQ ID NO: 10853 - DNA, 120 bp, synthetic construct
  misc_feature 1..120: note = Artificially Synthesized Probe
  source 1..120: mol_type = other DNA
tgtttcagccaccccagctcaagagccaggcatacatttaaagtcactaaatttggggatgaatagatgaaaaaatatccttgcctcagtatttaccatgctaggttgataactttggag

SEQ ID NO: 10854 - DNA, 120 bp, synthetic construct
  misc_feature 1..120: note = Artificially Synthesized Probe
  source 1..120: mol_type = other DNA
ggaccaaatacatagcatgttcttgttttcttcagaaaatacatatgtggaaaaaagtagtgcctatggattaatcccaaactccagaagcgtggctgagaacctggtcttctcggtttt

SEQ ID NO: 10855 - DNA, 120 bp, synthetic construct
  misc_feature 1..120: note = Artificially Synthesized Probe
  source 1..120: mol_type = other DNA
tctcaaggtttgttctttctttttttctcatcccaaagttttaaacaaggtacctaaggcaagttgcaactcacaggaacactttgcactcacaggcttattaaaaatgtcccaaggccg

SEQ ID NO: 10856 - DNA, 120 bp, synthetic construct
  misc_feature 1..120: note = Artificially Synthesized Probe
  source 1..120: mol_type = other DNA
ttcctccccagatgtttactgagacaacaaatatccaaaacatgaaccaccaaagaagaaaacaactagaccttcacatgcaaccattagagaacgagcaaatgaaggtgaggacaaagg

SEQ ID NO: 10857 - DNA, 120 bp, synthetic construct
  misc_feature 1..120: note = Artificially Synthesized Probe
  source 1..120: mol_type = other DNA
caaatcaaaatgcagtaagaacctatgcattgatagagttacaagcaaagcactaagggagaagaagatatgattcatctgattgagaagactgagggaggcgtcatgaaagaggtgtcc

SEQ ID NO: 10858 - DNA, 120 bp, synthetic construct
  misc_feature 1..120: note = Artificially Synthesized Probe
  source 1..120: mol_type = other DNA
caacaacccaaattagctggaaacagattctcctttagagccttagaaaacaatgcagccctaccaacatcgtgattttggtccactgagactgtatttgacacatagaactggaaaata

SEQ ID NO: 10859 - DNA, 120 bp, synthetic construct
  misc_feature 1..120: note = Artificially Synthesized Probe
  source 1..120: mol_type = other DNA
caccatagtcattcaatacaatgataaaaatatctactaacttccgttctggattcgaagtacaataaattttagtccctcatttattgagtacctgccaggtccaccgtgctgggtgcc

SEQ ID NO: 10860 - DNA, 120 bp, synthetic construct
  misc_feature 1..120: note = Artificially Synthesized Probe
  source 1..120: mol_type = other DNA
ctcactatacaaaacatcttaaagcttttaccacttccagtgatttttatggttaattctgtccctcaacaaagtaactaaggagtgtctgggatcacatttagagattgcctctctaag

SEQ ID NO: 10861 - DNA, 120 bp, synthetic construct
  misc_feature 1..120: note = Artificially Synthesized Probe
  source 1..120: mol_type = other DNA
ggggaattgcatatgccacttttatctcatcaagaaggactttaggagtgatgacagctttgaactgaggagtcatttactaaaggattcaacatgtgttctgggagtcacaaaggaaaa

SEQ ID NO: 10862 - DNA, 120 bp, synthetic construct
  misc_feature 1..120: note = Artificially Synthesized Probe
  source 1..120: mol_type = other DNA
atattttgcatgtctttttgagaaacaactgaatgtcacccattcctgtaagtcatgactttcctggaagactgaggacaagagcatacgtagagctccatttacctgttgtttaaggct

SEQ ID NO: 10863 - DNA, 120 bp, synthetic construct
  misc_feature 1..120: note = Artificially Synthesized Probe
  source 1..120: mol_type = other DNA
ccacgaggaaatcagatctttagagcaccagagatggaaataaagagaaatggaacagtagggaagaggagctctgtgcacttcaaaaatgagtatataaaaacaggttcaccaatttat

SEQ ID NO: 10864 - DNA, 120 bp, synthetic construct
  misc_feature 1..120: note = Artificially Synthesized Probe
  source 1..120: mol_type = other DNA
tccattagtaattcctattgtgtgcattgtctactcatgtcttttaacacgtacacgtgagggtgatcgcagactctacaatggcgaaaaggcttctctattaaaacatgtcatcctcac

SEQ ID NO: 10865 - DNA, 120 bp, synthetic construct
  misc_feature 1..120: note = Artificially Synthesized Probe
  source 1..120: mol_type = other DNA
aagttcagacaaaatggcagtcaacaagcaggactcctggggaaaaaggacgcatccaccgatgacactgtttaaaccctaaagtagatgagaaatctcaaaaatgtgaactttataaaa

SEQ ID NO: 10866 - DNA, 120 bp, synthetic construct
  misc_feature 1..120: note = Artificially Synthesized Probe
  source 1..120: mol_type = other DNA
actgctctcaatacactggttgaagtgaaccttggagtaatccttcccagcatggactctgtgatggtttcaagaacatccttgcggccttgtgcttcacattgttgttcttacctgaac

SEQ ID NO: 10867 - DNA, 120 bp, synthetic construct
  misc_feature 1..120: note = Artificially Synthesized Probe
  source 1..120: mol_type = other DNA
agctcagtgtcaaacacacagaggctgttcagtgaatattaattaactgaatgcagattgttggttgtctaggagtatcagggtgaagctggaaaaaagacagtaacttttctaccctct

SEQ ID NO: 10868 - DNA, 120 bp, synthetic construct
  misc_feature 1..120: note = Artificially Synthesized Probe
  source 1..120: mol_type = other DNA
aaggcccatgatatatgattttgccttgtgtcactgtaaggcacacttacgacccttgaggcatataaatgataaatgaattacggccttttggtccactaaatatgcatgtatatgggc

SEQ ID NO: 10869 - DNA, 120 bp, synthetic construct
  misc_feature 1..120: note = Artificially Synthesized Probe
  source 1..120: mol_type = other DNA
gcaaatgtggcataaaagtggggaaaagaatggaattaggaggaaaagatagaaagaaaccaactccatttgatccctaaaatgatatcccatgggtgtgggttaaaattttccagccgt

SEQ ID NO: 10870 - DNA, 120 bp, synthetic construct
  misc_feature 1..120: note = Artificially Synthesized Probe
  source 1..120: mol_type = other DNA
aaaatagcttaagttcctcctcttgtatgatctagatgactccaatagtgaagcctaacataacatgactgcaaagaggaaaggttactgccctctcatcagtttcataagaatgtcggc

SEQ ID NO: 10871 - DNA, 120 bp, synthetic construct
  misc_feature 1..120: note = Artificially Synthesized Probe
  source 1..120: mol_type = other DNA
aacctgcgggcagacagtaatttgaagtagcacaatgccatctgcttcccacagcaattaatgtcagtttcaacatgagaaaattccattcaggtaggaaaagatttatcaaagcactcc

SEQ ID NO: 10872 - DNA, 120 bp, synthetic construct
  misc_feature 1..120: note = Artificially Synthesized Probe
  source 1..120: mol_type = other DNA
tcctgccatatttaaaaagcgagcctcatcttgactgctattctaagtggcaaatcacttttgaagtgagtctcaggtctcaacaatagacaactaaagagatattgctcccttgattac

SEQ ID NO: 10873 - DNA, 120 bp, synthetic construct
  misc_feature 1..120: note = Artificially Synthesized Probe
  source 1..120: mol_type = other DNA
cccagtgagcccattcttttaattaccatacatgcctcccaagaagattaaaatgtaattgtgtaataagagcagttgttgaatgtggtaaagagctctgaactgagcaccgtaacatat

SEQ ID NO: 10874 - DNA, 120 bp, synthetic construct
  misc_feature 1..120: note = Artificially Synthesized Probe
  source 1..120: mol_type = other DNA
gttgaggtgaggacatagtggtggtggtctaactctaaccatgtgaataaacctggaaacatggatggccttataactagggttgccagatttaacaagtaaatataaatgacactcagt

SEQ ID NO: 10875 - DNA, 120 bp, synthetic construct
  misc_feature 1..120: note = Artificially Synthesized Probe
  source 1..120: mol_type = other DNA
tgtttgaaaatgaacttactctgtatccttgggctataaggatcttctattttgaaagcaggatctaaagcacgaaatatcacctaaaaatggaaacaagagtaattggtacttctgcaa

SEQ ID NO: 10876 - DNA, 120 bp, synthetic construct
  misc_feature 1..120: note = Artificially Synthesized Probe
  source 1..120: mol_type = other DNA
gactacctccttagtatcagccagtggactatatgttgtatatgttatacacagtccaatgaggtgcagatatgggtgtcaataatttgcaatatgctatgtcaaacaccatagtagggt

SEQ ID NO: 10877 - DNA, 120 bp, synthetic construct
  misc_feature 1..120: note = Artificially Synthesized Probe
  source 1..120: mol_type = other DNA
cagaagaggttggtcggggcaggtaagaagttgccatgctaagggacttacgtttttgcaaggaaaagagaacactaaaaaatttaagtggacaaatgaaatgatcagattgcactttag

SEQ ID NO: 10878 - DNA, 120 bp, synthetic construct
  misc_feature 1..120: note = Artificially Synthesized Probe
  source 1..120: mol_type = other DNA
gaaaacagagtggtgccagtacccctcattacattctttactttaactctctataatttgggctgatttgtgtgtctgcaagtttcatatgctgaagacctaactccatacttcaggtca

SEQ ID NO: 10879 - DNA, 120 bp, synthetic construct
  misc_feature 1..120: note = Artificially Synthesized Probe
  source 1..120: mol_type = other DNA
ctctcttttggaaacttttaagtcccaaaggaccattgacgagtcatccaatttcccgtggagttaagaagctgctggaaaccagaacaacacattttacctaacgaatagaatcctttc

SEQ ID NO: 10880 - DNA, 120 bp, synthetic construct
  misc_feature 1..120: note = Artificially Synthesized Probe
  source 1..120: mol_type = other DNA
ttttgattcagccctttccttccactgttctgcttctaatctttctccatttcatggttcagcttttgattttaaagtatccaaatgactgcccttagaaaacaggggcacctcatcttg

SEQ ID NO: 10881 - DNA, 120 bp, synthetic construct
  misc_feature 1..120: note = Artificially Synthesized Probe
  source 1..120: mol_type = other DNA
agttgtaatggctccctatttcttataaagttcacactccctagcaaggagtcaatgtcctttgcatctaatctgcttttctactttcctttcctttccttctctcactaccccaaactc

SEQ ID NO: 10882 - DNA, 120 bp, synthetic construct
  misc_feature 1..120: note = Artificially Synthesized Probe
  source 1..120: mol_type = other DNA
tcagtatttaaaaaacaaaaaacagaggggaacaggagaacatcaccattctgtcctatgtcctatgatgtaggtattattcctcttcccatttaccaatgaggaagtcacagctctggc

SEQ ID NO: 10883 - DNA, 120 bp, synthetic construct
  misc_feature 1..120: note = Artificially Synthesized Probe
  source 1..120: mol_type = other DNA
taacataaaggtaacatccttgtaggccgatgagcatcagtttaatcaccagattgtgtggtcaatgaagggacaagcggttggtgacaaggagtagttgacaatttatttagtgaaacc

SEQ ID NO: 10884 - DNA, 120 bp, synthetic construct
  misc_feature 1..120: note = Artificially Synthesized Probe
  source 1..120: mol_type = other DNA
cccatttaggtcaactcacatctgacatccattttgaaaggggacattacacagtgctctcatgtgtcatttgtgagaaagtcatggatttcttaccttgaaagtcattatgagatgagt

SEQ ID NO: 10885 - DNA, 120 bp, synthetic construct
  misc_feature 1..120: note = Artificially Synthesized Probe
  source 1..120: mol_type = other DNA
cttttggggtccatcttgagagcaaaagaagtcttaaatgcggaaagacaggaatgtgtcagaatgaatcatgtcacagactggtgtattttcaggaaatcaggaggaccttttgaaata

SEQ ID NO: 10886 - DNA, 120 bp, synthetic construct
  misc_feature 1..120: note = Artificially Synthesized Probe
  source 1..120: mol_type = other DNA
aagcccctctactggaaaatctcttctttctggcatctggtctcttttgtcccagagattcaaagttgtagaagttgattaactcgacataactaagaaaaaccttcctctagaactaca

SEQ ID NO: 10887 - DNA, 120 bp, synthetic construct
  misc_feature 1..120: note = Artificially Synthesized Probe
  source 1..120: mol_type = other DNA
caccaaatcccaaatagcaaagacaggaaaaagggtgtaattcatgcaatcactggaggaaccatttgacttggggtcatatccatgttgacagagtctttgaaaaaattacatcttgct

SEQ ID NO: 10888 - DNA, 120 bp, synthetic construct
  misc_feature 1..120: note = Artificially Synthesized Probe
  source 1..120: mol_type = other DNA
tgattttctaaaacctaaatgaagcagaaaccaagtattaggcagaagtatttagagaagctttgggaaccacagaacaagatttcttcgtttccaccctgcccgagcagtgaatcaatg

SEQ ID NO: 10889 - DNA, 120 bp, synthetic construct
  misc_feature 1..120: note = Artificially Synthesized Probe
  source 1..120: mol_type = other DNA
acaagcttcctgtctcaatcttgatgcccactagatgtttgagaaaagcatatgtccagtccctttctttaggccctatctgtgaaaagcacttcacaaatgcatggctaatcatatata

SEQ ID NO: 10890 - DNA, 120 bp, synthetic construct
  misc_feature 1..120: note = Artificially Synthesized Probe
  source 1..120: mol_type = other DNA
ggtgggtgggctgaccatgttctgagcaattagcttggaacttgccccgaatgtgaaactgatactttctgcttttgttagaggccagaaatatcagcctttatttaaaaaaattttttg

SEQ ID NO: 10891 - DNA, 120 bp, synthetic construct
  misc_feature 1..120: note = Artificially Synthesized Probe
  source 1..120: mol_type = other DNA
cagtccattcggaagaaagcaaaatgcacagaaaagacaatggagagatgagcgcaggagaggctgggaaggcagggactccgaaaggagaaggacacggaaagaaacccacacacgtca

SEQ ID NO: 10892 - DNA, 120 bp, synthetic construct
  misc_feature 1..120: note = Artificially Synthesized Probe
  source 1..120: mol_type = other DNA
tgctgtttctggtgccatccggagacaaacagagatggttaattaaagccacatggcccccatctgttcccagaatgaagcctccgctcagctcaggcactctcctgggcaatggatttt

SEQ ID NO: 10893 - DNA, 120 bp, synthetic construct
  misc_feature 1..120: note = Artificially Synthesized Probe
  source 1..120: mol_type = other DNA
ccaaaagcttccttggtgcaatccagtacagaaaacgccaccactttctgatgccaggagaaaagcaaaataaaaaaactgcttgcacacattagcactgataaaacaatgacaatttca

SEQ ID NO: 10894 - DNA, 120 bp, synthetic construct
  misc_feature 1..120: note = Artificially Synthesized Probe
  source 1..120: mol_type = other DNA
agaaagtttcggatttttttccttgtttttgcaaatggcagctggaattgcaggagtattttgtagaaaagccagaagagcattagtagatgtatggaaatatacggtagggcacacgct

SEQ ID NO: 10895 - DNA, 120 bp, synthetic construct
  misc_feature 1..120: note = Artificially Synthesized Probe
  source 1..120: mol_type = other DNA
ctgctttcccagctccccacgaggccagacacacaaaaagaaaaacagaatctctttctcttcttaaaaaccaaagtttttcccaatctatgtacactgaatcatgaattaagaagctga

SEQ ID NO: 10896 - DNA, 120 bp, synthetic construct
  misc_feature 1..120: note = Artificially Synthesized Probe
  source 1..120: mol_type = other DNA
cgcacctggcctgattcttaagaacaactcaaaacctctaaatcccactatgtaaaaagatggtaacccgtccgaaatctatcacactactttaatcatccacctaggaaacgctctgaa

SEQ ID NO: 10897 - DNA, 120 bp, synthetic construct
  misc_feature 1..120: note = Artificially Synthesized Probe
  source 1..120: mol_type = other DNA
actatctgtatttgcagttcactgctaattttccctgcccaacctctagtataagtgtttagtgaacagtgtaagaacaatgaaaattcatcctgaagtaaaatccatgactgaccctgg

SEQ ID NO: 10898 - DNA, 120 bp, synthetic construct
  misc_feature 1..120: note = Artificially Synthesized Probe
  source 1..120: mol_type = other DNA
atgtccatggtcgtcaacaacgcttcctataaggatacagacggggaaagggagaaggagcttctgtgtttaaagtattcaaataaagtactagtttacaggcaaatgtaaaaagtgcta

SEQ ID NO: 10899 - DNA, 120 bp, synthetic construct
  misc_feature 1..120: note = Artificially Synthesized Probe
  source 1..120: mol_type = other DNA
cctaagggaatctctaaactacccagaacctcagtacagaccactgatgtagaaatattagccagtataagctctgttggagaatcaaagttctaggttaaagaaaaagagtggtacctc

SEQ ID NO: 10900 - DNA, 120 bp, synthetic construct
  misc_feature 1..120: note = Artificially Synthesized Probe
  source 1..120: mol_type = other DNA
agtgacaaccacaacatggcagaaagctagtaatagaagaaaccagaagaaataatcactgatcagtggaaagctactagaaaggaaggtttaaagaagcctctgaggtgagcacaactg

SEQ ID NO: 10901 - DNA, 120 bp, synthetic construct
  misc_feature 1..120: note = Artificially Synthesized Probe
  source 1..120: mol_type = other DNA
agatccaccaatcttaaatatttagaatattacttttaaacacaagaacagctgataaacactgaagcactcccaaatgcctagaaacttcccacctgtcagtgctccctcgtcagcttc

SEQ ID NO: 10902 - DNA, 120 bp, synthetic construct
  misc_feature 1..120: note = Artificially Synthesized Probe
  source 1..120: mol_type = other DNA
gacaaggaaagcctaaacaactattagactagagaagactaagaaggaataacaactaaatgtattgtggagtcctgtcgaggttcctggaacagaaaaaggacaacagcggaaaaactg

SEQ ID NO: 10903 - DNA, 120 bp, synthetic construct
  misc_feature 1..120: note = Artificially Synthesized Probe
  source 1..120: mol_type = other DNA
tcatgggggcccccccaaaggactttacactccattttttttagataggcgacatttttttatattgaaatacttcaggtcagcatcaaccaatttgtaacctctcgtttctcttgtttt

SEQ ID NO: 10904 - DNA, 120 bp, synthetic construct
  misc_feature 1..120: note = Artificially Synthesized Probe
  source 1..120: mol_type = other DNA
ccgcaagtgcaaactgaagaaaatgactgtacacgtaatgaaactctacgccctggaagagagatgttccgatgactgcagatgtcaggataaaagcatagaatcctttaaaaaaaaaaa

SEQ ID NO: 10905 - DNA, 120 bp, synthetic construct
  misc_feature 1..120: note = Artificially Synthesized Probe
  source 1..120: mol_type = other DNA
aagtgctgtgctcagtctctgaatgtaccacacccctcagagggaagtgaaaatataacacaagactacttagaaaagaattggtacctacagagaaacacacaaaacactgaaatcaaa

SEQ ID NO: 10906 - DNA, 120 bp, synthetic construct
  misc_feature 1..120: note = Artificially Synthesized Probe
  source 1..120: mol_type = other DNA
aaacactctactccgtcttgtcaaatggaaaatcattcaaggatgactacaaaatagatctgtactttgccaaagtcttcaaatgacaaagctggactgaagcactcagcacatgctctt

SEQ ID NO: 10907 - DNA, 120 bp, synthetic construct
  misc_feature 1..120: note = Artificially Synthesized Probe
  source 1..120: mol_type = other DNA
aaatacctttatatctagtggatccctagctcaaacatctaccaatggctaccatactcttacaaagtaacagtatgattccattgtcttccatttgtggggtccttttcaattgggctc

SEQ ID NO: 10908 - DNA, 120 bp, synthetic construct
  misc_feature 1..120: note = Artificially Synthesized Probe
  source 1..120: mol_type = other DNA
gatgatccttatctattaaaggagtctagtaaatgctgtgttaggctttaatctgtgaatatatagatccaaatatacagtcagccctccgtatcgacgggatccacatccatggattca

SEQ ID NO: 10909 - DNA, 120 bp, synthetic construct
  misc_feature 1..120: note = Artificially Synthesized Probe
  source 1..120: mol_type = other DNA
cgagcccagtagcctatcaattaatcatttaaaatgctgcatctgaaatgacacatactaagagtgaattttttttccatagcaacctccactgagagtcggctactttgcaaaatagcc

SEQ ID NO: 10910 - DNA, 120 bp, synthetic construct
  misc_feature 1..120: note = Artificially Synthesized Probe
  source 1..120: mol_type = other DNA
tcacgttcatgtaatgtgtgcagattttaagtgatgctggacagcatctgtaacaggccagctagccaaaggttataacaaaatacaaagcaattaagccatgcaggattttgagccatt

SEQ ID NO: 10911 - DNA, 120 bp, synthetic construct
  misc_feature 1..120: note = Artificially Synthesized Probe
  source 1..120: mol_type = other DNA
acaaccaagatgaaagggaacactttcccacctgtgtatttttatgaggtgcgtcatttctctcaatatgctcaggctccccattatatctgctgatgctatttccaaatggcttctaaa

SEQ ID NO: 10912 - DNA, 120 bp, synthetic construct
  misc_feature 1..120: note = Artificially Synthesized Probe
  source 1..120: mol_type = other DNA
gtaggcccaaggcactaccaggtaagaggcaaagcttctgtggttcttgtgacaccaggactgtaagattacactgtaaaaatatagcagtcactaaatattaaaaatgaaaggataaca

SEQ ID NO: 10913 - DNA, 120 bp, synthetic construct
  misc_feature 1..120: note = Artificially Synthesized Probe
  source 1..120: mol_type = other DNA
tactttgtctttggtctactatctaaaatactatttgtacaagatctacaggctccatgcaccctgatatttcaaagcttacatcttgaaagtaattccactaaaatcatctttgaatag

SEQ ID NO: 10914 - DNA, 120 bp, synthetic construct
  misc_feature 1..120: note = Artificially Synthesized Probe
  source 1..120: mol_type = other DNA
aaaaaaacagtaccacagtttcactctgaacaaaacacataagcagatcttgaaaataaaacatgagcttggatgactgggaactgtttcactgtgtccccacctactccgaatctcctt

SEQ ID NO: 10915 - DNA, 120 bp, synthetic construct
  misc_feature 1..120: note = Artificially Synthesized Probe
  source 1..120: mol_type = other DNA
ggcattttatataaatgtttgtatactacggatcagatatcttaaaacccaggccctcaccagacaggttgaaaagccctgggctagactcgaatctaattaatgtcactctcctgatta

SEQ ID NO: 10916 - DNA, 120 bp, synthetic construct
  misc_feature 1..120: note = Artificially Synthesized Probe
  source 1..120: mol_type = other DNA
aaataattccaagtctgtaatgaataaatttgggggttatttagctttcaactcttacagctaaagtacaaatgcataccaagtaactctgccaaccacccacctaagccagggtggttg

SEQ ID NO: 10917 - DNA, 120 bp, synthetic construct
  misc_feature 1..120: note = Artificially Synthesized Probe
  source 1..120: mol_type = other DNA
tactagtttacagagatggcagctaggttggtagatgaaagaaaacacaagtacttatctggtgattagaggatgtcagtcaattaacacattaggtaagagaggcagctttcttcccta

SEQ ID NO: 10918 - DNA, 120 bp, synthetic construct
  misc_feature 1..120: note = Artificially Synthesized Probe
  source 1..120: mol_type = other DNA
acacacaggattttcttacaagagatgttttaggcaagtgtgtttgtaaagaaaaattttgttcactgcacccaatgtcctcattcgccataaacaggaaaaacacggagaccctcaggt

SEQ ID NO: 10919 - DNA, 120 bp, synthetic construct
  misc_feature 1..120: note = Artificially Synthesized Probe
  source 1..120: mol_type = other DNA
gtcattagaacatttttctgaaccctcaaaaaggtgaaaaagcaggaccgtgctttagcaggaacacgcacacccgcctaaatacccgatttttgagactgtccgggcgaaggaattcaa

SEQ ID NO: 10920 - DNA, 120 bp, synthetic construct
  misc_feature 1..120: note = Artificially Synthesized Probe
  source 1..120: mol_type = other DNA
cgaacgagatttttttttaagctacaaagaaaactaatacattcttgaagtgatcaccaaagatccgagctcgaaagcgtttctcggtaaaacactatgagtgccctccttagcgtgtta

SEQ ID NO: 10921 - DNA, 120 bp, synthetic construct
  misc_feature 1..120: note = Artificially Synthesized Probe
  source 1..120: mol_type = other DNA
tgtctgcctccagcctcctcctgctgtgctccaagacctgggtgctgtggtggccccagctctgagggcggctgctgcctgagccaccacaggtgctgcaggtcccaccgatgccggcgc

SEQ ID NO: 10922 - DNA, 120 bp, synthetic construct
  misc_feature 1..120: note = Artificially Synthesized Probe
  source 1..120: mol_type = other DNA
aaacattattatatacaattataagaatatatttatattgtatattcccatatgccacataagcagtgggtaagggtggctgcccttgtgtcttgagctcctgggcagtgcctggacgaa

SEQ ID NO: 10923 - DNA, 120 bp, synthetic construct
  misc_feature 1..120: note = Artificially Synthesized Probe
  source 1..120: mol_type = other DNA
gcacagctttgatccagaccaagctggcttcaaaattcagcatttactggagctacgtggcctcagacacattattgaaagtgaagctccctgaacctcactttccttatttatcttagg

SEQ ID NO: 10924 - DNA, 120 bp, synthetic construct
  misc_feature 1..120: note = Artificially Synthesized Probe
  source 1..120: mol_type = other DNA
aaaaccatcagccctgtccctagttggtctcagccaagcttgcaaagaaaaaaggctggagttttttccattacaaatgaagtgtagcaaagagaactttgacactgtatgtgcttctaa

SEQ ID NO: 10925 - DNA, 120 bp, synthetic construct
  misc_feature 1..120: note = Artificially Synthesized Probe
  source 1..120: mol_type = other DNA
aaataacgtggtctttgtgcacatttacattaaggaaaaagagccctaaggttgacctgcaaactatagaattcctaagtcatctttttctctatttttcttttctgcctgctctaaatc

SEQ ID NO: 10926 - DNA, 120 bp, synthetic construct
  misc_feature 1..120: note = Artificially Synthesized Probe
  source 1..120: mol_type = other DNA
aagattgcaccactgcactccggcctaggtgacagagcgagactccatctcaaaaacaaacaaaaagaatctgaaagattaaaataggaaaaaaaaaggtttttataaatctgtaagatg

SEQ ID NO: 10927 - DNA, 120 bp, synthetic construct
  misc_feature 1..120: note = Artificially Synthesized Probe
  source 1..120: mol_type = other DNA
cagagtgagacttcgtctcaaaaaaaataaataaagtgaaaaagtgaagggccaggctcagtggctcaagcctgtaatcccagcactttgggaggccgaggcaggtggatcactttaggt

SEQ ID NO: 10928 - DNA, 120 bp, synthetic construct
  misc_feature 1..120: note = Artificially Synthesized Probe
  source 1..120: mol_type = other DNA
gtgtaaaggagtatgttcagaagggggaaactgcagagattaacaatggtaataataataatcaccaacatttttgagtactttctctttttttgttaaagcccagactggagtgcagtg

SEQ ID NO: 10929 - DNA, 120 bp, synthetic construct
  misc_feature 1..120: note = Artificially Synthesized Probe
  source 1..120: mol_type = other DNA
caaggggagaaaggcattgtatttgacaaaacacatatgttcaggtctgagaaggctcataaagaatgttgtctgctatactttgtagttgcttctgttatcacacaatcagtctgcata

SEQ ID NO: 10930 - DNA, 120 bp, synthetic construct
  misc_feature 1..120: note = Artificially Synthesized Probe
  source 1..120: mol_type = other DNA
tagagcggacacaggcacctggcaagctttccttgaccaaatcaaggttgtccttgtcctattaagcctcttccccttgccttgaagggacctcacctggtgccctgacctcagcctcct

SEQ ID NO: 10931 - DNA, 120 bp, synthetic construct
  misc_feature 1..120: note = Artificially Synthesized Probe
  source 1..120: mol_type = other DNA
actccaaactgctctcagattctaaggtctcttgctgattttggagtgttactattatgcagggtatgaccttgcctatagaaactttcatctaaattcccctctttcattgtggagtga

SEQ ID NO: 10932 - DNA, 120 bp, synthetic construct
  misc_feature 1..120: note = Artificially Synthesized Probe
  source 1..120: mol_type = other DNA
caggcacctgaggaccaggaagaattaagcgggcaactgaggaccaaggaactagatgtattcctaagatgtttttactgagccacatatttacataagtataatgatctatgaaatatc

SEQ ID NO: 10933 - DNA, 120 bp, synthetic construct
  misc_feature 1..120: note = Artificially Synthesized Probe
  source 1..120: mol_type = other DNA
atatatatgaacaaagggaaaatgaagatttagtagttttatgccaaagaggagtgaaatagaccctaatatgcttgccagctcttcttccctatcagggttatgggatgctggagacac

SEQ ID NO: 10934 - DNA, 120 bp, synthetic construct
  misc_feature 1..120: note = Artificially Synthesized Probe
  source 1..120: mol_type = other DNA
ttctaggctctagactgctgacttcttgatgtcctcacatggtgaaaagaggatgacagggctctctgaggtcccttttatgtatttatttgcattgatgattattattattgagtcaag

SEQ ID NO: 10935 - DNA, 120 bp, synthetic construct
  misc_feature 1..120: note = Artificially Synthesized Probe
  source 1..120: mol_type = other DNA
ctgtagaacatagcagcagtacccacttcaggggggttctgtgaagatgggataatagaatgcatgtaaaacaccttgcacatggtaagtgctcagtacctgtgaaaaacacaaaaaaca

SEQ ID NO: 10936 - DNA, 120 bp, synthetic construct
  misc_feature 1..120: note = Artificially Synthesized Probe
  source 1..120: mol_type = other DNA
atgtacaagacatcatagtaagcgttttctgtaaatgatcacacttaatcctcacagtgctgctatgagtcagatactttacagacaacaggacggaagtcagagagggtaagtaacctg

SEQ ID NO: 10937 - DNA, 120 bp, synthetic construct
  misc_feature 1..120: note = Artificially Synthesized Probe
  source 1..120: mol_type = other DNA
tctaaataagcttctcctaaaaaagatcaaaggaagcgtgatacatttaggtggggaggtgggaccctgatttttccatttactgtgcatttgtttgacctcctgaccttctttgtagaa

SEQ ID NO: 10938 - DNA, 120 bp, synthetic construct
  misc_feature 1..120: note = Artificially Synthesized Probe
  source 1..120: mol_type = other DNA
gcagcctagtctagtgtttcccagcttttcctactgagaaaatcacctggaagagtgcttttgaaaacagggattattgaacccaaccatgacctaggaactagcatttttttttttttt

SEQ ID NO: 10939 - DNA, 120 bp, synthetic construct
  misc_feature 1..120: note = Artificially Synthesized Probe
  source 1..120: mol_type = other DNA
tagacactttcttattgagcttatttcacagatgttgtaagtacgaagaaatgtacatctcagcagtgatgagttctttgggctgggactagataccggagggctttgaagccagggtag

SEQ ID NO: 10940 - DNA, 120 bp, synthetic construct
  misc_feature 1..120: note = Artificially Synthesized Probe
  source 1..120: mol_type = other DNA
cctccctgattgcttcccattactcccttcttcctagggtgccttttgcttctgtttctcattgggctcttcccctgcctgtcttgggctaatttttcagagcataaatttcttccccaa

SEQ ID NO: 10941 - DNA, 120 bp, synthetic construct
  misc_feature 1..120: note = Artificially Synthesized Probe
  source 1..120: mol_type = other DNA
aaaaagaaaacaaattactagaaagagctgggccaaggagagaaaagatttcttctcatcacagtagggtagattcctatagttcctgggtcagggaaaggcctagatcccggatccctt

SEQ ID NO: 10942 - DNA, 120 bp, synthetic construct
  misc_feature 1..120: note = Artificially Synthesized Probe
  source 1..120: mol_type = other DNA
gggcaacagagcgagactcaatctaaaaaaaaaaatcttaaaagaaaaaaatagataaatcagctttcattaaaatttaaatttttttttgtttcaaaagacaccatcaagaaagtaaaa

SEQ ID NO: 10943 - DNA, 120 bp, synthetic construct
  misc_feature 1..120: note = Artificially Synthesized Probe
  source 1..120: mol_type = other DNA
tagtgatgatagttgcacaatctagtgaatatactaaaagccatatatatatatatatatatatatatatgtatttttttttttttttttttttttttgagacagattctggctctgtca

SEQ ID NO: 10944 - DNA, 120 bp, synthetic construct
  misc_feature 1..120: note = Artificially Synthesized Probe
  source 1..120: mol_type = other DNA
agctttcttgagagtaagaggaatctgatgtagtttggagatggagtagtgtgcaggaaattatcctaaaaacgagacttggtagtaacgtatactgttctctccttcattacagaggag

SEQ ID NO: 10945 - DNA, 120 bp, synthetic construct
  misc_feature 1..120: note = Artificially Synthesized Probe
  source 1..120: mol_type = other DNA
ccacgcgcctggccttacttgtgtcttgaaaggcggaaaaagatcagggaaagaagaaataatttcaaacacaaattcatgttttatggagcctggcacacaagaacagactgtttttag

SEQ ID NO: 10946 - DNA, 120 bp, synthetic construct
  misc_feature 1..120: note = Artificially Synthesized Probe
  source 1..120: mol_type = other DNA
aaatgcagattctgattcagttggtggggtgggtctggggccgtagaccctgcatttctaatgagtttttgggtgacaggctgctcaaacaggaatcacattttgcataaaaaagcatta

SEQ ID NO: 10947 - DNA, 120 bp, synthetic construct
  misc_feature 1..120: note = Artificially Synthesized Probe
  source 1..120: mol_type = other DNA
gagccactgcgcctgcctggtgtaccattttttaaaccagaccttggttattagacatttagggttgctatcatagataacaaaactttttgcttctgttgataatatcccaagtggcat

SEQ ID NO: 10948 - DNA, 120 bp, synthetic construct
  misc_feature 1..120: note = Artificially Synthesized Probe
  source 1..120: mol_type = other DNA
gaatcaaattcttcagagataagaacttgttcttccaagtttccttgttcctggctactataggcctgaagcctgaagccttttattataacactaaaactggacagtctcctgagacaa

SEQ ID NO: 10949 - DNA, 120 bp, synthetic construct
  misc_feature 1..120: note = Artificially Synthesized Probe
  source 1..120: mol_type = other DNA
cagctcactgcaacctctgcctcccaagttcaagagattctcctgtctcagcctcctgaatagctgggattacaggcatgtgccaccatgcctggctaatttatttatttgtttatttat

SEQ ID NO: 10950 - DNA, 120 bp, synthetic construct
  misc_feature 1..120: note = Artificially Synthesized Probe
  source 1..120: mol_type = other DNA
atgagtatcccagtgttgtcacagttaaattggtggtgggaacttccataatgggatttgatcttgtcacttggtccatggcagctagtttatgagaatgatcacatttgtgtgtatata

SEQ ID NO: 10951 - DNA, 120 bp, synthetic construct
  misc_feature 1..120: note = Artificially Synthesized Probe
  source 1..120: mol_type = other DNA
gacaaaatttgacaaattctgtagcttagtgacttttctatcatttatctcataatttactttttgaagaggtacaaaaaaaatttccagaagtctatccttggccaggcgtagtggctc

SEQ ID NO: 10952 - DNA, 120 bp, synthetic construct
  misc_feature 1..120: note = Artificially Synthesized Probe
  source 1..120: mol_type = other DNA
agtggcttaaaacaacatacatatctcagtttctgtggattaggaatcctgacaaggtttagctaagtgtttttgcctcaaggtttctcacaagctgcaattgtgttggatccacttcca

SEQ ID NO: 10953 - DNA, 120 bp, synthetic construct
  misc_feature 1..120: note = Artificially Synthesized Probe
  source 1..120: mol_type = other DNA
cattttttcatgtgttttttggctgcagaaatgtcttcttttgagaggtgtctgttcatgtccttcgcccactttttgatggggttgtttgtttttttcttgtaaatttgtttgagttca

SEQ ID NO: 10954 - DNA, 120 bp, synthetic construct
  misc_feature 1..120: note = Artificially Synthesized Probe
  source 1..120: mol_type = other DNA
cattgcttctgccctattctaacagaagaaagttcagcccacactgaaggcaaatggattatatgaataccaacaggtgggaatcacaggagcctttttaaaggttttcacaattactta

SEQ ID NO: 10955 - DNA, 120 bp, synthetic construct
  misc_feature 1..120: note = Artificially Synthesized Probe
  source 1..120: mol_type = other DNA
aaccaatgcaaacaatcacatcttagtggcacaactattaagaacatagctcaaatggcaggcagctgatgcacttcaataaacagtctaattctgccatttggagggcaacgcttgtta

SEQ ID NO: 10956 - DNA, 120 bp, synthetic construct
  misc_feature 1..120: note = Artificially Synthesized Probe
  source 1..120: mol_type = other DNA
cggcctacacatgtagtttttaaactccaacttttactttactgcaatctaccttcccaaacctccaacttaaatgtctttagcaacacacaaaaaaacttccttcccagttggcctcag

SEQ ID NO: 10957 - DNA, 120 bp, synthetic construct
  misc_feature 1..120: note = Artificially Synthesized Probe
  source 1..120: mol_type = other DNA
atcaaaaaatgcaaatacctatgaaaagtttatgacctcaccagtaatccaatatgcaaattataacgatattcctgtggggagggggcagggcacaaactagcgattcataataggcct

SEQ ID NO: 10958 - DNA, 120 bp, synthetic construct
  misc_feature 1..120: note = Artificially Synthesized Probe
  source 1..120: mol_type = other DNA
tttagtgagatcgtggcaatttgacagtattataattaagctcaataaaggtacatggggtacctggaagatcaagatctacagctgcctatttccacatctttcaatccatctggctcc

SEQ ID NO: 10959 - DNA, 120 bp, synthetic construct
  misc_feature 1..120: note = Artificially Synthesized Probe
  source 1..120: mol_type = other DNA
ggctgtgaccccaatcctgcctctcttttgctcttcagtattacttactggaggaatatgtaatattctaggtcaagtctaggagaggctcatcctaaaaaaaaaattgcaaagtctttt

SEQ ID NO: 10960 - DNA, 120 bp, synthetic construct
  misc_feature 1..120: note = Artificially Synthesized Probe
  source 1..120: mol_type = other DNA
acaccttcatagctcttttcaaaaaggatgcttataatttaaaggatgtcctaatgggaaggaaaggtacagggcaagaggctgtttcacattttagtccattagtctttggcagagccc

SEQ ID NO: 10961 - DNA, 120 bp, synthetic construct
  misc_feature 1..120: note = Artificially Synthesized Probe
  source 1..120: mol_type = other DNA
atcatgtcaagcatggataaaagcaacaaaaaaaaccccaaatcctacacagttttcagatacaacagcttcatatactctataccaggggtccccaactctataccaataccccctatg

SEQ ID NO: 10962 - DNA, 120 bp, synthetic construct
  misc_feature 1..120: note = Artificially Synthesized Probe
  source 1..120: mol_type = other DNA
attttcccacctaaaaagaggtttaagaaagggtaatgtttctgaggatggctcctgccaaggattgagaaaagtcatttttctcagcacttctgtagaagttgtgaggaaaaagggaac

SEQ ID NO: 10963 - DNA, 120 bp, synthetic construct
  misc_feature 1..120: note = Artificially Synthesized Probe
  source 1..120: mol_type = other DNA
cttttttatctctttgctaagtcacaggttagcattcaaggcaggcccatcattctgtaggacattgggaatatgtgcttacctcttcatttttaaacacttctgcctccttaatgtctg

SEQ ID NO: 10964 - DNA, 120 bp, synthetic construct
  misc_feature 1..120: note = Artificially Synthesized Probe
  source 1..120: mol_type = other DNA
aagactgactgggaaggccaagaattatttcaggtggttggtcacccgatagtgtctggcaagtcccattctggattttggaggcttatcttcatctttagttctattttgtctatatat

SEQ ID NO: 10965 - DNA, 120 bp, synthetic construct
  misc_feature 1..120: note = Artificially Synthesized Probe
  source 1..120: mol_type = other DNA
gcgtgaaccaccacacccgggcataatactcctggccagaaaaaaagctttagaaaatacttttatcgtgtagttacagaatcattaaggtttaaacttccagttatgtatcttataggg

SEQ ID NO: 10966 - DNA, 120 bp, synthetic construct
  misc_feature 1..120: note = Artificially Synthesized Probe
  source 1..120: mol_type = other DNA
tcggtggggctgatgtttgacctaaggactattagtactaactggtataggatggaataaattagaatttaaacatctagggaagatggtttttccttgtccccttatttgggactctgc

SEQ ID NO: 10967 - DNA, 120 bp, synthetic construct
  misc_feature 1..120: note = Artificially Synthesized Probe
  source 1..120: mol_type = other DNA
ttcaaattattaactcatttagttatctggatgccatcataatagaaaaatcagacacacacagttgctgcttccacagtctctcagacaaagtaactggcagcctaggcttttcccact

SEQ ID NO: 10968 - DNA, 120 bp, synthetic construct
  misc_feature 1..120: note = Artificially Synthesized Probe
  source 1..120: mol_type = other DNA
tatcttaataaaatggagaaaacagcaaagactcagtaaatactaacatgtgggttatttcatgcccaaacctccccaccctaaaccctagcaattcagccctcctgagtttcccttttt

SEQ ID NO: 10969 - DNA, 120 bp, synthetic construct
  misc_feature 1..120: note = Artificially Synthesized Probe
  source 1..120: mol_type = other DNA
cactccctaattaggaaaagaaaagcctgtctcctttaatagaaaaacctcttacagtgctcgagagtgtcttaggaaatgatatccttgggaataagtgccatgcagaatgaaaagcag

SEQ ID NO: 10970 - DNA, 120 bp, synthetic construct
  misc_feature 1..120: note = Artificially Synthesized Probe
  source 1..120: mol_type = other DNA
gaaccacagtgatagagcagatacttgttctaccctgagttgttccgaggtttatagtcccaaagcaacagagaaacaaatcatgattcttgttcaccaaaacttgtcaatcattcctga

SEQ ID NO: 10971 - DNA, 120 bp, synthetic construct
  misc_feature 1..120: note = Artificially Synthesized Probe
  source 1..120: mol_type = other DNA
ctaaaacacttgcctgaggttagacatcttcttctgtggtgaggctggatttcaaatttagaccatttgactgtagcacttatatgatgagcacgctgtttagtgttatagtgttggtct

SEQ ID NO: 10972 - DNA, 120 bp, synthetic construct
  misc_feature 1..120: note = Artificially Synthesized Probe
  source 1..120: mol_type = other DNA
ccaggcatttctatgatgtggctgcttttaacaacaacttgtttgatctgtggaactttaaatgctggtggattccttgatttggaaaatgaagtgaatcctgaggtgtggatgaatact

SEQ ID NO: 10973 - DNA, 120 bp, synthetic construct
  misc_feature 1..120: note = Artificially Synthesized Probe
  source 1..120: mol_type = other DNA
ttggattagtctttaaatagttatcagggaggctcactctttgcctgataattctctgaagacagacaggaacctaaaaatacaaacagcaagactgatcttgctaactgcaaccagagg

SEQ ID NO: 10974 - DNA, 120 bp, synthetic construct
  misc_feature 1..120: note = Artificially Synthesized Probe
  source 1..120: mol_type = other DNA
aacttctcatcaacaatatgagatgggtaccactaatagtcaccatttcacaaatgatgaaattaaggcacaaccggttatgttaagaggcctaaagtccacaaatagcaagctgacaga

SEQ ID NO: 10975 - DNA, 120 bp, synthetic construct
  misc_feature 1..120: note = Artificially Synthesized Probe
  source 1..120: mol_type = other DNA
tgcaggttatgatgtatggatgggaaacagtcggggaaacacttggtcaagaagacacaaaacactctcagagacagatgagaaattctgggcctttaggtaaatattagctaagaaaac

SEQ ID NO: 10976 - DNA, 120 bp, synthetic construct
  misc_feature 1..120: note = Artificially Synthesized Probe
  source 1..120: mol_type = other DNA
gctagaacagagtgtgtattcctactacattaataaaacattcagtacccactgaaagtttgagaatagtggaggaatagaatagaatgttatagtctgagttcttgggcaggggcaagc

SEQ ID NO: 10977 - DNA, 120 bp, synthetic construct
  misc_feature 1..120: note = Artificially Synthesized Probe
  source 1..120: mol_type = other DNA
ggacattcacttggcactacaataggtatgtttatgagggtcactgttaggtgtgtttttgagggtcagttttctcagagtcttacaggagttcacctttatgttggaataaaacaactg

SEQ ID NO: 10978 - DNA, 120 bp, synthetic construct
  misc_feature 1..120: note = Artificially Synthesized Probe
  source 1..120: mol_type = other DNA
caaaaatgccaccaataggcaaataattacagtatctaacacttattgagcattcgttatgtgtagggtcttgtgttcaggaccttccccacagtatctccctctgatcttcaaaacaac

SEQ ID NO: 10979 - DNA, 120 bp, synthetic construct
  misc_feature 1..120: note = Artificially Synthesized Probe
  source 1..120: mol_type = other DNA
gggaagagtctagagggttgaaaaacacccagtaagacactgggagcagtgaaatttcattccatagtgagaaagaaaacctgttagaataactgggtgatgctgcagaaagaaatcaat

SEQ ID NO: 10980 - DNA, 120 bp, synthetic construct
  misc_feature 1..120: note = Artificially Synthesized Probe
  source 1..120: mol_type = other DNA
gcatgtctgtgccatagtatctgcaggttctgtaatacaatttactatacaaggtcatcagcaggctgagtatatgtcagaatttctagctgaactgagtgctatatgacaacaaggatt

SEQ ID NO: 10981 - DNA, 120 bp, synthetic construct
  misc_feature 1..120: note = Artificially Synthesized Probe
  source 1..120: mol_type = other DNA
tacttttcagcctgagagctggctaatctgggacagtactcgaatgcagtgtacacatgggtaacatggaaaaccccgattttcccttatattcaaggtattatttgaccttaagaaaaa

SEQ ID NO: 10982 - DNA, 120 bp, synthetic construct
  misc_feature 1..120: note = Artificially Synthesized Probe
  source 1..120: mol_type = other DNA
gatatgtagcgaatttatgtccttatgggctggatccaacaagaaaaatatgaatcaggtatgtatgataattatagggccatttgataccttaagaaattccagctttcctttgactca

SEQ ID NO: 10983 - DNA, 120 bp, synthetic construct
  misc_feature 1..120: note = Artificially Synthesized Probe
  source 1..120: mol_type = other DNA
attcaacaggttctttagttcactttgttgatggtctcctttgctttgcagaagctttttagcttgacgtaatctaatttgttcatgtttgctttggttgcctgtgcatttgagggctta

SEQ ID NO: 10984 - DNA, 120 bp, synthetic construct
  misc_feature 1..120: note = Artificially Synthesized Probe
  source 1..120: mol_type = other DNA
accatgaaggtagatgtctgctatacatagaagattaagtactcaacaaaccttgaatatgaagactggggaagtgaataggcagcttcactcttctattccctggtgaaatttaggaga

SEQ ID NO: 10985 - DNA, 120 bp, synthetic construct
  misc_feature 1..120: note = Artificially Synthesized Probe
  source 1..120: mol_type = other DNA
ttccttctacttcaaaataagcaaattatcctacagattcagagctggtacaggtgtgctgtcaagcagcccattccattagtcagcttgtggttcactcacattaaagtattgacctaa

SEQ ID NO: 10986 - DNA, 120 bp, synthetic construct
  misc_feature 1..120: note = Artificially Synthesized Probe
  source 1..120: mol_type = other DNA
catctttctgttgagccccgtttgtcataattgtaaaatgggtggttacatccttctggtgatctaggagccctattttcgtcctagcatacagcatttttctaaaatttgctgttagct

SEQ ID NO: 10987 - DNA, 120 bp, synthetic construct
  misc_feature 1..120: note = Artificially Synthesized Probe
  source 1..120: mol_type = other DNA
aatgaaacaaaatcaacacgcacattcaagatcattatggtcaagtactaaagtatgtgagagtgttaatgtccttagaatttgtccacagttagctggtcctactctgctccaagccgg

SEQ ID NO: 10988 - DNA, 120 bp, synthetic construct
  misc_feature 1..120: note = Artificially Synthesized Probe
  source 1..120: mol_type = other DNA
cttatttaaagtcacccatggcttttaattgccaaattcaatggcctatcttcaccttttgaaatgtgttatgttcgttaccacagtctccttgaaactcagtcccctgacttggacttc

SEQ ID NO: 10989 - DNA, 120 bp, synthetic construct
  misc_feature 1..120: note = Artificially Synthesized Probe
  source 1..120: mol_type = other DNA
aaatcaagagtcttcattactttaagctattgccagattggaaccactttgattttgtctggggcctcgatgcccctcaacggatgtacagtgaaatcatagctttaatgaaggcatatt

SEQ ID NO: 10990 - DNA, 120 bp, synthetic construct
  misc_feature 1..120: note = Artificially Synthesized Probe
  source 1..120: mol_type = other DNA
cctccatcttaaaagcaatgagaagccaccaaaatattttacctaatggaaacctgattgccgcatttttgtaaccaccactttggctgctacatagagaatggattagaagatgccaac

SEQ ID NO: 10991 - DNA, 120 bp, synthetic construct
  misc_feature 1..120: note = Artificially Synthesized Probe
  source 1..120: mol_type = other DNA
tctcaaagggcttataaccaaaaaaggctaggacccagagcttcatgtgtttaaatagggaatcttccactctagtcccctttatcacagtgtgttgttcagaacaagatatagaaaagg

SEQ ID NO: 10992 - DNA, 120 bp, synthetic construct
  misc_feature 1..120: note = Artificially Synthesized Probe
  source 1..120: mol_type = other DNA
tcccctggtgtgagatatgtgatacatgataatcttttattatcaagtctaattccaaaatacatgatcagttacagtagttttcatgtggatttaaggagtgatggttacctttgtaca

SEQ ID NO: 10993 - DNA, 120 bp, synthetic construct
  misc_feature 1..120: note = Artificially Synthesized Probe
  source 1..120: mol_type = other DNA
ctatcatgctacttcacctaattctggctgctgttcatttggggaatgctatattggactattcttgaaacaatatatataaaatcaagcaaggcacgtgacagtcaggctttaggttgg

SEQ ID NO: 10994 - DNA, 120 bp, synthetic construct
  misc_feature 1..120: note = Artificially Synthesized Probe
  source 1..120: mol_type = other DNA
atgttcaccaaacatagctctgccatctctagaaatacaagccgttcactgaaaatacattcctacaacaattggtgtgaatatgacctcatttattcattgaaccctgttgcccagcat

SEQ ID NO: 10995 - DNA, 120 bp, synthetic construct
  misc_feature 1..120: note = Artificially Synthesized Probe
  source 1..120: mol_type = other DNA
ttctaaaccaaaaaaatgggagtgattaaatgccggcttgtcagactttataatcatttctgttgtttattggggacttttggcaggaatgggaaatactcttctcctaccaccaacttg

SEQ ID NO: 10996 - DNA, 120 bp, synthetic construct
  misc_feature 1..120: note = Artificially Synthesized Probe
  source 1..120: mol_type = other DNA
tatttgcttaagaagatcgctatatacatgtttgcttgtaaatgcctagaagagttctagtaagatacaaaaggatctggtaactttagctgtctctggaatgccagaggaatgcctggg

SEQ ID NO: 10997 - DNA, 120 bp, synthetic construct
  misc_feature 1..120: note = Artificially Synthesized Probe
  source 1..120: mol_type = other DNA
aaatccaagagccagggctgagcacagcattcagactatcagcaccatcatttccttgccttttgtggtatcaaaggcaagctaaggtgtataagtttactgaagattttcattttccta

SEQ ID NO: 10998 - DNA, 120 bp, synthetic construct
  misc_feature 1..120: note = Artificially Synthesized Probe
  source 1..120: mol_type = other DNA
ttggcattctgtctaagttcactgcacagtaagtactctgagagcccacagacacctcagtaaaagcaaaaccacttgtgtctgctaattaaaacacacatgaataccagctgagctgct

SEQ ID NO: 10999 - DNA, 120 bp, synthetic construct
  misc_feature 1..120: note = Artificially Synthesized Probe
  source 1..120: mol_type = other DNA
cacaactgccacttcctcagtgttgcttttgttcttaacattccctagggaagatgacctcctttccaacttcttacattatatccccatctagtttttgtcctctgtagagatattcat

SEQ ID NO: 11000 - DNA, 120 bp, synthetic construct
  misc_feature 1..120: note = Artificially Synthesized Probe
  source 1..120: mol_type = other DNA
tataatattatttatcttgattatgaagtttttaagcatccctttcaattttgtacccaagagaaatgtgtcacttgcctagcccttgtctgtccccttcttgtggctctgtctcagggg

SEQ ID NO: 11001 - DNA, 120 bp, synthetic construct
  misc_feature 1..120: note = Artificially Synthesized Probe
  source 1..120: mol_type = other DNA
gaagggagtttggattttccctgccctcacatcttcctcttcctttgtctccatcctgtatccagactcctttaggagaatttatgaagcatgtccacagtaagattcaaattattattt

SEQ ID NO: 11002 - DNA, 120 bp, synthetic construct
  misc_feature 1..120: note = Artificially Synthesized Probe
  source 1..120: mol_type = other DNA
ttgtcaacggaatccatccagtagcctctggcatttcaagcaaagattccttcagaaatacatctaataatagttgttcatcttcactgagcattcattataccccatgcactcttctgg

SEQ ID NO: 11003 - DNA, 120 bp, synthetic construct
  misc_feature 1..120: note = Artificially Synthesized Probe
  source 1..120: mol_type = other DNA
ggatgttcaactgcactggagttaagttttttgaagggaagcacatttcatgcccaatcactactaaaattctatctgtccagcctgatataggataatagatgtgtgagctcagagatc

SEQ ID NO: 11004 - DNA, 120 bp, synthetic construct
  misc_feature 1..120: note = Artificially Synthesized Probe
  source 1..120: mol_type = other DNA
tggggtcatctgcatcatctaaggtgcccttgggaaagaaagcagaaaaagaaaaattactgatttttcctcctcttctttgaatggtcacaaattaattctgtgaccacacagtaagcc

SEQ ID NO: 11005 - DNA, 120 bp, synthetic construct
  misc_feature 1..120: note = Artificially Synthesized Probe
  source 1..120: mol_type = other DNA
gggcccttccctgctcctgagtaaatttcacacttatataaatcaggcataattttcctaacctctcttcctcaaaagcacttgaaatttacagggctggaaaataaaggcttcctttca

SEQ ID NO: 11006 - DNA, 120 bp, synthetic construct
  misc_feature 1..120: note = Artificially Synthesized Probe
  source 1..120: mol_type = other DNA
aaaattgaatctacagaattcttaaaataagaatttgctcatgttaacatctctcaagattcaaatgcttcagaattctcagtgcagccatctcctgccctccatggtgggtactcacgc

SEQ ID NO: 11007 - DNA, 120 bp, synthetic construct
  misc_feature 1..120: note = Artificially Synthesized Probe
  source 1..120: mol_type = other DNA
ggttttgctgggacatactgcattcaaaccttcttgaagttagggccataggcagcctatgattagtgactcataaaaaaaattcactcctctcaaatataatattgtgctccatcctgc

SEQ ID NO: 11008 - DNA, 120 bp, synthetic construct
  misc_feature 1..120: note = Artificially Synthesized Probe
  source 1..120: mol_type = other DNA
aacctagttggagtgccctgaagccagtttccaagtcctctgtgattttccctcaaaccttctagaacagtagtgcctatatattgtaaagaccgtgtccttgactatgggtaacttctt

SEQ ID NO: 11009 - DNA, 120 bp, synthetic construct
  misc_feature 1..120: note = Artificially Synthesized Probe
  source 1..120: mol_type = other DNA
gtttttgtatattacttgagcatcctccactggctaagccaggctcagcacttggagatgcttgtacatggtgagtgtgttgatgaaataattacaagacttttgaaatggcaagaacat

SEQ ID NO: 11010 - DNA, 120 bp, synthetic construct
  misc_feature 1..120: note = Artificially Synthesized Probe
  source 1..120: mol_type = other DNA
gttgtctcccgcctcctgtgacctagtttgctgaataagcaacaatacagcctaggaaactaaaaaacaagtcactgaagcactagacataatgttcaagagatcctcgtaaagaaaaga

SEQ ID NO: 11011 - DNA, 120 bp, synthetic construct
  misc_feature 1..120: note = Artificially Synthesized Probe
  source 1..120: mol_type = other DNA
ttactgggggaagaaatttagccaaacggcaatctgcttggttgcaatctaaatcagaatgtgaatgttgctgtaagaacaggcactgttaaagttactatcaaacagtgggaaacactg

SEQ ID NO: 11012 - DNA, 120 bp, synthetic construct
  misc_feature 1..120: note = Artificially Synthesized Probe
  source 1..120: mol_type = other DNA
agaatatggtagaagtgatggcaaatcccttcccatattaggttataaaagacactatgacttccgtcttggtctcacttgccatctctttataagagaagagaagtggaaccaagagga

SEQ ID NO: 11013 - DNA, 120 bp, synthetic construct
  misc_feature 1..120: note = Artificially Synthesized Probe
  source 1..120: mol_type = other DNA
ttaccttgtaggaagcatctcattctaaccttaagtactctcttgatgaagtacggggccaagagattttggaattctaccacacaaggttgctcagcattccaagaagtattgataact

SEQ ID NO: 11014 - DNA, 120 bp, synthetic construct
  misc_feature 1..120: note = Artificially Synthesized Probe
  source 1..120: mol_type = other DNA
aggcaggatacatgtgttgagtagttgtttctacatcccaaggttttactgtacttacatcccaactacagtgctttctttaggaatgcatatggaaggacattgatacaagtaactttc

SEQ ID NO: 11015 - DNA, 120 bp, synthetic construct
  misc_feature 1..120: note = Artificially Synthesized Probe
  source 1..120: mol_type = other DNA
taccctgaccgaagcatgaacatttgcatgtgttccaatttatctaattgtggatatattaacattttttctccttccagatggtgatgtgaaaaagggcaaccgttggaactcagtcac

SEQ ID NO: 11016 - DNA, 120 bp, synthetic construct
  misc_feature 1..120: note = Artificially Synthesized Probe
  source 1..120: mol_type = other DNA
tccaccaggaaatacctcctttagaagttaagttacattgcatagcatgtcgtccatctgagtcaaggtataccaccctagaggcagagaagaggtcatggataatttcaaatagaaata

SEQ ID NO: 11017 - DNA, 120 bp, synthetic construct
  misc_feature 1..120: note = Artificially Synthesized Probe
  source 1..120: mol_type = other DNA
atataaaataagataaaatactcaagttcccttttggatttggaagcaaaaacagctgctgcaacaatgagtggctttccttctgagttcatcaagaggggagccagacgtggatctgat

SEQ ID NO: 11018 - DNA, 120 bp, synthetic construct
  misc_feature 1..120: note = Artificially Synthesized Probe
  source 1..120: mol_type = other DNA
tttctccatgtttcagcacatggtcttggcattaataatccatcgtgaaatgatttgtaatgcacaggggtgacatttgattatgtgaaaggcattgcaggaatgagcatgtaggctctt

SEQ ID NO: 11019 - DNA, 120 bp, synthetic construct
  misc_feature 1..120: note = Artificially Synthesized Probe
  source 1..120: mol_type = other DNA
ttgttattcattcatttggctattcacttaacacaatttattaggcactttatgcactgtatgcgaaacacagtgcttgaggtcatggggaacataaggatacacaccccatccctggaa

SEQ ID NO: 11020 - DNA, 120 bp, synthetic construct
  misc_feature 1..120: note = Artificially Synthesized Probe
  source 1..120: mol_type = other DNA
gatctacctttaagcagaatgctgtctctaagtcccacataaccacagagctgtgcttttcttttgttatgattctgcttggaatatgttgggccatttccatttgacaacctatgcttt

SEQ ID NO: 11021 - DNA, 120 bp, synthetic construct
  misc_feature 1..120: note = Artificially Synthesized Probe
  source 1..120: mol_type = other DNA
tttgaaagcagtttttgattagccttaaaattaccccaggactgcattctgctctttgcatttgttcatgtgaacctggagtttctctagctcttctttactttcacagtacgtttctcc

SEQ ID NO: 11022 - DNA, 120 bp, synthetic construct
  misc_feature 1..120: note = Artificially Synthesized Probe
  source 1..120: mol_type = other DNA
tccgcttagaaatgtagaagttcaacccatatctcttccttgagcttcagatcttactttttttttggataggggagggcgattgctgttctctgtttggcttccaggtacttcatactt

SEQ ID NO: 11023 - DNA, 120 bp, synthetic construct
  misc_feature 1..120: note = Artificially Synthesized Probe
  source 1..120: mol_type = other DNA
ttaccagtttacaaaaaggtttactttattttagcccaatgaactttcactgacaaattaatggctacttcttacctgaaagttgccaaaacagcttccccctgggagggtcacgtaact

SEQ ID NO: 11024 - DNA, 120 bp, synthetic construct
  misc_feature 1..120: note = Artificially Synthesized Probe
  source 1..120: mol_type = other DNA
ccccagtctaaacgagaatgaaaggcagttgtagaataagcaggaggctggaaaaatccatgagtgaaactaataacatgaagaccttgttaagaacaaggtctgttcgagtatttcaga

SEQ ID NO: 11025 - DNA, 120 bp, synthetic construct
  misc_feature 1..120: note = Artificially Synthesized Probe
  source 1..120: mol_type = other DNA
gcatctatgccctttgccattatcctgaatatattcttggatctgctttaaaattctggacagtgacatttttcagtgagtctggagtatctcagagtgtgatctggaggcaaaatcatt

SEQ ID NO: 11026 - DNA, 120 bp, synthetic construct
  misc_feature 1..120: note = Artificially Synthesized Probe
  source 1..120: mol_type = other DNA
tactttgtcagtcagttgttgactggtgtttagctgagaagtggaggaggaagttgaggacccatgatagtctaggtaaaatgcatgataatctagggaaaatgaacacaagaattttgg

SEQ ID NO: 11027 - DNA, 120 bp, synthetic construct
  misc_feature 1..120: note = Artificially Synthesized Probe
  source 1..120: mol_type = other DNA
attcctggttttcagtccttatttacttgacttcttagctgtgtttgataaagctgataactttcttctagaaaccttgtctccctaggcttttcctcctcagtctgcatctcttcctga

SEQ ID NO: 11028 - DNA, 120 bp, synthetic construct
  misc_feature 1..120: note = Artificially Synthesized Probe
  source 1..120: mol_type = other DNA
ccagtacttccattcatcctcctggaatgcccttctttccactgtctattgtcttcttgaatggtacctactctttttcaagacttgcttccagcatcagtttctcaaaaacaaaaacaa

SEQ ID NO: 11029 - DNA, 120 bp, synthetic construct
  misc_feature 1..120: note = Artificially Synthesized Probe
  source 1..120: mol_type = other DNA
cttccacctcagggtcaggaagctacagtcgaaaacacattatctatggctttgcattatttctccgaaagtttagtaaagttctttttgaaaagtttctactctctcccagtggacact

SEQ ID NO: 11030 - DNA, 120 bp, synthetic construct
  misc_feature 1..120: note = Artificially Synthesized Probe
  source 1..120: mol_type = other DNA
tgtaagtgaggttttcattttccccttcctgaagcttcctttcttttattataaaggtcagcattgaggctttcccagttaactgatgaagacatccagcaacatggaacaccttggtta

SEQ ID NO: 11031 - DNA, 120 bp, synthetic construct
  misc_feature 1..120: note = Artificially Synthesized Probe
  source 1..120: mol_type = other DNA
atgtgctgaccctgaccttgatgctatgaagtaatagaaaaatccaagacgggtctctgcccacggagatttacaatccgactggggaaataatatattcatcatataattagtgaacaa

SEQ ID NO: 11032 - DNA, 120 bp, synthetic construct
  misc_feature 1..120: note = Artificially Synthesized Probe
  source 1..120: mol_type = other DNA
ggcatgagttcattacacaataaaatatgcactgaatcttgtctctccactttttatcaacagacaggaagtttccttagtagttaaaagcctgttctctgaagccagactgtctgggtt

SEQ ID NO: 11033 - DNA, 120 bp, synthetic construct
  misc_feature 1..120: note = Artificially Synthesized Probe
  source 1..120: mol_type = other DNA
tttaagacttacatgaggaaatattctagctgggtagaatttctcttgtcgaaaacaaagacaaattggaaaggctgccatttaaggataaatcattaagaggctttcaagatgattacc

SEQ ID NO: 11034 - DNA, 120 bp, synthetic construct
  misc_feature 1..120: note = Artificially Synthesized Probe
  source 1..120: mol_type = other DNA
cttctttcattcccactccttaccccaaacatattcctgaggaaattatgatccttcaggttgttttacaaagttaacctctcaggagactctgcaaaacatgcaaaagggatatcatac

SEQ ID NO: 11035 - DNA, 120 bp, synthetic construct
  misc_feature 1..120: note = Artificially Synthesized Probe
  source 1..120: mol_type = other DNA
tcatctggctatcaacttaaccctgcatgtaattagcctgtgataatggagtcagaagataaatggcttaaaagggtcttggcacagtttatttcatcgtaaaggagaacacctgacagt

SEQ ID NO: 11036 - DNA, 120 bp, synthetic construct
  misc_feature 1..120: note = Artificially Synthesized Probe
  source 1..120: mol_type = other DNA
tcagaagttgttaaaattgagttcagactaacaaatcttaactgttaaaaacaacagcaaccaccaccaaagacctctggtgagatgggagagcagtcaatgaagaggtcccagatttga

SEQ ID NO: 11037 - DNA, 120 bp, synthetic construct
  misc_feature 1..120: note = Artificially Synthesized Probe
  source 1..120: mol_type = other DNA
gagaaagtttgccctgattttggccttcagtcagtgaaagtggtttctcctcataggcatgtttgacatttacaaatcttgcatcttgtctgagttggcaaatggtttcttgctaagaaa

SEQ ID NO: 11038 - DNA, 120 bp, synthetic construct
  misc_feature 1..120: note = Artificially Synthesized Probe
  source 1..120: mol_type = other DNA
gtactgctattacaacactaatgacatggtaactagcacttctgagaggcaatgtctcatagtgtttcaaggtaaggagttggaagacagaatttgattcctggctctatcacatactag

SEQ ID NO: 11039 - DNA, 120 bp, synthetic construct
  misc_feature 1..120: note = Artificially Synthesized Probe
  source 1..120: mol_type = other DNA
cttttgttcaactgggctgggttttaaaaattcttggatcagctttcatcttgtaggaaagtaaggtagcaatttttcttaaggaattggcagtgatgtgctcaagtgctcagctctttc

SEQ ID NO: 11040 - DNA, 120 bp, synthetic construct
  misc_feature 1..120: note = Artificially Synthesized Probe
  source 1..120: mol_type = other DNA
ttttatccctcactagtgaatcagttctattgtaggagagagacattctttcctccccttttcgcttaaaaaacataacaaacctgaatagactccaggctagagtagtggagagagtga

SEQ ID NO: 11041 - DNA, 120 bp, synthetic construct
  misc_feature 1..120: note = Artificially Synthesized Probe
  source 1..120: mol_type = other DNA
tcattaagtcttaggcaggtcttggattgtagaagagacttctaagtagttagcaagatgtatcactgacagaataacccagtgcctaatgcctgtaggtgaaatgaaatcgttcttctg

SEQ ID NO: 11042 - DNA, 120 bp, synthetic construct
  misc_feature 1..120: note = Artificially Synthesized Probe
  source 1..120: mol_type = other DNA
acacaccattgaagagggaacagaaaccaggccctgggacgctagagaccccaagagctacctggctgggtctatggtcagggctgtagtggaggaaggtgtcaggatggccattgtctc

SEQ ID NO: 11043 - DNA, 120 bp, synthetic construct
  misc_feature 1..120: note = Artificially Synthesized Probe
  source 1..120: mol_type = other DNA
tgtcccccgcctgggaaggtggggagaggaacctactgctcatggtgtggcgtctccaccatcaggccagtcctggcgcaaggtgcctgggggtttcggtccacggggcagtccgaggct

SEQ ID NO: 11044 - DNA, 120 bp, synthetic construct
  misc_feature 1..120: note = Artificially Synthesized Probe
  source 1..120: mol_type = other DNA
tcctggctttgagtctctttgggtctgggtgtgtgatggatgatgattcttctctccccaagtctgaattacgccaggaaaaccgggaagacagagaccctctgggtggaggagggtccc

SEQ ID NO: 11045 - DNA, 120 bp, synthetic construct
  misc_feature 1..120: note = Artificially Synthesized Probe
  source 1..120: mol_type = other DNA
tttttgaggagccattttaccctcccagcaacagccgagtgactcgatttcttggtatctttgccagcatgtggggttgttgctacttttattccagccgttttgatgggtgtgcagtgg

SEQ ID NO: 11046 - DNA, 120 bp, synthetic construct
  misc_feature 1..120: note = Artificially Synthesized Probe
  source 1..120: mol_type = other DNA
ctcgggatgggtgtgagtggtgtctcgggatgggtgtgagtggtgtctcgggatgggtgtgagtggtgtcacgggatgggtgtgagtggtgtctcgggatgggtgtgcgtggtgtcacgg

SEQ ID NO: 11047 - DNA, 120 bp, synthetic construct
  misc_feature 1..120: note = Artificially Synthesized Probe
  source 1..120: mol_type = other DNA
agtggtgtcacgggacgggtgtgagtggtgtctcgggacgggtgtgcagtgatgtctcgggacgggtgtgcactgatgtcacgggacgggtgtgcagtggtgtctcgggacgggtgtgag

SEQ ID NO: 11048 - DNA, 120 bp, synthetic construct
  misc_feature 1..120: note = Artificially Synthesized Probe
  source 1..120: mol_type = other DNA
gtgcagtggtgttatggtggtttttgcttctctaatgacaggcatttctcctgagcttatctgtcatctgtgcaccttctttggtgaaacgtctctgtgctcattttctaataagattat

SEQ ID NO: 11049 - DNA, 120 bp, synthetic construct
  misc_feature 1..120: note = Artificially Synthesized Probe
  source 1..120: mol_type = other DNA
ccatggaattgcatgtctgtccctctgtcaatactacactgtgttgactactgtagttctgtgtcttgaaactgggtagattgattcgttccaccttgttctctttcaaaatggttttag

SEQ ID NO: 11050 - DNA, 120 bp, synthetic construct
  misc_feature 1..120: note = Artificially Synthesized Probe
  source 1..120: mol_type = other DNA
gtagctggtaacgtgtggatctcatcgactgattctcaaatacggaaccaaccttcatccctggaataatccctacttggtcatggcatagaattctttgttatatattggcaaattcta

SEQ ID NO: 11051 - DNA, 120 bp, synthetic construct
  misc_feature 1..120: note = Artificially Synthesized Probe
  source 1..120: mol_type = other DNA
atccaagttataaaatttatgtatgtagatgtttgtcgtagtcgcttattatccttttcagattgcagggtctgtagtgatatctctttttcgtttcgagacagaatcttgtggtgtcgc

SEQ ID NO: 11052 - DNA, 120 bp, synthetic construct
  misc_feature 1..120: note = Artificially Synthesized Probe
  source 1..120: mol_type = other DNA
gaaagaagggtgttgaaacatccagccgtaattgttgatttgtcgagctctcctttcagttctttttcttcacatgttttgcagatctgtgcttagtgcacacacttaggattgctacat

SEQ ID NO: 11053 - DNA, 120 bp, synthetic construct
  misc_feature 1..120: note = Artificially Synthesized Probe
  source 1..120: mol_type = other DNA
ctcttagtataggttgttttttactggctgttcttggcacgtaacttacagtctactgatgtcattttaccacttcaagttaagcatagaaacctcacctctatgtccatttgccctcat

SEQ ID NO: 11054 - DNA, 120 bp, synthetic construct
  misc_feature 1..120: note = Artificially Synthesized Probe
  source 1..120: mol_type = other DNA
cactctaatacctccctcatcttggtgctatcatctgtcgactgtcctttttcaccaatgtcttcctgtttcctgctgtgacaagtaatttttccactgaaaactgaacattttgtgtat

SEQ ID NO: 11055 - DNA, 120 bp, synthetic construct
  misc_feature 1..120: note = Artificially Synthesized Probe
  source 1..120: mol_type = other DNA
tccagctgccaaacatgtgtatcatggagacgggagagatgtgccgtgtggcagtgttcaataatgttttccctaaatgttaactcattactggttcacataaaatagttactgcttttc

SEQ ID NO: 11056 - DNA, 120 bp, synthetic construct
  misc_feature 1..120: note = Artificially Synthesized Probe
  source 1..120: mol_type = other DNA
aaaaccttgtcctctggtcacaatgctcagggtccttagtgtctccctgtgcaccccagctcccctgcgtggagtctggaaagtcatccctggtatggagaggagggtgacttcccccat

SEQ ID NO: 11057 - DNA, 120 bp, synthetic construct
  misc_feature 1..120: note = Artificially Synthesized Probe
  source 1..120: mol_type = other DNA
ggatgatccagtcgttgtgctcgtaggtctgggaggagaggtcgggctggagacggctgtgccactcgctgtccaggcacagcccctccggacgctcggctgtgccctccactccctcct

SEQ ID NO: 11058 - DNA, 120 bp, synthetic construct
  misc_feature 1..120: note = Artificially Synthesized Probe
  source 1..120: mol_type = other DNA
ctgtgccctgcaggatcacctccgcccgctccttggtgatgctgccgggagaccgaggcaggccaggcccacgtcacacaccggctgggccgagtggggtgcatgggtggggggggttcc

SEQ ID NO: 11059 - DNA, 120 bp, synthetic construct
  misc_feature 1..120: note = Artificially Synthesized Probe
  source 1..120: mol_type = other DNA
tcataccttccgaaggccccgtaagtgttgacgatgtgaagagagttgaagtgggtgttcatgacctgcctggagctcagcaagttgaggaccacgggcacgctgagccaggccagcagg

SEQ ID NO: 11060 - DNA, 120 bp, synthetic construct
  misc_feature 1..120: note = Artificially Synthesized Probe
  source 1..120: mol_type = other DNA
tcgacgtctaatgaagggactcgtgagggcagccacatcagtgttatgggcgatgatggtgttttatgaactgtgcactcatggctctccctgggtgaattgggaaaaatagcttttctg

SEQ ID NO: 11061 - DNA, 120 bp, synthetic construct
  misc_feature 1..120: note = Artificially Synthesized Probe
  source 1..120: mol_type = other DNA
ttgttatgaaaacgcagttccgcgtagagtgcacggcctgagcgctcctgggggacctcgccttccttgtttttcttctagcatcactgagccatctcctcagagggaaatcagtcttct

SEQ ID NO: 11062 - DNA, 120 bp, synthetic construct
  misc_feature 1..120: note = Artificially Synthesized Probe
  source 1..120: mol_type = other DNA
tgcatcacgctgtgaacgtgctggaggcccccgagttcacttcaaaagcatgaacttactttgcgttatctgtgttgtttcatcacaaccgaaacacagctaagggccggtgagcccagc

SEQ ID NO: 11063 - DNA, 120 bp, synthetic construct
  misc_feature 1..120: note = Artificially Synthesized Probe
  source 1..120: mol_type = other DNA
atgcttgggagggtccctgtctgcctgcaccagggcccgttggtccaattctcatctaaccccctggccaggttcctgcgttctgaataaacaaggacgtttttgaggcctctggttcaa

SEQ ID NO: 11064 - DNA, 120 bp, synthetic construct
  misc_feature 1..120: note = Artificially Synthesized Probe
  source 1..120: mol_type = other DNA
gggtggcagtgggacccggggctggcacagccggccctggccccacgcctgtgctcagcacaaccctccttgtgcgccctgtgggaagcacatgtgcccggggctccgtctgttgccctt

SEQ ID NO: 11065 - DNA, 120 bp, synthetic construct
  misc_feature 1..120: note = Artificially Synthesized Probe
  source 1..120: mol_type = other DNA
aacgagagagaaagatacaaagaacaaagagaaaaacacaaagatgtggaaatacgtccaaatatgtcagttgagatatacgggcctgttacttaaaagagaaagacggccacgctgacc

SEQ ID NO: 11066 - DNA, 120 bp, synthetic construct
  misc_feature 1..120: note = Artificially Synthesized Probe
  source 1..120: mol_type = other DNA
tgagaaaggtcaaggtcaccagagtcccacacttagccaccaagaggaggaagtgtgacttaaaagggcaccatttacaacatcaacaaaaagaagtcacctcagagctgcagcctacaa

SEQ ID NO: 11067 - DNA, 120 bp, synthetic construct
  misc_feature 1..120: note = Artificially Synthesized Probe
  source 1..120: mol_type = other DNA
ttttcctggctgtatgttacacctccattgaaacaatcgagagagagaaccacctttaaaatccccaccacattttccttgggaattgacagtcggaatgtagcgtttacagggaaaagc

SEQ ID NO: 11068 - DNA, 120 bp, synthetic construct
  misc_feature 1..120: note = Artificially Synthesized Probe
  source 1..120: mol_type = other DNA
tttgaagcaaaagcaaagtgttcatttttgtcttaaaatctttaccatctaaaagcaaagaatacacaccccagctgaaggagagacgacacctgtaaaccccgtgcccaacttgagaac

SEQ ID NO: 11069 - DNA, 120 bp, synthetic construct
  misc_feature 1..120: note = Artificially Synthesized Probe
  source 1..120: mol_type = other DNA
aggcctctgctcatttgcttagagggcaaagagttatttttgtttacactgaggctaggagaaaacatcatgacctgaaacttggctgtgagccgtgaggtgggtgtggcagtgtcgcat

SEQ ID NO: 11070 - DNA, 120 bp, synthetic construct
  misc_feature 1..120: note = Artificially Synthesized Probe
  source 1..120: mol_type = other DNA
gcaactgcagatggagaaaaatgacactgagtgataaagacggtgacaaatgtaacagacatggggctgacatgacccaatgctgtgttaaaaagagaagagcatcaggctcagctgtag

SEQ ID NO: 11071 - DNA, 120 bp, synthetic construct
  misc_feature 1..120: note = Artificially Synthesized Probe
  source 1..120: mol_type = other DNA
cccggcagagcctatcacaggaccaggagaaagagaagccacccagcggagcccatcgcaggaccaggagaaagaggagccacccagcggagcccattgcaggaccaggagaaagaggag

SEQ ID NO: 11072 - DNA, 120 bp, synthetic construct
  misc_feature 1..120: note = Artificially Synthesized Probe
  source 1..120: mol_type = other DNA
gcttcatgtcttttgaagctctattatcaggcgcatacgtgtttgagagtcttctgacctcctgataaacactgtgaaatggcctctttactcctgatcatattctttgctctgaattct

SEQ ID NO: 11073 - DNA, 120 bp, synthetic construct
  misc_feature 1..120: note = Artificially Synthesized Probe
  source 1..120: mol_type = other DNA
aggtggagggagaatgatcacagatggaaaaaagagctccggaaatggtaagtatatggatacacaatgaggctgttcttccaattgaatgaaatgtctctgaaagataactggactgtt

SEQ ID NO: 11074 - DNA, 120 bp, synthetic construct
  misc_feature 1..120: note = Artificially Synthesized Probe
  source 1..120: mol_type = other DNA
aggcagaaaatgaggacgtacagaagagttgaaaaacactattggccaatttgatctaatgaatcctgacagaacactgtctgttcatttttggctcaaacggaactttcactaagacaa

SEQ ID NO: 11075 - DNA, 120 bp, synthetic construct
  misc_feature 1..120: note = Artificially Synthesized Probe
  source 1..120: mol_type = other DNA
aaaacattctcttcttacaaaaaccaataaaacagccaggagacaaggcgagaagcctcggctcccagccgccggatgggattcaggcgtggttcccctaatggtgacatttacagtctt

SEQ ID NO: 11076 - DNA, 120 bp, synthetic construct
  misc_feature 1..120: note = Artificially Synthesized Probe
  source 1..120: mol_type = other DNA
tccgaaaggggtgtggaaggagcgccgtgggactgaatcagagtgttggatttcccgcagctttctagcaacagagttatgttcaactcccctaaaaagcaatggagaattgtttgcaac

SEQ ID NO: 11077 - DNA, 120 bp, synthetic construct
  misc_feature 1..120: note = Artificially Synthesized Probe
  source 1..120: mol_type = other DNA
tctcttggaacttggggatgccttccctgctgcttctggcttaaccgactgaatttgccggcaactgcctttcgttaccagcagatgaaaaaagcggtgagtgtggggtgtgaggctgcg

SEQ ID NO: 11078 - DNA, 120 bp, synthetic construct
  misc_feature 1..120: note = Artificially Synthesized Probe
  source 1..120: mol_type = other DNA
tgacaccctgacttcctgaaaccttcaccagtgcctcgtcatcaagacacacgggagggagcatcctcgtccgagacacaagtctgaggtgagaggggggatgcagctcctgtcccagct

SEQ ID NO: 11079 - DNA, 120 bp, synthetic construct
  misc_feature 1..120: note = Artificially Synthesized Probe
  source 1..120: mol_type = other DNA
ttttaaggacacagtcgttggatttggggctcagcagtccactctgacttcatcttaactaatcacaaggaggtcccagataaagccacgctccaagctccagggagagtgggtttgggc

SEQ ID NO: 11080 - DNA, 120 bp, synthetic construct
  misc_feature 1..120: note = Artificially Synthesized Probe
  source 1..120: mol_type = other DNA
gacaaagagaggagctcacgggtcctcagcaaggcggggcacttgatgggctatggagacatctcaagagcctgaagaataaagtcaggacacagccactaaatgcaggcacaaacgcct

SEQ ID NO: 11081 - DNA, 120 bp, synthetic construct
  misc_feature 1..120: note = Artificially Synthesized Probe
  source 1..120: mol_type = other DNA
gaccttacgtatgaaacactcaggaaggcagaatttgagaagggcagattcagggctgctttgaggacaggagtttagtgcacaccgcgggcgtgagcaacagtggcttcctttgcgcct

SEQ ID NO: 11082 - DNA, 120 bp, synthetic construct
  misc_feature 1..120: note = Artificially Synthesized Probe
  source 1..120: mol_type = other DNA
agatgattccttcacaagtcagaaacaaactgtcccctcttcccgctaaccctaaaatcaccgctgagacacagattcacatccagcgtctctcacacactggtgcatgggaggtgaaac

SEQ ID NO: 11083 - DNA, 120 bp, synthetic construct
  misc_feature 1..120: note = Artificially Synthesized Probe
  source 1..120: mol_type = other DNA
cagggagccccggggcggggtggggatggccacgagggaggaagacagggtgagggcgcccccctcaggcagaagcgtggggtacagcagggctgaggaggccgcggggggaggcccagg

SEQ ID NO: 11084 - DNA, 120 bp, synthetic construct
  misc_feature 1..120: note = Artificially Synthesized Probe
  source 1..120: mol_type = other DNA
gcacggtccacagacacgcctcggaggggttgtgaggctcagccacccacacgcaggctgcacggtccacagacacgcctcggaggggttgtgaggctcagccacccacacgcaggctgc

SEQ ID NO: 11085 - DNA, 120 bp, synthetic construct
  misc_feature 1..120: note = Artificially Synthesized Probe
  source 1..120: mol_type = other DNA
attatattcctcccatctattgatttctctctacattgcacatgtcagattttccacggatttttttttctcccagagcaagtgtcaaaggaacaaagccttctttgaggcttttcagcc

SEQ ID NO: 11086 - DNA, 120 bp, synthetic construct
  misc_feature 1..120: note = Artificially Synthesized Probe
  source 1..120: mol_type = other DNA
tcatgcctcagaacagtgggctgagcatcaaagtgaggtgggccagggtctccatggctcctgatgaaggggacccaggtcccccgtggcttcacattgaggacaaagctcttccctcag

SEQ ID NO: 11087 - DNA, 120 bp, synthetic construct
  misc_feature 1..120: note = Artificially Synthesized Probe
  source 1..120: mol_type = other DNA
gattggtttgccttccagaagttgctgccctagtcaccataccatgtaaattcctcttgctgtgatcacggttttaacttagaaatcagacagagcagattttggacttactgtattttt

SEQ ID NO: 11088 - DNA, 120 bp, synthetic construct
  misc_feature 1..120: note = Artificially Synthesized Probe
  source 1..120: mol_type = other DNA
gctcgattctgaccccaaaatggttcacactgtgggcttacgtattccacatttcagccgttgctttttcttcttgtgttaatgaggaccaagacagtttgcacacaaggagcatcagaa

SEQ ID NO: 11089 - DNA, 120 bp, synthetic construct
  misc_feature 1..120: note = Artificially Synthesized Probe
  source 1..120: mol_type = other DNA
gttgggagggggaaggtacagaaaacagatttccagcttttcaattctccaggggtcaaactaaaaatcaagtggtctcctctactgatattgtccaggtctgagaattcccagcaacaa

SEQ ID NO: 11090 - DNA, 120 bp, synthetic construct
  misc_feature 1..120: note = Artificially Synthesized Probe
  source 1..120: mol_type = other DNA
ctttgacacgactgaaataaactcatttaaagcagaaaacctggccgaaacacgggggaaatgctccagggctccaggagaagccgtctgtgcgtgcagccccggtgggatgtaggctgg

SEQ ID NO: 11091 - DNA, 120 bp, synthetic construct
  misc_feature 1..120: note = Artificially Synthesized Probe
  source 1..120: mol_type = other DNA
gtctctgctgtgtggtggtgacctctgcactgcccgtggggacgcctgtctctgctgcgtggtggtgacctctgcactgcctgtggggacgcctgtctctgctgtgtggtggtgacctct

SEQ ID NO: 11092 - DNA, 120 bp, synthetic construct
  misc_feature 1..120: note = Artificially Synthesized Probe
  source 1..120: mol_type = other DNA
ctctgcactgcccacaggacgcctgtctctgctgtgtggtggtgacctctgcactgcccacaggacgcctgtctctgctgtgtggtggtgacctttgcactgcccgtggggacgcctgtc

SEQ ID NO: 11093 - DNA, 120 bp, synthetic construct
  misc_feature 1..120: note = Artificially Synthesized Probe
  source 1..120: mol_type = other DNA
gtctctgctgcgtggggtgacctctgcatcgcccacaggacgcctgtctctgctgcgtggtggtgacctctgcaccgcccacaggacgcctgtctctgctgtgtggtggtgacctctgca

SEQ ID NO: 11094 - DNA, 120 bp, synthetic construct
  misc_feature 1..120: note = Artificially Synthesized Probe
  source 1..120: mol_type = other DNA
tattctatgttaccttcaagaagtgttaatggttttagcttttatgtttgcaatccatctcaaattaacgtttgtgtgtggtgacggaggggggttcacttatccaggtgcatatccaga

SEQ ID NO: 11095 - DNA, 120 bp, synthetic construct
  misc_feature 1..120: note = Artificially Synthesized Probe
  source 1..120: mol_type = other DNA
ggtccttggcatttccatatacatctaagagtcagtttatctgtttctggaaaaaacaatccttctgggattgcttgggatgtcatggaatctatagctcaaattggtgacgatggacag

SEQ ID NO: 11096 - DNA, 120 bp, synthetic construct
  misc_feature 1..120: note = Artificially Synthesized Probe
  source 1..120: mol_type = other DNA
ttaatcacacccaacacaggagtctatcaagtaattataccttttagtgcacctgataatttcttctccagctggcactagcaatcaatcaaaatgccataaaaggtgcttcccatgagc

SEQ ID NO: 11097 - DNA, 120 bp, synthetic construct
  misc_feature 1..120: note = Artificially Synthesized Probe
  source 1..120: mol_type = other DNA
agtgctcatcatgagaggccatgtaaccctcccagaaaaggaataaagggaattaggtgctcgcataccaccagggagcacctcaagaaatggccagttcactccatgcatggctgacgt

SEQ ID NO: 11098 - DNA, 120 bp, synthetic construct
  misc_feature 1..120: note = Artificially Synthesized Probe
  source 1..120: mol_type = other DNA
cgtcttcagcgaatcctccacgaaacacttaagcaaacagatgctcagagagcatatctgtacgacatggtttccaacacaaaaacatgaagattttatcattccagcccaaaatgaaaa

SEQ ID NO: 11099 - DNA, 120 bp, synthetic construct
  misc_feature 1..120: note = Artificially Synthesized Probe
  source 1..120: mol_type = other DNA
tcccatcctaaaacaacgagacataccaaaggtgagttaatggaagccacacatttcacaaagaaatcatttcagaaactcagtttaatggaaacggtccttgagacagggctgatcttg

SEQ ID NO: 11100 - DNA, 120 bp, synthetic construct
  misc_feature 1..120: note = Artificially Synthesized Probe
  source 1..120: mol_type = other DNA
cccaacggattcttcgcactggaaacccagcataagaatgcggatgcgggtcgccattccagtgctattctcagaggtgaggccaccgtgaatgtggctgctggaaactgcccacagctc

SEQ ID NO: 11101 - DNA, 120 bp, synthetic construct
  misc_feature 1..120: note = Artificially Synthesized Probe
  source 1..120: mol_type = other DNA
tctgttttctttgcttgggtcttgaggaattccagcagctgcgcggcgtgcacaagggctgccattgttctccgcctcagcgtggcggacaacgcgtccccaggaaagtcaataagcagc

SEQ ID NO: 11102 - DNA, 120 bp, synthetic construct
  misc_feature 1..120: note = Artificially Synthesized Probe
  source 1..120: mol_type = other DNA
gtttataatggaaatttaagatgaaatactcggaagagaaaatctgcagacaatggcgaatgccacatggcgcctcttggagtggcttcccagagctctagactttggaatcagttctca

SEQ ID NO: 11103 - DNA, 120 bp, synthetic construct
  misc_feature 1..120: note = Artificially Synthesized Probe
  source 1..120: mol_type = other DNA
ccatctccctctctcccatgaccattggtgacaaaattttactgccttggaatcagatggaaacgtggtttctctgaactaaatatccgagtgctaatcagtaatgttccgtagtgactg

SEQ ID NO: 11104 - DNA, 120 bp, synthetic construct
  misc_feature 1..120: note = Artificially Synthesized Probe
  source 1..120: mol_type = other DNA
cagctgaggcctcattaactctgtggaaactattttagttacttagggagagtcattaaatatagcacagatggatccttcaaaaatgacagccaccatccacgttagaaacaggaaatc

SEQ ID NO: 11105 - DNA, 120 bp, synthetic construct
  misc_feature 1..120: note = Artificially Synthesized Probe
  source 1..120: mol_type = other DNA
catcttttgtgaccatgtttgaaaaagcttcagagggacaagtgcaggctctgccactgaggcctgcggccttgggatgcctcgttggctccctggcagcaaatgaaggtatgtcaggaa

SEQ ID NO: 11106 - DNA, 120 bp, synthetic construct
  misc_feature 1..120: note = Artificially Synthesized Probe
  source 1..120: mol_type = other DNA
gggcattttctagtaaccagacatctctgaaagtgctggttaagggctttcgtgctttagataaaattacgttaactgcacgctctcagttatgaggaatttcgtggactgttacatatt

SEQ ID NO: 11107 - DNA, 120 bp, synthetic construct
  misc_feature 1..120: note = Artificially Synthesized Probe
  source 1..120: mol_type = other DNA
gcctcaagggccccggcccttcaggccttgaggcactcaaaggcagcctgcgtggctgagaagcacattttaaatcacatttaactttggttcacttggatgtgaatttaagtgaccacg

SEQ ID NO: 11108 - DNA, 120 bp, synthetic construct
  misc_feature 1..120: note = Artificially Synthesized Probe
  source 1..120: mol_type = other DNA
aaggaggcagtgatgacctcaggcccacgtcctggaggtcttggggagaaagacaggaagtgttttcctagaaacactggtgtgcagagaggactgggtttcagctacatcatgtggcag

SEQ ID NO: 11109 - DNA, 120 bp, synthetic construct
  misc_feature 1..120: note = Artificially Synthesized Probe
  source 1..120: mol_type = other DNA
ccaaatttggtaaaaagtaggcatatcatagtcaagaaactggcaacggaagataaaatccccaaagccatcagagaaacataacacgttacactggaacgtcaggaatgatagtcgact

SEQ ID NO: 11110 - DNA, 120 bp, synthetic construct
  misc_feature 1..120: note = Artificially Synthesized Probe
  source 1..120: mol_type = other DNA
gactacatagaaaatttaaaaacaaaacataagtaagagaatctacagaaataggcttagccgctgagaggtgttagcaaggtctgggcggaacattaaaaatcctgtgagtgggcctgg

SEQ ID NO: 11111 - DNA, 120 bp, synthetic construct
  misc_feature 1..120: note = Artificially Synthesized Probe
  source 1..120: mol_type = other DNA
tcgggtgtgatgtggtgttggcgtcgtgttgttgcaaaggcctgtcttcaggtgtacgaggaggcatttccaaatgcaggaatgtgatgcctgggatctgcgtcatggcaaaacagcagg

SEQ ID NO: 11112 - DNA, 120 bp, synthetic construct
  misc_feature 1..120: note = Artificially Synthesized Probe
  source 1..120: mol_type = other DNA
atgaggtcctgagcggaaatcttcacaaagtggagagaaaaaactgatggattgtccaatgtgtttgattctgtaaaaacaacagtattggaaagggttgaccagttgtgctggtaaagt

SEQ ID NO: 11113 - DNA, 120 bp, synthetic construct
  misc_feature 1..120: note = Artificially Synthesized Probe
  source 1..120: mol_type = other DNA
acaagaggcaaaaacgaatgagctagagtatattttaaaattctgatagataaaaccagctctttgaaaagacccataaaggggatgatctatggcggtttaggcaagggagagtgagga

SEQ ID NO: 11114 - DNA, 120 bp, synthetic construct
  misc_feature 1..120: note = Artificially Synthesized Probe
  source 1..120: mol_type = other DNA
tcaccagatattagtaagtgaaaaaaagggaatgaaagaaatgtatctaatatggccctgtttgagtaaagcaaacatttacccctaaatcctgtatgtgcatctgcatgtgtgtctgtg

SEQ ID NO: 11115 - DNA, 120 bp, synthetic construct
  misc_feature 1..120: note = Artificially Synthesized Probe
  source 1..120: mol_type = other DNA
tctgagttggcatgaagataagaatggacggaaccgggaggttaacacggggtggatgtaaattagatgaaaaaagactaccctcaaaacaagcgccaccaaagaagactaccctaaaaa

SEQ ID NO: 11116 - DNA, 120 bp, synthetic construct
  misc_feature 1..120: note = Artificially Synthesized Probe
  source 1..120: mol_type = other DNA
cactaatagggcttaataaaaacttccagttgggccagtgaacccctcattaagctgtttttaaagcacgaatttaagagccgcaagggtgaagggtcacagggagcatttaattcacaa

SEQ ID NO: 11117 - DNA, 120 bp, synthetic construct
  misc_feature 1..120: note = Artificially Synthesized Probe
  source 1..120: mol_type = other DNA
tcaggctaaaatcacaaagaaattacaaaacgattttgggggcctaaaacactccaaaggccttgggaacctgttggtcttcctctgggactctatctgggcacaaagacctggcaaagt

SEQ ID NO: 11118 - DNA, 120 bp, synthetic construct
  misc_feature 1..120: note = Artificially Synthesized Probe
  source 1..120: mol_type = other DNA
tttgaagtgaatgttaccaaactcagcagccctcaaagctcagctctatctaaactccagcagaaacacagacggcagaatggggtttaacaaatattgtggttttcctgcgtcctggaa

SEQ ID NO: 11119 - DNA, 120 bp, synthetic construct
  misc_feature 1..120: note = Artificially Synthesized Probe
  source 1..120: mol_type = other DNA
cgcccagtggggaagccacagctacatgcggccacggagcacatgaggtgcagccaacgcaaccaaggactggagctttttatttcatttagttttaattaattttagaaacacatgtgc

SEQ ID NO: 11120 - DNA, 120 bp, synthetic construct
  misc_feature 1..120: note = Artificially Synthesized Probe
  source 1..120: mol_type = other DNA
aacatgaaactcaggctcacgagggctctcaggcggaaaacattaacattaatgagtcaacaattcgcttctgagtccctacaattaccacctgctaccgaagaatcagttagaatgtat

SEQ ID NO: 11121 - DNA, 120 bp, synthetic construct
  misc_feature 1..120: note = Artificially Synthesized Probe
  source 1..120: mol_type = other DNA
aataaaatttactaagaaaagatttgtttatctaaatgttgaagaatgtagttttctctgtgggcattttgatactgaatgtatcctggcgcactgcgggggaggcccagggactcaggt

SEQ ID NO: 11122 - DNA, 120 bp, synthetic construct
  misc_feature 1..120: note = Artificially Synthesized Probe
  source 1..120: mol_type = other DNA
ggggagaggccaggaaaagtgcgtgaagatacataccaaacacacaacgctcaactctcgcagagctttctctaaatgcatctcacttaccgaaagagtacctgaaaaacaaaagaagaa

SEQ ID NO: 11123 - DNA, 120 bp, synthetic construct
  misc_feature 1..120: note = Artificially Synthesized Probe
  source 1..120: mol_type = other DNA
gcagcatcaattaaatgccacggcaaatgtcatactctggaatctgaaaatttaaggacatcacatgacctcgagcgcagctcattagaaaagggatcttaaatgaaaggaattggtggg

SEQ ID NO: 11124 - DNA, 120 bp, synthetic construct
  misc_feature 1..120: note = Artificially Synthesized Probe
  source 1..120: mol_type = other DNA
cagtggctctgatatctttttaaatcatcccttacccggtagaggtccacactatttataggtaaaagagtacgaagtctagatttgcttttcactccagaggaagaaggctgggaggga

SEQ ID NO: 11125 - DNA, 120 bp, synthetic construct
  misc_feature 1..120: note = Artificially Synthesized Probe
  source 1..120: mol_type = other DNA
ccctttccgtgaccaaaatcttccaagcaaccgctgtacacattggctaatgctagaaataaatttacccccaaaatgttcccaatatataaccttagttgaacggagaaaggaaaagga

SEQ ID NO: 11126 - DNA, 120 bp, synthetic construct
  misc_feature 1..120: note = Artificially Synthesized Probe
  source 1..120: mol_type = other DNA
gttcctgacttgtgtctgcagctgatcccaccatcaagactgaagtctttgtcatgtggtgaaggccaaacgtggatttatttacagaagttaccaaaaaaaaaataccacaaaaaaaga

SEQ ID NO: 11127 - DNA, 120 bp, synthetic construct
  misc_feature 1..120: note = Artificially Synthesized Probe
  source 1..120: mol_type = other DNA
tacaggtaagcaatttaaaacaggatgtaaatatgtaaatagcccttaaaagtgtaaggaaaaagtgctggaggccgtttcgacaaagcacctaaggcagcaatgaaaatggggaaagac

SEQ ID NO: 11128 - DNA, 120 bp, synthetic construct
  misc_feature 1..120: note = Artificially Synthesized Probe
  source 1..120: mol_type = other DNA
ctttggttatttccaatattgtcataaggaccaggtaatgaaaattgtttaagaattaagtgaccagacagggaataaaacagggtgcgcagtctgagcccacctttattagagagaagc

SEQ ID NO: 11129 - DNA, 120 bp, synthetic construct
  misc_feature 1..120: note = Artificially Synthesized Probe
  source 1..120: mol_type = other DNA
ggaatgaaaagaacactcttcttaggaaaaacacccggaagtactgcagggtaaagggattcatcaattatgtcaaagtggccgatagtgccgttctgatcttctatgtcttcttttttt

SEQ ID NO: 11130 - DNA, 120 bp, synthetic construct
  misc_feature 1..120: note = Artificially Synthesized Probe
  source 1..120: mol_type = other DNA
ttttctcgcttcacgtagaatttagagagccagtgatgttacagattcaggaaggatcccctccctcctttgtgctaatgttgtgtatattacagtattacagtttttgccttagttgtg

SEQ ID NO: 11131 - DNA, 120 bp, synthetic construct
  misc_feature 1..120: note = Artificially Synthesized Probe
  source 1..120: mol_type = other DNA
ggctccaatcacaggtatgttagaccacctggtgctatcccacatgtcactgaagctctgctcgtttcaatcttttttctgtttgttctttagcttggataatttctacagatttctctt

SEQ ID NO: 11132 - DNA, 120 bp, synthetic construct
  misc_feature 1..120: note = Artificially Synthesized Probe
  source 1..120: mol_type = other DNA
tgtaatggctgcctcaaatcctcttttctacgtgtgctatcttggctatcatggtcagtttcttgtgacccttttttgtttcctgtatagggatcctattttcctgtttctttacttgtg

SEQ ID NO: 11133 - DNA, 120 bp, synthetic construct
  misc_feature 1..120: note = Artificially Synthesized Probe
  source 1..120: mol_type = other DNA
ctaaacaccccatctcgtctcaattgtcatccctgcccctttggtgcaccttgatgattatgggatgtactcttcggagtcaaagaaatacatatctcttgttaggttaaaaaaaatagg

SEQ ID NO: 11134 - DNA, 120 bp, synthetic construct
  misc_feature 1..120: note = Artificially Synthesized Probe
  source 1..120: mol_type = other DNA
taaaatgtgaaagagatttaggttaagaacggaaagggtcacaatctatttggataactagaaggcctcggcagaaagggtcgggaatctatttggagaagtagaaggcattggcagaaa

SEQ ID NO: 11135 - DNA, 120 bp, synthetic construct
  misc_feature 1..120: note = Artificially Synthesized Probe
  source 1..120: mol_type = other DNA
ctctgttgtttcagaggtcagctcacaggcaggactgagtgctaggcaggagtcagatatcacagacaaagacacccagcacacagcaacaggatcaggcttttcccacgccatttgaaa

SEQ ID NO: 11136 - DNA, 120 bp, synthetic construct
  misc_feature 1..120: note = Artificially Synthesized Probe
  source 1..120: mol_type = other DNA
tgaggtgtcctgactttggtccaagtttctggagaggatctttccttccttctggggtcgagacagtggggaagggatggcggtgctgccgtgctgaagagcagcaaagcagcctgcagg

SEQ ID NO: 11137 - DNA, 120 bp, synthetic construct
  misc_feature 1..120: note = Artificially Synthesized Probe
  source 1..120: mol_type = other DNA
agccaacgacagagtcagccaacgacagagtcagccaacgacagagtcagagccaacgacagagtcagccaacgacagagtcagagccaatgacagagtcagccaacgacagagtcagcc

SEQ ID NO: 11138 - DNA, 120 bp, synthetic construct
  misc_feature 1..120: note = Artificially Synthesized Probe
  source 1..120: mol_type = other DNA
agtcagagccaacgacagagtcagccaatgacagagtcagagacaacgacagagttagagacaacgacagagtcagccaaggacagcgtcagccaacgacagaatcagagacaacgacag

SEQ ID NO: 11139 - DNA, 120 bp, synthetic construct
  misc_feature 1..120: note = Artificially Synthesized Probe
  source 1..120: mol_type = other DNA
gagtcagccaatgacagagtcagacgacagagtcagccaacgacagagtcagccaatgacagagtcagagccaacgacagagtcagccaaggacggagtcagagccaacgacagagtcag

SEQ ID NO: 11140 - DNA, 120 bp, synthetic construct
  misc_feature 1..120: note = Artificially Synthesized Probe
  source 1..120: mol_type = other DNA
gagttttatgcaacaattattaagctgtggctctctccgtcataaatgttgccaaacccccagatgtttaaatttctagaccaagaagacagacccccaaagtaccaaaacaaaaacgtg

SEQ ID NO: 11141 - DNA, 120 bp, synthetic construct
  misc_feature 1..120: note = Artificially Synthesized Probe
  source 1..120: mol_type = other DNA
cgaaagacacaagagccatcctcagtctccatgcaaagcccagctgtcccattgagggcggaaccaagctgggcatgcaagagccagcgcatccccagcttcctacacatccacacagac

SEQ ID NO: 11142 - DNA, 120 bp, synthetic construct
  misc_feature 1..120: note = Artificially Synthesized Probe
  source 1..120: mol_type = other DNA
cagacacagacccactgcttctgcctccctttccccatccctctggctccagtaagctggcaacgcagtcctttaagtaaggaagagctactgcaaagaggtggggttttaatcctgaag

SEQ ID NO: 11143 - DNA, 120 bp, synthetic construct
  misc_feature 1..120: note = Artificially Synthesized Probe
  source 1..120: mol_type = other DNA
atacacacacacacatctaagtaaactagacacgttacataaaatgcgtgcccgcagcagacgcggtgtgtgcacacacacacacacatctaagtaaactagacaagttacataaaatgc

SEQ ID NO: 11144 - DNA, 120 bp, synthetic construct
  misc_feature 1..120: note = Artificially Synthesized Probe
  source 1..120: mol_type = other DNA
tccacgcatacgcatagaagcaaactagatgcttgtatataaattccgtgtctgcagcagatgcagtgtgtatacacgcacacacatagaagtaaagtagacatgtgtatataaattgcg

SEQ ID NO: 11145 - DNA, 120 bp, synthetic construct
  misc_feature 1..120: note = Artificially Synthesized Probe
  source 1..120: mol_type = other DNA
acctgggaggtggagggtgcagtgagccaagattgcgccactgcactccagcctggacgacaagagcaaaactccatctcaaaaaaaaaaaaaaaaagtagatttaagggtcgggcacgg

SEQ ID NO: 11146 - DNA, 120 bp, synthetic construct
  misc_feature 1..120: note = Artificially Synthesized Probe
  source 1..120: mol_type = other DNA
attggaaaaatcaaaatcattaaggtgtcaatttgatccataaattcggcacaatctgaaccaaacacccagtcagtgcttccgccgaggctgacaagctgattctagaatatacatggg

SEQ ID NO: 11147 - DNA, 120 bp, synthetic construct
  misc_feature 1..120: note = Artificially Synthesized Probe
  source 1..120: mol_type = other DNA
ccttcaacctgaaagtgtgctcgcacagaagcctcatgcagatgctcatagcagctctgttcatagccactaaaaactagaaacaaggaagacatccttcacggtggaagtggataaata

SEQ ID NO: 11148 - DNA, 120 bp, synthetic construct
  misc_feature 1..120: note = Artificially Synthesized Probe
  source 1..120: mol_type = other DNA
tgagagtcagagtcatcggcatggaccaggttgaccttcgtatacttacagatggataggtggatacgacagagaagcaatcaaatgtgtgaaatgagatagtgacacacagagcctagc

SEQ ID NO: 11149 - DNA, 120 bp, synthetic construct
  misc_feature 1..120: note = Artificially Synthesized Probe
  source 1..120: mol_type = other DNA
tgacagcacgggatcacgacccagacacagactcacggtgacagcacgggatcacgacccagacacagactcacggtgacagcacgggatcacgacccagacacagactcacggtgacaa

SEQ ID NO: 11150 - DNA, 120 bp, synthetic construct
  misc_feature 1..120: note = Artificially Synthesized Probe
  source 1..120: mol_type = other DNA
cagacacagactcacggtgacagcacgggatcacgacccagacacagactcacggtgacagcacgggatcacgacccagacagactcacggtgacagcacgggatcacgacccagacaca

SEQ ID NO: 11151 - DNA, 120 bp, synthetic construct
  misc_feature 1..120: note = Artificially Synthesized Probe
  source 1..120: mol_type = other DNA
ggaggagacgccaggacaaaaccgggtcccagaacggaacaggcacgggtggaaaagccatagagtctgcagtttcagttaatagttttatttttaataaaaaaattttaaaaagtaaag

SEQ ID NO: 11152 - DNA, 120 bp, synthetic construct
  misc_feature 1..120: note = Artificially Synthesized Probe
  source 1..120: mol_type = other DNA
caagatgtggcctcaccaaagcaatagcctaaatcagtaattctaaggcaagaagcataggatgcttcctgcttatcaggaaaaaggaagacagactgaattgagatttcagagagaaaa

SEQ ID NO: 11153 - DNA, 120 bp, synthetic construct
  misc_feature 1..120: note = Artificially Synthesized Probe
  source 1..120: mol_type = other DNA
gagccactgaaagctcagaacaaaaccaactgagcagggtttcaagtattctttttggtttcattttctcctcaaattttctgaagaacagctgagagtttagcaaatacgggtgcaaac

SEQ ID NO: 11154 - DNA, 120 bp, synthetic construct
  misc_feature 1..120: note = Artificially Synthesized Probe
  source 1..120: mol_type = other DNA
aatgctgcaaagctctgagggaaagtggctttgatggagaattagagatccgggcaagttggtcctttctggaaaagctgcttggggatacactccagcaaaaagagaatccaccagcaa

SEQ ID NO: 11155 - DNA, 120 bp, synthetic construct
  misc_feature 1..120: note = Artificially Synthesized Probe
  source 1..120: mol_type = other DNA
cacctgtcacagcttccagaaagttctctgcagtgaactgctatcaacccaattctgaccaactgtaattacactgtttccagataacaccttaattctgaggcagttaaaatgcattgt

SEQ ID NO: 11156 - DNA, 120 bp, synthetic construct
  misc_feature 1..120: note = Artificially Synthesized Probe
  source 1..120: mol_type = other DNA
tacttcagcatctgctcaacgcagtaatcacactagggacccgagtccacacgtcaggaagacaggtgtgtcttcaactctgagccctgtgaaaatgccgctttccgctaacacactccg

SEQ ID NO: 11157 - DNA, 120 bp, synthetic construct
  misc_feature 1..120: note = Artificially Synthesized Probe
  source 1..120: mol_type = other DNA
gcctattagagcctcacagcttcactttatctctacttcatcgtttgctaagtgacagcaccaacatttaaaatgactgtttaatactgtggagggaaaagcaacctgggaagaactact

SEQ ID NO: 11158 - DNA, 120 bp, synthetic construct
  misc_feature 1..120: note = Artificially Synthesized Probe
  source 1..120: mol_type = other DNA
cttccatactcatttgagagcctcacttgaggttcgtagctcctgacacgttgggcttatgaaacatgtatccgtgtgatcacatgtcaccgtgatcacagaaccgttctcttccaaacc

SEQ ID NO: 11159 - DNA, 120 bp, synthetic construct
  misc_feature 1..120: note = Artificially Synthesized Probe
  source 1..120: mol_type = other DNA
gagggcgggggtcgtggtgcgcggaggtgacactggcggatgtcccgggcccgcccggcactcacagtacacgaaggctagggccttcaggagcacgatccgggtcagccagaaggtgcc

SEQ ID NO: 11160 - DNA, 120 bp, synthetic construct
  misc_feature 1..120: note = Artificially Synthesized Probe
  source 1..120: mol_type = other DNA
tggagacctaggggttagtgaataaactgtggggcacttaggtggaagtgcagatttctccttattcatttgtcagcactctttacgtatgaaaaatcctgttcttttgtgtatattgga

SEQ ID NO: 11161 - DNA, 120 bp, synthetic construct
  misc_feature 1..120: note = Artificially Synthesized Probe
  source 1..120: mol_type = other DNA
ggagaggtggaccagcagctctggtcgtgcccatttcagcctgaatttaatcaaaagtgcactgggttatgattcagccatcaaaaagaatccaggagccgggcgcctgtcatcccagca

SEQ ID NO: 11162 - DNA, 120 bp, synthetic construct
  misc_feature 1..120: note = Artificially Synthesized Probe
  source 1..120: mol_type = other DNA
gaatcttctggaactaggcgatggctgcccagcactgtgaggtgctaaacaccgagtcgttcactggcaaatggcttatttcatgctatgtgaatttcgcctcgaattttagaaaagtaa

SEQ ID NO: 11163 - DNA, 120 bp, synthetic construct
  misc_feature 1..120: note = Artificially Synthesized Probe
  source 1..120: mol_type = other DNA
aagataatcgtgcacccttcatttaccccaatttttcatgtcctgaagtctgggtatggaaggggggcccaggacccgtggatgctaacatctgttgcctcctcctggaagggtggtcag

SEQ ID NO: 11164 - DNA, 120 bp, synthetic construct
  misc_feature 1..120: note = Artificially Synthesized Probe
  source 1..120: mol_type = other DNA
attaagccttccttccccacgctcagaaaaataaatacttgggagacagcagagacattttcacagggtgtgttttcatttgcctttggcactaatgggtctctggaacgttccatcctg

SEQ ID NO: 11165 - DNA, 120 bp, synthetic construct
  misc_feature 1..120: note = Artificially Synthesized Probe
  source 1..120: mol_type = other DNA
ggagcacagctgttcccgacacatccgtgatctgggcgtgcacctgtcactggggagagagcagtgctggtctccacgctttgggcatcgcctgctccctgaatcctttccacatgcgaa

SEQ ID NO: 11166 - DNA, 120 bp, synthetic construct
  misc_feature 1..120: note = Artificially Synthesized Probe
  source 1..120: mol_type = other DNA
cgggcagggagggacggaggggcacagggaaggacggagagggagggacaggggcctctccagggtggcatttccctgggcagccctgcttcctcctcgtgccctgggcccaacacacac

SEQ ID NO: 11167 - DNA, 120 bp, synthetic construct
  misc_feature 1..120: note = Artificially Synthesized Probe
  source 1..120: mol_type = other DNA
ccatctcttgtcatcagacactctgctctagcttccccagggaacacgctggcctctccctgcaggagatcagaagcttcagggctcagcttaaatgacaccaaagatgctttcccagac

SEQ ID NO: 11168 - DNA, 120 bp, synthetic construct
  misc_feature 1..120: note = Artificially Synthesized Probe
  source 1..120: mol_type = other DNA
ttgaagcttccttggtggatggggagccaggaagaggccaccctgcctgctcgcagacctaatgcaactgcttttctttggcaaagagagctctccacggaggtcctcacccggatggca

SEQ ID NO: 11169 - DNA, 120 bp, synthetic construct
  misc_feature 1..120: note = Artificially Synthesized Probe
  source 1..120: mol_type = other DNA
acccgcggttggacgttcgcctcggggggggcaatgtcccctctccgaccccgcggtccccaccagggcggcacaccccgccctctccccgcctccgcaggcgcccagggctcacaggct

SEQ ID NO: 11170 - DNA, 120 bp, synthetic construct
  misc_feature 1..120: note = Artificially Synthesized Probe
  source 1..120: mol_type = other DNA
attagggcagaggccccggctcgagcttcccctcaggaataaactcagaggcagaacctaaaatcaaaatgtttattggagtgttgtacaaaaaagtttccagtcataaaatgtatatta

SEQ ID NO: 11171 - DNA, 120 bp, synthetic construct
  misc_feature 1..120: note = Artificially Synthesized Probe
  source 1..120: mol_type = other DNA
gccataaataacttttaaaaatttgattttcttagtgtttccaaagactcaattctcaatgaacctccaattacccacaggctgcccagtccacgcttctccccacccccttcagctaag

SEQ ID NO: 11172 - DNA, 120 bp, synthetic construct
  misc_feature 1..120: note = Artificially Synthesized Probe
  source 1..120: mol_type = other DNA
tgtcctcaaggccctggcgtgagctcctgacctgtgtactgaccaatgtaaaaaaataaatatccattaaaaaaataacttctgtgtatctatgagggagggtgtaaacggtgagctatt

SEQ ID NO: 11173 - DNA, 120 bp, synthetic construct
  misc_feature 1..120: note = Artificially Synthesized Probe
  source 1..120: mol_type = other DNA
cccacccacacgttctggcagttcgcttagaaattctctagaaatgtatcaagaactaaagaaagccaatgatataaaaatagttttcagtggctctgggtaaagaaaggtgtgtggatg

SEQ ID NO: 11174 - DNA, 120 bp, synthetic construct
  misc_feature 1..120: note = Artificially Synthesized Probe
  source 1..120: mol_type = other DNA
atacacaagaagagaccagggttcacagaggccaagggctcttggcaagcaggggctgaactgggatctgacacccaccaggctccatggcccatgcgcctgactgttaacacttcacgg

SEQ ID NO: 11175 - DNA, 120 bp, synthetic construct
  misc_feature 1..120: note = Artificially Synthesized Probe
  source 1..120: mol_type = other DNA
ccgttacccccatgccccggtctttccggtcaccttgtcccctgcctcgcattggccggcggccccgtcaccctgaccctgatcacccccatcagctgggtcaccccgttacccccatgc

SEQ ID NO: 11176 - DNA, 120 bp, synthetic construct
  misc_feature 1..120: note = Artificially Synthesized Probe
  source 1..120: mol_type = other DNA
cgctgccacccgtgcccgtgcccaggacgcttgggccgctgcccaagggctcctccacctccagccgcttccgcttactgcggcccaggcgcccggtggcggacaagctgccgctgctgc

SEQ ID NO: 11177 - DNA, 120 bp, synthetic construct
  misc_feature 1..120: note = Artificially Synthesized Probe
  source 1..120: mol_type = other DNA
ctgggccccaagcaccaggcccaagggagggctcaaaaatgtgccaagaggaacctccaggcaattcctggttccttgtgcacaagttacaaaccgatacacgtgcaggtgagaggcgac

SEQ ID NO: 11178 - DNA, 120 bp, synthetic construct
  misc_feature 1..120: note = Artificially Synthesized Probe
  source 1..120: mol_type = other DNA
ctcatgcctgtaatcccagcactttgggaggctgaggcaggcagatcacgaggtcaggagttcgagaccagcctagccaacatggtgaaaccccatctctattaaaaatacaaaaattag

SEQ ID NO: 11179 - DNA, 120 bp, synthetic construct
  misc_feature 1..120: note = Artificially Synthesized Probe
  source 1..120: mol_type = other DNA
tccagggcctcttcccggcccctgcaccgccttcgtgggtcttttcccaggtgccctgtgggttccacctggggcacgttcctgggcccccgcacagaagctctcgtgagtctcttcacg

SEQ ID NO: 11180 - DNA, 120 bp, synthetic construct
  misc_feature 1..120: note = Artificially Synthesized Probe
  source 1..120: mol_type = other DNA
atgacaagtgtccttgtaggatacacagagtatggacacaggggaggcagccgcgggaagacagaggcagacactggggagacgcagccgaagccaagggcaccctaagaggcaggaagg

SEQ ID NO: 11181 - DNA, 120 bp, synthetic construct
  misc_feature 1..120: note = Artificially Synthesized Probe
  source 1..120: mol_type = other DNA
atgttacaaagaccctggcctttgaagggtcagccttgtttgtaaacttaagctgtctgaagcaggctcacctggttttccactaaaccaaattagctccaacattagatatttaagata

SEQ ID NO: 11182 - DNA, 120 bp, synthetic construct
  misc_feature 1..120: note = Artificially Synthesized Probe
  source 1..120: mol_type = other DNA
ccccagggcctttcaaaagaccacctaggcatttgcccaagaaatgaaagtgacccatagctgaaagtgaccgtatgtctgtctaagtatatctccatcaataactgtatttatctatat

SEQ ID NO: 11183 - DNA, 120 bp, synthetic construct
  misc_feature 1..120: note = Artificially Synthesized Probe
  source 1..120: mol_type = other DNA
agctcacagtgccctccctgcctaggatccgtaataaatcttcaaacttgtttcctatcgctgtgctgaatttgcgccttctgtcagaagaaccaggagctgccccaggctgggatccca

SEQ ID NO: 11184 - DNA, 120 bp, synthetic construct
  misc_feature 1..120: note = Artificially Synthesized Probe
  source 1..120: mol_type = other DNA
tcagctgggtgcccggggttttgtggcaggctctggcttgttaggtcctgcacgctgctcccagtgtttctctcattgtggggttttggagataaatttgttaggataagaaaaacatta

SEQ ID NO: 11185 - DNA, 120 bp, synthetic construct
  misc_feature 1..120: note = Artificially Synthesized Probe
  source 1..120: mol_type = other DNA
actgctcaggagattgtgaactgggaattcctcaacacctagggcgggcactgtgtaccattttctttttttaatgttttaatttgaggtgaaattcacatcctgtacatttcaacatct

SEQ ID NO: 11186 - DNA, 120 bp, synthetic construct
  misc_feature 1..120: note = Artificially Synthesized Probe
  source 1..120: mol_type = other DNA
cacatcaagaaaagccttgagctcagtgtttcattggcctcctggctcctctgaataaatattccttttgtcatcatcgttctgtttaaattgccgcccaaccacatcccacgcccagaa

SEQ ID NO: 11187 - DNA, 120 bp, synthetic construct
  misc_feature 1..120: note = Artificially Synthesized Probe
  source 1..120: mol_type = other DNA
acctggacatgcagccccttggccgctgtcatagcgacacgatgcctggccattagatgcatttttcacactctcggtttcagaaccagaaaactggtgggatgtttaatcaaggatctc

SEQ ID NO: 11188 - DNA, 120 bp, synthetic construct
  misc_feature 1..120: note = Artificially Synthesized Probe
  source 1..120: mol_type = other DNA
gctccctaccccaccagcggcccccacctttcacccctcgatcacagggatctgcagtcagagtccccagctccccaccccaccagcggcccccacgtttcacccctcgatcacagggat

SEQ ID NO: 11189 - DNA, 120 bp, synthetic construct
  misc_feature 1..120: note = Artificially Synthesized Probe
  source 1..120: mol_type = other DNA
tacagaaaacagtccaggggctcccccaagagtcacagagccaccctgtgacccggtaactccactcctgggtgtggacccagaagacatgaaattcacatccatgcatgtttgaaaact

SEQ ID NO: 11190 - DNA, 120 bp, synthetic construct
  misc_feature 1..120: note = Artificially Synthesized Probe
  source 1..120: mol_type = other DNA
aggcttcttttagtggggatgaacgttctaaaattggacacattggtggtggcacagctgtggagatatgaaaacgcgaaacctacgggtgagctgggtgaaccttatgaggcgggaatt

SEQ ID NO: 11191 - DNA, 120 bp, synthetic construct
  misc_feature 1..120: note = Artificially Synthesized Probe
  source 1..120: mol_type = other DNA
aggatgaacaaaacagcagagtttccaacaaagacaagatcagcgccgggacacacaggagcccgttcaaggtgagaaaaaacagcaactctgcaatggcagccacacgcacagaggcat

SEQ ID NO: 11192 - DNA, 120 bp, synthetic construct
  misc_feature 1..120: note = Artificially Synthesized Probe
  source 1..120: mol_type = other DNA
ccacacaaggggcacgtctcctaacgacacgctttccacaaggtatccctgtcactaaacgacacctgacttgaattaatagtttgttcattgtagattttttgaattaattgattttta

SEQ ID NO: 11193 - DNA, 120 bp, synthetic construct
  misc_feature 1..120: note = Artificially Synthesized Probe
  source 1..120: mol_type = other DNA
tgacgtagtcactaaatgtcacgtgagatagtggatggggtcttggggcaggaaaggacatcggggaaactgaggaagtctgaatacatgatggatgttgctgggagcagtggctcacag

SEQ ID NO: 11194 - DNA, 120 bp, synthetic construct
  misc_feature 1..120: note = Artificially Synthesized Probe
  source 1..120: mol_type = other DNA
agttttattgacacatagcagcacccacttattcacctatgggctaaggcagctttcatcctatggcagagctgagtggttcagatgcagacagtctggccttttttagaaaaagtctgc

SEQ ID NO: 11195 - DNA, 120 bp, synthetic construct
  misc_feature 1..120: note = Artificially Synthesized Probe
  source 1..120: mol_type = other DNA
gagactctatctcaaaaaagaagtgagaaaggcgtgtgtgaggacctcgggggccgccacacaccaggatgctgtgagtcgtgttatgagcctgaaaaaatctgaactgagtccctcacg

SEQ ID NO: 11196 - DNA, 120 bp, synthetic construct
  misc_feature 1..120: note = Artificially Synthesized Probe
  source 1..120: mol_type = other DNA
acacggctgggtgacagggctcacggaggggccagtgtgtcacctgctaaatggctgccttcactggagtcagacccgcatttcacccagcctgagtgaactgagttgtaaaggatgctg

SEQ ID NO: 11197 - DNA, 120 bp, synthetic construct
  misc_feature 1..120: note = Artificially Synthesized Probe
  source 1..120: mol_type = other DNA
tacattctttcaggttccctgtccccagggcactgtgaaaacaacccacagggagctactgaacaaaagttaacctgctgtggccccacacacaagtaagaggtgggtattataattaca

SEQ ID NO: 11198 - DNA, 120 bp, synthetic construct
  misc_feature 1..120: note = Artificially Synthesized Probe
  source 1..120: mol_type = other DNA
tggtgagagatgaggggcctaattcccaccccagtcaccaatctcttctggattcatcagggaactcgctaaagctccagggagaactgagaccacgtgactcaccccagagactccagg

SEQ ID NO: 11199 - DNA, 120 bp, synthetic construct
  misc_feature 1..120: note = Artificially Synthesized Probe
  source 1..120: mol_type = other DNA
ggggcccctcgaaaccccctggagaccctcgagacccgggcccgtccctgtctgcacccagggtcccagcgattgcccaccccgcggtgggagggacctggccgagctgcacccctcact

SEQ ID NO: 11200 - DNA, 120 bp, synthetic construct
  misc_feature 1..120: note = Artificially Synthesized Probe
  source 1..120: mol_type = other DNA
actgtcaccctaaacagaggtaggggaaaattcatgtgagctttaagctgccaaccttttaatatgggatgccatccttctcttatccatatgtacattttcccagtaattcaaatcaga

SEQ ID NO: 11201 - DNA, 120 bp, synthetic construct
  misc_feature 1..120: note = Artificially Synthesized Probe
  source 1..120: mol_type = other DNA
gactctctgacccattaaagtgcaaatgtcatataagattttatgttcccaagacctggattcaacaatctgggctttgtcatgctgctttggggttggttgttgtttgtgtactttttg

SEQ ID NO: 11202 - DNA, 120 bp, synthetic construct
  misc_feature 1..120: note = Artificially Synthesized Probe
  source 1..120: mol_type = other DNA
tgtagttcttcttttgtgaaaaactgcttaatttccttcgccaaattgaaacagaacctctgctaaagtgccagaggaaatgctgtttttccagatggacatgcccagggatttctcagt

SEQ ID NO: 11203 - DNA, 120 bp, synthetic construct
  misc_feature 1..120: note = Artificially Synthesized Probe
  source 1..120: mol_type = other DNA
tctgagaagctgagaacacccattgatctgatgtcattattaacatgtagaaagttgataagcaggcctgagttatgtatgtggctcctcctggtctagttggtgttctgaaaatccttt

SEQ ID NO: 11204 - DNA, 120 bp, synthetic construct
  misc_feature 1..120: note = Artificially Synthesized Probe
  source 1..120: mol_type = other DNA
tcctcacaattatctcatatgtaagatgagaaagcggaggctaaaagagattaaataactgcccaatgtcacatggaagatgggagagccagaactcacacccagatccttatgatttta

SEQ ID NO: 11205 - DNA, 120 bp, synthetic construct
  misc_feature 1..120: note = Artificially Synthesized Probe
  source 1..120: mol_type = other DNA
tcaaatcaaagcttatgcaaaaggctgatgtgcaaagcaccatttgaaaatgctggttttacagataagggattagagccaagtggtacaaagaggtaacgtgtctagttcaggtctatc

SEQ ID NO: 11206 - DNA, 120 bp, synthetic construct
  misc_feature 1..120: note = Artificially Synthesized Probe
  source 1..120: mol_type = other DNA
tacaactatctccaaaatgctcattttgtaacatgcactgaaggtcaaaaacaatttgttacgtgggcaatggaattgatctcaccttgggtttctccccagccagtgatgtaacattca

SEQ ID NO: 11207 - DNA, 120 bp, synthetic construct
  misc_feature 1..120: note = Artificially Synthesized Probe
  source 1..120: mol_type = other DNA
ctactttagtaagttcaaggggataaaggaatggaaatgagaaatgccgtattctgaccaaaaatcatcattagcaccaactttgaagcagacacactttctgcttctggacactagaag

SEQ ID NO: 11208 - DNA, 120 bp, synthetic construct
  misc_feature 1..120: note = Artificially Synthesized Probe
  source 1..120: mol_type = other DNA
tccctgatcatgaatgtggatgaactggtgaacattaagtaagttttacgggtaacagggtatctctttttccacgtgaggaaacgaatccttctgcctttttaaagagcacaactaaca

SEQ ID NO: 11209 - DNA, 120 bp, synthetic construct
  misc_feature 1..120: note = Artificially Synthesized Probe
  source 1..120: mol_type = other DNA
cagaagtgctttccaaacctagaaagaaaacatgccaaggctttggtcaaattggatggtttgttctacttcattgtacagaaagccaggaagacaagttcactcagttttgatcatgtt

SEQ ID NO: 11210 - DNA, 120 bp, synthetic construct
  misc_feature 1..120: note = Artificially Synthesized Probe
  source 1..120: mol_type = other DNA
ataaagtaaagaaaaatcaactcaacagcagagtgaaatgcgatgcgatcaggtttgtcgatggcatttcacaaacttacagaaggaagtctctttagaggagaacagcaattgagcaca

SEQ ID NO: 11211 - DNA, 120 bp, synthetic construct
  misc_feature 1..120: note = Artificially Synthesized Probe
  source 1..120: mol_type = other DNA
aagaggatgctgtggcacaaggtgggaaaagaagtcgcatttgagtccaagttagcaattgtgtcgtttaattcaggacgaattccaagcactagtttttcacatctcaaaggtgaaatt

SEQ ID NO: 11212 - DNA, 120 bp, synthetic construct
  misc_feature 1..120: note = Artificially Synthesized Probe
  source 1..120: mol_type = other DNA
aacctcacttgtcttacatcaaagtaaggtggggaacctcacagtccattggaagaaatcttgttcccattcttccttctttctccaatctctaagaacctgattctcatacatcctcaa

SEQ ID NO: 11213 - DNA, 120 bp, synthetic construct
  misc_feature 1..120: note = Artificially Synthesized Probe
  source 1..120: mol_type = other DNA
tcctaggatggccatctgaggtttacaatgtgcattacatgcttagctgtttcctgctgctcgtattttttttttcttctcagctgcagaagaggacagtttttcatcataatgactcta

SEQ ID NO: 11214 - DNA, 120 bp, synthetic construct
  misc_feature 1..120: note = Artificially Synthesized Probe
  source 1..120: mol_type = other DNA
cctgataaagcctgtttgctgttgattcagaaatgcttacttccatgcattatgcaccatccacagccaagacacacaaaggcagtatcatccttagcttcctgtgatattgtgatagaa

SEQ ID NO: 11215 - DNA, 120 bp, synthetic construct
  misc_feature 1..120: note = Artificially Synthesized Probe
  source 1..120: mol_type = other DNA
aaagtaaaccatcacagagaatgcatgaggctaagggaagtctcatggtgacctgatggcccatccaaatcttttctagaaaaatctgacttaagcctcatagagggcatctctgactac

SEQ ID NO: 11216 - DNA, 120 bp, synthetic construct
  misc_feature 1..120: note = Artificially Synthesized Probe
  source 1..120: mol_type = other DNA
cagtattttcctctgcccctcttctgtttgaaaagatttgtcagcaaagggaaaaagagtccaaatcaaagtggcttacatttttttccagacctgcccatttatttgtccctggaatga

SEQ ID NO: 11217 - DNA, 120 bp, synthetic construct
  misc_feature 1..120: note = Artificially Synthesized Probe
  source 1..120: mol_type = other DNA
attgtcaggccactggaaattccaaagcaatacaagttacaggaggcggaagaatattcagggacatccagcaccctctacattttgttctaacaaagtcttaacaagtgtctttgaaat

SEQ ID NO: 11218 - DNA, 120 bp, synthetic construct
  misc_feature 1..120: note = Artificially Synthesized Probe
  source 1..120: mol_type = other DNA
ctcccttactctctgtactagtcgtgtagctaaaaggctctgcatttacagtgaaaaacaaccatgaaaatagcattattgtcaataccacttcaggtgggtcaagtgagtttgagtcta

SEQ ID NO: 11219 - DNA, 120 bp, synthetic construct
  misc_feature 1..120: note = Artificially Synthesized Probe
  source 1..120: mol_type = other DNA
catcaccccagaaaaaaacttcgttttactgctcaatcaatctctgctactctcttcccatggccagaggcaaatgatattggtttctttcaccagaaattagttttacctttctggaac

SEQ ID NO: 11220 - DNA, 120 bp, synthetic construct
  misc_feature 1..120: note = Artificially Synthesized Probe
  source 1..120: mol_type = other DNA
tgtctccattgaattgctttgccatctatacggaaaatccatttaccatatatgtatgtgggtctggtggtgggccatccctttttaggtttgcatacttttttggccaataacacatat

SEQ ID NO: 11221 - DNA, 120 bp, synthetic construct
  misc_feature 1..120: note = Artificially Synthesized Probe
  source 1..120: mol_type = other DNA
gtttttgcacattgagcacgtatatacttttgtttcttcaatttgaccacattcacttattagtctttaggagtgcctgcatccattaatcaccactccagcttatttatgattcaggtt

SEQ ID NO: 11222 - DNA, 120 bp, synthetic construct
  misc_feature 1..120: note = Artificially Synthesized Probe
  source 1..120: mol_type = other DNA
ttgagcttcttgactgtgagtttatcattttcttcatacgtgtaaagtcttcagccatcattgctttgagtatttttttctgtcccaatatctccttcccgtccttctgtgacttgcttt

SEQ ID NO: 11223 - DNA, 120 bp, synthetic construct
  misc_feature 1..120: note = Artificially Synthesized Probe
  source 1..120: mol_type = other DNA
cagtccaggaaggttctccaggaagaaagtcataatagttacggagttgcgctcattcatttccttttctaaattatctcagtcctgtactgtctcttgtccaacatgtggaaagtgttt

SEQ ID NO: 11224 - DNA, 120 bp, synthetic construct
  misc_feature 1..120: note = Artificially Synthesized Probe
  source 1..120: mol_type = other DNA
aaatacctattctctcagactctttgatcaaaagcaaagttgtctggacattttgacacaccttctgggtctaagggaaatttgtcctaacaagttagcttgaagcaaggctcttctagg

SEQ ID NO: 11225 - DNA, 120 bp, synthetic construct
  misc_feature 1..120: note = Artificially Synthesized Probe
  source 1..120: mol_type = other DNA
gcagagcctacctaagactgaaataagccagagaaatagtgtattctgtggtatttactgccaaatagccccaggattagatggaataaatatcatcatattaggtttccccaggatgac

SEQ ID NO: 11226 - DNA, 120 bp, synthetic construct
  misc_feature 1..120: note = Artificially Synthesized Probe
  source 1..120: mol_type = other DNA
cactgcaaattccaaaacaacacaggtcacaagaggcgggaaaaaattcaggggcacccagcgctgtctaaactttgttataacaaagtgttaaaaagtgacgttgtaatattcccattt

SEQ ID NO: 11227 - DNA, 120 bp, synthetic construct
  misc_feature 1..120: note = Artificially Synthesized Probe
  source 1..120: mol_type = other DNA
tccaagcaactggatgtgctaaaaggctgagcgtttaaaagcaatttctgccctttttacagttgagatatactttcccacagagtgagatgcacagatctgcaatgttgtttttttgat

SEQ ID NO: 11228 - DNA, 120 bp, synthetic construct
  misc_feature 1..120: note = Artificially Synthesized Probe
  source 1..120: mol_type = other DNA
ccatctgactgattttttaattcgttttatcattttgatcttccaccagcatatgataagagttttataatctacctccacatcagtgacaccacttattattatttccacccatttact

SEQ ID NO: 11229 - DNA, 120 bp, synthetic construct
  misc_feature 1..120: note = Artificially Synthesized Probe
  source 1..120: mol_type = other DNA
gtcctgaatggtattgcctatgttttcttctagggtttgattttttgtttttgtttttgtttttttgatggagtctcactctgttgcccaggctggagtgcagtggcacaatcttggctt

SEQ ID NO: 11230 - DNA, 120 bp, synthetic construct
  misc_feature 1..120: note = Artificially Synthesized Probe
  source 1..120: mol_type = other DNA
ggctctgtgtctcttattggtgtataggaatgcttgtgatttttgcacattgattttgtatcctgagactttgctgaagttgcttatcagcttaaggagattttgggctgagatgataga

SEQ ID NO: 11231 - DNA, 120 bp, synthetic construct
  misc_feature 1..120: note = Artificially Synthesized Probe
  source 1..120: mol_type = other DNA
tgtttaaagtattctctgatggtagtttgtatttctgtggcatcattggtgatatcccctttattattctttattgtgtctatttgattcttctctattttcttctttattagtctggct

SEQ ID NO: 11232 - DNA, 120 bp, synthetic construct
  misc_feature 1..120: note = Artificially Synthesized Probe
  source 1..120: mol_type = other DNA
ctgtttcatcaaagactaagattgcaaccgctgctttttttttctttccatttgcttggtaaatattccttcatttctttattttgagcccatgtatgtcttttcaccctgagatgggtc

SEQ ID NO: 11233 - DNA, 120 bp, synthetic construct
  misc_feature 1..120: note = Artificially Synthesized Probe
  source 1..120: mol_type = other DNA
catggctcagagggtcccatgcccacagagccttgctcactgctagtacagcagtctgagattgaactgctagcacagtagtctgagaccgaactgcaaggcggcagcaaagctggggga

SEQ ID NO: 11234 - DNA, 120 bp, synthetic construct
  misc_feature 1..120: note = Artificially Synthesized Probe
  source 1..120: mol_type = other DNA
accatggcacgagaactacgtgacacatgaacaagtttcagtagttgattcaatcaagtggaagaaagggtatcagtgattaaagatcaaatgaatgaaatgaagcgagaagagaagttt

SEQ ID NO: 11235 - DNA, 120 bp, synthetic construct
  misc_feature 1..120: note = Artificially Synthesized Probe
  source 1..120: mol_type = other DNA
tgataaaacagactttaaactaacaaagatcaaaagagacaaagaaggccattacataatggtaaagggaccaatttaacaagaagagctaactatcctaaatatatatgcacccaatac

SEQ ID NO: 11236 - DNA, 120 bp, synthetic construct
  misc_feature 1..120: note = Artificially Synthesized Probe
  source 1..120: mol_type = other DNA
gagaatattataaacacctctgtgcaaataaactagaaaatctagaagaaatggaaaaattcctggacacatacaccctaccaagactaaaccagaaagaaattgaatccttgaatagac

SEQ ID NO: 11237 - DNA, 120 bp, synthetic construct
  misc_feature 1..120: note = Artificially Synthesized Probe
  source 1..120: mol_type = other DNA
cctttgtagggacatggatgaactcccattcacaattgcttcaaagagaataaaatacctaggaatccaacttacaagggatgggaaggacctcttcaaggagaactacaaaccactgct

SEQ ID NO: 11238 - DNA, 120 bp, synthetic construct
  misc_feature 1..120: note = Artificially Synthesized Probe
  source 1..120: mol_type = other DNA
aaagaaaacttttatgcagtcaagagacacatgaaaaagtgctcaccatcactggccatcagagaaatgcaaatcaaaaccacaatgagataccatctcataccagttagaatggtgatc

SEQ ID NO: 11239 - DNA, 120 bp, synthetic construct
  misc_feature 1..120: note = Artificially Synthesized Probe
  source 1..120: mol_type = other DNA
tttgtggtgttctctgtatttcctgaatttgaatgtggtattctctgtatttccttaatttgaatgttggcctgtcttgctaggttggggaagttctcctggataatatcctgaagagtg

SEQ ID NO: 11240 - DNA, 120 bp, synthetic construct
  misc_feature 1..120: note = Artificially Synthesized Probe
  source 1..120: mol_type = other DNA
acttagctccctggcttcagccctttcttcacgggggtgaatggttctgtcttgctggcattccagggaccactggggtatgaaaaaaaactcctgcagctagcttagtgtctgcccaaa

SEQ ID NO: 11241 - DNA, 120 bp, synthetic construct
  misc_feature 1..120: note = Artificially Synthesized Probe
  source 1..120: mol_type = other DNA
cttgccttcgtcttaactttgcataacctgatgagaatgtgcctaggctaagatctttttgtgatgaatttcccaggtgttctttgtgctgcttgtatttacatgttctttgtgtttctt

SEQ ID NO: 11242 - DNA, 120 bp, synthetic construct
  misc_feature 1..120: note = Artificially Synthesized Probe
  source 1..120: mol_type = other DNA
aatggactccataggggttcctagctttggtggtttaatgctctatttttgtgctggttggcctcctgcatcagctatactagtgtggagagggactagaggtgggtgggccctagaact

SEQ ID NO: 11243 - DNA, 120 bp, synthetic construct
  misc_feature 1..120: note = Artificially Synthesized Probe
  source 1..120: mol_type = other DNA
ttctgatgagaaggcatcagtcatttgtgtaactgttcctttatataaacaatcttttttcctctggcttataaaattttcctagctttctttgattttagacaatttaaccaagaagat

SEQ ID NO: 11244 - DNA, 120 bp, synthetic construct
  misc_feature 1..120: note = Artificially Synthesized Probe
  source 1..120: mol_type = other DNA
tctaggtacatgactgtagctctttatctccacaaattctttctcattattaccaagtgtagaaaatcccagctgcctttgtaatcccaaactctggtgtctctcagttcatcaagactg

SEQ ID NO: 11245 - DNA, 120 bp, synthetic construct
  misc_feature 1..120: note = Artificially Synthesized Probe
  source 1..120: mol_type = other DNA
agactctttgctcaaaagcaaaggtcctgagacattttgccaaaatgtgagtctaagagaaatttgtccctaggaagtgagcttaaagcatgggtcttctaaccaatatttgagttggct

SEQ ID NO: 11246 - DNA, 120 bp, synthetic construct
  misc_feature 1..120: note = Artificially Synthesized Probe
  source 1..120: mol_type = other DNA
gtcctgaattgtaacaaagcagaattctcttcctcttcttctgtagactcactgccaatgcaggtttcatgagaagaagaggcaagaacacctagaaatttctaacttcaaagctgaggt

SEQ ID NO: 11247 - DNA, 120 bp, synthetic construct
  misc_feature 1..120: note = Artificially Synthesized Probe
  source 1..120: mol_type = other DNA
gtcaccagagatgggagaatattcaagggcacttagcgccctctacattttgctgtaacaaagtgttaacaagtgcctttgaaatattcccattataccacaataatattgccacaagca

SEQ ID NO: 11248 - DNA, 120 bp, synthetic construct
  misc_feature 1..120: note = Artificially Synthesized Probe
  source 1..120: mol_type = other DNA
ttgaggatgttaggcagtggtttttaacacaactggacgtatcaagtgatgtagcacctgaaacagatacctgctctgtttttcagttgagtatattttcacatagagtgagatgcacag

SEQ ID NO: 11249 - DNA, 120 bp, synthetic construct
  misc_feature 1..120: note = Artificially Synthesized Probe
  source 1..120: mol_type = other DNA
ctgttgcccattttgattaggttgtttgtcctctgattagtgagtgggagaaatgtttctatactctggatacaggccatttgtcagatatatggatgagagtgtttttcttccagtgtg

SEQ ID NO: 11250 - DNA, 120 bp, synthetic construct
  misc_feature 1..120: note = Artificially Synthesized Probe
  source 1..120: mol_type = other DNA
aaagtgttaggattacagccaagcgtcccagccaataccacatgtcttgattactgtgtctttatgagaatttccatattaccatatgcatctatcccacaaacttgtgattttattcca

SEQ ID NO: 11251 - DNA, 120 bp, synthetic construct
  misc_feature 1..120: note = Artificially Synthesized Probe
  source 1..120: mol_type = other DNA
tcccttcctctgtgacttgctttaaacaaatattaaatattttgatattttcatagatgtccttgaggctctgtttatcttctcaggctttgtataagcgtgctatggtttgcaccaccc

SEQ ID NO: 11252 - DNA, 120 bp, synthetic construct
  misc_feature 1..120: note = Artificially Synthesized Probe
  source 1..120: mol_type = other DNA
agactgctgtggaatgctttggttaaaactctttgcccttaagtctaggaagggtaattatggggttgatcttatttgtttccctttctaaactatctcaggttgtactgtctgctgttc

SEQ ID NO: 11253 - DNA, 120 bp, synthetic construct
  misc_feature 1..120: note = Artificially Synthesized Probe
  source 1..120: mol_type = other DNA
caatcctaaaacttctcttcattcagaccttttgctcaaaagtaagtttcctgagacattttgctacaaactctgagtctatgagaaatttggacctaggaagtgagcttgtagcatggg

SEQ ID NO: 11254 - DNA, 120 bp, synthetic construct
  misc_feature 1..120: note = Artificially Synthesized Probe
  source 1..120: mol_type = other DNA
aagatgaaggtaggctggggagataaacaatttggtggctatgtactgcttcaaagtctcaggacaatacggatctaatgaagacatgttaggtttctcaagaacaacagcctcaaaaat

SEQ ID NO: 11255 - DNA, 120 bp, synthetic construct
  misc_feature 1..120: note = Artificially Synthesized Probe
  source 1..120: mol_type = other DNA
aactgagagaaaacatcaatgtgtaccagaaaggatcagaataccctccttctaccttctgccaaatacattcctttggattaaccgagagggattttgaagtgtgtcttggagattgtt

SEQ ID NO: 11256 - DNA, 120 bp, synthetic construct
  misc_feature 1..120: note = Artificially Synthesized Probe
  source 1..120: mol_type = other DNA
ttggtctgtctgtctgtcctgtgatttgtgtagctcctattgaattattttctaggtcacctttcctaccgtaatgtctaaagtgatgataaggccatccagtgagttcttcattagaga

SEQ ID NO: 11257 - DNA, 120 bp, synthetic construct
  misc_feature 1..120: note = Artificially Synthesized Probe
  source 1..120: mol_type = other DNA
gacaggttaatgatgaagttgatctcctttgattccctttctcagttctctcaagcctaccatatctgttgtccaacctgtgaaaactgttttctcatgtatttgatagtccttcatggc

SEQ ID NO: 11258 - DNA, 120 bp, synthetic construct
  misc_feature 1..120: note = Artificially Synthesized Probe
  source 1..120: mol_type = other DNA
aatccatgatagaaacaggacatcatctctgaaaatgacgaccatgctctgttctacattagtaggcagatggacatgccaataacaaagctcaaagattcatagcattctggaacttca

SEQ ID NO: 11259 - DNA, 120 bp, synthetic construct
  misc_feature 1..120: note = Artificially Synthesized Probe
  source 1..120: mol_type = other DNA
atcatcacaaatttggcaggatgttagaatatccattttcactaggacactgaaataatctattgaataaccaggggagtggtaaatccagtgccctagaaggtctgcacgcttcctaaa

SEQ ID NO: 11260 - DNA, 120 bp, synthetic construct
  misc_feature 1..120: note = Artificially Synthesized Probe
  source 1..120: mol_type = other DNA
gtctattttcttgttcactgaatgtcattggtttggactatttccatccatcccctttccttgtgtcttatttgcttttccttgcctagatatttaagctgtggtcttagatcaactgtc

SEQ ID NO: 11261 - DNA, 120 bp, synthetic construct
  misc_feature 1..120: note = Artificially Synthesized Probe
  source 1..120: mol_type = other DNA
agttaatttacttggaaatcatttggatccttttagactggcttggaagaagggttgctggagtgtttctggagtcaccttatttctaggaatccgaagatcctactcccaaattatggc

SEQ ID NO: 11262 - DNA, 120 bp, synthetic construct
  misc_feature 1..120: note = Artificially Synthesized Probe
  source 1..120: mol_type = other DNA
attccagatctgagataaatttgtcataagaagttagttggaagcatggcccttccaagagaaatgtaagggggctgctgtctgtctttgaagaaaactcaaggttgtacccatttggat

SEQ ID NO: 11263 - DNA, 120 bp, synthetic construct
  misc_feature 1..120: note = Artificially Synthesized Probe
  source 1..120: mol_type = other DNA
gacccagaagtatatggaactaagaaaagtcatattaggtttctcaaggatgacagactcaaaaaccgcattcctccgaaaccgcaaagccaaagatgcaatgaacactgactacttgaa

SEQ ID NO: 11264 - DNA, 120 bp, synthetic construct
  misc_feature 1..120: note = Artificially Synthesized Probe
  source 1..120: mol_type = other DNA
tcagcctctctgtatgtctctctacaggactacactaactattcagcatctggtttgctgatttgttgtcttcctcaggaattggcccacatgattaacattcctgaatttattcacata

SEQ ID NO: 11265 - DNA, 120 bp, synthetic construct
  misc_feature 1..120: note = Artificially Synthesized Probe
  source 1..120: mol_type = other DNA
aacctcatggactgtctctgaaggtactcaaaggtcctcaggtttctctagactacactttgagaattgcagtttgaaatcttgattattacatgcttctgtttttccctaagagcatct

SEQ ID NO: 11266 - DNA, 120 bp, synthetic construct
  misc_feature 1..120: note = Artificially Synthesized Probe
  source 1..120: mol_type = other DNA
ctcttctctctagctggtcaaaactccaatattccagagcactatgtgagctctgtcacctttattaagctcactgttcccttgtagttgttgttcctcaatatatggtgtttttttgcc

SEQ ID NO: 11267 - DNA, 120 bp, synthetic construct
  misc_feature 1..120: note = Artificially Synthesized Probe
  source 1..120: mol_type = other DNA
aagaagtagatagaaaaagatttgcctctccatagatgtgcaagtatcaattccctgtgacccaagatgcaaaaggccaacacaacattcacttcagggactagagcttagaatgataga

SEQ ID NO: 11268 - DNA, 120 bp, synthetic construct
  misc_feature 1..120: note = Artificially Synthesized Probe
  source 1..120: mol_type = other DNA
tagtggaaaagaaatatcagattgcttctcatcggaaactccactaacatggaagctcatttctaggaatctctacagagtgttcatgacgacatggaacagcatagaagaaagggtgat

SEQ ID NO: 11269 - DNA, 120 bp, synthetic construct
  misc_feature 1..120: note = Artificially Synthesized Probe
  source 1..120: mol_type = other DNA
gaagaaatccctggaaaagtttactggcttggaaagacacacacatctgacagcatattacaataagaattttgtctaggacaatgagatagccccttttacaatgaggggagtggtgaa

SEQ ID NO: 11270 - DNA, 120 bp, synthetic construct
  misc_feature 1..120: note = Artificially Synthesized Probe
  source 1..120: mol_type = other DNA
gagaaaaaaatggcatccagcatgatatccttcccaggccagcagtctcattcaatgtactcaaaatgtagccaaaaggctctatgttcagcatgtaaaaccattgcacaaaaagtattc

SEQ ID NO: 11271 - DNA, 120 bp, synthetic construct
  misc_feature 1..120: note = Artificially Synthesized Probe
  source 1..120: mol_type = other DNA
tatcccctgttaactgggttccagtgtttctgatgagaatgcattagcaatttgtatcactgttcttctagcaagacacagctctttttcctccagtttctcatgagatgtttcttgtta

SEQ ID NO: 11272 - DNA, 120 bp, synthetic construct
  misc_feature 1..120: note = Artificially Synthesized Probe
  source 1..120: mol_type = other DNA
cagttttgccagggtttgtctagagctgcctttttttctagaaatttactaattctactcctaaagtatgacttttctggagtctctactgtattcccaagaggttcagtgaggtctctc

SEQ ID NO: 11273 - DNA, 120 bp, synthetic construct
  misc_feature 1..120: note = Artificially Synthesized Probe
  source 1..120: mol_type = other DNA
taatgtgatatccttgcctccagatacctttctgctccattaaactaggaggaaggagagccagattaacatttgtcttctcttagactctttgctcaaagacaatgttcctgagacatt

SEQ ID NO: 11274 - DNA, 120 bp, synthetic construct
  misc_feature 1..120: note = Artificially Synthesized Probe
  source 1..120: mol_type = other DNA
ttcacataaaagcttagaaaaaaaggacaaatgagagggcttctcaatggaaactgtgctcacgtgcaagcacatttatgggaatttctactgaatgttcatgaggactatggggcagca

SEQ ID NO: 11275 - DNA, 120 bp, synthetic construct
  misc_feature 1..120: note = Artificially Synthesized Probe
  source 1..120: mol_type = other DNA
tgctgcaacaaggtcattaccagtgcctttctaatattcccataaaagtaccatatgattgccacaagcacaaatggctctcaatcactaatcctgtctgcacatttctcatacttaaaa

SEQ ID NO: 11276 - DNA, 120 bp, synthetic construct
  misc_feature 1..120: note = Artificially Synthesized Probe
  source 1..120: mol_type = other DNA
ccctccattccaggaagctggttcaatgagctacaggatgtactaagagcccaaactcgtgacaaatttctttcttccttggcttctctcttttgaatacatggaatattcttattatac

SEQ ID NO: 11277 - DNA, 120 bp, synthetic construct
  misc_feature 1..120: note = Artificially Synthesized Probe
  source 1..120: mol_type = other DNA
tctgtttccaatctcccgttctcttttctgtgacttgcttcccatatgcaggaaatcttttcctattttgcaacatgtctgtgaggttcggttggttttctatttcactatttcttgagg

SEQ ID NO: 11278 - DNA, 120 bp, synthetic construct
  misc_feature 1..120: note = Artificially Synthesized Probe
  source 1..120: mol_type = other DNA
ctcccttgctctttactgtgacttgcttcccacatgcaggaaatcttcttatattttcctgcatgtctctgagggtcggttaattttatatttccctatttctttagggatgtgcatgtg

SEQ ID NO: 11279 - DNA, 120 bp, synthetic construct
  misc_feature 1..120: note = Artificially Synthesized Probe
  source 1..120: mol_type = other DNA
ggaacctctatcctttcaggccactggtacttaggaccaagagattttctccctattggaatacaggtagaaatagaaacagatcaattcacctgtccataagtaagcacataaactttc

SEQ ID NO: 11280 - DNA, 120 bp, synthetic construct
  misc_feature 1..120: note = Artificially Synthesized Probe
  source 1..120: mol_type = other DNA
acaaccagaaaggagtctatgagaattatgaacgttatctttcccttacctgtaggcagatggatgggagaaaaccaaccaaaaaacatacagcaaacctacagattcctaccaatctag

SEQ ID NO: 11281 - DNA, 120 bp, synthetic construct
  misc_feature 1..120: note = Artificially Synthesized Probe
  source 1..120: mol_type = other DNA
gaagagccttagagcattgggagctcatatactgctccatagacccaggaccatatggaattaatgcagccctgttaggtttctcgaggatgacaggctccagagccacatttctcagaa

SEQ ID NO: 11282 - DNA, 120 bp, synthetic construct
  misc_feature 1..120: note = Artificially Synthesized Probe
  source 1..120: mol_type = other DNA
atacgtagtgaaaaggctctacctttcccacagaaaagcattgtgcaaatagtattactgtctgtcaggtttagtaggtttgtttctccaagacttctcaaagctgccctggaaaacttg

SEQ ID NO: 11283 - DNA, 120 bp, synthetic construct
  misc_feature 1..120: note = Artificially Synthesized Probe
  source 1..120: mol_type = other DNA
ttggggcagtgcacaatatgcatttatccgacatggatgaccttcaaggcattttattgctggattcagcattcccggttgatctctttttgttcctgattatcattttaacaatattcc

SEQ ID NO: 11284 - DNA, 120 bp, synthetic construct
  misc_feature 1..120: note = Artificially Synthesized Probe
  source 1..120: mol_type = other DNA
aacgcttttctacatgtagtcagattttaaatttaggactcactctgcggataccgcatagctgaggcaatcgactttgttgtttacttctaaagagagttgagatttcctctcacaggc

SEQ ID NO: 11285 - DNA, 120 bp, synthetic construct
  misc_feature 1..120: note = Artificially Synthesized Probe
  source 1..120: mol_type = other DNA
ggaagtggaagccagaataacggaattccaactggaaagtctccattgacgtttagttggtgttgtggaagggtaatctaagtgtctggtcctttgtcattctgactttcttcataatgt

SEQ ID NO: 11286 - DNA, 120 bp, synthetic construct
  misc_feature 1..120: note = Artificially Synthesized Probe
  source 1..120: mol_type = other DNA
cattctagaactgtagtaagttcttggaaatatttcacctgacaccttagagaaacacaacagatcagattcctcattggaaagtgagctcacgaggtagcacctttctaggaaactcta

SEQ ID NO: 11287 - DNA, 120 bp, synthetic construct
  misc_feature 1..120: note = Artificially Synthesized Probe
  source 1..120: mol_type = other DNA
gtgctgcaacaaggtcattaccggtgcctttctaatattcccattaaaagtaccatatgattgccaccagcaaaaatggctctcgatcactaatcctctctgcacatctctcatacttaa

SEQ ID NO: 11288 - DNA, 120 bp, synthetic construct
  misc_feature 1..120: note = Artificially Synthesized Probe
  source 1..120: mol_type = other DNA
ttccaggaagctggttcaatgagcaactggatgtataagagcctgagctcttgaaagacttctagttcttccttggcttccctcttttgaatgcatggactattcttattataccaaaaa

SEQ ID NO: 11289 - DNA, 120 bp, synthetic construct
  misc_feature 1..120: note = Artificially Synthesized Probe
  source 1..120: mol_type = other DNA
gtgtgtgtgtgtgtgtgtagctcattctgtaggttctctagaattgtgtgttgggtaatgttttcctctgaaacgtctaaattgatcagccggccatacagtaatttttttcaattaaga

SEQ ID NO: 11290 - DNA, 120 bp, synthetic construct
  misc_feature 1..120: note = Artificially Synthesized Probe
  source 1..120: mol_type = other DNA
atttgtagagctcttttcctccacacaaaccagttcttatttctagcagacctagaaaaatttcagctaccacagtcatcccaaactccaatccctctcctccattcagcaagatggcta

SEQ ID NO: 11291 - DNA, 120 bp, synthetic construct
  misc_feature 1..120: note = Artificially Synthesized Probe
  source 1..120: mol_type = other DNA
tacgaccgttctcttttccttatccataggcagatggatgtgagaaaaccgaccaacaaacaaacaccaaagcaacagattcctcccattctagaactgtagtaagttcttggaaatatt

SEQ ID NO: 11292 - DNA, 120 bp, synthetic construct
  misc_feature 1..120: note = Artificially Synthesized Probe
  source 1..120: mol_type = other DNA
tttctcagaatctgcaatgctgaagattgctctgaatgctggctacttgaagaaatccccggaaaagcttactggcttggaaagagtgacacacctgacagcatgttacaataaaaattt

SEQ ID NO: 11293 - DNA, 120 bp, synthetic construct
  misc_feature 1..120: note = Artificially Synthesized Probe
  source 1..120: mol_type = other DNA
tatgtactcaatacgtagtgaaaaggctctacctttcccacagaaaagcattgtgcaaatagtattactgtctgtcaggtttagtaggtttgtttctccaagacttctcaaagctgccct

SEQ ID NO: 11294 - DNA, 120 bp, synthetic construct
  misc_feature 1..120: note = Artificially Synthesized Probe
  source 1..120: mol_type = other DNA
attcttcattacgtgggctgcagaaagttcctttcttgttcaattcttcttctacctaattccttcgggtcacctctcttgttacataagcctgctgatttccaattcttacagtttccg

SEQ ID NO: 11295 - DNA, 120 bp, synthetic construct
  misc_feature 1..120: note = Artificially Synthesized Probe
  source 1..120: mol_type = other DNA
gtgtgtgtgtgtgtgtagctcattctgtaggttctctagaattgtgtgttgggtaatgttttcctctgaaacgtctaaattgatcagccggccatacagtaatttttttcaattaagaca

SEQ ID NO: 11296 - DNA, 120 bp, synthetic construct
  misc_feature 1..120: note = Artificially Synthesized Probe
  source 1..120: mol_type = other DNA
acaatcggaatatacgtagatatagaaacagatcaattcacctgtccataaataagcacctattctttcctcttgaacccagagagaaaaggcaaacgcaaccttcccttcaggaagtgg

SEQ ID NO: 11297 - DNA, 120 bp, synthetic construct
  misc_feature 1..120: note = Artificially Synthesized Probe
  source 1..120: mol_type = other DNA
aactgtagtaagttcttggaaatatttcacctgacaccttagagaaacacaacagatcagattcctcattggaaagtgagctcacgaggtagcacctttctaggaaactctactgaatct

SEQ ID NO: 11298 - DNA, 120 bp, synthetic construct
  misc_feature 1..120: note = Artificially Synthesized Probe
  source 1..120: mol_type = other DNA
ttgtgctgcaacaaggtcattaccggtgcctttctaatattcccattaaaagtaccatatgattgccaccagcaaaaatggctctcgatcactaatcctctctgcacatctctcatactt

SEQ ID NO: 11299 - DNA, 120 bp, synthetic construct
  misc_feature 1..120: note = Artificially Synthesized Probe
  source 1..120: mol_type = other DNA
cattccaggaagctggttcaatgagcaactggatgtataagagcctgagctcttgaaagacttctagttcttccttggcttccctcttttgaatgcatggactattcttattataccaaa

SEQ ID NO: 11300 - DNA, 120 bp, synthetic construct
  misc_feature 1..120: note = Artificially Synthesized Probe
  source 1..120: mol_type = other DNA
acgattctgtgattttttttaatgttcttcgtaattgaaaagttatcagccatccttgattccggtatttgtttctattccaaactcccttgctctttactgtgacttgcttcccacatg

SEQ ID NO: 11301 - DNA, 120 bp, synthetic construct
  misc_feature 1..120: note = Artificially Synthesized Probe
  source 1..120: mol_type = other DNA
agaactccagtatcccagagtgctatgtgatctctctcttctttattgagcttcctgtgctcttgtacttgctgtttctcagtaaatgttctttgccacactttctcgtggaaccatttc

SEQ ID NO: 11302 - DNA, 120 bp, synthetic construct
  misc_feature 1..120: note = Artificially Synthesized Probe
  source 1..120: mol_type = other DNA
gaagccatttatgacacaaccagaaaggagtctatgagaattacgaacgttatctttcccttacctgtaggcagatggatgggagaaaaccaaccaaaaaacatacagcaaacctacaga

SEQ ID NO: 11303 - DNA, 120 bp, synthetic construct
  misc_feature 1..120: note = Artificially Synthesized Probe
  source 1..120: mol_type = other DNA
cttgaagaaatccccagaaaagcttactgcgacagaaagaatcacacacctgacagcacgttacaataaaaattttggctaagacactgagatagcccattttagaaggaggtgagttgt

SEQ ID NO: 11304 - DNA, 120 bp, synthetic construct
  misc_feature 1..120: note = Artificially Synthesized Probe
  source 1..120: mol_type = other DNA
tcaaccctcacactctatgtactcaatacgtagtgaaaaggctctacctttcccacagaaaagcattgtgcaaatagtattactgtctgtcaggtttagtaggtttgtttctccaagact

SEQ ID NO: 11305 - DNA, 120 bp, synthetic construct
  misc_feature 1..120: note = Artificially Synthesized Probe
  source 1..120: mol_type = other DNA
tgcatttacatctatctacatttgccaattgctggattcttcattacgtgggctgcagaaagttcctttcttgttcaattcttcttctacctaattccttcgggtcacctctcttgttac

SEQ ID NO: 11306 - DNA, 120 bp, synthetic construct
  misc_feature 1..120: note = Artificially Synthesized Probe
  source 1..120: mol_type = other DNA
ctaatcatttctctcattcctgagcctgtttgtattacccgatttatttcctggtcatgggtcacacgaaacgcttttctacatgtagtcagattttaaatttaggactcactctgcgga

SEQ ID NO: 11307 - DNA, 120 bp, synthetic construct
  misc_feature 1..120: note = Artificially Synthesized Probe
  source 1..120: mol_type = other DNA
atcttctcttgctgggaacctgtatcccttcaggccactggtacttaggaacgagtgtttttctgacaatcggaatatacgtagatatagaaacagatcaattcacctgtccataaataa

SEQ ID NO: 11308 - DNA, 120 bp, synthetic construct
  misc_feature 1..120: note = Artificially Synthesized Probe
  source 1..120: mol_type = other DNA
tagtaagttcttggaaatatttcacctgacaccttagagaaacacaacagatcagattcctcattggaaagtgagctcacgaggtagcacctttctaggaaactctactgaatcttcatg

SEQ ID NO: 11309 - DNA, 120 bp, synthetic construct
  misc_feature 1..120: note = Artificially Synthesized Probe
  source 1..120: mol_type = other DNA
ctgcaacaaggtcattaccggtgcctttctaatattcccattaaaagtaccatatgattgccaccagcaaaaatggctctcgatcactaatcctctctgcacatctctcatacttaatag

SEQ ID NO: 11310 - DNA, 120 bp, synthetic construct
  misc_feature 1..120: note = Artificially Synthesized Probe
  source 1..120: mol_type = other DNA
aggaagctggttcaatgagcaactggatgtataagagcctgagctcttgaaagacttctagttcttccttggcttccctcttttgaatgcatggactattcttattataccaaaaacctc

SEQ ID NO: 11311 - DNA, 120 bp, synthetic construct
  misc_feature 1..120: note = Artificially Synthesized Probe
  source 1..120: mol_type = other DNA
tgtaggaagacacagctctttttcctccagtttctcgtgacaggtttcttcttattacatctttgccttgttaccttcgaactgtgatgtacaaaagtacatcatacaggttgggttttt

SEQ ID NO: 11312 - DNA, 120 bp, synthetic construct
  misc_feature 1..120: note = Artificially Synthesized Probe
  source 1..120: mol_type = other DNA
tggtctagctgggaagaactccagtatcccagagtgctatgtgatctctctcttctttattgagcttcctgtgctcttgtacttgctgtttctcagtaaatgttctttgccacactttct

SEQ ID NO: 11313 - DNA, 120 bp, synthetic construct
  misc_feature 1..120: note = Artificially Synthesized Probe
  source 1..120: mol_type = other DNA
tttgctacgccatctgcatctgtcacaagttgagttcggagaactcagcttgagacacatctcttgtaacagaaacttcacttggccctttcttctcttatggtaaagaacaaagacata

SEQ ID NO: 11314 - DNA, 120 bp, synthetic construct
  misc_feature 1..120: note = Artificially Synthesized Probe
  source 1..120: mol_type = other DNA
tctcagaatctgcaatgctgaagattgctctgaatgctggctacttgaagaaatccccggaaaagcttactggcttggaaagagtgacacacctgacagcatgttacaataaaaattttg

SEQ ID NO: 11315 - DNA, 120 bp, synthetic construct
  misc_feature 1..120: note = Artificially Synthesized Probe
  source 1..120: mol_type = other DNA
tcacactccatgtactcaaaacctagtgaaaaggctctacctttcccatggaaaagcattgtgcaaatagtattactgtctgtcattcccatatcatgtcggtcaagtaggtttgtttct

SEQ ID NO: 11316 - DNA, 120 bp, synthetic construct
  misc_feature 1..120: note = Artificially Synthesized Probe
  source 1..120: mol_type = other DNA
cagaaagttcccttcttgttctattcttcttctccttaattccttagggtcacctcttttgttacataagcctgctgattccaaagtcttacagtttccggtttctttgtttaggggagt

SEQ ID NO: 11317 - DNA, 120 bp, synthetic construct
  misc_feature 1..120: note = Artificially Synthesized Probe
  source 1..120: mol_type = other DNA
cattctaatcatttctgtctcttctgggtctgtttgtattggctgattttcctcctgcttgtgggtcacactaaaaggtttctatgtgtagtcaagttttatatttaggcctcacactgt

SEQ ID NO: 11318 - DNA, 120 bp, synthetic construct
  misc_feature 1..120: note = Artificially Synthesized Probe
  source 1..120: mol_type = other DNA
catctgttgagttgatctcattgttctctctctcgcaattcccttggtcctctaccatctattgtccaacaagcggaaatcattttttcttgtctttggtagtcacttatgtgtgaaaga

SEQ ID NO: 11319 - DNA, 120 bp, synthetic construct
  misc_feature 1..120: note = Artificially Synthesized Probe
  source 1..120: mol_type = other DNA
aggaagttaacatatcagaattcttctcaccagaaactatgctcatgtgcaagctcttttttagaaatctcttcttaatgttcatgaggaccacaggacaggagagatcagagggagata

SEQ ID NO: 11320 - DNA, 120 bp, synthetic construct
  misc_feature 1..120: note = Artificially Synthesized Probe
  source 1..120: mol_type = other DNA
gatagcagcaacccatcactggaggaatttaaacctgtggtgcatttaagataaaagcaacaagcacaaatgccaaattcagttcaaccagttactaggttgactcaattgaccacaaaa

SEQ ID NO: 11321 - DNA, 120 bp, synthetic construct
  misc_feature 1..120: note = Artificially Synthesized Probe
  source 1..120: mol_type = other DNA
tgaaagacaacagcaacagcagtcccgtgctataagaaatgctaaaggttgtttttcacagaaagaatgtgactccagatggaaattgggatctactgtaaaagataaggagcaccagaa

SEQ ID NO: 11322 - DNA, 120 bp, synthetic construct
  misc_feature 1..120: note = Artificially Synthesized Probe
  source 1..120: mol_type = other DNA
ccttcacctaaacgaccttgagagaacaccccgctcaacaacagaagaagacagtcttttgaagagtacatgaaagtgagttttagaactcaataatgagtaatgagttctgaagttgaa

SEQ ID NO: 11323 - DNA, 120 bp, synthetic construct
  misc_feature 1..120: note = Artificially Synthesized Probe
  source 1..120: mol_type = other DNA
caatatttaaatgctgatatgaacaacacttaaatgcttaaatgctgatgtgaagtccataaatctaaggtcacatgataaaggaaaaataaaggaaataaaataaagatattttcttag

SEQ ID NO: 11324 - DNA, 120 bp, synthetic construct
  misc_feature 1..120: note = Artificially Synthesized Probe
  source 1..120: mol_type = other DNA
taccgaggtagaaagtccctaaattttagctggatttatttcccatcctctggcatacaaatgtctcaccaataagttcagtgtgtttgctacttcttgctcactgtatccaatcatcat

SEQ ID NO: 11325 - DNA, 120 bp, synthetic construct
  misc_feature 1..120: note = Artificially Synthesized Probe
  source 1..120: mol_type = other DNA
tgggagaaagagtaacagcataagttgtcagtagcctagtggtgtccttcctcaaggggatccagcctccccttcattcagtgggttctggaactgtaacaggttcgagtctggaaattg

SEQ ID NO: 11326 - DNA, 120 bp, synthetic construct
  misc_feature 1..120: note = Artificially Synthesized Probe
  source 1..120: mol_type = other DNA
tacaggcgtgagccactgctcccggccctatcagaaccttttctaagtccccgagctgcaacattaaatgcagaatccctacttagtagggccaaaccaataaattcagcttgatccaac

SEQ ID NO: 11327 - DNA, 120 bp, synthetic construct
  misc_feature 1..120: note = Artificially Synthesized Probe
  source 1..120: mol_type = other DNA
tcaggccaagtactatcagtgttctccatactattagaagtagagtccttagcattttttggtctaatcatattaatcagccaacaccagaagtcccaaaaccaatgaaagaattccatc

SEQ ID NO: 11328 - DNA, 120 bp, synthetic construct
  misc_feature 1..120: note = Artificially Synthesized Probe
  source 1..120: mol_type = other DNA
ctgagcccatactttaatctcaagagtttgagataaacagtggtaaggaagaaagtacaacgggtacggctaatgaaacccaggaagataagtcaatgcgtagaagtaattccaacctaa

SEQ ID NO: 11329 - DNA, 120 bp, synthetic construct
  misc_feature 1..120: note = Artificially Synthesized Probe
  source 1..120: mol_type = other DNA
atcagtggcaactgtgttgccaagattgatgttgatctgctaatccctgtgtagaaatgaaccttggaggccattgtttgatttcttacaatatgtgcattggttgtaacactgtcactt

SEQ ID NO: 11330 - DNA, 120 bp, synthetic construct
  misc_feature 1..120: note = Artificially Synthesized Probe
  source 1..120: mol_type = other DNA
tccatgtcttcaccccgcactgtttctcatttgaactctcttttccaggaagagttgtgcttgggtaaattctatagctcacagtgtgacttcaaaacacacaataaattaataaggtgc

SEQ ID NO: 11331 - DNA, 120 bp, synthetic construct
  misc_feature 1..120: note = Artificially Synthesized Probe
  source 1..120: mol_type = other DNA
gttcacagtgatctacatcctagtttccatgggctgaaatagaatattcatatcccctgcactccctacacacacagacatagacaccaatttccccaaaaaactctttgcttaatcttc

SEQ ID NO: 11332 - DNA, 120 bp, synthetic construct
  misc_feature 1..120: note = Artificially Synthesized Probe
  source 1..120: mol_type = other DNA
taccgatggaaagccttactcaggccataacaaagagagaaatgctgagtcccactccatgaacaggtcaaggaaccaaacatattcaaagagttatttcattgtttcaacttgctagtg

SEQ ID NO: 11333 - DNA, 120 bp, synthetic construct
  misc_feature 1..120: note = Artificially Synthesized Probe
  source 1..120: mol_type = other DNA
agcctaagctctgaaggaaactgccgtcaggattttatgaactttgttttaggtggtgggagcctaaaaaagccggtgttaaggtttctggagaattgtatgaagacgagggttaagatt

SEQ ID NO: 11334 - DNA, 120 bp, synthetic construct
  misc_feature 1..120: note = Artificially Synthesized Probe
  source 1..120: mol_type = other DNA
tgcaattatggggcttcttaaccactaacatacagttatttctcgtcactaactgagcagcacgtttattaactgacagatttctgatggagtcgttaagaaagagtcatcaatgggcca

SEQ ID NO: 11335 - DNA, 120 bp, synthetic construct
  misc_feature 1..120: note = Artificially Synthesized Probe
  source 1..120: mol_type = other DNA
gtagtgtcagttaaacctagcacagcctctttgttatgcagcaagtgcctttttctaagacattcttggaagagctacctgattataacaataagtctggcacagatttgacaaaacagc

SEQ ID NO: 11336 - DNA, 120 bp, synthetic construct
  misc_feature 1..120: note = Artificially Synthesized Probe
  source 1..120: mol_type = other DNA
atgcttctctgtatgagaaactctctagaatattatttgatcattcagagcttgactgggttctctgtgggtatagagctctgtttcacattattctgattacacacacatacacagcat

SEQ ID NO: 11337 - DNA, 120 bp, synthetic construct
  misc_feature 1..120: note = Artificially Synthesized Probe
  source 1..120: mol_type = other DNA
tgaacagattcgttttttagcatagaggacataagcttatgttgaatagctctagggaagtctttccatgtgtgacttgagcttcaacctctgtagctattttagtaaccctggcaaaat

SEQ ID NO: 11338 - DNA, 120 bp, synthetic construct
  misc_feature 1..120: note = Artificially Synthesized Probe
  source 1..120: mol_type = other DNA
ctcggcctcccatggatttagtcttgatcccttaaaagagtatgagctcactagcagtgacttgtgtgatgtcaagcaaaaacttcatagctttacctgtatttcatatttccttcctaa

SEQ ID NO: 11339 - DNA, 120 bp, synthetic construct
  misc_feature 1..120: note = Artificially Synthesized Probe
  source 1..120: mol_type = other DNA
aattagccagccgtggtggcgggcgcctgtaatcccagttactctggaggctgaggcaggagaatcgcttgagcccgggaggcagaggttgtagtgagctgagaccactgcactctagca

SEQ ID NO: 11340 - DNA, 120 bp, synthetic construct
  misc_feature 1..120: note = Artificially Synthesized Probe
  source 1..120: mol_type = other DNA
ctgtgcccggcctgcttctggtcttttaactatcttactatatggtttcttttcaaggtacctcattatccatagtaaatgttgtgaatgaatcagggcattatcttagctaattatttc

SEQ ID NO: 11341 - DNA, 120 bp, synthetic construct
  misc_feature 1..120: note = Artificially Synthesized Probe
  source 1..120: mol_type = other DNA
gagccttgcagcatccattagatagttactaaatattaatgagtaagtagttgcatggagtgtcatgatggctgacagctgtagatggaggtgtttttagtggtctgaaactgtatactg

SEQ ID NO: 11342 - DNA, 120 bp, synthetic construct
  misc_feature 1..120: note = Artificially Synthesized Probe
  source 1..120: mol_type = other DNA
gaacaagaaaatctgcaacaagagagcctaaagaaatctgatctaatacagatctgatacagatcacctgggcttggttgttacacaattataccctggtgtattagtctcttgcactgc

SEQ ID NO: 11343 - DNA, 120 bp, synthetic construct
  misc_feature 1..120: note = Artificially Synthesized Probe
  source 1..120: mol_type = other DNA
acatcctctgcccatcaggctttgggttattagatggatttctggactggtaacgttctcagccccacctgtaccttagactgttgcttggagagcttttacaaaataccattgttgaga

SEQ ID NO: 11344 - DNA, 120 bp, synthetic construct
  misc_feature 1..120: note = Artificially Synthesized Probe
  source 1..120: mol_type = other DNA
gataatcacttggtttcctaatgctagaaaatacatttccttcatcttagatggatgacattttatatgctttattctttaaaggtctttcaatcctgatggaaaactggcatttaacca

SEQ ID NO: 11345 - DNA, 120 bp, synthetic construct
  misc_feature 1..120: note = Artificially Synthesized Probe
  source 1..120: mol_type = other DNA
gaaccactgtgcgcggtctatcctgaagatctttacctaatgtttatccaatatagctagccatttctagttcaaccacaaagcaaaaatgcttccaggaagcatttattcacagaaaag

SEQ ID NO: 11346 - DNA, 120 bp, synthetic construct
  misc_feature 1..120: note = Artificially Synthesized Probe
  source 1..120: mol_type = other DNA
tgtcagaagttgctgaagttcccggttcagcctattattgctgcatattcttgaaaacaaaattgttgatgattcagatgtatgtgtgactgtgcgaagaaaacccctccatttctgttg

SEQ ID NO: 11347 - DNA, 120 bp, synthetic construct
  misc_feature 1..120: note = Artificially Synthesized Probe
  source 1..120: mol_type = other DNA
gtcttcatattttagtcttctgtcttttgggaggtacttttaaaaaaagaaataggaaaggcatgcttacggggaacacgagtatgcctgtgcactcctgtgtgcacgtgtcatttgatc

SEQ ID NO: 11348 - DNA, 120 bp, synthetic construct
  misc_feature 1..120: note = Artificially Synthesized Probe
  source 1..120: mol_type = other DNA
atgattatgtgggtcaatgattattgacaatcataggagaactctaggggatgaatacagtcaagagttacattgccaggaagatttagggttgggaaaggcattatgaacactgttagg

SEQ ID NO: 11349 - DNA, 120 bp, synthetic construct
  misc_feature 1..120: note = Artificially Synthesized Probe
  source 1..120: mol_type = other DNA
ggcagacagcttgtgtgggctgcattccacctcagccttgtaaagatgccagaagcatcaaggtgaatttttaaagcctatttaactatttagacttgactaatttcagtgaaatctcta

SEQ ID NO: 11350 - DNA, 120 bp, synthetic construct
  misc_feature 1..120: note = Artificially Synthesized Probe
  source 1..120: mol_type = other DNA
tcatttgttgttactgggaaggggaattgggtggctggaaacaaaagtgggagactttttacactttttgataattggaccatgtgaatatattcccaaactcagaagctacacacacat

SEQ ID NO: 11351 - DNA, 120 bp, synthetic construct
  misc_feature 1..120: note = Artificially Synthesized Probe
  source 1..120: mol_type = other DNA
acctaaaatgttttctttggctttgttattatcagactgtcttggcattgggttggtgatttcaagttgcaggctgtgggggaaatattctaccttcctggggctaaaagtaagatttac

SEQ ID NO: 11352 - DNA, 120 bp, synthetic construct
  misc_feature 1..120: note = Artificially Synthesized Probe
  source 1..120: mol_type = other DNA
caaactgtttaaagggctgctgggatcagatgcaacatgttatgttatctgtaaaattagtcataggttccatctctgggtgggctgataaatttcatctgtggtctcaagtaacactct

SEQ ID NO: 11353 - DNA, 120 bp, synthetic construct
  misc_feature 1..120: note = Artificially Synthesized Probe
  source 1..120: mol_type = other DNA
agagtccataatataatcccagaaataaatgcacaggcactccagttttaccctgctctggagagtttagacctcagctcaaatataatatcagaaatcaagacatcttcatttcctcgc

SEQ ID NO: 11354 - DNA, 120 bp, synthetic construct
  misc_feature 1..120: note = Artificially Synthesized Probe
  source 1..120: mol_type = other DNA
aacagaataaccaccttggaggctggttgcttcgataatttatcaagttccttattagtggtaaagttaaaccgtaaccgaatgagcatgattccacctaagatcttcaagctgcctcac

SEQ ID NO: 11355 - DNA, 120 bp, synthetic construct
  misc_feature 1..120: note = Artificially Synthesized Probe
  source 1..120: mol_type = other DNA
ccaccgtgcccggccaaaaagtttatattcttaatgttttggctaatgaaaattaccagaatttatccaaacaggtatactataccacttggcctgttggttttgtagagctcctatttt

SEQ ID NO: 11356 - DNA, 120 bp, synthetic construct
  misc_feature 1..120: note = Artificially Synthesized Probe
  source 1..120: mol_type = other DNA
aaatacaatgaattccttaccttccacatttcttgttttcagtgatttgtcctataaccagctgacccgcctggatgaatctgcctttgtgggtctgagcttattggagagattgaattt

SEQ ID NO: 11357 - DNA, 120 bp, synthetic construct
  misc_feature 1..120: note = Artificially Synthesized Probe
  source 1..120: mol_type = other DNA
gagtaattagtagaatttgtagattcttaagcttcctgaatagaggactttgtggtcattaggtttcgagttgaaatggttcagagaagaggcaggttcccaacttggagacataaccat

SEQ ID NO: 11358 - DNA, 120 bp, synthetic construct
  misc_feature 1..120: note = Artificially Synthesized Probe
  source 1..120: mol_type = other DNA
ttgctcttgagcaatgaaactgtattgatattactctctgtcagccattgtaagttcaaggtcccagaggaaggcttgggtcacccagaaatcccattaatctgaaatcagatttataag

SEQ ID NO: 11359 - DNA, 120 bp, synthetic construct
  misc_feature 1..120: note = Artificially Synthesized Probe
  source 1..120: mol_type = other DNA
ggtatgagccactgaacttggctggtttttttctttttttttttgagacagggtcttgctctgtcacccaggctggagtgctgtggtgcaatcacagctcacagcagcttcaacctccta

SEQ ID NO: 11360 - DNA, 120 bp, synthetic construct
  misc_feature 1..120: note = Artificially Synthesized Probe
  source 1..120: mol_type = other DNA
actgtaagtaacttgtctttttaaaatcaccagttggatcattgttcctgcttgttgtgcttaaagtgtgatgggagtgacccaagttatttccaaaagcacacagttcaggcaggaaaa

SEQ ID NO: 11361 - DNA, 120 bp, synthetic construct
  misc_feature 1..120: note = Artificially Synthesized Probe
  source 1..120: mol_type = other DNA
gattcaaatatgcagtcaggggtaagaaccactagattatagaaattattttgccttgcctgggaagctactcaaaggatactctgtggagcagaactggttgatgagaagataaggata

SEQ ID NO: 11362 - DNA, 120 bp, synthetic construct
  misc_feature 1..120: note = Artificially Synthesized Probe
  source 1..120: mol_type = other DNA
aaactcttttgaagatacagcatttgaaccaggaccttaatgaaatggcaaaccatgtgaacactgggtgaatggctttccaggcacaaggagtaggaagtaaaatgagtttagagagtt

SEQ ID NO: 11363 - DNA, 120 bp, synthetic construct
  misc_feature 1..120: note = Artificially Synthesized Probe
  source 1..120: mol_type = other DNA
aacagtaggtcaaagcaaatattgcagtctcaatcttcagagagtcatttagtaatttgagagttgtcacaaagattctttgcttgaccaacccgtaggcaagcccttaaaccttctcct

SEQ ID NO: 11364 - DNA, 120 bp, synthetic construct
  misc_feature 1..120: note = Artificially Synthesized Probe
  source 1..120: mol_type = other DNA
aaagtaatgacttgggttgaaaaggaaaaagaacaattggaaatagcctaagtattttatctacactcagatgggctttggagatatccagacagcccctagatgtctcttcagcctcca

SEQ ID NO: 11365 - DNA, 120 bp, synthetic construct
  misc_feature 1..120: note = Artificially Synthesized Probe
  source 1..120: mol_type = other DNA
aataaagtatttagccccgtgcctggccacagacaaaacttaattcacagtagcttccttcacttctgtgtcttttgcttctttccattcttcatatactaaccaaatcctgagcacaag

SEQ ID NO: 11366 - DNA, 120 bp, synthetic construct
  misc_feature 1..120: note = Artificially Synthesized Probe
  source 1..120: mol_type = other DNA
gatcttagatactttatgccaaacattaaacttgataaggatttgatcatgcacataaagcaagttctcaaaatcatttactttccctgcttctaagtggatgggacatttaaggggtca

SEQ ID NO: 11367 - DNA, 120 bp, synthetic construct
  misc_feature 1..120: note = Artificially Synthesized Probe
  source 1..120: mol_type = other DNA
ctttagtcgtcttcaaaacagatccctggccacccttcttcccctctctttttttagtgtctttcatgaggttgatatatttaaagaattttggctgacagtctcaatttgttttctcat

SEQ ID NO: 11368 - DNA, 120 bp, synthetic construct
  misc_feature 1..120: note = Artificially Synthesized Probe
  source 1..120: mol_type = other DNA
tatactgattctgtgtgtttcatattttttgtgtggtttcataacattaaagtggcagagttttgttttttccttgaggggagagagatagtcatagacaagttgtcctgattctagcac

SEQ ID NO: 11369 - DNA, 120 bp, synthetic construct
  misc_feature 1..120: note = Artificially Synthesized Probe
  source 1..120: mol_type = other DNA
ggatatccctagtatctctgatcatttgagtacctatatattgccaaatctgttttcacaatgtacttaaagatggttggaacagaacacacacttggaagttcgggctcacaaaataca

SEQ ID NO: 11370 - DNA, 120 bp, synthetic construct
  misc_feature 1..120: note = Artificially Synthesized Probe
  source 1..120: mol_type = other DNA
actgactgacatgtctttgagcaagtcatttgaattttctgggcctcatttcccccatctttaaacaagggaattggactgtagctctgtagtctctttcaactttaatatgccactttg

SEQ ID NO: 11371 - DNA, 120 bp, synthetic construct
  misc_feature 1..120: note = Artificially Synthesized Probe
  source 1..120: mol_type = other DNA
ctttggttgaagggtaagtgctgtggccctaggagatgtgctactttcactgctgtttatgcttttgaagacattcttatgaaattctcagttttcattccagaaccataaatctctctt

SEQ ID NO: 11372 - DNA, 120 bp, synthetic construct
  misc_feature 1..120: note = Artificially Synthesized Probe
  source 1..120: mol_type = other DNA
gagtcatagtaaataccaggttctaaaatacgaagttcaaagaaggtttgtggccttctgctttccctagttccagctgatgattaagtgtatcatgcatcctagaagacacagtcatca

SEQ ID NO: 11373 - DNA, 120 bp, synthetic construct
  misc_feature 1..120: note = Artificially Synthesized Probe
  source 1..120: mol_type = other DNA
atctttttaagtccctctctgtaaggtttctgtttcatgtaggtgtgtttactattcactgagtttgcattgagagttccactgttcttttaggagtatcccagccatttgatgctgctt

SEQ ID NO: 11374 - DNA, 120 bp, synthetic construct
  misc_feature 1..120: note = Artificially Synthesized Probe
  source 1..120: mol_type = other DNA
cagctattgcagctgccctgaacttctttcttaggatagcttgcctaagctggaattatcgagaaaagattgaggcttttttcaggattttgttctgaaacattaacttctaatcctccc

SEQ ID NO: 11375 - DNA, 120 bp, synthetic construct
  misc_feature 1..120: note = Artificially Synthesized Probe
  source 1..120: mol_type = other DNA
gtctgctgtgttgttggcacttctttgatctgggtcattgttatttaccacatgagaaggaaaaatgaagactatagtatcacaaacacaggtaagtagtacccacatgacacctatggc

SEQ ID NO: 11376 - DNA, 120 bp, synthetic construct
  misc_feature 1..120: note = Artificially Synthesized Probe
  source 1..120: mol_type = other DNA
gatcagtctctttttttcccttgaatatcaaactggatcattgaggtcagtcttttacacctctcaccctggaatcctgcaagaaaagaaatctaggcagatagattatgaaagtgtggc

SEQ ID NO: 11377 - DNA, 120 bp, synthetic construct
  misc_feature 1..120: note = Artificially Synthesized Probe
  source 1..120: mol_type = other DNA
agactccccacctctaaaagaaatcaacaaatggtagcaatggttctcagcatatactggagaacatcagagagatgtaaagagttccctaattaaatgaacctgacatcccaacacgta

SEQ ID NO: 11378 - DNA, 120 bp, synthetic construct
  misc_feature 1..120: note = Artificially Synthesized Probe
  source 1..120: mol_type = other DNA
tgctcctggcctgttgcatgattttgaataagtaactcactctttatttctcactctctcttctctccttcatcattcagttttcaaagcacataataatccagggagttcattgttaaa

SEQ ID NO: 11379 - DNA, 120 bp, synthetic construct
  misc_feature 1..120: note = Artificially Synthesized Probe
  source 1..120: mol_type = other DNA
aagatatttagattctttttcttgttattaggtggcactggtacccgggtgatttgctcagattgttatgacaatgccaacatctactccaggacccgagaatactgtccatacacctat

SEQ ID NO: 11380 - DNA, 120 bp, synthetic construct
  misc_feature 1..120: note = Artificially Synthesized Probe
  source 1..120: mol_type = other DNA
cttccttctatcatataggtagtgctctcatttgacaggaagcaagcagatgggtatataggagtaactggccattgttaaatggtataaactatagccagagatttctgcatactagag

SEQ ID NO: 11381 - DNA, 120 bp, synthetic construct
  misc_feature 1..120: note = Artificially Synthesized Probe
  source 1..120: mol_type = other DNA
gccaccatgcctggctgagaagagttttaaatgttttgttttgttgctgttttagcaggtaaacatttaatttcagcttcacttggcgggtgtttttttctatgaggtatgatcaaggtc

SEQ ID NO: 11382 - DNA, 120 bp, synthetic construct
  misc_feature 1..120: note = Artificially Synthesized Probe
  source 1..120: mol_type = other DNA
cccatgttagattatgtcccacaggttacaggatcatgcttttgattttaattttagtaggacttggaacattcaagatggtagtgagggcacatgaaactcttcaggatgaaatctggg

SEQ ID NO: 11383 - DNA, 120 bp, synthetic construct
  misc_feature 1..120: note = Artificially Synthesized Probe
  source 1..120: mol_type = other DNA
aaaagggtttaagaaggaccagaaatgtagtcccatcttttttgtaactttggggatgccttcatttttaatctggtccgtaagtaaggaaatcagcaaatgagagtgcttcggcccatt

SEQ ID NO: 11384 - DNA, 120 bp, synthetic construct
  misc_feature 1..120: note = Artificially Synthesized Probe
  source 1..120: mol_type = other DNA
tctttgaggatttggctaaaaggatattaagttttaccagtcactactgataattcttgtctttcattctcagaaacattgcagcggcccgtgtggaacataaacagagaactaggcctg

SEQ ID NO: 11385 - DNA, 120 bp, synthetic construct
  misc_feature 1..120: note = Artificially Synthesized Probe
  source 1..120: mol_type = other DNA
tagttgagactggggctttgatattcaaggtctttggcaagaatcccaggcttgaccaactggtaccaggtcaaagatttttgtattcttgtgaatttttttttttgtccctattgccca

SEQ ID NO: 11386 - DNA, 120 bp, synthetic construct
  misc_feature 1..120: note = Artificially Synthesized Probe
  source 1..120: mol_type = other DNA
tgactggggtgagccgctaggatacaaatcactatcactgtccatatttgagtctgcaaatcttgtcattgtctgctttaatgctctttgagttgcaacaggtgtattatttaaatgagt

SEQ ID NO: 11387 - DNA, 120 bp, synthetic construct
  misc_feature 1..120: note = Artificially Synthesized Probe
  source 1..120: mol_type = other DNA
gtaaccttctcagcaactcttctgtacttcacctatagtgcctagcaaattgttatcactcataagcctgtaatcttcatcactcaggttatttgcaagtagaaagcttctggaaccatt

SEQ ID NO: 11388 - DNA, 120 bp, synthetic construct
  misc_feature 1..120: note = Artificially Synthesized Probe
  source 1..120: mol_type = other DNA
gtgagccaccgagcccggccggtccttattttatacaagtgattaagccaaaaattttcttgaatttctgataccaaagagctttaggtaaataacttcacactctaatgcaatgtaatt

SEQ ID NO: 11389 - DNA, 120 bp, synthetic construct
  misc_feature 1..120: note = Artificially Synthesized Probe
  source 1..120: mol_type = other DNA
gtgactcacctttctaatgtattcgaagttatccctataattatattactctcgctcaaattctgatagatttcctgaatggaataggtggaattagggctaggctgccagagactgtgc

SEQ ID NO: 11390 - DNA, 120 bp, synthetic construct
  misc_feature 1..120: note = Artificially Synthesized Probe
  source 1..120: mol_type = other DNA
ttctgatcaagcaatatgttaaccctctaagtaggattagtgtcccatgagtatttcttccagcagaatcatgtctgcctaatgctaatcaggaatgttgcaaactgaaatgctcctttc

SEQ ID NO: 11391 - DNA, 120 bp, synthetic construct
  misc_feature 1..120: note = Artificially Synthesized Probe
  source 1..120: mol_type = other DNA
aactttgtcctttctaagtcctttgtattcattttagagctcttcaggaaactagagaattttggactttggttgacaaaagcggtctgacctgtgttcgtagctgggaacatgaaacac

SEQ ID NO: 11392 - DNA, 120 bp, synthetic construct
  misc_feature 1..120: note = Artificially Synthesized Probe
  source 1..120: mol_type = other DNA
gtgcctgttttcagataaaggagtaaagtgatctacaaactgtaactatcttgaaagagaaattgatcatcagatggtcgagtactcttggaatgtctctttgctgtttactgtggcctc

SEQ ID NO: 11393 - DNA, 120 bp, synthetic construct
  misc_feature 1..120: note = Artificially Synthesized Probe
  source 1..120: mol_type = other DNA
acaaaacaacagcagacaacagagatttccaactccagcaatgacaggctagggtacctagatgaaccatcacactgaaaacacatgctgcagtaaatactgaatttctccttaagagct

SEQ ID NO: 11394 - DNA, 120 bp, synthetic construct
  misc_feature 1..120: note = Artificially Synthesized Probe
  source 1..120: mol_type = other DNA
ataaataacaaagaacagaagacaacatgaccccacaagtgaaccagagggaaagacaggaacagaccattggagactttagggatggttagtgataccagaggctaaaataatcatgtg

SEQ ID NO: 11395 - DNA, 120 bp, synthetic construct
  misc_feature 1..120: note = Artificially Synthesized Probe
  source 1..120: mol_type = other DNA
caatgctgcccttcatgtacttccagccccggaggagctgaacctagagatacctggaaacccagcttagggaagtaaaaaaaaaatcactgcatctcataattattgagatatttttaa

SEQ ID NO: 11396 - DNA, 120 bp, synthetic construct
  misc_feature 1..120: note = Artificially Synthesized Probe
  source 1..120: mol_type = other DNA
tggaaacctttgctttccaaaagataaccattaagaaagtaaaatagcaagccagaggatcggaaattattcacaacacatatctgaggaaggactcacacctagacctgggaataacgc

SEQ ID NO: 11397 - DNA, 120 bp, synthetic construct
  misc_feature 1..120: note = Artificially Synthesized Probe
  source 1..120: mol_type = other DNA
caatggacccaaaagtaggtttctttggggaaaatatctgtaaaaatgataaactcttagctagtctgatcagggggaaaagaaaacacaaatggcccagagcaggaatgagaatggaca

SEQ ID NO: 11398 - DNA, 120 bp, synthetic construct
  misc_feature 1..120: note = Artificially Synthesized Probe
  source 1..120: mol_type = other DNA
gcacaggtgacaaatgaaataaaaatacacagtcctcaatagcatatcgaacacctaggactagatctaaaggaaaacatgccagacacatgcacagaaaactccagttcattgttggga

SEQ ID NO: 11399 - DNA, 120 bp, synthetic construct
  misc_feature 1..120: note = Artificially Synthesized Probe
  source 1..120: mol_type = other DNA
atggaaacaccaaggacataaacagccacaagaatctttaaaaagaagagttggaaaatgcacatcacctcgattcagggtttattataaacccaactgtagccaagacagtgtggcggc

SEQ ID NO: 11400 - DNA, 120 bp, synthetic construct
  misc_feature 1..120: note = Artificially Synthesized Probe
  source 1..120: mol_type = other DNA
tcaccacagctatttccaagtgagtgttattaccccagaaaggaagcaactcaaatatccacccacaataaagtgcattaaaatcagagcacaggacagtcatgcaatggaatactatac

SEQ ID NO: 11401 - DNA, 120 bp, synthetic construct
  misc_feature 1..120: note = Artificially Synthesized Probe
  source 1..120: mol_type = other DNA
agctgcagaggtgagagttgaaagacgctgcccccaggccacagtctctgactgtccacagaaccacacgctccacatcttcccctcaaactcaactcaagcgctcttggctttaaatca

SEQ ID NO: 11402 - DNA, 120 bp, synthetic construct
  misc_feature 1..120: note = Artificially Synthesized Probe
  source 1..120: mol_type = other DNA
agtactaactagaaaatcccaccaaagaacgctaagagccaccagccaggagcagttcatgctgaagtggaaagctcagggtctctgtgataggcccatggtgttatttatttacttact

SEQ ID NO: 11403 - DNA, 120 bp, synthetic construct
  misc_feature 1..120: note = Artificially Synthesized Probe
  source 1..120: mol_type = other DNA
ttctgccaggcagacccgcaccaccctctcctatcagaacttctaccttcatttattttttaggcctttgctatttttgaatcggtaacacatgcctgcagttcaaagtttaaaaggcac

SEQ ID NO: 11404 - DNA, 120 bp, synthetic construct
  misc_feature 1..120: note = Artificially Synthesized Probe
  source 1..120: mol_type = other DNA
ctcagcttctcgtgcgcaatctccagctgcttctggtagtggttgtgcttctcgattttggcttcgaagtgcttgagctcctcctggaacaaggtttccataggtgagtgttcccttccc

SEQ ID NO: 11405 - DNA, 120 bp, synthetic construct
  misc_feature 1..120: note = Artificially Synthesized Probe
  source 1..120: mol_type = other DNA
agatgagaaggaaaacgcaagcaggttcaccgagtggttaaggaagaaactgcgagaatcttgagagagagagcttggaggagagggctgcatttccttacccggaaactgcaagagaat

SEQ ID NO: 11406 - DNA, 120 bp, synthetic construct
  misc_feature 1..120: note = Artificially Synthesized Probe
  source 1..120: mol_type = other DNA
aggtgggaagagaagtgtgtggggctgagtcgccctttcctgcatggactatagccaggctcatccgggtctctccagcacaggaactcagcaaactgcatcgcaggcctacaaggtggt

SEQ ID NO: 11407 - DNA, 120 bp, synthetic construct
  misc_feature 1..120: note = Artificially Synthesized Probe
  source 1..120: mol_type = other DNA
ggttgatgctgcgcagcttctccttcagctccgtgtgcctgctgtgcaggacgctgcccttgatgtcgctcaggtccgaggggctaatgacgttctcgtggatttctgtaaaaccgaagg

SEQ ID NO: 11408 - DNA, 120 bp, synthetic construct
  misc_feature 1..120: note = Artificially Synthesized Probe
  source 1..120: mol_type = other DNA
gttgtactcgtgaactttctctttgtgatgcaggaactcccgccagagcttgtccagttcttcgccggagaatttcccagaggtcttcgcctaagagggaaacaaggcctggagtgaacc

SEQ ID NO: 11409 - DNA, 120 bp, synthetic construct
  misc_feature 1..120: note = Artificially Synthesized Probe
  source 1..120: mol_type = other DNA
ccaaacagagctcctttactcaaagagcaaggaatcttctaaacaggaaagctgaaaagattcacagaatgacagtggaatggcttccttaggaagccaccgtcttcctgagactttccc

SEQ ID NO: 11410 - DNA, 120 bp, synthetic construct
  misc_feature 1..120: note = Artificially Synthesized Probe
  source 1..120: mol_type = other DNA
gcacacatcttatatttattgggaggaaaaacagtttctaaaggagaaacgtcagtgtcagcagcttctaacaaaaagttactggtagcagccaggaggaataaatagtctgcagtgtgc

SEQ ID NO: 11411 - DNA, 120 bp, synthetic construct
  misc_feature 1..120: note = Artificially Synthesized Probe
  source 1..120: mol_type = other DNA
aataataccggctgtgggggatgagaaaataaatgaaataaatacatacaaaaatacacaaactttttaaaaaagtggcctggatgcctcctggccttagaaagccagtgccaggcctgc

SEQ ID NO: 11412 - DNA, 120 bp, synthetic construct
  misc_feature 1..120: note = Artificially Synthesized Probe
  source 1..120: mol_type = other DNA
tttcctgagtgtgggcagggtctgcttctgggacgccggctcctagagtcccactaagttttctgccaggtcactaggcaatggcagaaaacaagacagctccacttgggccacagacct

SEQ ID NO: 11413 - DNA, 120 bp, synthetic construct
  misc_feature 1..120: note = Artificially Synthesized Probe
  source 1..120: mol_type = other DNA
ccagacaaatcaccctctctgagcctgtcaaatgggacgacaacgagttttgaggagtaggtgttagagcatcaggcctaacgaaggaactccgtagacacctcctctctttaccagaga

SEQ ID NO: 11414 - DNA, 120 bp, synthetic construct
  misc_feature 1..120: note = Artificially Synthesized Probe
  source 1..120: mol_type = other DNA
ttcccaaatccaaaaacaaaatccgacatccaaaacactgccgctctcaagcatttaggaagagggatactcgacctgcattaggaaagaaacaaacgtaccattgaggttgcgtatgag

SEQ ID NO: 11415 - DNA, 120 bp, synthetic construct
  misc_feature 1..120: note = Artificially Synthesized Probe
  source 1..120: mol_type = other DNA
tttggttgcaaagacaggatttaggccaagagtgtccccacgtcagaaagactgggccagaatgccaggcggccgaggcaagcagcagaatgaaacccaccggccagctctcatcaactc

SEQ ID NO: 11416 - DNA, 120 bp, synthetic construct
  misc_feature 1..120: note = Artificially Synthesized Probe
  source 1..120: mol_type = other DNA
agtttaaaatttagttagggatgaattcagattactgagccaagatccccaatggtaaaaagatagcaaacggtaggcacaaaatgaatggcagggcctagggcagaggaaagcttctaa

SEQ ID NO: 11417 - DNA, 120 bp, synthetic construct
  misc_feature 1..120: note = Artificially Synthesized Probe
  source 1..120: mol_type = other DNA
attctttcacctctctcaagttaaatgttaacgcatcaagttagaagtaccctgtggaaaccaactgcagaaaagaacctgtcaaacatgaagcagcgaggcaaatcatcaacaaccagg

SEQ ID NO: 11418 - DNA, 120 bp, synthetic construct
  misc_feature 1..120: note = Artificially Synthesized Probe
  source 1..120: mol_type = other DNA
gtttccactcgtcagacctctgagaacaagatgcttcacacactctcattgcagtcaccattcacgtcagaactaaggactgtctgcgtgcggtgcctcctgggactacacctgtaatcc

SEQ ID NO: 11419 - DNA, 120 bp, synthetic construct
  misc_feature 1..120: note = Artificially Synthesized Probe
  source 1..120: mol_type = other DNA
tcctgaaacgctcccttcaccctatgcctactgacacactacgcaatcctatatgccaggatgtggctttacatgcagaaaacagggacacgatgttttcatgaagcaaaccaaagaaag

SEQ ID NO: 11420 - DNA, 120 bp, synthetic construct
  misc_feature 1..120: note = Artificially Synthesized Probe
  source 1..120: mol_type = other DNA
tgtggagctgatgcccaggcgtcaatccccatccccacgcagtcttataaccgtctgtcgtctgtctgtcccccacctgtttctcctctcccttttcgttccaaaagttccttcttattc

SEQ ID NO: 11421 - DNA, 120 bp, synthetic construct
  misc_feature 1..120: note = Artificially Synthesized Probe
  source 1..120: mol_type = other DNA
ctcctcatttctcgctcaaatgaacaagcacgggcttgctactgggattccttctgtccctggacacgtctttctacccaacattttgtttttcttgtttccccacatagggagataagg

SEQ ID NO: 11422 - DNA, 120 bp, synthetic construct
  misc_feature 1..120: note = Artificially Synthesized Probe
  source 1..120: mol_type = other DNA
ccccacaaaagcctccaaaccagttgtcaccaacccactcacctctattcaagacagaggtcattacctttaagtataatatttcccctttttcctaagcagttttgaaaatggttttgt

SEQ ID NO: 11423 - DNA, 120 bp, synthetic construct
  misc_feature 1..120: note = Artificially Synthesized Probe
  source 1..120: mol_type = other DNA
tgcttctgaattacatagaacatcttggtccacagacaatggaatggatttttggagagagtgtcaatttagggctaaagaaatacagggtgagaatgaagccctcaacaaaagctccaa

SEQ ID NO: 11424 - DNA, 120 bp, synthetic construct
  misc_feature 1..120: note = Artificially Synthesized Probe
  source 1..120: mol_type = other DNA
tacagactctttatactaatgcagaaggataagcctcttcttcccactctaaaaatctcttctttgctgtaaagaattctcagtgcatgtgagctaagactctggagcactcagtagaga

SEQ ID NO: 11425 - DNA, 120 bp, synthetic construct
  misc_feature 1..120: note = Artificially Synthesized Probe
  source 1..120: mol_type = other DNA
atacgactatatgagtaaagggctagcaaatctacttctctaaggacaaatctcaccttgaattccctttctagctctgctcccctggaactctgataaaggtaaaatgtcaactcagtt

SEQ ID NO: 11426 - DNA, 120 bp, synthetic construct
  misc_feature 1..120: note = Artificially Synthesized Probe
  source 1..120: mol_type = other DNA
tctacatattttatataaattatgacaaaagtatagaagtccttaaaaaaaacagtccctcatccctctgcaggctgtgggaagaaggagcagaagagcaacatggtgggatgtagggca

SEQ ID NO: 11427 - DNA, 120 bp, synthetic construct
  misc_feature 1..120: note = Artificially Synthesized Probe
  source 1..120: mol_type = other DNA
tgatattctaaaaataactgttttagaatggtgattcaacatcataggagatgaaaaaaatgatgtatgttttgtgtgcatgccagcctcccttgccagcctaggtaagtgccagcccct

SEQ ID NO: 11428 - DNA, 120 bp, synthetic construct
  misc_feature 1..120: note = Artificially Synthesized Probe
  source 1..120: mol_type = other DNA
tttgcttcaaaaaaacatggctggtgggaagaagaaagtagaggtacaaatgaaaccagactggccatgcattggtaactgctaaatagagtgaagagtgcatgggggttcattatacta

SEQ ID NO: 11429 - DNA, 120 bp, synthetic construct
  misc_feature 1..120: note = Artificially Synthesized Probe
  source 1..120: mol_type = other DNA
aagtgagaatatcttgcataccaggaagattgtagaaaaacttaaaaaataaatgtgagaatatcttgcatgccagggaaactgcaggtgtgtgagctatgtactgtcccctctgcccta

SEQ ID NO: 11430 - DNA, 120 bp, synthetic construct
  misc_feature 1..120: note = Artificially Synthesized Probe
  source 1..120: mol_type = other DNA
tccacacacaactgagtcttctctgctacccagtatgacacctgtagcacacaggagaatattctctggtctctatttctagaacatcagttctactttcccaataaaactattacattt

SEQ ID NO: 11431 - DNA, 120 bp, synthetic construct
  misc_feature 1..120: note = Artificially Synthesized Probe
  source 1..120: mol_type = other DNA
gttaccgcagatcacaaactttaaatgtccatcaataaacgctgtccaaaatttcatgctcttcactttaccttgaaaaggtgtgatcaggagctacttcaggctctctagaaggttaag

SEQ ID NO: 11432 - DNA, 120 bp, synthetic construct
  misc_feature 1..120: note = Artificially Synthesized Probe
  source 1..120: mol_type = other DNA
caatggagtatttacggtgtgcccgtgaagtggaatggtaagtggccactccaattaatgagaatgattagaaagagaggtagataactactagtattgtctccatttgtcagatgagta

SEQ ID NO: 11433 - DNA, 120 bp, synthetic construct
  misc_feature 1..120: note = Artificially Synthesized Probe
  source 1..120: mol_type = other DNA
aaatgaaaatagtccatagtatctactgaaaaagagtaccacaaattcctaggaaagacagatagtgggggtgtgccatctgaagatttgcaaaggccaatgagaagtgactacacacaa

SEQ ID NO: 11434 - DNA, 120 bp, synthetic construct
  misc_feature 1..120: note = Artificially Synthesized Probe
  source 1..120: mol_type = other DNA
tcactatgaaccacagcttgtaatccattgaggacttcagagacttcatctatggtgaaggtgtcctccaccagcctgaaaaacaaccatgatccaaaacttatagaaaaacaacaagaa

SEQ ID NO: 11435 - DNA, 120 bp, synthetic construct
  misc_feature 1..120: note = Artificially Synthesized Probe
  source 1..120: mol_type = other DNA
aactactcttacatagagaatgcttgggttggaagagaactttggtgccatcttctacaatcccctaactttacagataggaacacaggtttgaagagtggagatgacttgcctatggtt

SEQ ID NO: 11436 - DNA, 120 bp, synthetic construct
  misc_feature 1..120: note = Artificially Synthesized Probe
  source 1..120: mol_type = other DNA
agattcattgctttcaccacaatacaacttcttttgtttcctgtatccatgaggcttagtgtagctgctcttagcaaataattgatcatgatgaatcccagaaattgtctggcctctgct

SEQ ID NO: 11437 - DNA, 120 bp, synthetic construct
  misc_feature 1..120: note = Artificially Synthesized Probe
  source 1..120: mol_type = other DNA
gctaagagcaaggcatcagccatgttagttggatttgtaattaagctgctgatgagatttacaaagcagtttaggtggcataagtctttaaggtctggaggatagaatggagatagcaag

SEQ ID NO: 11438 - DNA, 120 bp, synthetic construct
  misc_feature 1..120: note = Artificially Synthesized Probe
  source 1..120: mol_type = other DNA
gccacactagtctgctcatcagtcctgaaacatgacttaaaatttcctgccttgactttcactcatgttactctgatcctaaagtatctctccattcctatttgagaatctgaatcctac

SEQ ID NO: 11439 - DNA, 120 bp, synthetic construct
  misc_feature 1..120: note = Artificially Synthesized Probe
  source 1..120: mol_type = other DNA
aattgtgtatgtgtgtttagggggaaggggatagaagagaaatgggtaaggtaccagaaagggttccctgttcttaaccatgcccacaaatccatatacaatttaagataagtacaagga

SEQ ID NO: 11440 - DNA, 120 bp, synthetic construct
  misc_feature 1..120: note = Artificially Synthesized Probe
  source 1..120: mol_type = other DNA
tgatattttttgagcaagccaaaacaaaggaaatgtcacccaaattcctcagctgtaatacggggtgctgggattcttaaagtcacctccacatcagaaagttggatttcaatcacacag

SEQ ID NO: 11441 - DNA, 120 bp, synthetic construct
  misc_feature 1..120: note = Artificially Synthesized Probe
  source 1..120: mol_type = other DNA
taaaaaaaatgcaaaaagcatgggttttctccgagagcagtgaatttcaaaaggttccatatgcctggaactactatggaagcttgttgaacaaattcctgggccttatctccagaaatt

SEQ ID NO: 11442 - DNA, 120 bp, synthetic construct
  misc_feature 1..120: note = Artificially Synthesized Probe
  source 1..120: mol_type = other DNA
gtcagcaaatctgaacatgaattttagtctcaaaagtgatgaatttggctcatgaaaaggctgaacttgtacttcaggttgtttactagtgcgggttggtcaccaaagcaaacaattcga

SEQ ID NO: 11443 - DNA, 120 bp, synthetic construct
  misc_feature 1..120: note = Artificially Synthesized Probe
  source 1..120: mol_type = other DNA
gtattggagagtgctgacaaactagattagtgaaatcactatcacatgcattaaagcaggtcaagcaaggaagtggttcaccataaaatacaactccctctaagaatgtgtggatgttgg

SEQ ID NO: 11444 - DNA, 120 bp, synthetic construct
  misc_feature 1..120: note = Artificially Synthesized Probe
  source 1..120: mol_type = other DNA
aaattaaatttgctcagaaagttttgcctacaaagctggggctgtgtagtcctattggaagagctgaatagctgtgtcatgaatagctgtgttcatgactggaagttttctcaatgggat

SEQ ID NO: 11445 - DNA, 120 bp, synthetic construct
  misc_feature 1..120: note = Artificially Synthesized Probe
  source 1..120: mol_type = other DNA
atggaaatgcataatttctgtctgactttttcttttttgtttatctaaaaatgtttctacgtggtaccagtccttcttccgccatttgcatgtttcagtgcctgcataatagaagggtcc

SEQ ID NO: 11446 - DNA, 120 bp, synthetic construct
  misc_feature 1..120: note = Artificially Synthesized Probe
  source 1..120: mol_type = other DNA
gcacaaaacattggagttagataatcctttcctattacattttggtgctcatttctcttctttatgaataaatgtcctttgtggtatcttttttcccagaatggggcattttcatctgca

SEQ ID NO: 11447 - DNA, 120 bp, synthetic construct
  misc_feature 1..120: note = Artificially Synthesized Probe
  source 1..120: mol_type = other DNA
tcaaaccaatgttgttcaggtgcaactgtgtatttctgatttcaaacatttttataggccatcggccctgtgtctaaagtgtctatcggttgttgggagaacaaagatgaagtaaggtcc

SEQ ID NO: 11448 - DNA, 120 bp, synthetic construct
  misc_feature 1..120: note = Artificially Synthesized Probe
  source 1..120: mol_type = other DNA
atttatctgacttccacccggtcagcctgcaaaactaacccaagtacagggatagcagaaacgtggtaagaatgtcttcattaaatcatccacaaaaaagactgtggagaataactttga

SEQ ID NO: 11449 - DNA, 120 bp, synthetic construct
  misc_feature 1..120: note = Artificially Synthesized Probe
  source 1..120: mol_type = other DNA
aatcctaatcaacacttttcctctccagcttccagtgactgccttgtgggattcacaatatatttcttgatgtcctgagatcatcagctttttcctcaaacactccttaccaaagaggaa

SEQ ID NO: 11450 - DNA, 120 bp, synthetic construct
  misc_feature 1..120: note = Artificially Synthesized Probe
  source 1..120: mol_type = other DNA
aagtcacataactaactatattgacttcataaaaactttttgacattttttccccaattttctctgggctttttagatgcctggacattgtgggtcagctcctgctccactccacccaag

SEQ ID NO: 11451 - DNA, 120 bp, synthetic construct
  misc_feature 1..120: note = Artificially Synthesized Probe
  source 1..120: mol_type = other DNA
ctcacatcaaaatgtgggaagaggtgctagagtggcagtagggatgggaggtggttgatccctactttatatatgtctgtaacttgaatttatttcttaagcagacaggcattactttta

SEQ ID NO: 11452 - DNA, 120 bp, synthetic construct
  misc_feature 1..120: note = Artificially Synthesized Probe
  source 1..120: mol_type = other DNA
tcccattctcatctaagcccttctacctctgctaggaccaagctccatcaattatcccttaagatttttctttttggctctatatcttcattttcttcccttttctttgatccttcctca

SEQ ID NO: 11453 - DNA, 120 bp, synthetic construct
  misc_feature 1..120: note = Artificially Synthesized Probe
  source 1..120: mol_type = other DNA
aacacatctaaagagaactcataatccatcagtgtgtcttggtctcattctaccaccaaccattttatcactatctgccaatgagatgattcagagttgcttatgagttctcctctctct

SEQ ID NO: 11454 - DNA, 120 bp, synthetic construct
  misc_feature 1..120: note = Artificially Synthesized Probe
  source 1..120: mol_type = other DNA
gtctcatcccaaaggcttcttaagctgataagcaacttcagcaaagtctcaggatacaaaatcaatgtgcaaaaatcacaaacattcctatacaccacaaatagacagacagccaaatca

SEQ ID NO: 11455 - DNA, 120 bp, synthetic construct
  misc_feature 1..120: note = Artificially Synthesized Probe
  source 1..120: mol_type = other DNA
atctacaaggaacttaaatacatttacaagaaaaaaaaccttaaaaagtgggcaaaagacatgaacagacacgtctcaaaagaagacatttatgcagccaacaaacatgaaaaaaactca

SEQ ID NO: 11456 - DNA, 120 bp, synthetic construct
  misc_feature 1..120: note = Artificially Synthesized Probe
  source 1..120: mol_type = other DNA
ttaaagtaaacattttttaaaacccgctagagatgtggttggacaaataggccaaaagacaatttttaaaagtagatcttatcctttggagaagttttgggtccaaaacaaaattgagag

SEQ ID NO: 11457 - DNA, 120 bp, synthetic construct
  misc_feature 1..120: note = Artificially Synthesized Probe
  source 1..120: mol_type = other DNA
ttcagaggaagttgattttatttactcaccttgcgattaatccactgtgaactctggcctctaggaagctgtccaagaaatagggacatagttggaggtgttgctccttgtaaaaattat

SEQ ID NO: 11458 - DNA, 120 bp, synthetic construct
  misc_feature 1..120: note = Artificially Synthesized Probe
  source 1..120: mol_type = other DNA
tgagccactgaatgtggcctatgctggtattttcaccaacaaaaaacaccaatgaagtagttttctcatttttaaatgacaaaaattaacgaatgaatgaaagtggatctttcacagaga

SEQ ID NO: 11459 - DNA, 120 bp, synthetic construct
  misc_feature 1..120: note = Artificially Synthesized Probe
  source 1..120: mol_type = other DNA
aggaagaggttgcattctcacctagtctcttaaagggttgcctcagcaaggaaacccaacccaaggagtttaataagtacgaaatcgttgaccattttcatcttttcccatcttaatttt

SEQ ID NO: 11460 - DNA, 120 bp, synthetic construct
  misc_feature 1..120: note = Artificially Synthesized Probe
  source 1..120: mol_type = other DNA
gtgtgtgtgtttgcattcttgtgcctgcttatttgcagatacaagggacaaagtcacagataagtaggagcatagctgagaccataaactagcagtaaagcacataactgatatgaattc

SEQ ID NO: 11461 - DNA, 120 bp, synthetic construct
  misc_feature 1..120: note = Artificially Synthesized Probe
  source 1..120: mol_type = other DNA
tgctgtaagtaagaaaaaagaaagtaatggctttggaggcttagaagcatcttaaagtatgggccgatctactagcttttgacattggatctgagtttatgccagccgcagttgaaacat

SEQ ID NO: 11462 - DNA, 120 bp, synthetic construct
  misc_feature 1..120: note = Artificially Synthesized Probe
  source 1..120: mol_type = other DNA
aaaagatagagagaggacataaaagccaggtgcaatgtgtggtccaggattggttcctcgtttggacaaagaagctgggaaggacattcagggaaacatttggtgaatttgaataatata

SEQ ID NO: 11463 - DNA, 120 bp, synthetic construct
  misc_feature 1..120: note = Artificially Synthesized Probe
  source 1..120: mol_type = other DNA
agagaaaaaaacacacatgaggagacagtaaaaaactgtttagctgaccaagtgagtgctgcattattgtctgttttaacaagggagtaggttttctcaccacattcagccaatgtggta

SEQ ID NO: 11464 - DNA, 120 bp, synthetic construct
  misc_feature 1..120: note = Artificially Synthesized Probe
  source 1..120: mol_type = other DNA
atgacccagccatttcactcctgagtgtttacccaagagagaaagaaatatatgttcctgcaaatacttgagcgtttataacagcgttgtctgtaataaccgaaaatcagaggcaaccaa

SEQ ID NO: 11465 - DNA, 120 bp, synthetic construct
  misc_feature 1..120: note = Artificially Synthesized Probe
  source 1..120: mol_type = other DNA
tgaatgtgtaaaagagcctaccctcttcatttcatagtatataatgagggctttttcatgtcactaaaagttctttgaaaacataccatggcttcacacccttccactgcctggatctac

SEQ ID NO: 11466 - DNA, 120 bp, synthetic construct
  misc_feature 1..120: note = Artificially Synthesized Probe
  source 1..120: mol_type = other DNA
gaactgtccttggctcctgccaaattcccgcaattcaagttttttttttcttgcacctgctagtctgaacacatccatcaaccttgcttaaagaatctttggggtgaattggaattaaaa

SEQ ID NO: 11467 - DNA, 120 bp, synthetic construct
  misc_feature 1..120: note = Artificially Synthesized Probe
  source 1..120: mol_type = other DNA
ggcttaacaagattgagtgacttgctcaaattctcagtcagtggtagggggggtaaacccaactctctctgattccaaagcaagtatatcatctacatgatagaaaatcataataacagc

SEQ ID NO: 11468 - DNA, 120 bp, synthetic construct
  misc_feature 1..120: note = Artificially Synthesized Probe
  source 1..120: mol_type = other DNA
tttttgagccataaaatccccatcttattgaaataaaaagaaattcaggtatgtctggtccagacagaagaggtcacccccaaatctgggacatccaagatgacacccaagatgaaagat

SEQ ID NO: 11469 - DNA, 120 bp, synthetic construct
  misc_feature 1..120: note = Artificially Synthesized Probe
  source 1..120: mol_type = other DNA
taattacacaattaagcaatttattcttgaaaacactctcatagtaaagcactcgttgattacagacaaacgaaacgtctccttcaccaccttccaccaccccctgacttcttccaggag

SEQ ID NO: 11470 - DNA, 120 bp, synthetic construct
  misc_feature 1..120: note = Artificially Synthesized Probe
  source 1..120: mol_type = other DNA
agcaatggcttgcatagaaatagagaaaaaagtctgtggtatgtgtatgtgcatttttttttttccatagagtgacgctaacacccacacacctttagcaaatggagtgaagcccccaaa

SEQ ID NO: 11471 - DNA, 120 bp, synthetic construct
  misc_feature 1..120: note = Artificially Synthesized Probe
  source 1..120: mol_type = other DNA
ggacattttagaaaacatctgtggggtaggttgtgtttccactctttgtgaatgtggctagtaagctgaaactctcactgaggagatgctaatttatgagcgtagtgagatttgcaacaa

SEQ ID NO: 11472 - DNA, 120 bp, synthetic construct
  misc_feature 1..120: note = Artificially Synthesized Probe
  source 1..120: mol_type = other DNA
ttcttacaatgtcttgctcataataattctgtttcccctctcccctcgataaagctcaccataacagctcatctataaagtcctcttttctctggaagacctccatctttccacaaattc

SEQ ID NO: 11473 - DNA, 120 bp, synthetic construct
  misc_feature 1..120: note = Artificially Synthesized Probe
  source 1..120: mol_type = other DNA
ttcccaccactcagccattctctatcacattaccctgtaggtacattaatttcattgatgtctccaattaatagtctccctgtatccataccctttgaaatggactttgtagttcttccc

SEQ ID NO: 11474 - DNA, 120 bp, synthetic construct
  misc_feature 1..120: note = Artificially Synthesized Probe
  source 1..120: mol_type = other DNA
ggaaccaagtgtctctttagaggatgtgacttatagaaaggaaggggaggaaaaaattatggcctttgaaattagttgaatcccagctaccactactgtgtgatcttaggacattcggtt

SEQ ID NO: 11475 - DNA, 120 bp, synthetic construct
  misc_feature 1..120: note = Artificially Synthesized Probe
  source 1..120: mol_type = other DNA
ctgtattagttctttttcctctcacagcaatcccttgaagggggtagtatcatcctattttatagataaggaaaatgttttgcccagcgtcacctagtaaagcaccgtcttgacaccaaa

SEQ ID NO: 11476 - DNA, 120 bp, synthetic construct
  misc_feature 1..120: note = Artificially Synthesized Probe
  source 1..120: mol_type = other DNA
acaaagcacctccttttgctggacacctgcccacagaactctgtttgggaaggctgctagatattgttttggtttttctttggtaaattttttccaaatatggttaatactgaaaattgg

SEQ ID NO: 11477 - DNA, 120 bp, synthetic construct
  misc_feature 1..120: note = Artificially Synthesized Probe
  source 1..120: mol_type = other DNA
ggacaaagtggggcagggtgaggctgggggatggggcccatttctaatgtaatttcttatttaaaaaactaaacatgtaaagttctgatttttagggtcacaaaggccctcaagtaaaaa

SEQ ID NO: 11478 - DNA, 120 bp, synthetic construct
  misc_feature 1..120: note = Artificially Synthesized Probe
  source 1..120: mol_type = other DNA
taaaaatatgtatttaaaaaaacccataagcacttctcagtgaataatgatggtcatcactagaaatgttccctgggtgacgtttagtgtgtgtgtcctccttccatcaggggtggcagg

SEQ ID NO: 11479 - DNA, 120 bp, synthetic construct
  misc_feature 1..120: note = Artificially Synthesized Probe
  source 1..120: mol_type = other DNA
atttgtcgctatttaatgtgctctgtcttgctgactgctacatccaacctcttagaacagtgacagcaaatagtaggagcttgacaagtacatgttgaatgaaggattccaatgagatct

SEQ ID NO: 11480 - DNA, 120 bp, synthetic construct
  misc_feature 1..120: note = Artificially Synthesized Probe
  source 1..120: mol_type = other DNA
accgcgaccttcaagggctattcatggtaactgaatttagcaaaaatgactactttctcctcattcctgtcctttaagggttttgattactaactgcgacacacgaagaatgtgtaaaaa

SEQ ID NO: 11481 - DNA, 120 bp, synthetic construct
  misc_feature 1..120: note = Artificially Synthesized Probe
  source 1..120: mol_type = other DNA
taattttttctgtgccagagactgtgctagatacttggtatattggaatgaacaagaggtaaccgacttgatcatatattgtaatgaacagactcagcactcctgttggcccctgcaaca

SEQ ID NO: 11482 - DNA, 120 bp, synthetic construct
  misc_feature 1..120: note = Artificially Synthesized Probe
  source 1..120: mol_type = other DNA
aggcatgcattaattcttcaaagtataagtcaaaaaggtcagcgcttctacaatgtggcagtatctttgcagatgcccacatcatgatagttgaaagagcaaagcccagaaaaggctaaa

SEQ ID NO: 11483 - DNA, 120 bp, synthetic construct
  misc_feature 1..120: note = Artificially Synthesized Probe
  source 1..120: mol_type = other DNA
tctagttgcaaagaaagaaacacagcaaagaaaacaagaggatagggcttttttcaggaatggacctaaactagattgcagcaaagggagtcacatttgcacaagctcctttgagaaagc

SEQ ID NO: 11484 - DNA, 120 bp, synthetic construct
  misc_feature 1..120: note = Artificially Synthesized Probe
  source 1..120: mol_type = other DNA
gtattatctttgttaatgtatctgatgtgcaaaaccttactagatttgccccaatttgaaggtgtctgtggctttccagcactccatgtgttcctagctacatctcacaggcagactttc

SEQ ID NO: 11485 - DNA, 120 bp, synthetic construct
  misc_feature 1..120: note = Artificially Synthesized Probe
  source 1..120: mol_type = other DNA
ctgtgctgtctaggaagagaatttgctcttagatcatcagtctgtatgtgcgtcttcagatgagacagtttccccttatcccagcagttttcagctttttgtttctggttgcaaatgatt

SEQ ID NO: 11486 - DNA, 120 bp, synthetic construct
  misc_feature 1..120: note = Artificially Synthesized Probe
  source 1..120: mol_type = other DNA
gagtaaagcaaaaagttattttaaatgactcatcagtggatgctggtttgccttttcaaacacacctaccctctttagttctgaattagctgttactccatagacggctggcaagtccat

SEQ ID NO: 11487 - DNA, 120 bp, synthetic construct
  misc_feature 1..120: note = Artificially Synthesized Probe
  source 1..120: mol_type = other DNA
ctctcagtatgtttggtcatatgtgggattttcccccctatatttttcccgctttctcactggcaagacaaaaatgaaagcaagcactgagacttagtagctgggagaataaaatatttg

SEQ ID NO: 11488 - DNA, 120 bp, synthetic construct
  misc_feature 1..120: note = Artificially Synthesized Probe
  source 1..120: mol_type = other DNA
atagtttgcaaaatctaaatgaaaacatgaaagttcattttccactggtcacagtggttcagtctccttccagaaaatgtttcggtgctggtgagcagtgcagtgtatgtctttttctat

SEQ ID NO: 11489 - DNA, 120 bp, synthetic construct
  misc_feature 1..120: note = Artificially Synthesized Probe
  source 1..120: mol_type = other DNA
tgtaataaaataaaatttgctgagttgaggtcttccaaactcaactgggcatttttcatctggggcaaaaaaaagaagagtaatgctcagctccaaagtggctgcttttctgcttgctgg

SEQ ID NO: 11490 - DNA, 120 bp, synthetic construct
  misc_feature 1..120: note = Artificially Synthesized Probe
  source 1..120: mol_type = other DNA
tcaggaaatttaatccggatgcagcactatcatcgaattcacagcacctattgtaatgcccttaatttcccagtaatgtccttcacaattattttttttccccactccaggaccaaatcc

SEQ ID NO: 11491 - DNA, 120 bp, synthetic construct
  misc_feature 1..120: note = Artificially Synthesized Probe
  source 1..120: mol_type = other DNA
acaaaccaaaacaaaaaaaacccacgtgggtccgtagtgatctctcaagttggctacaacagcacaaggcactccagtgcacttttgaaaagctaccagcagagaggttaccaggaggaa

SEQ ID NO: 11492 - DNA, 120 bp, synthetic construct
  misc_feature 1..120: note = Artificially Synthesized Probe
  source 1..120: mol_type = other DNA
ggtctggctacttggcataattgtttggagacttgtccatgttgctgtgtgaatcggtcattcattccctattccattggacggatatttcacagttaacttatccatttactacttgat

SEQ ID NO: 11493 - DNA, 120 bp, synthetic construct
  misc_feature 1..120: note = Artificially Synthesized Probe
  source 1..120: mol_type = other DNA
gaaagggagctaatgtagaaaggatgagctgggaaaaatgtaacagcccacctgccattcctcatttgtggatgggagatgtactaattattgtctaagtagaaagaaaacaaatgctag

SEQ ID NO: 11494 - DNA, 120 bp, synthetic construct
  misc_feature 1..120: note = Artificially Synthesized Probe
  source 1..120: mol_type = other DNA
ggcacattagttgtatttcttgcataacattatgtagaccttatgaaaacacgtaacagtatacattcccctgaaagagaccaagagctgagcaaaaattagtgagtcagtctgggcgtg

SEQ ID NO: 11495 - DNA, 120 bp, synthetic construct
  misc_feature 1..120: note = Artificially Synthesized Probe
  source 1..120: mol_type = other DNA
tcagggtgaatgtcaaagcactgaaatccaggtctcaatgttgggatttaatactttctcaagtgtggggccaaggtgtctgccagagtccctgctgataacaaattcattttttcccca

SEQ ID NO: 11496 - DNA, 120 bp, synthetic construct
  misc_feature 1..120: note = Artificially Synthesized Probe
  source 1..120: mol_type = other DNA
cacagggggtgttgttccaggattcctctcgtggtcctgacaaattttatataaatctagatttggggtgtaaaattcaatcacttaaaaaatatgcctggggagtccctaacctaacta

SEQ ID NO: 11497 - DNA, 120 bp, synthetic construct
  misc_feature 1..120: note = Artificially Synthesized Probe
  source 1..120: mol_type = other DNA
gaaacatctctaagtgtaaactgaaatggattaatcaagccaagggactaatcacatataaaatagggagacgagttttctttagttctttgcgtttgtgggccatttccagctgccctg

SEQ ID NO: 11498 - DNA, 120 bp, synthetic construct
  misc_feature 1..120: note = Artificially Synthesized Probe
  source 1..120: mol_type = other DNA
gtggatttggggtgacttctagtccaaatgtatccagatgaattgaactattgcatttgcctcaggataaataaaagtagagatgagatttggcaaggaatgtccctcaaggaaagggag

SEQ ID NO: 11499 - DNA, 120 bp, synthetic construct
  misc_feature 1..120: note = Artificially Synthesized Probe
  source 1..120: mol_type = other DNA
ctggttgctctatgggtaggtaagtttcctgagagtgaagccacacatctgacttatttattatggtttctttggcacatagcacagtagccaacatacagtatgtgcttaataaacatc

SEQ ID NO: 11500 - DNA, 120 bp, synthetic construct
  misc_feature 1..120: note = Artificially Synthesized Probe
  source 1..120: mol_type = other DNA
atgagagcacatacttggagggagaaaaggcttttgtacagcaaaatggtttgctttaccatctgggtattggcagctgctctctgcatcccagaaatcttatacagccaaatcaaggag

SEQ ID NO: 11501 - DNA, 120 bp, synthetic construct
  misc_feature 1..120: note = Artificially Synthesized Probe
  source 1..120: mol_type = other DNA
tgaaaatgtccatctttgggaaattttctaccctgctcttgagcctgataacccatgccaggtcttatagattcctgatctagaacctttccaggcaatctcagacctaatttccttctg

SEQ ID NO: 11502 - DNA, 120 bp, synthetic construct
  misc_feature 1..120: note = Artificially Synthesized Probe
  source 1..120: mol_type = other DNA
caaataccttaaaaccatcatggctgacaactttttatttctcctctgtccaaacttactcctcaggcttttccgtgttagtcaaatggaatttccaaggaggactattggaacagcaca

SEQ ID NO: 11503 - DNA, 120 bp, synthetic construct
  misc_feature 1..120: note = Artificially Synthesized Probe
  source 1..120: mol_type = other DNA
tcatttctcaaatatgtacttcatgtgtcagagttcagcagctaggaaacttctagaaaataaagattgccaaccttgaccattgggacattacatcctttgggcagtgatgctgtcctg

SEQ ID NO: 11504 - DNA, 120 bp, synthetic construct
  misc_feature 1..120: note = Artificially Synthesized Probe
  source 1..120: mol_type = other DNA
ttccttatgaggtcctctccacatatttacttgtatacgctcaattgtggcaccacaagctaagcaaaaaacctctatggtcatatggagatgcctcaagaaagaacttgtagggagtat

SEQ ID NO: 11505 - DNA, 120 bp, synthetic construct
  misc_feature 1..120: note = Artificially Synthesized Probe
  source 1..120: mol_type = other DNA
tataagacagccacgatacctcccagaattttgagcaccattgctaaccctgatttacagaggaaggagctgagcctcagagataccaagtaactcatctgagcccatgcagttagtaat

SEQ ID NO: 11506 - DNA, 120 bp, synthetic construct
  misc_feature 1..120: note = Artificially Synthesized Probe
  source 1..120: mol_type = other DNA
aatacacatttcaagcacatctgaattgtgtcatctggaaatttctaaacagtgtaaacaaccctcagtcaagagctggccgaagcgtcccttctcgtattaaaaggtactatggcaatt

SEQ ID NO: 11507 - DNA, 120 bp, synthetic construct
  misc_feature 1..120: note = Artificially Synthesized Probe
  source 1..120: mol_type = other DNA
gcaccactcatgcctgtgggacatcactgtcaactctctggtgaagtgtccatgcatgcaattggtttaggacttctccactcatgttcttttctttttaaactttttaattacagaaat

SEQ ID NO: 11508 - DNA, 120 bp, synthetic construct
  misc_feature 1..120: note = Artificially Synthesized Probe
  source 1..120: mol_type = other DNA
tgctcttatccttataaagccccaaatcacaattttaaaacattaaaataagaaatggagactggatggactcttcctctgtgtggttaggccaccactcaacaaaggaaccgaaggagg

SEQ ID NO: 11509 - DNA, 120 bp, synthetic construct
  misc_feature 1..120: note = Artificially Synthesized Probe
  source 1..120: mol_type = other DNA
aggcagactgtgattggctgaggagcaaatcaatgggaagtgaggatgtggaaagaggatgtgtaggtgaaacttgtgtcaggtttgctatgataaagtatcaggagtaatccaataaaa

SEQ ID NO: 11510 - DNA, 120 bp, synthetic construct
  misc_feature 1..120: note = Artificially Synthesized Probe
  source 1..120: mol_type = other DNA
atattttaaaatcaccaaaggtggctactctgtaaattaactcatctttcaatgatcccaatcactcggtcccccaacttgactagctgactaatgcccagaagtaatcaaaagagccaa

SEQ ID NO: 11511 - DNA, 120 bp, synthetic construct
  misc_feature 1..120: note = Artificially Synthesized Probe
  source 1..120: mol_type = other DNA
ggtggaaatatgtgcaagaagggaagattatagactctttggtagaaatattacaaaaatggtcccaattctctacccctcactgtccctgtgccctttataaagtgactttgcagttcc

SEQ ID NO: 11512 - DNA, 120 bp, synthetic construct
  misc_feature 1..120: note = Artificially Synthesized Probe
  source 1..120: mol_type = other DNA
tctttctcttgtttttcatgaggacctgccacaacctaaagatccttaacttttttttttttttggcctcatccacacctttgacaatctgacaaagcctatagcccctttctcagaatg

SEQ ID NO: 11513 - DNA, 120 bp, synthetic construct
  misc_feature 1..120: note = Artificially Synthesized Probe
  source 1..120: mol_type = other DNA
cttccttttatttactgacacctaataaatgaacagttgactctggagcaaaactgagccctgggtgagtcttgggcttttcctgatggctcaatacctgaaactttcataaccaaagaa

SEQ ID NO: 11514 - DNA, 120 bp, synthetic construct
  misc_feature 1..120: note = Artificially Synthesized Probe
  source 1..120: mol_type = other DNA
tgaaatcattttttctgtgatgattctatggacccacaggcccgaagacagacctgtcctagaaacaaggacttccttttggtaaggacactcatgcatctcaggttttgttcatttttt

SEQ ID NO: 11515 - DNA, 120 bp, synthetic construct
  misc_feature 1..120: note = Artificially Synthesized Probe
  source 1..120: mol_type = other DNA
attcattattatatagtgcgttttaaatgttatttacgtgtatgtgggtgggtaagatttaatggctaaagagtgctagacagcgggagccaggagtgtgtctgggcttgtcacatgaat

SEQ ID NO: 11516 - DNA, 120 bp, synthetic construct
  misc_feature 1..120: note = Artificially Synthesized Probe
  source 1..120: mol_type = other DNA
ctccagagaagacgcgtggacaaggtgaggaggagaccagagccttcctcccagactcgcagagccacccccgcgcgagccctccgcaccacccgcacctcctgagctctcaggtatggt

SEQ ID NO: 11517 - DNA, 120 bp, synthetic construct
  misc_feature 1..120: note = Artificially Synthesized Probe
  source 1..120: mol_type = other DNA
ccgaggccgggccaggcgcctgcggggcctaacgcttctgagacaggcgagccgtgctccgtgctccgtgctccgggacgaagggggctgtggggtcggcagagggcttcccgtgaggag

SEQ ID NO: 11518 - DNA, 120 bp, synthetic construct
  misc_feature 1..120: note = Artificially Synthesized Probe
  source 1..120: mol_type = other DNA
tgaatgtggagaggaattatcctccaggctggaactgatcccagctgccctcaggacacctaactcgggtgccaggggtcaagggcactggagtcccagaggccggcatggaagaggtgg

SEQ ID NO: 11519 - DNA, 120 bp, synthetic construct
  misc_feature 1..120: note = Artificially Synthesized Probe
  source 1..120: mol_type = other DNA
cagggattacaccatcaaggtcgaacacagaacctgcatccacctcacgccccgactttccacgcgcctcccagctcctatcaggaaaggtctcccccaggtccgtcccatccacgctct

SEQ ID NO: 11520 - DNA, 120 bp, synthetic construct
  misc_feature 1..120: note = Artificially Synthesized Probe
  source 1..120: mol_type = other DNA
ttccatcctggagggcatctgggcccctcacggtggctccaaggaccagggctgggagagaggtggcaaggagaggccaaggcagccagggcagggcagggccaggacccctcctcccgg

SEQ ID NO: 11521 - DNA, 120 bp, synthetic construct
  misc_feature 1..120: note = Artificially Synthesized Probe
  source 1..120: mol_type = other DNA
tctccctgctgtctgggaagacacagctcccattggtgggagatgggacacaactcctggggccacatatctgagctgccccaggaacactaggtcctcacgctgcaccctgttcaaggc

SEQ ID NO: 11522 - DNA, 120 bp, synthetic construct
  misc_feature 1..120: note = Artificially Synthesized Probe
  source 1..120: mol_type = other DNA
gcctgctccaccttgtgtgtggcggaaagcagggggacagacgaaagagagaaagagaaaggggagagaaaacagaaaacaggaaagtgaactgactccagcagcagcagctgctaaggt

SEQ ID NO: 11523 - DNA, 120 bp, synthetic construct
  misc_feature 1..120: note = Artificially Synthesized Probe
  source 1..120: mol_type = other DNA
cgccttcctctcttcctccaggtctctccgcttgaaacgataaaacaaactcaggagactcactcacagaggattccgtcccgtccccagaaagaacctccgcttacccccgatggaaaa

SEQ ID NO: 11524 - DNA, 120 bp, synthetic construct
  misc_feature 1..120: note = Artificially Synthesized Probe
  source 1..120: mol_type = other DNA
agcgacgaagcattaaagaaagattccacaaacaaaacgaaacacaatttaaattaaaataaaaacactttctccacccgccccatgccagaaggctctggcccaagcctcctcttaaaa

SEQ ID NO: 11525 - DNA, 120 bp, synthetic construct
  misc_feature 1..120: note = Artificially Synthesized Probe
  source 1..120: mol_type = other DNA
aaggtgggaacggagaaccacgttcaacgtatgtacaagcggacgcttggaaagaagttagacctggctcaagtttccttagaaatcaccgttctccgctcaacctcaggacggcgaccc

SEQ ID NO: 11526 - DNA, 120 bp, synthetic construct
  misc_feature 1..120: note = Artificially Synthesized Probe
  source 1..120: mol_type = other DNA
tgcccgggctgggcgcgcagaagctgggcgaggagggcacggaggagcagggcgtgctgagcggcgtcgaggacagcgagcctggcggcaggcggtggcagaagcgctcggcctcgggag

SEQ ID NO: 11527 - DNA, 120 bp, synthetic construct
  misc_feature 1..120: note = Artificially Synthesized Probe
  source 1..120: mol_type = other DNA
cgtggtgtatgctcccctcggtacagtgagaaatgagcccctcttgattggctcctggtctgttcgtggtggtctcaggccgaagggcattgataaccacatgcggactgtgcatcgcct

SEQ ID NO: 11528 - DNA, 120 bp, synthetic construct
  misc_feature 1..120: note = Artificially Synthesized Probe
  source 1..120: mol_type = other DNA
cttgcattctaccttaaacagctccaggaggcatatatggcaacgaattggcaagaaatcaagataaagagaaaggtagagctgtatgtaaccacctggctagaacacagatgttaattt

SEQ ID NO: 11529 - DNA, 120 bp, synthetic construct
  misc_feature 1..120: note = Artificially Synthesized Probe
  source 1..120: mol_type = other DNA
gggttataactggggttcaatccagaggcatttcaaaccactgaagattgagaagaattattttcctttaccatttattaccacgtgtttacctctctctcgttttggactggtcggata

SEQ ID NO: 11530 - DNA, 120 bp, synthetic construct
  misc_feature 1..120: note = Artificially Synthesized Probe
  source 1..120: mol_type = other DNA
gttgagaacaccagggtggtgctgactctggtgtggctgctcggaacccttagaaggcccttagggtgttagttactgttgttggtacatctgtgattgtgtctagcaggtgtgggagtg

SEQ ID NO: 11531 - DNA, 120 bp, synthetic construct
  misc_feature 1..120: note = Artificially Synthesized Probe
  source 1..120: mol_type = other DNA
tcctgttcagaccctggcacttgtctagacctggttagggatgaggctgtgtttaggccagatccctttctgttaacgttttactttggttgagttcaaatttttttgttttatattttt

SEQ ID NO: 11532 - DNA, 120 bp, synthetic construct
  misc_feature 1..120: note = Artificially Synthesized Probe
  source 1..120: mol_type = other DNA
taattttatttggataaacacatgtatacatcattgagggttaggggctggattggtatttggatacacacgtgtgtacgtaattgagggttaggggctggattggtccctgtttctttt

SEQ ID NO: 11533 - DNA, 120 bp, synthetic construct
  misc_feature 1..120: note = Artificially Synthesized Probe
  source 1..120: mol_type = other DNA
ggccctatgtgctcccatcccggaagctgtccgtgtcctttgatgagtcttaggacttttatattttcctttattattggtattccctttattattagtatgactgttgtgagttagaat

SEQ ID NO: 11534 - DNA, 120 bp, synthetic construct
  misc_feature 1..120: note = Artificially Synthesized Probe
  source 1..120: mol_type = other DNA
atttttaagactaggtgatcttagtgacataattctaatagtttgttccgaccttccactgtggactcaatagcagggagatgaagaggacagtgattgcatgacctggtggagaagaga

SEQ ID NO: 11535 - DNA, 120 bp, synthetic construct
  misc_feature 1..120: note = Artificially Synthesized Probe
  source 1..120: mol_type = other DNA
ccgtgcccagccataagtaagcattctttccttttttaaaaaaaaaaaaagtggagcaatctaaatatccatcagtaaagaagtacaaaattatggcttgtgccgggcatgttggctgca

SEQ ID NO: 11536 - DNA, 120 bp, synthetic construct
  misc_feature 1..120: note = Artificially Synthesized Probe
  source 1..120: mol_type = other DNA
aggagctgtcttctgaagctgcctgtcgtattgaaaaacgaaagtaatttagtcagaggtcagaagctcagtctgtgaggtgtgggctgcacctgagggcgtcccatagagggaaagaag

SEQ ID NO: 11537 - DNA, 120 bp, synthetic construct
  misc_feature 1..120: note = Artificially Synthesized Probe
  source 1..120: mol_type = other DNA
ttagcgttggcatgaatgcaaggacgctttacttccagagcaaaagaggatttgacctcagcttgtcaaaagtgccacgtttgtactcccagcatgtaagccatctgtggttgtaagagg

SEQ ID NO: 11538 - DNA, 120 bp, synthetic construct
  misc_feature 1..120: note = Artificially Synthesized Probe
  source 1..120: mol_type = other DNA
agcatccccctgttgtctgagtcctcacaggctctgcaaccttggtgacaccatgtggctcttggcctgctgtccctgagcacatggctgcagaagaaggtgtgtctgagaggtttgtgt

SEQ ID NO: 11539 - DNA, 120 bp, synthetic construct
  misc_feature 1..120: note = Artificially Synthesized Probe
  source 1..120: mol_type = other DNA
gccaaaaaaatttaaaaaaagggaacgaagggactgtagcgcgtgtgcacagtgcgattcccgtggagcacctgaagcccacgtggcagaaggagcgtgtttgagtcgaggatgttcatc

SEQ ID NO: 11540 - DNA, 120 bp, synthetic construct
  misc_feature 1..120: note = Artificially Synthesized Probe
  source 1..120: mol_type = other DNA
ccgctggtcccagatctcagcagcatccttcatagaccagcacatccactttgaattgggagtatgtgtcttcggttatttaagcgataatttaaacatttgcctaattttttgaatagg

SEQ ID NO: 11541 - DNA, 120 bp, synthetic construct
  misc_feature 1..120: note = Artificially Synthesized Probe
  source 1..120: mol_type = other DNA
gccaaatgtattttgaagatggatagataataggaaaacgttggagccatccatttgtctctgcatcctttactgttttatgtcatagaatttgaggaagccaggaagtgggtgtcgaag

SEQ ID NO: 11542 - DNA, 120 bp, synthetic construct
  misc_feature 1..120: note = Artificially Synthesized Probe
  source 1..120: mol_type = other DNA
atgtgcatgtgtgttttcaggttttttactgtgataaaacacacaaaacgcaccaccttaaccatttccaggcgtggtcggtggtgttacattcacgctgttgcaggcgtgcaggtcggt

SEQ ID NO: 11543 - DNA, 120 bp, synthetic construct
  misc_feature 1..120: note = Artificially Synthesized Probe
  source 1..120: mol_type = other DNA
catgctgttgcaggcgtgcaggtcggtggtgttacacacattcacactgttgcaggcgtgcaggtcggtggtgttacattcatgctgttgcaggcgtgcaggtcagtggtgttacacaca

SEQ ID NO: 11544 - DNA, 120 bp, synthetic construct
  misc_feature 1..120: note = Artificially Synthesized Probe
  source 1..120: mol_type = other DNA
ttgtgcagctatcacttccatctccagagcccttttcatcttaaaactgaagctctcccatcacacagtgacccttcatgtccctccccagtccctgaaaaacactgttcaggtttttct

SEQ ID NO: 11545 - DNA, 120 bp, synthetic construct
  misc_feature 1..120: note = Artificially Synthesized Probe
  source 1..120: mol_type = other DNA
tatccttttatttgggctcctttcactcagcgtctttaagcttcatacgcgaaagatgcttcagagattcctttttcaggctgaatatctgctgcgtggctaggccactttttgtttaat

SEQ ID NO: 11546 - DNA, 120 bp, synthetic construct
  misc_feature 1..120: note = Artificially Synthesized Probe
  source 1..120: mol_type = other DNA
aggacagtgcctgtggttgtcagatgctgtcccttcgagtaagggatgagagccatcctgaagatgggtcagctctgtggtgaccacccgttgggagcagtgacattcaggtgcgttgca

SEQ ID NO: 11547 - DNA, 120 bp, synthetic construct
  misc_feature 1..120: note = Artificially Synthesized Probe
  source 1..120: mol_type = other DNA
acggccgcttcagtgccaagatggtgagtgtgtctgcggggccttccggccgccgccccttttaccttggcttccaaggtgcctgagtcatgatgtcaaaaagaacgaaatcctggccat

SEQ ID NO: 11548 - DNA, 120 bp, synthetic construct
  misc_feature 1..120: note = Artificially Synthesized Probe
  source 1..120: mol_type = other DNA
cagccgattcacacgggtgagcacctgtcctcgccccgcgtggtcacggccaccgggccacaggcacggctgggctgtggggctcaggctggctccgctcttggtggtggctgtgacctg

SEQ ID NO: 11549 - DNA, 120 bp, synthetic construct
  misc_feature 1..120: note = Artificially Synthesized Probe
  source 1..120: mol_type = other DNA
ggtggctattcttccatcaacaatgtccaggatcctcagaagcccgagcctagggacaagatggagagcttcttcctgggggagacgctcaagtatctgttcttgctcttctccgatgac

SEQ ID NO: 11550 - DNA, 120 bp, synthetic construct
  misc_feature 1..120: note = Artificially Synthesized Probe
  source 1..120: mol_type = other DNA
acccagactaggactttgttctgctcaccccatccaagtcaggagcctcattctgacctcatttgggccttatggctgcagcctggacatgaactctcccagtcttctccctcagcggga

SEQ ID NO: 11551 - DNA, 120 bp, synthetic construct
  misc_feature 1..120: note = Artificially Synthesized Probe
  source 1..120: mol_type = other DNA
ttcctggaaatttttgtgaggtggcagcagcaggatttgtcatgcggagggggaaggatgaaactcggagggcaaaaggggaattttttttttttcaggaagaggaaaggatgtttttgg

SEQ ID NO: 11552 - DNA, 120 bp, synthetic construct
  misc_feature 1..120: note = Artificially Synthesized Probe
  source 1..120: mol_type = other DNA
gaaggatgtggtggcagagccacaatgcccttcaccaaaaaccctatgagctccttctttttttccatgtgccatgcattttctcatttattcctcatagccccatttactgataaggaa

SEQ ID NO: 11553 - DNA, 120 bp, synthetic construct
  misc_feature 1..120: note = Artificially Synthesized Probe
  source 1..120: mol_type = other DNA
agagtgccacctgtgggagcacttcatggctaatcttcacacagcttggactgtggctgtaggactcctgactgcccgatggtgacactgaggtttcatagagcactgttgtatcctagc

SEQ ID NO: 11554 - DNA, 120 bp, synthetic construct
  misc_feature 1..120: note = Artificially Synthesized Probe
  source 1..120: mol_type = other DNA
gcatttgttaagtgaatggcacctgttattattttattattgttacttttgtgggtgtagttcattggtaggtggataaacagtagcagggcttcgtgacaatgtgctcgtaggcgctgt

SEQ ID NO: 11555 - DNA, 120 bp, synthetic construct
  misc_feature 1..120: note = Artificially Synthesized Probe
  source 1..120: mol_type = other DNA
ctggcggctatatcgagtgccctgactgtccttgcctgcatcactgtgctgatgcccccaagggcttccaaggcccgtcccaaggtttacatgtgccagtgtgtgcggtgatgcggtgac

SEQ ID NO: 11556 - DNA, 120 bp, synthetic construct
  misc_feature 1..120: note = Artificially Synthesized Probe
  source 1..120: mol_type = other DNA
gcgggtggatcatgaggtcaggagctcgagaccatcctgtctaacacggtaaaaccccgtctctactaaaaacacacaaaaaattaaccgggcgtggtggcaggtgtctgtagtcccagc

SEQ ID NO: 11557 - DNA, 120 bp, synthetic construct
  misc_feature 1..120: note = Artificially Synthesized Probe
  source 1..120: mol_type = other DNA
ttgagtagcctttatcacacagtgcaggaatctcaaagggacaaaaaggcagtctcttgtttctcctcggaatactctgcacactccagcattttctttccttcttcttctcattttttt

SEQ ID NO: 11558 - DNA, 120 bp, synthetic construct
  misc_feature 1..120: note = Artificially Synthesized Probe
  source 1..120: mol_type = other DNA
atcacattagtacctgcctcaaggggttgctgagaggatcaaatgagatgtaatgaaagaaatttgcataggccaggcacgcagaggacaccccaggacaccccagcacatagtaggtat

SEQ ID NO: 11559 - DNA, 120 bp, synthetic construct
  misc_feature 1..120: note = Artificially Synthesized Probe
  source 1..120: mol_type = other DNA
cagaacttctgcagtagaacagggacctcctggaacatccggaagtcaggtgagggcagtgaactaggagcagggattacttctgttgtcagaaacctggtgatgctcctgcatgtggca

SEQ ID NO: 11560 - DNA, 120 bp, synthetic construct
  misc_feature 1..120: note = Artificially Synthesized Probe
  source 1..120: mol_type = other DNA
cttccagatggccccatctaatctccacgcgccaggcactgctatggcatgacgctgataacccggggaggtttgtctgtaatctccactttacatatgtccagagaggtgaagccactt

SEQ ID NO: 11561 - DNA, 120 bp, synthetic construct
  misc_feature 1..120: note = Artificially Synthesized Probe
  source 1..120: mol_type = other DNA
aaggggctgggggcaaggtcaaggcccagggtctctgtgcagagctttaatttttaacagaaaatattttatattctggttacgaaaagcctgacatcaggaataaaagctacctataat

SEQ ID NO: 11562 - DNA, 120 bp, synthetic construct
  misc_feature 1..120: note = Artificially Synthesized Probe
  source 1..120: mol_type = other DNA
actcgcagtgagacccatgcggtccctgacagccagggtgttgctgcatcttaaaatgagataaaaacgctgcgcacaggagtagtgactaggcgattgattcatggggtgagcagttag

SEQ ID NO: 11563 - DNA, 120 bp, synthetic construct
  misc_feature 1..120: note = Artificially Synthesized Probe
  source 1..120: mol_type = other DNA
accgcctgttgccctttctgggggcctggccttcctcatcttggatgcagtatgagccccatcctgctacctgcagctaatgaagcccctgtacagtggctgctgcaggtgctggctgga

SEQ ID NO: 11564 - DNA, 120 bp, synthetic construct
  misc_feature 1..120: note = Artificially Synthesized Probe
  source 1..120: mol_type = other DNA
tctactgctgcacttggggaagggtgtggttctctctgaagctcacggagtcttctttctccacagacccccccggaacctggactcccggaccttcatcaccattggagacagagtagg

SEQ ID NO: 11565 - DNA, 120 bp, synthetic construct
  misc_feature 1..120: note = Artificially Synthesized Probe
  source 1..120: mol_type = other DNA
caagagagggaaacatctgtgaaggcaatacttttgttttgttgtcactgtgtccccagtgcctaaaacacattgtggatgcttggtaaacagtttctgaatgagtgactcattctagcc

SEQ ID NO: 11566 - DNA, 120 bp, synthetic construct
  misc_feature 1..120: note = Artificially Synthesized Probe
  source 1..120: mol_type = other DNA
aactcacaggagcagaagcggctgctcatggacctggacatcaacatgcgcacggtcgactgtttctacactgtcaccttctacggggcactattcagagaggtgcgtccttgcatgatg

SEQ ID NO: 11567 - DNA, 120 bp, synthetic construct
  misc_feature 1..120: note = Artificially Synthesized Probe
  source 1..120: mol_type = other DNA
acgtgtggatctgcatggagctcatggacacatccttggacaagttctaccggaaggtgctggataaaaacatgacaattccagaggacatccttggggagattgctgtgtctgtgagtg

SEQ ID NO: 11568 - DNA, 120 bp, synthetic construct
  misc_feature 1..120: note = Artificially Synthesized Probe
  source 1..120: mol_type = other DNA
tttttaaaaaaggaatttagtatttacaacagcgtcatactaaaaatgccccggggcagctcacagaggtacaagctaagttgggggaaaggttagcatccaaaatgtgtgctttttgag

SEQ ID NO: 11569 - DNA, 120 bp, synthetic construct
  misc_feature 1..120: note = Artificially Synthesized Probe
  source 1..120: mol_type = other DNA
cttgatgtttctggacccacctgggtctggtgtggtctcagtttgttcctttttgctgctgagcacaagtctatttttccagatttactgcttttcaaaaaatgaattaggcttagttcc

SEQ ID NO: 11570 - DNA, 120 bp, synthetic construct
  misc_feature 1..120: note = Artificially Synthesized Probe
  source 1..120: mol_type = other DNA
ggtagggtcagaccgatgcaagggttgggccttctaagcatgacccaggccctcctagcctcagtttcctcccccgtcacatgggcaggtgggctaagctgagcgctcagtttggggatt

SEQ ID NO: 11571 - DNA, 120 bp, synthetic construct
  misc_feature 1..120: note = Artificially Synthesized Probe
  source 1..120: mol_type = other DNA
tggtaaagatcttttcaaaaatatttcatagcagaaggtttgttgtcggtggcgtcctggtacattgcggtggggtggtagaaagggtgggcgggctctcaatcctgggcctgtggaagc

SEQ ID NO: 11572 - DNA, 120 bp, synthetic construct
  misc_feature 1..120: note = Artificially Synthesized Probe
  source 1..120: mol_type = other DNA
aggcacaagctactgcacccactgaaagtttttatagagcacagtctccaggcccccctcctctcagcatcagttggcgggtgatgctgagagttcccaccctctataatcagctgggtt

SEQ ID NO: 11573 - DNA, 120 bp, synthetic construct
  misc_feature 1..120: note = Artificially Synthesized Probe
  source 1..120: mol_type = other DNA
cgagcgaagagaagtgtctggtgggtagagagttgacgcaggtgttgtgggttttactggtgttgctgctaccattgttatcatcatcatgtggttataactttatttatttttaatttt

SEQ ID NO: 11574 - DNA, 120 bp, synthetic construct
  misc_feature 1..120: note = Artificially Synthesized Probe
  source 1..120: mol_type = other DNA
tttttttttgaggtggagaggaatattcaggctgaaggcaggtgctgtatctgcaataacagttttccaagtcctaagtttgatgcaaaggacaagttcttgctgtatttagactgcaca

SEQ ID NO: 11575 - DNA, 120 bp, synthetic construct
  misc_feature 1..120: note = Artificially Synthesized Probe
  source 1..120: mol_type = other DNA
ctttcacaagttacaaacgtagtggaaacctaacataaaaatagaggcacagtaaggggaaaatgactgtagttattctacctagagacacctcttaccccgtttcagtgccaacattgt

SEQ ID NO: 11576 - DNA, 120 bp, synthetic construct
  misc_feature 1..120: note = Artificially Synthesized Probe
  source 1..120: mol_type = other DNA
ttttttgagctctttagaaaaaataaaggagtacgaggttgaaggtttggacacttctgcttttctaattataactctcatggccgctggtccttctcctgtagctcgtatggggtactt

SEQ ID NO: 11577 - DNA, 120 bp, synthetic construct
  misc_feature 1..120: note = Artificially Synthesized Probe
  source 1..120: mol_type = other DNA
ctcatgaggctacggcccaaagttgccagctcctcagatttttccagagcagctggaacctgcattgttttgtaaaatcttcagaattcaggttttctgaaaaccctatgatggtcccac

SEQ ID NO: 11578 - DNA, 120 bp, synthetic construct
  misc_feature 1..120: note = Artificially Synthesized Probe
  source 1..120: mol_type = other DNA
gcagaaacagctggagcatgaggagcatttgacaaaacgatggtcttggtgggagattttaatacagttcttccagaagtggacaaatcagatagactgaaaaagagaacaaagtatatg

SEQ ID NO: 11579 - DNA, 120 bp, synthetic construct
  misc_feature 1..120: note = Artificially Synthesized Probe
  source 1..120: mol_type = other DNA
ggaaggcttcatggaggaggtaccatttgaactgagcctggaaggatgaataagggttatctcctgatggagaggctgtcccaagcagaaggtccagcatgggcagaggcctgacgtgtg

SEQ ID NO: 11580 - DNA, 120 bp, synthetic construct
  misc_feature 1..120: note = Artificially Synthesized Probe
  source 1..120: mol_type = other DNA
tcctgcccgccaccgttatcggtgtcattcacctttcgtgttttttttaatttatcctctgttgattttttcttttgctttatgggtttggcttgtttttcttgcatggtttggagctga

SEQ ID NO: 11581 - DNA, 120 bp, synthetic construct
  misc_feature 1..120: note = Artificially Synthesized Probe
  source 1..120: mol_type = other DNA
gaagcgcagaagtatccgaaatctacccgtttcttgggtccagcaaaacttttaagccaggtaaaccggtggttctgtttgtgtaaaggtgaccaggcatgattcctgtgacactttgct

SEQ ID NO: 11582 - DNA, 120 bp, synthetic construct
  misc_feature 1..120: note = Artificially Synthesized Probe
  source 1..120: mol_type = other DNA
gataaaatgatcagatgtctggggtttacttcagaggactctattggcagaggaaatagtatggggagtataaatgaaacaagtttggccataaatcgataagtgtagaagctggatgtg

SEQ ID NO: 11583 - DNA, 120 bp, synthetic construct
  misc_feature 1..120: note = Artificially Synthesized Probe
  source 1..120: mol_type = other DNA
gcctggtgcaaggcaggttaaatgaagggtcttcgttttccaaagtaaaataaaataaagccttaggaatttccaaattgttcaacagtataaagatggggttatcagaccaggtgcagt

SEQ ID NO: 11584 - DNA, 120 bp, synthetic construct
  misc_feature 1..120: note = Artificially Synthesized Probe
  source 1..120: mol_type = other DNA
tatgctttatttttgaggtggattgaataccttctgagatacttgagtctctccttgggaacagtaaatcacctgaattgccctcgaaagagtaatagtaatggtcattgctgccattct

SEQ ID NO: 11585 - DNA, 120 bp, synthetic construct
  misc_feature 1..120: note = Artificially Synthesized Probe
  source 1..120: mol_type = other DNA
catcattgagaggataagtaactaatcataagtgataactttaaatttggccacaggtgtgaaaatcacaaatgtcaaatgatggaagatccaggaatcgggacaggcgctacgatgagg

SEQ ID NO: 11586 - DNA, 120 bp, synthetic construct
  misc_feature 1..120: note = Artificially Synthesized Probe
  source 1..120: mol_type = other DNA
atttaatacaccagtgaatgcagtgttctgccgggtagaaggaggacagatagctgcaatgatcttcctgtttgtcaccatgatagtttatctcattagtgctttggtttgcctaaagtt

SEQ ID NO: 11587 - DNA, 120 bp, synthetic construct
  misc_feature 1..120: note = Artificially Synthesized Probe
  source 1..120: mol_type = other DNA
tgaacagtagcaaatgttagagtatgttccactggctacattattctctgaagtaagttgatattttgccttcttccaaggatatgtgtatagtagactctcctatgccactgaaatttt

SEQ ID NO: 11588 - DNA, 120 bp, synthetic construct
  misc_feature 1..120: note = Artificially Synthesized Probe
  source 1..120: mol_type = other DNA
taggagaaatatcgctgaattctttttctcagcaaggagcatccctgagaaagagaatgcatccctgagggtaggcctctgaaatggccgctttggggatggctgtcttttacaatcata

SEQ ID NO: 11589 - DNA, 120 bp, synthetic construct
  misc_feature 1..120: note = Artificially Synthesized Probe
  source 1..120: mol_type = other DNA
aagtataagccactgtgcttgatggaaaaaaatagttttataacaagtacctacatgttatacaaaggactttgacatgtgtccatgtgatctctctctctatatattttaaattttttg

SEQ ID NO: 11590 - DNA, 120 bp, synthetic construct
  misc_feature 1..120: note = Artificially Synthesized Probe
  source 1..120: mol_type = other DNA
catgcaaagtaatgggaggcaagaataaataaaatttgagggtaattcagagtggtttatctaacagtttccaccatctccgtattccctactcctctctatgccctgattgacagggaa

SEQ ID NO: 11591 - DNA, 120 bp, synthetic construct
  misc_feature 1..120: note = Artificially Synthesized Probe
  source 1..120: mol_type = other DNA
agctgttacatcgagttcatattaggactttgagcttttttccagatactaaaaggaccaaattaaacaatcatatctatagctgcttttaattttgttagatgaaaatttatgcaagta

SEQ ID NO: 11592 - DNA, 120 bp, synthetic construct
  misc_feature 1..120: note = Artificially Synthesized Probe
  source 1..120: mol_type = other DNA
ctgtgtggcagcagacaaattatttaacctttctatgcctgcatttcttcatctgtgagattgcaataataataattcatacctcgcaagtttgctgagaggactcagtgagatgctgtt

SEQ ID NO: 11593 - DNA, 120 bp, synthetic construct
  misc_feature 1..120: note = Artificially Synthesized Probe
  source 1..120: mol_type = other DNA
atcacatagagacagcaacaaattctgaagtctgtgctttaagtgctgtgcaggtttatattataagctagaaaagccggaatctaatgtgggcatggaacgtgatggtatgggtttgag

SEQ ID NO: 11594 - DNA, 120 bp, synthetic construct
  misc_feature 1..120: note = Artificially Synthesized Probe
  source 1..120: mol_type = other DNA
caaaaaaaaaaaagttttttcccaatagagttttccaaactgatgatcgggaaggttcatccaaaaagagcagaaaaaaagttaagaccataaaaataaaaaaaaatttaggccgggcat

SEQ ID NO: 11595 - DNA, 120 bp, synthetic construct
  misc_feature 1..120: note = Artificially Synthesized Probe
  source 1..120: mol_type = other DNA
ttttcataaccttcccctagggctggttagcagcctccacacctaatccaatctaaagggtgtgctatttggtgagttaaagtgctagtggtttttagaatgagctaatattaaaccaaa

SEQ ID NO: 11596 - DNA, 120 bp, synthetic construct
  misc_feature 1..120: note = Artificially Synthesized Probe
  source 1..120: mol_type = other DNA
cactttgggaggctgaggtgggtggattgcctgagctcagaagtttgagaccagactaggaaatatggtgaaaccccatctctactaaaatacaaaaaattagccagtcatggtggtgtg

SEQ ID NO: 11597 - DNA, 120 bp, synthetic construct
  misc_feature 1..120: note = Artificially Synthesized Probe
  source 1..120: mol_type = other DNA
gcccggccaactcatttccttttctaatccactcagtggttacttacaattaaatcatcccaaattgccattatcattactttctctttccatttaagtaggcttgttccatttttatcc

SEQ ID NO: 11598 - DNA, 120 bp, synthetic construct
  misc_feature 1..120: note = Artificially Synthesized Probe
  source 1..120: mol_type = other DNA
gtacaatcttggttcactgcaacctccacctcctgggcccaagtgattctcctgcctcagcctcccgaggagctgggattataggcacccgccaccactcccagctaatttttgtatttt

SEQ ID NO: 11599 - DNA, 120 bp, synthetic construct
  misc_feature 1..120: note = Artificially Synthesized Probe
  source 1..120: mol_type = other DNA
gaaacaattatatctttggcttatgtttttcccctagaaaataccctgtgattcagacagatgatgagcgagaacgctataaagctgtgttccaagaccagttttcagagtacaaagagc

SEQ ID NO: 11600 - DNA, 120 bp, synthetic construct
  misc_feature 1..120: note = Artificially Synthesized Probe
  source 1..120: mol_type = other DNA
taagatagatactgagtcagtcagggtcccaaaggagacagatagcacattcaaactaggataattcacaaaggtttattcagaaagggaatgtagggaagccaccaggggcattgcatt

SEQ ID NO: 11601 - DNA, 120 bp, synthetic construct
  misc_feature 1..120: note = Artificially Synthesized Probe
  source 1..120: mol_type = other DNA
ctgtgccattttttaatcagatgtactcttttttttttttttttttgagatggagtcttgctctgtcacccagacgggagtgcagtggtgcaatctcggctcactgcaacctttgcctcc

SEQ ID NO: 11602 - DNA, 120 bp, synthetic construct
  misc_feature 1..120: note = Artificially Synthesized Probe
  source 1..120: mol_type = other DNA
tgtgtaatattctgtctttttaaaagaggctgtattaatctattacatgtatgattaaattttaaaaacacagctttgtaaaaactaaatgtcggtctggctgtggtggcacatgcctgc

SEQ ID NO: 11603 - DNA, 120 bp, synthetic construct
  misc_feature 1..120: note = Artificially Synthesized Probe
  source 1..120: mol_type = other DNA
gtaccaggaagcaagagaaattcagcaaatattgaggttgaatgtcagtaccatttggaaaataagcaaggcccacaggtctaagaagggtgacctagtctctcagaggccgtcaaagga

SEQ ID NO: 11604 - DNA, 120 bp, synthetic construct
  misc_feature 1..120: note = Artificially Synthesized Probe
  source 1..120: mol_type = other DNA
taagtaacccaatggcaggcccacggttattattatcagtgtatcctccagtccttatctaaagtagaaatattaaccatattacaaaagttagcttctccttggccacaggctgagctt

SEQ ID NO: 11605 - DNA, 120 bp, synthetic construct
  misc_feature 1..120: note = Artificially Synthesized Probe
  source 1..120: mol_type = other DNA
aaaaaaataaatataaataaaaattagccaggcctggtgatgtgccgtataatcccagctacttgggaggctgagacaggaggatcacttgagcccaagaagttttggttacagtgagct

SEQ ID NO: 11606 - DNA, 120 bp, synthetic construct
  misc_feature 1..120: note = Artificially Synthesized Probe
  source 1..120: mol_type = other DNA
ggtttgcattgtctgacaatctctatgcataggtttgcatggatgaacgagggcattgctatagtaatgtgttccctttggataggccgttcaactccttaacaaagttcgtatttatta

SEQ ID NO: 11607 - DNA, 120 bp, synthetic construct
  misc_feature 1..120: note = Artificially Synthesized Probe
  source 1..120: mol_type = other DNA
aatgagcattgatcaggaattctccacctgttccttcaaaaagatgaactgattttacatctttccaactctaacttaatctcaaaatcagtagaggtggctggacactggctcaggcct

SEQ ID NO: 11608 - DNA, 120 bp, synthetic construct
  misc_feature 1..120: note = Artificially Synthesized Probe
  source 1..120: mol_type = other DNA
atgttggtcaggctgggaaactactttttttaaaaaatagcaagtttactatttatttactgcctttttaatgctagcctctgtggtagagaagcaagcgcttcccaaatcagcttccaa

SEQ ID NO: 11609 - DNA, 120 bp, synthetic construct
  misc_feature 1..120: note = Artificially Synthesized Probe
  source 1..120: mol_type = other DNA
aaatgaataaattataaagaatgagtctcaagaaaaggtccttaatgagcaagcccaacctacttaaccaaaagcccaagtgtctggtgcctttctggtttgtggtgttaactcatggcc

SEQ ID NO: 11610 - DNA, 120 bp, synthetic construct
  misc_feature 1..120: note = Artificially Synthesized Probe
  source 1..120: mol_type = other DNA
tccctggtttttatttgtcagtgaaatctttatgcattcattgttaatattttaattccatggctttgtaggctgtgctgtgtctgaaggggtaacacctagggaaacatgaggcccctt

SEQ ID NO: 11611 - DNA, 120 bp, synthetic construct
  misc_feature 1..120: note = Artificially Synthesized Probe
  source 1..120: mol_type = other DNA
tatagattgcgcagtctctttgtggagaggacttgatcattaaaggaatcagcgttcatatatccaatgccgaacctaagcacaatagcaatagacagttagaaagaagtggaagatttg

SEQ ID NO: 11612 - DNA, 120 bp, synthetic construct
  misc_feature 1..120: note = Artificially Synthesized Probe
  source 1..120: mol_type = other DNA
gagacttggtggtgcataatggatattttttaacttggcgagatgtgtctctcaatcctgtggctttggtgagagagtgtgcagagagcaatgatagcaaataatgtacgaatgtttttt

SEQ ID NO: 11613 - DNA, 120 bp, synthetic construct
  misc_feature 1..120: note = Artificially Synthesized Probe
  source 1..120: mol_type = other DNA
tcttagtgcctctgtgcatttgggtgatgttctatttacatggcctgtgtaaatctccattgggaagtcatgccttctaaaaagattcttatttgggggagtgggcaaaatgttgattat

SEQ ID NO: 11614 - DNA, 120 bp, synthetic construct
  misc_feature 1..120: note = Artificially Synthesized Probe
  source 1..120: mol_type = other DNA
gagcccaggggtaagttaacttgtcaacggcatggtttaatcccttctttacacttgtgtaaatttcagttactggtcatagaaggctttcaatgttgagtggccttttattaacatgtt

SEQ ID NO: 11615 - DNA, 120 bp, synthetic construct
  misc_feature 1..120: note = Artificially Synthesized Probe
  source 1..120: mol_type = other DNA
gccaccctccctgaacatgcctggtcttgcttaaaatgtattgccaaatagtccttgggaagtttatgttgtctttaacaatgtgaaatagtactactattcacgttccttttgtctgac

SEQ ID NO: 11616 - DNA, 120 bp, synthetic construct
  misc_feature 1..120: note = Artificially Synthesized Probe
  source 1..120: mol_type = other DNA
atcagtgctatgtcattgtcaaagccagcatcatgagtataaccttcatgtataaaaacagcttcagaccaggcttgtgtataatgaggtgatagtcttttcagggtgcccattcgaatg

SEQ ID NO: 11617 - DNA, 120 bp, synthetic construct
  misc_feature 1..120: note = Artificially Synthesized Probe
  source 1..120: mol_type = other DNA
ggcaagcaggcattgtctgagcagatggactggatgatgtgcataggaattagaaggatataaccttttcattgtttctgttttcctacttgtaaaatgggtatttatgtaatcctagga

SEQ ID NO: 11618 - DNA, 120 bp, synthetic construct
  misc_feature 1..120: note = Artificially Synthesized Probe
  source 1..120: mol_type = other DNA
ggagccaattctggttaaaaaaaaaagtactattaaaaggcagattgcattgatgtttaaaaactagatgttgaaaacaattgcttggggaaattatttgctttgggttttaatagcatt

SEQ ID NO: 11619 - DNA, 120 bp, synthetic construct
  misc_feature 1..120: note = Artificially Synthesized Probe
  source 1..120: mol_type = other DNA
gctcacagactgggagtgatttttctcctttggagctcgtccagaatccatcagcctcacacacatatttacctgcaaatcattggaaaagcaaaaatgtttaactgcatgtataagatg

SEQ ID NO: 11620 - DNA, 120 bp, synthetic construct
  misc_feature 1..120: note = Artificially Synthesized Probe
  source 1..120: mol_type = other DNA
ctgggtagatcatcaggagggccacagtcaacaactaagaaagaagcatgggagggaggaatccattgatcatttcagtgctaactttccaaaggtctggagaagcacctttgggaggct

SEQ ID NO: 11621 - DNA, 120 bp, synthetic construct
  misc_feature 1..120: note = Artificially Synthesized Probe
  source 1..120: mol_type = other DNA
atggttgatcattatcccagtttggggtgtgtgtattaccacataaaattgccccccttttctacatacaatagtgtatacttgctcacacatgtgaattgtgtgtaattggagggacac

SEQ ID NO: 11622 - DNA, 120 bp, synthetic construct
  misc_feature 1..120: note = Artificially Synthesized Probe
  source 1..120: mol_type = other DNA
ttatacttgcatatggtggtattacaggtattaagatgttcataattttctgtattttccatcttctaccatgaatattgttgctttcatacttagaaaaatattgtcggccgggcgcgg

SEQ ID NO: 11623 - DNA, 120 bp, synthetic construct
  misc_feature 1..120: note = Artificially Synthesized Probe
  source 1..120: mol_type = other DNA
ggttggttctgttttaacctctaagaatgcactgagagatgagtaaaaagaagcaaatttgaaattcaagggctgataaatggatcattaaaaaaaaaaaaccaaggatccgggcacagt

SEQ ID NO: 11624 - DNA, 120 bp, synthetic construct
  misc_feature 1..120: note = Artificially Synthesized Probe
  source 1..120: mol_type = other DNA
gcctcggtgcacgtctatgccacctaggttacgtatttcatcactcaacaggtattggcattttatgaatcagatggaacctttgcagcaatttataattttttttttgcttttcaccct

SEQ ID NO: 11625 - DNA, 120 bp, synthetic construct
  misc_feature 1..120: note = Artificially Synthesized Probe
  source 1..120: mol_type = other DNA
actaagagttcttttgtgagcttcgtctgtgtgctgtccatcagctttcaccgccagcgtcattcacagggaaacatttttcgacttgctaagataatgtttttctaaaatcaaacatta

SEQ ID NO: 11626 - DNA, 120 bp, synthetic construct
  misc_feature 1..120: note = Artificially Synthesized Probe
  source 1..120: mol_type = other DNA
taaaattatactcctcccttaacagtgaccactatttataactttgcagaatatactctttcccggggctgtctacttttttgtgggcccaggagttgtttcatggaaaggtcatttgac

SEQ ID NO: 11627 - DNA, 120 bp, synthetic construct
  misc_feature 1..120: note = Artificially Synthesized Probe
  source 1..120: mol_type = other DNA
gtagggttctttaaaaccaaaggcaagattaaactctcaggtgcttttgcaaattaaggtttcttgttttccctgggactgagcaaaaggtatgtgagaaagctgggttatgtgggaaga

SEQ ID NO: 11628 - DNA, 120 bp, synthetic construct
  misc_feature 1..120: note = Artificially Synthesized Probe
  source 1..120: mol_type = other DNA
tttgcacatactcttctgccacctagaactcttctgccacctagaactctgtccaacacccacttatcctttaaattcaatctcagcatttcctattcaaggatagcttcctagctccta

SEQ ID NO: 11629 - DNA, 120 bp, synthetic construct
  misc_feature 1..120: note = Artificially Synthesized Probe
  source 1..120: mol_type = other DNA
tggatggatggatagatggatggatagatggataggatgggtgggtgggtgaatggctgtaagaatgggcggatgggtaaatggatgggtgggtggatgaatgagggataggattggtag

SEQ ID NO: 11630 - DNA, 120 bp, synthetic construct
  misc_feature 1..120: note = Artificially Synthesized Probe
  source 1..120: mol_type = other DNA
tggatggatggatggatggatgggtaggtaggtagaagaatgggtgcatggataggattggtaagtagaaggatgggtgggtagatagatagctggaaagatggatggatggatggatgg

SEQ ID NO: 11631 - DNA, 120 bp, synthetic construct
  misc_feature 1..120: note = Artificially Synthesized Probe
  source 1..120: mol_type = other DNA
ggtagatgagtagaaggatgggttgatagaaggatgggtgggtggaaggatgggtggatgggtggttggatagaaggatggatggatggatggaaggatgggtaggtagaagtataagtg

SEQ ID NO: 11632 - DNA, 120 bp, synthetic construct
  misc_feature 1..120: note = Artificially Synthesized Probe
  source 1..120: mol_type = other DNA
tcatctgtgacaaaggtgatggtcaccgtgttgctttttgtttcaatcctgtggggcaatgtcttcccacagaatgggccatgttcttctctgtctgtttgaatctgagaaagaagctca

SEQ ID NO: 11633 - DNA, 120 bp, synthetic construct
  misc_feature 1..120: note = Artificially Synthesized Probe
  source 1..120: mol_type = other DNA
aattcgggaaaagagaggagcatctcctcgagcctaagggccccttcggagctcccctaaattcccttacagccaccccagtgattcccaagtttattcatcaggggtctcctacccgaa

SEQ ID NO: 11634 - DNA, 120 bp, synthetic construct
  misc_feature 1..120: note = Artificially Synthesized Probe
  source 1..120: mol_type = other DNA
aatcacccctggatttgcgggggaccagattacccctcaatgaatatctcccagggtgtctcctctgtgggtcaggctcctccaggccagaccctgaatgggggtggttcaagattactc

SEQ ID NO: 11635 - DNA, 120 bp, synthetic construct
  misc_feature 1..120: note = Artificially Synthesized Probe
  source 1..120: mol_type = other DNA
tagggtcgctgcaagctcccagcagcgctgggagaaagatgcaaacatcacctctgttaaaccagtgggagtttcagtgtccggcccgaggtcacccagctaatgaggggagtcaatcaa

SEQ ID NO: 11636 - DNA, 120 bp, synthetic construct
  misc_feature 1..120: note = Artificially Synthesized Probe
  source 1..120: mol_type = other DNA
agagttggcactcagcccatgtgaatggaggtcacggctgttttggtctttgcattgtggatgatgtcaggccagaggcctctcccctgccctgggaaaggtggggaaactgaaggcagg

SEQ ID NO: 11637 - DNA, 120 bp, synthetic construct
  misc_feature 1..120: note = Artificially Synthesized Probe
  source 1..120: mol_type = other DNA
cctcagtttcccctttgtgaaatgggaagcttatgcttccttccaagtctgcaatattggtgcgatgagctaaaagtggagcgaaagacacaaggaagaggcttcccactcccaggacct

SEQ ID NO: 11638 - DNA, 120 bp, synthetic construct
  misc_feature 1..120: note = Artificially Synthesized Probe
  source 1..120: mol_type = other DNA
cttccatacacactcagtcctatcaagaccctcttcttctttaaagatttaacattttatattccactgcccttcctctcccaggaccaacaagtcttaattcttcagcccagtggtttt

SEQ ID NO: 11639 - DNA, 120 bp, synthetic construct
  misc_feature 1..120: note = Artificially Synthesized Probe
  source 1..120: mol_type = other DNA
ggctcatgaagatccagaagtccctggcctgtggtccttccttattctgggcccaggagatatgttcctcttcctccaaggcccagcaccatctttcctcactctttttatttttttgga

SEQ ID NO: 11640 - DNA, 120 bp, synthetic construct
  misc_feature 1..120: note = Artificially Synthesized Probe
  source 1..120: mol_type = other DNA
tgagctgtaaaataaacaaaaacgatggatcctgtgcattttaaggtgtttaggagcatccctggcccccacccacgacatccgactagcaccttccagttacaacaacatgtctccagg

SEQ ID NO: 11641 - DNA, 120 bp, synthetic construct
  misc_feature 1..120: note = Artificially Synthesized Probe
  source 1..120: mol_type = other DNA
gtagctgggattataggcgcccgccaccatgcctagctaattttttgtatttttagtagagaaggggtttctccatattgcccaggctggtcttcaccatattgccctgacctcaagatg

SEQ ID NO: 11642 - DNA, 120 bp, synthetic construct
  misc_feature 1..120: note = Artificially Synthesized Probe
  source 1..120: mol_type = other DNA
atttagtccttctatctacctatgaaaccagtaataaatagcattcactccattcaacacttgaggcaactaagaggtcaactaactcctcaaggtttctccataacctggacggccaag

SEQ ID NO: 11643 - DNA, 120 bp, synthetic construct
  misc_feature 1..120: note = Artificially Synthesized Probe
  source 1..120: mol_type = other DNA
tttgttgctaaggaaaaggcattccttagcaacaatgcctaggatgtttagaaaggcttttaggaaggggcttttttcctggtcgcagtgattattggagaagtgtcacctctagcaata

SEQ ID NO: 11644 - DNA, 120 bp, synthetic construct
  misc_feature 1..120: note = Artificially Synthesized Probe
  source 1..120: mol_type = other DNA
agcaacagagcaaaacttctggtaaaaaggaggtgagctactgttgctagggatcctgcttccctagcaaatagtggcgttctgttgctagggaaccgtttccctagcaacagagggtga

SEQ ID NO: 11645 - DNA, 120 bp, synthetic construct
  misc_feature 1..120: note = Artificially Synthesized Probe
  source 1..120: mol_type = other DNA
gtagggactgagaccctgagagatggggataaggaacgagagacaggggggacaagaaactcagagagacagagacagtaacagaaaaacagacagaggggccggtgcggtggctcacac

SEQ ID NO: 11646 - DNA, 120 bp, synthetic construct
  misc_feature 1..120: note = Artificially Synthesized Probe
  source 1..120: mol_type = other DNA
caaatctttacagatagaaagtcaattactggttaccagggatggatggaggtttgtgggatgatggacatggggtttctttgcagggtatgaaactgttctgaatataactacacagtg

SEQ ID NO: 11647 - DNA, 120 bp, synthetic construct
  misc_feature 1..120: note = Artificially Synthesized Probe
  source 1..120: mol_type = other DNA
ccgtgaatatttgttgtctgggaagcaaaaacatcaggttgacatagatctttacctcctttatctcttctctttgctcccaatacgctacaaggagaagagcaaggaattgcttaggtt

SEQ ID NO: 11648 - DNA, 120 bp, synthetic construct
  misc_feature 1..120: note = Artificially Synthesized Probe
  source 1..120: mol_type = other DNA
aagtcaggagagggagggtagggcttttattcccttgtaagatggccttgggctggctgtcacccttgatagatcatttcaaggtgggtggctctacacaccctttaaaaaaaataattt

SEQ ID NO: 11649 - DNA, 120 bp, synthetic construct
  misc_feature 1..120: note = Artificially Synthesized Probe
  source 1..120: mol_type = other DNA
caccacagtttgtcacctggactcggacaaaggaggatccctttatctgagtccatcccatcttgccctgttccacttcaattctccttcagcatccagaacgagttttctttcttttct

SEQ ID NO: 11650 - DNA, 120 bp, synthetic construct
  misc_feature 1..120: note = Artificially Synthesized Probe
  source 1..120: mol_type = other DNA
gaacgagtatttttaaacatttaaaactggtcacattgcctcttctggcagcaaaccaaaaatcccctcttccagcagatctcaatcctccacgggaagaagtccaatgtcctcacggtc

SEQ ID NO: 11651 - DNA, 120 bp, synthetic construct
  misc_feature 1..120: note = Artificially Synthesized Probe
  source 1..120: mol_type = other DNA
tatgattgaaacagtgggagaagaggctcagccacatagaaacacacaccaacagagaatgaggttaagagaagcttcgggtgaagaccctgcaatcctccactttttctttatttccga

SEQ ID NO: 11652 - DNA, 120 bp, synthetic construct
  misc_feature 1..120: note = Artificially Synthesized Probe
  source 1..120: mol_type = other DNA
aaagaaagacaaacaaacaaacatgaaacagagaaatgagctgatcaacaagagacagctagacatgaggcagaagctgaaaaagactcaaagaggaaacaggttgcttccccctctccc

SEQ ID NO: 11653 - DNA, 120 bp, synthetic construct
  misc_feature 1..120: note = Artificially Synthesized Probe
  source 1..120: mol_type = other DNA
tggcccacctgagctgctcgccgggcaggaggcggccgagcagtcccagcccgcttgccgccgcagctccggccacgcctcccccgcccagcgcgcccccgcgccgcctgctccttctgg

SEQ ID NO: 11654 - DNA, 120 bp, synthetic construct
  misc_feature 1..120: note = Artificially Synthesized Probe
  source 1..120: mol_type = other DNA
tccgtggacccacctcccagaaagcccatcactgtgtaatcgtctaacctggggctcgccgaggcctgtgagttcatccttttggcagttcctggtgtctccttactctgctcagcattt

SEQ ID NO: 11655 - DNA, 120 bp, synthetic construct
  misc_feature 1..120: note = Artificially Synthesized Probe
  source 1..120: mol_type = other DNA
agtggtgctggggtttatgtcatgacctgcagctgagcctacttccaatgaccgtgagatctgaaagactgttttgagggcgtagcctctgccatgattgtggggaatgctgtcctgttt

SEQ ID NO: 11656 - DNA, 120 bp, synthetic construct
  misc_feature 1..120: note = Artificially Synthesized Probe
  source 1..120: mol_type = other DNA
tgtgtgtgcgcctgtgtgtgtgggtgcacatttgtgtgtgtgtgcgcctgtgtgtgtgggtgcctgtgtgtgtgtggggcacatttgtgtgtgtgtgtgtgcctgtgtgtgggtgcacat

SEQ ID NO: 11657 - DNA, 120 bp, synthetic construct
  misc_feature 1..120: note = Artificially Synthesized Probe
  source 1..120: mol_type = other DNA
ggggcactaagagaccaaaatcgagatatgattagctgtaggatgtcatctaatcacagatcatcccgaggctaatttatctcccccatgaccataacacatcaaaaagttgactttttg

SEQ ID NO: 11658 - DNA, 120 bp, synthetic construct
  misc_feature 1..120: note = Artificially Synthesized Probe
  source 1..120: mol_type = other DNA
tgtgtctgttggtctggtgctgcttatgtggctggttcaggtctgtcatccgtcaacctgcatatttatcactggtgcattttcatgtatgttgtacctcaattaaaacattttagggcc

SEQ ID NO: 11659 - DNA, 120 bp, synthetic construct
  misc_feature 1..120: note = Artificially Synthesized Probe
  source 1..120: mol_type = other DNA
aaaatgcggttgtaacaagtatttactgtaccagtaaatatgaaaaatattaatgtcctcacacacatggaggtggcttgtgagtggtgtgagcatttcatggtcagagtttggcagttg

SEQ ID NO: 11660 - DNA, 120 bp, synthetic construct
  misc_feature 1..120: note = Artificially Synthesized Probe
  source 1..120: mol_type = other DNA
caaactcctgcagggctcactcagtttccagaactttaattattggaaagttctccctggtccagcccccaaatctgccgtgaacgttgacagctgagttgctgctccatgcgtgctttg

SEQ ID NO: 11661 - DNA, 120 bp, synthetic construct
  misc_feature 1..120: note = Artificially Synthesized Probe
  source 1..120: mol_type = other DNA
caccatgaactaagcaggacacctggaggggaagaactgtggggacctggaggcctccaacgactccttcctgcttcctggacaggactatggctgtgcagggatcccagagaagacttc

SEQ ID NO: 11662 - DNA, 120 bp, synthetic construct
  misc_feature 1..120: note = Artificially Synthesized Probe
  source 1..120: mol_type = other DNA
gtggtgatattgtgtggtctggttcctgtgtgaccctgggcagttccttacctccctggtccccgtttgtcaaagaggatggactaaatgatctctgaaagtgttgaagcgcggaccctt

SEQ ID NO: 11663 - DNA, 120 bp, synthetic construct
  misc_feature 1..120: note = Artificially Synthesized Probe
  source 1..120: mol_type = other DNA
ggaaaggcactgggcgaccgcacccgtggctttctctgggcgaccgggtcccagactccccccagcacagcagagcgcttccctgcccacccgcggaaaccgccccaggtgggccgcgcc

SEQ ID NO: 11664 - DNA, 120 bp, synthetic construct
  misc_feature 1..120: note = Artificially Synthesized Probe
  source 1..120: mol_type = other DNA
cctgggctcgaggcgtcccccggggagtcgcctcttagcggtgcgtccgggctagcggcgaggggccgccccaagtcttcccaccgccgccaccttagcagcccgacttggggcctggaa

SEQ ID NO: 11665 - DNA, 120 bp, synthetic construct
  misc_feature 1..120: note = Artificially Synthesized Probe
  source 1..120: mol_type = other DNA
gcctgtgaggggacaattccaagttaaaccttaagttttgagtcctggccagtggcttcctgacatcgcctcacttggcttccctgcctggaaaagtctgaagatgggcactacaagaga

SEQ ID NO: 11666 - DNA, 120 bp, synthetic construct
  misc_feature 1..120: note = Artificially Synthesized Probe
  source 1..120: mol_type = other DNA
ttccctgatgcccgggtgtttgtggagccggcggtctgcaatgggtcagcctaactgctgatatggtattaatatttctttcttgttttacagccaagaaagggaagggaaaggactaga

SEQ ID NO: 11667 - DNA, 120 bp, synthetic construct
  misc_feature 1..120: note = Artificially Synthesized Probe
  source 1..120: mol_type = other DNA
tcgtagagaacacaaaagtcacacaaccctcgccgaggcttgacccccgcgacagagtttagtcattccgttagctggctccacccgccctcctgggcgtggggactcgatttcttggga

SEQ ID NO: 11668 - DNA, 120 bp, synthetic construct
  misc_feature 1..120: note = Artificially Synthesized Probe
  source 1..120: mol_type = other DNA
ctcgtctgccactcatcttttgagctttttacagccaaacacttttactcaaaaatgggcctgaagaggaacacaccagtagcttcagggatatattggttaatttgtttttgtttggtt

SEQ ID NO: 11669 - DNA, 120 bp, synthetic construct
  misc_feature 1..120: note = Artificially Synthesized Probe
  source 1..120: mol_type = other DNA
agggatatgttgggtgaagatccatgctcatggtaggagcttaaaatacgagaactgttacaccttcagtttgcaattcatttagttgaccttctctgaacacattcctatttgtctctg

SEQ ID NO: 11670 - DNA, 120 bp, synthetic construct
  misc_feature 1..120: note = Artificially Synthesized Probe
  source 1..120: mol_type = other DNA
aataaatgcagagctttctacatgaatttttgcacagatctgaggtcttatcatgaggcggaactgtgttagacttggaatgtgacaagaatgtgtgataagccactggctgagggagta

SEQ ID NO: 11671 - DNA, 120 bp, synthetic construct
  misc_feature 1..120: note = Artificially Synthesized Probe
  source 1..120: mol_type = other DNA
agtttaaatccatctgtggcttctcattttctctagaacaaattcctaattccctacgatgaaattctcttgctatcctaattttttgccggctcaaaggactaaccgttttccccaaac

SEQ ID NO: 11672 - DNA, 120 bp, synthetic construct
  misc_feature 1..120: note = Artificially Synthesized Probe
  source 1..120: mol_type = other DNA
tgatactctacacttttcaaaggcgtaagggatgccttttaaaggattatggattagaaaaattcctccctctttcttgtgcctctgggcccttgcattgtgattctatcttacgtaaat

SEQ ID NO: 11673 - DNA, 120 bp, synthetic construct
  misc_feature 1..120: note = Artificially Synthesized Probe
  source 1..120: mol_type = other DNA
attgggatttttagatcctggcatcaccctggtgcgatttaggatttttatactcagtcattgctgcagcatgatttaggatttctaacccccagcatcgccctggtttgatttaggata

SEQ ID NO: 11674 - DNA, 120 bp, synthetic construct
  misc_feature 1..120: note = Artificially Synthesized Probe
  source 1..120: mol_type = other DNA
ctcagaaatttttggaaagtttgttactggagtttgcttattgtctccgctcatggctcatcaaatagttgggattttggccaaaaaatgtttgcttaacccattttgcctactgacggc

SEQ ID NO: 11675 - DNA, 120 bp, synthetic construct
  misc_feature 1..120: note = Artificially Synthesized Probe
  source 1..120: mol_type = other DNA
tccattctggctgttttgagagaacttccattctactgacaattcttgatctgttgaccatcagaagtcatagacttgaaacagaacggtttataattcctgtttggcactccttgtcaa

SEQ ID NO: 11676 - DNA, 120 bp, synthetic construct
  misc_feature 1..120: note = Artificially Synthesized Probe
  source 1..120: mol_type = other DNA
tttccttaagattagaatgatgaacaaatatggtgagtgctatggcagacagaggtttgattatagtctcggtcagctttgtgcctatgtgaagggcaatgtaatcattgcatggtaaca

SEQ ID NO: 11677 - DNA, 120 bp, synthetic construct
  misc_feature 1..120: note = Artificially Synthesized Probe
  source 1..120: mol_type = other DNA
tttataggtgaagaaactgagaaacagattggaaatgatttgttttgagcgggggtcaagagcaataacgaaaaatgtttgtcataaaccgtttttcattattgctcctgacctcctctc

SEQ ID NO: 11678 - DNA, 120 bp, synthetic construct
  misc_feature 1..120: note = Artificially Synthesized Probe
  source 1..120: mol_type = other DNA
tcttcgaggttatttttatagggatttggcataattgattgtactttccttcttcctagactctgtgggtgtggttggaagtccagagatagttgtgcttttacacggttttccaacatc

SEQ ID NO: 11679 - DNA, 120 bp, synthetic construct
  misc_feature 1..120: note = Artificially Synthesized Probe
  source 1..120: mol_type = other DNA
aaccttctttctcatgactatggagatattgttgctcaggagcttctctacaggtcagtggagcttcagacttcagcttatgatgctaggaaagtacattgtttctggactgtttgtatc

SEQ ID NO: 11680 - DNA, 120 bp, synthetic construct
  misc_feature 1..120: note = Artificially Synthesized Probe
  source 1..120: mol_type = other DNA
ttaactgtatgagattccccaactcctaactgatggcagtgccaagtttcagttagaaaataccgaacccctgattagactttctgggtagccagcttgcaagttcatgaatatccaaat

SEQ ID NO: 11681 - DNA, 120 bp, synthetic construct
  misc_feature 1..120: note = Artificially Synthesized Probe
  source 1..120: mol_type = other DNA
ttaggcaactaaagcagaggcagtggcccctacgtaaacccaaaaccaatcctaagaataagagatcaacaaatatttggagaaattacagctatggaaagatctgtgtcacaagcttga

SEQ ID NO: 11682 - DNA, 120 bp, synthetic construct
  misc_feature 1..120: note = Artificially Synthesized Probe
  source 1..120: mol_type = other DNA
tgaaactggactctttgttagtattaaatgcttcaaagtattgaatcatggttgtgaaagtagcctagtgcctccctcaaggtacaaggctcttccttttgcctatctttctgcagcaac

SEQ ID NO: 11683 - DNA, 120 bp, synthetic construct
  misc_feature 1..120: note = Artificially Synthesized Probe
  source 1..120: mol_type = other DNA
gtcttttaaaaaacaaaccaacaaatgaggaaaccgagttgaaagatctgtgttatatgtttgagtcagagaggtaggtagtggtggagcctaaattggaacctcagacctgggcttttt

SEQ ID NO: 11684 - DNA, 120 bp, synthetic construct
  misc_feature 1..120: note = Artificially Synthesized Probe
  source 1..120: mol_type = other DNA
tgtgtgtagagtgaagtatataaaaagctgagacattactgtaaaggtagttggtattactgatttctgtggtgtgcattgtcagtgactgccacattacatgctgaattgctcggacag

SEQ ID NO: 11685 - DNA, 120 bp, synthetic construct
  misc_feature 1..120: note = Artificially Synthesized Probe
  source 1..120: mol_type = other DNA
tatgttttgttagtatctcatcctgacagtggtaaacagaattgcctgttgagggctattggctctagccattgtctttaacctcgctggctgttcatccaggaaacaataaaaagattg

SEQ ID NO: 11686 - DNA, 120 bp, synthetic construct
  misc_feature 1..120: note = Artificially Synthesized Probe
  source 1..120: mol_type = other DNA
aaaactagtttgtataaatggaattggcaagtttatctgcctaagatacaatttcagagtagaaggtgaataagctctttggtggctccttccagtgtggtgtgtccacagggtcattta

SEQ ID NO: 11687 - DNA, 120 bp, synthetic construct
  misc_feature 1..120: note = Artificially Synthesized Probe
  source 1..120: mol_type = other DNA
gtcccagagaggctttccaatgtagctcagtaattcctgttactttacagacaggaaagttccagaaactttaagaacaaactctgaaagacctatgagcaaatggtgctgaatactttt

SEQ ID NO: 11688 - DNA, 120 bp, synthetic construct
  misc_feature 1..120: note = Artificially Synthesized Probe
  source 1..120: mol_type = other DNA
accccacggcggtgaagagaaaacgttcatgtcttctcagatcagaaggaaagaaacaaaaccattgtgaaggaaaacacctgctggaaagtaattatcaaagtaacagcattccagttt

SEQ ID NO: 11689 - DNA, 120 bp, synthetic construct
  misc_feature 1..120: note = Artificially Synthesized Probe
  source 1..120: mol_type = other DNA
agtgaggatcaagacaaagtacttgctaggaggtagagggcgctgggtgaacctgtgagaattcctgggctctgacctgatctgtcctgcattttgagtaatgggagcaaacacaggagg

SEQ ID NO: 11690 - DNA, 120 bp, synthetic construct
  misc_feature 1..120: note = Artificially Synthesized Probe
  source 1..120: mol_type = other DNA
aaaattaaactaccctaggaagtgaaaaccccacctgcagcctggtttgccctcacacaagggaaaagaggtgttagaagcagtagctcagggcgattaggggttgtgcgtttccatgct

SEQ ID NO: 11691 - DNA, 120 bp, synthetic construct
  misc_feature 1..120: note = Artificially Synthesized Probe
  source 1..120: mol_type = other DNA
tgcagaaccgcgtccccaccagagaccagggaaggaaacttcaggacctgtgggagtcctcacaaagccctcttctgtgtctctaagagcaaatctgaaagcattaagtccagaatattt

SEQ ID NO: 11692 - DNA, 120 bp, synthetic construct
  misc_feature 1..120: note = Artificially Synthesized Probe
  source 1..120: mol_type = other DNA
aaaagaaaagaaagacattttacttcttcggggtttttctggggtgtttttaaaaatacaaagtggcacaatgaatcttcgagggccacgtcgtgtggccctcggaggccctcaccagga

SEQ ID NO: 11693 - DNA, 120 bp, synthetic construct
  misc_feature 1..120: note = Artificially Synthesized Probe
  source 1..120: mol_type = other DNA
cctctgtgcccatggatagctttcccgtgttggctcaagaaaaacaaagcaactaaatgttaacacacaaaagagccaaacatctatccaatgtcactgctacaaaaagtaagagaagaa

SEQ ID NO: 11694 - DNA, 120 bp, synthetic construct
  misc_feature 1..120: note = Artificially Synthesized Probe
  source 1..120: mol_type = other DNA
ggtaaaggcatgggccccatgtggtctttgctcttcggttgttgagacaccatttattgcaaagcctatgctttcctcagtctcaaaaaaaaaaaatccagagccattaaagaaaatatt

SEQ ID NO: 11695 - DNA, 120 bp, synthetic construct
  misc_feature 1..120: note = Artificially Synthesized Probe
  source 1..120: mol_type = other DNA
ggtacagaatagtgattctagtatacaagctattttgtaagaaagaaaaaaaaattatcatctggttgcccataagaggagcaggtcagtcaggcatgagaccacagcttttctgagctc

SEQ ID NO: 11696 - DNA, 120 bp, synthetic construct
  misc_feature 1..120: note = Artificially Synthesized Probe
  source 1..120: mol_type = other DNA
tgactccatccccccatcaggcagtgactccattccccatcagcacacgcatgttgacctggagcaaacagcttaatacaggtcttctaatgatttgggtgcaaaaccacttatactgga

SEQ ID NO: 11697 - DNA, 120 bp, synthetic construct
  misc_feature 1..120: note = Artificially Synthesized Probe
  source 1..120: mol_type = other DNA
ataaaatacaactcacttttatggctggcgggtaatccttaaacatctccacgattctcatgatgctgaatgacagatatccagaggctgtgaacagcagcggagacgtgaggctgctta

SEQ ID NO: 11698 - DNA, 120 bp, synthetic construct
  misc_feature 1..120: note = Artificially Synthesized Probe
  source 1..120: mol_type = other DNA
aacaaaaccaagaaacaaaaaacatttacctgcaattctccactcttgaaaaaatagcccttccgcatgggtcacctccttcactgctctgaagtctgtccttttaacccaccccaaatc

SEQ ID NO: 11699 - DNA, 120 bp, synthetic construct
  misc_feature 1..120: note = Artificially Synthesized Probe
  source 1..120: mol_type = other DNA
accagacacttgctgggacactctgctgccacatgactggcaatggcacttggaaagcactaagagaaaagaaaaaggaaagattttagaggaaatagtcgaagaagtcgaattccaaac

SEQ ID NO: 11700 - DNA, 120 bp, synthetic construct
  misc_feature 1..120: note = Artificially Synthesized Probe
  source 1..120: mol_type = other DNA
cttcctgatgacgctgacttgactcactgggttagggggatctgtaggttcctctgttggatgggcacctcttcctttttataaccaagaaatgcccttttcccacttattgtgaggagc

SEQ ID NO: 11701 - DNA, 120 bp, synthetic construct
  misc_feature 1..120: note = Artificially Synthesized Probe
  source 1..120: mol_type = other DNA
gtgcctttcattctcaactttttggaggtatgtggtctctgtcctccctcagcttcgggatgtaatccctgcgtttcagaccccagggtcagttgtacacacctgcaggcgtcattctct

SEQ ID NO: 11702 - DNA, 120 bp, synthetic construct
  misc_feature 1..120: note = Artificially Synthesized Probe
  source 1..120: mol_type = other DNA
aggaagagccccactgctgcccaggaggagcctgtagctgatgctgggtgctcaccattcctgctcatgtacataagagagcaggggcaaaatctaaaagtccacacagcatgagacaaa

SEQ ID NO: 11703 - DNA, 120 bp, synthetic construct
  misc_feature 1..120: note = Artificially Synthesized Probe
  source 1..120: mol_type = other DNA
aatataaaataatcacacaaactaatataaaagcagttaatactttgactcatttaatccttaactccccagttcttctgaagttgggggccagcgaggaccctctgtggtgactctctg

SEQ ID NO: 11704 - DNA, 120 bp, synthetic construct
  misc_feature 1..120: note = Artificially Synthesized Probe
  source 1..120: mol_type = other DNA
gccagactcagggagggctggggaagaaacacacgcccgaaaacctgctcccgtgaaggatctctgtgagtcgcaaacacagagctgtggccagcaggaaagccaggcataaggagtggg

SEQ ID NO: 11705 - DNA, 120 bp, synthetic construct
  misc_feature 1..120: note = Artificially Synthesized Probe
  source 1..120: mol_type = other DNA
ggagagagaatgacaagataaagaacaaaatacagttacgtgctgcttataacaattataccaaagtacaaggcaagaaaagttgaaagtaagaaggagaaagaggccaggtgcggtggc

SEQ ID NO: 11706 - DNA, 120 bp, synthetic construct
  misc_feature 1..120: note = Artificially Synthesized Probe
  source 1..120: mol_type = other DNA
ccgtggatctttgggcttgaggaaatgttcacacacattgtccttgcatatgaaaattagcagatgtggtgtctcctggtgatcccctggggacgagcactggactgagtcaggcttagg

SEQ ID NO: 11707 - DNA, 120 bp, synthetic construct
  misc_feature 1..120: note = Artificially Synthesized Probe
  source 1..120: mol_type = other DNA
aagaaagagtgcagaaccacattcaactaaaaacagagcctcgaaatatatgatgtcataacagagccacaggaagatgtagatatatcagtagaggtggggaaggacttgaaacacttt

SEQ ID NO: 11708 - DNA, 120 bp, synthetic construct
  misc_feature 1..120: note = Artificially Synthesized Probe
  source 1..120: mol_type = other DNA
cctcctccagctttccccaatcatcaagtgcattccacatgtcacacaaagcaggaggccctccttgcagtatctcggatgaggtcctggtttcctttgggatttttgtctttttttttt

SEQ ID NO: 11709 - DNA, 120 bp, synthetic construct
  misc_feature 1..120: note = Artificially Synthesized Probe
  source 1..120: mol_type = other DNA
ggaggggttttccttctttgaataataaaagaaaaaaggtaacagataaaccacacttcaggccattcactaaaaattatcctgattaggacataatggtggggagtcctgcgtgctcag

SEQ ID NO: 11710 - DNA, 120 bp, synthetic construct
  misc_feature 1..120: note = Artificially Synthesized Probe
  source 1..120: mol_type = other DNA
aagatatttgttaatgaaggctcttctagctggataagctttgaagcctagaatgtaactcacgcaggcacaagacctggtctttgctgaaaattacccaaaaaaggaaaaagtatcagc

SEQ ID NO: 11711 - DNA, 120 bp, synthetic construct
  misc_feature 1..120: note = Artificially Synthesized Probe
  source 1..120: mol_type = other DNA
agaagcttccagagagggcagcagagtgggacgggtcacctgccccaaagggctttgttctaagggagcagagacccaggacagcacggggcggggcatccactttgtttttaagacatt

SEQ ID NO: 11712 - DNA, 120 bp, synthetic construct
  misc_feature 1..120: note = Artificially Synthesized Probe
  source 1..120: mol_type = other DNA
tatgaagaggtttgaatgaggtacaggtgacagaaacctgcacatctcagaacaaagaaaccagagcacgtgccggcgagcttgggcactggcagaggcgtggaggaagctgcttacaga

SEQ ID NO: 11713 - DNA, 120 bp, synthetic construct
  misc_feature 1..120: note = Artificially Synthesized Probe
  source 1..120: mol_type = other DNA
atctcattctcagcccaagctacacggaaccgggggtccctgcatagaggcctgtcctgcagcatggctctgagcagctgcacacactcaggcccaagtggctcctccaatcatctctgt

SEQ ID NO: 11714 - DNA, 120 bp, synthetic construct
  misc_feature 1..120: note = Artificially Synthesized Probe
  source 1..120: mol_type = other DNA
caccacagctgtgctgaatgtacagccacgtgtcaccagttctttatctggaataaaattatcatcggctttggccactctgaggaaacttcaataagttgtttccaagaaatatttttt

SEQ ID NO: 11715 - DNA, 120 bp, synthetic construct
  misc_feature 1..120: note = Artificially Synthesized Probe
  source 1..120: mol_type = other DNA
agtaacagtaaagtatatggcaaggaggtaaggaaatgaaaaacataagcaccagatcatatgggatgtggaaatactggcttcagtgtaagcttcactctattccagggttcacactca

SEQ ID NO: 11716 - DNA, 120 bp, synthetic construct
  misc_feature 1..120: note = Artificially Synthesized Probe
  source 1..120: mol_type = other DNA
cagaatcgaaggggtgagggtacgctctctgcagcagaaagccctgggcttaaagtcctatttattatttggcgttgccacttactggtcggtggctttggtagggcgcgtttctgagcc

SEQ ID NO: 11717 - DNA, 120 bp, synthetic construct
  misc_feature 1..120: note = Artificially Synthesized Probe
  source 1..120: mol_type = other DNA
ctgacattaactggcactggaaactccacctcacttccacacggaacttgggacaggtccttttttagatggtgtgactggtatcttcttcacttatttctttctgagggagtgaaatga

SEQ ID NO: 11718 - DNA, 120 bp, synthetic construct
  misc_feature 1..120: note = Artificially Synthesized Probe
  source 1..120: mol_type = other DNA
ttgactgaggacacatttagagaacatgggatggtgcccggcacacacatggggagtcagtgggtcttactgagtacgacatgagtgactcagaaaaaaattaaaacaaaccagctgaat

SEQ ID NO: 11719 - DNA, 120 bp, synthetic construct
  misc_feature 1..120: note = Artificially Synthesized Probe
  source 1..120: mol_type = other DNA
gagctagttaagccaattcttcatccaggaggaacccccaccctgatttcccttcaatttggccaaaaaattaattcaactctttagcggataaagatgacacactactggaattcagca

SEQ ID NO: 11720 - DNA, 120 bp, synthetic construct
  misc_feature 1..120: note = Artificially Synthesized Probe
  source 1..120: mol_type = other DNA
aaaggaacagagtttgaatgctcccagggcattggggcaatctcttcttgtattgcaaacactcaactttatgtttgagagtggaaatgttgacgaatgggtgcaaaaaaattcaacgaa

SEQ ID NO: 11721 - DNA, 120 bp, synthetic construct
  misc_feature 1..120: note = Artificially Synthesized Probe
  source 1..120: mol_type = other DNA
tctaaggttccacctatcttggcttttgacatttggattttccttcctctgtcctttggacattgattgggatcaggtctgatgaacttcaaaaaaaaagggcataagatcatctgaggt

SEQ ID NO: 11722 - DNA, 120 bp, synthetic construct
  misc_feature 1..120: note = Artificially Synthesized Probe
  source 1..120: mol_type = other DNA
actgacgttcatcccacagtggaaagaaaatgagagacccgtggctgagtgtgtttgggagagtaggaagtagatcccttttaaaattcgaatgtgggaattttgcatagattcacttaa

SEQ ID NO: 11723 - DNA, 120 bp, synthetic construct
  misc_feature 1..120: note = Artificially Synthesized Probe
  source 1..120: mol_type = other DNA
tgatatatcctaagccaggtgatacttaggccacatctttgaagaatagagcaaaaggtgatacatggggaaagtctccatgccattctgaaacacctagatgttggaatcaagtcttta

SEQ ID NO: 11724 - DNA, 120 bp, synthetic construct
  misc_feature 1..120: note = Artificially Synthesized Probe
  source 1..120: mol_type = other DNA
aaaggtgaagcttcatatggtgaaacggatgaaaggtatttgtattcatttctgggactgctgcatatgtgacttgtacagtacagatttagtggtttaaaacacacagctgtcctgcag

SEQ ID NO: 11725 - DNA, 120 bp, synthetic construct
  misc_feature 1..120: note = Artificially Synthesized Probe
  source 1..120: mol_type = other DNA
tattgtcagcccttatttcaaatggcaacttgtaacttctcattgcctgagtataggcgaatgcagagaaatggaaaaggggggagaaccatgttttccaaggagcagagggagggagca

SEQ ID NO: 11726 - DNA, 120 bp, synthetic construct
  misc_feature 1..120: note = Artificially Synthesized Probe
  source 1..120: mol_type = other DNA
tgtgtcaaggtagtgttaggtcgagaatactgaatgcccaagtggcattgctatgatgggtcttactatgagagtacatgtcagcaggtgacacatttgggaggcaaagaatcatgtaaa

SEQ ID NO: 11727 - DNA, 120 bp, synthetic construct
  misc_feature 1..120: note = Artificially Synthesized Probe
  source 1..120: mol_type = other DNA
tctgcagaggagctggcgaaaataccagaaatccatgatgaaacggaagataactcttacaataatgaacctccttccctgtctttcatcattgctaatctgtgcgtttaaccaatttca

SEQ ID NO: 11728 - DNA, 120 bp, synthetic construct
  misc_feature 1..120: note = Artificially Synthesized Probe
  source 1..120: mol_type = other DNA
agtgctgtgcaccatagaatcgaaaacttgaagatgtacaaaattaggatgttagcaccactggcatcagataggcattttaggatagatttgacttaacacccatgtcctatcccagga

SEQ ID NO: 11729 - DNA, 120 bp, synthetic construct
  misc_feature 1..120: note = Artificially Synthesized Probe
  source 1..120: mol_type = other DNA
ttagccagattttacttttttaaaaaaatacgtagaaaaatccaataatggtagcagaagctcagcactcattgagccctctctggatgtggctctacgtcgtgtgttggagtctagtcc

SEQ ID NO: 11730 - DNA, 120 bp, synthetic construct
  misc_feature 1..120: note = Artificially Synthesized Probe
  source 1..120: mol_type = other DNA
ctagacaacacatctaaacaatgagtcccaagtttacacccacatcagagacacatcctctgaactctgacttttgtaggcaaaggcttgcacgacactgcggccaaagtgttccactga

SEQ ID NO: 11731 - DNA, 120 bp, synthetic construct
  misc_feature 1..120: note = Artificially Synthesized Probe
  source 1..120: mol_type = other DNA
aagcttatgtgtagaagaaagctagctgtttacttttgtggaatttttcacagtctggagttagctgaggatatcctcgtgatgtttgcaccaaagttccattgtccctgttttcctgta

SEQ ID NO: 11732 - DNA, 120 bp, synthetic construct
  misc_feature 1..120: note = Artificially Synthesized Probe
  source 1..120: mol_type = other DNA
aaaaatccatttttttgatcataaggaatttgaaatcacccttagccggactagttggaatcacggacacaggcaactctagagatgaaaaaaataggggctaaaacagggactccgctg

SEQ ID NO: 11733 - DNA, 120 bp, synthetic construct
  misc_feature 1..120: note = Artificially Synthesized Probe
  source 1..120: mol_type = other DNA
ggtgccacaatcctgccgacaccttgatgttagctcaatgaatcctgagtcaaacttctgccctccagagctgtcaggtaatgcatttgcattgtttttgtattgtgtttattttatttt

SEQ ID NO: 11734 - DNA, 120 bp, synthetic construct
  misc_feature 1..120: note = Artificially Synthesized Probe
  source 1..120: mol_type = other DNA
tctaatctgaagactcagctctttctttgtttcttctctctggttaggagagttttcctgtgttgttagggtgacggctgcctcagtggcatggcaaaaactcatggtcgaaaacttcac

SEQ ID NO: 11735 - DNA, 120 bp, synthetic construct
  misc_feature 1..120: note = Artificially Synthesized Probe
  source 1..120: mol_type = other DNA
gcaaacttgacttcgaaatcagcagttctcaaacctttgggcctcaggaccccttcacatttcctaaattactgagaaccccaaagagttttattcatatgggtcatatctattaatatt

SEQ ID NO: 11736 - DNA, 120 bp, synthetic construct
  misc_feature 1..120: note = Artificially Synthesized Probe
  source 1..120: mol_type = other DNA
cccttatctggaacaatagaagatgggtgaattctccacttgcttctgcattcagtgggtcgtaacatgttttctaggctgtagtatttgaagaaaatctaggctcatacagatacataa

SEQ ID NO: 11737 - DNA, 120 bp, synthetic construct
  misc_feature 1..120: note = Artificially Synthesized Probe
  source 1..120: mol_type = other DNA
tgccaagtacccaagtcgaaacagttcatctctctgttgttctctcaagtgaaaatgctatttcataagaaaagtttctagctcaggtggcgatcggaacaattgcccaatccttttaat

SEQ ID NO: 11738 - DNA, 120 bp, synthetic construct
  misc_feature 1..120: note = Artificially Synthesized Probe
  source 1..120: mol_type = other DNA
tttatccaccattgtttttacaccttcagtgcaggcatcaaagagcaaagaaaaggcaaatgatgtctcagcattattacaaaaatagctttggccttgtgactcacccccctaaaggat

SEQ ID NO: 11739 - DNA, 120 bp, synthetic construct
  misc_feature 1..120: note = Artificially Synthesized Probe
  source 1..120: mol_type = other DNA
ggtgtccgcctccaaatcagtgtgcttcagagttctcagaagacaatggcacctagtgtccttcttgtttttgtcactaagaatggattaattttatctcatctgaaactgaaaatatta

SEQ ID NO: 11740 - DNA, 120 bp, synthetic construct
  misc_feature 1..120: note = Artificially Synthesized Probe
  source 1..120: mol_type = other DNA
tgtgtgtgtatgtacgtgtacacacttaaagcctgttgcaaaaacaagatgcccaatatatttcttgtttctgatattttcccaagggcgttgaagggcaagattaagaaggaaagctcc

SEQ ID NO: 11741 - DNA, 120 bp, synthetic construct
  misc_feature 1..120: note = Artificially Synthesized Probe
  source 1..120: mol_type = other DNA
aagtatttatttcatgatgaatttgaaatccaggcagtaggcttaaactaaacaatgtgttcgcctgtaagatcccccataaggcatttggaagagatcttttcagggagagggtgggag

SEQ ID NO: 11742 - DNA, 120 bp, synthetic construct
  misc_feature 1..120: note = Artificially Synthesized Probe
  source 1..120: mol_type = other DNA
aaaaaaaaaaaaaaaaggagggtaaaaaagcttaaggttaatgttttgaaacctgacccagccagggcctaatgcagaccttgtccagctagtaagtgggcctctgggggtcttcattga

SEQ ID NO: 11743 - DNA, 120 bp, synthetic construct
  misc_feature 1..120: note = Artificially Synthesized Probe
  source 1..120: mol_type = other DNA
gctctgtcatctgggcacgttcggagccaaaagccttgaccttctgaaagttcactgaaaaatcatctcgtaaaaggcagattcattggacaaaagatttagaaatgtgtttaccgtgta

SEQ ID NO: 11744 - DNA, 120 bp, synthetic construct
  misc_feature 1..120: note = Artificially Synthesized Probe
  source 1..120: mol_type = other DNA
caggcagtaacagcgtgtgcttgtcacctgatctcagctgtttgttataaagtccgtcgttcagatttccagttttgccaactggttgactatttctatctctgtattataaatggaaaa

SEQ ID NO: 11745 - DNA, 120 bp, synthetic construct
  misc_feature 1..120: note = Artificially Synthesized Probe
  source 1..120: mol_type = other DNA
cagggaaatgtctaaaacagaaaccacgcggtcgtttcacataaggaactggttgaaatgctgttaactgagaatgggaaaaggagatactgaggtatcagaggtcataactgcaggagt

SEQ ID NO: 11746 - DNA, 120 bp, synthetic construct
  misc_feature 1..120: note = Artificially Synthesized Probe
  source 1..120: mol_type = other DNA
atcctgcagacatggtcagacctgttggtaacattgattggtaacattggcaactgattggtaatgttgatgcagattaccggtttttatactgtaattcagaccagctctaagtgatgt

SEQ ID NO: 11747 - DNA, 120 bp, synthetic construct
  misc_feature 1..120: note = Artificially Synthesized Probe
  source 1..120: mol_type = other DNA
tgtctgagtggatggataaatagatgtctgagtggatgaatgcattggtgagtggatgggcagctgggtggatgggtagatggatgaagtcgggagggatgagtggtgggtggatggata

SEQ ID NO: 11748 - DNA, 120 bp, synthetic construct
  misc_feature 1..120: note = Artificially Synthesized Probe
  source 1..120: mol_type = other DNA
tgtttgtttttttttgccaaccatgagccttgtgtttctgttttcacgtattgtttaacttattttgggtgggcgagacaaacgaggtaacacctgggttttggggtgggaagcaagaag

SEQ ID NO: 11749 - DNA, 120 bp, synthetic construct
  misc_feature 1..120: note = Artificially Synthesized Probe
  source 1..120: mol_type = other DNA
tgcagggtatttggtcctctccctcaagctagccctgacttgagtcttgccctgtcttgtgcctgctaagaaaaagcgcctcctctccgtccacgacttcgacttcgagggagactcaga

SEQ ID NO: 11750 - DNA, 120 bp, synthetic construct
  misc_feature 1..120: note = Artificially Synthesized Probe
  source 1..120: mol_type = other DNA
tggaggctgaaatttgggtttgcataaaggtctttggtatagacttttctagttaaattaggtttggaagtgaagccagattttggcttgtgaatagccttgagttgggggttgtatggt

SEQ ID NO: 11751 - DNA, 120 bp, synthetic construct
  misc_feature 1..120: note = Artificially Synthesized Probe
  source 1..120: mol_type = other DNA
atagattgctgtgagtatggtagtaacagccgccagacagaatgtaaaggtttggattgatagattcttttctattgaagggtagaagcagatgagcaggaaaactccagctacaactat

SEQ ID NO: 11752 - DNA, 120 bp, synthetic construct
  misc_feature 1..120: note = Artificially Synthesized Probe
  source 1..120: mol_type = other DNA
ctgctcggctgtaccatcagccgattagtaagaaagacatgagtcctacaccttctcatccaataaagagctgaaagaggcggtaaccagaattaatattgtgatgaggaaaataagtat

SEQ ID NO: 11753 - DNA, 120 bp, synthetic construct
  misc_feature 1..120: note = Artificially Synthesized Probe
  source 1..120: mol_type = other DNA
aagtcctataagcataacagtgatagttgatcaggagaacgaggccatagtcacaaagagttctcctactagattactgatagcgggtaaagcaagattagtaagatttgctagaagtca

SEQ ID NO: 11754 - DNA, 120 bp, synthetic construct
  misc_feature 1..120: note = Artificially Synthesized Probe
  source 1..120: mol_type = other DNA
gggacaatgacataacacagacacccctctgctggagggatgtccggattacagccaaggagctgccaggaagccccaacccacttttctgatcttcaaagattaaggtgtacatagtta

SEQ ID NO: 11755 - DNA, 120 bp, synthetic construct
  misc_feature 1..120: note = Artificially Synthesized Probe
  source 1..120: mol_type = other DNA
tggtcaaccggccaaccatcctggtctgggcaggatgggcatctgggcattgccactgctggcccacagtcagttcaagtctgttgatcaggagatctttaagcactgagaacctaaatc

SEQ ID NO: 11756 - DNA, 120 bp, synthetic construct
  misc_feature 1..120: note = Artificially Synthesized Probe
  source 1..120: mol_type = other DNA
cctctgtgcacctcagtttcctcattgtacaaaaggggttaacaacgtctaactcatcccattgtcatagggattaaatgagatggctgaacctgttgactacatagcaaattatcacaa

SEQ ID NO: 11757 - DNA, 120 bp, synthetic construct
  misc_feature 1..120: note = Artificially Synthesized Probe
  source 1..120: mol_type = other DNA
caggtaacggtggctggaaagacttctgtcttgtcgtttctttgggtggagtctttttacctccacaccaagtcactttagagaaattacagcttttaatactttcaaactatgaaattg

SEQ ID NO: 11758 - DNA, 120 bp, synthetic construct
  misc_feature 1..120: note = Artificially Synthesized Probe
  source 1..120: mol_type = other DNA
gaaggacatctggccttttgtcacgagctcctttcaccgagcataatgcttctgaggtccatccatgctgtagcacatatgggtgcttcattcctttttatgaaaatatatattttatac

SEQ ID NO: 11759 - DNA, 120 bp, synthetic construct
  misc_feature 1..120: note = Artificially Synthesized Probe
  source 1..120: mol_type = other DNA
tcaatttgagcaagttcatgttaccgggggaaaggcaatattgtttcttctgagaacatcatgaccactaggttctttaaggcaatgaaagacacaggctattaatgtctctgatagagc

SEQ ID NO: 11760 - DNA, 120 bp, synthetic construct
  misc_feature 1..120: note = Artificially Synthesized Probe
  source 1..120: mol_type = other DNA
ttctaaaattgggctagtgtccacggggcagaagcatgcagtttctgaattcagcatctctctggactcagtgtcctcagctgactttttactgtagtgtcatctggaagcttcctcaac

SEQ ID NO: 11761 - DNA, 120 bp, synthetic construct
  misc_feature 1..120: note = Artificially Synthesized Probe
  source 1..120: mol_type = other DNA
ttttcacctatgtagaaattgtagcaggatcacaaccttgcaaaggaacagtgacctggggggcccttatctccaatcctgtttggtcttaattattcacagggaaaaaaaaagtagaag

SEQ ID NO: 11762 - DNA, 120 bp, synthetic construct
  misc_feature 1..120: note = Artificially Synthesized Probe
  source 1..120: mol_type = other DNA
acgtctgagtgatgctactcccaccagagcagttgttactgttggagaaatataatttttagaaaaacccgaaatcttttcattacccagaaaatctctccataagggtagcagaggaag

SEQ ID NO: 11763 - DNA, 120 bp, synthetic construct
  misc_feature 1..120: note = Artificially Synthesized Probe
  source 1..120: mol_type = other DNA
ctcttttaaagccaggtgagccgtaaatgagataatggcaggaaagatgcatctgctgggtgaggaagaaaactagaaaattgatttatcatgtctcagtctgggagctaatagactttg

SEQ ID NO: 11764 - DNA, 120 bp, synthetic construct
  misc_feature 1..120: note = Artificially Synthesized Probe
  source 1..120: mol_type = other DNA
agtgtgacatgggcttttgggagaagagtttcttgagattttgctgtttgtaaggttaagttctgtgtgtagttctcagagagccaggcagttcccaccacatagcctgagtgaagtctt

SEQ ID NO: 11765 - DNA, 120 bp, synthetic construct
  misc_feature 1..120: note = Artificially Synthesized Probe
  source 1..120: mol_type = other DNA
cattttccatacaaggcctataattacattgtagcaattcactaggttacagcttactaattccgaggaagattgctttaacactccatgagtaggggtaatgatcttgagaggggtctc

SEQ ID NO: 11766 - DNA, 120 bp, synthetic construct
  misc_feature 1..120: note = Artificially Synthesized Probe
  source 1..120: mol_type = other DNA
cagaaacagattaaccttgtggagggaaagggcagccaccctcgctctggctcttgttggtacctcctggctttggccttttgctcatacaaatctcagcccagggactagtaaatcaga

SEQ ID NO: 11767 - DNA, 120 bp, synthetic construct
  misc_feature 1..120: note = Artificially Synthesized Probe
  source 1..120: mol_type = other DNA
tcttcatcgactcaatctaatcatccccttggtgttcgtctgtgagaccccaggcagccagccctgtcgatctgtctcaataggcttcgtccaaatagaaaattaaatgatcatgtgcaa

SEQ ID NO: 11768 - DNA, 120 bp, synthetic construct
  misc_feature 1..120: note = Artificially Synthesized Probe
  source 1..120: mol_type = other DNA
tgaataaacagctggaaataagtcccagaagtctattctggggtggtgtattttggtttccttcacaacccaacaagtggaacacaggtcaggaggtggaggaaggtacagaaaaataaa

SEQ ID NO: 11769 - DNA, 120 bp, synthetic construct
  misc_feature 1..120: note = Artificially Synthesized Probe
  source 1..120: mol_type = other DNA
tagaccctttaaggactttacagagattattgaactgagttcttataacttgcaggttggatactgctatcaccaccattttaaagctgagggaactgagatgcagaggggttgagtgac

SEQ ID NO: 11770 - DNA, 120 bp, synthetic construct
  misc_feature 1..120: note = Artificially Synthesized Probe
  source 1..120: mol_type = other DNA
agcaatatcgtggtgagtccccatctgggtgaaaccccacactccctcctgctgctggtcagcctccgtccttctctttcctaggtgggcacggctgcccatcaaaccaacagacaggaa

SEQ ID NO: 11771 - DNA, 120 bp, synthetic construct
  misc_feature 1..120: note = Artificially Synthesized Probe
  source 1..120: mol_type = other DNA
gtgcaaataccttagacgaagccccagccttcctggagcttgtttttagtggaaggagataaacagcaaacaaacaagatcatttgggttcatgaaaagtgtgattaagacaatcagtga

SEQ ID NO: 11772 - DNA, 120 bp, synthetic construct
  misc_feature 1..120: note = Artificially Synthesized Probe
  source 1..120: mol_type = other DNA
caatcttaagggaaaacacaagtaaaattggctccaggactgagctgggggcagctgctctttctgtccatgactttgaggcgggatctcgagcgtctgtctgacgggccttctgtctgc

SEQ ID NO: 11773 - DNA, 120 bp, synthetic construct
  misc_feature 1..120: note = Artificially Synthesized Probe
  source 1..120: mol_type = other DNA
ggcacggtagtgagtggggggacagtggtgagtgggaggacagtggtgagtggggacagtggtgagtggggggacagtggtgagtgggcacggtagtgagtggggggacagtggtgagtg

SEQ ID NO: 11774 - DNA, 120 bp, synthetic construct
  misc_feature 1..120: note = Artificially Synthesized Probe
  source 1..120: mol_type = other DNA
acagttgttgagttgggggacactttagtgttgggggggacattgtttattgggggcatagtggtgtgtggttgtcagtgtgtggtggtggtcagtggtgattgggcactgtagtgagtg

SEQ ID NO: 11775 - DNA, 120 bp, synthetic construct
  misc_feature 1..120: note = Artificially Synthesized Probe
  source 1..120: mol_type = other DNA
tgaaagatgaccttaggagagtcccagatagggtcatgacggaaaatacaggatgcccagttagctctaaatttcagatcaacaactaataatctagtataagtataccccatgcaacat

SEQ ID NO: 11776 - DNA, 120 bp, synthetic construct
  misc_feature 1..120: note = Artificially Synthesized Probe
  source 1..120: mol_type = other DNA
aataacataagtctcttctttgccctccagatatttctccctcgagtggctgggaaacttggcaagagaccagaggacccaaatgcagacccttcaagtgaggccaaggtatgtgttact

SEQ ID NO: 11777 - DNA, 120 bp, synthetic construct
  misc_feature 1..120: note = Artificially Synthesized Probe
  source 1..120: mol_type = other DNA
tcctcacagtgacacgcgatgttttcaaaagtccatctttccacaggatgtttacagcacccagcgggtaggcagtgctatttattaaccctgttgtactgatgaacaaaccagccggct

SEQ ID NO: 11778 - DNA, 120 bp, synthetic construct
  misc_feature 1..120: note = Artificially Synthesized Probe
  source 1..120: mol_type = other DNA
gaaacttgtactctttctgccataccacccaaatgtggcagcttccccaaagctgagcatctcttatttcaggcatttcatgcttaatttattgaaaatgtccattctcatattgctaaa

SEQ ID NO: 11779 - DNA, 120 bp, synthetic construct
  misc_feature 1..120: note = Artificially Synthesized Probe
  source 1..120: mol_type = other DNA
ttccatggttttctacataaattgtcctaacgtggtacacagttcctggccttctagaaagtacggctcatcatttagccttccttgaaggcttggtggtgacaaggacattagctttgt

SEQ ID NO: 11780 - DNA, 120 bp, synthetic construct
  misc_feature 1..120: note = Artificially Synthesized Probe
  source 1..120: mol_type = other DNA
caagagattcatgtttgtagcaggaggacaaggggcgattccttgtgtcctctgtatgactggttttgtgaagggtagactctgtcctatccagagacctcactcacctccagtccaaag

SEQ ID NO: 11781 - DNA, 120 bp, synthetic construct
  misc_feature 1..120: note = Artificially Synthesized Probe
  source 1..120: mol_type = other DNA
gaacaaaaaagaaaagaaagtcaaggaaatgcgaagaccacacaccagtgcagtgtgatgggcctttctgctgcttcattagtgtgaggatttccagggccacagtgaggaagaatgtta

SEQ ID NO: 11782 - DNA, 120 bp, synthetic construct
  misc_feature 1..120: note = Artificially Synthesized Probe
  source 1..120: mol_type = other DNA
aatatcttgtgttttagagctttaaattttcaaatatctgctgtccacacaccccattggaggaggacctgtgtcactaacccaaatttgtagctgagaaaacagaggcagagagaggtt

SEQ ID NO: 11783 - DNA, 120 bp, synthetic construct
  misc_feature 1..120: note = Artificially Synthesized Probe
  source 1..120: mol_type = other DNA
ctgctgtgacttccctttaggacaatgttgtgtaaatctttgaaggacacaccgaagacctttatactgtgatcttttacccctttcactcttggctttcttatgttgctttcatgaatg

SEQ ID NO: 11784 - DNA, 120 bp, synthetic construct
  misc_feature 1..120: note = Artificially Synthesized Probe
  source 1..120: mol_type = other DNA
agtcaagccttgtgtcttcaagcattgaccaagttaagtgtttccttccctctctcaataagacacttccaggagctttccaatctctcacttaaaactaaggtttgaatctcaaagtgt

SEQ ID NO: 11785 - DNA, 120 bp, synthetic construct
  misc_feature 1..120: note = Artificially Synthesized Probe
  source 1..120: mol_type = other DNA
aaggtttgaattactggtatccaaggggctgggggcaaaagccagaagcctttgtcccttcagagccagagtggcatgagtgtcttggctcccctcctctccctcccttcagtagtcttc

SEQ ID NO: 11786 - DNA, 120 bp, synthetic construct
  misc_feature 1..120: note = Artificially Synthesized Probe
  source 1..120: mol_type = other DNA
aggcctttcggaggaaagccaagtcgtcagggtcaccaacctctagcatatgggctacaggcaaaagtagggttggggggttggcgtggactgctcgttgtactaggaattctggaggca

SEQ ID NO: 11787 - DNA, 120 bp, synthetic construct
  misc_feature 1..120: note = Artificially Synthesized Probe
  source 1..120: mol_type = other DNA
ggttggaggtccagaagacattgtagcttgaaggggagaagataaataggaaatattattcaagagaaggcagtgggcattataaagagaaatacaaagtgttcaggagtcaggttggga

SEQ ID NO: 11788 - DNA, 120 bp, synthetic construct
  misc_feature 1..120: note = Artificially Synthesized Probe
  source 1..120: mol_type = other DNA
gctattattatctacattgtacattttacaagcaaggaaatcaaggcttagagatggtaaatagaaatggttatacaggcagttgtttaaggcaggatttaagccaggcagccagagccc

SEQ ID NO: 11789 - DNA, 120 bp, synthetic construct
  misc_feature 1..120: note = Artificially Synthesized Probe
  source 1..120: mol_type = other DNA
gggtagaatggccacgtaagtcaaagagcaggggacctgtccctccgggtctccgggtcatccctcttcataactctcctgatccattccttcccacccttgctctcgcttcaagctggg

SEQ ID NO: 11790 - DNA, 120 bp, synthetic construct
  misc_feature 1..120: note = Artificially Synthesized Probe
  source 1..120: mol_type = other DNA
ctcttcaaggccttttcaggtgctcctttccaggaccagggtcacagaagtcaaagctcaggaaaagcccctcgagggtttttgtgcggcagaggtgggttgtggggtgggattgtgcct

SEQ ID NO: 11791 - DNA, 120 bp, synthetic construct
  misc_feature 1..120: note = Artificially Synthesized Probe
  source 1..120: mol_type = other DNA
tcacgtcagcgtccgttccaggccgactggcagtctccgttctacattaacgtcagcactcccgttaaaaataatgcatctctcccatgccaggaggacttaggtgctgctaaagaccag

SEQ ID NO: 11792 - DNA, 120 bp, synthetic construct
  misc_feature 1..120: note = Artificially Synthesized Probe
  source 1..120: mol_type = other DNA
cagatgaagaaaccaaagcaggtggtcagatccagtccttgcacttcctgagcctgaccttaccacacagctgtctcctattcggatgcttatttattttttttcccattacagttttgc

SEQ ID NO: 11793 - DNA, 120 bp, synthetic construct
  misc_feature 1..120: note = Artificially Synthesized Probe
  source 1..120: mol_type = other DNA
tttgtcctttaatgagcctacttttaggttataatcaccaagaagaaccagaagagaaataccagtgccaggagttgggtgctaaaggagcagaccctagaatgtgggctcgacctcatg

SEQ ID NO: 11794 - DNA, 120 bp, synthetic construct
  misc_feature 1..120: note = Artificially Synthesized Probe
  source 1..120: mol_type = other DNA
aggccccagtatctgccactggtggaaatggtatcagtgaaatcctgatcagaaatttgggatggaaaaggaaacaatgagaaaagggctgtgggaacctcctctccagagtggtagttg

SEQ ID NO: 11795 - DNA, 120 bp, synthetic construct
  misc_feature 1..120: note = Artificially Synthesized Probe
  source 1..120: mol_type = other DNA
gtgatgcctggcctcgtgctaaatgctgatggttttctcaagggcacttgggaaaggaggaatctggggaatggagggtcctgctgagaggacttgacctgcaaggtgaatccatgactg

SEQ ID NO: 11796 - DNA, 120 bp, synthetic construct
  misc_feature 1..120: note = Artificially Synthesized Probe
  source 1..120: mol_type = other DNA
ggaggactgaggtggggccagcatttgagcgaggaggtgccacttccaggccaggccagggtttcgggagctctggctacgctgacggggcagggctggttaggttaaaggggtagaaag

SEQ ID NO: 11797 - DNA, 120 bp, synthetic construct
  misc_feature 1..120: note = Artificially Synthesized Probe
  source 1..120: mol_type = other DNA
gaatcacagaatggacgggaacttaaaggctttgcttggcctggattttatcttgaaatacttttgacagctggctggttgagggtatctgctcacaggaacgccgcatttgctggcttt

SEQ ID NO: 11798 - DNA, 120 bp, synthetic construct
  misc_feature 1..120: note = Artificially Synthesized Probe
  source 1..120: mol_type = other DNA
tctggagcttcctttgctggctttatagctgctgccagtcacaagaccaggggaagccaggtggaaaggaactgatacccagcatttgtcatgtgtttttaacagtctggctttgtgggg

SEQ ID NO: 11799 - DNA, 120 bp, synthetic construct
  misc_feature 1..120: note = Artificially Synthesized Probe
  source 1..120: mol_type = other DNA
cgtcttaggtccgagggtatcatcgcagatcatccccccaaaagagattctaagcaatttccatactcatttttttttctgccagaatcattcagacacttgattgttagaaagttcatc

SEQ ID NO: 11800 - DNA, 120 bp, synthetic construct
  misc_feature 1..120: note = Artificially Synthesized Probe
  source 1..120: mol_type = other DNA
agagagtgttttagtaccgcaaatgttaaatcataagtattgagtggtagtgattacaaaaacacaagtgaaggcggtatggtttacatcctgtctctctcactcactagctttgcgacc

SEQ ID NO: 11801 - DNA, 120 bp, synthetic construct
  misc_feature 1..120: note = Artificially Synthesized Probe
  source 1..120: mol_type = other DNA
gggagagaagggggatgctgaagatctgtttacttggagaataaacaaacaaaaaattcaagggaccccccttccagatttttttttcctacgtgaaagcctgtaatttgtgttgttttg

SEQ ID NO: 11802 - DNA, 120 bp, synthetic construct
  misc_feature 1..120: note = Artificially Synthesized Probe
  source 1..120: mol_type = other DNA
cgctcaaacagtgggtcaggtagtatcatgaaaagcctagaacatctgcaaaaaatgataatgagagacgtcttggtggacagagaagccttagaatcatagaccattaaagcaagaaca

SEQ ID NO: 11803 - DNA, 120 bp, synthetic construct
  misc_feature 1..120: note = Artificially Synthesized Probe
  source 1..120: mol_type = other DNA
tgctcaaccttaggttttgacagttgtgcagcttttggtttaatctacaaatattgcacatgaataactgtagtagaaacttagacctcagggacccatagcttcccataaagcagatgg

SEQ ID NO: 11804 - DNA, 120 bp, synthetic construct
  misc_feature 1..120: note = Artificially Synthesized Probe
  source 1..120: mol_type = other DNA
gcctggccggtccctctttctgcactgctgcaacagttctctgctctttcatttcatcttattctgaaacatctcacactgtctgtacgactgattttgccaagttaacaataataataa

SEQ ID NO: 11805 - DNA, 120 bp, synthetic construct
  misc_feature 1..120: note = Artificially Synthesized Probe
  source 1..120: mol_type = other DNA
ccttgtggtcagacccatactgggttcatattatgtacttttccaaatggccagttgcaatgacctaaatcagtagtttccctgaatattttgggtctgaatgaaggatcaaagtgacaa

SEQ ID NO: 11806 - DNA, 120 bp, synthetic construct
  misc_feature 1..120: note = Artificially Synthesized Probe
  source 1..120: mol_type = other DNA
aatctggaggcatctgctacagctacttgctgcttttcctcttatctggcttctctgtcttccagaagttattgtcttttgtgttccaatgtcagcattttatttgctgatagtcaggaa

SEQ ID NO: 11807 - DNA, 120 bp, synthetic construct
  misc_feature 1..120: note = Artificially Synthesized Probe
  source 1..120: mol_type = other DNA
atgttggtgtggttaatattggtaaaaatgccacaagctgccttttggccaacgtcttgaatacgccttcagaggaagaagtatgacattttaagtcagacatgttgcagagatgatgat

SEQ ID NO: 11808 - DNA, 120 bp, synthetic construct
  misc_feature 1..120: note = Artificially Synthesized Probe
  source 1..120: mol_type = other DNA
acaggtcactgttccctttctaataaacaatgatataggggctggatgtatttttcctgggtacagtggttcccttttgcagggtttaagttgttgagaacttgtagttagaaacccagt

SEQ ID NO: 11809 - DNA, 120 bp, synthetic construct
  misc_feature 1..120: note = Artificially Synthesized Probe
  source 1..120: mol_type = other DNA
agggtgagctgctttactcaaagttggctgattgaaatgatcatctcatctttaaaagaattcctttgtaacaacatccagtctggtgcttgatcaaatatctgggtgccaagacccagc

SEQ ID NO: 11810 - DNA, 120 bp, synthetic construct
  misc_feature 1..120: note = Artificially Synthesized Probe
  source 1..120: mol_type = other DNA
gccctatattatcaaaattctcattttattgccaaggtagaaaattactcattttgtcccactagggcacgagcagttacaaaatgagatcaagtgtggaaggaagctcagctagacagg

SEQ ID NO: 11811 - DNA, 120 bp, synthetic construct
  misc_feature 1..120: note = Artificially Synthesized Probe
  source 1..120: mol_type = other DNA
tgctaacctccctggggtgttcagaacaggatatagaatacagcttgcaaaaatgctttggaaacactgaaggacgctactagtggtatgattctaactttgtttgatttcgctggaatt

SEQ ID NO: 11812 - DNA, 120 bp, synthetic construct
  misc_feature 1..120: note = Artificially Synthesized Probe
  source 1..120: mol_type = other DNA
tattgtattcgtattacccaaattttcttttcccagttgatattattcctttctgttttctgccttgtatgttccactcctggacaatccttgggcatgtaaggtgggactttgcatgag

SEQ ID NO: 11813 - DNA, 120 bp, synthetic construct
  misc_feature 1..120: note = Artificially Synthesized Probe
  source 1..120: mol_type = other DNA
caatctgtgctccagaggttatgaaggtaagatgcctggaattttcaccttcgtgttgaaattttctcgtcttcttagttggaacctgattcaagaaaatcatcatgttcttgtttggcg

SEQ ID NO: 11814 - DNA, 120 bp, synthetic construct
  misc_feature 1..120: note = Artificially Synthesized Probe
  source 1..120: mol_type = other DNA
aacctttcaggagaaactcaacagaaaattacaaggaaggagaagggtgaattaaacttgacggagtcaaattccacaggtgggacaattgtgctaattgaggagtttaacttgaggaag

SEQ ID NO: 11815 - DNA, 120 bp, synthetic construct
  misc_feature 1..120: note = Artificially Synthesized Probe
  source 1..120: mol_type = other DNA
gtaaataaagctatatgtcattggcatctgtaaatccagcgctgaacatttcttggctaatgatgaccagtacaactaaccccaaggtggtcttgactggtttcctttgtacgaagaaac

SEQ ID NO: 11816 - DNA, 120 bp, synthetic construct
  misc_feature 1..120: note = Artificially Synthesized Probe
  source 1..120: mol_type = other DNA
ggagagatgagcttccttaacctttttggcttaagccaaaccataatcaacaatgattctgtgtttgtttcaattaacatttctagttgaacccagagcttcccactcaatctgttggcc

SEQ ID NO: 11817 - DNA, 120 bp, synthetic construct
  misc_feature 1..120: note = Artificially Synthesized Probe
  source 1..120: mol_type = other DNA
tctatattggctgaagactagaacacagatgttggactttatactgtaggctttgtatgtgtattttgattttgccagtaagactagagtcacccctactgtctcagcattccctgagat

SEQ ID NO: 11818 - DNA, 120 bp, synthetic construct
  misc_feature 1..120: note = Artificially Synthesized Probe
  source 1..120: mol_type = other DNA
aggatgcaaaataagcagtatcgcattatcttagtgggaaagcaccagaacagatgaattcttggtgttcttccacgcttaaaaatctgtaggcaaatagtgaagcacattttaggtgga

SEQ ID NO: 11819 - DNA, 120 bp, synthetic construct
  misc_feature 1..120: note = Artificially Synthesized Probe
  source 1..120: mol_type = other DNA
ttgacaaaggagttagatgaatgtgtgatttcctgaatgaaatgtggaggacaagtggtaagttactaatcacaaagaaaactcacaatcttggaaatccttggatgtgtgttggagacg

SEQ ID NO: 11820 - DNA, 120 bp, synthetic construct
  misc_feature 1..120: note = Artificially Synthesized Probe
  source 1..120: mol_type = other DNA
cagttctctgtagcaagtttagcttccagcatcagttgtgttggtttactgtgggaatttgaactccttggggagatggtatgcaatcagcaaacctaaacattaattgagaaatatgtt

SEQ ID NO: 11821 - DNA, 120 bp, synthetic construct
  misc_feature 1..120: note = Artificially Synthesized Probe
  source 1..120: mol_type = other DNA
tgctattgctaagcgctccacctgtattaaatatattctagcaatgagaaaacgagacttcaaaagttaataatttatctgaagtcaagtctccagtgagcgataggacctcaggtgcag

SEQ ID NO: 11822 - DNA, 120 bp, synthetic construct
  misc_feature 1..120: note = Artificially Synthesized Probe
  source 1..120: mol_type = other DNA
ttttgtagtatccaaggtctattgtctttatatttgtctcacttcccaactcaattgatcccgaaagggaaatcgtgcctgcctttctttctttaggcatgtggaaaagactggatgtag

SEQ ID NO: 11823 - DNA, 120 bp, synthetic construct
  misc_feature 1..120: note = Artificially Synthesized Probe
  source 1..120: mol_type = other DNA
aaaagctgccaacaacagaacgctgagctcctgagcatcacagagattcatgagcaaacatacctgacaggtaaggacatgaaaagtctcaagtaaaatcatgactgctttatttttata

SEQ ID NO: 11824 - DNA, 120 bp, synthetic construct
  misc_feature 1..120: note = Artificially Synthesized Probe
  source 1..120: mol_type = other DNA
actaaaagggctaaagtttgcttgagaagagagtatccgttttagcttctaaaatatacacttggggaaacagagagattaggatcagaaattagtgtgggagcaaaagcatccccgatt

SEQ ID NO: 11825 - DNA, 120 bp, synthetic construct
  misc_feature 1..120: note = Artificially Synthesized Probe
  source 1..120: mol_type = other DNA
gaaattcagtctcctgtttggaaaactagacagtcatggcaagaagacagtaaatgcagtggttcttctgtgtgaagtggcttattcatcaccttggaattctgttaaagtgatgatgcc

SEQ ID NO: 11826 - DNA, 120 bp, synthetic construct
  misc_feature 1..120: note = Artificially Synthesized Probe
  source 1..120: mol_type = other DNA
aagaaaatatatcagaggtgcagaggtgaaatggtttcagttgatgtgtttttggtttttgtgtttgaatttatttgtggggtgtgttatctcttggaagcctggggacagagcacaggt

SEQ ID NO: 11827 - DNA, 120 bp, synthetic construct
  misc_feature 1..120: note = Artificially Synthesized Probe
  source 1..120: mol_type = other DNA
cctcatgaataaatattattagccccactgtatagatgagataacagactaggagggagaagttaggaaacttgcttaatgcctcctgtttagaaaacagctgaactggaattcagccct

SEQ ID NO: 11828 - DNA, 120 bp, synthetic construct
  misc_feature 1..120: note = Artificially Synthesized Probe
  source 1..120: mol_type = other DNA
tccgtatgtgcaggatgaggatttacagaactgaaataagatataggaagtgaaatttggcttgtttccccgatggtttttaccagtttcctttggtactgcctgaaaaacacattggac

SEQ ID NO: 11829 - DNA, 120 bp, synthetic construct
  misc_feature 1..120: note = Artificially Synthesized Probe
  source 1..120: mol_type = other DNA
aagccaaaggatagtttttattttaattaattgcttttgatcaattaaaataactcagaacagagaattctcattgatggtttcaaaaaagatagaggtggcagggtatggtggctcacg

SEQ ID NO: 11830 - DNA, 120 bp, synthetic construct
  misc_feature 1..120: note = Artificially Synthesized Probe
  source 1..120: mol_type = other DNA
agtcctttccgatatttgaactggttaccaggtagggttaagcctgtttgtgtcgaattaatccaaatttaagtcatctagacgccccgaagacgtttattatctcacctgttgatctca

SEQ ID NO: 11831 - DNA, 120 bp, synthetic construct
  misc_feature 1..120: note = Artificially Synthesized Probe
  source 1..120: mol_type = other DNA
tttttaggaaagagtgcaattaatgattagtgacgtctgccgtgggtgtgggaaaggagagaagtatcatattggtcacatcttatcaaatctcctatgggccataccattataatacgg

SEQ ID NO: 11832 - DNA, 120 bp, synthetic construct
  misc_feature 1..120: note = Artificially Synthesized Probe
  source 1..120: mol_type = other DNA
ttaggcagtcatttaatttattcacttgggggtgatgattatatttaaccgcttgcatcctacgagttcagggagaaaacttccgggttaactttgggtggagtaaagaatgaaagtgga

SEQ ID NO: 11833 - DNA, 120 bp, synthetic construct
  misc_feature 1..120: note = Artificially Synthesized Probe
  source 1..120: mol_type = other DNA
cacaaagaataccaccaaaactttaaaaaggttatttaggttattacctgctccagactttgtggagcaggtaatatgatttccgtcttgcaggaaaggaagtgacattcaggcacaggt

SEQ ID NO: 11834 - DNA, 120 bp, synthetic construct
  misc_feature 1..120: note = Artificially Synthesized Probe
  source 1..120: mol_type = other DNA
ccgtgccctgccctaataatgtttagtgtggcaggtttggaacatcatgtattctttctttttaataaattctacttgtagattcagagatacatgtacacggttgttacatacctaggt

SEQ ID NO: 11835 - DNA, 120 bp, synthetic construct
  misc_feature 1..120: note = Artificially Synthesized Probe
  source 1..120: mol_type = other DNA
gtaggtgtcatgattcacatgctatagttgaggaaaaagatattcagaggatacagaaaccttgcagacatggcaaaaccggaatccaagctagaaagtcaacatttggaagggatgttt

SEQ ID NO: 11836 - DNA, 120 bp, synthetic construct
  misc_feature 1..120: note = Artificially Synthesized Probe
  source 1..120: mol_type = other DNA
taaatagatatagatgcgggacctggatgttgggtttgattatcctttacaggctctccatagtgacggtgggtatctttagagaaagctcaccatttttgcattttacctctactattc

SEQ ID NO: 11837 - DNA, 120 bp, synthetic construct
  misc_feature 1..120: note = Artificially Synthesized Probe
  source 1..120: mol_type = other DNA
acaaatcatcttctgtggctgccccagggaactccccttcatttcactcaagttggttgttttcatgctttcaaatatgtttaaagttcatcatttcagtttttgaaggacagcattggc

SEQ ID NO: 11838 - DNA, 120 bp, synthetic construct
  misc_feature 1..120: note = Artificially Synthesized Probe
  source 1..120: mol_type = other DNA
tttaaaaattttcacctatatgggtactccttttcatgtgatgtgacttgccgaagatcacacaacttaccgcaaattcaggttttaggagttatgactccagatccctctcctagtcac

SEQ ID NO: 11839 - DNA, 120 bp, synthetic construct
  misc_feature 1..120: note = Artificially Synthesized Probe
  source 1..120: mol_type = other DNA
gaggaattggactttattatctcccagctaggatatggtgagaaacttgacagtgataatatacttggctttaatcctgggagcacccctttctacccaactctggaaaattctatcata

SEQ ID NO: 11840 - DNA, 120 bp, synthetic construct
  misc_feature 1..120: note = Artificially Synthesized Probe
  source 1..120: mol_type = other DNA
gggaggaaaaagcaactaacaaatagatgagaaacaaatagagtagtagcagaaaaagacttaaaagtccccgaaacactcctacttctagcacctgccaaatggtatccatcttcctgt

SEQ ID NO: 11841 - DNA, 120 bp, synthetic construct
  misc_feature 1..120: note = Artificially Synthesized Probe
  source 1..120: mol_type = other DNA
caatttaaatctttgaggggtacatgaggtcactttgaagcctgcatttgttgctgaaaagatcacgatctgcaaatcaagtgaaaggagaagaggatcatcctggcagtgtcattcatt

SEQ ID NO: 11842 - DNA, 120 bp, synthetic construct
  misc_feature 1..120: note = Artificially Synthesized Probe
  source 1..120: mol_type = other DNA
cagtcatattcacaatgtaaagggtacactacacagcctaaaactaacaaggtaaaatgtagttggcatctaagtcgacagcatgtaggtcagatgagcactcatgaggactatctttca

SEQ ID NO: 11843 - DNA, 120 bp, synthetic construct
  misc_feature 1..120: note = Artificially Synthesized Probe
  source 1..120: mol_type = other DNA
acaccaagtagatgcagatctacttacagctacggtggattaggtctggaagctgtacttggggagctacattcatttttttcagtttacatggagctgtcatatgaaatgattgctttt

SEQ ID NO: 11844 - DNA, 120 bp, synthetic construct
  misc_feature 1..120: note = Artificially Synthesized Probe
  source 1..120: mol_type = other DNA
gcccagaaaacatttttttcaagatgtttagcagcgaagggaaggaaaggagaggtccttttaacatgaaatctcaaaggaaaagagaggggatagaatctgaaataaagtggaaggttg

SEQ ID NO: 11845 - DNA, 120 bp, synthetic construct
  misc_feature 1..120: note = Artificially Synthesized Probe
  source 1..120: mol_type = other DNA
cttgcgagcaccgtcatccaaggacttacagacatttttaatttctccctggattcctctaaacaatggcttggacatctcagatataaaatcatattgcggctccaatcactttttaca

SEQ ID NO: 11846 - DNA, 120 bp, synthetic construct
  misc_feature 1..120: note = Artificially Synthesized Probe
  source 1..120: mol_type = other DNA
gtcatccaccttctatagtagaaggtgacagtctactatagtctgtcatcctatgggttgttaagaacatttgcagtagatacccccaagttgctgatagcaaatgatccttagtcattt

SEQ ID NO: 11847 - DNA, 120 bp, synthetic construct
  misc_feature 1..120: note = Artificially Synthesized Probe
  source 1..120: mol_type = other DNA
atttttttctgcctgggctttggcatacagtggtgttgaggggtctttctaagaattcagaaatcacaggcttgttgttgttgcacagacctgggatttaattttcaattcaatgctatc

SEQ ID NO: 11848 - DNA, 120 bp, synthetic construct
  misc_feature 1..120: note = Artificially Synthesized Probe
  source 1..120: mol_type = other DNA
ccagagtgattctttgaggtttcacagccatctttcagttcttgaaagtgacccatcattagttttattcgctgcttctgaaacttctgaaacttattataggcggttgttcaaccttct

SEQ ID NO: 11849 - DNA, 120 bp, synthetic construct
  misc_feature 1..120: note = Artificially Synthesized Probe
  source 1..120: mol_type = other DNA
tcttgacctggttggtgggcgtatttctgatgtgtggttttgcattctacttcttggagtgctttagagattctccttttacagattaagtatgactttaattttttggctgtgggttcc

SEQ ID NO: 11850 - DNA, 120 bp, synthetic construct
  misc_feature 1..120: note = Artificially Synthesized Probe
  source 1..120: mol_type = other DNA
ttctagtattgtcttccataggcaactaggtttgctcttccccaaattctttcctgtggttacctattctaaaactggtatcttagccgttctgttcagtttcctcagtaaacgtttcac

SEQ ID NO: 11851 - DNA, 120 bp, synthetic construct
  misc_feature 1..120: note = Artificially Synthesized Probe
  source 1..120: mol_type = other DNA
ctaaaagttgccggctcaaaatcacgttatatctttaccactctctccaccaaaaaagaaggcaaagaagtttactgaataattcattcattctttccagtcttccattctttgctttgc

SEQ ID NO: 11852 - DNA, 120 bp, synthetic construct
  misc_feature 1..120: note = Artificially Synthesized Probe
  source 1..120: mol_type = other DNA
tgctgttaggtttctctatattctcttcctgctctctctgaagtcatctacaactctctccgtttctggaaacttcggacaccatttttctttttctcaaaagacagactttttcctatg

SEQ ID NO: 11853 - DNA, 120 bp, synthetic construct
  misc_feature 1..120: note = Artificially Synthesized Probe
  source 1..120: mol_type = other DNA
cagcgcttaggttgagggttgctttcaccctacgaatctgttagataaagtctgttattcctccgggtatctctgcaaatagactaggtaaattagtcatgcttttagtaacaatttata

SEQ ID NO: 11854 - DNA, 120 bp, synthetic construct
  misc_feature 1..120: note = Artificially Synthesized Probe
  source 1..120: mol_type = other DNA
aaaaaaaaaaaagcagtggaaactgagactcaggaagtttatgtgactagaaagcttccaagcatggatttagactaatctgtgtcatccccaaatctgtgctacttacactcgcaccac

SEQ ID NO: 11855 - DNA, 120 bp, synthetic construct
  misc_feature 1..120: note = Artificially Synthesized Probe
  source 1..120: mol_type = other DNA
catctattccacagttagcaggttttaactcagtgctacaaagagaaggagacaatcttaggaatcagggaaaacccttgaggtgtcagggaatcagagatttcagagaaaatattctaa

SEQ ID NO: 11856 - DNA, 120 bp, synthetic construct
  misc_feature 1..120: note = Artificially Synthesized Probe
  source 1..120: mol_type = other DNA
attggggcgccagcagtagaacaagcttgtgtttcaaggtgagtatcagttataaagctggtaagagaatctggagtatgcttcagcctaaagaatcatctaaggacatagaaaacaaac

SEQ ID NO: 11857 - DNA, 120 bp, synthetic construct
  misc_feature 1..120: note = Artificially Synthesized Probe
  source 1..120: mol_type = other DNA
ttctacagtaatgccacataagtattctaaagagagtcctccctttttctgatgtaaccccgatgattataatgatgggtgaggaaaggaaatgataggttggggcacatggcttttcag

SEQ ID NO: 11858 - DNA, 120 bp, synthetic construct
  misc_feature 1..120: note = Artificially Synthesized Probe
  source 1..120: mol_type = other DNA
tgatactgttttctaatagtcctgctctctgtacttcttttattcaatctctttgaatggcatatggccatgacatgccctgtaagacagtttggcaagactggtgaggaatttgcatca

SEQ ID NO: 11859 - DNA, 120 bp, synthetic construct
  misc_feature 1..120: note = Artificially Synthesized Probe
  source 1..120: mol_type = other DNA
cctgccagatggttgtctgtgtttgcatgtgcttcagtagttgttaagatgtacaaccataatgaaaaatacaaggcggtattgaaggacattaccaacaaaatattgaaacattgccag

SEQ ID NO: 11860 - DNA, 120 bp, synthetic construct
  misc_feature 1..120: note = Artificially Synthesized Probe
  source 1..120: mol_type = other DNA
catatgctttctttatgttttggatttcatagagctagtggaagctaccacaaactgttttggttgggattgacatatggaagcccttcagaaggttttacttggagtgatggttctcct

SEQ ID NO: 11861 - DNA, 120 bp, synthetic construct
  misc_feature 1..120: note = Artificially Synthesized Probe
  source 1..120: mol_type = other DNA
aacgcactgaaatattatcctttccattgggttgtaaatttaggaactcccaacactgagaagtggaactttgttgccaagtttttcctgtatataaatccccatttgtggcccttggat

SEQ ID NO: 11862 - DNA, 120 bp, synthetic construct
  misc_feature 1..120: note = Artificially Synthesized Probe
  source 1..120: mol_type = other DNA
cattatctgggactcagaaagttctgcatattcaagtcaggccagaggatccgagttctaatgttaagagaaaccaacacaccaacaagcaaataaacaaacctacccttgaaccaaaat

SEQ ID NO: 11863 - DNA, 120 bp, synthetic construct
  misc_feature 1..120: note = Artificially Synthesized Probe
  source 1..120: mol_type = other DNA
ttctatttttctcttgttttacaggacaaacaccaaaacctgagccaacaccagctcctcaagacagtaggtgttttcttattttctgatctctgtactgataaccctttctccgcctct

SEQ ID NO: 11864 - DNA, 120 bp, synthetic construct
  misc_feature 1..120: note = Artificially Synthesized Probe
  source 1..120: mol_type = other DNA
accctgaagcacccaagtgcatctattcgaagttttgcttttttttttttcttatactggggtgaaagctgctttctcatagttcccactcctttgatgtagaagattatgggtgcatta

SEQ ID NO: 11865 - DNA, 120 bp, synthetic construct
  misc_feature 1..120: note = Artificially Synthesized Probe
  source 1..120: mol_type = other DNA
actcattggctgatgggcatttaggctggttccatatgtttgcaattgcaaattgtgccaatattataacgtgtgtgcaagtgtctttttcatataatgacttattttcctctgggtaga

SEQ ID NO: 11866 - DNA, 120 bp, synthetic construct
  misc_feature 1..120: note = Artificially Synthesized Probe
  source 1..120: mol_type = other DNA
tatacctatcactgaaggtataatttattttttccaagagtgctttgctcagtatctttctgattaaaattcttcatggcctcattgccagagaggaggtaacagagagagcaggaaaaa

SEQ ID NO: 11867 - DNA, 120 bp, synthetic construct
  misc_feature 1..120: note = Artificially Synthesized Probe
  source 1..120: mol_type = other DNA
tctccataatgttaaatgcctacagtagttacattgttgaagacattctttaaaaccaagtaggcagtcaggattgtaggactatgcatcaaataaaagactcctgctttacaagttcaa

SEQ ID NO: 11868 - DNA, 120 bp, synthetic construct
  misc_feature 1..120: note = Artificially Synthesized Probe
  source 1..120: mol_type = other DNA
tttgaagggcagatacgtcctcctggctcatgtgcagatttttttagccttacatgttccaggggactgctattgtcatctttgagcaatagagacctaaattcaaggtcattattttta

SEQ ID NO: 11869 - DNA, 120 bp, synthetic construct
  misc_feature 1..120: note = Artificially Synthesized Probe
  source 1..120: mol_type = other DNA
ccaattagtctaatgattggatcgtttcaaaatgcctgaattttcttttccagttggatggatggaagcaaagtggattacgtgtcttgggccacaggtgaacccaattttgcaaatgaa

SEQ ID NO: 11870 - DNA, 120 bp, synthetic construct
  misc_feature 1..120: note = Artificially Synthesized Probe
  source 1..120: mol_type = other DNA
ggtgcaaggaaggttggaatttctacagcaacaaggtactaggaaaattagttgcaatcttggcactgatcagtatggagagtgatgcaaatctttcagctcaaagttaacttttgctag

SEQ ID NO: 11871 - DNA, 120 bp, synthetic construct
  misc_feature 1..120: note = Artificially Synthesized Probe
  source 1..120: mol_type = other DNA
ggagcttgcctgttaagcattagagctgggagtcaaacctaggtttgtccagctttctaccaaatcagtttgctcccaaagagtcaaagaagagtacttctaagaataagatgtaaaatt

SEQ ID NO: 11872 - DNA, 120 bp, synthetic construct
  misc_feature 1..120: note = Artificially Synthesized Probe
  source 1..120: mol_type = other DNA
ctcaaaagtttatttggctttgtgaatgccaccatgtgctctctgagaacacattgtacaataaatcccaaccaagcttttaccgagaacatttgacaagttgagcaatttgtcaggcac

SEQ ID NO: 11873 - DNA, 120 bp, synthetic construct
  misc_feature 1..120: note = Artificially Synthesized Probe
  source 1..120: mol_type = other DNA
tatttcctatttatgttcagcagatgtgtttaagtgtaaatgtttgcaaagtgttgttcagtagagtaggtacttgttggtctaggagttaatgactcaggtggtggtgttggccccaga

SEQ ID NO: 11874 - DNA, 120 bp, synthetic construct
  misc_feature 1..120: note = Artificially Synthesized Probe
  source 1..120: mol_type = other DNA
taaatcagattatcttatttacagaatcgggacagctgctaatccatacggtgactttttatgaattagaaaaagttttggttgtaggcagccacgacccagataggggcgcacagaatg

SEQ ID NO: 11875 - DNA, 120 bp, synthetic construct
  misc_feature 1..120: note = Artificially Synthesized Probe
  source 1..120: mol_type = other DNA
gaaacccagttccattctgagcctaacttgcagtcaaaagaaacacttcaacctagagttatcaactttctttgtatcaccttccccttattccttgtagctgttttagtatttggggtg

SEQ ID NO: 11876 - DNA, 120 bp, synthetic construct
  misc_feature 1..120: note = Artificially Synthesized Probe
  source 1..120: mol_type = other DNA
gagccaccacgcccattcaggtttttgtttcaataaatttaaaacataataattaggggaacttagcaaaaggttgagaaaggccatgttagatggtcaaggtgggcagccttcaagcaa

SEQ ID NO: 11877 - DNA, 120 bp, synthetic construct
  misc_feature 1..120: note = Artificially Synthesized Probe
  source 1..120: mol_type = other DNA
ctgtggagaaattctttcattctcatgacaccaatgagggctgaaagacttactgaagaagcgaaagtagaatggagcgagatagcattagcttagatttaatggatgagaggtgaattt

SEQ ID NO: 11878 - DNA, 120 bp, synthetic construct
  misc_feature 1..120: note = Artificially Synthesized Probe
  source 1..120: mol_type = other DNA
gtgattcactgtagctcaagggatgggttaaagatgtgctgacttcacagtgacatgtctcttaagtactttcattcagaaaaactgcagtcacctttttttggttgtctttgtgtgtca

SEQ ID NO: 11879 - DNA, 120 bp, synthetic construct
  misc_feature 1..120: note = Artificially Synthesized Probe
  source 1..120: mol_type = other DNA
tcaccaaatacgttatcaccaaatacattgctgtccactttttacattagagtccttagtatattattcatagttgtttaacaacaactatagttgtttgaagagaccggtatctgttag

SEQ ID NO: 11880 - DNA, 120 bp, synthetic construct
  misc_feature 1..120: note = Artificially Synthesized Probe
  source 1..120: mol_type = other DNA
cttgctcttcgcttcaaactgtgtgtgtgtttttaaaaaatcttttagtgtgtcttatatttttatgttgaaagctgggtatatattacagtgcaggggtctgcaacccgtgggccacag

SEQ ID NO: 11881 - DNA, 120 bp, synthetic construct
  misc_feature 1..120: note = Artificially Synthesized Probe
  source 1..120: mol_type = other DNA
gctgacgtagtggataaagggaacagaggtaaatagacatttagtgtgaggtttcatgtttacttagctacgaattaggctgtgtttgctgtttgctgtcactttaggtgtcagaggtta

SEQ ID NO: 11882 - DNA, 120 bp, synthetic construct
  misc_feature 1..120: note = Artificially Synthesized Probe
  source 1..120: mol_type = other DNA
ccagcaatgtgtcaatgacatttagtatctcctacctcaatacttgttccctttttctgctcctgggcttctgctctggtcaattcttattccctatatccatcagtccgtttctccaat

SEQ ID NO: 11883 - DNA, 120 bp, synthetic construct
  misc_feature 1..120: note = Artificially Synthesized Probe
  source 1..120: mol_type = other DNA
gtgtagatagtacattgaaatggggcaggcagcatgtgtttctcttacctctactccaacaggaccaggtatgaggattagaatggaaataatggcatttcagaaaaaaaaatctgagat

SEQ ID NO: 11884 - DNA, 120 bp, synthetic construct
  misc_feature 1..120: note = Artificially Synthesized Probe
  source 1..120: mol_type = other DNA
tgaactcctgacctcaggtgatctacctgcctcggcctcccaaagtgctgggattacaggagtaagccactgtgcctgacctcacttttattttattttattttactttaagttccagga

SEQ ID NO: 11885 - DNA, 120 bp, synthetic construct
  misc_feature 1..120: note = Artificially Synthesized Probe
  source 1..120: mol_type = other DNA
gaaaacaacacagtatgcagatatttgctgtcaattaagatggtgtttatatacattttagtttctagagaaactagaataaaaatgcctagttgacagggcaggtgagccccgaaattg

SEQ ID NO: 11886 - DNA, 120 bp, synthetic construct
  misc_feature 1..120: note = Artificially Synthesized Probe
  source 1..120: mol_type = other DNA
aaaccatgccatctttgcctctgttctttgggacaagaggggacactccttccaggagtgaatggtgattcacacgcttatttaaaaacttctctttcttttccttatacacatacatga

SEQ ID NO: 11887 - DNA, 120 bp, synthetic construct
  misc_feature 1..120: note = Artificially Synthesized Probe
  source 1..120: mol_type = other DNA
gtatggctgcattccagaatctacacccgttacctgaatgtgcattactcacaagtgaagtcaaacagatacaaactcatggatcaagtagaacaaatgagggaggaagagaaagacttt

SEQ ID NO: 11888 - DNA, 120 bp, synthetic construct
  misc_feature 1..120: note = Artificially Synthesized Probe
  source 1..120: mol_type = other DNA
ttccaaggtcatgattgtaactatggcatgagaattaagaaagcaggttagggacatagttgccagtgatggggacaatttttttttgttgtggcaagacgttctagacttgttgtaggt

SEQ ID NO: 11889 - DNA, 120 bp, synthetic construct
  misc_feature 1..120: note = Artificially Synthesized Probe
  source 1..120: mol_type = other DNA
atttgagataacatacttctaatttttgtcactggatttttggcaattggcttcgtaaattaaataatgcagtcaaaagggtgataattgcttgaatctttgaaaaattcagctacctct

SEQ ID NO: 11890 - DNA, 120 bp, synthetic construct
  misc_feature 1..120: note = Artificially Synthesized Probe
  source 1..120: mol_type = other DNA
ttcttttagtattttctaaatgaagcaaggctgcatgttaatgcttgtttttgtcgttgcagactgataatcaatacacttggactgataagtggagggtgaggtacactaactgggctg

SEQ ID NO: 11891 - DNA, 120 bp, synthetic construct
  misc_feature 1..120: note = Artificially Synthesized Probe
  source 1..120: mol_type = other DNA
ttgtagctgctaatgtatgatgctacacactacagaaacttcaggttttgctttatttaaaatgtgtttttattaacagaaatccctgctactgaacccccacaactgcctggcagatgc

SEQ ID NO: 11892 - DNA, 120 bp, synthetic construct
  misc_feature 1..120: note = Artificially Synthesized Probe
  source 1..120: mol_type = other DNA
tttatgccctaactcaagagttctccatccaacagtggtacgcacagtttataacctcattttctccacgttctttcaaaagtcaacctgacttttgactttaaattctgagtgagatga

SEQ ID NO: 11893 - DNA, 120 bp, synthetic construct
  misc_feature 1..120: note = Artificially Synthesized Probe
  source 1..120: mol_type = other DNA
tggtcaggctgttttcgaactcctgacctcaggttatccacctgcctcggcttcccaaagtactgggattactggtgtgagccactgcacctggcctccattttaattttcttgttgttt

SEQ ID NO: 11894 - DNA, 120 bp, synthetic construct
  misc_feature 1..120: note = Artificially Synthesized Probe
  source 1..120: mol_type = other DNA
atttctttaagtgcctagaactaatgaagtctcccaggttttgcagaggatctgtctgtgtgttgggatgtgcctttaatatttgtccaagcagttacaaactgccttagctttcacttc

SEQ ID NO: 11895 - DNA, 120 bp, synthetic construct
  misc_feature 1..120: note = Artificially Synthesized Probe
  source 1..120: mol_type = other DNA
atttaataatggattatgtagtcatgcagtgaaaacaaggcgataattcagaactcagtaatatgggatacaggcatatggttaggtacggaccctcaaggttcagaaagcctgggtcat

SEQ ID NO: 11896 - DNA, 120 bp, synthetic construct
  misc_feature 1..120: note = Artificially Synthesized Probe
  source 1..120: mol_type = other DNA
ctcttgttactggccactgaaccataacttttggaagacatactctacatcctactaatctttgactatcctgcaggaactagttcagtgcttgtactcaaatgatgctaatgatgctta

SEQ ID NO: 11897 - DNA, 120 bp, synthetic construct
  misc_feature 1..120: note = Artificially Synthesized Probe
  source 1..120: mol_type = other DNA
gtcaactggaacacaggagatccctctggtgaacggaatgattgtgtagctttacatgcgtcttctgggttttggagtaatattcactgttcatcctacaaaggatatatttgtaaaaga

SEQ ID NO: 11898 - DNA, 120 bp, synthetic construct
  misc_feature 1..120: note = Artificially Synthesized Probe
  source 1..120: mol_type = other DNA
cttaggcttcagcaggctaatttcaaaacccctagccttgaatgttttacttatgggtagattgggtaggttttaagggtgagtatcagtggctcaaatgtaacttggagaatcacattt

SEQ ID NO: 11899 - DNA, 120 bp, synthetic construct
  misc_feature 1..120: note = Artificially Synthesized Probe
  source 1..120: mol_type = other DNA
tcataatcccttccaactcccctgctctctcagtagaatttgcttaagctaaactatcctttgtcatcagcctactttgaataatactttagaaaaagaggccttggagtcaggttggtg

SEQ ID NO: 11900 - DNA, 120 bp, synthetic construct
  misc_feature 1..120: note = Artificially Synthesized Probe
  source 1..120: mol_type = other DNA
ccacagcaccacatctaagcattagtgatgggtagctgatgtcagcttcatgtggattttaagcactctagaaacaatgaagcttcttggcatattttaaggagctcccaaaatgtgtta

SEQ ID NO: 11901 - DNA, 120 bp, synthetic construct
  misc_feature 1..120: note = Artificially Synthesized Probe
  source 1..120: mol_type = other DNA
cacttgctgttaaacctctggcaggccacacagggatgaggatagatgacaggacctagtacctagcactacccaatcaggggcagctcttctcatccctatgattactgttccagtcct

SEQ ID NO: 11902 - DNA, 120 bp, synthetic construct
  misc_feature 1..120: note = Artificially Synthesized Probe
  source 1..120: mol_type = other DNA
tgcctgccccattatcttggggatgtcattcctgcctgaaataatactctaccctacacacaatatctcatataattctcagactctcggaaggtggtactgttgtctccactttacaga

SEQ ID NO: 11903 - DNA, 120 bp, synthetic construct
  misc_feature 1..120: note = Artificially Synthesized Probe
  source 1..120: mol_type = other DNA
tctcagtaaatccccgtacataaatctccagctgagtctgtttccaggagcccaatctggatatgggtaggcagtgaattaaagaagtgaatagtaagagcaaacccaaggcaggtagga

SEQ ID NO: 11904 - DNA, 120 bp, synthetic construct
  misc_feature 1..120: note = Artificially Synthesized Probe
  source 1..120: mol_type = other DNA
tgactgtgaatgactcgtccagccttaggggtagggagaggatcacacttaggactggcccttaccaggccctgaacccacctgttctaggcccttacagaattttttttttttttgaga

SEQ ID NO: 11905 - DNA, 120 bp, synthetic construct
  misc_feature 1..120: note = Artificially Synthesized Probe
  source 1..120: mol_type = other DNA
ctgccttcccatcttctgccccacttacgacttagtgacttgatggcacattggattcgattctgggcctggtctatgtattctccgtggtagacaactccaaagtggcctggtgtgagg

SEQ ID NO: 11906 - DNA, 120 bp, synthetic construct
  misc_feature 1..120: note = Artificially Synthesized Probe
  source 1..120: mol_type = other DNA
ctctagtcccagctgcttgggagcctgaggcaggaggatagcttgaacccgggaggcagaggttgcagtgagccaagatcgtgtcactgcactccagcctgagagacagggcgagactcc

SEQ ID NO: 11907 - DNA, 120 bp, synthetic construct
  misc_feature 1..120: note = Artificially Synthesized Probe
  source 1..120: mol_type = other DNA
aggagtttgagaccagcctggccaacatggtgaaaccccatctctactaaaaatacaaaaattagccaggtgtggtggcgggcgcctgtaatcccagctactagggagggtgaggcagga

SEQ ID NO: 11908 - DNA, 120 bp, synthetic construct
  misc_feature 1..120: note = Artificially Synthesized Probe
  source 1..120: mol_type = other DNA
ataaataaaaccaaaaacaaacagcagccacttgatggcagaggctacaatcttcctatgcctgattgatccacaccagaacccactgaagacagaacttttctcatccccattttacag

SEQ ID NO: 11909 - DNA, 120 bp, synthetic construct
  misc_feature 1..120: note = Artificially Synthesized Probe
  source 1..120: mol_type = other DNA
ccttagctggatggactctttccgcagcagtggcacacaggattcatcttcactatcggagaaggatgctccatggacacaagtggtggaatccagaccatcaatggcagggagtgctgt

SEQ ID NO: 11910 - DNA, 120 bp, synthetic construct
  misc_feature 1..120: note = Artificially Synthesized Probe
  source 1..120: mol_type = other DNA
gaatgacagcactaagtgccatgctgaagttagatgctggccacagatggtgatgtgggagttgctgtggaagagggtagggtggtaggctttgggtgttctccaaagctggctctctca

SEQ ID NO: 11911 - DNA, 120 bp, synthetic construct
  misc_feature 1..120: note = Artificially Synthesized Probe
  source 1..120: mol_type = other DNA
actctgtgatgggctctcttgcctctgggctgaagagggcagtagtcttttcttcctggacctgctctccacaccacactgaccatgtaacaagcactcttccctccatcctgacagaat

SEQ ID NO: 11912 - DNA, 120 bp, synthetic construct
  misc_feature 1..120: note = Artificially Synthesized Probe
  source 1..120: mol_type = other DNA
tgcattcaagcactttcctgcctccaagtctttgcatgtggcatcccctctgacaagaatgccctccttgtagatatgaaggacaccccccagacctgagaaaaattgtgatcaagactt

SEQ ID NO: 11913 - DNA, 120 bp, synthetic construct
  misc_feature 1..120: note = Artificially Synthesized Probe
  source 1..120: mol_type = other DNA
ggcccaggctggaaggtccactcctcattctccctgccccaccctgccatgcccatcctgatggtgagttacccccattccatcctcacaaccaccccgtacatcttttttttttttttt

SEQ ID NO: 11914 - DNA, 120 bp, synthetic construct
  misc_feature 1..120: note = Artificially Synthesized Probe
  source 1..120: mol_type = other DNA
agggtacaaaagggataaaccaaacccctacagcctgggtgccagaactaagttctggaagctagggggtactaacctctcccctgcttttagcaagggggtgtttttgggggctgcaat

SEQ ID NO: 11915 - DNA, 120 bp, synthetic construct
  misc_feature 1..120: note = Artificially Synthesized Probe
  source 1..120: mol_type = other DNA
tccaaatacagttaaaaaaaaaagtctgggatggaccaattccaaccagcccttcctaggcctttacttatccccagatgtttatagttgcttgcacaagactagagtgaggctcccaga

SEQ ID NO: 11916 - DNA, 120 bp, synthetic construct
  misc_feature 1..120: note = Artificially Synthesized Probe
  source 1..120: mol_type = other DNA
agtaggagggaatgcccatcattctacccagcattcaggagctatgctaacagagacacggttatgtaaccctatcctcacatagccagggaaactacctaaaaaaccagaggccatgat

SEQ ID NO: 11917 - DNA, 120 bp, synthetic construct
  misc_feature 1..120: note = Artificially Synthesized Probe
  source 1..120: mol_type = other DNA
tgcaggcgattgcgtatggctacaaacacagcactctcatttctgtcgccctcgtaggtcaccatggcctgtaccaggcctccggcggagaagctgggcaccacgtacttcacgtcaaag

SEQ ID NO: 11918 - DNA, 120 bp, synthetic construct
  misc_feature 1..120: note = Artificially Synthesized Probe
  source 1..120: mol_type = other DNA
cctacaagttggcagaagtggctgccactgctgggtttgtgtaagagaggctgctgccaccattacctgcagaaacctgggtggaaggaaaagagatccagggtgaggagcaaaaggtac

SEQ ID NO: 11919 - DNA, 120 bp, synthetic construct
  misc_feature 1..120: note = Artificially Synthesized Probe
  source 1..120: mol_type = other DNA
aaaaaagcaaaacaaaacaaaactgccacggtggcaccagttcagccagcgccagccagcatgaatgtggacggccaatgatcttttaggaattctggcagtggggccactccctcttga

SEQ ID NO: 11920 - DNA, 120 bp, synthetic construct
  misc_feature 1..120: note = Artificially Synthesized Probe
  source 1..120: mol_type = other DNA
tactcaccatttcagaaatgtctctctgcagctcttggtagtagtcggtgctgggatcttccagagaggaattaaactggaggtttgaaatgtgaaaagacaggaaaaagaaagagaccc

SEQ ID NO: 11921 - DNA, 120 bp, synthetic construct
  misc_feature 1..120: note = Artificially Synthesized Probe
  source 1..120: mol_type = other DNA
gcccggtgccggcctggtgtccggggccgaggtgacaccgtggactgggggggcggtggagcccggggccggcctggtgtccggggccgaggtgacaccgtgggctgggggggcggtgga

SEQ ID NO: 11922 - DNA, 120 bp, synthetic construct
  misc_feature 1..120: note = Artificially Synthesized Probe
  source 1..120: mol_type = other DNA
gggctgggggggcggtggagcccggggccggcctggtgtccggggccgaggtgacaccgtgggcttggggggcggtggagcccggggccggcctggtgtccggggccgaggtgacaccgt

SEQ ID NO: 11923 - DNA, 120 bp, synthetic construct
  misc_feature 1..120: note = Artificially Synthesized Probe
  source 1..120: mol_type = other DNA
aggtgacaccgtgggctgcgggcgcggtggagcccggggcgggcctggtgtccggggccgaggtgacaccgtgggctgggggggcggtggagcccggggcgggcctggtgtccggggccg

SEQ ID NO: 11924 - DNA, 120 bp, synthetic construct
  misc_feature 1..120: note = Artificially Synthesized Probe
  source 1..120: mol_type = other DNA
tgggggggcggtggagcccggaaccggcctggtgtccggggccgaggtgacaccgtgggctgggggggcggtggagcccggggccggcctggtgtccggggccgaggtgacaccgtgggc

SEQ ID NO: 11925 - DNA, 120 bp, synthetic construct
  misc_feature 1..120: note = Artificially Synthesized Probe
  source 1..120: mol_type = other DNA
gttgcgggtttaggggctgtggtagctgtaagaagttaaagtcatagggttgggtctttatgaaggaaaaataagagcaagaagaaaatataagctctggccaccagagaaataatacca

SEQ ID NO: 11926 - DNA, 120 bp, synthetic construct
  misc_feature 1..120: note = Artificially Synthesized Probe
  source 1..120: mol_type = other DNA
gccagaggccttatgcttcctctgtctcccttcattgtttcatttaatttctccctcagttcttttcctcttttcaccactttcttttcttctgtctccttgtttcactctcggtttaaa

SEQ ID NO: 11927 - DNA, 120 bp, synthetic construct
  misc_feature 1..120: note = Artificially Synthesized Probe
  source 1..120: mol_type = other DNA
ttactagtagtgggatggtagggtcttacggtaggtgtgtgtaattttcaaagaaatggccaagctattttccactttcactttatgagagttccagttctgtcacattttcaccaacac

SEQ ID NO: 11928 - DNA, 120 bp, synthetic construct
  misc_feature 1..120: note = Artificially Synthesized Probe
  source 1..120: mol_type = other DNA
cccagaaagccaggatccctgctatccctttactatgcctcaatagtctttgccatgggttggcaattttgatcctcatccaagactctgtgtgcctggtgctcttggacaaggcaaagc

SEQ ID NO: 11929 - DNA, 120 bp, synthetic construct
  misc_feature 1..120: note = Artificially Synthesized Probe
  source 1..120: mol_type = other DNA
gtggtggagagaatggatcatcgcagttggaaactgatgggacctctctaagttttaaaattttcacccaaaaggtttttcttctgcctaaaaacacatttaagctctccttcacttggt

SEQ ID NO: 11930 - DNA, 120 bp, synthetic construct
  misc_feature 1..120: note = Artificially Synthesized Probe
  source 1..120: mol_type = other DNA
atgtaatttagtataatctctatgaaaaacgtggagatttctcaaataactaaaaatgaaactaccatttgatccaggaatcccacgactgggtatctacacaaaggaaaataaataatt

SEQ ID NO: 11931 - DNA, 120 bp, synthetic construct
  misc_feature 1..120: note = Artificially Synthesized Probe
  source 1..120: mol_type = other DNA
aaattggtaaaacaagaaaaagaaaaacctgtgacaggcatgtgaaaggcttgttgattctgaaggatcaacagtgctctcttgcacaacaataattcggaatcaaggacagtgcacaca

SEQ ID NO: 11932 - DNA, 120 bp, synthetic construct
  misc_feature 1..120: note = Artificially Synthesized Probe
  source 1..120: mol_type = other DNA
tgagccaccttgaagccatctctggagttggaaaataggtccatcctaccacatttgttgaggatgaatcacatacaacttgaaactggaagccctcattgacctgctgaggcaggagga

SEQ ID NO: 11933 - DNA, 120 bp, synthetic construct
  misc_feature 1..120: note = Artificially Synthesized Probe
  source 1..120: mol_type = other DNA
cagacctggaaggggacagggataagcaaagatatctgcaattttatcatgattctaggctttctccttctaggctcttcctgcagaaactttctgcaatgatgtaaacattctatgtcg

SEQ ID NO: 11934 - DNA, 120 bp, synthetic construct
  misc_feature 1..120: note = Artificially Synthesized Probe
  source 1..120: mol_type = other DNA
ccacagggagaacatttctggaatgttggggtaacaacttctgaatacccataaaatcaatgagaacattggccaaaatagtccaaatcaatttttccagaagtctagaagtgaaccaaa

SEQ ID NO: 11935 - DNA, 120 bp, synthetic construct
  misc_feature 1..120: note = Artificially Synthesized Probe
  source 1..120: mol_type = other DNA
tcattaggtcctgagttagaacttacctgaatgttgaaacttgacagtcagaaaaataactcttgatgctgctgtttcggaagagttggttgagctgaaagacagggcgatgtttcttag

SEQ ID NO: 11936 - DNA, 120 bp, synthetic construct
  misc_feature 1..120: note = Artificially Synthesized Probe
  source 1..120: mol_type = other DNA
taacagctctatattggatggaggatcttcctccatccatctgtccagcttgtatccatccacccatctacctgttcaattctctttctaccaagcattgtaagaattctctacaacatg

SEQ ID NO: 11937 - DNA, 120 bp, synthetic construct
  misc_feature 1..120: note = Artificially Synthesized Probe
  source 1..120: mol_type = other DNA
aagacaaggttgtgtgttcctccttggggctcccacaggcccctgaaattcccttatcatagcaatgatcacactgtgttatcagtacgtgtttacttccattgtttatttattttttat

SEQ ID NO: 11938 - DNA, 120 bp, synthetic construct
  misc_feature 1..120: note = Artificially Synthesized Probe
  source 1..120: mol_type = other DNA
cagagaccacaggaattcagccagtactcagcatcagcagggtcatcggttgctgtctttaaagagcaaaagatctagaggcacccaccctcagtctagagaagggttctgatcaaaatg

SEQ ID NO: 11939 - DNA, 120 bp, synthetic construct
  misc_feature 1..120: note = Artificially Synthesized Probe
  source 1..120: mol_type = other DNA
ccatattcccagctgaaatacaaaaatctttgaagtttagaaatatacaaagtcagccctgtgtcctgtgaccctcctcttcccaagtataggtatcttcattccttcatccagtcatca

SEQ ID NO: 11940 - DNA, 120 bp, synthetic construct
  misc_feature 1..120: note = Artificially Synthesized Probe
  source 1..120: mol_type = other DNA
ggaatggtagtcaagagagtacttttggaaactgagagagaacccagaatacatagtgaagtgaagcatttaaagtgatcacttaacagagaaatcaggtagaagagggagagaagcaca

SEQ ID NO: 11941 - DNA, 120 bp, synthetic construct
  misc_feature 1..120: note = Artificially Synthesized Probe
  source 1..120: mol_type = other DNA
tcacagggtaagggggaatcagataatttaacaagtaattacagtaaagtgtgataaatgtcagccttgtgcccacctaagaactttgagaccatgtacaacaggatttctcacccttga

SEQ ID NO: 11942 - DNA, 120 bp, synthetic construct
  misc_feature 1..120: note = Artificially Synthesized Probe
  source 1..120: mol_type = other DNA
aaaagtgaaggagaaagagacaaacaatttatgacattaatttggtcaaagaatttcatgctatttactcaaaataatgggaaagaccctccccttggtggtttggggaagggtgtcccc

SEQ ID NO: 11943 - DNA, 120 bp, synthetic construct
  misc_feature 1..120: note = Artificially Synthesized Probe
  source 1..120: mol_type = other DNA
ctgagactagatcagactgcgctcattattaactagtgtggccatccaagtcagaagctatgtgtcttctcccctccaagtaacaccaattctctttactgaatattcatcacatatatc

SEQ ID NO: 11944 - DNA, 120 bp, synthetic construct
  misc_feature 1..120: note = Artificially Synthesized Probe
  source 1..120: mol_type = other DNA
tatttatttcataaaatctgggactccacgagggcaggtgtctgattgaaatgctattctaatcttcgaggaggaaaaatggccccaaatacctgttgtggcttctgacagaggaggcag

SEQ ID NO: 11945 - DNA, 120 bp, synthetic construct
  misc_feature 1..120: note = Artificially Synthesized Probe
  source 1..120: mol_type = other DNA
tcatgaatgaggagaaaagcttgaaccaagacccatggagattgaaatgggcactagattcaaagacacgtacttgtaggaggctcatctggaccaggttcattgtaaccttgaaacaaa

SEQ ID NO: 11946 - DNA, 120 bp, synthetic construct
  misc_feature 1..120: note = Artificially Synthesized Probe
  source 1..120: mol_type = other DNA
attacattaggacaggatgcacatgtaacctatctctgttcctggggcgaggcacattgtggcctggttaatagtagctgcttggtaaatctaaatgaaggaacaaaatgaagcacataa

SEQ ID NO: 11947 - DNA, 120 bp, synthetic construct
  misc_feature 1..120: note = Artificially Synthesized Probe
  source 1..120: mol_type = other DNA
ttgtaccccataactgtatacatacaacgatgatcatgaggaggatagtaataataataataaagaacatcaagacccagactagccaaaaactcgctgtgggcatgggcaagtcccttc

SEQ ID NO: 11948 - DNA, 120 bp, synthetic construct
  misc_feature 1..120: note = Artificially Synthesized Probe
  source 1..120: mol_type = other DNA
ggaagactcttctgtgagttaaacatgtggagtggatcatagcaccgaatgctgacaagtggagttcatatcctggttccaccactgtcaaggtaaattgcttagcctgtctaagcctca

SEQ ID NO: 11949 - DNA, 120 bp, synthetic construct
  misc_feature 1..120: note = Artificially Synthesized Probe
  source 1..120: mol_type = other DNA
ctcttattatattgaagccccagaacccagcaccccttgacaactccctgcaaaaatcaaagtcctaatgaatggagaaacacaatacagcatttacatacaagtggaaaaggaagggaa

SEQ ID NO: 11950 - DNA, 120 bp, synthetic construct
  misc_feature 1..120: note = Artificially Synthesized Probe
  source 1..120: mol_type = other DNA
tcatatcactttactccatttgaagccattttacttagatatttatgttcctgtttagcatctgttcttctccactgggtgagggcagggacagcatctgtcttatcactctagtaccca

SEQ ID NO: 11951 - DNA, 120 bp, synthetic construct
  misc_feature 1..120: note = Artificially Synthesized Probe
  source 1..120: mol_type = other DNA
tgttacatgtatttttgccacaatataaaaaaaatgtgatcttaaatagatgcagaaaaggaccctctgagaatagctcaacccatatatatctaaaagaaatgaggccatgtgtggtgg

SEQ ID NO: 11952 - DNA, 120 bp, synthetic construct
  misc_feature 1..120: note = Artificially Synthesized Probe
  source 1..120: mol_type = other DNA
aaccaaccaaccaaacaaacaacaaacaaccagatgctggcaagaataaaagaaaagggaactcttatacactgttggtgggaatccaaattagtacaatctatggaaaatggtatgagg

SEQ ID NO: 11953 - DNA, 120 bp, synthetic construct
  misc_feature 1..120: note = Artificially Synthesized Probe
  source 1..120: mol_type = other DNA
aaggaaagataaaaagatttaaaaaaatatgtagcccaccccaacccaagagggacctcccagtcagaactctaagttcttggtggtgcgctgtgggtgggggagtttctcaccttagtg

SEQ ID NO: 11954 - DNA, 120 bp, synthetic construct
  misc_feature 1..120: note = Artificially Synthesized Probe
  source 1..120: mol_type = other DNA
tgacaatggttcacaatgatgtttcctgcctcaaccgttgttatgaagcttaaacaagttaatcattgtaaatcatgtaagcactgctgggcacacaggtcaatatggtgtacatgttta

SEQ ID NO: 11955 - DNA, 120 bp, synthetic construct
  misc_feature 1..120: note = Artificially Synthesized Probe
  source 1..120: mol_type = other DNA
ctttcttacacctctcttttcttccttccatctacttatccatctttcctcctccttttttctttcatccatttttttctttcttcaatccactcatccatcctctctcccttcctcctt

SEQ ID NO: 11956 - DNA, 120 bp, synthetic construct
  misc_feature 1..120: note = Artificially Synthesized Probe
  source 1..120: mol_type = other DNA
caaaacatcaaaaaataacagatgtgtgactctgggggccaagatggtcgactataagcagcagcgctcagaggctcacattgaaaaaaactgtaataagtgtgtgatccttcctggcaa

SEQ ID NO: 11957 - DNA, 120 bp, synthetic construct
  misc_feature 1..120: note = Artificially Synthesized Probe
  source 1..120: mol_type = other DNA
cacaggagcgatcctactggcatcaggttggtgtccctcgaggtcagaggtcccagaagaagcaggcacctatgttcgctgctctccaagcctccttgagtgacacctccagacatggga

SEQ ID NO: 11958 - DNA, 120 bp, synthetic construct
  misc_feature 1..120: note = Artificially Synthesized Probe
  source 1..120: mol_type = other DNA
tccagtgtaaactctggcagacactaaagttgaaccaaggcagaagaggaaagtttccatacattataagaaagcatacttcattccttccttccctgggaaaatccatattttcctgta

SEQ ID NO: 11959 - DNA, 120 bp, synthetic construct
  misc_feature 1..120: note = Artificially Synthesized Probe
  source 1..120: mol_type = other DNA
tccccaggatttggcagagccccagggcttgtcacaatgctcaataaagtttgttggttggctcatcatcactagatttataaagaatttccatctttatttgactgaataatggaagag

SEQ ID NO: 11960 - DNA, 120 bp, synthetic construct
  misc_feature 1..120: note = Artificially Synthesized Probe
  source 1..120: mol_type = other DNA
atacaagaattttataaaattgcattctcatggtatggggacaggagagcccagacttgagaaatattaagagctggaattggggatgaaagcaagtggatgggggatgtttatcttgag

SEQ ID NO: 11961 - DNA, 120 bp, synthetic construct
  misc_feature 1..120: note = Artificially Synthesized Probe
  source 1..120: mol_type = other DNA
ataccgcaggttagtgatggtgaagttgagggtgaatagtatcaggagatggctggcagctgtagtggaggtgggaaataaacactatgttcaaaagtagagaacatttaagagtttgta

SEQ ID NO: 11962 - DNA, 120 bp, synthetic construct
  misc_feature 1..120: note = Artificially Synthesized Probe
  source 1..120: mol_type = other DNA
tgatttttaatcttatttgagtgaaaaggacagagatgttgacactcatcatgcatactctaatagaggtgccattgactggtacttacctgaagggccaaatatcgaggctggagtctt

SEQ ID NO: 11963 - DNA, 120 bp, synthetic construct
  misc_feature 1..120: note = Artificially Synthesized Probe
  source 1..120: mol_type = other DNA
acaagctggaattgggaattaaacaagtgaatgaggcacatttgtcttgagagaaatcttagttagagaatttaacacctaagggcaagggaggtggggagaaaagagggaattcagagg

SEQ ID NO: 11964 - DNA, 120 bp, synthetic construct
  misc_feature 1..120: note = Artificially Synthesized Probe
  source 1..120: mol_type = other DNA
ctaaatattatctgttacctttattattaccattgtcatcatcaatgtcaccaacactgtgaccctcactattattgtcatcaccaccagcatcagcaccacccacatcagcaccaaaat

SEQ ID NO: 11965 - DNA, 120 bp, synthetic construct
  misc_feature 1..120: note = Artificially Synthesized Probe
  source 1..120: mol_type = other DNA
ccgtagattcactaggattttttatctttatttaagtgaaaatggcagagatgttgacagtcatcaggcatgctctaacagagatgcgattgatttgtacttacccgagggaccaggttt

SEQ ID NO: 11966 - DNA, 120 bp, synthetic construct
  misc_feature 1..120: note = Artificially Synthesized Probe
  source 1..120: mol_type = other DNA
agcaactatgagcagaatcatggatgcaaggatttttataaaattgcaaagtggaaactgcattcttgtagcatggggtaaggagaactcatacttgagacaggtgaagagctaggtttg

SEQ ID NO: 11967 - DNA, 120 bp, synthetic construct
  misc_feature 1..120: note = Artificially Synthesized Probe
  source 1..120: mol_type = other DNA
acagctcttggtgcatattcagtattccatactactagacattatctactacctttgccaacaccacgatcatcatcaacatcagcaacactgtgaccatcgctatcattattgtcatca

SEQ ID NO: 11968 - DNA, 120 bp, synthetic construct
  misc_feature 1..120: note = Artificially Synthesized Probe
  source 1..120: mol_type = other DNA
gaataacttgtgctctctcttccttccctcatgaagaggatataggggcatagaaggagaggtaagctcctgccctttatgatgtaggatcaggagcactggaacatcagttaatactca

SEQ ID NO: 11969 - DNA, 120 bp, synthetic construct
  misc_feature 1..120: note = Artificially Synthesized Probe
  source 1..120: mol_type = other DNA
aggactgtgaacagagtcatagatgcaagaactttttataaaattgcaaagtaaagcctgcattctcatggcatggagacaagagtactcagacatgagacagatgaagagctggaattg

SEQ ID NO: 11970 - DNA, 120 bp, synthetic construct
  misc_feature 1..120: note = Artificially Synthesized Probe
  source 1..120: mol_type = other DNA
actgcaggttagtgatggtaaaattgagggtgaatggcagcaggacagggccagtggctgtagtaaaaggtgtggaaacaaacactattgtgtttgtttgtatttttaatctgttgcata

SEQ ID NO: 11971 - DNA, 120 bp, synthetic construct
  misc_feature 1..120: note = Artificially Synthesized Probe
  source 1..120: mol_type = other DNA
gtgaataatgacagagatgtttacactcatcaaccatgctctaacagagtataaacagagatgtttacactcatcaaccatgctccaaataccattgactggtatttacctgtggggcca

SEQ ID NO: 11972 - DNA, 120 bp, synthetic construct
  misc_feature 1..120: note = Artificially Synthesized Probe
  source 1..120: mol_type = other DNA
ggcaataaatgaattgcctaaggagaggtcttgagatggcagagtgtaggacaagaaggacagaggaagtaaaaagtctaatacagaggtgggaagcaatacttagattccctgagtgta

SEQ ID NO: 11973 - DNA, 120 bp, synthetic construct
  misc_feature 1..120: note = Artificially Synthesized Probe
  source 1..120: mol_type = other DNA
tgatggtgaagttgagtgtgaatggcaccaggagagggccggtggctatagtgaaggtgggaaataaacactatgttcaaaagtagagaaaatttaagagtttgcaatagacttatttct

SEQ ID NO: 11974 - DNA, 120 bp, synthetic construct
  misc_feature 1..120: note = Artificially Synthesized Probe
  source 1..120: mol_type = other DNA
gaagatttcctatcagcatcctcatatcagcaaagaatgccctgagggaacacaatctacggtgataaagaaactatgaagtccagaacttagtcatcccatgtaaaacaagtgacagaa

SEQ ID NO: 11975 - DNA, 120 bp, synthetic construct
  misc_feature 1..120: note = Artificially Synthesized Probe
  source 1..120: mol_type = other DNA
aggatatgagaaacctgggaaagaggtgagaagccacacttagattctctgagtgcgcagactactggcttgttagagactgtgagcagagtcatgaatacaacagttttgataaaagtg

SEQ ID NO: 11976 - DNA, 120 bp, synthetic construct
  misc_feature 1..120: note = Artificially Synthesized Probe
  source 1..120: mol_type = other DNA
cggcaccaggagaggaacagctgctgtagtgggagggggaaataaacactatgttcaaaggagagaaaataggagtttgcaatatagttatctttaaatataggcagtatttaattgact

SEQ ID NO: 11977 - DNA, 120 bp, synthetic construct
  misc_feature 1..120: note = Artificially Synthesized Probe
  source 1..120: mol_type = other DNA
ccagatttactataattttacatctttatttgagtgaaaatggcagagatgttcacactcatcaggcatgctgtaatagagatgtcattgactggtacttacttgtggggctggggaggg

SEQ ID NO: 11978 - DNA, 120 bp, synthetic construct
  misc_feature 1..120: note = Artificially Synthesized Probe
  source 1..120: mol_type = other DNA
aagtctgggaaagaggtgagaaatcacacttagattctctgaatgcaccgactactggcttgctttgaactgcaagcagggtaatgaatacaagaatttttatgaaagtgcaaagtggct

SEQ ID NO: 11979 - DNA, 120 bp, synthetic construct
  misc_feature 1..120: note = Artificially Synthesized Probe
  source 1..120: mol_type = other DNA
gcaccaggagagggccagcagctgtagtggaggtgggaaacaaacactatgtccaaagtagagaaaataggagtttgcaatagacttatctttaaacatatgcagaatttaaattgagtg

SEQ ID NO: 11980 - DNA, 120 bp, synthetic construct
  misc_feature 1..120: note = Artificially Synthesized Probe
  source 1..120: mol_type = other DNA
tagatttactatgattttccatcttcatttgagtgaaaacggcacagatgttcatattcatcaggcatgatctaatagacatgtcattgactggtacttacatgtagggctggggaggga

SEQ ID NO: 11981 - DNA, 120 bp, synthetic construct
  misc_feature 1..120: note = Artificially Synthesized Probe
  source 1..120: mol_type = other DNA
caatgaaaagattgcctaggacttgtcttgagattgctgagggaaacatatcaaggaaccagaggaaatgagaaatctgggaaagaggtgagaatctgcacttagattatctgagtacat

SEQ ID NO: 11982 - DNA, 120 bp, synthetic construct
  misc_feature 1..120: note = Artificially Synthesized Probe
  source 1..120: mol_type = other DNA
gtgaagttgagggtgaacggcaccaggagagggccagcagctgtagtgggaattgaaaataaacactatgttcaaagtagagaaaataggggtttggaatagacttatctttaaacatat

SEQ ID NO: 11983 - DNA, 120 bp, synthetic construct
  misc_feature 1..120: note = Artificially Synthesized Probe
  source 1..120: mol_type = other DNA
atttattatgattttccattttcatttgactgaaaatggcacagatgtttgcattcatcaggcatgatctaatacagataccattggctggtacttacttgtggggctggggagggagga

SEQ ID NO: 11984 - DNA, 120 bp, synthetic construct
  misc_feature 1..120: note = Artificially Synthesized Probe
  source 1..120: mol_type = other DNA
gattatctgagtacatagaccactatcttggttgggactgcaagcagagtcatggatataataatttttataaaagtgcaaggtgaaacctgcattctcatggcatgggaacaggagaac

SEQ ID NO: 11985 - DNA, 120 bp, synthetic construct
  misc_feature 1..120: note = Artificially Synthesized Probe
  source 1..120: mol_type = other DNA
ttgttgctatcactttcaccatcataaacagcaacatcatcatcatcatcacactccacacaccatcattaccatcataaccttcacagccatcactgacaacatccttatgtccatcat

SEQ ID NO: 11986 - DNA, 120 bp, synthetic construct
  misc_feature 1..120: note = Artificially Synthesized Probe
  source 1..120: mol_type = other DNA
gttaaggagatatgagggacacaataagggtcatggcaatcccaatgcaattaaatgagtttcatgggacaatgagtttcatgggactggggccattaaagaattcctatcagtatcctc

SEQ ID NO: 11987 - DNA, 120 bp, synthetic construct
  misc_feature 1..120: note = Artificially Synthesized Probe
  source 1..120: mol_type = other DNA
ggacaggagagcccagacttgagaccagtgaagagctagaaacagggatgaaagcacttggatgaggcatgattgtcttgagagaaattctggggacagaatttaacacctaaatgaaag

SEQ ID NO: 11988 - DNA, 120 bp, synthetic construct
  misc_feature 1..120: note = Artificially Synthesized Probe
  source 1..120: mol_type = other DNA
attattatcatcatcaccaccatgataatccccatcatgaccaccacaaacatcatcactctcaacacatcatcattaccatcataaccccaccaccatcacttgaatcatccttatcac

SEQ ID NO: 11989 - DNA, 120 bp, synthetic construct
  misc_feature 1..120: note = Artificially Synthesized Probe
  source 1..120: mol_type = other DNA
atctgagcaatggggaaaggattccctatttaataaatggtgctgggaaaactggctagccatatgtagaaagctgaaactggatcccttccttacaccttatacaaaaattaattcaag

SEQ ID NO: 11990 - DNA, 120 bp, synthetic construct
  misc_feature 1..120: note = Artificially Synthesized Probe
  source 1..120: mol_type = other DNA
cagtatcactagatttactatgattttccatctttatttgagtgaaaatgacagagatgtttacactaatcaggtatgctctcatagagatgtcattgactgatacttacttgtggggct

SEQ ID NO: 11991 - DNA, 120 bp, synthetic construct
  misc_feature 1..120: note = Artificially Synthesized Probe
  source 1..120: mol_type = other DNA
tttcatggtacagggacaattgaagattttctatcagcatcctcacatcaggaaagaatgccctgagggaacacagtccatgatggtaaggaaaccatgaagtccagaccttagtcatcc

SEQ ID NO: 11992 - DNA, 120 bp, synthetic construct
  misc_feature 1..120: note = Artificially Synthesized Probe
  source 1..120: mol_type = other DNA
gattctctctgttgaggtggagtgtaggggtgttactgtcaggaaacacactgatcctgaagcctgtgactcctgaattccacctttggtgaggatatccctaggaagtgcagcaaggaa

SEQ ID NO: 11993 - DNA, 120 bp, synthetic construct
  misc_feature 1..120: note = Artificially Synthesized Probe
  source 1..120: mol_type = other DNA
tcattaccatcataaccccaccaccatcaccgacatcatcctcatcaccatcattgtcactgtcgttgatatcaccattaccatcatcaatgtcactagcataataatcatcatcatcat

SEQ ID NO: 11994 - DNA, 120 bp, synthetic construct
  misc_feature 1..120: note = Artificially Synthesized Probe
  source 1..120: mol_type = other DNA
aatggaagcagtttcatgcagcagggaccattaaagatttcctatcagtgccctcacatcagggaagaatgccctgatggaattcattccatgatgatgaagaaaccatgaagtcctggc

SEQ ID NO: 11995 - DNA, 120 bp, synthetic construct
  misc_feature 1..120: note = Artificially Synthesized Probe
  source 1..120: mol_type = other DNA
aagaatgtggttctcatcagagagatgcccaccataaacaaattactaggattattagtggaagcagaaagcattaccatggcagaaatgccaagaggtgacacttttatagggtttgct

SEQ ID NO: 11996 - DNA, 120 bp, synthetic construct
  misc_feature 1..120: note = Artificially Synthesized Probe
  source 1..120: mol_type = other DNA
caactaccatttattaaatacttcctatgcagcaggcccagcattttgtattcataatcacatattttcatcctcaaacatccctatgggttggtactgctcaattccccaagtcagtac

SEQ ID NO: 11997 - DNA, 120 bp, synthetic construct
  misc_feature 1..120: note = Artificially Synthesized Probe
  source 1..120: mol_type = other DNA
tcatgcccagccctgacaaatccattgtgaactgaaaatgtcataagtcaaaaatgccctgtagccgggcgtgatggctcacacctgtaatcccaggattttgggaggccaaggtgggag

SEQ ID NO: 11998 - DNA, 120 bp, synthetic construct
  misc_feature 1..120: note = Artificially Synthesized Probe
  source 1..120: mol_type = other DNA
ataatacgtaacaaatacaatgtatgcattatatataacaattatgtataatataattatatataatatatcatatataacatacattatatgtaacataatgtatattaaactgattta

SEQ ID NO: 11999 - DNA, 120 bp, synthetic construct
  misc_feature 1..120: note = Artificially Synthesized Probe
  source 1..120: mol_type = other DNA
ttttatatatataatatgtcaggaaatagggcacagaaggcttcaggcacttgctcagagtcacagatagtaaatggcagagctgggttggttcagaactgaggtctgcctgagttcacc

SEQ ID NO: 12000 - DNA, 120 bp, synthetic construct
  misc_feature 1..120: note = Artificially Synthesized Probe
  source 1..120: mol_type = other DNA
tcaatttctgaggacccagacggagtgcttgaagcaagagtctgaagcagacaggtgggtgctttagtttggacggataatggaaagccaggtaaggagaaaagtgggatgttcctaaaa

SEQ ID NO: 12001 - DNA, 120 bp, synthetic construct
  misc_feature 1..120: note = Artificially Synthesized Probe
  source 1..120: mol_type = other DNA
aaaaaaaaggcggcgaggggcataatgatattttggagggaaattaggaaggttacatgactgttaaaaagagcacatctccagggcattacactgagtggaaaagaagccaatttcaaa

SEQ ID NO: 12002 - DNA, 120 bp, synthetic construct
  misc_feature 1..120: note = Artificially Synthesized Probe
  source 1..120: mol_type = other DNA
ataacttggttgtcttttattgtcaattgtaattgcttgttccatttcagtcttgcccaatacactgtaaacttggtgaggggagggactgcatttgacttagtcaacatcttatccccc

SEQ ID NO: 12003 - DNA, 120 bp, synthetic construct
  misc_feature 1..120: note = Artificially Synthesized Probe
  source 1..120: mol_type = other DNA
agattgataaataacaaaatgaacagaacctcagggtctcttcgggcaacatcatttcattggaggtccgaaggggagaaagaatcagagcagaaaataaacactttgagactcaagaag

SEQ ID NO: 12004 - DNA, 120 bp, synthetic construct
  misc_feature 1..120: note = Artificially Synthesized Probe
  source 1..120: mol_type = other DNA
taataataataattttaaaaaaattagaaagttgagaagataccaaccatagctggtccccaggaatcgctagtgcaaagctctcgaggttagacagaggttagggtgctagaagaccac

SEQ ID NO: 12005 - DNA, 120 bp, synthetic construct
  misc_feature 1..120: note = Artificially Synthesized Probe
  source 1..120: mol_type = other DNA
ctctcagcccagagtggccaaagttgaacaagtcatggacatttcattgagaagaggtggggccaagatcttttgtgaataaaggataatggctatattttatttggtacatattttgtg

SEQ ID NO: 12006 - DNA, 120 bp, synthetic construct
  misc_feature 1..120: note = Artificially Synthesized Probe
  source 1..120: mol_type = other DNA
ggctctgtgagagatacaaggaaagacagaacccagggcagccctgttatttatctgggttgttcctgaattatctcatttgattatcagaacaatcccacgtagtatttttattccatt

SEQ ID NO: 12007 - DNA, 120 bp, synthetic construct
  misc_feature 1..120: note = Artificially Synthesized Probe
  source 1..120: mol_type = other DNA
cctacagtttccttttgatgaaaatgagctgctgttatggttgctattctggtggtggcattgctgcttgggtcattgttgccactgatgttgtgtaaacagttattatttgaggggtat

SEQ ID NO: 12008 - DNA, 120 bp, synthetic construct
  misc_feature 1..120: note = Artificially Synthesized Probe
  source 1..120: mol_type = other DNA
ctgtagtaataattgccaggaaggaagtgagcatagaggtagaatagagattggctgtgtgcaagatgcgtatacgggggaaatgctactttataaagggtgatccaagctgagatttga

SEQ ID NO: 12009 - DNA, 120 bp, synthetic construct
  misc_feature 1..120: note = Artificially Synthesized Probe
  source 1..120: mol_type = other DNA
gaaagaaatggaagctttaaatccaggcaaaaagaaagtgtccaaggtggtatagtgaggacatcattaaacaagcattagcttaaattgttggatgagattggacagaggggaacacgc

SEQ ID NO: 12010 - DNA, 120 bp, synthetic construct
  misc_feature 1..120: note = Artificially Synthesized Probe
  source 1..120: mol_type = other DNA
aggaagaacgaatcagagtgagaagacaggaggaagttaagagaggaaggaggggtagaactcaaaacacaggtgcaccaaccctcctgtgtgctttctctgaggttcattcatgaataa

SEQ ID NO: 12011 - DNA, 120 bp, synthetic construct
  misc_feature 1..120: note = Artificially Synthesized Probe
  source 1..120: mol_type = other DNA
cctctttggcactctgtgaatagtgcaaagaaaatttagacttattttacatttgatggtctgactgattttcttgaaacttctgagactggtccaagtggagccctgtggtttacttgg

SEQ ID NO: 12012 - DNA, 120 bp, synthetic construct
  misc_feature 1..120: note = Artificially Synthesized Probe
  source 1..120: mol_type = other DNA
cctgtggtagctaaattagtggcttcaaccattgtagttctcaagatagtggttggactcactccttctccatgactggttttaggtggtgttggcatctctgatggtatcaaggtcata

SEQ ID NO: 12013 - DNA, 120 bp, synthetic construct
  misc_feature 1..120: note = Artificially Synthesized Probe
  source 1..120: mol_type = other DNA
gaaatgttttacttgtctctgttctgggatgggtgctcaataaggctgtggtctctggcataccaggagaatgagtcaaagttggaacagttgtactggttgctgccccagaactagtga

SEQ ID NO: 12014 - DNA, 120 bp, synthetic construct
  misc_feature 1..120: note = Artificially Synthesized Probe
  source 1..120: mol_type = other DNA
tcaccagaagaaagagtcagagttggaatagttatactggtgtctgtcccagaactagtgacctgtgaggttaccatatctggtacatcaggtgagacagttattgttggaaaatctgaa

SEQ ID NO: 12015 - DNA, 120 bp, synthetic construct
  misc_feature 1..120: note = Artificially Synthesized Probe
  source 1..120: mol_type = other DNA
tggttcaccaagagaaaaagtcagaattggaatagttgtactagtcactgccctagaactagtgaccagagaggtcaccactcctggtaccccaggtgaaacagttggagttggaatagc

SEQ ID NO: 12016 - DNA, 120 bp, synthetic construct
  misc_feature 1..120: note = Artificially Synthesized Probe
  source 1..120: mol_type = other DNA
gtgtctaattcactgtggaaaaaattgggggttgtcttggaaacagttgggatggtctctgcaggatggataacccatgaagctgttgtatctggctcactagaagaaacatctagagtt

SEQ ID NO: 12017 - DNA, 120 bp, synthetic construct
  misc_feature 1..120: note = Artificially Synthesized Probe
  source 1..120: mol_type = other DNA
ttgaaatccaagcccacatccacctttacaaattcactccagaactcatctttgcttctcaatatttccttatcacactgtctgaatctgcgttgtaccatccttcacagtctcatttgt

SEQ ID NO: 12018 - DNA, 120 bp, synthetic construct
  misc_feature 1..120: note = Artificially Synthesized Probe
  source 1..120: mol_type = other DNA
tacaaaataaacatttgctaaatagaattctccaccaaccacactagacactaccagagctgaccaaggtgactggaatacctttgaacaagattccagtagcattgatgagacagcagc

SEQ ID NO: 12019 - DNA, 120 bp, synthetic construct
  misc_feature 1..120: note = Artificially Synthesized Probe
  source 1..120: mol_type = other DNA
accattgcattatattaattcactaaaggaacttctggatcttgtggggaccagaatggaaagagaatgaagtgaggtgaaaacgcccatctagtaagatggatcttaggatgcattctc

SEQ ID NO: 12020 - DNA, 120 bp, synthetic construct
  misc_feature 1..120: note = Artificially Synthesized Probe
  source 1..120: mol_type = other DNA
ttacaagagagttatgtctgtttttcaaccagggcatacataaaggctgttaatttatacttccttttcctacatttgctagaactattgggatgcattttcagacatactctgtctctc

SEQ ID NO: 12021 - DNA, 120 bp, synthetic construct
  misc_feature 1..120: note = Artificially Synthesized Probe
  source 1..120: mol_type = other DNA
tgtgccataagtggccacacctgtccatagatccatccacctacctatagatttgtccatccttcctttcattcatccctagatctgatcatctattcttccattttttcttccttttat

SEQ ID NO: 12022 - DNA, 120 bp, synthetic construct
  misc_feature 1..120: note = Artificially Synthesized Probe
  source 1..120: mol_type = other DNA
gttacctctctgaccactcctgtttagcccagcagttaggagcatgagttcctagtgacacacaatttgagttcttatcctagttctattgctttctagctatatggacttaagaaagtt

SEQ ID NO: 12023 - DNA, 120 bp, synthetic construct
  misc_feature 1..120: note = Artificially Synthesized Probe
  source 1..120: mol_type = other DNA
gatgatgagtactttctgttacagacatagtaaacctggattctgggaaggaggttatcccagtggactccgtaatagatggagaagcattaaagggggtgattatgtccactggaattt

SEQ ID NO: 12024 - DNA, 120 bp, synthetic construct
  misc_feature 1..120: note = Artificially Synthesized Probe
  source 1..120: mol_type = other DNA
tgacaggtaaggacaacagagaagatgaagagctagttttttccacaaagagagagctcttccatgatggattttcaggactcctactcataagagttgtcatctctgagtgtaaaaatc

SEQ ID NO: 12025 - DNA, 120 bp, synthetic construct
  misc_feature 1..120: note = Artificially Synthesized Probe
  source 1..120: mol_type = other DNA
agagatgacattgactctatctcaatccttgtaatgccagaggagccaggcattgttgtggaaaccatgttgtctcttatagaggaagaggtgaccactggagatatcacttttgttggc

SEQ ID NO: 12026 - DNA, 120 bp, synthetic construct
  misc_feature 1..120: note = Artificially Synthesized Probe
  source 1..120: mol_type = other DNA
tttgttgtcactgagtcagctaggacagaggaaggagattcatgtgtataacctgaggttaccacattggtcatctccagtttctctgtatctgtagtgacttcagtgatggccagtatt

SEQ ID NO: 12027 - DNA, 120 bp, synthetic construct
  misc_feature 1..120: note = Artificially Synthesized Probe
  source 1..120: mol_type = other DNA
tgttatctcagaggaagcaggtatggttgtagaaacaatgtcttttatggtggaagaggtgaccactggagatgtcactttggatggctctgggaggcctggataagaggaatagaattc

SEQ ID NO: 12028 - DNA, 120 bp, synthetic construct
  misc_feature 1..120: note = Artificially Synthesized Probe
  source 1..120: mol_type = other DNA
gttttgttgtcactaagtcagccaaaacagaggaaggggatagatgtttataaatcacagtccctacattgactacaggtgtgtttgaggagggatgaattttctctctatctttggtga

SEQ ID NO: 12029 - DNA, 120 bp, synthetic construct
  misc_feature 1..120: note = Artificially Synthesized Probe
  source 1..120: mol_type = other DNA
agtgggtttctacccagttgggtgttgttgatatgtccacagtatgagtactctctggtgtagacccaggaggatctgtttgtgtcttgatcatcatttctgctgattctgtcattatgc

SEQ ID NO: 12030 - DNA, 120 bp, synthetic construct
  misc_feature 1..120: note = Artificially Synthesized Probe
  source 1..120: mol_type = other DNA
aatccttgagatatagttgagtgtgtcattgtcaaagaggttgtgcttgacgtgtccaaagtactggtgccttgtgttgtggcccctaaaggacttgtatgggtgttcatggttatttct

SEQ ID NO: 12031 - DNA, 120 bp, synthetic construct
  misc_feature 1..120: note = Artificially Synthesized Probe
  source 1..120: mol_type = other DNA
gctctgactgaattttcctagtgttagataaggcaggagttaatgtagaaacacttgtatcccccataatggagatggtacccattgccgatgtggctttggttgtctctgagtcaggta

SEQ ID NO: 12032 - DNA, 120 bp, synthetic construct
  misc_feature 1..120: note = Artificially Synthesized Probe
  source 1..120: mol_type = other DNA
gttgatgtgtctaatgtaaaggtactctctgatgtagacccaggaggacttgtttgggtcttgatggtcatttctgatgattctgccaggatgggggaagtagggaacttaatgattttt

SEQ ID NO: 12033 - DNA, 120 bp, synthetic construct
  misc_feature 1..120: note = Artificially Synthesized Probe
  source 1..120: mol_type = other DNA
acttctgaaagaacaatacttgtgtcagtggaaaagctggcattttgggaaatgctggtctctctcagtccaggagtcaaggaatatgttgactctctcttaatttttgtagtctcagag

SEQ ID NO: 12034 - DNA, 120 bp, synthetic construct
  misc_feature 1..120: note = Artificially Synthesized Probe
  source 1..120: mol_type = other DNA
cagacgaataagattccttttcagaagtggtggtccccacattggttactgctatgtttgtggaaggatacattttctctgtatctttaatgtcttctgaagtagtcggtatcttatgtg

SEQ ID NO: 12035 - DNA, 120 bp, synthetic construct
  misc_feature 1..120: note = Artificially Synthesized Probe
  source 1..120: mol_type = other DNA
ctgagaagagagagagttggcttcttctgcagagaaagggcttgtcttcaacacatcattgagatcattgttcatgacactggttgtttctgaatctacaaaatcctgagttctggctga

SEQ ID NO: 12036 - DNA, 120 bp, synthetic construct
  misc_feature 1..120: note = Artificially Synthesized Probe
  source 1..120: mol_type = other DNA
gtggattgagacagaggaatgtagtttatgcatagaattggtggtccccatattggtttctgctgtgttctctgaaaagtgaattgtctctgtatttgtggaggcttcagaagtgagtat

SEQ ID NO: 12037 - DNA, 120 bp, synthetic construct
  misc_feature 1..120: note = Artificially Synthesized Probe
  source 1..120: mol_type = other DNA
tgctattgtgggccgatcaaggtctgagatggatgttctgctagaggagatttctgttctggaggcctgagtaatagcacctgtgggcacataagaaaaggcagtatttgtctctgttgt

SEQ ID NO: 12038 - DNA, 120 bp, synthetic construct
  misc_feature 1..120: note = Artificially Synthesized Probe
  source 1..120: mol_type = other DNA
aaagtagaaaacttgtgtccgtgggaaagctggactcctgagaggtactggtctctctcagtctaggagtcaagaaatatgttggctctctcttaatgtttgtagtctcagaggaaccat

SEQ ID NO: 12039 - DNA, 120 bp, synthetic construct
  misc_feature 1..120: note = Artificially Synthesized Probe
  source 1..120: mol_type = other DNA
ttgtctcagtctcagttcttgtagtcttagaggatttaggtattgatctggaaattgtggtgtcttccatggtggaggtggtaacatttggagatgtgactttagatggctctgggtaag

SEQ ID NO: 12040 - DNA, 120 bp, synthetic construct
  misc_feature 1..120: note = Artificially Synthesized Probe
  source 1..120: mol_type = other DNA
tattgtcatgggaggagagtttgaaagtctactgctggctactgagaaaatatctgggaactttgttgactgagcaggagttggtatgaatgttgcatcaaaagaggggacttccatttt

SEQ ID NO: 12041 - DNA, 120 bp, synthetic construct
  misc_feature 1..120: note = Artificially Synthesized Probe
  source 1..120: mol_type = other DNA
acatctgtaaatgtgttggtagaagttataaactgatgagggcttgagatggatgttccgctagagaaagtggcttgtgtcttggtgacatgagtagtagcatcaccactagacacatgg

SEQ ID NO: 12042 - DNA, 120 bp, synthetic construct
  misc_feature 1..120: note = Artificially Synthesized Probe
  source 1..120: mol_type = other DNA
acctccttgatggtatcttctgagacagaattcatcatctcagtgatccaaggtgcacttggggttgatttttctttctcattccaggagtcagatgtagctcttgcctctgttgtaaga

SEQ ID NO: 12043 - DNA, 120 bp, synthetic construct
  misc_feature 1..120: note = Artificially Synthesized Probe
  source 1..120: mol_type = other DNA
aatgacagttatacggccatggggagtagacatggagtctaattcagtgcttgaggctaagaatgaagttgtatgcattgtggaaattgttccaggagatcttgcaactttcaagtttga

SEQ ID NO: 12044 - DNA, 120 bp, synthetic construct
  misc_feature 1..120: note = Artificially Synthesized Probe
  source 1..120: mol_type = other DNA
acttgtctgttgttcagctgccattatcttattattcaggacagtggagggaatggctgtggtgcttacccatgtctcggttttatgtttggatttatctgtcaatgagctcacagagtt

SEQ ID NO: 12045 - DNA, 120 bp, synthetic construct
  misc_feature 1..120: note = Artificially Synthesized Probe
  source 1..120: mol_type = other DNA
gaaaataacatctacctgtcaaaggagtgagaaaaatgtgacatcccaagagcactcctagggaccatatttcacatttttctaagcaatttggcactgccaaggacttcagcccataat

SEQ ID NO: 12046 - DNA, 120 bp, synthetic construct
  misc_feature 1..120: note = Artificially Synthesized Probe
  source 1..120: mol_type = other DNA
agtggctcacacctgtaatccctgcactttgggaggctgaggtgggaggatctcttggagccaggagtttaagaccaccttgggccacatagtgagaccccatctgtacaaaaaaaaaaa

SEQ ID NO: 12047 - DNA, 120 bp, synthetic construct
  misc_feature 1..120: note = Artificially Synthesized Probe
  source 1..120: mol_type = other DNA
cttgacatctttatggtggtcactagcgttccatcagttgctgaaagaaaagggcaataggaaggtttagctatccattacttcagaatgtcagtttttgagctttctttacattgactg

SEQ ID NO: 12048 - DNA, 120 bp, synthetic construct
  misc_feature 1..120: note = Artificially Synthesized Probe
  source 1..120: mol_type = other DNA
ctattgaaaagcctaataaccactataattatgaataaagtcgtacatgatttttaaaagtgcttgcaacaattgtcataggatatgaaagtgtccggaatttctgttgttggcaaaggc

SEQ ID NO: 12049 - DNA, 120 bp, synthetic construct
  misc_feature 1..120: note = Artificially Synthesized Probe
  source 1..120: mol_type = other DNA
aaaagtttaaaaaataaaaaagatgtagtttatttccagattcatccccagcacacttggggaaggagcagggcattcttactttcaaccaaggaggtcttggcaggaactgaaatagag

SEQ ID NO: 12050 - DNA, 120 bp, synthetic construct
  misc_feature 1..120: note = Artificially Synthesized Probe
  source 1..120: mol_type = other DNA
ttgtctctgagttttcagaactctgactgaatacaagggaaccagtagttcccgcaggcaaagtagaaagtgccactgtgatcgaaccttcataggttgtattccgtggagcaacaatct

SEQ ID NO: 12051 - DNA, 120 bp, synthetic construct
  misc_feature 1..120: note = Artificially Synthesized Probe
  source 1..120: mol_type = other DNA
ctgttttagtgacatccatagttgaagaagctatggaggtgttgatcagatcagaagaagaactgctatctgaggggagctcatttgttttccgtgcgtcaaggatatctgaggttttta

SEQ ID NO: 12052 - DNA, 120 bp, synthetic construct
  misc_feature 1..120: note = Artificially Synthesized Probe
  source 1..120: mol_type = other DNA
tttctgtattagtagttggatgggaccccaaagggattgacactgtccatggatccttgttcattctaaaggaaaccaaagactctgaagtgggcagggatattgtcctagttaatttgg

SEQ ID NO: 12053 - DNA, 120 bp, synthetic construct
  misc_feature 1..120: note = Artificially Synthesized Probe
  source 1..120: mol_type = other DNA
gagtgagagaaatccatggtgtcacctccattgatggagttggagatggaagatccatagaggcagttctgagtttttcttttcctgtattttcagtgcttcccaaagctgtggacataa

SEQ ID NO: 12054 - DNA, 120 bp, synthetic construct
  misc_feature 1..120: note = Artificially Synthesized Probe
  source 1..120: mol_type = other DNA
ctgtatttctaatggcactggtatctgcctctgactttgaaagttcatgagaaggtgtggacataggtggaaaaatagcaaatgtactcatgggtgaacttggacttgaaatatcaaggt

SEQ ID NO: 12055 - DNA, 120 bp, synthetic construct
  misc_feature 1..120: note = Artificially Synthesized Probe
  source 1..120: mol_type = other DNA
gtgagttgcagtcatttgtggagtcagagctgagcttgttccatctctaggtattgtaatttctctggatgttaaatgatagacatcatcagaaaatgtgtcaacgaattggcttgtcct

SEQ ID NO: 12056 - DNA, 120 bp, synthetic construct
  misc_feature 1..120: note = Artificially Synthesized Probe
  source 1..120: mol_type = other DNA
gaaacagaagtctcaggttgagacacagatggattcgaagtttcctctgtttcttctccactagtaaatagatgagtggaaggagtagatgaagaaaatgtggttttgactccagagaca

SEQ ID NO: 12057 - DNA, 120 bp, synthetic construct
  misc_feature 1..120: note = Artificially Synthesized Probe
  source 1..120: mol_type = other DNA
agaggtctcaagtggagtcatagatgtattcaaagttccttctgtttcctttccactcgtggagtgatgggtgttggtctcctctgagactaaagtggtagatggagatgtggttgtcag

SEQ ID NO: 12058 - DNA, 120 bp, synthetic construct
  misc_feature 1..120: note = Artificially Synthesized Probe
  source 1..120: mol_type = other DNA
atgtgagtcagtaactgtggtctcagctggagtcatagacactggggcattttccttggatgcagttgaatctgcaaatgttttcattggagatgtgatttttacaggaatatatcttgt

SEQ ID NO: 12059 - DNA, 120 bp, synthetic construct
  misc_feature 1..120: note = Artificially Synthesized Probe
  source 1..120: mol_type = other DNA
cacttcgcttccaagggtgcgtctgagactacccgtcgtggggtcccaggcttctctcttctgccctgcaggaacacctcgcaattcctctatacttctcttttctctgtacttcagtgt

SEQ ID NO: 12060 - DNA, 120 bp, synthetic construct
  misc_feature 1..120: note = Artificially Synthesized Probe
  source 1..120: mol_type = other DNA
gttgaaatccacatgctggggttcatgcttgtaaactaatgaatcccacggccaaaagggaatagtatagaaaaatatgtctatttgtgtgatgaacactcactgctaagccttaaggtc

SEQ ID NO: 12061 - DNA, 120 bp, synthetic construct
  misc_feature 1..120: note = Artificially Synthesized Probe
  source 1..120: mol_type = other DNA
tctgtgatgctgcctggaaaatgggtgagtgagtagcttacatgagtgatgtaacaaaatgacccacggatttaccagtggattcctctgctctgccgccaatgcaggaactttatccac

SEQ ID NO: 12062 - DNA, 120 bp, synthetic construct
  misc_feature 1..120: note = Artificially Synthesized Probe
  source 1..120: mol_type = other DNA
tgactacagcaacagacctcacatcaacattcacggtttccagttcctcagcaatgtccacgagtgtcattccatcttcccccagcattcagaatacagaaacctcatcccttgtcagca

SEQ ID NO: 12063 - DNA, 120 bp, synthetic construct
  misc_feature 1..120: note = Artificially Synthesized Probe
  source 1..120: mol_type = other DNA
cagaatctctcacaacagccatgacttctcctcccatcacttcatcagtcacttccacaaatacagtgacttctatgacaactacgacctctcctcccacaaccaccaattcttttacat

SEQ ID NO: 12064 - DNA, 120 bp, synthetic construct
  misc_feature 1..120: note = Artificially Synthesized Probe
  source 1..120: mol_type = other DNA
acaatgacttctatgagaactacaacctattggcccacagccactaatacattatcaccactcaccagtagcattttatcttctacacctgtcccaagcacagaaatgatcaccagtcat

SEQ ID NO: 12065 - DNA, 120 bp, synthetic construct
  misc_feature 1..120: note = Artificially Synthesized Probe
  source 1..120: mol_type = other DNA
actgactcctacaactgacttttctacagaatctctcacaacagccatgacttctactccccccatcacttcttcaatcactcccaccgatacaatgacttctatgagaactacgacctc

SEQ ID NO: 12066 - DNA, 120 bp, synthetic construct
  misc_feature 1..120: note = Artificially Synthesized Probe
  source 1..120: mol_type = other DNA
tcacctacaaccaccatgtcattcacaacatttacaaagatggaaacaccttcatccactgtagcaactacaggcacaggtcagactacattcaccagttcaacagccacatcccctaag

SEQ ID NO: 12067 - DNA, 120 bp, synthetic construct
  misc_feature 1..120: note = Artificially Synthesized Probe
  source 1..120: mol_type = other DNA
ttcacttcattgatcaccatcaccgagatcacctcacacagtactctcagctacactacctcaatcaccaccaccgagaccccctcacacagtactctcagcttcacttcttcaatcacc

SEQ ID NO: 12068 - DNA, 120 bp, synthetic construct
  misc_feature 1..120: note = Artificially Synthesized Probe
  source 1..120: mol_type = other DNA
cttcacttcttcaatcaccaccactgagaccacctcagagagtactcccagcctcagttcttcaaccatctactccacagtcagcacatccacaactgccatcacctcacattttactac

SEQ ID NO: 12069 - DNA, 120 bp, synthetic construct
  misc_feature 1..120: note = Artificially Synthesized Probe
  source 1..120: mol_type = other DNA
tcacatctacaagtgagttcactacagaatctttcactaggggaagtacgtctacaaatgcaatcttgacttcttttagtaccatcatctggtcctcaacacccactattatcatgtcct

SEQ ID NO: 12070 - DNA, 120 bp, synthetic construct
  misc_feature 1..120: note = Artificially Synthesized Probe
  source 1..120: mol_type = other DNA
cagtttccaactgctgccgggccaacaaacacaaatctggctgctggaacaacacgacattatcatgttagaattctgtagattagaagtctgatgtgggtgtcactgggctgaaatcaa

SEQ ID NO: 12071 - DNA, 120 bp, synthetic construct
  misc_feature 1..120: note = Artificially Synthesized Probe
  source 1..120: mol_type = other DNA
tgtcttataatccctgcactttggaaggccgaggagggagtatcgcttgaggcgaggagttcaggaccagcctgggcaacacagcgagaccctcatctccacaaaaaattttaaaaactt

SEQ ID NO: 12072 - DNA, 120 bp, synthetic construct
  misc_feature 1..120: note = Artificially Synthesized Probe
  source 1..120: mol_type = other DNA
tgtgtagatgtagtggagaccgaggtgggcatggaagtgtctgtggatcagcagttctcgccggacctcaatgacaacacttcccaggcctacagggatttcaacaagaccttctggaat

SEQ ID NO: 12073 - DNA, 120 bp, synthetic construct
  misc_feature 1..120: note = Artificially Synthesized Probe
  source 1..120: mol_type = other DNA
cgcacacaaaaaacccattcctttcttttgtaatcatcagattttataaagaggggtggagggggtacataaggaatcactccctgggtattttttcggatcgttttctggggccattta

SEQ ID NO: 12074 - DNA, 120 bp, synthetic construct
  misc_feature 1..120: note = Artificially Synthesized Probe
  source 1..120: mol_type = other DNA
aatcatgtcagtcattccttgtcctgccttcccaggcagaccaagtcaggaatgctggcagccccttctgaaaaggatgcacgtggcatcccaactcatgacctctgctcccttccccct

SEQ ID NO: 12075 - DNA, 120 bp, synthetic construct
  misc_feature 1..120: note = Artificially Synthesized Probe
  source 1..120: mol_type = other DNA
tcgaatcccagggtctaccccacagcatcccacctcggaaatggaatcctcctcgcgcatattcagaggcaccgttatcaggcccctgaatagaatggatgaggtccttgtctctgtgca

SEQ ID NO: 12076 - DNA, 120 bp, synthetic construct
  misc_feature 1..120: note = Artificially Synthesized Probe
  source 1..120: mol_type = other DNA
tccccttctctttctccgctcctctctctctctagacaaggatacaaatttctatgtggccttggagaacgtggacaccactatgaaggtgaggggctaaagagggggaccccaaggaac

SEQ ID NO: 12077 - DNA, 120 bp, synthetic construct
  misc_feature 1..120: note = Artificially Synthesized Probe
  source 1..120: mol_type = other DNA
tattttctctcaattccctactgcctgtttcttactttgaacctggaggcagcctgcagccccatcccatctcctgccctctcctgatctaactccctgctgcatctcttgctctcattc

SEQ ID NO: 12078 - DNA, 120 bp, synthetic construct
  misc_feature 1..120: note = Artificially Synthesized Probe
  source 1..120: mol_type = other DNA
taaggtatagtcttgtcttgattcccagtattcattctccttgaagaatcctgacagccttcagtcaccttcccttttccagtctcccaaaagcaatggcgccttaaatgtgcggtaagg

SEQ ID NO: 12079 - DNA, 120 bp, synthetic construct
  misc_feature 1..120: note = Artificially Synthesized Probe
  source 1..120: mol_type = other DNA
aaaggcgcctcgcttgactgaggggcaggactggcctagacacaggactgcaggttcttttcccacaaggagacagcagggaagcagcagccagatcaggtgggagggtttgactttggg

SEQ ID NO: 12080 - DNA, 120 bp, synthetic construct
  misc_feature 1..120: note = Artificially Synthesized Probe
  source 1..120: mol_type = other DNA
tttatcctgagaaataattggagaagtgcacagatacatatgcccctggacgttcagatcagcatggtggataatagtaacgtttcagaagtagggtctggttaaataaactactgcaca

SEQ ID NO: 12081 - DNA, 120 bp, synthetic construct
  misc_feature 1..120: note = Artificially Synthesized Probe
  source 1..120: mol_type = other DNA
taagtttgtgtttcctaaagtttctgcaataaacatacgatgcttgtataataaaaattataggttttccttaattgcatagtcagggcttgcctccctgcgcctcctaccccaactccc

SEQ ID NO: 12082 - DNA, 120 bp, synthetic construct
  misc_feature 1..120: note = Artificially Synthesized Probe
  source 1..120: mol_type = other DNA
ttgcttaataatgtttgttgagagtgaagggttttccattctgtccccccctcagcctcatatgacgagcagagaatctgacatgaatggcccctaccttgcctctgacacatgactcat

SEQ ID NO: 12083 - DNA, 120 bp, synthetic construct
  misc_feature 1..120: note = Artificially Synthesized Probe
  source 1..120: mol_type = other DNA
actaaatgcttgacacgcgttatcatttaaacggtgatacggcctgttgactcaggtgctatgattgtccctgtgtttacagatgacctgttatatgatgtgtctagttagcacacctgc

SEQ ID NO: 12084 - DNA, 120 bp, synthetic construct
  misc_feature 1..120: note = Artificially Synthesized Probe
  source 1..120: mol_type = other DNA
tgcacatgggctgacagcccagagtctgggagatgtagcagtggccttgattgtagcagtaattcacagggcaggactggttctgacacaggaaagagctccccagagctgcagagtgag

SEQ ID NO: 12085 - DNA, 120 bp, synthetic construct
  misc_feature 1..120: note = Artificially Synthesized Probe
  source 1..120: mol_type = other DNA
agatttcccatacctgcctagatgatttcccacacctgcctagatttcccacacctgcctagattgagcattctaaagatctgctggaaaaaggagagaaatggtttgcctttggctgtc

SEQ ID NO: 12086 - DNA, 120 bp, synthetic construct
  misc_feature 1..120: note = Artificially Synthesized Probe
  source 1..120: mol_type = other DNA
ctccacctcccaggttcaagccatcctcccacctcagcctcccgaggagctggggctacaggcatgcaccaccacgcccactaatttttgtatttttcttctgcttttttttttaatgag

SEQ ID NO: 12087 - DNA, 120 bp, synthetic construct
  misc_feature 1..120: note = Artificially Synthesized Probe
  source 1..120: mol_type = other DNA
gccaagtatcttggctagaaacatggagaagtagtttctccaaactggaaaagatgtttcttttagctggaaggagatagtaaaagagaaagcaaaggggcttggaggtgtcaagataga

SEQ ID NO: 12088 - DNA, 120 bp, synthetic construct
  misc_feature 1..120: note = Artificially Synthesized Probe
  source 1..120: mol_type = other DNA
gtctgattgtacaaacactggctctctgcattgcaatggcagaccacagtcctgggctggagtgcagatgccaagccaatcttggcacttcttgctagaatctccagagtgaatggctcc

SEQ ID NO: 12089 - DNA, 120 bp, synthetic construct
  misc_feature 1..120: note = Artificially Synthesized Probe
  source 1..120: mol_type = other DNA
tcagatcaaactgatatttttcaagaaaataggaaagtctccttaaaacagcagattgaaaggaagtgacagagaatagacgaacgtaatttccagaccatcgtccttcaggggtggggc

SEQ ID NO: 12090 - DNA, 120 bp, synthetic construct
  misc_feature 1..120: note = Artificially Synthesized Probe
  source 1..120: mol_type = other DNA
ggcacctatttgagttatagatatcgctcctcggaaatgccggtcctggatattcaaatgaaagagtgacagcaagtgttgctgggtgtagcaatgcagaatttcccaaatttgactctg

SEQ ID NO: 12091 - DNA, 120 bp, synthetic construct
  misc_feature 1..120: note = Artificially Synthesized Probe
  source 1..120: mol_type = other DNA
aattataaaatatgttgagtaattataaatgctaaggagaaaaaaataaagcagggaaggcaaacatgaagtgtgggtgaatgtgacattttagacagggcggccaagagaggcctcacc

SEQ ID NO: 12092 - DNA, 120 bp, synthetic construct
  misc_feature 1..120: note = Artificially Synthesized Probe
  source 1..120: mol_type = other DNA
tcatagatgcatgagctatctccgtcacagttggagatcaaatgttcagcccaggagctgtttttttgcagttgtgagtagaaaacaggggtgaagttggaaggcagctggtcattcctc

SEQ ID NO: 12093 - DNA, 120 bp, synthetic construct
  misc_feature 1..120: note = Artificially Synthesized Probe
  source 1..120: mol_type = other DNA
ggccgccggcgtgggggtccgagctccggctggctccgcggagcctcagaggcaggtccgagccgccctcacccaggagcccctccgtgcggttctggtactcgggcgggaggctggcgg

SEQ ID NO: 12094 - DNA, 120 bp, synthetic construct
  misc_feature 1..120: note = Artificially Synthesized Probe
  source 1..120: mol_type = other DNA
atggttttcggattatgccctttagctcttacaacagcccgtgaggcaggtaatgtcatccccattcttactaggagaaaaccaaattaagtagtttcttcgaagccaagcagctgggaa

SEQ ID NO: 12095 - DNA, 120 bp, synthetic construct
  misc_feature 1..120: note = Artificially Synthesized Probe
  source 1..120: mol_type = other DNA
atgttcacagagcacagaatcctcccctcaagcctccttgcattttcgtgccccgctattctcactccttccccaactcaggtacaaagcccctccactgaccatccacccatcactggc

SEQ ID NO: 12096 - DNA, 120 bp, synthetic construct
  misc_feature 1..120: note = Artificially Synthesized Probe
  source 1..120: mol_type = other DNA
gatgtggagccaggtatagagatgaggaaagaggctctcagctcatacatccccgaatgtccgctggtggggatgttggaagcttcctaacgttacccgatcaggaagtggaggcccaga

SEQ ID NO: 12097 - DNA, 120 bp, synthetic construct
  misc_feature 1..120: note = Artificially Synthesized Probe
  source 1..120: mol_type = other DNA
agaacaaatagaactggatttacacttcacagttcacgtggctggtttctaaggctaaaatgtccttcaacctatcacattttggaaactattatttctttcccattggggcctctggac

SEQ ID NO: 12098 - DNA, 120 bp, synthetic construct
  misc_feature 1..120: note = Artificially Synthesized Probe
  source 1..120: mol_type = other DNA
tcttagttttcacatctgtataaaagggattacagtggcatctacctcactgtattgtgaggattaaatgcagtaacatctgcaaatccctcagaactgagtgaggccttgatacaacag

SEQ ID NO: 12099 - DNA, 120 bp, synthetic construct
  misc_feature 1..120: note = Artificially Synthesized Probe
  source 1..120: mol_type = other DNA
ctccttcatagcacaccaagaaactagtgaaagcagtgtaatcaaaggggtaacctgaacacactcaatgtaagagaagacatttgcagcaattatcaagaacaaaagacatgtggcctt

SEQ ID NO: 12100 - DNA, 120 bp, synthetic construct
  misc_feature 1..120: note = Artificially Synthesized Probe
  source 1..120: mol_type = other DNA
acgaagtgttagtgtcatcagtcttggctgttattatcacgatatttgagaaggtaagagaggccagctaatgtcagtggaaatcagggaagccaaagctctgggaatgattacaactca

SEQ ID NO: 12101 - DNA, 120 bp, synthetic construct
  misc_feature 1..120: note = Artificially Synthesized Probe
  source 1..120: mol_type = other DNA
taaaatggggagcataataccagactgagccacgtgaaattgtgaatagccagacatttttgacttacaaaaatgccacttgctatgtttcagcctaataatacccggtttgctgggctg

SEQ ID NO: 12102 - DNA, 120 bp, synthetic construct
  misc_feature 1..120: note = Artificially Synthesized Probe
  source 1..120: mol_type = other DNA
acatttcctctgattggagttattcacccagtccaggagcacaggacgggccctcttgactcactcttgttaggatagaccccctacagcctgattttacaatcaaaggctgaattgtca

SEQ ID NO: 12103 - DNA, 120 bp, synthetic construct
  misc_feature 1..120: note = Artificially Synthesized Probe
  source 1..120: mol_type = other DNA
agctcctcaaaagcgtgacccccaagggtagagctttagagatgctaacaacccctggaagtcacctcctgtgtcctgttttggggagagccctttccatatattctcacagaatgctcc

SEQ ID NO: 12104 - DNA, 120 bp, synthetic construct
  misc_feature 1..120: note = Artificially Synthesized Probe
  source 1..120: mol_type = other DNA
tatagacaccctcccttcatcgctcaggggtgtagacaccctctctccatcgctcaggggtgtagataccctctctccatcgctcaggggtgtagacaccctctctccatcgctcagggg

SEQ ID NO: 12105 - DNA, 120 bp, synthetic construct
  misc_feature 1..120: note = Artificially Synthesized Probe
  source 1..120: mol_type = other DNA
gccaggactgtccctccaactctgctccaggaggcagggaccagggggccagagacaaatcccagaaggtggaaacggcaggaacagtccagtttcccaagtgtagctttttactcctga

SEQ ID NO: 12106 - DNA, 120 bp, synthetic construct
  misc_feature 1..120: note = Artificially Synthesized Probe
  source 1..120: mol_type = other DNA
aaaaaaaaaatagacaaaagtccagcgcaatgaagatgagtaactgcaaagcccttttcagggaatgagacttgtttcctaagacggcctttctccagataaacttgaagactcctccaa

SEQ ID NO: 12107 - DNA, 120 bp, synthetic construct
  misc_feature 1..120: note = Artificially Synthesized Probe
  source 1..120: mol_type = other DNA
ataccttccacggccataccttccacacccataccttccacacccataccttccacacccataccttccacacccataccttccacagtcataccttccacacccataccttccacaccc

SEQ ID NO: 12108 - DNA, 120 bp, synthetic construct
  misc_feature 1..120: note = Artificially Synthesized Probe
  source 1..120: mol_type = other DNA
tcataccttccacacccataccttccacacccataccttccacacccataccttccacacccttaccttccacacccataccttccacagtcataccttccacacccataccttccacag

SEQ ID NO: 12109 - DNA, 120 bp, synthetic construct
  misc_feature 1..120: note = Artificially Synthesized Probe
  source 1..120: mol_type = other DNA
ctgcattccttagggccttccattgtgtgcacttagaccctgggatgagtcctctaaccgccgctaccggaccgtccatctatcccttgctgaatggcactggggtcatttctctgtctc

SEQ ID NO: 12110 - DNA, 120 bp, synthetic construct
  misc_feature 1..120: note = Artificially Synthesized Probe
  source 1..120: mol_type = other DNA
acagtaacaaaacaggagagtcaaagagattcaaagaaatcaggagctggaagagggagctggaaactccttgtctctcccctgctcatatccaaactactctcgacatcagtgcttttc

SEQ ID NO: 12111 - DNA, 120 bp, synthetic construct
  misc_feature 1..120: note = Artificially Synthesized Probe
  source 1..120: mol_type = other DNA
ggaaacgtcggtgacaggaagacgggtggtgtcatctgtggaagctgaggaagtgtcggtgacaggaagaggggtggcgtgacgtgtggatgctgaggaagtgtcggtgacaggaagagg

SEQ ID NO: 12112 - DNA, 120 bp, synthetic construct
  misc_feature 1..120: note = Artificially Synthesized Probe
  source 1..120: mol_type = other DNA
gcgtgacctgtggatactgaggaagcgtcggtgacaagaagaggggtggtgtcacctgtggatactgaggaaaggctggtgacaggaagaggggtggcctgacctgtggatgccgaggaa

SEQ ID NO: 12113 - DNA, 120 bp, synthetic construct
  misc_feature 1..120: note = Artificially Synthesized Probe
  source 1..120: mol_type = other DNA
cggtgacaggaagagaggtggtgtcacctgtggatgctgaggaagtgtcggtgacaggaagagaggtggcatgaccggtggatgctgaggaagggctagtgacaggaagaggcgtggtgt

SEQ ID NO: 12114 - DNA, 120 bp, synthetic construct
  misc_feature 1..120: note = Artificially Synthesized Probe
  source 1..120: mol_type = other DNA
tgtggatactgaggaaaggctggtgacaggaagaggggtggcctgacctgtggatgctgaggaagtgtcggtgacaggaagaggcgtggtgtcacctgtggatactgaggaaaggctggt

SEQ ID NO: 12115 - DNA, 120 bp, synthetic construct
  misc_feature 1..120: note = Artificially Synthesized Probe
  source 1..120: mol_type = other DNA
ggaagaggggtggcctgacctgtggatgctgagtaagtgtcggtgacaggaagaggggtggtgtcacctgtggatgctgaggaagtgctggtgacaggaagaggggtggcgtgacctgtg

SEQ ID NO: 12116 - DNA, 120 bp, synthetic construct
  misc_feature 1..120: note = Artificially Synthesized Probe
  source 1..120: mol_type = other DNA
ctgaggaaaggctggtgacaggaagagaggtggcgtgacctgtggacactgaggaagcgtcggtgacaggaagaggggtggtgtcacctgtggatgctgaggaaaggctggtgacaggaa

SEQ ID NO: 12117 - DNA, 120 bp, synthetic construct
  misc_feature 1..120: note = Artificially Synthesized Probe
  source 1..120: mol_type = other DNA
ggtggtgtgacctgaggatgctgaggaagggctagtgacaggaagaggcgtggtgtcacctgtggatgctgaggaaaggctggtgacaggaagagaggtggcgtgacctgtggatactga

SEQ ID NO: 12118 - DNA, 120 bp, synthetic construct
  misc_feature 1..120: note = Artificially Synthesized Probe
  source 1..120: mol_type = other DNA
gtgtcggtgacaggaagaggggtggtgtgacctgtagatgctgaggaagggctggtgacaggaagaggggtggtgtcacctttggatgctgaggaagtgtcggtgacaggaagaggggtg

SEQ ID NO: 12119 - DNA, 120 bp, synthetic construct
  misc_feature 1..120: note = Artificially Synthesized Probe
  source 1..120: mol_type = other DNA
gacctgtggatgctgaggaagtgctagtgacaggaagaggcgtggtgtcacctgtggatactgaggaagtgtcggtgacaagaagagaggtggcctgacctgtggatgctgaggaagtgt

SEQ ID NO: 12120 - DNA, 120 bp, synthetic construct
  misc_feature 1..120: note = Artificially Synthesized Probe
  source 1..120: mol_type = other DNA
cttactgggatggcaccatgactggctgaggcggacagcaattcggttgttgactgggttgtgtgactgtccctggaggggtttgatgaaaaccttgtcgtctctcctgaggtggatatt

SEQ ID NO: 12121 - DNA, 120 bp, synthetic construct
  misc_feature 1..120: note = Artificially Synthesized Probe
  source 1..120: mol_type = other DNA
agaggtgcttgtggaatgtattgttgaatgatttgttgatggtgccgttgtaatttgttgggatgtgtgtctatccagcataggtgaagaagatggggatgtggccgtttttatcatctg

SEQ ID NO: 12122 - DNA, 120 bp, synthetic construct
  misc_feature 1..120: note = Artificially Synthesized Probe
  source 1..120: mol_type = other DNA
ggttcttagaaaaagctgttgtgtcctgagtagaagtccttgagaaagttgctggtgattgtccttctggatcaaatgttactaaggctgctgaggtgactggcataagacttccagtaa

SEQ ID NO: 12123 - DNA, 120 bp, synthetic construct
  misc_feature 1..120: note = Artificially Synthesized Probe
  source 1..120: mol_type = other DNA
ctctagtgtcgctgttgttgagcctgttgaggtgactggggcagcagttttacttccagttattaatgtgtcctctgtggttcctggagtgaaccaaaataggcaagcagagagctaaat

SEQ ID NO: 12124 - DNA, 120 bp, synthetic construct
  misc_feature 1..120: note = Artificially Synthesized Probe
  source 1..120: mol_type = other DNA
aggaatataaatcattctgttataaagatacatgcacacgtatgtttactgcagcactatttacaatagtaaagacatgaaaccaacccaaatgtccatcagtgatagactggataaaga

SEQ ID NO: 12125 - DNA, 120 bp, synthetic construct
  misc_feature 1..120: note = Artificially Synthesized Probe
  source 1..120: mol_type = other DNA
gaaggtgaggttagactagaatggtgaattaactgtgttaaactccatgggaagaggcaaacagtacccctgctataagccgggttaactctctcaacttgaattatagcattatctttc

SEQ ID NO: 12126 - DNA, 120 bp, synthetic construct
  misc_feature 1..120: note = Artificially Synthesized Probe
  source 1..120: mol_type = other DNA
gagagacaaagtctcagggaagaattcagcttcaagtccactttctggaattgactgtaattcgccaccttctcttcttcagacagtaacttagactctcaagtgagtgataatggttat

SEQ ID NO: 12127 - DNA, 120 bp, synthetic construct
  misc_feature 1..120: note = Artificially Synthesized Probe
  source 1..120: mol_type = other DNA
tgaactgagtttccctgcaaaaagctggaaccgccagcaaaaaaggtagactagaaagaccaggaagaaaaaagaaaaaggaagcagaatgaaggatatagtaacagaccagaactcact

SEQ ID NO: 12128 - DNA, 120 bp, synthetic construct
  misc_feature 1..120: note = Artificially Synthesized Probe
  source 1..120: mol_type = other DNA
tggaaaccaaagataggataagaaagacaaactatagattaataagtcccagtaataatacatggaagcatcgtaaataaaatattagcaagccaaagtgcatcatggccgggcgcggcg

SEQ ID NO: 12129 - DNA, 120 bp, synthetic construct
  misc_feature 1..120: note = Artificially Synthesized Probe
  source 1..120: mol_type = other DNA
aacggaggggagacacaatcaccacagcagatacaggaaagttatttgataaaagtcaacacttactcctgttaaaactcctagcaaactaaaaagagacgttaactcttttaacctgat

SEQ ID NO: 12130 - DNA, 120 bp, synthetic construct
  misc_feature 1..120: note = Artificially Synthesized Probe
  source 1..120: mol_type = other DNA
ataattttgtatcctgcctttttagccatacctgatatgagcatttcttcaagatactagcttcgtaaacatagcctgagaagacgcacatcttttatgtcttggatggcagttccttgc

SEQ ID NO: 12131 - DNA, 120 bp, synthetic construct
  misc_feature 1..120: note = Artificially Synthesized Probe
  source 1..120: mol_type = other DNA
tataaaatttttcatgttattaatacagactgccaaatttctttgcagaaagcttatgccaatttacagacctgttggcagtgtgcaagagtgtgcctgtttccccatatccctagcctg

SEQ ID NO: 12132 - DNA, 120 bp, synthetic construct
  misc_feature 1..120: note = Artificially Synthesized Probe
  source 1..120: mol_type = other DNA
atctctcaatctgttgggcttgtgaggaggaagagattagcattcgttacgacaaaactacagttattgcatttgtctttcaccatcatttaaacaatacctctgaagccactcctgcaa

SEQ ID NO: 12133 - DNA, 120 bp, synthetic construct
  misc_feature 1..120: note = Artificially Synthesized Probe
  source 1..120: mol_type = other DNA
ttcaggttccgtcagattgtcagacaactgaaacttgttctcactctggccaaacgcataaacttggggagcagagagctgggagatttgcgcctaaagagttgatattggagagaaaca

SEQ ID NO: 12134 - DNA, 120 bp, synthetic construct
  misc_feature 1..120: note = Artificially Synthesized Probe
  source 1..120: mol_type = other DNA
gccaagggatttctcgtttctgcgggagacattgttcagttttgtagccggcagcttaaattcaaaatgcattttaaacatgttttcccctttctcttgggtttccaaatacaaccttga

SEQ ID NO: 12135 - DNA, 120 bp, synthetic construct
  misc_feature 1..120: note = Artificially Synthesized Probe
  source 1..120: mol_type = other DNA
atgaacacaccagggaggtggggcttctttttacttctctcgtaggcacgttatgactctatgaataatacaaatgttcacagctcatgttcatgtggtgctttatagcttatcttgtta

SEQ ID NO: 12136 - DNA, 120 bp, synthetic construct
  misc_feature 1..120: note = Artificially Synthesized Probe
  source 1..120: mol_type = other DNA
taatgctatttgtgtatcagcccagaatcaactgtgaccagggttgtgtccactgggtacttccctagaattcaagatgaggaaagacactaactcaagatacccttggaataacagacc

SEQ ID NO: 12137 - DNA, 120 bp, synthetic construct
  misc_feature 1..120: note = Artificially Synthesized Probe
  source 1..120: mol_type = other DNA
ttcaagtcccttcacagtggactccaaggcgagaactttacccgttctttccaacgatccccgccgaagtcacaccccaacccatggatcccaccaccggtcatttgacctcatttctgt

SEQ ID NO: 12138 - DNA, 120 bp, synthetic construct
  misc_feature 1..120: note = Artificially Synthesized Probe
  source 1..120: mol_type = other DNA
atcttaaacaagtcacttaacttagagagctttgaaaagcaggaactgtgacgcattcatcttcctgtccagagcagctggcatgagtagaaattctgcaagtgaatgaacaactccaaa

SEQ ID NO: 12139 - DNA, 120 bp, synthetic construct
  misc_feature 1..120: note = Artificially Synthesized Probe
  source 1..120: mol_type = other DNA
ataaaaaaaccgtctatgaagaaatcgtcgatgaggtgccaacagactcagttattttgactcaatttctcagaacatgctggggcgggaactcagcctagcagtaagaaagacgtatat

SEQ ID NO: 12140 - DNA, 120 bp, synthetic construct
  misc_feature 1..120: note = Artificially Synthesized Probe
  source 1..120: mol_type = other DNA
agatgaagggatatgaccctgggccgacacaagtgccattccgggttcaatcaccctccttcccccgtcttcccaggcctctttctcaaacacgtctttatggcttttctttttttttta

SEQ ID NO: 12141 - DNA, 120 bp, synthetic construct
  misc_feature 1..120: note = Artificially Synthesized Probe
  source 1..120: mol_type = other DNA
ctccacatggagctgagtgtccagctggtacccagcacatttgggctcagctttaaatcacagatttggaaactcaagaacttgggcgtcaggaggtccaaccgttcaccactgcttttt

SEQ ID NO: 12142 - DNA, 120 bp, synthetic construct
  misc_feature 1..120: note = Artificially Synthesized Probe
  source 1..120: mol_type = other DNA
cagcatggcttctcttgcagcctttaaacggcactcgccttctgactcactcccaggaagctcctcaaatatgcgcccaagaaatattttccctcggcgactgttcttagcctgctgaga

SEQ ID NO: 12143 - DNA, 120 bp, synthetic construct
  misc_feature 1..120: note = Artificially Synthesized Probe
  source 1..120: mol_type = other DNA
cactcttctttctctctccctcttctcttcctcttctttccctctctgggtctctctccaccttccccccatgttgtcccattcatctctttctcctttccctctccctctttttctctc

SEQ ID NO: 12144 - DNA, 120 bp, synthetic construct
  misc_feature 1..120: note = Artificially Synthesized Probe
  source 1..120: mol_type = other DNA
ccatctgtgggcatctcatgccgcacgggctgcctggctctcagccgagcgttttccctcgtctgctgtctcttggccagagccgcagcattaatacttactgtcaatagagaaagatgc

SEQ ID NO: 12145 - DNA, 120 bp, synthetic construct
  misc_feature 1..120: note = Artificially Synthesized Probe
  source 1..120: mol_type = other DNA
ggaggggttgcctgggttggggaggggctgtctggggcaggggaggagctgcctggggcgggggaggggctgtagggccagggaggggctgcctggggctggggaggggctgctggggtg

SEQ ID NO: 12146 - DNA, 120 bp, synthetic construct
  misc_feature 1..120: note = Artificially Synthesized Probe
  source 1..120: mol_type = other DNA
ctgacttaggatctagttcgaaactggttctgtgtttaggtttctgctaagtcacgcctggaaggctccaagtgtgtcctcctaacaaagctggtctttgtccttctccaagggatgtgt

SEQ ID NO: 12147 - DNA, 120 bp, synthetic construct
  misc_feature 1..120: note = Artificially Synthesized Probe
  source 1..120: mol_type = other DNA
tcactggccaccctgggggatggggacgggtcaggggtcttggagcaaaacagacgcagtccagggtgagccaggcagggcacagccagcagccgaccatgggcttttccattccaaaaa

SEQ ID NO: 12148 - DNA, 120 bp, synthetic construct
  misc_feature 1..120: note = Artificially Synthesized Probe
  source 1..120: mol_type = other DNA
tgccacctgggtgagggggcggtgaccaattatgtcggccaacgaagagccacagtcccggggaggccgggagggggcggagtggggaccgggcaccaggcagggaggggccacgaggac

SEQ ID NO: 12149 - DNA, 120 bp, synthetic construct
  misc_feature 1..120: note = Artificially Synthesized Probe
  source 1..120: mol_type = other DNA
tcactccccaagggccaagcagagctctgcatggccacagtgggtggaaggggtggggctgggtacaaggaaccccgacagggagagggcttcccggcctggcctgccatgggtcctatt

SEQ ID NO: 12150 - DNA, 120 bp, synthetic construct
  misc_feature 1..120: note = Artificially Synthesized Probe
  source 1..120: mol_type = other DNA
ccagcctcatcaggcgtggaagcagagcccctcatgccagaaggtcccaccagagggcccagggtgggaagggcactggctgggagggtgccggaagacctgccgatgcgtggagggagg

SEQ ID NO: 12151 - DNA, 120 bp, synthetic construct
  misc_feature 1..120: note = Artificially Synthesized Probe
  source 1..120: mol_type = other DNA
aggccctgagacaagctgctgggaggtgaccagaggtgccaaggaccacctccccacagagccacatcccccacatgggcatccccagcacacttctggggggcaccccacatcatcgag

SEQ ID NO: 12152 - DNA, 120 bp, synthetic construct
  misc_feature 1..120: note = Artificially Synthesized Probe
  source 1..120: mol_type = other DNA
tcactcccgggtctcagtggggtggcccggcccactggatgccctgcccctccaatctagccagatctgtccctgcacccctgaccggcctctcccccacactcccggcagccaacatca

SEQ ID NO: 12153 - DNA, 120 bp, synthetic construct
  misc_feature 1..120: note = Artificially Synthesized Probe
  source 1..120: mol_type = other DNA
aggaggtgcttggggccaggcggccagaaccccccaaggcgcagcaggtgagccgcaaattccaactcactgttccccgggctgagggggtcgcaggcctgcgtgtcaggggtgtgggct

SEQ ID NO: 12154 - DNA, 120 bp, synthetic construct
  misc_feature 1..120: note = Artificially Synthesized Probe
  source 1..120: mol_type = other DNA
gtggtaagggtctggggggaaagcaggccccccaggtgctcctcagagccacttcccgccctccccgaaggcttctgtgcctccccccgagggttctgagacatgaggggccaggctggg

SEQ ID NO: 12155 - DNA, 120 bp, synthetic construct
  misc_feature 1..120: note = Artificially Synthesized Probe
  source 1..120: mol_type = other DNA
agctcggcgggcacccctggggccgagtgcctccggagctgccacacgctggacgtgggctgtgtgagttccatgcttcagggaggggtgggcagggaaggggtcccagctttcccagct

SEQ ID NO: 12156 - DNA, 120 bp, synthetic construct
  misc_feature 1..120: note = Artificially Synthesized Probe
  source 1..120: mol_type = other DNA
cagggaagcttcgtgaggctttagctgcacccacaggttctcagcagtgtcctggccccgggctgctgttccaagcagccacaaaccagggggcttagacaacagaaatgcattctcagt

SEQ ID NO: 12157 - DNA, 120 bp, synthetic construct
  misc_feature 1..120: note = Artificially Synthesized Probe
  source 1..120: mol_type = other DNA
cctgttcccagcacttcctggccagcctcttgccaaaccttcgctgagggtctcacggacccagctcacccctaacgccagccgcttgtgctaagagcccgtgcgcacctgcagagcact

SEQ ID NO: 12158 - DNA, 120 bp, synthetic construct
  misc_feature 1..120: note = Artificially Synthesized Probe
  source 1..120: mol_type = other DNA
tcctctatgatccccagacctgcccagtcctcagcacaaactggaatgccagcctggctccccgctcagccagggaggaatcagagatctgccctaagcagagacttccaaaaagcagtt

SEQ ID NO: 12159 - DNA, 120 bp, synthetic construct
  misc_feature 1..120: note = Artificially Synthesized Probe
  source 1..120: mol_type = other DNA
aaacaaaacaacaaaaaaccaaaaagcagtttcgtgtcatcttaaggaagacttgagtgcccacttaggcacacagcatggtggctcaggagctgagatgaggggctggcgtaggggcag

SEQ ID NO: 12160 - DNA, 120 bp, synthetic construct
  misc_feature 1..120: note = Artificially Synthesized Probe
  source 1..120: mol_type = other DNA
acacagacatccaacacgcatgtgcctccatgtgagtgcacaagtttctatgcacagaggaagacctgtgcaaaaccaccagacaggttgccccagcatgagacagctcctaggggacaa

SEQ ID NO: 12161 - DNA, 120 bp, synthetic construct
  misc_feature 1..120: note = Artificially Synthesized Probe
  source 1..120: mol_type = other DNA
ctgcacctatgaggacaggacctacagctaccaggacgtcatctacaacaccaccgatgggcttggcgcctgcttgatcgccatctgcggaagcaacggcaccatcatcaggaaggctgt

SEQ ID NO: 12162 - DNA, 120 bp, synthetic construct
  misc_feature 1..120: note = Artificially Synthesized Probe
  source 1..120: mol_type = other DNA
ccacctgccagccccggtgtcagtggacagagtggtttgatgaggactaccccaagtctgaacaacttggaggggacgttgagtcctacgataagatcagggccgctggagggcacttat

SEQ ID NO: 12163 - DNA, 120 bp, synthetic construct
  misc_feature 1..120: note = Artificially Synthesized Probe
  source 1..120: mol_type = other DNA
ctgtcaaccgaagtgtgagtggacagagtggtttgacgtggacttcccaacctcaggggttgcaggcggggacatggaaacttttgaaaacatcagggctgctgggggcaagatgtgctg

SEQ ID NO: 12164 - DNA, 120 bp, synthetic construct
  misc_feature 1..120: note = Artificially Synthesized Probe
  source 1..120: mol_type = other DNA
aactaccacaaccacgggcttcacagccaccccctcctccagcccagggacggcactcacgcctccagtgtggatcagcacaaccaccacacccacaaccagaggctccacggtgacccc

SEQ ID NO: 12165 - DNA, 120 bp, synthetic construct
  misc_feature 1..120: note = Artificially Synthesized Probe
  source 1..120: mol_type = other DNA
ggagttgggccaggtcgtggaatgcagcctggactttggcctggtctgcaggaaccgtgagcaggtggggaagttcaagatgtgcttcaactatgaaatccgtgtgttctgctgcaacta

SEQ ID NO: 12166 - DNA, 120 bp, synthetic construct
  misc_feature 1..120: note = Artificially Synthesized Probe
  source 1..120: mol_type = other DNA
accaacccctcctcaactccagggacaacacctatccccccagtgctgaccaccaccgccaccacacctgcagccaccagcagcacagtgactccctcctctgccctagggaccacccac

SEQ ID NO: 12167 - DNA, 120 bp, synthetic construct
  misc_feature 1..120: note = Artificially Synthesized Probe
  source 1..120: mol_type = other DNA
caccacacccacagccaccagttccaaagccacttcctcctccagtccaaggactgcaaccacccttccagtgctgacaagcacagccaccaaatccacagctaccagctttacacccat

SEQ ID NO: 12168 - DNA, 120 bp, synthetic construct
  misc_feature 1..120: note = Artificially Synthesized Probe
  source 1..120: mol_type = other DNA
cgccacagtgctgaccaccaccaccacaactgtggccactggttctatggcaacaccctcctctagcacacagaccagtggtactcccccatcactgaccaccacggccactacgatcac

SEQ ID NO: 12169 - DNA, 120 bp, synthetic construct
  misc_feature 1..120: note = Artificially Synthesized Probe
  source 1..120: mol_type = other DNA
tggaatgcagcctggactttggcctggtctgcaggaaccgtgagcaggtggggaagttcaagatgtgcttcaactatgaaatccgtgtgttctgctgcaactacggccactgccccagca

SEQ ID NO: 12170 - DNA, 120 bp, synthetic construct
  misc_feature 1..120: note = Artificially Synthesized Probe
  source 1..120: mol_type = other DNA
caccacggccaccacacacgggcgatccctgtcccccagcagtccccacacggtgcgcacagcctggacttcggccacctcaggcaccttgggcaccacccacatcacagagccttccac

SEQ ID NO: 12171 - DNA, 120 bp, synthetic construct
  misc_feature 1..120: note = Artificially Synthesized Probe
  source 1..120: mol_type = other DNA
ggaccaccgggaccctcccagaacagaccaccacacccgtggccaccatgtccacaatccacccctcctccactccggagaccacccacacctccacagtgctgaccacgaaggccacca

SEQ ID NO: 12172 - DNA, 120 bp, synthetic construct
  misc_feature 1..120: note = Artificially Synthesized Probe
  source 1..120: mol_type = other DNA
actgtggccactggttctatggcaacaccctcctctagcacacagaccagtggtactcccccatcactgaccaccacggccactacgatcacggccaccggctccaccaccaacccctcc

SEQ ID NO: 12173 - DNA, 120 bp, synthetic construct
  misc_feature 1..120: note = Artificially Synthesized Probe
  source 1..120: mol_type = other DNA
tcccacttctctactccctgcttctgcagggcatttggacagtttttctcgcccggtgagtgcatgtggataacactgctgtaccctttccccacatgctatgccaacctgggtctgcct

SEQ ID NO: 12174 - DNA, 120 bp, synthetic construct
  misc_feature 1..120: note = Artificially Synthesized Probe
  source 1..120: mol_type = other DNA
caggtgaatgagacctggaccctggagaactgcacggtggccaggtgcgtgggtgacaaccgtgtcgtcctgctggacccaaagcctgtggccaacgtcacctgcgtgaacaagcacctg

SEQ ID NO: 12175 - DNA, 120 bp, synthetic construct
  misc_feature 1..120: note = Artificially Synthesized Probe
  source 1..120: mol_type = other DNA
agtccacgatgatgtcatttcaagatgcttcccttaatcccatctgcaaagacactttctcccggcaaagccacatgcggaggttctgggatagccatagattttgggggaccccattct

SEQ ID NO: 12176 - DNA, 120 bp, synthetic construct
  misc_feature 1..120: note = Artificially Synthesized Probe
  source 1..120: mol_type = other DNA
cagggttcccctggattcccccagatcctgtttgaccaaattccggtgagcagcggtttcagcaagaacggcgtgcttgtgtctgtgctggggaccaccaccatgcgtgtggacattcct

SEQ ID NO: 12177 - DNA, 120 bp, synthetic construct
  misc_feature 1..120: note = Artificially Synthesized Probe
  source 1..120: mol_type = other DNA
tgagtgggggcggccccgggccccccagacccctcggcctctctgagtgtcctgtgcggtgagtgggggcggccccgggccccccagacccctcggcctctctgagtgtcctgtgcggtg

SEQ ID NO: 12178 - DNA, 120 bp, synthetic construct
  misc_feature 1..120: note = Artificially Synthesized Probe
  source 1..120: mol_type = other DNA
atctctaggtctcagggcctctcttgtcatcctgcaggaaccagagcccacagctggaggggatggcggagggctgcttctgccctgaggaccagatcctcttcaacgcacacatgggca

SEQ ID NO: 12179 - DNA, 120 bp, synthetic construct
  misc_feature 1..120: note = Artificially Synthesized Probe
  source 1..120: mol_type = other DNA
ctgccccgagacggtgtgcggtaagacgctgcagagcagaggtgcccggcatagggtgaggggggacagagccggtgcccaccaggggcctgtgggttgggcacaggagagcagaggaga

SEQ ID NO: 12180 - DNA, 120 bp, synthetic construct
  misc_feature 1..120: note = Artificially Synthesized Probe
  source 1..120: mol_type = other DNA
cggattcctgcctgccagattcctgcccccatggggtctctgcccacccagattcctgcccacatggggtctctgcctgcccagattccctgcccacctgtggtccctgtgtgcatcagc

SEQ ID NO: 12181 - DNA, 120 bp, synthetic construct
  misc_feature 1..120: note = Artificially Synthesized Probe
  source 1..120: mol_type = other DNA
acaagaggtaatccctactcagcttccacactcacccttgcatttcagctgaatgaaacctgggtcaacagccatgtggacaactgcaccgtgtacctctgtgaggctgagggtggagtc

SEQ ID NO: 12182 - DNA, 120 bp, synthetic construct
  misc_feature 1..120: note = Artificially Synthesized Probe
  source 1..120: mol_type = other DNA
gtgagggtccagtggggctccacatctgcctttcctcctcccagactcctgtcaagtccgcatcaacacgaccatcctgtggcaccagggctgcgagaccgaggtcaacatcaccttctg

SEQ ID NO: 12183 - DNA, 120 bp, synthetic construct
  misc_feature 1..120: note = Artificially Synthesized Probe
  source 1..120: mol_type = other DNA
ttcccggcccaggaggccactgctgtctgagaacgttctgcctccatccccatgctctgtccacctggagccaggatgtgcattgtctgatcatgaaaaccttgggcctcctctgcggag

SEQ ID NO: 12184 - DNA, 120 bp, synthetic construct
  misc_feature 1..120: note = Artificially Synthesized Probe
  source 1..120: mol_type = other DNA
agagctctgacttctagggcaaaacataagcatgtacactgcaagttatcaaggtctattttgtttatgcgaatgtcaaatttcagggtggtctaagtggatgatgacaaccttttcgca

SEQ ID NO: 12185 - DNA, 120 bp, synthetic construct
  misc_feature 1..120: note = Artificially Synthesized Probe
  source 1..120: mol_type = other DNA
caaacagctaataatagtcagaaagacttaacattggcttcagattattttaatacttcctgatcaaacaacggatgtccggtaaggccccacctggatgtttgaacgtatgggttgtct

SEQ ID NO: 12186 - DNA, 120 bp, synthetic construct
  misc_feature 1..120: note = Artificially Synthesized Probe
  source 1..120: mol_type = other DNA
ccactgcgccagccattatactactgaaactaataaaaatggcccacccaaactatttctactatttctagaaaactactgttttccctattcttggcagacggtaataacaaaaagagt

SEQ ID NO: 12187 - DNA, 120 bp, synthetic construct
  misc_feature 1..120: note = Artificially Synthesized Probe
  source 1..120: mol_type = other DNA
gaaggagcagaaatttcaagatctctttaaactctaccttatttccaaaggtaaatgaagtaggcagcttctcagtgaaataaaacctgatgtcgttgaaggagagtaacaagtgagggg

SEQ ID NO: 12188 - DNA, 120 bp, synthetic construct
  misc_feature 1..120: note = Artificially Synthesized Probe
  source 1..120: mol_type = other DNA
caactgatccatgtgattgtgtcagtgaaaaccggaaagcagatttggataactggaaatatggacaatgtggacttggcattctgtgtgtagaaactgatattgatgtacatcttctct

SEQ ID NO: 12189 - DNA, 120 bp, synthetic construct
  misc_feature 1..120: note = Artificially Synthesized Probe
  source 1..120: mol_type = other DNA
ttaccaagtggctcttgcaaacctgcggaagacaaaacttgtgtgcctcaatcttctcccacttgactacgattaatagaatttagtacaattgatctgttttctgcagtaaaagtcacc

SEQ ID NO: 12190 - DNA, 120 bp, synthetic construct
  misc_feature 1..120: note = Artificially Synthesized Probe
  source 1..120: mol_type = other DNA
tggtttccatttatttattccttgtgacaagttatgtggaggctatacattatctccgtctatagctgagacactgaggttaagtgtggttaagtgacttgcagagtcggtaagtgatgg

SEQ ID NO: 12191 - DNA, 120 bp, synthetic construct
  misc_feature 1..120: note = Artificially Synthesized Probe
  source 1..120: mol_type = other DNA
aaatcctgtaagatacagaaaaacaaaaatataaaattacacataatgctcatagcaagggataagtgctcttagcattttgctattcattctttcagtctctttctctcatatatgtgt

SEQ ID NO: 12192 - DNA, 120 bp, synthetic construct
  misc_feature 1..120: note = Artificially Synthesized Probe
  source 1..120: mol_type = other DNA
tctttacaaatttcagaggctgttatttcattgaggaaagagaagcatttaaataagaagctctctcttcagctgcctaccagcaaaggggaaaaacctacctctctgcatccatcttgt

SEQ ID NO: 12193 - DNA, 120 bp, synthetic construct
  misc_feature 1..120: note = Artificially Synthesized Probe
  source 1..120: mol_type = other DNA
actgcacctggctccttgtagcttttatgtaactggagacttaattctttcttaagagttttttaaaacttatctgaaaaactttggggcattatatttttttcagaagtgttctttgct

SEQ ID NO: 12194 - DNA, 120 bp, synthetic construct
  misc_feature 1..120: note = Artificially Synthesized Probe
  source 1..120: mol_type = other DNA
ataggtcagcttataccattggcacttactgtgatttctggtatatttggacttgtttcttccatattattttatgtcttctgttaaccatgctttttcttggcttatttattcctcctc

SEQ ID NO: 12195 - DNA, 120 bp, synthetic construct
  misc_feature 1..120: note = Artificially Synthesized Probe
  source 1..120: mol_type = other DNA
acgcagtcatgtaaaggtattagcctattgccttttggtatcaattgttgttgctgaataatctcaggttacccaaaattggcattcctattaaggaattaaactttttctttctggtag

SEQ ID NO: 12196 - DNA, 120 bp, synthetic construct
  misc_feature 1..120: note = Artificially Synthesized Probe
  source 1..120: mol_type = other DNA
tcattttaatagtatctgtgtgacaagtggcattataagaatgacatttcaggataacataaggttaaggaaagaggcatttgggtctgcctagcatgtcaggggaagtggaaggagatg

SEQ ID NO: 12197 - DNA, 120 bp, synthetic construct
  misc_feature 1..120: note = Artificially Synthesized Probe
  source 1..120: mol_type = other DNA
cccaagtgaattctctatgaatctgatgaagcttaagcttcagattctctcatttgcaggagccctttctaagaccctcagtgggctttagcaatgtgcttttatgagtgtctattttta

SEQ ID NO: 12198 - DNA, 120 bp, synthetic construct
  misc_feature 1..120: note = Artificially Synthesized Probe
  source 1..120: mol_type = other DNA
tttgatgtttagatcccacaaataagtgagaacatgcaatgtttgtctttctgtgcctggctaatttcatttaacataatgatctccagttccatccatgtctttgcaaatgactggatc

SEQ ID NO: 12199 - DNA, 120 bp, synthetic construct
  misc_feature 1..120: note = Artificially Synthesized Probe
  source 1..120: mol_type = other DNA
ttctgtacatggatatccagttttccacacatcatttactgaagagactgtctttttcccagtgtatgttcttggtacctctgtcaaaaatgaaatgagttcactgcaggtgcatgaatt

SEQ ID NO: 12200 - DNA, 120 bp, synthetic construct
  misc_feature 1..120: note = Artificially Synthesized Probe
  source 1..120: mol_type = other DNA
gtcctggttccttttttgcttagcagtttttcccacttatcttttcctcttgaattttactataaccagaaaaaagaaatgaggccgcagcttcgacacatttcttagaaatttcctcag

SEQ ID NO: 12201 - DNA, 120 bp, synthetic construct
  misc_feature 1..120: note = Artificially Synthesized Probe
  source 1..120: mol_type = other DNA
cctctgcctccattgtcatacctccctttatcaatctgcctctctcttccatcttttaaggatacttattatcacacagggaccattcgaatagtccagaacactccattttaagattct

SEQ ID NO: 12202 - DNA, 120 bp, synthetic construct
  misc_feature 1..120: note = Artificially Synthesized Probe
  source 1..120: mol_type = other DNA
gtgggaggagctgtggagagttgtggagccctgcaagtgaagatgagtgagtgggaaacagattcgtctattgatttgaaagttgacttggtacacttagttttgtatttattttttaca

SEQ ID NO: 12203 - DNA, 120 bp, synthetic construct
  misc_feature 1..120: note = Artificially Synthesized Probe
  source 1..120: mol_type = other DNA
aagactgccaaacactagtaggtaatctcccagccctcagtgttgcttttaaaccattctattttgtattcctatacaaaatctttcctctgatgagggcttatgccattctgacctatc

SEQ ID NO: 12204 - DNA, 120 bp, synthetic construct
  misc_feature 1..120: note = Artificially Synthesized Probe
  source 1..120: mol_type = other DNA
atataaatatatcatatatatattcatattttatataatatataatatataaatatataaatatataaactatatatttatatattgtatagttatatttatatataaatatatagctat

SEQ ID NO: 12205 - DNA, 120 bp, synthetic construct
  misc_feature 1..120: note = Artificially Synthesized Probe
  source 1..120: mol_type = other DNA
tatatatttaagtatatataaatatatataaatatatatttaagtataaatatatatttaagtatatataaatatatataaatatatatttaagtacaaatatataaatatatataaata

SEQ ID NO: 12206 - DNA, 120 bp, synthetic construct
  misc_feature 1..120: note = Artificially Synthesized Probe
  source 1..120: mol_type = other DNA
tgtcacccactggaagtagtctgcatttaaaatcttcagcttcagtatgtcactctcatcatggacattttttggtacagccttgtcagatgagcaaaacagtttcccatactcatgatt

SEQ ID NO: 12207 - DNA, 120 bp, synthetic construct
  misc_feature 1..120: note = Artificially Synthesized Probe
  source 1..120: mol_type = other DNA
cacgattggaagtcttcattttgctcgcattgttggataataattttgctgcatgcagaatgagagttttaaaatcccttttctttagttttagtagatatcctctgttgcagatgagaa

SEQ ID NO: 12208 - DNA, 120 bp, synthetic construct
  misc_feature 1..120: note = Artificially Synthesized Probe
  source 1..120: mol_type = other DNA
ttcttttcttgccttcttttttccaacctctcctttggagatctcatccattcatgtggatatacaccggtgtggccattccaattgctaaaattttggaatgcttccatacttcttgga

SEQ ID NO: 12209 - DNA, 120 bp, synthetic construct
  misc_feature 1..120: note = Artificially Synthesized Probe
  source 1..120: mol_type = other DNA
aaaaaacaaaacccaacaggtcatgaaggctttgcaagtatctcttaccaccaacaacaccaaagcccccattcctctccctcacattgaagtagaagaaaacaaagtccatatttcatg

SEQ ID NO: 12210 - DNA, 120 bp, synthetic construct
  misc_feature 1..120: note = Artificially Synthesized Probe
  source 1..120: mol_type = other DNA
taaaataactcgtcctcccataaatgtgaaaataatagagggattaaaagcagtcctaccatgtactacaatgggtaatcccaaaccatcagtgtcttggataaagggagacagccctct

SEQ ID NO: 12211 - DNA, 120 bp, synthetic construct
  misc_feature 1..120: note = Artificially Synthesized Probe
  source 1..120: mol_type = other DNA
ttaatgttgaatctgagacttaggggatgaaaaagaaaaactaaaacccaggctttagaactgacagtttctggaaggagggagggagacaaggttcggaagaaaagaaatgagatctct

SEQ ID NO: 12212 - DNA, 120 bp, synthetic construct
  misc_feature 1..120: note = Artificially Synthesized Probe
  source 1..120: mol_type = other DNA
tggcaaatgtatccttgatagacccataaacatttttgaattcacgtccctatctctggcaggaaaattcccgaattgcagttcttgaatctgggagcttgaggattcataacgtacaaa

SEQ ID NO: 12213 - DNA, 120 bp, synthetic construct
  misc_feature 1..120: note = Artificially Synthesized Probe
  source 1..120: mol_type = other DNA
attaggcgaataaactgagtacaaacccttcctagctcttcctgttgtatgccagagaattaacatttttggctcctagctttctcacctgttaagtggggtttgctctatttaatgaag

SEQ ID NO: 12214 - DNA, 120 bp, synthetic construct
  misc_feature 1..120: note = Artificially Synthesized Probe
  source 1..120: mol_type = other DNA
acctacaaacccacccagacacacattcagactcactgaatatctgtctgcctagatccagtgttttcttgttctgtctaaggaatgatgcagaattaatgctatccatttgtataaaat

SEQ ID NO: 12215 - DNA, 120 bp, synthetic construct
  misc_feature 1..120: note = Artificially Synthesized Probe
  source 1..120: mol_type = other DNA
cggtgacatacataattattgatggaaccatctaactcaagcgtggtgcagcatggatgtctttctgaaaggatgtccaatgggaaggctaacattttaaaaagttccattgaggctaaa

SEQ ID NO: 12216 - DNA, 120 bp, synthetic construct
  misc_feature 1..120: note = Artificially Synthesized Probe
  source 1..120: mol_type = other DNA
aatatggagtagcatcaatccacatggttgcagggtttttccctccagtgttgctctgctgtacaggtgtaagttcagaaaatagcagaaagctaaattcaaaggcaagacataaatgtt

SEQ ID NO: 12217 - DNA, 120 bp, synthetic construct
  misc_feature 1..120: note = Artificially Synthesized Probe
  source 1..120: mol_type = other DNA
tcttccaactagcccggaaatgctgggctagttgtataactgataagaataaaatataaatctctggaagctcaaaatggacaggaactgcaaaaaccataagctcaatgagctggtttc

SEQ ID NO: 12218 - DNA, 120 bp, synthetic construct
  misc_feature 1..120: note = Artificially Synthesized Probe
  source 1..120: mol_type = other DNA
aagcactttacccaagttacataggcttttcatggatatacctacactgaggatgagttcacaatgcaaaattgtcacacctacagaaaacaacctaccttgagtgagtgttgtccaaca

SEQ ID NO: 12219 - DNA, 120 bp, synthetic construct
  misc_feature 1..120: note = Artificially Synthesized Probe
  source 1..120: mol_type = other DNA
tccagcattgatgaaagacttaaatcttcaagtacgtgaagcataccaagtcccaatcggtaaaaatgaagagcagagaaataagcatttcacacccagtcaaatcataaggaaacatca

SEQ ID NO: 12220 - DNA, 120 bp, synthetic construct
  misc_feature 1..120: note = Artificially Synthesized Probe
  source 1..120: mol_type = other DNA
ccattgatctccaagacaaactcagggatgggaaaagttttgtcaaaggtaattgattcctatgttgcttaggttttcacaactcttggatattggctgaagaattttgaaggtggaggt

SEQ ID NO: 12221 - DNA, 120 bp, synthetic construct
  misc_feature 1..120: note = Artificially Synthesized Probe
  source 1..120: mol_type = other DNA
ggtgctaaaggcattcacacccagtttgtggcttctgccctccagctaagatcgttccttagctgtccccaaatatgagaatgaatatacaatgataaaacaaaaataaatcaaccatat

SEQ ID NO: 12222 - DNA, 120 bp, synthetic construct
  misc_feature 1..120: note = Artificially Synthesized Probe
  source 1..120: mol_type = other DNA
tgaggctgaatgtggctcttactacattctgtgaatatcacattcagatgaatactgctttgtatatagaaactggctgaatgtagtgtacttgagacccaaattaaaatagatggatgc

SEQ ID NO: 12223 - DNA, 120 bp, synthetic construct
  misc_feature 1..120: note = Artificially Synthesized Probe
  source 1..120: mol_type = other DNA
tttttcctttgtttatgctgcagctcttaatatcacaaatgccacagagagaggtatttaaaaccccaccgtgtgctgtgctctcagtgattgcagttttaataaaatttgcagtggtcc

SEQ ID NO: 12224 - DNA, 120 bp, synthetic construct
  misc_feature 1..120: note = Artificially Synthesized Probe
  source 1..120: mol_type = other DNA
tgagcaatgttccaggtgcgacatgagacagagaaggccatgcctccactgggcttaatttcaaaatgtgactattttgattcatgcaaagatatcatggaaagctattagaattctatg

SEQ ID NO: 12225 - DNA, 120 bp, synthetic construct
  misc_feature 1..120: note = Artificially Synthesized Probe
  source 1..120: mol_type = other DNA
atagataaagacacttgagaccaaacaaattgtgactttgcccaggttggcaaaggaacttgagtgtcttattcctagtctaggacatgttccactacctattccgattctttcctcttt

SEQ ID NO: 12226 - DNA, 120 bp, synthetic construct
  misc_feature 1..120: note = Artificially Synthesized Probe
  source 1..120: mol_type = other DNA
atttatacaaggtccagccttgcaggttgtaagggaggtcactttcatggcaggccaagatccttgagatgttttgaaaatttgaaggagaaaggaattaggccaaaatgaatagatact

SEQ ID NO: 12227 - DNA, 120 bp, synthetic construct
  misc_feature 1..120: note = Artificially Synthesized Probe
  source 1..120: mol_type = other DNA
atggccatatcaatataccttccttaagatctctatggaaagagaaagaaataactaagttgacggattcatggaacttctcctccaagtggttctcaaatgccagtgcacatcagaagc

SEQ ID NO: 12228 - DNA, 120 bp, synthetic construct
  misc_feature 1..120: note = Artificially Synthesized Probe
  source 1..120: mol_type = other DNA
agcacagcctgacactgactcataaccagggagtaaaagaaggattagagagtttgggacagtatctattagtggtgctataaaaacagaataaaccatgatttgactcacaggctaaca

SEQ ID NO: 12229 - DNA, 120 bp, synthetic construct
  misc_feature 1..120: note = Artificially Synthesized Probe
  source 1..120: mol_type = other DNA
agctcttgtctgatttacatggtaaacatttcttgctcgtacccactattcaccatccatatttacaagtgagaaaaacgttaccatctcaaaggccacagaaatgttcccaacccaagc

SEQ ID NO: 12230 - DNA, 120 bp, synthetic construct
  misc_feature 1..120: note = Artificially Synthesized Probe
  source 1..120: mol_type = other DNA
aagccttctccctttgaagtccgctaaaggaacagctttcatgactcagaaagatatcctagagatcaaaaaagctctggagaaagaaaaagaactagaagacctggcttcaaaatttac

SEQ ID NO: 12231 - DNA, 120 bp, synthetic construct
  misc_feature 1..120: note = Artificially Synthesized Probe
  source 1..120: mol_type = other DNA
cacaaatcatcttaaacattaatgctgtcaccaaataaattctcacaaagtaatagaaagctcaggaaattaatatttgagaagtaaatttagaggcaaggataacttaaactgagaagc

SEQ ID NO: 12232 - DNA, 120 bp, synthetic construct
  misc_feature 1..120: note = Artificially Synthesized Probe
  source 1..120: mol_type = other DNA
tttaagatcatgtaggatcttctccagtctctttaactaaagcaagcatcttatcattctttaaaatcttatctaacagcaccttccctcatcctctgtcactttccttggcattatcca

SEQ ID NO: 12233 - DNA, 120 bp, synthetic construct
  misc_feature 1..120: note = Artificially Synthesized Probe
  source 1..120: mol_type = other DNA
tatggtgccttccttccctaagagtagatgatctaatagagaacaaggaggagttagtaatgtttttcatggtctagcttcaaaagccacacacagtcacttctgccacatcctatttgt

SEQ ID NO: 12234 - DNA, 120 bp, synthetic construct
  misc_feature 1..120: note = Artificially Synthesized Probe
  source 1..120: mol_type = other DNA
ttaaagtttacatctcacaggacctatataacagtaacacaatgaaaacaacaacaacaacaacaacaaggtattcaggcaacaaatagcacaatgaatagaatagtacctctcatctca

SEQ ID NO: 12235 - DNA, 120 bp, synthetic construct
  misc_feature 1..120: note = Artificially Synthesized Probe
  source 1..120: mol_type = other DNA
attcatagcattatctgaaaaagcacatatagacaatccaaggccacacctccaattctccatgcaattggtgaaacaagaacaatctaaacacaaatgcagaagaagaaaagaaatata

SEQ ID NO: 12236 - DNA, 120 bp, synthetic construct
  misc_feature 1..120: note = Artificially Synthesized Probe
  source 1..120: mol_type = other DNA
aaacccacagccaacgttatactgaatggggaaaagctgaaagtgttacccctgagaactgaaacaagacaaggatgcccactttcaccacttctattcaacatagtactggaagtccta

SEQ ID NO: 12237 - DNA, 120 bp, synthetic construct
  misc_feature 1..120: note = Artificially Synthesized Probe
  source 1..120: mol_type = other DNA
attgaagacctggaaccataaaaattctagaagataacatcagaaaaactcttctagacattggcttaggcaaagacttcataaccaagaactaaaagcaaatgcaacaaaaacaaagaa

SEQ ID NO: 12238 - DNA, 120 bp, synthetic construct
  misc_feature 1..120: note = Artificially Synthesized Probe
  source 1..120: mol_type = other DNA
caaaaatatagaaccagcccaaatgctcatcaatcaaccagtggataaagaaaatgtgagacatataaatacacacacatacatacatatacacacacaccatggaatactactacatat

SEQ ID NO: 12239 - DNA, 120 bp, synthetic construct
  misc_feature 1..120: note = Artificially Synthesized Probe
  source 1..120: mol_type = other DNA
atcttttagttaatctttcacatttctgtccatctttctctctggcctcagggctgtatgatggcttaagtgccatcttctgattcattaattcttcacttgaccttgtccaagcttgag

SEQ ID NO: 12240 - DNA, 120 bp, synthetic construct
  misc_feature 1..120: note = Artificially Synthesized Probe
  source 1..120: mol_type = other DNA
acgtacagtttcattcttgttaggtggatagaagtgggaaaagggtcttatagatagtaagtataaagagattggttttggtttgattttgatttacagatattctctctcctttacaac

SEQ ID NO: 12241 - DNA, 120 bp, synthetic construct
  misc_feature 1..120: note = Artificially Synthesized Probe
  source 1..120: mol_type = other DNA
ctaggcgagcaggatatgtggaaaaactaggactactgtttgagctcgaaatgaccaaaaaagtcatacagcgaataactatacctgagcttaaataggcctatagacttttcttgcata

SEQ ID NO: 12242 - DNA, 120 bp, synthetic construct
  misc_feature 1..120: note = Artificially Synthesized Probe
  source 1..120: mol_type = other DNA
accactgagttgatggaggtagggaaagttcagacagtagaatctaaatgaggaatcacaaattcacttaaatgtaaggggattgggtgttaagtgtaaatatgagaccttctcattggg

SEQ ID NO: 12243 - DNA, 120 bp, synthetic construct
  misc_feature 1..120: note = Artificially Synthesized Probe
  source 1..120: mol_type = other DNA
tttctattcaatctaaacattttacaatatcctgtggaccttacttccttagtagattcccagaaggtaatgatttgctcctttctgctctccaagcagcttctgtgttggtgcagagtt

SEQ ID NO: 12244 - DNA, 120 bp, synthetic construct
  misc_feature 1..120: note = Artificially Synthesized Probe
  source 1..120: mol_type = other DNA
cttttggtgggggttggggggctttacagtctttggataaatgttaggatgtcaaggtgccaatttggtttttattgtgatgatttcaacaagatcaggagtattatgcaattgctccaa

SEQ ID NO: 12245 - DNA, 120 bp, synthetic construct
  misc_feature 1..120: note = Artificially Synthesized Probe
  source 1..120: mol_type = other DNA
tctccacttgcagttagcctgcaagtctgctcaagagacattaaagccccaaactcatgaatagatcccatgagagaaaacccagagttaaatatattaccttggtctattttccatgtt

SEQ ID NO: 12246 - DNA, 120 bp, synthetic construct
  misc_feature 1..120: note = Artificially Synthesized Probe
  source 1..120: mol_type = other DNA
ttagatgcaagagagctgggagactgatagctcagaataggattgagatacacataacatatccaagtcccttcccccaaccttaccagagaagtcatcatgttcgttcatttatttatt

SEQ ID NO: 12247 - DNA, 120 bp, synthetic construct
  misc_feature 1..120: note = Artificially Synthesized Probe
  source 1..120: mol_type = other DNA
ttcaagggtatagtcaatgttactagaacagttttctagcacatgtgaggttgaaatgtgctagattttccaaatctctcaaagatcctgcttgtttcagattctcgggcagtgggatcc

SEQ ID NO: 12248 - DNA, 120 bp, synthetic construct
  misc_feature 1..120: note = Artificially Synthesized Probe
  source 1..120: mol_type = other DNA
aacaatgagaccaactggaaacactactctggacctgttctatcattgtcctgcgtatctccttatgtagcacatgtggtctcccatactttagtttagaatccaatattcacaaatttc

SEQ ID NO: 12249 - DNA, 120 bp, synthetic construct
  misc_feature 1..120: note = Artificially Synthesized Probe
  source 1..120: mol_type = other DNA
atagggttataacataaagggcttggaggctcggccatggcatgtggtattatccttaaaacagagcaaacactgaagaactgcacacaggggaacatggtctaatttgcatttctaaaa

SEQ ID NO: 12250 - DNA, 120 bp, synthetic construct
  misc_feature 1..120: note = Artificially Synthesized Probe
  source 1..120: mol_type = other DNA
ctgccctcaaagagcttaccttctcatggggaaatacgggaaaatatatgttgtatgtgtatggtgtcaaatgccatgcagaaaaataaatcaggaaaaggagacagaaagttcaacctt

SEQ ID NO: 12251 - DNA, 120 bp, synthetic construct
  misc_feature 1..120: note = Artificially Synthesized Probe
  source 1..120: mol_type = other DNA
ttgaacaaagatctgaaggagttgaagggtgaagttacatagataactgggggaacataactagacaaagtctctgagataatggtatacatggcatgtcagaaaaacagcaaggagacc

SEQ ID NO: 12252 - DNA, 120 bp, synthetic construct
  misc_feature 1..120: note = Artificially Synthesized Probe
  source 1..120: mol_type = other DNA
cagggacaagaggttactgctaatcttgtaccaccttcaactaagctcaaggtatgaagctccttgggcatcccagataattataacatgaccagtaattcattatgtggactatttaac

SEQ ID NO: 12253 - DNA, 120 bp, synthetic construct
  misc_feature 1..120: note = Artificially Synthesized Probe
  source 1..120: mol_type = other DNA
tcttaaagttggctcctgcttacagcccctgctatctgaagtttgaaattttccatgactttgtagggaaaatgtatccattctcctctcagtaaacctcttcttttgtgctaggtttca

SEQ ID NO: 12254 - DNA, 120 bp, synthetic construct
  misc_feature 1..120: note = Artificially Synthesized Probe
  source 1..120: mol_type = other DNA
gagctgccagacatcctttagattttacaggtgggaattacatacttgtctaatgtgtctccaaattgcaagtgtgttagagtccccaagatcacattcatgtctgatgattcatgagaa

SEQ ID NO: 12255 - DNA, 120 bp, synthetic construct
  misc_feature 1..120: note = Artificially Synthesized Probe
  source 1..120: mol_type = other DNA
ggagatcaaagaagtgtcccaaatcgggacactttaatatccacatcatcccaaattgtgtttaatgcaagcatcacaacaagaaaatgggggacttctttttaaggaaggcaaaacctt

SEQ ID NO: 12256 - DNA, 120 bp, synthetic construct
  misc_feature 1..120: note = Artificially Synthesized Probe
  source 1..120: mol_type = other DNA
aaaattaaaagtctaaatttttttaaaggagtttcaaaaactaatgctttgctctatacttgtacctggccccacccttgtctctctaaagcagggtgccctaggaagactgattggctg

SEQ ID NO: 12257 - DNA, 120 bp, synthetic construct
  misc_feature 1..120: note = Artificially Synthesized Probe
  source 1..120: mol_type = other DNA
gacgtcaggtggctgtcaaagatgatctctaatggtataattagagacatcagggctaatgttctctaattttgtccagttatgataaagtaacttggagtgcctgttctttacctctct

SEQ ID NO: 12258 - DNA, 120 bp, synthetic construct
  misc_feature 1..120: note = Artificially Synthesized Probe
  source 1..120: mol_type = other DNA
acaggacatggaggcaatgtcaggcatttaatgttgtaaaagttgcaaaccagaaatcccatggaggagaacacagagaatcctatagtcctgatatcatttttggtggaatgaacaaag

SEQ ID NO: 12259 - DNA, 120 bp, synthetic construct
  misc_feature 1..120: note = Artificially Synthesized Probe
  source 1..120: mol_type = other DNA
ggccagaatacctttcagaggtcttccctagctaaggtcaaatcataaaattatcggattatccatagctgggggtggattctctcaagaccgcattagtaatgtattaatgatacatta

SEQ ID NO: 12260 - DNA, 120 bp, synthetic construct
  misc_feature 1..120: note = Artificially Synthesized Probe
  source 1..120: mol_type = other DNA
atttcaacacctggatgaagtccaggagaagagacgtcaggcagtttaaaaattgcttctctttcctactaaggatgttttcagtgaccttgaggaggtgtttaagaatgactttcttag

SEQ ID NO: 12261 - DNA, 120 bp, synthetic construct
  misc_feature 1..120: note = Artificially Synthesized Probe
  source 1..120: mol_type = other DNA
tggctagtcaaactgtgaaaatcctttctcatgcaacacaataaaataattggctccaaaatgtctcattctcagcctcattccctaatactggacacaggaatctctttcagccaagca

SEQ ID NO: 12262 - DNA, 120 bp, synthetic construct
  misc_feature 1..120: note = Artificially Synthesized Probe
  source 1..120: mol_type = other DNA
gtattggttatctatggttgtatcacaaatcagcccaaagcttagtgacttaaaccaataactattagtgctcacaagtctgtggttcaactgggtggttttgctgatttggttttgctg

SEQ ID NO: 12263 - DNA, 120 bp, synthetic construct
  misc_feature 1..120: note = Artificially Synthesized Probe
  source 1..120: mol_type = other DNA
gatatggattttggcagatttgctgcctggaaaactaaatcctcaatacctacccaagtggtaggtaacagcttccaggaactcacttcttccttccttcttgtttttcttatctttttt

SEQ ID NO: 12264 - DNA, 120 bp, synthetic construct
  misc_feature 1..120: note = Artificially Synthesized Probe
  source 1..120: mol_type = other DNA
aagcacttttacatgcatttatcaaatactctagatgacgcccattgtgttgggtagagtaagagatgaaaagttaatttaaaaatgggtcctgccttccagggactctgcatctagaag

SEQ ID NO: 12265 - DNA, 120 bp, synthetic construct
  misc_feature 1..120: note = Artificially Synthesized Probe
  source 1..120: mol_type = other DNA
ctgcactttcactggcagaagaaaaatactaatgttactaatcttaggagagtctcatttcaggtcattattcagtcactcaaagatacccgtgccagagctctttctcccttttcttcc

SEQ ID NO: 12266 - DNA, 120 bp, synthetic construct
  misc_feature 1..120: note = Artificially Synthesized Probe
  source 1..120: mol_type = other DNA
aaatctataaaatatccaaatttttaatctccctaccttcctccttttcacagcatatgaagctggaagagcaggtggtcaggaatctcccccaaccttcagtgcagtaatctttagagc

SEQ ID NO: 12267 - DNA, 120 bp, synthetic construct
  misc_feature 1..120: note = Artificially Synthesized Probe
  source 1..120: mol_type = other DNA
attaaaaaattgctacacatctagtgttattccctggaataagacccttttgtccaacccctgatttgtttgtctggttgattctcactgattattaggggacttgacactcctcgactt

SEQ ID NO: 12268 - DNA, 120 bp, synthetic construct
  misc_feature 1..120: note = Artificially Synthesized Probe
  source 1..120: mol_type = other DNA
gtgatatatttctttctgactcatttacatttactgttagtcatcaaaaggagtcagaaaaacttttggaacctctccctatgaaccaggaagttgcatttcccctccagtcacaacccc

SEQ ID NO: 12269 - DNA, 120 bp, synthetic construct
  misc_feature 1..120: note = Artificially Synthesized Probe
  source 1..120: mol_type = other DNA
agtagcacgtaatttgctttaccactcagtgcttcaaccatcataggtaaagagtgttcttatcaacaaaacagacaccatccctggcattccatgctggctttctctggttttaaatta

SEQ ID NO: 12270 - DNA, 120 bp, synthetic construct
  misc_feature 1..120: note = Artificially Synthesized Probe
  source 1..120: mol_type = other DNA
gtttccttcatagtcactccagagtctgttagttcttatgtataaagaaatttcacaaagaaatccagcttttctcactgctaaaaggatgtggccttctgtccctaagcaaagtgaccc

SEQ ID NO: 12271 - DNA, 120 bp, synthetic construct
  misc_feature 1..120: note = Artificially Synthesized Probe
  source 1..120: mol_type = other DNA
ctattatacacccttcccttcttccctttcctcctgttcctcttcatctctggcatatttaaggagaagaggatttacaaggaaggcggcaaatgtgttttcctaaatggaatatgtttt

SEQ ID NO: 12272 - DNA, 120 bp, synthetic construct
  misc_feature 1..120: note = Artificially Synthesized Probe
  source 1..120: mol_type = other DNA
gagatgcccttcatctttacttgaaggctgagaaccaaagctatttgtctggttatagggcctacaaattgcaacaaaggttggggtgattgtgccttttagtaaattccaaggaaaaat

SEQ ID NO: 12273 - DNA, 120 bp, synthetic construct
  misc_feature 1..120: note = Artificially Synthesized Probe
  source 1..120: mol_type = other DNA
ctggagtgttaacaaattaataccatctgtgatgacttttccattctgccaaaacctgataaagctctgctgaagtaaagaaattggtttcacagagccagcacactgaatgggcaaaag

SEQ ID NO: 12274 - DNA, 120 bp, synthetic construct
  misc_feature 1..120: note = Artificially Synthesized Probe
  source 1..120: mol_type = other DNA
aaagaacaaagctggaggaatcatgctatcttacttcaaactatactacaggactgcagtaaccaaaacagcatggtactggtacaaaaacagacatatagaccactggaagagaataga

SEQ ID NO: 12275 - DNA, 120 bp, synthetic construct
  misc_feature 1..120: note = Artificially Synthesized Probe
  source 1..120: mol_type = other DNA
aaagaaataaaaaattaaaaaataacagacactggcgaggttgctgagaaaagggaactcttatacactgctgctggtggtgtaaattagttcaaccactgtggaaagcagtgtggtaag

SEQ ID NO: 12276 - DNA, 120 bp, synthetic construct
  misc_feature 1..120: note = Artificially Synthesized Probe
  source 1..120: mol_type = other DNA
acttggtaaagagtgtgaagtttttaatttacaagaaagaaaatggaataattcagaaatgctggttatatcacacccttgccgggattctcatgccttggcagagtctgagttggggct

SEQ ID NO: 12277 - DNA, 120 bp, synthetic construct
  misc_feature 1..120: note = Artificially Synthesized Probe
  source 1..120: mol_type = other DNA
ccattaatgcagcatctggcctcctagcagaagcggagaacttttcagaaacttagagatcagtagtatcaaaacaatctcagccaaagcataagatgaaaatgtactaacgttctttct

SEQ ID NO: 12278 - DNA, 120 bp, synthetic construct
  misc_feature 1..120: note = Artificially Synthesized Probe
  source 1..120: mol_type = other DNA
tgcaacttacagtgttttatttgcagtacttttaaaactgaccttcataaaactctatggagtgtaattaattttaagacagcattcttagcacatagcctacgtttaaaaacaggcagc

SEQ ID NO: 12279 - DNA, 120 bp, synthetic construct
  misc_feature 1..120: note = Artificially Synthesized Probe
  source 1..120: mol_type = other DNA
tgagtttatattgtaaggaggcaagagagggactgtttccatgtgcaatattaactagcattattagaagctagtctggctgatgattccgaaataaccagcattctgtgaatggatccc

SEQ ID NO: 12280 - DNA, 120 bp, synthetic construct
  misc_feature 1..120: note = Artificially Synthesized Probe
  source 1..120: mol_type = other DNA
ggtggagttttttctgttaagcgtaaagagtcacacatgctcttattcatccccctttatgccgagatattacgtcaacatgtgagaccatttcgtaaaccagtttgagatatttctggt

SEQ ID NO: 12281 - DNA, 120 bp, synthetic construct
  misc_feature 1..120: note = Artificially Synthesized Probe
  source 1..120: mol_type = other DNA
ggtgtcgtttactgagcctcaacaacagcatccttgtttctgtctaattttctctgggggttttctcacctttaccttgagaaagtttttgtggagttttgtgctttcttattcaaggcc

SEQ ID NO: 12282 - DNA, 120 bp, synthetic construct
  misc_feature 1..120: note = Artificially Synthesized Probe
  source 1..120: mol_type = other DNA
tttacaggtttctccctgatatatggcccattaacacacaataatccgagttcagagtaattacttacatcattcaacagaatagatcactgaggcactgggtgaccagttgactttcca

SEQ ID NO: 12283 - DNA, 120 bp, synthetic construct
  misc_feature 1..120: note = Artificially Synthesized Probe
  source 1..120: mol_type = other DNA
gtgtaaccacatcttccaggagtgcagtcctggagtagtgcctactcctattcccatttgcaggtaaaatctcaaaaataagtcaaaggaaaaattccatttttctatctgcacaacaga

SEQ ID NO: 12284 - DNA, 120 bp, synthetic construct
  misc_feature 1..120: note = Artificially Synthesized Probe
  source 1..120: mol_type = other DNA
gttctgctttctcgatgtgtgtggtcttggctaaacttcagtttcctcatctgcacggtagaattgagaggattaaaggaaaaatcacactcatggaatatgtcagaaactagatagaca

SEQ ID NO: 12285 - DNA, 120 bp, synthetic construct
  misc_feature 1..120: note = Artificially Synthesized Probe
  source 1..120: mol_type = other DNA
acagtagattctatcagcttttcctttagtactactaacataatttgtggtggccacgggatagttatcatacttacacagtgacactcaggcaaatcagctcaacaccatggatagatg

SEQ ID NO: 12286 - DNA, 120 bp, synthetic construct
  misc_feature 1..120: note = Artificially Synthesized Probe
  source 1..120: mol_type = other DNA
gaaactgtgccccttttaaccatatagttcagagtttgacaaacgtatacaacaatgtaaccactaccccaatcaagacatagaatgttttcaccacccataaatttctcttatgctcat

SEQ ID NO: 12287 - DNA, 120 bp, synthetic construct
  misc_feature 1..120: note = Artificially Synthesized Probe
  source 1..120: mol_type = other DNA
tcaaaaggaaagttagtatagaaatgttaggccactcaagatgacagactcatcagccacaacaaaaaagtcagataccagctttagacacaaaggatcaaccaaataatttattcctgc

SEQ ID NO: 12288 - DNA, 120 bp, synthetic construct
  misc_feature 1..120: note = Artificially Synthesized Probe
  source 1..120: mol_type = other DNA
ccccaacctaacataagcagtcattcaatgatgtgtgcctcttttcatgaacgacatggaattttattgtctaacaaatatttattgatctccttctgggctccaagtactacactgagc

SEQ ID NO: 12289 - DNA, 120 bp, synthetic construct
  misc_feature 1..120: note = Artificially Synthesized Probe
  source 1..120: mol_type = other DNA
caagtgttagcttttgcgttagttctcctcacttgtgttacttatcctcaaaactgtggactctgaccaattattttctggccatgttgtaataaagaggaagaagaaagcaatcctgac

SEQ ID NO: 12290 - DNA, 120 bp, synthetic construct
  misc_feature 1..120: note = Artificially Synthesized Probe
  source 1..120: mol_type = other DNA
gtgtttcttcagccccttcactcataatacaacatgtagatgaacataacagcttcatattcaaacagataatactttggctttctcagatggaagcacgcagagcaatgggacaggatt

SEQ ID NO: 12291 - DNA, 120 bp, synthetic construct
  misc_feature 1..120: note = Artificially Synthesized Probe
  source 1..120: mol_type = other DNA
cacggcctgtgccagactgccacatctaggtaacacagagttctcccaagactttggaggttaagagaaatttactattttgaagaaactaaggtgtgaacttaaagcttctaatatttc

SEQ ID NO: 12292 - DNA, 120 bp, synthetic construct
  misc_feature 1..120: note = Artificially Synthesized Probe
  source 1..120: mol_type = other DNA
attagaaaagcttttcatgtcaactaacttcctctggtctcagcgttctaaggcttaaatcacacttacttcctgtaatacatattccagccctaatctcctctgcatttgactaggtgc

SEQ ID NO: 12293 - DNA, 120 bp, synthetic construct
  misc_feature 1..120: note = Artificially Synthesized Probe
  source 1..120: mol_type = other DNA
agggcagggaatatctgaaagtatgctccttgagttaaggcaattattattaaaagagttggctttagcaggtcaatagtggagcaaagaaaacatccttattaggcagtgtcccatatt

SEQ ID NO: 12294 - DNA, 120 bp, synthetic construct
  misc_feature 1..120: note = Artificially Synthesized Probe
  source 1..120: mol_type = other DNA
gactttttgttaacatttaaatgaatacatgctttgtgtcccagaccatttttccataatgatcagctactattttgcccacgaatgaaatcatgaagcgtcagtgtctctgtgtgtgtg

SEQ ID NO: 12295 - DNA, 120 bp, synthetic construct
  misc_feature 1..120: note = Artificially Synthesized Probe
  source 1..120: mol_type = other DNA
tttacttgttactggttatgttttctccactgctaagtgaaagtcagacaccaattctttctacacatcgcagtgctctatttattcttcatttctgcccaccccatgggactttcagaa

SEQ ID NO: 12296 - DNA, 120 bp, synthetic construct
  misc_feature 1..120: note = Artificially Synthesized Probe
  source 1..120: mol_type = other DNA
taagaccctccatttgctgcagggcatagtccaaattacttaaattggtatacaaggacttttatcactaaacctgatatctgcagctttacctatagatactccccaactccaacaatg

SEQ ID NO: 12297 - DNA, 120 bp, synthetic construct
  misc_feature 1..120: note = Artificially Synthesized Probe
  source 1..120: mol_type = other DNA
cttacagttactcactctagaaaaccttctcagtatgtctaaacctgagttagtgccagccctgaacgagactcacaagcatcgtgttcttactactcctataatgcttcttatattttg

SEQ ID NO: 12298 - DNA, 120 bp, synthetic construct
  misc_feature 1..120: note = Artificially Synthesized Probe
  source 1..120: mol_type = other DNA
tcactgggtccacttcatgtatgactaagaagtcatacatgagcgtctcttgtagcctccaattttgcaagtgccctatttcaaatgctttaggcatctactgccataaaggttttattt

SEQ ID NO: 12299 - DNA, 120 bp, synthetic construct
  misc_feature 1..120: note = Artificially Synthesized Probe
  source 1..120: mol_type = other DNA
aatggactttgtactctacaaatagtggtatgagtatggcatcttttggtttccaacagtaatgctgattttactttatacatatcacatcggccttttaaattgaagtttgacaggagt

SEQ ID NO: 12300 - DNA, 120 bp, synthetic construct
  misc_feature 1..120: note = Artificially Synthesized Probe
  source 1..120: mol_type = other DNA
tcttcttccttctctgtctcacctacatactccatgactgtaataatctccatcatgtccagctttgcaatatttgtgcttcttaccataactactctctattgctgccgaagaagaaaa

SEQ ID NO: 12301 - DNA, 120 bp, synthetic construct
  misc_feature 1..120: note = Artificially Synthesized Probe
  source 1..120: mol_type = other DNA
agagacatcggagagggagcgtttggaagggtgtttcaagcaaggtaaagttacctatggaaaaaaaaactccattgaaatatgttatgtctgaaaagctaccaaactattagcttggta

SEQ ID NO: 12302 - DNA, 120 bp, synthetic construct
  misc_feature 1..120: note = Artificially Synthesized Probe
  source 1..120: mol_type = other DNA
ggaaaccaaaatttgcaaggcaccactttaggctcaatggagggtacaaagatgagtaagccatagttcctacgtcatggaatttagattctggacaaagattaaaaggttaggatgtgg

SEQ ID NO: 12303 - DNA, 120 bp, synthetic construct
  misc_feature 1..120: note = Artificially Synthesized Probe
  source 1..120: mol_type = other DNA
gtgctttttccttttctccttgatcagtgagacgtttcagttccttttcaaatttagcttcttcaccttggtctatcccaaccctataggacattcatggcttaatggattatccctctt

SEQ ID NO: 12304 - DNA, 120 bp, synthetic construct
  misc_feature 1..120: note = Artificially Synthesized Probe
  source 1..120: mol_type = other DNA
gaggtaggcaggtcctgtcaggccttattaaaaacattggcttttaatctaagttgggaaacaaatggagagtttcagccaagacatgacatgacacaactcacattttttcagatcttc

SEQ ID NO: 12305 - DNA, 120 bp, synthetic construct
  misc_feature 1..120: note = Artificially Synthesized Probe
  source 1..120: mol_type = other DNA
gagaagaggtccaaggaccaaggcctggagcattccagtatttagtgtgagaaagaggagatgaacaagaaaaacaaactaaaaacgagcaaccaatgaaatagaagtaaatcaagagag

SEQ ID NO: 12306 - DNA, 120 bp, synthetic construct
  misc_feature 1..120: note = Artificially Synthesized Probe
  source 1..120: mol_type = other DNA
gccagctgggcatagactcgttaagaggagttaaattttaccagaattagcattttgccacacaagtaagttgaagtcaaattgaggcaaataagagaggtgtatgcaaaggagtgatta

SEQ ID NO: 12307 - DNA, 120 bp, synthetic construct
  misc_feature 1..120: note = Artificially Synthesized Probe
  source 1..120: mol_type = other DNA
tcaaagaccaaaagtagataaaaccacaaagatggggaaaaaacagaacagaaaaactggaaactctaaaacgcagagcgcctctcctcctccaaaggaacgcagttcctcaccagcaac

SEQ ID NO: 12308 - DNA, 120 bp, synthetic construct
  misc_feature 1..120: note = Artificially Synthesized Probe
  source 1..120: mol_type = other DNA
tggaaaggaacaaccggtaccagccgctgcaaaatcatgccaaaatgtaaagaccatcgagactaggaagaaactgcatcaactaatgagcaaaatcaccagctaacatcataatgacag

SEQ ID NO: 12309 - DNA, 120 bp, synthetic construct
  misc_feature 1..120: note = Artificially Synthesized Probe
  source 1..120: mol_type = other DNA
agagggaaatttatagcactaaatgcctacaagagaaagcaggaaagatccaaaattgacaccctaacatcacaattaaaagaactagaaaagcaagagcaaacacattcaaaagctagc

SEQ ID NO: 12310 - DNA, 120 bp, synthetic construct
  misc_feature 1..120: note = Artificially Synthesized Probe
  source 1..120: mol_type = other DNA
aataataagagctatctatgacaaacccacagccaatatcatactgaatgggcaaaaactggaagcattccctttgaaaattggcacaagacagggatgccctctctcaccgctcctatt

SEQ ID NO: 12311 - DNA, 120 bp, synthetic construct
  misc_feature 1..120: note = Artificially Synthesized Probe
  source 1..120: mol_type = other DNA
caagatggattaaagatttaaacgttagacctaaaaccataaaaaccctagaagaaaacctaggcattaccattcaggacataggcgtgggcaaggacttcatgtccaaaacaccaaaag

SEQ ID NO: 12312 - DNA, 120 bp, synthetic construct
  misc_feature 1..120: note = Artificially Synthesized Probe
  source 1..120: mol_type = other DNA
acaaacaaacaaaaaaaaagtttcagtggggtcaaaggatttttagagttagggcagtcgaggcagtgaactagggtgaaaaagggaggaagtgatgaacaacaggtagagtaactgaaa

SEQ ID NO: 12313 - DNA, 120 bp, synthetic construct
  misc_feature 1..120: note = Artificially Synthesized Probe
  source 1..120: mol_type = other DNA
catcttgaaaacacttcttccatttcctcaactcctaaacattcatttattcattcttcatcacacaaaaatctgaatctggcttctgccccctaccctccttatttactttctcaaata

SEQ ID NO: 12314 - DNA, 120 bp, synthetic construct
  misc_feature 1..120: note = Artificially Synthesized Probe
  source 1..120: mol_type = other DNA
tcaactcaaccagcataacaatggtaaagccagttgatgagataggtaagtccctgttaactaaagattatccaaaaaggatcccacagaagaaacttctaagtattatccagttggtat

SEQ ID NO: 12315 - DNA, 120 bp, synthetic construct
  misc_feature 1..120: note = Artificially Synthesized Probe
  source 1..120: mol_type = other DNA
ggaagtcctcaaaaactttagccaagggacagaaaccccactacccagagtgcatttcctagctgagactccttttgtgttgtgattaaaaggatacaaatattaaaaaacaaacatacg

SEQ ID NO: 12316 - DNA, 120 bp, synthetic construct
  misc_feature 1..120: note = Artificially Synthesized Probe
  source 1..120: mol_type = other DNA
acccattgaaagccagtgattggaaacacaggctaggaaatgtgtcagataatggagacaactattcttcttcatgaaggtttgtaatacacactgcacagggaagaatgtcatcctgtt

SEQ ID NO: 12317 - DNA, 120 bp, synthetic construct
  misc_feature 1..120: note = Artificially Synthesized Probe
  source 1..120: mol_type = other DNA
aagcagcagctctggaactcagattcctgggggttcagattttttctcagtggatcctcacacaatacatctttatctaagtccatacatgatctgagtttatttctgatatagcaggaa

SEQ ID NO: 12318 - DNA, 120 bp, synthetic construct
  misc_feature 1..120: note = Artificially Synthesized Probe
  source 1..120: mol_type = other DNA
aaagcagaaagtcaagatgccaacaaagcagaaaagttggagagggccaccagcaagtctagaacttgagcatagatatccatggcttattttagatggttcatgtatgctctgcaaaat

SEQ ID NO: 12319 - DNA, 120 bp, synthetic construct
  misc_feature 1..120: note = Artificially Synthesized Probe
  source 1..120: mol_type = other DNA
ggacagatatcagtaaggcaccagcagtcatttttagtgatcaaataccaaacatggtaagataccagagtatttttcacatgacacccaaaaacatattctctgctatcgtggtagagc

SEQ ID NO: 12320 - DNA, 120 bp, synthetic construct
  misc_feature 1..120: note = Artificially Synthesized Probe
  source 1..120: mol_type = other DNA
accttcctgaattattttattaacatgtacctctcctagtcagataagacagcccatttatttcagtctcaccaatactgagtatagcattttaatcattgccaatataatagctaatag

SEQ ID NO: 12321 - DNA, 120 bp, synthetic construct
  misc_feature 1..120: note = Artificially Synthesized Probe
  source 1..120: mol_type = other DNA
agttcccttcttccttttcatctctagtcccagcctaagtgctaaccacttcacccatttatagtgttagttcttctggtgattaccagtgcaattctaacaaataggtttgcatttctc

SEQ ID NO: 12322 - DNA, 120 bp, synthetic construct
  misc_feature 1..120: note = Artificially Synthesized Probe
  source 1..120: mol_type = other DNA
tcagtaaatgcggggggttctgaactaactgatgcggcagccggctattgggaagcggggaaatgggagctggaagggaagtaaacggagtagaagtcacggtaagaactgagggtaggc

SEQ ID NO: 12323 - DNA, 120 bp, synthetic construct
  misc_feature 1..120: note = Artificially Synthesized Probe
  source 1..120: mol_type = other DNA
ccagcttatgtttagtttatagctcattcaggagatgaacccggatagctggaatataaagagggccacagaaagataagcacccccttcacttccagaatatcctggcctttaggaaag

SEQ ID NO: 12324 - DNA, 120 bp, synthetic construct
  misc_feature 1..120: note = Artificially Synthesized Probe
  source 1..120: mol_type = other DNA
attcgttattctctccccacatggacttgttaacttgctgcttcccattcctcatctcttccaaatggtgtgtcttgggtgggcctagatttcagttaggcaagggttgattgtgccaga

SEQ ID NO: 12325 - DNA, 120 bp, synthetic construct
  misc_feature 1..120: note = Artificially Synthesized Probe
  source 1..120: mol_type = other DNA
tcttttctttgtcttgtgactgacctggatttctggaggaactgtcctcgtcttagaatgatctgttgcttttcttctgagattagaggtattagattctctcccaagagctactttgga

SEQ ID NO: 12326 - DNA, 120 bp, synthetic construct
  misc_feature 1..120: note = Artificially Synthesized Probe
  source 1..120: mol_type = other DNA
gcgagactttctgagcccgagcccgatgataaataaagtagtgattcaagggttcagcccatgggttcgtcggagtgatgaataagatatccttgtctgactcacttgtttaaaacccat

SEQ ID NO: 12327 - DNA, 120 bp, synthetic construct
  misc_feature 1..120: note = Artificially Synthesized Probe
  source 1..120: mol_type = other DNA
atataggaacctggagggaaatgatcgtgtcaatagagaataggtccattttgtctcttctcactcctttaaataaacactttaagggtgagcaggttggttggccacatcaattttgga

SEQ ID NO: 12328 - DNA, 120 bp, synthetic construct
  misc_feature 1..120: note = Artificially Synthesized Probe
  source 1..120: mol_type = other DNA
ggaatatccaaaagtaactacactcttggacccaagtgaccttaggaccaactgctgtcacaagtgattgaacaaaagaagtttctggaaggtcttaaaatccttcagcaaaaaggaagt

SEQ ID NO: 12329 - DNA, 120 bp, synthetic construct
  misc_feature 1..120: note = Artificially Synthesized Probe
  source 1..120: mol_type = other DNA
cgcactctcaatatcctgcagccaagtgagcgtggggttggaaccatgctaacatgtcaagtgcccgtgggtcctcgaggaggctgaaagtgtgtgaatcttgctttttttttttttttt

SEQ ID NO: 12330 - DNA, 120 bp, synthetic construct
  misc_feature 1..120: note = Artificially Synthesized Probe
  source 1..120: mol_type = other DNA
tgtattctgtgtattctggtatttagtgtgaggaaagaatcaatttttttccaaataattaatgtagggtctctcaccctcagcactgctgatatttgtggctgggtccctctctgtggt

SEQ ID NO: 12331 - DNA, 120 bp, synthetic construct
  misc_feature 1..120: note = Artificially Synthesized Probe
  source 1..120: mol_type = other DNA
tgtctcaaagggaaaaaaacatgtctcgggacagaggttgccaagtgtccctgaggacagagtcagctccaggggagaaacaatgatatagaagaacaccaagcttttgaggggcaagca

SEQ ID NO: 12332 - DNA, 120 bp, synthetic construct
  misc_feature 1..120: note = Artificially Synthesized Probe
  source 1..120: mol_type = other DNA
aattattttttgctgtgggggccgtgctgtgcactgtgggacactgagtggcattcctggcctccacctaccatttgcagtatcccctcgccacaagtggtaacttccaaaatgtctcca

SEQ ID NO: 12333 - DNA, 120 bp, synthetic construct
  misc_feature 1..120: note = Artificially Synthesized Probe
  source 1..120: mol_type = other DNA
cagtgttagcacagttatgctggatttttcctccccaaagcacttatcactgttgctaatacctccttgctttgtggtgagtgtgttatccgtctccttcacctccccattctctctcct

SEQ ID NO: 12334 - DNA, 120 bp, synthetic construct
  misc_feature 1..120: note = Artificially Synthesized Probe
  source 1..120: mol_type = other DNA
ctgtgtgcacatgtctcttttccttttataaggacgccagtctttggatttggggcccacccttgtccagtacaacctgatcttaactgactacatccccaaaggccttatttccaaaca

SEQ ID NO: 12335 - DNA, 120 bp, synthetic construct
  misc_feature 1..120: note = Artificially Synthesized Probe
  source 1..120: mol_type = other DNA
gtggtcattccttcgtgtgtgtgtgtccatctttcccatactgcccatgagcgtttcttctaaaaaaaaaaaaaatcctcaacaggatcagggaaatgtacacaaaatgtgaaatgcact

SEQ ID NO: 12336 - DNA, 120 bp, synthetic construct
  misc_feature 1..120: note = Artificially Synthesized Probe
  source 1..120: mol_type = other DNA
tctgttggatgaatgggccacgttgtgtttttccatttatccgttgacaggcactttgttaccactttttggcatttcttcgaggatctttatagtctgacagtttgattttcatttggt

SEQ ID NO: 12337 - DNA, 120 bp, synthetic construct
  misc_feature 1..120: note = Artificially Synthesized Probe
  source 1..120: mol_type = other DNA
ataaaataacgccatgtgtagtatttaacaaaggaggctccccaatccagggagggaaggattctttcacaaaaggcatgaaaacagttgcttccatgtttggaagcagttttgttttgt

SEQ ID NO: 12338 - DNA, 120 bp, synthetic construct
  misc_feature 1..120: note = Artificially Synthesized Probe
  source 1..120: mol_type = other DNA
tgtacgcatgtatgtaggcatgaacatgtgggtggacatgtgcatgcaagtgttttgtgtacaagcatatacgtgtggctgggcacatgtgtgtgcatgagtgttcatatggaagtatat

SEQ ID NO: 12339 - DNA, 120 bp, synthetic construct
  misc_feature 1..120: note = Artificially Synthesized Probe
  source 1..120: mol_type = other DNA
tttgtatactgtatgcacagaagtgtgtgtattcacatgtgtttcctctgtgtacatgcaagcacatggaagtacatatgccagtgcacacacacattcatgcatgtgtgattaagacat

SEQ ID NO: 12340 - DNA, 120 bp, synthetic construct
  misc_feature 1..120: note = Artificially Synthesized Probe
  source 1..120: mol_type = other DNA
taagcagttttatccaggtgaaattgttgcataataggctgcacttactcagtgtgccaacagccatgagcccaccaccacgaccaatgccataaacacatccatcatctgaaaagtgtc

SEQ ID NO: 12341 - DNA, 120 bp, synthetic construct
  misc_feature 1..120: note = Artificially Synthesized Probe
  source 1..120: mol_type = other DNA
gttacagtgagccagggtcgcagcactgcaatggagtgcaagactgtgtctcaaaaaagaaaaaaaaattaagtgtgctagtcagtgcattcaccgtgttgtgcaacgaccagctctatc

SEQ ID NO: 12342 - DNA, 120 bp, synthetic construct
  misc_feature 1..120: note = Artificially Synthesized Probe
  source 1..120: mol_type = other DNA
acgtctctgtctcgacatctgcttcatttctcctgagtaactcctgagaggggaattgcagggtcacgtgctaggtatgtgttttaacattgaaagaaactgctgaagtgttttctaaag

SEQ ID NO: 12343 - DNA, 120 bp, synthetic construct
  misc_feature 1..120: note = Artificially Synthesized Probe
  source 1..120: mol_type = other DNA
aaaaataaaaataaaccaggctctcaaagctttatctcatgacctggaggaacatacaaatgcactgacatatcaaggaaagaattaggttttacagctaaatggataagacaatccaaa

SEQ ID NO: 12344 - DNA, 120 bp, synthetic construct
  misc_feature 1..120: note = Artificially Synthesized Probe
  source 1..120: mol_type = other DNA
ttccaggctgtaatattacagtctgtgcctgaactatttcactctgctcttgtagcaaaagcagccacagacaataaggaaaggagtgtgggcaaggctgccttccagtaaaactttatt

SEQ ID NO: 12345 - DNA, 120 bp, synthetic construct
  misc_feature 1..120: note = Artificially Synthesized Probe
  source 1..120: mol_type = other DNA
tcaagaaaaaaaaaaaaatgaagagggtgaattttggggagctaaacaatctatatacgtggacataacagagcagaatagttattggggactgcagaaggtgatggggggaggagggtg

SEQ ID NO: 12346 - DNA, 120 bp, synthetic construct
  misc_feature 1..120: note = Artificially Synthesized Probe
  source 1..120: mol_type = other DNA
aaaagaaaagaaattggtattggcagactgctacttaccaccttcctggtgtgcttctggtgtcactagctcttccattcaagccctctctctggtagaggatcctttccagggagtcct

SEQ ID NO: 12347 - DNA, 120 bp, synthetic construct
  misc_feature 1..120: note = Artificially Synthesized Probe
  source 1..120: mol_type = other DNA
tctggatggggtgggatgggggctgggatggagcaaactcaggggaagggtcaggtcttggggttgtctgatgatgtcacttgtaaaagccactgtatttttttttaagtgacagggtct

SEQ ID NO: 12348 - DNA, 120 bp, synthetic construct
  misc_feature 1..120: note = Artificially Synthesized Probe
  source 1..120: mol_type = other DNA
tgaagaacctcaagcaccgcttcctgcaacaaaagatctacacgtacgcggggagcatcctggtggccatcaacccctttaagttcctgcccatctacaaccccaagtacgtgaagatgt

SEQ ID NO: 12349 - DNA, 120 bp, synthetic construct
  misc_feature 1..120: note = Artificially Synthesized Probe
  source 1..120: mol_type = other DNA
agagacagaccctgcctctaaagagagaaaaagtggaggttttctgattgttgttattattcaggtactgcgaagccaactggtcaggatgcaactgcctcttggaaagagagtttgtta

SEQ ID NO: 12350 - DNA, 120 bp, synthetic construct
  misc_feature 1..120: note = Artificially Synthesized Probe
  source 1..120: mol_type = other DNA
aaaaaaaaaaatagtcacagttaatacacatttggcttccagaacatggccattcattctcaaggtgcctgaaagaaaaggctggtgtattcaaaccagtttgaggagtgcttcacaacg

SEQ ID NO: 12351 - DNA, 120 bp, synthetic construct
  misc_feature 1..120: note = Artificially Synthesized Probe
  source 1..120: mol_type = other DNA
ttctcacattatttatattttgcattcgtgtggtgtgttggttgcacctgactcaactctacgttggtactgttactaacagccatagtttccattagggttcttggtgttgcacattct

SEQ ID NO: 12352 - DNA, 120 bp, synthetic construct
  misc_feature 1..120: note = Artificially Synthesized Probe
  source 1..120: mol_type = other DNA
caacttagccctggtccgacatatgtagcctattcctgttttctcctgtgcaagtaacacagagattcattgtcattgtttacatcagcttttaataaaactgctgagcaatttcaccat

SEQ ID NO: 12353 - DNA, 120 bp, synthetic construct
  misc_feature 1..120: note = Artificially Synthesized Probe
  source 1..120: mol_type = other DNA
aaaaaataacaaaaaaaatttagtaggtgaatgaatgagagggtagatccaacatttaccatgtcagacattttgccaaatgggactaggcaggtgggtaaatgcctgagccccgcagaa

SEQ ID NO: 12354 - DNA, 120 bp, synthetic construct
  misc_feature 1..120: note = Artificially Synthesized Probe
  source 1..120: mol_type = other DNA
aacaggcttgagccaaatccacgtcatggcaataaacgtgcttcctggggcgactgtttgcaaagggatgtgattgtcttcactgagagctggatttctcaacctggctctgctgacatt

SEQ ID NO: 12355 - DNA, 120 bp, synthetic construct
  misc_feature 1..120: note = Artificially Synthesized Probe
  source 1..120: mol_type = other DNA
ggccatcattttctaataagaggaataagacctcaggcccactgggtatcagggtttgggcttcgtgattttcctccatcatctctaatccctcacggcagctctgcccattttaaagat

SEQ ID NO: 12356 - DNA, 120 bp, synthetic construct
  misc_feature 1..120: note = Artificially Synthesized Probe
  source 1..120: mol_type = other DNA
atctcaaaatacttaccttcatgacatctgccaagaccccgtttccagataaagccacagtcacaggttctgggggtaaggacttagacatgtcttttttgggaagccacaagtcaaccc

SEQ ID NO: 12357 - DNA, 120 bp, synthetic construct
  misc_feature 1..120: note = Artificially Synthesized Probe
  source 1..120: mol_type = other DNA
gctcagcaagggtggcagagatagaagtttctggaaccaggtgtgtgtcaactctcatgcctctgaagttgaggttcctgtttaagagcttatggagatataatttacctatttacttat

SEQ ID NO: 12358 - DNA, 120 bp, synthetic construct
  misc_feature 1..120: note = Artificially Synthesized Probe
  source 1..120: mol_type = other DNA
tcagtgtcccccacaagaacaatgttggggagtggggggattgacactcacacagaggatcccctggagactgtcatgagccctgggaaggaggagagcagtcctctccagcaggctgct

SEQ ID NO: 12359 - DNA, 120 bp, synthetic construct
  misc_feature 1..120: note = Artificially Synthesized Probe
  source 1..120: mol_type = other DNA
tttgtttgaggaagagcaatacctgcagtcagcacccgtctgtctgtcaaagggtccaggagcccccactggcttgagttgtgtctatgttacatgaatgcagaggtatttgaggctgag

SEQ ID NO: 12360 - DNA, 120 bp, synthetic construct
  misc_feature 1..120: note = Artificially Synthesized Probe
  source 1..120: mol_type = other DNA
cctgaggagcagaaccaccccccagttgagaactgctgttttaggccaactgtatgacaagatagatttcattgtaacagatggtctctgcctaaatatttgtagattctttttttcttg

SEQ ID NO: 12361 - DNA, 120 bp, synthetic construct
  misc_feature 1..120: note = Artificially Synthesized Probe
  source 1..120: mol_type = other DNA
atttactacctggccctttataggaattttttttcctttgtctaccccagtacatccaccgcttcgtagaatgttccagaaccccataaaggtgaccatttcacagatgccttttttttt

SEQ ID NO: 12362 - DNA, 120 bp, synthetic construct
  misc_feature 1..120: note = Artificially Synthesized Probe
  source 1..120: mol_type = other DNA
aatctctgcatttgtatccgtgccatagacatacatacgtattcataaacatccatttccccacacagagtcataaagcagtttggggagtcaggaaaggaggacacagatagagatgtc

SEQ ID NO: 12363 - DNA, 120 bp, synthetic construct
  misc_feature 1..120: note = Artificially Synthesized Probe
  source 1..120: mol_type = other DNA
aatgctgcatctaagagaagagtgaaattatggggtatattttaagcaccataaaaaggtctccttggaatttggagaaagttgattaaaagctgaagtgtaaggtctgggacacccctg

SEQ ID NO: 12364 - DNA, 120 bp, synthetic construct
  misc_feature 1..120: note = Artificially Synthesized Probe
  source 1..120: mol_type = other DNA
aaaaagaaaagacatatacaggattctagttagcgggtatgtgaactgaggttcttgcctggagctgattctgccatcggttgatgtttggcaactgctggagacatttttggttatcat

SEQ ID NO: 12365 - DNA, 120 bp, synthetic construct
  misc_feature 1..120: note = Artificially Synthesized Probe
  source 1..120: mol_type = other DNA
tttttaatttaaattttcttttaaatgaagccaccacctgtgtggagggagctgtttgtggaaggtgtaattgttaataagattgtcctccaaggaggatgagaagacgacaagggcagg

SEQ ID NO: 12366 - DNA, 120 bp, synthetic construct
  misc_feature 1..120: note = Artificially Synthesized Probe
  source 1..120: mol_type = other DNA
tgggaggattgcaggcccatgatatgtcaaaggcaggatgtgtaaaccaagatggaggtgatgaggagcagcttgtgcccaactgtcaggagcagcaagggtctttgtatcatatgatcc

SEQ ID NO: 12367 - DNA, 120 bp, synthetic construct
  misc_feature 1..120: note = Artificially Synthesized Probe
  source 1..120: mol_type = other DNA
cactggggttcgggagatgagggcaaactgaaatcttggtgattcagactttctttccccactaccataagtgagggaacccacacttacagcagatatgtattccaaatatatatatat

SEQ ID NO: 12368 - DNA, 120 bp, synthetic construct
  misc_feature 1..120: note = Artificially Synthesized Probe
  source 1..120: mol_type = other DNA
tcaaaaaaaaaaaaaagtactggaagtctttgctgttcaagtccctgtggtttggagattgtgtggggaagcaaacgtcatctcaagatgaaacctttccaaatgagctgaacacttgca

SEQ ID NO: 12369 - DNA, 120 bp, synthetic construct
  misc_feature 1..120: note = Artificially Synthesized Probe
  source 1..120: mol_type = other DNA
gattttcagcttggcttgcaagtatataaagcaagttctgttccttgctttatacacaagacacacctaaatcaaagggcttcaggaagttaaaaacaaaggggaaagcaagcacaggtg

SEQ ID NO: 12370 - DNA, 120 bp, synthetic construct
  misc_feature 1..120: note = Artificially Synthesized Probe
  source 1..120: mol_type = other DNA
gacgcccaaaccacatgcttaaggcagacattgtggccatatcgtgaactcttaagagaataaacctccttacacatacatggaacattctcaaaaaatcatttttcttttttgagacag

SEQ ID NO: 12371 - DNA, 120 bp, synthetic construct
  misc_feature 1..120: note = Artificially Synthesized Probe
  source 1..120: mol_type = other DNA
caaaaaaagggtaagatgagccctaggggaaatatgataaattcttcagatgttttcacagccttgagaaccaaacaggaccttcccccatcaaagcctggtttgttctgtattctttct

SEQ ID NO: 12372 - DNA, 120 bp, synthetic construct
  misc_feature 1..120: note = Artificially Synthesized Probe
  source 1..120: mol_type = other DNA
ccctggccactcttttctcacgaaaaccagacagtctgtatttcacacagatcctaggggccacccagtctctgtcagaatggcttgactctgctattgtaactcaaatgcagccttaag

SEQ ID NO: 12373 - DNA, 120 bp, synthetic construct
  misc_feature 1..120: note = Artificially Synthesized Probe
  source 1..120: mol_type = other DNA
gattctcctgccacagcctcccaagtaactgggactacaggtgcacaccaccacgcccggctaatttcatttgtagtttggtagagatggggtttcaccatgttggccaggctggtctca

SEQ ID NO: 12374 - DNA, 120 bp, synthetic construct
  misc_feature 1..120: note = Artificially Synthesized Probe
  source 1..120: mol_type = other DNA
tgattcacacagaaaatcccgcttaatcctccatctgctaaggcagagatttttccaaaaccttaccttacaggagagaaatctgaaatccaagagccgtgaactaatttgcccaaattg

SEQ ID NO: 12375 - DNA, 120 bp, synthetic construct
  misc_feature 1..120: note = Artificially Synthesized Probe
  source 1..120: mol_type = other DNA
ttacccagctagaaggagagaggacttttgcaaaccaaaaagcaaggggacaatctccctctttcagcccctttctttaggctctgtggtggctcgatatttgcagatgttctttctcca

SEQ ID NO: 12376 - DNA, 120 bp, synthetic construct
  misc_feature 1..120: note = Artificially Synthesized Probe
  source 1..120: mol_type = other DNA
ctgcctggcctccctaaaatgttaccaggcattccaaccaagaggagagccatcctttagatagaagatatagaatttttgaccaggcacagtggctcacacctgtaatcccagcacttt

SEQ ID NO: 12377 - DNA, 120 bp, synthetic construct
  misc_feature 1..120: note = Artificially Synthesized Probe
  source 1..120: mol_type = other DNA
aaaaaaaaaaaatctagaatttttgcctacataggacgttcaaccctggatgtctcttttcacagattctctgtttgactgaacattagactcctgaaccttgtcccagtcccatctgtg

SEQ ID NO: 12378 - DNA, 120 bp, synthetic construct
  misc_feature 1..120: note = Artificially Synthesized Probe
  source 1..120: mol_type = other DNA
ttacctagaaaccgtgactggggggaagctgaattatgaccaatagctttatggatttctttcttctgtgcttttcacgaggtttttaaaatttttctttaatttttttggggggtgggg

SEQ ID NO: 12379 - DNA, 120 bp, synthetic construct
  misc_feature 1..120: note = Artificially Synthesized Probe
  source 1..120: mol_type = other DNA
cccaaagtgctggcattacaggcgtgagccactgcgcccggcctattttatttctaattgatgaaagttgtatatattcatgatgtgcaacatgacattttgaaatacgtatacattgtg

SEQ ID NO: 12380 - DNA, 120 bp, synthetic construct
  misc_feature 1..120: note = Artificially Synthesized Probe
  source 1..120: mol_type = other DNA
tgctttctacttctgtgagtttttttttggactgggggtacatgtgtagtttgttacagggatatattgggtaatggttagggttgggcttctaaaatacccatcactcaaatagtgaac

SEQ ID NO: 12381 - DNA, 120 bp, synthetic construct
  misc_feature 1..120: note = Artificially Synthesized Probe
  source 1..120: mol_type = other DNA
gttttttatattataaaagaaaaaaaaatgtgtttctgttaaaggagaggcgttttttggttttgagtgagtccagcgctgtgggttttatagcctggggggaccatggcatccgccttc

(The sequence listing continues in the following parts.)
